United States Patent Application Publication US 2005/0196754 A1 - sequence listing, part 18

SEQ ID NO: 43346 - protein, 232 aa, Homo sapiens
  DOMAIN (132)..(169): Ribosomal protein S5 proteins domain identified by eMATRIX, accession number BL00585B, p-value=3.250e-30, raw score of 18.78
QSSIPAIMSSFLGTGAETMPVPLGAGMRRTSTEPQRVCFCTGIIFKTSSLREAPRKKSMISDSLMGREWMPVTKLGRLVKDMKIKSLEEIYLFSLPIKESEIIDFFLGASLKDEVLKIMPVQKQTRCGSVLVRLIPAPRGTGIVSAPVPKKLLMMAGIDDCYTSARGCTATLGNFAKATFDAISKTYSYLTPDLWKETVFTKSPYQEFTDHLVKTHTRVSVQRTQAPAVATT

SEQ ID NO: 43347 - protein, 273 aa, Homo sapiens; identical to SEQ ID NO: 41704
  DOMAIN (83)..(135): Ribosomal protein S5 proteins domain identified by eMATRIX, accession number BL00585A, p-value=1.391e-40, raw score of 28.43

SEQ ID NO: 43348 - protein, 207 aa, Homo sapiens
  DOMAIN (23)..(75): Ribosomal protein S5 proteins domain identified by eMATRIX, accession number BL00585A, p-value=9.419e-34, raw score of 28.43
MARRKNGKWESEIIDFCLGGSLKDEVLKIMPVQKQTRAGQCTRFKAFVAIGDYNGHIGLGIKCSKELATAIRRAIILAKLSIVPVCRGYWGNKISKPHIVPCRGTGIVSAPVSKKLLMMASINDCYTSARGCTAILGNFDKATFDAISKTYSYLTPNLWKETVFTKSPYQEFTDHLVKTYTRVSMQSTQAPALAKLPRVAVQPRAEV

SEQ ID NO: 43349 - protein, 314 aa, Homo sapiens
  misc_feature (1)...(314): Xaa = X or * as defined in Table 2
KWRITPVPTGRPGGPGGPGMGKPRCFRGEVFGIVIRAGSPGPGTGPGRGGEAAGAKAEDXEWMPVTKLGRLVKDMKIKSLEEIYLFSLAIKKSEIMSFLLGGLLSRDEVFEXLCPVQEQTRAGQRATRFKAFVALTTLGTTNGHVGLGCXVPPREVATGNSWGPFILGQALHSSPVRRGLLGGTKNSAKPPTLVPWQRXPRAACGLCAGYAFIPLQPRGQLASVSAPVPKKLLMMAGTDGCNNSQRRGCTATVGNLAKATTFDAISKTYSYLTPDLWKETVFTKSPYQEFTDHLVKTHTRVSVQRTQAPAGATT

SEQ ID NO: 43350 - protein, 58 aa, Homo sapiens
  DOMAIN (17)..(33): CYCLOPHILIN PEPTIDYL-PROLYL CIS-TRANS ISOMERASE SIGNATURE domain identified by eMATRIX, accession number PR00153E, p-value= 7.632e-17, raw score of 9.10
SFELFADKVPKTAWLDGKHVVFGKVKEGMNIVEAMERFGSRNGKTSKKITIADCGQLE

SEQ ID NO: 43351 - protein, 262 aa, Homo sapiens
  DOMAIN (49)..(65): CYCLOPHILIN PEPTIDYL-PROLYL CIS-TRANS ISOMERASE SIGNATURE domain identified by eMATRIX, accession number PR00153A, p-value= 7.000e-18, raw score of 12.98
  misc_feature (1)...(262): Xaa = X or * as defined in Table 2
NRVLLAMVNPTVFFDIAVDGEPLGRVSFEVRGLDTKKXLLIXSIKLCXQIGLFADKVPKTAENFRALXSIEEKGFGLXGVPCFHRLFPRVLCVRGGDFHTAINGTGGKSIYGEKFEDENFILKHTGPGILSHGKMLDPNTNGSQFFICTAKTEWLDGKHVVFGKVKEGMNIVEAMEAFGSRDCKTSKKITIADFGQLRIKFDFVFLSLTTKIISFCALLSGEHPLHPIWLGVILESMWLSLAVPFWVPCFPCSLPCLAGLQS

SEQ ID NO: 43352 - protein, 240 aa, Homo sapiens
MSWEVVCALLLPPAPLWTPVLAPLRSLVRSAPFPPRPVLGQDVLPALRTLEQGPATPRSLYDGNRPAPSPLRGAGQPWGALKTGAGAWHRHSGQDPTSLQLLLTTPQIPRSHGKQGLAGPEATGGGDRPGSRFTMEPSLQCSPFHIAPAPWSWCSGGAVQLPVPVCLCSPDTRSPGGQGQGASEKDIVHSGLAYTMERSARQIMRTAMKYNLGLDLRTAAYVNAIEKVFKVYNEAGVTFT

SEQ ID NO: 43353 - protein, 458 aa, Homo sapiens
  DOMAIN (147)..(202): Glu / Leu / Phe / Val dehydrogenases proteins domain identified by eMATRIX, accession number BL00074A, p-value=1.000e- 40, raw score of 25.39
MYRYLGEALLLSRAGPAALGSASADSAALLGWARGQPAAAPQPGLALAARRHYSEAVADREDDPNFFKMVEGFFDRGASIVEDKLVEDLRTRESEEQKRNRVRGILRIIKPCNHVLSLSFPIRRDDGSWEVIEGYRAQHSQHRTPCKGGIRYSTDVSVDEVKALASLMTYKCAVVDVPFGGAKAGVKINPKNYTDNELEKITRRFTMELAKKGFIGPGIDVPAPDMSTGEREMSWIADTYASTIGHYDINAHACVTGKPISQGGIHGRISATGRGVFHGIENFINEASYMSILGMTPGFGDKTFVVQGFGNVGLHSMRYLHRFGAKCIAVGESDGSIWNPDGIDPKELEDFKLQHGSILGFPKAKPYEGSILEADCDILIPAASEKQLTKSNAPRVKAKIIAEGANGPTTPEADKIFLERNIMVIPDLYLNAGGVTVSYFEWLKNLNHVSYGRLTVQI

SEQ ID NO: 43354 - protein, 81 aa, Homo sapiens
AQQLLAQVLSPSLPGAGGGPPAAPSAGSAEPTPTRNSRWPASTTRSPVPACTSPSTPPPKLREPAPTLASSGRGSHSAAAG

SEQ ID NO: 43355 - protein, 86 aa, Homo sapiens
GSRLRPWPAQKGAPTVQRRAEGLLKCRQSGSPGRGGAESEQGLRGLPARCHLSLSVFPLRRKNTTILYLPYLYRKILLWNLDRGMC

SEQ ID NO: 43356 - protein, 147 aa, Homo sapiens
  DOMAIN (31)..(45): LEUCINE-RICH REPEAT SIGNATURE domain identified by eMATRIX, accession number PR00019B, p-value=7.840e-09, raw score of 11.36
MAEGEGEASVLVLNSCGITCAGDEKEIAAFCAHVSELDLSDNKLEDWHECSGGLKGSSSAAKVGAQAEEAPRASEGCEDCQHAVTTASTLSPLSMATVKSSLSGEDHEKSGVKCTRWMLHGYSVDRLTSELRYLWGHPETLKRLVAL

SEQ ID NO: 43357 - protein, 107 aa, Homo sapiens
  DOMAIN (43)..(64): 1 HERPESVIRUS GLYCOPROTEIN H domain identified by eMATRIX, accession number DM01803A, p-value=4.253e-09, raw score of 10.51
  misc_feature (1)...(107): Xaa = X or * as defined in Table 2
WCPSQAAAAGARATRDMPEGSMTCLCRALWWLFSWLKVHRXRQGQQGRPAAPSAGPAKPTPTRNSSWLLLAAPVPTRTSPSTPPCKLREPAPALASPERGSHSAAVG

SEQ ID NO: 43358 - protein, 343 aa, Homo sapiens
SRGRCLSGRLRQHSSPQRGGGSGMAGCRSRAMPRREAAKAGEKSSPVPVGGTALSTGPPQPLALVLSPSLHGAGRACRLLRVRARQAHAHLELQLARKCPHSPCSRSCLSLHTSLQAEGASSGLGQPRKGLPQCSGGLKGSSSAAKVGAQAEEAPRASEGCEDCQHAVTSQADIGSCEDPPVSLHLKQSYNCPVNAEEEAPVCCSARYNLAILAFFGFFIVYALRVNLSVALVDMVDSNTTLEDNRTSKACPEHSAPIKVHHNQTGKKYQWDAETQGWILGSFFYGYIITQIPGGYVASKIGGKMLLGFGILGTAVLTLFTPIAADLGVGPLIVLRALEGLGE

SEQ ID NO: 43359 - protein, 107 aa, Homo sapiens
MISFDLMSHIQVTVMPKVFGPVMRGAAMKDFAEKKSTAKALEDVKANFYCELCDKQYHKHQEFDNHINSYDHAHKQTQEPSWLHPVDPTPGLHVELPASPGPCAHTP

SEQ ID NO: 43360 - protein, 226 aa, Homo sapiens
GLVVSLASGVKPQTFAVSVTVLKAARLELFIPPRGLVVSLASGVKLQTFAVSVTAHKSSVDPKNSGAQLASPSGSRTRAAGGAACQCHAVRSHSSALGWSMGLGAVEQGVVLVGEARAAQEPMEWVGGSGMAGCMSRALPHGKAAKAWREIEHSAGGPALLGDLVHPLQPLARVPSPSLPCASRAGRLLRVQARQTHAHPELQLAPKRCTQPRFPLAPLPPHIPAS

SEQ ID NO: 43361 - protein, 54 aa, Homo sapiens
ARGTSPTLMTSQVASEPGEAKKMEDKEKDNKLISANSSEKYIFQRPSVLIHMKH

SEQ ID NO: 43362 - protein, 371 aa, Homo sapiens
  misc_feature (1)...(371): Xaa = X or * as defined in Table 2
MASLLKSARPQTHWKEETPETSKRLKEQTPDIPSLRAVTLIAKVHSFIPEVCETKNPLEGIHSGHILAPNVGPSPSRRQARVQVFENVSVRATKSDLPQSSLWSRRKTTVSAAASKKTSKEISKGPQKPPGYPVTSPSSCRGRGIWPNPEYMSTSPSLIXSQIKVDLGKISDDPDRYIDVLQGLGQTLDLSWRDVMLLLDQTLAFNEKNAALAAAQEFGDTWYLSEVNDRMTAEERDKFPTEDGEPIKCDCQQIIVQTYAAQDDILEVPLANPDLNLYTDGSSFVENGIRRAGYAIVSDVTILERPNLFRAIQQVVKACEVCQRKNPLVHPPNYLYKTLNLTHSLLNQSNPSLANDCWLCSSLSVSAEPYN

SEQ ID NO: 43363 - protein, 443 aa, Homo sapiens
  misc_feature (1)...(443): Xaa = X or * as defined in Table 2
RGGRACLRPXAASPGPSTPXWPPPRGVQAAAILSGPPRPAPPKGAASQRLCGGFVEARQAWVGRRGGRRGPVGETQPPPSVIQPPSRGAGPRDQQPAMPEPPTPSVGSCAARASQISAAPCSTAPSPIDHPRAEECRRTVWDWQAAPPAAQVRDPLGEASWAPESGGDVENLYVLLRDCKYTSQHPVSSSGSVNAPIDTLYLATLLRDCKYTNRHSVSSSRFVNTPISTVSSSEFANAPIDTLHLATLKEETPNTSEHQKEQTPDMPPLRTVTVTARVRGFILDVSETKNPPIPDTFWRPRWDLRQSPSNQTLAFNEKNAALAAAQEFGDTWYLSQVNDRMTAEERDKFPTEFIPSSGFLVLLTSRMKPQTFAASVTALKDGVSRVCSFRCVQSFFLPSADWCIYKPLARYRALIGAFLQSAHWCVYKPLARHSVLIGAFTNL

SEQ ID NO: 43364 - protein, 414 aa, Homo sapiens
MAEGKAGGAAGLFAKQVQKKFSRAQEKVLQKLGKAVETKDERFEQSASNFYQQQAEGHKLYKDLKNFLSAVKVMHESSKRVSETLQEIYSSEWDGHEELKAIVWNNDLLWEDYEEKLADQAVRTMEIYVAQFSEIKERIAKRGRKLVDYDSARHHLEAVQNAKKKDEAKTAKAEEEFNKAQTVFEDLNQELLEELPILYNSRIGCYVTIFQNISNLRDVFYREMSKLNHNLYEVMSKLEKQHSNKVFVVKGLSSSSRRSLVISPPVRTATVSSPLTSPTSPSTLSLKSESESVSATEDLAPDAAQGEDNSEIKELLEEEEIEKEGSEASSSEEDEPLPACNGPAQAQPSPTTERAKSQEEVLPSSTTPSPGGALSPSGQPSSSATEVVLRTRTASEGSEATKKDSLYPEDLSTP

SEQ ID NO: 43365 - protein, 155 aa, Homo sapiens
TLGGKWVTDTLLLCTLFAQNEGCAHPSLGGMQSRIPVSYSEKLQEKATSEKYQGSSKQCIMVWARMLFPSSRHTFVVFFRVMMAELEKTVKKIEPGTAADSQQCSRMLDSSSSVARVVAKAKEVPRVSEGREGCQHIVTSQKYKLNVNKIPLYIN

SEQ ID NO: 43366 - protein, 62 aa, Homo sapiens
KNRDLQGEEIKSQNSQESTADESEDDMSSQASKSKATEDGEEDEVSAGEKEQDSDESYDDSD

SEQ ID NO: 43367 - protein, 66 aa, Homo sapiens
FILFWHVCLKGEEIKSQNSQESTADESEDDMSSQASKSKATEDGEEDEVSAGEKEQDSDESYDDSD

SEQ ID NO: 43368 - protein, 60 aa, Homo sapiens
  misc_feature (1)...(60): Xaa = X or * as defined in Table 2
MLKLGXXXXXXXXXXXXXSFTLTXXXXXXXXXXXXXXXXXXKATXXXXXXXXXXXXXXXL

SEQ ID NO: 43369 - protein, 43 aa, Homo sapiens
ISPRKPPNNQRFRPCSSFGIPHPKDAPPQMPARVLLYRVSVVP

SEQ ID NO: 43370 - protein, 28 aa, Homo sapiens
WMKLETILSKLTQEQKTNHYIFSLISGS

SEQ ID NO: 43371 - protein, 58 aa, Homo sapiens
PRGGTLCLSRARALCWESCCSLQSREAETFTSAEAAPTAAPFPQVLCPREMGVLSISP

SEQ ID NO: 43372 - protein, 60 aa, Homo sapiens
  misc_feature (1)...(60): Xaa = X or * as defined in Table 2
MLKLGXXXXXXXXXXXXXSFTLTXXXXXXXXXXXXIPPQLSKATXXXXXXXXXXXXXXXL

SEQ ID NO: 43373 - protein, 55 aa, Homo sapiens
MEMVSEFCFCFVFGLKKHTFMSSVSASQMSRHRLAGPPPQNLTQLQSRVGWVGFC

SEQ ID NO: 43374 - protein, 82 aa, Homo sapiens
DCAQDCIQRCTLRGAKLWIPDAHNPEQRSHRRHACFTFTFSHDSEFPEVSATMLPVQPAELYKTRQIYEATVLRLWTTEESP

SEQ ID NO: 43375 - protein, 253 aa, Homo sapiens
  DOMAIN (193)..(240): kw TRANSCRIPTASE REVERSE II ORF2 domain identified by eMATRIX, accession number DM01354V, p-value=1.000e-40, raw score of 12.97
MGRNHNRKAENSKNQNPSYPPKDCSSSPATEQSWMENDFHKLTEICFRRSVITNFSKLKEDVQTHRKEAENLERRLEEWLTGVNSIQKTLNDLTELKNMARELLLEVLARVIRQEKEIKGIQLRKEEVKLSLFADDVTVYLENPIVSAQNLLKLISNFSKVSGYKINVQKSQAFLYTNNRQTESQIMHDFPFTIASKRIKYLGIQLTRDVKDLFKENYKPLLNEIKEDTNKWKNIPCPWIGRINIVKMAILPK

SEQ ID NO: 43376 - protein, 201 aa, Homo sapiens
  DOMAIN (141)..(188): kw TRANSCRIPTASE REVERSE II ORF2 domain identified by eMATRIX, accession number DM01354V, p-value=1.000e-40, raw score of 12.97
PNLRLIGVPESDGENVTKLENTLQDIIQENFPNLARQTNIQIQEIQRTPQRYSSRRATTRHIIVRLTKVDMKEIMLRAAREKDDMIAYLENPIISAQNLLKLISNFSKVSGYKINVQKSQAFLYTNNRQTESQIMSEIPFTTASKRIKYLGIQLTRDVKDLFKENYKPLLNKIKEDKNKWKNIPCSWIGRINIVKMGILPK

SEQ ID NO: 43377 - protein, 186 aa, Homo sapiens
  DOMAIN (126)..(173): kw TRANSCRIPTASE REVERSE II ORF2 domain identified by eMATRIX, accession number DM01354V, p-value=1.000e-40, raw score of 12.97
MNIDAKILNKTLANRIQQHIKKLIHHDQVGFIPGTQVLEVLARAIRQEKEIKGTQLGKEEVKLSLFADDMIVYLENPIVSAQNLLKLIGNFSKVSGYKINVQKSQAFLCTNNRQTESQIMSELPLTIASKRIKYLGIQLTRDVKHLFKENYKPLLNEIKEDTNKWKNIPCSWVGRINIVKMAILPK

SEQ ID NO: 43378 - protein, 351 aa, Homo sapiens
  DOMAIN (140)..(195): kw TRANSCRIPTASE REVERSE II ORF2 domain identified by eMATRIX, accession number DM01354Q, p-value=1.000e-40, raw score of 9.23
IQTTIREYYKHLYANKLENLEEMDKFLDTYTLPRLNWEEFELLNRPITGSEIEAVINSLPTQKKSPGPGEFTAEFYQRYKEKLVPFLLKLFQSIEEEGILPNSFYEASIILIPKPGRDTTKNENFRPISLMNINAKILNKILAKQIQQYIKKLIHHKQVGFIPGMPGWFNICESININHHINRTKDKNHMIISIDAEEAFDKIQQPFMLKPLNKLGIDGTYLKIIRPIYDKPTANIILNGQKLEAFPLKTGTRQGCPLSPLLFNIVLEVLARAVRQEKEIKGIQLGKEEVKLSLLRIKYLGIQLTRDVKDLFKENYKPLLNEIKEDTNKWKNIPCSWIGRINIVKTAILPK

SEQ ID NO: 43379 - protein, 155 aa, Homo sapiens
  DOMAIN (95)..(142): kw TRANSCRIPTASE REVERSE II ORF2 domain identified by eMATRIX, accession number DM01354V, p-value=1.000e-40, raw score of 12.97
MDKFLDTYTLPRLNQEEVESLNRPITGAEIVAIINSLPTKKSPGPDGFTAEFYQRLISNFSKVSGYRINVQESQAFLYTINRQTESQIMSALPLTIASKRIKYLGIQLTRDVKDLFKENYKPLLNEIKEDTNKWKNIPCSWVGRINIVKMAILPK

SEQ ID NO: 43380 - protein, 282 aa, Homo sapiens
  DOMAIN (127)..(174): kw TRANSCRIPTASE REVERSE II ORF2 domain identified by eMATRIX, accession number DM01354V, p-value=1.000e-40, raw score of 12.97
APEGSTKHGKEQRVPATAKTCQTVKTINARKKLHQLTVLEVLARAIRQEKEIKSIPLGKEEVKLSLLADDMIVYLENPIISAQNLLKQISNFSNVSGYKINVQKSQAFLYTNNRQTETQIMSKLPFTIATKRIKHRGIQLTRDVKNLFKENYKLLLNEIKEDTNKWKNIPCSWIGRINIVKMAILPKVIYRFNAIPIKLPMTFFTELEKTTLKFIWNQKRACIAKTILSKKNKAGGNTLLQTILQGYSNQNSMVLVPKQRDRPMEQNRALRNNTTHLQPSDL

SEQ ID NO: 43381 - protein, 56 aa, Homo sapiens
TIKYLGIQLTRDVKDLFKENYKPLLHEIKEDTNKWKNIPCSWRGRINIVKMAILPK

SEQ ID NO: 43382 - protein, 88 aa, Homo sapiens
  DOMAIN (28)..(75): kw TRANSCRIPTASE REVERSE II ORF2 domain identified by eMATRIX, accession number DM01354V, p-value=1.000e-40, raw score of 12.97
TLMQKSSVKYWQTESSSTSKNLSTVIKWASSLRIKYLGIQLTRDVKDLFKENYKPLLKEIKEDTNKWKNIPCSWVGRINIVKMVILPK

SEQ ID NO: 43383 - protein, 247 aa, Homo sapiens
  DOMAIN (10)..(65): kw TRANSCRIPTASE REVERSE II ORF2 domain identified by eMATRIX, accession number DM01354Q, p-value=1.000e-40, raw score of 9.23
MNIDAKILNKILANRIQQHIKKLIHHDQVGFIPGMQGWFNIRKSINVIWHINRTKDKNHMIISIDAEKVFDKIQQPFMLKTLNKLGIDGTYLKILRAIYDKPTANIILNGQKLEAFPLKTGTRQGCPLSPLLFNIVLEVLARAIRQEKEIKGIQLGKEEVKPSLFADDVIVYLENPIISVQNLLKLISNFSKIKYLGIQLTRNVKYLFKENYKSLLNEIKEDTNKWKNIPCSWIGRINIVKMAILPK

SEQ ID NO: 43384 - protein, 486 aa, Homo sapiens; identical to SEQ ID NO: 38995
  DOMAIN (234)..(281): kw TRANSCRIPTASE REVERSE II ORF2 domain identified by eMATRIX, accession number DM01354V, p-value=1.000e-40, raw score of 12.97

SEQ ID NO: 43385 - protein, 540 aa, Homo sapiens; identical to SEQ ID NO: 40421
  DOMAIN (35)..(78): kw TRANSCRIPTASE REVERSE II ORF2 domain identified by eMATRIX, accession number DM01354T, p-value=1.000e-40, raw score of 9.48

SEQ ID NO: 43386 - protein, 365 aa, Homo sapiens; identical to SEQ ID NO: 33859
  DOMAIN (57)..(100): kw TRANSCRIPTASE REVERSE II ORF2 domain identified by eMATRIX, accession number DM01354T, p-value=1.000e-40, raw score of 9.48

SEQ ID NO: 43387 - protein, 971 aa, Homo sapiens
  DOMAIN (427)..(452): 7 kw REVERSE TRANSCRIPTASE RNA POLYMERASE domain identified by eMATRIX, accession number DM00895E, p-value=3.333e-11, raw score of 15.72
MLIEPALHPRDEADLIVEDKLFDVLLDSVCQYFIEDFRIESGSSAAGLLEFAGGPLQTLFAWVSPADAAEQQSLLPVPSSGSFIPEGHLQMPAIALLYEVSVSSYWEGASSTAVTHSKGLQTFAKCKKLVTFQEGMRCPEQSYPKVQQVLENGVSKRVDSEVPCFNSSGNTINETEREQGYPGLELSSAPSRPNRHLQNSPPQINRIYILLSTTLHCTYSKIDHTLGSKALLSKCKITEIITDSQTTVLSELRIKKLTQKPLSYMETEQLLNDYWVHNEMKAEIKMFFETNENKDTTYQNLWDTFKAVCRGKFIALNAHKRKQERSKIDTLMSQLKELEKQEQTHSKVSRRPIPSSEIEAIINSLPTKKSPGPDGFTAEFYQRYKEELVPFLLKLFQSIEKEGILPNSFYEASIILIPKPGRDTTEKENFRPISLMNIDAKILNKILANRIQQHIKKLLHHDQVGFIPGMQGWFNICKSINVIQHINRTSDKNHTIISIDAEKAFNKIQQLFMLKTLNKLGTNGMYLKIVRAIYDKPTANIILNGQKLEAFPLKTGTRQGCPLSPLLFNIVLEVLARAIRQEKEIQGIQLGKEEVKLSLFADDMIVYLENPIVSAQNLLKLISNFSKVSGYKINLQKSQAFLYTNNRQTESQIMSELPFTTASKRIKYLGIQLTRDVKDLFKENYKPLLNEIKEDTNKWRNIPCSWVGRINIVKMAILPKVTYRFNAIPIKLPMTFFTELEKTILKFRWNQKRAHIAKTILSQKNKAGGIRLPDFKLFYKATVTKTARYWYENRDIDQWNRTEPLEIMPHIYNHLIFDKPDKNKQWGKDSLFNKWCWENWLAICRKLKLDPFLTSYTKINSRWIEDLNVRPKTIETLEENLGNTIQDIGMGEDFMTETPKAMATKAQIDKWDLIKLKSLCTAKETTIRVNRQPTEWEKLFIVYPSDKGLISRIYKELKQIYKKKSNHPIEK

SEQ ID NO: 43388 - protein, 628 aa, Homo sapiens
  DOMAIN (48)..(91): kw TRANSCRIPTASE REVERSE II ORF2 domain identified by eMATRIX, accession number DM01354T, p-value=1.000e-40, raw score of 9.48
AFDKIQQPFMLKTLNKLGIDGMYFKIIRAIYDKPTANIILNGQKLEAFPLKTGTRQGCPLSPLLFNIVLEVLARAIRQEEEIKGIQLGKEEVKLSLFADDMIVYLENPIVSAPNLLKLISNFSKVSGYKINVQKSQAFLYTNNRQTESQIMSELPFTIASKRIKYLGIQLTRDVKDLFKENYKPLLKEIKEDTNKWKNIPCSWVGRINIVKMAILPKVIYRFNAIPIKLPMTFFTELEKTTLKFIWNQKRARITKSILSQKNKAGGITLPDFKLYYRATVTKTAWYLYQNRDIDQWNRTEPSEITLHIYNYLIFDKPEKNKQWGKDSLFNKWCWENWLAICRKLKLDPFLTSYTKINSRWIKDLNVRPKTIKTLEENLGITIQDIGMGEDFISKTPKAMATKDKIDKWDLIKLKSFCTAKETTIRVNRQPTKWEKIFTTYSSDKGLISRIYNELKRIYKKKTNTTIKKLAKDMNRHFSKEDVYAAKNHMKKCSSSLGIREMQIKTTMRYHLTPVRMAIIKKSGNNRCWRGCGEIDFQQTNTGTENQTLHILTHKWELNNETTRTQGGEHHTLGLVEGWGARGGIAWNGEGQRGEAREDAKYVVHVDIEITKMSRIEVQQKPMSFWPSS

SEQ ID NO: 43389 - protein, 324 aa, Homo sapiens
  DOMAIN (24)..(58): kw TRANSCRIPTASE REVERSE II ORF2 domain identified by eMATRIX, accession number DM01354P, p-value=1.000e-40, raw score of 9.18
MVLFLLKLSQSIEKEGILPNSFYEANIILIPKPGRDTTKKENFRPISLMNIDAKILNKILANPIQQHIKKLIHHDQVGFIPGMQGWFNISKSINVIHHINRTKDNNHMIISIDAEKAFDKIQQPFMLKTLNKLAISNFSKFSGYKFNVQKSQGFLYTNNRQTERQVMSELPFTIASKTIKYQGIQLTRDVKDLFKENYKPLFNEIKEDTNKWKKIPCSWIGRINILKMAILPKVIYRFNAIPIKLPMTFFTELEKPTLKFMWNQKRAHIAKSVLSQKNKAGGIILPDFKLYYKATVTKTAWYWYQNRDIDQWNRIEPPEIIPHI

SEQ ID NO: 43390 - protein, 291 aa, Homo sapiens
  DOMAIN (207)..(254): kw TRANSCRIPTASE REVERSE II ORF2 domain identified by eMATRIX, accession number DM01354V, p-value=1.000e-40, raw score of 12.97
MEDQMNEMKQVEKLREKRVKRNEQNLQEIWDYVKRPNLRLIGAPESDGENGTKLENTLQDIIQENFPNLARQADIQIWEIQRMPQRLSSRRATPRHIIIRFTEVEMKEKMLRAAREKVLEVLARAIKQDKEIKGIQLGKEEVKLSLFVDDRIVYLENPIISAQNLLKLISNFSKVSGYKINLQKSQASLYTNNRQTESQIMSELPFKIASKRIKYLGIQLTRDVKDLFKENYKPVLNEIKEDTNKWKNIPCSWIGRINIMKTAVLPKVIYRFNAIPIKLPMTFYTELEKTI

SEQ ID NO: 43391 - protein, 455 aa, Homo sapiens
  DOMAIN (57)..(104): kw TRANSCRIPTASE REVERSE II ORF2 domain identified by eMATRIX, accession number DM01354V, p-value=1.000e-40, raw score of 12.97
MVDKLFDVLLDSVCQYFIEDFCIKVSGYKINVQKSQAFLYTNKRQTESQIMGELPFTIASKRIKYLGIQLTRDVKDLFKENYKPLLKEIKEDTNKWKNIPCSWVGRINIVKMAILPKVIYRFNAIPIKLPMTFFTELEKTTLKFIWNQKRARIAKSILSQKNKAGGITLPDFKLYYKATVIKTAWYWYQNRDIDQWNRTEPSEIMPHIYNYLIFDKPEKNKQWGKDSLFNKWCWENWLAICRKLKLDPFLTPYTKINSRWIKDLNVKPKTIKTLEENLGITIQDIGVGKDFMSKTPKAMATEDKIDKWDLIKLKSFCTAKETTIRVNRQPTTWEKIFATYSSDKGLISRIYNELKQIYNKKTNNPIKKWAKDMNRHFSKEDIYAAKKHMKKCSSSLAIREMQIKTTMRYHLTPVRMAIIKKSGNNRCWRGCGEIGTLLHCWWDCKLVQPLWKSVW

SEQ ID NO: 43392 - protein, 289 aa, Homo sapiens
  DOMAIN (159)..(206): kw TRANSCRIPTASE REVERSE II ORF2 domain identified by eMATRIX, accession number DM01354V, p-value=1.000e-40, raw score of 12.97
MGDFNTPLSTLERSTRQKVNKDIQELNSALHQANLIDIYITLHAKSTEYTFFSEPAHTYSKIGRIVGSKALLSKCKRTEITKNCLSDHSAIKLELRIKKLIQNCSTTWKLNNLLLNDYWLISNFSKVSAYKINVPKSQAFLYTNNRQTESQIKSELPLTIASKRIKYLGIQLTRDVKDLFKENYKPLLNEIKEDRNKWKNIPCSWIGRICIMKMAILPKIIYSFNAIPIKLPMTFFTEFEKTTLKFIWNQKRARIAKTILNQKNKAGGIMLPDFKLYYKATVTKTAWYW

SEQ ID NO: 43393 - protein, 197 aa, Homo sapiens
  DOMAIN (91)..(138): kw TRANSCRIPTASE REVERSE II ORF2 domain identified by eMATRIX, accession number DM01354V, p-value=1.000e-40, raw score of 12.97
MVLEVLARAIRQEKEIKGIQLGKEEVKLSLFADDMIVYLENPIVSAQNLLKLISNFSKVSGYKINVQTSQAFLYGNNRKTESQIMRKLPFTIASKRIKYPGIQLTRDVKDLFKGNYKPLLNEIKENTNKWKNFPCSWIGRINIVKMAILPKVIYRFNAIPIKLPMTFFIELEKTTLKFIWNQVNPKPKEQSWRHHAT

SEQ ID NO: 43394 - protein, 330 aa, Homo sapiens
  DOMAIN (102)..(145): kw TRANSCRIPTASE REVERSE II ORF2 domain identified by eMATRIX, accession number DM01354T, p-value=1.000e-40, raw score of 9.48
MELKTTAQELRVACTSFNSRFDQVEERISVIEDQINEIKTNDKNHMIVSKDAEKAFDKIQHPFMLKTLNQLGIDGIYLKIIRAIYDKPTANIILNGQKLEAFPLKTGTRQRCPISALLFNIVLEVLARAIRQEKKIKGIQLGKEEVKLTLFADDMIVYLENPISSAQNLLKLISKVSGYKINVQKSQAFLYTNNRQTESQIMSELPFTITTKRIKYLGIQLTRDVKDLFKENYKPLLNEIKEYTNKWKNIPCSWIGRINILKMAILLKVIYRFNAIPIKLPLTFFTELEKTTLTFLWNQKRACKAKTILAKRINLEASHYRTSNYTTRLQ

SEQ ID NO: 43395 - protein, 703 aa, Homo sapiens
  DOMAIN (154)..(199): kw TRANSCRIPTASE REVERSE II ORF2 domain identified by eMATRIX, accession number DM01354N, p-value=1.000e-40, raw score of 13.17
MGDFNTALSTLDRSMRQKVNKDIQELNSALHQADLTDIYGTLHPKSTECTFFSAPHHTYSKIVHIVGSKALLSKWKRREIITNCLSDHSAIKLELRIKKLNQNCSTTWKLNNLLLNNYWTNKEEKREESNRCNKNDKGDITTNPTEIQTTIREYYKHLYANKLENLEEMDKFLDTYTLPRLNQEEVESLNRPITGSEIEAIINSLPTKKSPGPDGFTAEFYQRMNYISFKSTWKIIKNAYSLAHSRELRDGGQSQKICEQFYILFLTHFSRYERHVKEHTVEKSNSYSPEKIRKEESKQDTKLNDENDSERKASVHLLETDNCASAMHHCFVLFVAKPVAHYEVGIDFMIAKQMHRDILSRAVDSYLLNRIRSNVQNNMLKQPFTKASHNPLPLSFSRQPASGGLQIATCGTNVFLYIMHVSPSRYESNSKNLNVYHGKHLRHPTQSTAGHPKVKFTLAVAVLQGSGTVCISETTPVLEVLASAIRQEKEIKGIQLGKEEVKLSLFADDMIVYLENPIVSAQNLLKLISNFSKVSGYKINVQKSQAFLYTNNRQTESQSMGELPFTIASKRIKYLGIQLTRDVKDLFKENYKPLLKEIKEDTNKWKNIPCSWVGRINIVKMAILPKVIYRFNAIPIKLPMTFFTELEKTTLKFIWNQKRARIAKSILSQKNKAGGITLPDFKLYYKATVTKTAWYWYQNRDID

SEQ ID NO: 43396 - protein, 281 aa, Homo sapiens
  DOMAIN (109)..(156): kw TRANSCRIPTASE REVERSE II ORF2 domain identified by eMATRIX, accession number DM01354V, p-value=1.000e-40, raw score of 12.97
MARELCDECTSFSSQFNQREKRISVIEDQMNEMKREEKFREKRVKRNKQSLQEIWDYVKRQNLYLIGIPESDGENGTKLENILQDIIQENFPNLARQTESQIMSELPFTIASKRIKYLGIQLTRNVKDLFEENYKPLLNEIKEDTNKWKNIPCSWIGRINIMKTAILPKVIYRFNAIPIKLPMTFFTELEKTTLKFTWNQKRARIAKTILSQKNIAGGIMLPDFKLYYKATVTKTAQYWYQNRDIDQWNRREPSDIVPHIYNYLIFDKPDKNKKLGKGFPI

SEQ ID NO: 43397 - protein, 401 aa, Homo sapiens; identical to SEQ ID NO: 34254
  DOMAIN (263)..(310): kw TRANSCRIPTASE REVERSE II ORF2 domain identified by eMATRIX, accession number DM01354V, p-value=1.000e-40, raw score of 12.97

SEQ ID NO: 43398 - protein, 406 aa, Homo sapiens
  DOMAIN (226)..(273): kw TRANSCRIPTASE REVERSE II ORF2 domain identified by eMATRIX, accession number DM01354V, p-value=1.000e-40, raw score of 12.97
MESEVLNVLFMGVIALSSGNNILGFNTDNFVIDISRLTSINKTVTLTVMQNDADCPQWSIVKESPCFERSKRFEDELLKNLVQASRTAGPPYLLVHESTSGTDKILNQVSFPGTSAKTIGFIACLIQVELSSSRATVLEVLARAIRHEKEIKGIQLGKEEVKLSLFADDMIVYLENSIVSAQNLLKLISNFSKVSGYKINVQKSQAFLYTNNRQTESQIMSELPFTIASKRIKYLGIQLTRDVKDLFKENYKPLLNEIKEDTNKWKNIPCWWVGRINIVKMAILPKVIYRFNAIPIKLPMSFFTELEKTTLKFIWNQKRARIAKSILSQKNKAGGITLPDFILYYKATVTKTAWYWYQNRDIDQWNRTEPSEITLHIYNYLIFDKLRKTSNGERIPYLINGAGKTG

SEQ ID NO: 43399 - protein, 364 aa, Homo sapiens
  DOMAIN (219)..(266): kw TRANSCRIPTASE REVERSE II ORF2 domain identified by eMATRIX, accession number DM01354V, p-value=1.000e-40, raw score of 12.97
MAHTCNPSTLGGRGAPIDPIFLLSRTVSNVISSVVFRSRFDYEDKQFLNLLRLINESFIEMSTPWAQLYDMYSGIMQYLPGRHNLIYYLVEELKDFIASRVKINEASFDPQNPRDFIDCFLIKMHQGTDVITLLNTVHYDPSQFLTPQEFNPEHFLDANQSFKKSPAFMPFSAAQNLFKLISNFSKVSGCKINVQKSQAFLYTNNRQTESQIMSERPFTTASKRIKYLEIQLTRDVKDLFKENYKPLLNEIKEDTNKWKNFPCSWIGRISIVKMAILPKVIYRFSAIPIKLPMTFFTELEKTTLKFIWNQKRAHIDRTILSKKNKAGGMMLPDFKLYYKATITKTAWYWYQNRDTDQWNRTEAS

SEQ ID NO: 43400 - protein, 310 aa, Homo sapiens
  DOMAIN (90)..(137): kw TRANSCRIPTASE REVERSE II ORF2 domain identified by eMATRIX, accession number DM01354V, p-value=1.000e-40, raw score of 12.97
MLEVMARAIRQEKEIKGIQLGKEEVKLFLFADNMIVYLENPIVSAQNLLKLISNISKVSGYKINVQKSQAFLYTNNRQPQSQIMTELPFTIATKRIKYLGIQLTRDVKDLFKENYKPLLNETKEDTNKWKNIPCSWIGRINIVKIAILPKVIYRFNAIPIKLPMTFFTKLEKTTLKFIWNQKRACIAKTILSQRNKAGGITLRDFKPYYKATETKTASEMKYYLENKIPFKVLHMVYNVPTHPPFIGDLHPNTKVVSLPPNITSLIEPMNQGVISAFKDCYLRKTFVQAVATPEGETEMTVMQFWKDYNT

SEQ ID NO: 43401 - protein, 431 aa, Homo sapiens; identical to SEQ ID NO: 35797
  DOMAIN (198)..(245): kw TRANSCRIPTASE REVERSE II ORF2 domain identified by eMATRIX, accession number DM01354V, p-value=1.000e-40, raw score of 12.97

SEQ ID NO: 43402 - protein, 181 aa, Homo sapiens
  DOMAIN (7)..(54): kw TRANSCRIPTASE REVERSE II ORF2 domain identified by eMATRIX, accession number DM01354V, p-value=1.000e-40, raw score of 12.97
MSEISFTIASKGIKYLGIQLTRDVKDLFKENYKPLLNEIKEDTNKWKNIPGSWIGIISIVKMAILPKVIYRFNAILIKLQMTFCTELEKTTLKFIWNQNRAHIAKTILSQKNKAGGITLPDFKLYYKATVTKTTCPATLKPHPIDHLLKILVPGSGLLSTVNTHIKAPGSLLRRQSCLPPS

SEQ ID NO: 43403 - protein, 238 aa, Homo sapiens
  DOMAIN (58)..(105): kw TRANSCRIPTASE REVERSE II ORF2 domain identified by eMATRIX, accession number DM01354V, p-value=1.000e-40, raw score of 12.97
DMILYLENPIVSAQNLLKLIGNFSKFSGYKINVQKSQAFLYINNIQTESQIMSELPFTIASKRIKCLGIQLTRDVKDLFKENYKPLLKEIKEDTNKWKNIPCSWVGRINIMKMAILPKVIYRFNAIAIKLPMTFFTELGKTTLKFIQNQKGACIAKSILSQKTKAGGITLPDFKLYCKGYSNQNSMVHRKAAKCCVNPGAVDLRDFGPTLLSGHLSWLSHSLHALTLRLAALMLFDLS

SEQ ID NO: 43404 - protein, 258 aa, Homo sapiens
  DOMAIN (93)..(140): kw TRANSCRIPTASE REVERSE II ORF2 domain identified by eMATRIX, accession number DM01354V, p-value=1.000e-40, raw score of 12.97
  misc_feature (1)...(258): Xaa = X or * as defined in Table 2
ARAEVKLSLFADDMIVYLENPIIXARAEVKLSLFADDMIVYLENPIISAQNLLKLISKFSKVSRYKINVQKSQAFLYTNNRQTESQIMSELPFTIATKRIKYLGIQLTRDVKDLFKENYKPLLNEIKEDTNKWKNIPCSWIGRINIVKMAILPKVIYRFSAIPIKLPMTFFTELEKKNWLAICRKLKLDFFFIPYTKINSRWIKDLNVRPKTMKTLEESLGNTIQDIGIGKDFMTKTPKAMATKAKRASAQQKKLPSE

SEQ ID NO: 43405 - protein, 938 aa, Homo sapiens
  DOMAIN (397)..(444): kw TRANSCRIPTASE REVERSE II ORF2 domain identified by eMATRIX, accession number DM01354V, p-value=1.000e-40, raw score of 12.97
ITYLDLLWKHTRVNKVPGCPGADLDGRVPQSLVLNPQSLVLNPPGPEAMQGQRVIVTAFIHTCGTRALVWHPGKIRSDEQIEGRRMQRILLLMKVALRGKPLIPCFPFSWHNVPHTLPYPSISPQEPGFSLFSGLAGAGLLRFAGHLLQSLVASDFLVPEDITSEACKTAKWQPAPFSGSSIPVGYRHVASPNAPAGGRWRPWYFIPKRNRNSVYRRTQAEVAVGPSLEVLPRDDEWIGILFKEMVWPNFCGAAVLCWGIPSLPSQSGLSEACRLEKLGHSNSKDSGPPLPSGTPTCPGKAQHYCQGLAGIPSQAIRQEKEIKGIQLGKEEVKLSLFADDMIVYLENPIVSAQNLLKLISNFSKVSGYKINVQKSQAFLYTNNRQTERQIMSELPFTIASKRIKYLGIQLTRDVKDLFKENYKPLLKEIKEDTNKWKNIPCSWVGRINIVKMVILPKVIYRFNAIPIKLPMTFFTELEKTTLKFIWNQKRARIAKSILSQKNKAGGITLPDFKLYYKATVTKTAWYWYQNRDIDQWNRTEPSEITPHIYNYLIFDKPEKNKQWGKDSLFNKWCWENWLAICRKLKLDPFLTPYTKINSRWIKDLNVRPKTIKTLEENLGITIQDIGVGKDFMSKTPKAMATKAKIDKWDLIKLKSFCIAKETTIRVNRQPTTWEKIFTTYSSDKGLISRIYNELKQIYKKKTSNPIKKWAKDMNRHFSKEDIYAAKKHMKKCSSSLAIREMQIKTTMRYHLTPVRMAIIKKSGNNRNSTPGIFAQRNNPKDNRRLRHDSVHYFMIHKSKNKNKTPKSLKAQERQDWPTLQFLILLNKCTAVDMTKGLPGGAWGVWTDRGHFLGFSIGSTPTKGEHELREGAFHASPLFLPMLRVNTCKEPLAGSYFSASSTGWKPELHLQIKVNHYNNKLEEDTAYLQPRSPYRALVL

SEQ ID NO: 43406 - protein, 434 aa, Homo sapiens
  DOMAIN (150)..(197): kw TRANSCRIPTASE REVERSE II ORF2 domain identified by eMATRIX, accession number DM01354V, p-value=1.000e-40, raw score of 12.97
MMLKQKLHGVFLPVWPHDCCKGKGLGAGSLPREFQQRIVLNSSQKDALQALFKQNSYPGIPTREQLAKEIGSLESSIQKVCICITDVNPQQILPMALTHFSIPGSLPREFQQRIVLNSSQKDALQALFKQNSYPGIPTREQLAKEIGSLESRIQRIKYLGIQLTRDVKDLFKENYKPLLNEIKEDTNKWKNIPCSWVGRISIVKMVILPKNWKKTTLKFIWNQKTACITKSIISQKNKAGGITLPDFKLHYKATVTKTAWYWYQNRDIDQWNGTEPSEITPHIYNYLIFDKPEKNKQWGKDSLFNKWCWENWLAICRKLKLDPFLTTYTKINSTWIKDLHVRPKIIKTPEENLGNTIQDIGMGKDFMSKTPKAMGTKAKIDEADLIKLKSFCTAKGTTIRVNRQPTKWEKIFTTYSSDKGLISRIYNELKQIYK

SEQ ID NO: 43407 - protein, 514 aa, Homo sapiens; identical to SEQ ID NO: 40460
  DOMAIN (207)..(254): kw TRANSCRIPTASE REVERSE II ORF2 domain identified by eMATRIX, accession number DM01354V, p-value=1.000e-40, raw score of 12.97

SEQ ID NO: 43408 - protein, 441 aa, Homo sapiens
  DOMAIN (145)..(190): kw TRANSCRIPTASE REVERSE II ORF2 domain identified by eMATRIX, accession number DM01354N, p-value=1.000e-40, raw score of 13.17
KLLCSVITAMLKFWWPLLNPSNPNSITKGRIQSAHFTSHLGHVETVQTSERRTREKEGSPRKKPHKNKKRPPTKTGSPNQTSRDAEGGTGHKPTAPQKAQKKAENTQLKLRPRHKHTSDSSNHSKSQRRNPLLFTLEIQTTIREYYKHLYANKLENLEEMDKFLDTYTLPRLNQEEVESLNRPITGSETVAIINSLPTKKSPGPDGFTAEFYQRYKEELRIKYLEIQLTRDVKDLFKENYKPLLKEIKEDTNKWKNIPCSWVRRINIVKMAILPKRIKYLGIQLTRDVKDLFKENYKPLLNEIKEDTNKWKNIPCSWIGRINIMKMAILPKHKQDDMEVKTENRRGQQKKMAKPIPEKGDIRRRRLYPPIGELSTSGGEGFFFSSRWFSQRSVISEVPPEKATVITHLDDCRRLLTIRLSVFPTSNLAMAHSTNTCCVPTM

SEQ ID NO: 43409 - protein, 341 aa, Homo sapiens; identical to SEQ ID NO: 40463
  DOMAIN (133)..(180): kw TRANSCRIPTASE REVERSE II ORF2 domain identified by eMATRIX, accession number DM01354V, p-value=1.000e-40, raw score of 12.97

SEQ ID NO: 43410 - protein, 482 aa, Homo sapiens; identical to SEQ ID NO: 40449
  DOMAIN (197)..(244): kw TRANSCRIPTASE REVERSE II ORF2 domain identified by eMATRIX, accession number DM01354V, p-value=1.000e-40, raw score of 12.97

SEQ ID NO: 43411 - protein, 346 aa, Homo sapiens
  DOMAIN (181)..(228): kw TRANSCRIPTASE REVERSE II ORF2 domain identified by eMATRIX, accession number DM01354V, p-value=1.000e-40, raw score of 12.97
MDVKPVVWEVMDVKPKKLSNCANGSDESIPLNSEVEDYVARNAKRINTMWKLPRLGAEAMARAIPWPPLAMAGAEASGMHSTMSLGYAKQEVLEVLARAIRQEKEIKDIELGKEEVKLSLFADDMIVYLENPIISAHNLLRLISKFSKLSGHKINVQKSQAFLCSNNRQMESQIMSELPFAIASKKIKYLGIQLTRDVKDLFKENYKTLLNEIKEDTNKWKNIPCSWIGRIIIMKMAILPKVIYRFNAIPIKLPMTFFTELEKTTLKFIWNQKRACIVKTILSQKNKAGGITLPDFKLYYKATVTKTAWYWYQNRDIDKGNRKEPSEIMLHIYKYLIFDKSDRNKQ

SEQ ID NO: 43412 - protein, 569 aa, Homo sapiens
  DOMAIN (23)..(78): kw TRANSCRIPTASE REVERSE II ORF2 domain identified by eMATRIX, accession number DM01354Q, p-value=1.000e-40, raw score of 9.23
DTTKKGNFRPISLMNIDAKILNKILAKQIQQHIKKLIHHDQVGFIPGMQGWFNIRKSINVIQHINRTEDKNHMIISIDAEKAFDKIQQPFMLKPLNKLGIDGTYFKIIRAIYDKSTPNIILNGQKLEAFPLKTGTRQGCPLSPLLFNIVLEVLARAIRQEKEIKGIQLGKEEVKLSLFADDMIVYLENPTASAQNLLKLISNFSKVSGYKKKINVQKSQAFLYTNNRQTESQIMSKLPFTIASKRIKYLGIQLTRDVKDLFKENYKPLLKEIKEDTNKWKNIPCSWVGRINIVKMAILPKVIYRFNAIPIKLPVTFFTELEKTTLKFIWNQKRARIAKSILSQKNKAGGITLPDQTESHKLRLQFCPSSQSAPMELGFRPIPVDSGTRTIPEPGLTPWTQASGWTPKTCASGFFLQIQLTSPLWWTPVLGLHHKPRIQVYTEGPSPRPAPLDSDASSTHLLTQASERRIKTMNNHTVNRKSKREHCCTKEKPPEIPDEQREKKIQRSKQMVQGDEVWSINECPSHDVVKRRPVPSLHACRSTLEDPPKTLARMTKKEQRHKLLKLRIKR

SEQ ID NO: 43413 - protein, 586 aa, Homo sapiens
  DOMAIN (313)..(360): kw TRANSCRIPTASE REVERSE II ORF2 domain identified by eMATRIX, accession number DM01354V, p-value=1.000e-40, raw score of 12.97
  misc_feature (1)...(586): Xaa = X or * as defined in Table 2
MKNKPSKRCIHSCILPDTPRGTGTIPTETTPKIEEKGLLSNSFYEASLTLKLKPGRDTTRRNVQANIFRNIDAKRLNKMLAIGIEKHTHKLFHNNQAGLIPWLEVSPGQNNQAREKHKGPSQIEREKLKLSLFADDMILYLENLHSVHPKSPSADKQLRQSFRIQDQHLQISSILIHHQQPNQEPNQEHNPIQNCHKKNKISRNMVNQGRTNGYFQYTRCNHPETLRAPPSIARGCGRVVSAIQGCFFYLFSAFFSDKKLKADIAFNLMFDSYEADKQLQRSLRIQKQCTKITSILIHQQQTESQIMSELPFTIASKTIKYLGIHLTRDVKDLFKENYKPLLNEIKEDTNKWKNIPCSWVGRINIVKMVILPKVIYRFNAIPIKLPMTFFTELEKTTLKFIWNQKRARIAKSILSQKNKAGGITLPDFKLHYKATVTKTACLLNRRALPLANRGRKNPVFGGPPKTVPISPAKVGGHPETREQPPLSRNPPVFSLGPPEWGNPKLGATKAFGSKRASQPNPPEKRPGLKSPPGANPPRPLDPPVARENHQNPICGPPSPPQIPVTKPRSPHDRQTALSHRTSTFHX

SEQ ID NO: 43414 - protein, 307 aa, Homo sapiens
  DOMAIN (208)..(255): kw TRANSCRIPTASE REVERSE II ORF2 domain identified by eMATRIX, accession number DM01354V, p-value=1.000e-40, raw score of 12.97
MISQFIPENYFSGKSSATSGWARAQRDFRVGAGSARPALLSGRLAPPALGSERLSTRASSCGGLPRATPRGRAPPPATRHPVPSTAQRLRSAAARQRLAGSSARGRDALGKASWAPESVLEVLARAVRQEKEIKGILLGKEEVKLSLFAGDMIVYLENPIISAQNLLKLMSNFSKVSGYKISVQKSHAFVYTNNRQSESQIMSELPFTVATKRIKYLGIQLTRDVKDLFKENYKPLLNEIQEDTNKWKNIPCSWVGRINIVKMAILPKVIYRFNAIPIKLPMTFFTELEKTKVHMESKKEPILPRQS

SEQ ID NO: 43415 - protein, 505 aa, Homo sapiens
  DOMAIN (99)..(124): 7 kw REVERSE TRANSCRIPTASE RNA POLYMERASE domain identified by eMATRIX, accession number DM00895E, p-value=6.897e-10, raw score of 15.72
MDKFLDTYTLPRLNQEEVESLNRPITGSEIVAIINSLPTKKSPGPDGFTAEFYQRYKEELVPFLLKLFQSIEKEGILPNSFYEASIILIPKPGRDTTKKENFRPISLMNIDAKILYKILAKRIQQHIKKLIHHDQVGFIPGMQGWFNIRKSINVIQHINRAKDKNHMIISIDAEKAFDKIQQPFMLKTLNKLAQNLLKLISNFNKVSGYKINVQKSQAFLYTSNRQTESQIMSELPFTIASKRIKYLGIQLTRDVKDLFKENYKPLLKEIKEDTNKWKNIPCSWVGRINIVKMAILPKVIYRFNAIPIKLPMTFFTELEKTTLKFIWNQKRAHIAKSILSQKNKAGGITLPDFKLYYKATVTKTACLASGLSILSRAIRQEKETKGTQLGKEEVKLSLFADDMIVYLKNPIVSAQNLLKLISNFSKVSGYKINVEKSQAFLYTNNRQTESQIMSELPFTLASKRIKYLGIQLTSDVKDLFKENYKPLLKEIKEDTNKWKNIPCSW

SEQ ID NO: 43416 - protein, 519 aa, Homo sapiens
  DOMAIN (200)..(246): kw TRANSCRIPTASE REVERSE II ORF2 domain identified by eMATRIX, accession number DM01354O, p-value=1.000e-40, raw score of 8.73
MKAEIKMFFETSENKDTIYQNLWDTFKAVCRGKFIALNAHKRKQERSKIDTLTSQLEELEKQEQTHSKASRRQEITKIRAELKEIETQKTLQKINESRSWFFEKINTIDRPLTRLIKKKREKNQIDAIKNDKGDITTDPTEIQTTIREYYKHLYTNKLENLEEMDKFLDTNTLPRLNQEEAESLNRPITGAEIEAIINSLPTKKSPGPDGFTAEFYQRYKEELVPFLLKPFQSIEKEGILPNSFYEASIILIPKPVLEVLARAIRQEKEIKGIQLGKEEVKLSLFADDMIVYLENPTVSAQNLLKLISNFSKVSGYKINVQKSQAFLYTNNRQTESQIMSKLPFTIASKRIKYLGIQLTRDVKDLFKENYKPLLNEIKEDTNKWENIPCSWVGRINIVKMGILPKVIYRFNAVPIKLPMTFSTELEKTTFKFIWNQKRACIAKSILSQKNKAGGITLPDFKLYYKATVTKTARIQPAPADREDLDRTLMSASLTQEVHQSLHGFALHVPPPGNLLQVVI

SEQ ID NO: 43417 - protein, 1344 aa, Homo sapiens
  DOMAIN (37)..(83): kw TRANSCRIPTASE REVERSE II ORF2 domain identified by eMATRIX, accession number DM01354O, p-value=1.000e-40, raw score of 8.73
MDKFLDTYTLPRLNQEEVESLNRSITGSEIVAILNSLPTKKSPGPDGFTAEFYQRYKEELVPFLLKLFQSIEKEGILPNSFYEASIILIPKPGRDTSKKENFRPIPLMNIDAKILNKILAKRIQQHIKKLIHHDQVGFIPGMQGWFNIRKSINVIQHTNRAKDKNHMIISIDAEKAFDKIQQLFMLKTLNKLGIDGMYLKIRRAIYDKPTANIILNGQKLEAFPLKTGTRQGCPLSPLLFNIVLEVLARAIRQEKEIKGIQLGKEEVKLSLFADDMIVYLENPIVSAQNLLKLISNFSKVSGYKINVQKSQAFLYTNNRQTESQIMSELPFTLASKRIKYLGIQLTRDVKDLFKENYKPLLNEIKEDTNKWKNIPCSWVGRINIVKMAILPKVIYRLNAIPIKLPMPFFTELEKTTLKFIWNQKRARVAKSILSQKNKAGGITLPDFKLYYKAIVTKTAWYWYQNRDIDQWNRTEPSEITPHINNYLIFDKPDKNKQWGKDSLFNKWCWENGLAICRKLKLDPFLTPYTKINSRWIKDLNVRPKTRKTLEENLGITIQDIGMGKDFMSKTPKAMATKDKIDKWDLIKLKSFCTAKETTIRVNRQPTKWEKIFATYSSDKGLISRIYNELKQIYKKKTNNPIKKWAKDMNRHFSKEDIYAAKKHMKKCSSSLAIREMQIKTTMRYHLTPVRMAIIKKSGNNSTIHSSKDMDSTQMCINDTLYEESVEHIHHEIQSSHKKGVHILCSNMDGAESHFPKQTNARTESQILHVLTYKWELNDENTWTHGWGRHINGTKDKNHMIISIDAEKAFDKIQQRFMLKTLNKFGIDGTYLKIIRDDMIVYLENPIVSAQNLLKLISNFSKVSGYKINVQKSQAFLYTNNRQTESQIMSELPFTIASKRIKYLGIQLTRDVKDLFKENYKPLLNEIKEDTNKWKNIPCSWVGRINIVKIAILPKVIYRFNAIPIKLPMTFFTELEKTSLKFIWNQKRALITKSILSLKNKAGGIMLPDFKLYYKATVTKTAWYWYQNRDIDQCNRTEPSEITPHIYNYLICDKPEKNKQWGKVSLFNKWCWENWLAICRKLKLDPFLTPYTKINSRWIKDLNVRPKAIKTLEENLGNTIQDIGMDKDFMSKTPKAMATKAKIDKWDLIKLKSFCTAKETTIRVNRQPTQWEKIFATYSSDKGLISRIYNALRQIYKKKTNNPIKKDMDETGNHHSQHTIARTKNQTPHVLTHGWELNNENTWTQEGEHHTLGTVVWNQKSPSPSLMQKHKHNAEGGILTEKRPDRGWKTKAANVTSIPSKTERAWGIRRRWISDNQSHPASPIKQLELYPEGYGTPIKAVNTGQ

SEQ ID NO: 43418 - protein, 894 aa, Homo sapiens
  DOMAIN (316)..(361): kw TRANSCRIPTASE REVERSE II ORF2 domain identified by eMATRIX, accession number DM01354N, p-value=1.000e-40, raw score of 13.17
MVKGSIQQEELTILNIYAPNTGAPRFIKQVLSDLQRDLDSHTLIMGDFNTPLSTLDRSTRQKVNKDTQELNSALHQADLIDINRTLHPKSTEYTFFSAPHHTYSKIDHIVGSKALLSKCKRTEIITNYLSDHSAIKLELRIKNLTQSRSTPWKLNNLLLNDYWVHNEMKAEIKMFFETNKNKDTTYQNLWDAFKAVCRGKFIALNAYKRKQERSKIDTLTSQLKELEKQEQTHSKASRRQEITKIRAELKEIETQKTLQKINESRSWFFERINKIDRPLARLIKKKREKNQIDTIKNDKGDITTDPTEIQTTIREYYKHLYANKLENLEEMDTFLDTYTLPRLNQEEVESLNRPITGSEIVAIINSLPTKKSPGPDGFTAEFYQRAIYDKPTANIILNGQKLEAFPLKTGTRQGCPLSPLLFNIVLEVLARAIRQEKEIKGIQLGKEEVKLSLFADDMIVYLENPIVSAQNLLKLISNFSKVSGYKINVQKSQAFLYTKNRQTESQLMSELPFTIASKRIKYLGIQLTRDVKDLFKENYKPLLNEIKEDTNKWKNIPCSWVGRINIVKMAILPKVIYRFNAIPIKLPMTFFTELEKTTLKFIWNQKRARIAKSILSQKNKAGGITLPDFKLYYKATVTKTAWYWYQNRDIDQWNRTEPSEIIPHIYNHLIFDKPEKNKQWGKDSLFNKWCWENWLAICRRLKLDPFLTPYTKINSRWIKDLNVRPKTIKTLEENLGITIQDIGVGKDFMSKTPKAMATKAKIDKWDLIKLKSFCTAKETTIRVNRQPTTWEKIFATYSSDKGLISRIYNELKQIYKKKTNNPIKKWAKDMNRHFSKEDIYAAKKHMKKCSSSLAIREMQIKTTMRYHLTPVRMAIIKKSGNNRDMDEIGNHHSQ

SEQ ID NO: 43419 - protein, 383 aa, Homo sapiens
  DOMAIN (118)..(161): kw TRANSCRIPTASE REVERSE II ORF2 domain identified by eMATRIX, accession number DM01354T, p-value=1.000e-40, raw score of 9.48
MTKERYSILQAIMEKAGQNGWHVSAICVENFNDVSYRQLLEELDRRQEKKFVIDCEIERLQNILEQMQKRPLTKIQQPFMLKPLNKLGIDGTYLKIIRAIYDKLTANIILNGQKLEAFPLKTGTRQGCPLSPLLFNIVLEVLARVIRQEKKIKGIQLRKEEVKLSLFADDMIVYLENPIISGQNLLKLISNFSKVSGYKINVQKSQAFLYTNNRQTESQIMSELPFTIASKRIKYLGIQLTRDVKDFFTENYKPLLNEIKEDTNKWKNIPCSWIGRINIMKMAILPKVIYRFNAIPIKLPMTSFTELEKTTLKFMWSQKRARIAKTILSQKNKAGGIMLPDFKLSYKATVTKTAWYCYQNRYRSMEQNRALRNNTTHLQPSDL

SEQ ID NO: 43420 - protein, 67 aa, Homo sapiens
  DOMAIN (47)..(67): kw TRANSCRIPTASE REVERSE II ORF2 domain identified by eMATRIX, accession number DM01354W, p-value=8.640e-12, raw score of 12.64
LTFLTSSQTIKYLGIQLTRDVKENYKPLLNEIKEDTNKWKNIPCLWIGRISIVKMVILPKVHSACCQ

SEQ ID NO: 43421 - protein, 377 aa, Homo sapiens
  DOMAIN (264)..(311): kw TRANSCRIPTASE REVERSE II ORF2 domain identified by eMATRIX, accession number DM01354V, p-value=1.000e-40, raw score of 12.97
MEEKIHDTGLSNDFLDAAPKHSINGCILENLEYKLPSGGIRVLEAITSPMPDVLSVWPIDSTGRRSKGRRRDSGICSPGHFPAGLWLGTGWDPLPKAQPSPGPANCFPQSLTLPAVIVFRPPLLIPRQTGSGVDLWQTPTDLQLRVLTVRRKPNKQKGHPHQNPICTSPSPKTKALEVLVRAIRQEKEIQGIQLGKEEVKLSLFADDMIVYLENPMVSAQNLLKLISNFSKVSGYKINVQKSQALLYTNNRQTESQIMSELPFTIVSKRIKYLGIQLKRNVKDLFKENYKPLLNEIKEDTNKWKNIPCSWVGRINIVKMVILPKVSYRFNATPIKLPMTFFTELEKHYFKIHMEPKKSPHRQVNPKPKEQSWRHHAT

SEQ ID NO: 43422 - protein, 340 aa, Homo sapiens
  DOMAIN (71)..(88): Zinc finger C2H2 type, domain proteins. domain identified by eMATRIX, accession number BL00028, p-value=2.588e-14, raw score of 16.07
MLIMDEEQNRGQYSWNRVTERKGWLEARAPPGESSLIMNKLKCPHCSYVAKYRRTLKRHLLIHTGVRSFSCDICGKLFTRREHVKRHSLVHKKDKKYKCMVCKKIFMLAASVGIRHGSRRYGVCVDCADKSQPGGQEGVDQGQDTEFPRDEEYEENEVGEADEELVDDGEDQNDPSRWDESGEVYSQIMSELPFTIALKRIKYLGIQLTRDVKDLFKENYKPLLNEIKEDTNKWENIPCSWIGRINIVKMAILPKNWKKLKFIWNQKRARVAKTILSQKNKAGGTTLPDFKLYYKATVTKTAWYWYQNRDIDQWNRTEPSEIIPHIYNHLIFDKPDKNKK

SEQ ID NO: 43423 - protein, 402 aa, Homo sapiens
  DOMAIN (235)..(282): kw TRANSCRIPTASE REVERSE II ORF2 domain identified by eMATRIX, accession number DM01354V, p-value=1.000e-40, raw score of 12.97
VGFLGILFSLKHLENTLQDIIQENFPNLAKQANIQIQETQRTPQSYSSRRATPRHIIVRFTKVEMKEKMLRLNHEELESLNRPITGSEIQAIINSLPTKKSPESDGFTAKFYQSQYHTEWAKTGSIPFENRHKTGCPLSPLLFNIVVDVPARAIRQEKEIKGIQLGKEEAKLSLFADDMNVYLKIPIVSVQNLLKLISNFSKVSGYKINVQKSQAFLYTNNRQTESQIMSELPFTIASKRIKYLGIQLTRDVKDLFKENYKPLLNEIKEDTNKWKNIPCSWIGRINIMKMAILPKVIYRFNAIPIKLPMTFFTELEKTALKFIWNQKRACIAKTILSQKNKAGGITLPDFKLYYKATVAKTAWYWYQNSMVLVPKQRYRPVEQNRALGNNTIHLQPSDLRKT

SEQ ID NO: 43424 - protein, 648 aa, Homo sapiens
  DOMAIN (262)..(287): 7 kw REVERSE TRANSCRIPTASE RNA POLYMERASE domain identified by eMATRIX, accession number DM00895E, p-value=3.586e-10, raw score of 15.72
MKAEIKMFFETNENKDTTYQNLWDAFKAVCRGKFIALNAHKRKQERSKIDNLTSQLKELEKQEQTHSKASRRQEITKIRAELKEIETQKTLQKINESRSWFFERINKIDRPLARLIKKKREKNQIDTIKNDKWDITTDPTEIQTTIREYYKHLYANKLENLEEMDKFLDTYTLPRLNQEEVESLNRPITGSEIVAIINSLPTKKSPGPDGFTAEFYQRYKEELVPFLLKLFQSIGKEGILPNSFYEASIILIPKPGRDTTKKANFRPISLMNIDAKILNKILAKRIQQHIKKLIHHDQHINKAKDKNHMIISIDAEKAFDKIQQPFMLKTLNKLGIDGTYFKIIRAIYDKPTANIILNGQKLEAFPLKTGTRQGCPLSPLLFNIVLEVLARAIRQEKEIKGIQLGKEEVKLSLFADDMIVYLENPIVSAQNLLKLISNFSKVSGYKINVQKSQAFLYTNNRQTESQIMSELPFTIASKRIKYLGIQLTRDVKDLFKENYKPLLKEIKEDTNKWKNIPCSWVGRINIVKMAILPKVIYRFNAIPIKLPMTFFTELEKTSCGSLTEKPHAGFCRFRNHHQTGFSPAGANQRGPLAATLSGPGGEGQSAVARLTGEKKNHPGAQYANRLSPRVGRFINAAGTTGFPTGKRA

SEQ ID NO: 43425 - protein, 427 aa, Homo sapiens
  DOMAIN (149)..(194): kw TRANSCRIPTASE REVERSE II ORF2 domain identified by eMATRIX, accession number DM01354N, p-value=1.000e-40, raw score of 13.17
MKAEIKMFFETNKNKDTTYQNLWDAFKAVCRGKFIALNAHKRKQERSKIDTLTSQLKELEKQEQTHSKASRRQEITKIRAELKEIETQKTLQKINESRSWFFERINKIDRPLARLLKKKREKNQIDAIKNDKGDITTDPTEIQTTIREYYKHLYANKLENLEEMDKFLDTYTLPRLNQEEVESLNRPITGAEIVAIINSLPTKKSPGPDGFTAEFYQRYKEKLIVLEVLARAIRQEKEIKGIQLGKEELKLSLFADDMIVYLENPIVSAQNLLKLISNFSKVSGYKINVQKSQAFLYSNNRQTESQIMSELPFTIASKRIKYLGIQLTRDVKDLFKENYKPLLNEVKEDTNKWKNIPCSWIGRINIVKMAILPKVIYRFNAIPIKLPMTFFTELEKNYLKVHMEPKKSPHRQVNPKPKEQSWRHHTT

SEQ ID NO: 43426 - protein, 807 aa, Homo sapiens
  DOMAIN (388)..(413): 7 kw REVERSE TRANSCRIPTASE RNA POLYMERASE domain identified by eMATRIX, accession number DM00895E, p-value=3.333e-11, raw score of 15.72
MVKGSIQQEELTILNIYAPNTGAPRFIKQVLSDLQRDLDSHTLIMGDFNTPLSTLDRSTRQKVNKDTQELNSALHQADLIDIYRTLHPKSTEYTFFSAPHHTYSKIDHIVGSKALLSKCKRTEIITNYLSDHSAIKLELRIKNLTQSRSTTWKLNNLLLNDYWVHNEMKAEIKMFFETNENKDTTYQNLWDAFKAVCRGKFIALNAYKRKQERSKIDTLTSQLKELEKQEINKIDRPLARLIKKKREKNQIDTIKNDKGDITTDPTEIQTTIREYYKHLYTNKLENLEEMDTFLDTYTLPRLNQEEVESLNRPITGSEIVAIINSLPTKKSPGPDGFTAEFYQRYKEELVPFLLKLFQSIEKEGILPNSFYEASIILIPKPGRDTTEKENFRPISLMNIDAKILNKILANRIQQHIKKLIHHDQVGFIPGMQGWFNIRKSINVIQHINRAKDKNHMIISIDAEKAFDKIQQPFMLKTLNKLGIDGMYFKIIRAIYDKPTANIILNGQKLEAFPLKTGTTQGCPLSPLLFNIVLEVLARAIRQEKEIKGIQLGKEEVKLSLFADDMIVYLENPIVSAQNLLKLISNFSKVSGYKINVQKSQAFLYTNNRQTESQIMSELPFTIASKTIKYLGIQLTRDVKDLFKENYKPLLKEIKEDTNKWKNIPCSWVGRINIVKMAILPKVIYRFNAIPIKLPMTFFTELEKTTLKFIWNQKRARIAKSILSQKNKAGGITLPDFKLYYKATVTKTASVLVPKQRYRSMEQNRALRNNAAYLHYSDPLDKPEKNKHGGKASLIYKMAAGENWLAHM

SEQ ID NO: 43427 - protein, 898 aa, Homo sapiens
  DOMAIN (330)..(373): kw TRANSCRIPTASE REVERSE II ORF2 domain identified by eMATRIX, accession number DM01354T, p-value=1.000e-40, raw score of 9.48
MPMVEELYGNYGIMADTTERVGQHKDAYQVILDGVKGGTKEKRLAAQFILKFFKHFTELADSAINAHLQTVSGRQQLVKLVAEQADLEQTFNPSDPECVGRLLQCTQQAVPFFSKTVHSTRSVTYFCEQVLPNLGILTTAVEGLDIQLEVLKLLVEMSSFCGDMEKLETNLGKLFDKLLEYMPLPPEEAENGGNAGDEEPKLQFSYVECLLYSFHQLGQKLPDFLTAKLNAEKLKDFKIRLQYFARGLQVYIRQLHLALQVKQHINRAKDKNHMIISIDAEKAFDKIQQPFMLKTLNKLGIDGTYFKIIRAIYDKPTANIILNGQKLEAFPLKTGTRQGCPLSPLLFNIVLEVLARAIRQEKEIKGIQLGKEEVKLSLFADDMIVYLENPIVSAQNLLKLISNFSKVSGYKINVQKSQAFLYTNNRQTESQIMGKLPFTIASKRIKYLGIQLTRDVKDLFKENYKPLLNEMKEDTNKWKNIPCSWIGIINIVKMVILPKNWKKTTLKFIWNHKRACIAKSILSQRNKAGGITLPDFELYYKATVTKTAWYWYQNRDIDQWNRTEPSEITPHIYNHMIFDKPDKNKKWGNDSLFDKWCWENWLAICRKLKLDPFLTPYTKINSRWIKDLNVRPKTIKTLEESLGNTIQDIGIGKDFMSKTSKAMTTKAKIDKWDLIKLKSFCTAKETTIRVNRQPTEWENIFAIYSSDKGLISRIYKELKQIYKKKTTPSKAQNLLKLISNFSKVSGYKINVQKSQAFLYTNNRQTESQIMSELPFTIASKRIKYLGIQLTRDVKDLFKENYKPLLKEIKEDTNKWKNIPCSWVGRINIVKMAILPKKKKKKKKKKEKEKKGGEGGKREGGGREEGGGGGGEGEEGEGGEGGGRKEEEEGRKKEERRRK

SEQ ID NO: 43428 - protein, 398 aa, Homo sapiens
  DOMAIN (37)..(83): kw TRANSCRIPTASE REVERSE II ORF2 domain identified by eMATRIX, accession number DM01354O, p-value=1.000e-40, raw score of 8.73
MDTFLDTYTLPRLNQEEVESLNRPITGSEIVAIINSLPTKKSPAPDGFTAEFYQRYKEELVPFLLKLFQSIEKEGILPNSFYEASIILIPKPGRDTTKKENFRPISLMNIDAKILNKILANRIQQHIKKLIHHDQVSFIPGMQGWFNIRKSINVIQHINRAKDKNHMIISIDAEKAFDKIQQPFMLKTLNKLDIDGLEVLARAIRQEKEIKGIQSGKEEVKLSLFADDMIAYLENPIVSAQNLLKLISNFNKVSGYKINVQKSQAFLCTNNRQTESQIMSELPFTIASKRIKYLGIQLTRDVKDLFKESYKPLLNEIKEDTNKWKNIPCSWVGRINIVKMAILPKVIYRFNAIPIKLPMTFFTELEKTTLKFIWNQKKSPHCQDNPKPKEQSWRHHTT

SEQ ID NO: 43429 - protein, 299 aa, Homo sapiens
  DOMAIN (108)..(155): kw TRANSCRIPTASE REVERSE II ORF2 domain identified by eMATRIX, accession number DM01354V, p-value=1.000e-40, raw score of 12.97
  misc_feature (1)...(299): Xaa = X or * as defined in Table 2
KLAQDRDALSPPLLFNIVLEVLARAIRQEKEIKGIQLGKEEVKLSLFADDMIVYLENPIVSAPKSPLRLISNVSKVXGYKINVQKSQAFLYTNNTDKQESQIMSELPFTTASKRIKYLGIQLTRDVKDLFKENYKPLLKEIKEDTNKWKNIPCSWVGRINIMKMAILPKVNYRFINSMPSIPIKLPMTFFTELEKNYFKVHMEPKKSPHCQVNPKTKEQSWRHQRYLTSNYILQGYSNQKSTISMVLVPKQHGTGTKTEIIDQWNRTEPSEITPHIYNYLIFDKPLLEKNKQWGKGFPI

SEQ ID NO: 43430 - protein, 47 aa, Homo sapiens
  misc_feature (1)...(47): Xaa = X or * as defined in Table 2
MVEEKLTLPKDEKXKSKQRSIYRKTLQELKNKNEKRNRKNKWQVKTH

SEQ ID NO: 43431 - protein, 98 aa, Homo sapiens
MLRCLLFYFSSLGKDHPCRPPPPARPVSGHLMASLPAPPTSQAKPLDVRTLHHAAHCIFSLSWSPAPASPARTPGSWWPMRLGQPTGFCALPLNTKLP

SEQ ID NO: 43432 - protein, 120 aa, Homo sapiens
MNHAVQTVFTPANTSHPLNYEMLKEEHEVAVLRVPHNPVPPTSTVIHIHTFTYSVKSRDRKMVGDLTGAQAYASTAKCLNVCTLILGIRVTTTLIILFTSSSMIIFQAISQMIKNLQGQQ

SEQ ID NO: 43433 - protein, 125 aa, Homo sapiens
EVSLSTVPASGHHSGPSLHAENHTSQTFTQHFLPQSQKMHKEEHEVAVLGAPPSTILPRSTVINIHSETSVPDHVVWSLFNTLFLNWCCLGFIAFAYSVKSMDRKMVGDVTGAQAYASTAKCLNI

SEQ ID NO: 43434 - protein, 120 aa, Homo sapiens; identical to SEQ ID NO: 43432

SEQ ID NO: 43435 - protein, 125 aa, Homo sapiens; identical to SEQ ID NO: 43433

SEQ ID NO: 43436 - protein, 155 aa, Homo sapiens; identical to SEQ ID NO: 43365

SEQ ID NO: 43437 - protein, 62 aa, Homo sapiens; identical to SEQ ID NO: 43366

SEQ ID NO: 43438 - protein, 66 aa, Homo sapiens; identical to SEQ ID NO: 43367

SEQ ID NO: 43439 - protein, 43 aa, Homo sapiens
TCVVNPFLSHVTLQRGLPAKLVHLIYNGSPRAISHTLLFHFSA

SEQ ID NO: 43440 - protein, 557 aa, Homo sapiens
  DOMAIN (111)..(160): kw TRANSCRIPTASE REVERSE II ORF2 domain identified by eMATRIX, accession number DM01354Z, p-value=1.000e-10, raw score of 9.06
MAGGSWEQYPWGVSTFCDICSHITPYAFEYYEGPSHTGVYTSCDIGSNINLSASEYEEENHRGYGVCSVGLERLAYVFGAYSLGPQPPHSWACWACGCHAQCPSWLQQGYSVSASRNENTALFKIAKTWNQPKCPSMIGLEKEYVVHIRHGMLCSHQKEQENILCRDMDEAESHYPQQTNAETENQTPHVLTYKWKPNNENTRTQRGEQHTLGPTGGQRFGVIHSVFTNLLLWANGVLNESKHQLNEHKERLITLGFGNITTVLDDHTPQCNCTPPTLCTAISHGIYYLYPFNIEYQILASTMLYVLWKNIGRKVDSHQHQKMQFKSDGVMTKSESALIMFYLYAITLLMLMGAAGLAGIRIYRIDEKSLDESKNPARKLDSDLLVGTASGSWLISWGSILAILCAEGHPRYTWYNLPYSILAIVEKYIQNLFIFESIHREPEKLSEDIQTLRVVTVCNGNTMPLASSCPKSGGVARDVAPQGKDMPPAANGNVCMRESHDKEEEKQEESSWGGSPSPVRLPRFLQGNAKRKVLRNIAAFLFLCNISVICTKLFLFF

SEQ ID NO: 43441 - protein, 552 aa, Homo sapiens
MREHKGGHFGSLGFGVIHLVFTNLLLWANGVLNESKHQLNEHKEWLITLGFGNITTVLDDHTPQCNCTPPTLCTTISHGIYYNYYLYPFNIEYQILASTVLYVLWKNIGRKVDSHQHQKMQFKPDGVTVGTVLGLTALAATIAVVTKSESALITFYLYVITLMMLMGAAGLAGIRIYRTDEKSLDESKNPPRKLDSDLLVGTASGSWLISWGSILAILCAEDHPHYTWYNLPYSIVVIMEKYIQNLFIFESIHREPKKLSEDIQTLRMVTVCNGNTMSLASSCLKSGVVAGDVAPWGRDMPPAANGNVCLRESCDKEEKQEESSWGGNPSPVHLPRFLQGNAKRKVLRNIAAFLFLCNTLVQGVRMQICYMGKLRVAEVWCTNDPVTQVVPKASGREQELSSPASGASPEAPAAGADVHVQVEWAPLQRRTWKCASVASKWTNPVDREVEKEGVGNSSWAAIVDQMDQLSGKASLKGDMRQEGVGHACSGQREQRLLWIPPAFGCRPEYDNGLEEIVFGFEPWIIVVNLAMPFSIFYGMHAAASLFEVYCKI

SEQ ID NO: 43442 - protein, 411 aa, Homo sapiens
  DOMAIN (353)..(402): kw TRANSCRIPTASE REVERSE II ORF2 domain identified by eMATRIX, accession number DM01354Z, p-value=5.731e-20, raw score of 9.06
STWCSPTCFCGPTASSMSQSTNEHKEWLITLGFGNITTVLDDHTPQCNCTPPTLCTTISHGIYYIYYLYPFNIEYQILASTVLYVLWKNIGRKVDSHQHQKMQFKPDGVTVGTVLGLTALAATIAVVTKSKSALITFYLYVITLMKLMGAAGLAGIRIYRTDEKSLDESKNPPRKLDSDLLDHPHYTWYNLPYSIVVIVEKYIQNLFIFESIHREPKKLSEDIQTLRMVTVCNGNTMPLASSCLKSGGVAGDVAPWGRDMPPAANGNVCLRESCDKEEKHEESSWGGNPSPVHLPRFLQGNAKRKVLRNIAAFLFLCNTLVQGVRMQICYMGKLRVAEVWCTNDPVTQSAGITVPGPVRFITARLTIGKSWNQPSCPSVGYRIKQKWFFYSIEYYTAMKKNKIMSFAATWM

SEQ ID NO: 43443 - protein, 58 aa, Homo sapiens
  misc_feature (1)...(58): Xaa = X or * as defined in Table 2
GLHQLLDDMWKMIDELPAALKYTLSTAHHLYILSLPEQKIGQPHTEVGDGKGGDEDGX

SEQ ID NO: 43444 - protein, 28 aa, Homo sapiens
  DOMAIN (6)..(21): FUNGI-IV METALLOTHIONEIN SIGNATURE domain identified by eMATRIX, accession number PR00874C, p-value=9.031e-11, raw score of 4.37
EHVNRSSCCCCCCCCCCCCCCCCCCCCC

SEQ ID NO: 43445 - protein, 130 aa, Homo sapiens
  DOMAIN (60)..(105): RIBOSOMAL PROTEIN 40S ZINC-FINGER METAL domain identified by eMATRIX, accession number PD01457A, p-value=1.000e-40, raw score of 16.51
KPSDTIENVKAKIQDKEGIPPDQQRLIFAGKQLEDGRTLSDYNIQKESTLHLVLRLRGGAKKRKKKSYTTPKKNKHKRKKVKLAVLKYYKVDENGKISRLRRECPSDECGAGVFMASHFDRHYCGKCCLT

SEQ ID NO: 43446 - protein, 146 aa, Homo sapiens
  DOMAIN (26)..(78): Ubiquitin domain proteins domain identified by eMATRIX, accession number BL00299, p-value=1.000e-40, raw score of 28.84
VDHLRWSRTKMQIFVKTLTGKTITLEVEPSDTIENVKAKIQDKEGIPPDQQRLIFAGKQLEDGRTLSDYNIQKESTLHLVLRLRGGAKKRKKKSYTTPKKNKHKRKKVSRLRRECPSDECGAGVFMASHFDRHYCGRCCLTYCFNK

SEQ ID NO: 43447 - protein, 119 aa, Homo sapiens
  DOMAIN (33)..(54): UBIQUITIN SIGNATURE domain identified by eMATRIX, accession number PR00348A, p-value=8.851e-16, raw score of 7.86
  misc_feature (1)...(119): Xaa = X or * as defined in Table 2
EIVREGASFSIRHLRWSRHRKCRFSVKTLTGEDPSTLEVEPSDTIENVKAKIQDKEGIPPDQQRLVSFAGKQLEDGRDSLSGYNIQKGSLLLHPCVXDFRGGAKKKEEESLYTTSPRKD

SEQ ID NO: 43448 - protein, 138 aa, Homo sapiens
  misc_feature (1)...(138): Xaa = X or * as defined in Table 2
PVKVGAXGGQVINGVLAQVXLTVGPVGPRTHPVVIFPVPECRIGRDILSSWQNPHTGSLTGRVRAFMVGKAKWKPXELPLPRKTVNQKQYRIPGGIAEISATIKNLRRGVVIPTTSRFNSPIWPVQKTDGSWXTAADY

SEQ ID NO: 43449 - protein, 134 aa, Homo sapiens
  misc_feature (1)...(134): Xaa = X or * as defined in Table 2
HCCGIPHSIASEQDTYFMAKEVWQWAHAHGIHWSYHVPHHLEAAGLIEQWNGLLMSQLQHQLGDNTLQGWGKVLQKVVYALNQRSIYGTVSPIARIHGSRNQGVEVEVALLTVTPNDPLGKYXLPVPVTLHSDR

SEQ ID NO: 43450 - protein, 82 aa, Homo sapiens
GGQARLSQILHYWHRWSHDNLGFQDPRVFHPGPPDNVKLSEPPPSSMTNLWPTAAVPWHDGEEASPKETLKTHITPMPCGFV

SEQ ID NO: 43451 - protein, 37 aa, Homo sapiens
MWTARVVFAEPTGSQACRAPDAAPFPFQQTQLGNPST

SEQ ID NO: 43452 - protein, 143 aa, Homo sapiens
  DOMAIN (33)..(88): Histone H2A proteins domain identified by eMATRIX, accession number BL00046, p-value=1.000e-40, raw score of 12.95
MSGRGKTGGKARAKAKSRSSRAGLQFPVGRVHRLLRKGHYAERVGAGAPVYLAAVLEYLTAEILELAGNAARDNKKTRIIPRHLQLAIRNDEELNKLLGGVTIAQGGVLPNVQAVLLPKKTSATVGPKAPSGGKKATQASQEY

SEQ ID NO: 43453 - protein, 289 aa, Homo sapiens
  DOMAIN (33)..(88): Histone H2A proteins domain identified by eMATRIX, accession number BL00046, p-value=1.000e-40, raw score of 12.95
MSGRGKTGGKARAKAKSRSSRAGLQFPVGRVHRLLRKGHYAERVGAGAPVYLAAVLEYLTAEILELAGNAARDNKKTRIIPRHLQLAIRNDEELNKLLGGVTIAQGGVLPNIQAVLLPKKTSATVGPKAPSGGKKATQASQEVRAFRMRLGRSSGTSVARKTRACRGEAGGAAPARLGVRDSAAPSRVAKGLRGGRSTFWKTWPSALTQGRGLRWGRDEPLGNRHIFLPSDCLLGGHLGEGRGLQFGFTAGYVDSKSRFRGSRLAARPVGPPDAAPFPFQQTQLGNPST

SEQ ID NO: 43454 - protein, 185 aa, Homo sapiens
  DOMAIN (48)..(103): Histone H2A proteins domain identified by eMATRIX, accession number BL00046, p-value=3.085e-16, raw score of 12.95
  misc_feature (1)...(185): Xaa = X or * as defined in Table 2
CLSRRASPVYLASMSGRGKTGGKARAKAMSRSSRAGRPSSQVGRVHRLLRKGHYAERVGRRQPCCYLGGXCMEYLTSXESWSMAGNAARNNKKTRIIPRHLQLAIRNDEELNKLAWAALTIAQGSRVLPNIQARCCGPRXTSATVGPKAPSGGEERATQASARSTKRARAAAGRPSVPMPPQRPF

SEQ ID NO: 43455 - protein, 100 aa, Homo sapiens
MRYYLTPVRMAIIKKSENNRCWRGCGETRMLLHCWFECKLVQLLWKTVWRFLKDLESEIPFDLAIPLLCIYPKDYTSFCYKDTCTCMFIAALFTIAKTWN

SEQ ID NO: 43456 - protein, 183 aa, Homo sapiens
MARLILERFLQEHEETPPSKSIINSMLRDPSQIPDGVLANQVYQCIVNDCCYGPLVDCIKHAIGHEHEVLLRDLLLEKNLSFLDEDQLRAKGYDKTPDFILQVPVAVEGHIIHWIESKASFGDECSHHAYLHDQFWSYWNRFGPGLVIYWYGFIQELDCNRERGILLKACFPTNIVTLCHSIA

SEQ ID NO: 43457 - protein, 207 aa, Homo sapiens
MADKSNVKMWSGDHLYLQTSTERELEIDGSHLFLCAVESRDEDQLRAKGYDKTPDFILQVPVAVEGHIIHWIESKASFGDECSHHAYLHDQFWSYWNSTIHNSKDVESTQMPINDTVNKENVVHIHHGILCSHKKEQDHVLRRVMDGAGSHYAQQTNAGTENQTLHVVTCFHREQNKHSTPPRYIEGCRTPAVGSGTSGAIEESQKE

SEQ ID NO: 43458 - protein, 80 aa, Homo sapiens
MERNNSLNSYFPRSRNRCTYSCWVPCHTMHPGLVQRLIKISLTKTSLHYPPPYPEKLLLLENQAKQLSQDMLKKLLKRKL

SEQ ID NO: 43459 - protein, 231 aa, Homo sapiens
  misc_feature (1)...(231): Xaa = X or * as defined in Table 2
WVYLFXPSCKGVIYPXAAGFESIFWWVTINKNIDWINYIYYNQQQFMNYTRDAVKGIAEQLGTNCQMAWENRIALDMILAERGGVCIMIKTECCAFIPNNTAPNGSITKALQGLTALSNELASSSGVNDPFTGWLEKWFGKWKGITASILTSLTAVMGVLILVGCCVIPCICGLVQRHRGPPLVVIETKPLGLERLAGLPVGHALKLGSGIQATPQNGENADRREAFPAAS

SEQ ID NO: 43460 - protein, 180 aa, Homo sapiens
MKINMSLSLILTLNLTVTLSLAGTMNLTEDDQQGACEPPCRTPEKPPPPPCSYCGRQRRARSEEENLIFLNTDLRGHRLTLRQLEAASVWSTECRTNYGIKAPPRMGQDSWLTLGSLLKSSQIKWSQFTNAQSEESQEEQSKASYFYSRLRLTDGAMDAWYDTAPNKNKYTYYGCEGSKN

SEQ ID NO: 43461 - protein, 46 aa, Homo sapiens
  DOMAIN (23)..(36): Heat-stable enterotoxins proteins domain identified by eMATRIX, accession number BL00273, p-value=2.500e-09, raw score of 12.24
HLDTIRRWLVAGCFVFCMCLYCCCCCCCCCCCFSCQFTVTLVWILC

SEQ ID NO: 43462 - protein, 113 aa, Homo sapiens
SHAWAHAKRRLVSVYRTCLGWQFPWGREEAWWELGPAWQTKPVGTQACPPPWPGVEKRVCKAKPYAPLSICPPDVLRFDNTYSFVHAKKVSFTVEVLLPDEGMQKYDKELTPV

SEQ ID NO: 43463 - protein, 75 aa, Homo sapiens
YEVRRFPPEARGGDGMKGNPPEPSETSQQEIAQEMEVGEDVMCSLKGSLLVPQFFGLLEENYPETLKFMLIVKGM

SEQ ID NO: 43464 - protein, 419 aa, Homo sapiens
  DOMAIN (196)..(230): CRAL/TRIO domain proteins domain identified by eMATRIX, accession number PF00650D, p-value=8.754e-10, raw score of 24.34
MSGRVGDLSPKQAETLAKFRENVQDVLPALPNPDDYFLLRWLRGEGRARNFDLQKSEALLRKGTGSPVGSYHSFPFQYMEFRKTMDIDHILDWQPPEVIQKYMPGGLCGYDRDGCPVWYDIIGPLDPKGLLFSVTKQDLLKTKMRDCERILHECDLQTERLGKKIETIVMIFDCEGLGLKHFWKPLVEVYQEFFGLLEENYPETLKFMLIVKATKLFPVGYNLMKPFLSEDTRRKIIVLGNNWKEGLLKLISPEELPAQFGGTLTDPDGNPKCLTKINYGGEIPKSMYVRDQVKTQYEHSVQINRGSSHQVEYEILFPGCVLRWQFSSDGADIGFGVFLKTKMGERQRAGEMTDVLPSQRYNAHMVPEDGNLTCSEAGVYVLRFDNTYSFVHAKKVSFTVEVLLPDEGMQKYDKELTPV

SEQ ID NO: 43465 - protein, 126 aa, Homo sapiens
  DOMAIN (49)..(82): Ribosomal protein L24 proteins domain identified by eMATRIX, accession number BL01108A, p-value=1.500e-19, raw score of 20.33
MKFNPFVNLDRSKNRKRHFHAPLHVHRKIMSSPLSKELRQKYNVRSTPIRKDDEVQVVQGHYKGQQIGKVVQVYRKKDVIYTEQVVITRLNLNKDRKKIIEHKAKSRQVRKEKGKYKEELIEKMQE

SEQ ID NO: 43466 - protein, 381 aa, Homo sapiens
  DOMAIN (194)..(232): Inorganic pyrophosphatase proteins domain identified by eMATRIX, accession number BL00387B, p-value=9.000e-27, raw score of 27.02
MVYSNVLVLHIHSPVTDSLTAISSPASSIHGPLGMNQGTKKPTKPQNTLITMRGTRVTMKFNPFVTSDRSKNRKRHFNAPSHVRRKIMSSPLSKELRQKYNVRSMPIRKDDEVQWWRLDSGTMSGFSTEERATPFSLKYRVFLKNEKGQYMSPFQDIPIYADKDVFHVVVEVPLWSNAKMEVATKDPLNPIKQDVKKRKLRYVANLFPYKGYVWNYGAIPQTWEDPGHNDKHTGCCGDNDPIDVCEIGSKVCARGEIIGVKVLGILAMIDEGETDWKVIAINMDDPDAGNYTDISDVKRLKPGYLEATVDWFRSTHDHWKALVTKKMNGKGISCMNKTVSESLFKCDPDAARAIVDALPPPCESACTVPTDVDTWFHHQKN

SEQ ID NO: 43467 - protein, 159 aa, Homo sapiens
  DOMAIN (60)..(93): Ribosomal protein L24 proteins domain identified by eMATRIX, accession number BL01108A, p-value=9.151e-13, raw score of 20.33
SDSELNRPRVTMKFNPFVTSDRSKNRKRHFNAPSHVRRKIMSSPLSKELRQKYNVRSMPIRKTDEVQVVRGHYKGQQIGQGSPRCTRKKYVIYIERVQREKANGTNCSTWGISPKARWLFTRLKLDKDRKKILERKAKSRQVGKEKGKYKEELIEKMQE

SEQ ID NO: 43468 - protein, 173 aa, Homo sapiens
AAAGYFAEDCEASCVCVKHPPSVKKARCFLSELIKKPSGGSVTLSESTAIISHGTTGLVTWDATLYLAEWAIENPAAFTNRTVLELGSGAGLTGVAICKMYRPRAFIFSDCHSRVLEQLRGNVLLNGLSLEADITANLDSPRVTVAQLDWDVATVHQLSAFQPDVVIAADVLY

SEQ ID NO: 43469 - protein, 62 aa, Homo sapiens
QPVLHTHRMLHSLPGEGTQCARRQEAALETLQQEFGPRVLLGHQDGGGAAALPGDRAEAEPG

SEQ ID NO: 43470 - protein, 501 aa, Homo sapiens
  DOMAIN (284)..(303): RHO PROTEIN GDP DISSOCIATION INHIBITOR SIGNATURE domain identified by eMATRIX, accession number PR00492B, p-value=8.141e- 09, raw score of 9.77
MHKFTTNNTEITVSLYSKELFFILPSLKLEYTLQSLGNKAASSHYSRGGAKYEGEAVKQSLVESYTHPNSNETERSANIDTVMNWFTKEDFDFVTLCYREPDNVGHRFRPEAENRKLMIQQIDRTIRPWDDHREEETQCQQDPLSNYIKFMDLVKFDIVGYGGFGMPLPKLGQEEALYQALKNAYPHLHIYKKEGFPEHFHLAKHDRVLPIVMYANFGYSINGISLLYFYTHLCDKYFNVHFFHEPLSLWRAQTTPSLSHRYISLVRHMDATNLDASEAQLPGSPYPDSAPGPANLDSTQDLPQRRLSWPYPRPRPPNAHPGPALQPAPRTLLLTLPPGPAPSLPPRTALGPPPLQSRPGFRPVSRQRCGPAHFMAPEENAGTELLLQSFERRFLAARTLRSFPWQGGGGRAERPAGLAGVQGQTGWVSVLKPPALLPREFLGSPRSGPRDPVPVPGAWPKSLAPLLPRELAAEDEGVSTALGGQTRARCGVQFTIIFTTF

SEQ ID NO: 43471 - protein, 112 aa, Homo sapiens
  misc_feature (1)...(112): Xaa = X or * as defined in Table 2
FFFANTFYCVFNVLVNAPLRFLSLPSTQSLEAKLRDSSDSELRRDILQKVRIPESLGLMTLPPESLRKTXEKNRRCACTLXKTPVQRTKPLSQHCRWVWAPPTAPALSFSKT

SEQ ID NO: 43472 - protein, 197 aa, Homo sapiens
NSWVEQLRGNVLLNGLSLEADITANLDSPRVTVAQLDWDVATVHQLSAFQPDVVITADVLYCPEAIVSLVGILRRLAACREHQQAPEVYVAFTVHNPETCQLFTTELGQGGIIWGSGSSFMTRNCFPMGEHLEMGNAESHPVGLTHDSNGIVRIKSLSWEEFLYGKADKTFIGLECLENVNFQIRNHKLPSNKTSAI

SEQ ID NO: 43473 - protein, 490 aa, Homo sapiens
MAPEENAGTKLLLQSFERRFLAARTLRSFPWQVGGGASGEACGACGSPGADGMGLPAETPGAPATEGSHSALPTHSIACFNVPVNAPLRFLSLPSTRSLEAKLRDSSDSELLRDILQKHEAVHTELLDELYEALAETLMAKESTQGHWSYLLPRYPSCTDKVKTPRKARSHSPSTAIISHGTTGLVTWDAARYLAEWAIKNLAAFTNRTVLELGSGAGLTGLSICKMCHPRTYIFSDCHSRVLEQLRGNVLLNGLSLEADITANLDSPRVTVAQLDWDVATVHQLSAFQPDVVITADVLYCPEAIVSLVGVLRRLAACWEHQWAPEVYMAFTVRNPETCQLFTTELAPSTCEGVLSLSHLTDKNTRTHRGQETPELPQIAARPPGFSAFTVHPSPPLPPDFAPAPPEHSPSWQPCAKMHPQQPLPAHRDMDDPVPVHVGQPVNYRANKQASTRRHTGFHDRVPHNLAQEAGQAWGSGLSSQHFRRLRQED

SEQ ID NO: 43474 - protein, 425 aa, Homo sapiens
  misc_feature (1)...(425): Xaa = X or * as defined in Table 2
XPSQSRLGFRPVSRQRCGPAPVLVPEENAGTELLLQSFERRFLAARALRSFPWQSLEAKLRDSSDSELRRDILQKTVKHPVCVKHPPSVKYARCFLSELIKKHEAVHTEPLDELYEALAETLMAKESTQGHRSYLLPSGGSVTLSESTAIISYGTTGLVTWDAALYLAEWAIENPAVFTNRTVLELGSGAGLTGLAICKMCRPRAYIFSDCHSRVLEQLRGNVLLNGLSLEADITANLDSPRVTVAQLDWDVATVHQLSAFQPDVVIAADVLYCPKAIVSLVGILRRLAACREHQQAPEVYVAFTVHNPETCQLFTTELAPSTCEGVLSLSHLTDKDIRTHRGQATLELLQTAARPPGSRASTIHPSLPMPRASAPAPPEHSPSWQPCAQMHPQQPLPAHRDTDNPVPVHVGQPVNYRANKQAST

SEQ ID NO: 43475 - protein, 97 aa, Homo sapiens
EHTPSVTFLDSDTFMVIIALKLSSSLSSFPSRSCMPRGPGTGSQRRPSSRGIASAASFLHHQRSNAHRGSRLQFQQNNAESTIVPIKGKDRKPGNLV

SEQ ID NO: 43476 - protein, 334 aa, Homo sapiens
  DOMAIN (60)..(73): LDL-receptor class A (LDLRA) domain proteins domain identified by eMATRIX, accession number BL01209, p-value=4.115e-10, raw score of 9.31
DGSDLSLARRLPRRDSARVGAQACPGSSMPEAGFQATNAFTECKFTCTSGKCLYLGSLVCNQQNDCGDNSDEENCLLVTEHPPPGIFNSELEFAQIIIIVVVVTVMVVVIVCLLNHYKVSTRSFINRPNQSRRREDGLPQEGCLWPSDSAAPRLGASEIMHAPRSRDRFTAPSFIQRDRFSRFQPTYPYVQHEIDLPPTISLSDGEEPPPYQGPCTLQLRDPEQQMELNRESVRAPPNRTIFDSDLIDIAMYSGGPCPPSSNSGISASTCSSNGRMEGPPPTYSEVMGHHPGASFLHHQRSNAHRGSRLQFQQNNAESTIVPIKGKDRKPGNLV

SEQ ID NO: 43477 - protein, 316 aa, Homo sapiens
  DOMAIN (60)..(73): LDL-receptor class A (LDLRA) domain proteins domain identified by eMATRIX, accession number BL01209, p-value=4.115e-10, raw score of 9.31
DGSDLSLARRLPRRDSARVGAQACPGSSMPEAGFQATNAFTECKFTCTSGKCLYLGSLVCNQQNDCGDNSDEENCLLVTEHPPPGIFNSELEFAQIIIIVVVVTVMVVVIVCLLNHYKVSTRSFINRPNQSRRREDGLPQIMHAPRSRDRFTAPSFIQRDRFSRFQPTYPYVQHEIDLPPTISLSDGEEPPPYQGPCTLQLRDPEQQMELNRESVRAPPNRTIFDSDLIDIAMYSGGPCPPSSNSGISASTCSSNGRMEGPPPTYSEVMGHHPGASFLHHQRSNAHRGSRLQFQQNNAESTIVPIKGKDRKPGNLV

SEQ ID NO: 43478 - protein, 65 aa, Homo sapiens
TLWHSDCKNMQRSARWPEIFFTFRSFHYNSYHHIKHRSSNYTGYRWPKHRNNSRSSHRTFYYRHY

SEQ ID NO: 43479 - protein, 121 aa, Homo sapiens
  misc_feature (1)...(121): Xaa = X or * as defined in Table 2
PPCAVVCLLWIAAVYCLSTTFCAPLCGQNTWLPKPCRHVNRAASNASVSLSTVTLFSRLSXPQRKGSELLDSSGPLPASPSLPLCSGVSPRAGLGSAWPKIPFLGIREAKNPRSENTRLTT

SEQ ID NO: 43480 - protein, 24 aa, Homo sapiens
  misc_feature (1)...(24): Xaa = X or * as defined in Table 2
KCSSNGAPDAVHEXDLPWTPGPAC

SEQ ID NO: 43481 - protein, 158 aa, Homo sapiens
MAPAHAITLTEPRVCLTIEGQEVNCLLDTAIWREREFLTSKGTPIKHQEAIKRLLLAVQKPKEVAVLHCWDHQKGKEREIEGNHQADIETKRAARIEAVKLQIVLQMEPQMQSMTKIYCGPLDRPTSPCFDVDDIEGTPHEEISTARPLLCPNSAGSS

SEQ ID NO: 43482 - protein, 235 aa, Homo sapiens
PLSSSMAAELEFAQIIIIVVVVTVMVVVIVCLLNHYKVSTRSFINRPNQSRRREDGLPQIMHAPRSRDRFTAPSFIQRDRFSRFQPTYPYVQHEIDLPPTISLSDGEEPLLYQVPCTLQLRDPEQQMELNRESVRAPPNRTIFDSDLIDIAMYSGGPCPPSSNSGISASTCSSNGRMEGPPPTYSEVMGHHPGASFLHHQRSNAHRGSRLQFQQNNAESTIVPIKGKDRKPGNLV

SEQ ID NO: 43483 - protein, 368 aa, Homo sapiens
  DOMAIN (224)..(259): Prion protein domain identified by eMATRIX, accession number BL00291A, p-value=6.855e-10, raw score of 4.49
  misc_feature (1)...(368): Xaa = X or * as defined in Table 2
FYSFDSARGEPARPWRVRGLEGRVELGQQLGLLTLGPAFPGGLGGTQRVGLPGPAGPGAGEEGQAGPAEAGQVPVGGLADEAVEHGVGDAVEAGEQEGEVVGVENALGEVAAGLPDAAHQQQHVVGQEAGQEDDHGAEHQPLDLVLAALLGAVAPAHGAQDALVGRQQQADGEEEALPGSGSSXWHAAMPGWGSAQSTRGAGSRPRXPPRASGSRCWSAAPWPRXPRXRRRPPSGSGTGGSGRDGPQPGSGPRTMQQRKPTLMXMFSYRRIRTPGRTGRRETSCRAAARTAARRAASRCRRGRPPSGCTGTRPARSGPXSAGSEVEGQAVGREAHHQHGNIDHRGQRLVDGMVDGTAHRGVVCSDVPH

SEQ ID NO: 43484 - protein, 204 aa, Homo sapiens
  misc_feature (1)...(204): Xaa = X or * as defined in Table 2
MANVGQARGILGQCEQESKGQAVEHVRGMKAWLQALALITXELEFAQIIIIVVVVTVMVVVIVCLLNHYKVSTRSFINRPNQSRRREDGLPQEGCLWPSDSAAPRLGASEIMHAPRSRDRFTAPSFIQRDRFSRFQPTYPYVQQETDLPPTISLSHGVEPPPYQGPCTMQLRDPDQQMELNRESVRAPPNRTIFDSDLIDICYV

SEQ ID NO: 43485 - protein, 485 aa, Homo sapiens
HIYGHHCAQTVFKPLLFSFQIMHAPRSKDRFTAPSFIQRDRFSRFQPTYPYVQHEIDLPPTISLSDGEEPPPYQGPCTLQLRDPEQQMELNRESVRAPPNRTIFDSDLIDIAMYSGGPCPPSSNSGISASTCSSNGRMEGPPPTYSEGHEKGEKNGHFSTAGLARSTAQDKRQDGPAQDWNLVQFLLQLVWPYECGLSLCSWALLGSLSSEPSDLLGGTTDSHGCGQQTHTVVATGEAPPDLCLHRPTYERIHLTDMPPHWPGPEPCCGTSELEFAQIIIIVVVVTVMVVVIVCLLNHYKVSTRSFINRPNQSRRREDGLPQVSPGSLLPDVALPASELCTNGTGPGWSLVPGSSGLAVHFTLCPEHQHTGHTLTNQEAQQKSKKCQKSVFCVMWRQICVMPFPGKRWLPHLQSLPSLKSGRIEAVKLQIVLQMEPQMQSMTKIHCGPLDRPASPCSDVDDIKGTPPEELSTARPLLCPNSAGSS

SEQ ID NO: 43486 - protein, 95 aa, Homo sapiens
MEYYAAIKRNEIMSFAGTWMELEAIILSKLMQERKTRYHMFSLIAFSQHSNFMDLVQFFVTFFRRVFDEQLYVNEFENETDGMGPLKEKYATCQN

SEQ ID NO: 43487 - protein, 187 aa, Homo sapiens
  DOMAIN (10)..(59): kw TRANSCRIPTASE REVERSE II ORF2 domain identified by eMATRIX, accession number DM01354Z, p-value=1.000e-40, raw score of 9.06
QTEYKSFCYKDTCIHMFTAALFTVAKTWNQPKCPLMIDFIKKMWYIYTTEYYAAIKRNEIMSFAGTWMELEAIILSKLMQEQKTKHCMFSLKGQSKLETGKPIEIIQEWDFRDLDQGSNSREGKKRLDFAYVVKMAVITYSQCKNSKIIESITDDNHGFTCDKIVTLRSETMKTKPNQQAPISIHIS

SEQ ID NO: 43488 - protein, 101 aa, Homo sapiens
TTLSWLLCSWLCPGPEQVSKAEQGLDAPSGGWWSGSQEMGKEAPHTGSSIFFLSRKQQTGINRKLHRHIHSFRQIWQQDDDIQQVSNKRMQEKHIWKNRSE

SEQ ID NO: 43489 - protein, 159 aa, Homo sapiens
MKLMETLNQCINAGHEMTKAIAIAQFNDDSPEARKITRRWRIGEATDLVGGSSQAIRDAEKAGRLPHPDMEIRGTPLSKYPAVINDISFWLPSENYAENDFYDLVRTIGGDLVEKVDLIDKFVHPKLTPCSGDCWPATSCSQSQMGLPESVHCQSELRC

SEQ ID NO: 43490 - protein, 308 aa, Homo sapiens
MSSEKLKCTCGKFDTSSIQQQNFSISIKEVCCYIKGGNPLEYPHRAGISVPTSWFMSAKAFILRTHKTSHCYRITYRHMERTLSQREVRHIHQALQEAAVQLLVLQRAGFKEGTNEMPGLSSNVKGGCSAPGFAQVLNKSAKLNRVLMLPAVAGGQAAKKWERKPLNTGSSIFFLSRKQQPISKLMGFAQEESGAGTLLGALDQAQDHAGDLSSLDFTVYIIISILVTTIYPDSKKQQISLIFLSSSESSKLFQPLHVTQFQSYFHIIRDTQLVSLRTRVFPKETGLWVNGPSVGKSAFNVGRYQPTD

SEQ ID NO: 43491 - protein, 314 aa, Homo sapiens
MVGSALRRGAHAYVYLVSKASHISRGHQHQAWGSRPPAAECATQRAPGSVVELLGKSYPQDDHSNLTRKVLTRVGRNLHNQQHHPLWLIKERVKEHFYKQYVGRFGTPLFSVYDNLSPVVTTWQNFDSLLIPADHPSRKKGDNYYLNRTHMLRAHTSAHQWDLLHAGLDAFLVVGDVYRRDQIDSQHYPIFHQLEAVRLFSKHELFAGIKDGESLQLFEQSSRSAHKQETHTMEAVKLVEFDLKQTLTRLMAHLFGDELEIRWVDCYFPFTHPSFEMEINFHGEMAGSSWLRGDGTTTGQFSWCSRPNRLGLWA

SEQ ID NO: 43492 - protein, 134 aa, Homo sapiens
  DOMAIN (7)..(54): kw TRANSCRIPTASE REVERSE II ORF2 domain identified by eMATRIX, accession number DM01354V, p-value=1.000e-40, raw score of 12.97
MSEFPFTIATKRIKYLGIQLTRDVKDLFKENDKPLLNEIKEDTNKWKNIPWSWIGRISTVKMAILPKWASSQDRAYRIPDVQTPSASSFPVFGCCIDPPRGPAVHCSDEAFHRGKCLPWSALRIRIAQAGRSPP

SEQ ID NO: 43493 - protein, 64 aa, Homo sapiens
RDPRHNPSSAFQAGGIALLMLITRGEDLTGGVIHQYPGPGMNLWMQGTAGNQRRAAENAAQQQT

SEQ ID NO: 43494 - protein, 174 aa, Homo sapiens
VTETALTLPYLVAKHGYFLPQDLAKRTETMNWLFWLQGAAPFLGGGFGHFYHYAPVKIEYAINRFTMEAKRLLDVLDKQLAQHKFVAGDEYTIADMAIWPWFGNVVLGGVYDAAEFLDAGSYKHVQRWAKEVGERPAVKRGRIVNPTNGPLNEQLHERHDPSDFQTNTENNRQG

SEQ ID NO: 43495 - protein, 83 aa, Homo sapiens
  DOMAIN (34)..(60): Ribonucleotide reductase small subunit proteins domain identified by eMATRIX, accession number BL00368B, p-value=1.486e- 15, raw score of 22.06
MRVFTGLTLLGTLQNVIGAPSLMPDALTPHEEAVLSNISFMEAVHARSYSSDFSTLCQTKDVDGAYAWSEEKAPWQGKAQAEI

SEQ ID NO: 43496 - protein, 163 aa, Homo sapiens
MERTGKGMTPAGPTGSTTQVQSEVRIVGFGGGLEAAQVGQDVGDPVGHGHGVHTAIVAGCGSHYLLQMRERLFDLAARYRFIWLRRTVLSVEMLEDKHDQHQLILFSRSLLTHNKLAKDIRVPTTCCPGVSLRNLTIFQSFFSFYGDPLESPEAGLYLTRFIG

SEQ ID NO: 43497 - protein, 130 aa, Homo sapiens
HSVPSTLTGTNGPSLHRTVLGLWDGFFASLGVTALLAATPALVGRENLMQAGAITMLTVRLGSVISPMIGGLLLATGGVAIAGCVFVLLDGVPCAFAGWCVGHCCVCVFAGLGPLVFFSVFLIVGRPLSM

SEQ ID NO: 43498 - protein, 32 aa, Homo sapiens
TNSSSGPGDPFRWTAPDMLDVKEHRCRYPYRS

SEQ ID NO: 43499 - protein, 370 aa, Homo sapiens
  DOMAIN (192)..(235): Flagella transport protein fliP family proteins domain identified by eMATRIX, accession number BL01060A, p-value=3.893e- 40, raw score of 15.65
MGSKIFHNLIPYCTTGRIRRLRRIRQQCQLPDATLARLIRPTNSRTIRRPDKAFTPHPATQHEETTQDDEVNTANRSEHADEASREQKRQRQRCLHRRYNSQPWRAAQTATSLVRTTPIRTPNRKPPQAHRPPSKSGSPKNPCPGKPRPKKYPRSSLEDPQLQITPGFCFTSQTLVLITSLTFIPAILLMMTSFTRIIIVFGLLRNALGTPSAPPNQVLLGLALFLTFFIMSPVIDKIYVDAYQPFSEEKISMQEALEKGAQPLPLSGVNSDVYVAATTKSIGFAGKTVVVQGDALGIAGIQFTSGQHRLYLADKMWKYHIQLRTFGVTKLTGDTGPVSQIVQLVALLHQTCSQARRDISLQAPCGVAHS

SEQ ID NO: 43500 - protein, 198 aa, Homo sapiens
  DOMAIN (93)..(115): FLAGELLAR BIOSYNTHETIC PROTEIN FLIP SIGNATURE domain identified by eMATRIX, accession number PR00951E, p-value=1.360e- 24, raw score of 12.13
MSPVIDKMYVDAYQPFSEEKISMQEALEKGAQPLREYMLRQTREADLGLFARLANTGPLQGPEAVPMRILLPAYVTSELKTAFQIGFTIFIPFLIIDLVIASVLMALGMMMVPPATIALPFKLMLFVLVDGWQLLVALVTGLIISILQAATQINEMTLSFIPKIIAVFIAIIIAGPWMLNLLLDYVRTLFTNLPYIIG

SEQ ID NO: 43501 - protein, 80 aa, Homo sapiens
MVSSLRDRPLPQDLVVFGEVGLAGEIRPVPSGQERISEAAKHGFRRAIVPAANVPKKAPEGMQIFGVKKLSDALSVFDDL

SEQ ID NO: 43502 - protein, 225 aa, Homo sapiens
MTGRITPERFVELTSAMPARLFGTVHPPSVDALFDAASLIIILMIAGREQPARCHAVIECNRADRRGEAGGFVVDWAASSCLHRLYCTLLRLRSLRAADAAVISLHSKGRIHTDSSDNQSGRNFYSSDCCLEKMIISLCDEHCHSASERCFCDAPQKPERARGQPPTKHRTTQAQKRKGPFTGNGKTQTGKNQPGGAGAQQRKTHGFRGNTGKKGKPLRRYRETL

SEQ ID NO: 43503 - protein, 63 aa, Homo sapiens
VGSVRMDVTFAAFRQTNSAASSAGVENRMQLLFSSGVMTGRITPERFVELTSAMPARLFGSAM

SEQ ID NO: 43504 - protein, 142 aa, Homo sapiens
  DOMAIN (41)..(53): ABC transporters family proteins domain identified by eMATRIX, accession number BL00211A, p-value=8.000e-13, raw score of 12.23
MPAENIVEVHHLKKSVGQGEHELSILTGVELVVKRGETIALVGESGSGKSTLLAILAGLDDGSSGEQRVALARAFNGRPDVLFADEPTGNLDRQTGDKIADLLFSLNREHGTTLIMVTHDLQLAARCDRCLRLVNGQLQEEA

SEQ ID NO: 43505 - protein, 1048 aa, Homo sapiens
  misc_feature (1)...(1048): Xaa = X or * as defined in Table 2
XVGIRWKVWRLLLVLTVSSTCAYCAERGGAAACVSDPRINPEYSHAATSPPPALWRGRSRPYRTPAVSGEHRWRRAFRKPEYYRPENVSQYRCQRGHTTIARPSAPIAIKPSSNDRLILRYFYRTYRGNERTAELRQDPVYGSYQHKNIMMYMMISLIPIAFTPVSMLFIGGCGVNALSAYMCNPRRLDKTRQASHRQLHRATGGCGVNALSPYMCNPVDKSGPGGGTRVTAQTNIFSAGCAMRRNARCRPTSPGVYHPIRIRHLRVKRTTRIISNPALLRFDTTEGRRKKKKKGTERNARKNRTQEAKERTRPVNATERNGTGPQRPDTRDAERGREGTEGTEGREGNGGDVNGEAGRPTQQTRPQHSTHPNLPTPEHYANLALNQNRRQKHDRKANSATAEFPRENAQKTGGNTKRPNLTNDRPQPRTQRTRSPRRTPKATKDKELSDTRHNEAASASGKSRQAKQRSEHRTTDHRHTQRNTHKTPNTPPHKPTHTHPQQPPAITLLTHHSSKTQTTTNTTQHEQGTIPSINVLIMGEVRSSCNKPKPFGLYVGTSNAGAIEQRINGKVVAPGFTVSNQKAVKSGTLLYCRCKCRSPGRGPQTVLICIINGAEITRAGNDTTSRRASSGALNTRNRQSRDRFALLIVLYQTCIVVFEQLRAKVNFTPRCVAGSTENIRTRRRNPFPYGRTERPVDGSQRMPERFFGVVLNTVISLRVIVASVSAVCAKSCAIDCRMEKSNAGFARRQYQNLPRMPPRKKRSNAAGTAHGGHSIEPLINRLRSIPETCRHSSAAPVSQTTKTKHTARQGSKANSNKQRQGKEGSNSNQQQRGTGNRHTQQAQWHRATAHSTQGTRHSTQAQAQAQWHRGTWSGGSGTVAQEQCGSGTGHMGSAAERGVHRQIVTGEVQQAVDQHGPWPLDSTKRSRSAQDGSAGCVSGNHATGLRQCRHTHRGTRHWQALYVRTFDSRSDDEGHALNDLTQRVLGYAGKFANNLPQARVMYMEHPFAASEISGHARMLRNLLARPLRFSYTETERRFTCKRRIFRKS

SEQ ID NO: 43506 - protein, 790 aa, Homo sapiens
  DOMAIN (720)..(762): Sodium:dicarboxylate symporter family proteins domain identified by eMATRIX, accession number BL00713F, p-value=3.471e- 22, raw score of 16.13
MQEIGKCTEEHQAIVRKWLEERKLDETMMRKMLLAAALSVTAMTAHADYQCSVTPRDDVIVSPQTVQVKGENGNLVITPDGNVMYNGKQYSLNAAQREQAKDYQAELRSTLPWIDEGAKSRVEKARIALDQIIADKLLQLMRVLFIQQWGIPAGTVQMLDRLESEILADRVSEESRRWLASCGLTVEQMKNQMDPVYTPARKIHLYHCDHRGLPLALISTEGATAWCAEYDEWGNLLSDENPHHLQQLIRLPEVRYTGASFSYNVASILGASVAPYIAAWLQTNYGLGAVSDWGWGIDPLGLRITMNMMYDRYQKPLFLVENGLGAKDEFAANGEINDDYRISYLREHIRAMGEAIADGIPLMGYTTWGCIDLVSASTGEMSKRYGFVFVDRDDAGNGTLTRTRKKSFWWYKKVIASNGEDLDLPVEALKVRINEVYTALNMIDYGLDNLPGGPLMVEGFTYIPHRFALGFAEAPRGDDIHWSMTGDNQKLYRWRCRAATYANWPTLRYMLRGNTVSDAPLIIGSLDPCYSCTDRMTVVDVRKKKSKVVPYKELERYSIELIKTGTATSSYPLEPIAVDKNFRGKPEQNPQQCIGCAACVNACPSNALTVETDLATGELAWEFNLGHCIFCGRCEEVCPKRGSTVPEYNWPRGEKDSGKAPFACKCGLKSFYAEKINTLVTFPGGSQLSCHEDIQTALWEDPCDKELRPPANSQCSSMLATLGSVGIPLEGLAFIAGVDRILDMARTALNVVGNALAVLVIAKWEHKFDRKKALAYEREVLGKFDKTADQ

SEQ ID NO: 43507 - protein, 932 aa, Homo sapiens
  DOMAIN (505)..(547): Sodium:dicarboxylate symporter family proteins domain identified by eMATRIX, accession number BL00713F, p-value=7.962e- 21, raw score of 16.13
MLSAFQLENNRLTRLEVEESQPLVNAVWIDLVEPDDDERLRVQSELGQSLATRPELEDIEASARFFKDDDGLHIHSFFFFEDAEDHAGNSTVAFTIRDGRLFTLRERELPAFRLYRMRARSQSMVDGNAYELLLDLFETKIEQLADEIENIYSDLEQLSRVIMEGHQGDEYDEALSTLAELEDIGWKVRLCLMDTQRALNYLSRLRHLLLPYAIQRNRCSQQRRLSLPGFIQFFSWPLLGQRPQVVAQRRRSFSKRFFDNWIARRHISQHSNGLRTLSREHKCKLRHVLILILETNQRGAPGESTAKGFKQNQLPRLNAPVAYSFIQRARDRGRRGITVAIQRHHDIIHRHTEFFRRCTDNTQVSLMRNQPVQLRTVKIIRRQRLINDVRQFRYRNLEDFVARHLLGIVARLCGLSVWILIRILKDELILAYSTASSESVLPRIIEKMEAYGAPVSITSFVVPTGYSFNLDGSTLYQRNHSGVTLMVTSKGIAGVPGVSFVVLLATLGSVGIPLEGLAFIAGVDRILDMARTALNVVGNAAGGAGLLLVISHAFAATVQDEHGTFTLEKTPQRIVVLELSFADALAAVDVIPIGIADDNDAKRILPEVRAHLKPWQSVGTRAQPSLEAIAALKPDLIIADSSRHAGVYIALQQIAPVLLLKSRNETYAENLQSAAIIGEMVGKKREMQARLEQHKERMAQWASQLPKETGDPLETTFGNTRYNGYPLIKEFSIVALLIITTILWAFSFSFYGEYYAGHVDSYFAVLHENGRPVYAGGRDAAWRDVYAEFPRLSLPDGFRAAAVHRVTPLYITLIYDIMSKRRLRWGYAFSALLAVIGAGIIRYDQVTDHFWTGLLLVQLSNITFAIGMVGYKRLMETRPMPQHNAFAWFYLGAFLVAVIAWFLLGNAQKMPQTTLQWGILVFKVIITKKSRA

SEQ ID NO: 43508 - protein, 167 aa, Homo sapiens
  DOMAIN (97)..(139): Sodium:dicarboxylate symporter family proteins domain identified by eMATRIX, accession number BL00713F, p-value=3.471e- 22, raw score of 16.13
MFSGYRRSQNHMDIVLSDVNMPNMDGYRLTQRIRQLGLTLPVIGVTANALAEENQRCLESGMDSCLSKPEIILVLTLMVTSKGIAGVPGVSFVVLLATLGSVGIPLEGLAFIAGVDRILDMARTALNVVGNALAVLVIAKWEHNFDRKKALAYEREVLGKFDKTGNV

SEQ ID NO: 43509 - protein, 301 aa, Homo sapiens
MERRALAGPGDWVMSRGMYPRSNRVPTRNRSNLQGNENHILNSSRTPGVNGLWYTTEASNDNEQPPTISNYMDKSHRRMMNKTIQASALKGSEIIRLVEESDPVAELALRRYELRLAKSLAHVVNILDPDVIVLGGGMSNVDRLYQTVGQLIKQFVFGGECETPVRLQNVPEPRRADKAFTPHPAISNEHRDYKLTQWFRQHRSIRRLLALIANIKQQEDIAAKKAGGGTAVIFAARVGDNSEMGRAPGTLLPVANFYLVWVATVGACGCPAHIKEGFAGKVREYHAWRKACIRRFYHAGS

SEQ ID NO: 43510 - protein, 35 aa, Homo sapiens
VLGGLPVLWSPLPHHPHHWQWQQGIWGDGDGEGCC

SEQ ID NO: 43511 - protein, 251 aa, Homo sapiens
LINKWVGAWKHSRARPFVHIMQDKDIEETYHAQFMEQALHQAGFETRILRGLDELGWDAAGQLIDGEGRLVNCVWKTWAWKSAFDQIREVSDREFAAVPIRTGHPQNEVRLIDVLLRPEVLVFEPLWTVIPGNKAILPILWSLFPHHRYLLDTDFTVNDELVKTGYAVKPIAGRCGSNIDLVSHHEEVLDKTSGKFAEQKNIYQQLWCLPKVDGKYIQVCTFTVGGKPAISLGLLGLQPQTERCNYCLPYF

SEQ ID NO: 43512 - protein, 446 aa, Homo sapiens
  DOMAIN (166)..(195): Band 7 protein family proteins domain identified by eMATRIX, accession number BL01270E, p-value=5.765e-25, raw score of 13.03
MQDKDIEENYHAQFMEQALHQAGFETRILRGLDELGWDAAGQLIDGEGRLVNCVWKTWAWETAFDQIREVSDREFAAVPIRTGHPQNEVRLIDVLLRPEVLVFEPLWTVIPGNKAILPILWSLINLTMTNIRTVLGSNSRLLRIVDEATNPWGIKVTRIEIRDVRPPAELISSMNAQMKAERTKRAYILEAEGIRQAEILKAEGEKQSQILKAEGERAVYQIMQLQKLVNMFGGDLTRRYGQKVHKLTLHGGFSCPNRDGTIGRGGCTFCNVASFADEAQQHRSIAEQLAHQANLVNRAKRYLGYFQAYTSTFAEVQVLRSMYQQAVEHTTGKVGITGFCYGGGVSNAAAVAYPELACAVPFYGRQAPTADVAKIEAPLLLHFAELDTRINEGWPAYEAALKANNKVYEAYIYPGVNHGFHNDSTPRYDKSAADLAWQRTLKWFKA

SEQ ID NO: 43513 - protein, 269 aa, Homo sapiens
  DOMAIN (151)..(204): Bacterial export FHIPEP family proteins domain identified by eMATRIX, accession number BL00994E, p-value=7.943e-35, raw score of 29.97
MLVVGRIRVSAKICPDDGFLPPVVHIRDNMDLQPARYRILMKGVEIGSGDAYPGRWLAINPGTAAGTLPGEATVDPAFGLNAIWIESALKEQAQIQGYTVVEASTVVATHLNHLISQHAAELFGRQEAQQLLDRVAQEMPKLTEDLVPGVVTLTTLHKVLQNLLDEKVPIRDMRTILETLAEHAPIQSDPHELTAVVPPGLHAADERMALENARDAYTRRSEGCSIWVVKASEIVASQPEERGEFFDPAESKVYRHPTFYTIPDGIEHM

SEQ ID NO: 43514 - protein, 305 aa, Homo sapiens
  DOMAIN (89)..(104): Phosphoglucomutase and phosphomannomutase phosphoserine signa domain identified by eMATRIX, accession number BL00710, p-value= 8.875e-15, raw score of 12.98
  misc_feature (1)...(305): Xaa = X or * as defined in Table 2
MARADTVSVPMFMGLAAKPCWRDTEPNTGYRGPHVRNIQLTHDPRLDYRSILIDINDIGQTFHERLHPDACLSNAILVHNKKGGPLADGIVITPSHNPPEDGGIKYNPPNGGPAVPTSLKWWKTGPTHCWPMAXKAXSVSPRRSDGIRSKNDVIDTSDDDMXXQCLSRRSNGHPGAKVANLVPKTTFIDGVDQTSFFLGTNGQSNRKAEHYFLNGKLAAVRMDEFKYHVLIQQPYAYTQSGYQGGFTGTVMQTAGSSVFNLYTDPQESDSIGVRHIPMGVPLQTEMHAYMEILKKYPPRAQIKSD

SEQ ID NO: 43515 - protein, 478 aa, Homo sapiens; identical to SEQ ID NO: 39243
  DOMAIN (325)..(370): ubiE/COQ5 methyltransferase family proteins domain identified by eMATRIX, accession number BL01183B, p-value=3.838e-09, raw score of 21.31

SEQ ID NO: 43516 - protein, 104 aa, Homo sapiens
LAWARRCRRLLAKATSLIRAPSSEMRASTPCRGQRRPSGYSWYGRSPRAVLEGLRVGAHLSRANCPWPSRSQVVELIPDGFPVFLDFTKIPGRDTQNEHIVLLH

SEQ ID NO: 43517 - protein, 314 aa, Homo sapiens
  DOMAIN (4)..(34): Sulfatases proteins domain identified by eMATRIX, accession number BL00523E, p-value=1.563e-14, raw score of 19.27
MVEMNDVFANRYKTPEKTVQLDNTLIVLTSDNGPEAEVPPHGRTPFRGAKGSTWEGGVRVPTFVYWKGMIQPRKSDGIVDLADLFPTALDLAGHPGAKVANLVPKTTFIDGVDQTSFFLGTNGQSNRKAEHYFLNGKLAAVRMDEFKYHVLIQQPYAYTQSGYQGGFTGTVMQTAGSSVFNLYTDPQESDSIGAKMAAIGNKWFGLGPGPDPVGRPNQKSKPIWLLKNNWPVTHRHAATVKTDVHPAHIVQQETTHIRFLTGFFLKFCQLLLGFFILRRMLHYWHHIVGNSGRRFNQILVWVIVSGKAFACGGS

SEQ ID NO: 43518 - protein, 401 aa, Homo sapiens
  misc_feature (1)...(401): Xaa = X or * as defined in Table 2
MTLHGDTRIDNYYWLRDDTRSQPEVLDYLQQENSYGHRVMASQQALQDRILKEIIDRIPQREVSAPYIKNGYRYRHIYEPGCEYAIYQRQSAFSEEWDEWETLLDANKRAAHSEFYSMGGMAITPDNTIMALAEDFLSRRQYGIRFRNLETERFPNDVDPIETRDWLQAIESVIREEGVERAQYLIDQLLAEARKGGVNVAAGTGISNYINTIPVEEQPEYPGNLELERRIRSAIRWNAIMTVLRASKKDLELGGHMASFQSSATIYDVCFNHFFRARNGVPTYHLIEAVVFRFLTAGFPLLLKKASGVFWNAEFGHQLIAGDHFFHHFQAHLVQFGGDFFQLFNLGEGQLVVSIFTPVRLAVHGVKIETVFVGFLTPVRALGNTDSFHRYQPPIEREEPX

SEQ ID NO: 43519 - protein, 79 aa, Homo sapiens
GRTCFIRIMNFPSPLGAMYGEPYWCEDAYYKLTLAQVEKLEEVTAELHQMCLKVVEKVIASDELMTKFRIPKHTKAFSA

SEQ ID NO: 43520 - protein, 83 aa, Homo sapiens
  DOMAIN (17)..(51): Iron-containing alcohol dehydrogenases proteins domain identified by eMATRIX, accession number BL00913D, p-value=6.000e- 11, raw score of 24.20
YTDEGEFDRYLLLPNNPNMVIVDTKIVAGAPARLLAAGIGDALATWFEARACSRSGATTMAGGKCTQAALALAELCTTPTAIV

SEQ ID NO: 43521 - protein, 32 aa, Homo sapiens
YTKVFALDVAARHRVQFAMPESDAVAMLTQLS

SEQ ID NO: 43522 - protein, 363 aa, Homo sapiens
  DOMAIN (299)..(319): ASPARTATE AMINOTRANSFERASE SIGNATURE domain identified by eMATRIX, accession number PR00799A, p-value=1.720e-23, raw score of 12.96
MLKSENKTTGDRLSIIPEYTLNSTLSWQAREDLSMQTTFTWYGKQQPKKYNYKGQPAVGPETKEISPYSIVGLSATWDVTKNVSLTGGVDNLFDKRLWRAGNAQTTGDLAGANYIAGAGAYTYNEPGPLGRETGICRGSSSLPANCAGGEGSGRGQAVGSRTHHGHGDPQLQEHPACLRGLLHLVEQCPSKMTAQPGRPFGSTKDYPDEVLQFARAHPLMFWPVRPRHGRPVLVKTHLAQQLHQIVVDRVEAEDGTYDVIFLGTGLEVREYAYYDAENHTLDFDALINSLNEAQAGDVVLFHGCCHNPTGIDPTLEQWQTLAQLSVEKGWLPLFDFAYQGFARGLEEDAEGLRAFAAMHKELI

SEQ ID NO: 43523 - protein, 160 aa, Homo sapiens
  DOMAIN (109)..(142): PROLINE-RICH PROTEIN 3 domain identified by eMATRIX, accession number DM00215, p-value=1.763e-09, raw score of 19.43
KALLERVGDSKVQVVMSDMAPNMSGTPAVDIPRAMYLVELALEMCRDVLAPGGSFVVKVFQGEGFDEYLREIRSLFTKATGAHGPQRPPPQTERAAPSPRPPEETADKRTAKQGTKRTAPPSPPPTPPPTKPHKPPCHRNPRDHQKNPSPVNYTSPNWII

SEQ ID NO: 43524 - protein, 832 aa, Homo sapiens
  DOMAIN (445)..(474): Isocitrate lyase proteins domain identified by eMATRIX, accession number BL00161A, p-value=9.167e-13, raw score of 19.46
MIVAADEFIPGTVFRSIAWLLTAKSIRTDQTRRWQSLKTAGAVGSDEDAQQRLDMVKEFKNCATHTRRWQDGISRTLHKGHQGGHYPMVADSASTLPYREPITSLVVTGEHNRAIPFGSWLSSSRPEISAWRYRKYTPAHRAPAARQRLAPRTKLGNYLQISSSPSSCAKPERTMRMILTSSYFHWRSPSPEYSSSGCRAGETQHFAIRVRQRSAIAAGRPKPIVPSPPELVTHVMGDIAVVADAVTIIAAAVESSREGICAPGRRRWSSAHTAGRQHGAQVVFEDPDTDAADQVIARIIIPAMASPRTNLMPRPSRRRNRPRWQHLTPGLRLRLVDQSGVKIASIAICLPGIASKPVSSAKTCHRGGAGREEKKARDVNEKTALLKKNPPPSLLLAINAQILPLFMWAAVTVSPQILRICCCGHLEDPRKPYTTNEELQKDGLNPRWEGITAPIQCGDVVKLRGSVNPECTLAHWAQRKCGVCCTVSRKKLHQQPRRTDWRSGAATAKAAVVERINNTFRRPIRSNGPRALSRAIRACRLLPADRCRCGSRFWRVLNAFELMKAMIEAEKPRRKTIASFQQQLSDMGYKSSSSPLAGTEKNPFRLEPYEISTLFEQRQAMFSLSKKASLPWTIAARSADQRCRTRIAELPQFHSLTFFAGLCIGISLWLRHSPPKGKLTRMTAGCRSINAFALCATTIADAEILASDLADSTLRNCWPLIPVISPLRNQQSHARRRKVPASRLKRQQRYVAEAITEEWRWHPVRLKWPGERLRLALQELGRFGSSSGKCYQPAAIFSTAYCRSAGVIAGQSCSFDGKLAKQQIEAAMGGCR

SEQ ID NO: 43525 - protein, 114 aa, Homo sapiens
  misc_feature (1)...(114): Xaa = X or * as defined in Table 2
RCRPDKAFTPHPAIGARCLMRRLRVLSCLQPLPNVGWIRRLRRIRQFSAPDEGAKCRVAILQDFDAQYGRFLEVTSGAQQRFEQTDXKHAAALPFFFPSSAYSLAAISVVFGFR

SEQ ID NO: 43526 - protein, 40 aa, Homo sapiens
MAGDRSHVEEAYRAISSAQGEMMKFTGIPNFAQNCSVVSA

SEQ ID NO: 43527 - protein, 148 aa, Homo sapiens
  DOMAIN (91)..(146): Isocitrate lyase proteins domain identified by eMATRIX, accession number BL00161H, p-value=1.243e-39, raw score of 27.03
MPAEFITGGAVPVKASSRIHAGIEQAISRGLAYAPYADLKNLDDKTIASFQQQLSDMGYKFQFITLAGIHSMWFNMFDLANAYAQGEGMKHYVEKVQQPEFAAKKDGYTFVSHQQEVGTGYFDKVTTIIQGGTSSVTALTGSTEESQF

SEQ ID NO: 43528 - protein, 81 aa, Homo sapiens
CSAVAPRPDQRDDRKDGYGFSSPAGQHASRPVRNAAAHRRSLRGIDHTEHRSLAKWFEQSIIPGHAAFSALIRSRELPDAA

SEQ ID NO: 43529 - protein, 74 aa, Homo sapiens
IPGSMVNTMPGWRIRVQRRYGYFAGAARCVPLSSCIKPATSCTCRPSGWPIPCGINGPVRSFSTIASSLISVMI

SEQ ID NO: 43530 - protein, 84 aa, Homo sapiens
LKPKNLDEKLLPASSSSCRIWATSPVHHLWQVLKKILFGWNPTKSPRCLSTRQAMFSLSKKASLPWTIAARSADQRCRTRIAEL

SEQ ID NO: 43531 - protein, 243 aa, Homo sapiens
RPHQEQRIAGCGVNALSSLRSATAVGMIRRASVASGDRAPIAGCGVNALSGLHRHFIEVTCTHFLLVRYEGIAIFRGGKFRLLHFLNVVLHTLALGIGVCQVKHVEPHAVDTCQGDELELVAHIRQLLLEAGNSFVVEVYLPVERRRAVISQQFARIFRVDSLCKATRQFQIRRGRSHQTGQHMGIRRQVDAAHADDRRTSGRVPPLIQVCPAHSSEAVVVVDVDVDVDVDVDVIGAVDYKEH

SEQ ID NO: 43532 - protein, 49 aa, Homo sapiens
QMTSPLWYWTHEWSKKAMPAVPSTRSCFRSSQSPLNGRFMFSIASMMSW

SEQ ID NO: 43533 - protein, 371 aa, Homo sapiens
HASRPVRNAAAHRRSLRGIDHTEHRSLAKWFEQSIIPGHAAFSALIRSRELPDARKRLIQPTFGNGCRHDKTRKRRIRHRAPIAGCGVNALSFLHRHFIEVTCTHFLLVRYEGIAIFRGGKFRLLHFLNVVLHTLALGIGVCQVKHVEPHAVDTCQGDELELVAHIRQLLLEAGNKPFLASLMDEQTLTQLEQLKQNLKNQRRQAQTLVTQTAETLAQHQQHRPDDGLALTVTVEQIQQELAQTHQKLRENTTSQGEIRQQLKQDADNRQQQQTLMQQIAQMTQQVEDWGYLNSLIGSKEGDKFRKFARGVTLDNLVHLANQQLTRLHGRYLLQRKASEALEVEVVDTWQADAVRVSRTLSGGESFLVSLA

SEQ ID NO: 43534 - protein, 1011 aa, Homo sapiens
  DOMAIN (101)..(128): Protamine P1 proteins domain identified by eMATRIX, accession number BL00048, p-value=9.875e-11, raw score of 6.39
  misc_feature (1)...(1011): Xaa = X or * as defined in Table 2
VGHSTRPAASPGPAAGIGRSPARLVQQPQRSLAKPLNRPAQQRGLLPQRRHPKRTRKRRKQAQNPQKRLPHRQPVRRRHRHHRRLLQKMRRPDKRQQRRAAPRRHPRRRQRLLAVRRRQLRAKVRRNPRQRAPRQQLNGQRILHPPWRLRMQVRRKRGXYSSAVRPTVRLKRWRQRQRQXNQPMTMQRNVCRKTRTALIYPYKGCFLNNINAVSKTDFADKRGMRYVRVNAPAGATSGKYYPVVVMRSAGSFHIFDLLKSGQNVVLSAPTSMGKSAIVDSLLGMGTLKRLVLVVPTVALADETRRRLQERFGDRYQIIHHSSQVCHSDQAVYVLTQERVNERDDIVDIDLFVIDEFYKLAFRQLKSGDIDHQDERVIELNIALSKLLKVSRQFYLTGPFVNSIRGLEKLGYPHTFVSTDFNTVALDVKTFGIKANDDKAKLKALGEIAHACVDATIIYCKSPTVAGLVARELIRLGHAIRQLNSGAPDKANLLAEAYIYKLAGRHQDELRAMTESLPENASTQQYPTEYVQALRNNQLAAAIDDANLTPDIRADIHAATDHQPKKAQSIMTELFYHKETIAPDLSDEELADLFYSHLESENYPGALTVTQHTINTSPPFLRLMGTPTSIPNDTWLQGHSFLSTVAKYSNDLPQAEMTARELAYNAPGNQGLRIDYASVLQARGWPRAAENELKKAEVIEPPNIGIHNVPFIGFVNRLYTFPVVSCQRSGSHFATIRHTAIQNVQFSQAEARQGVQLYRTTNGNGVQPAGTTTTPRSCAEFVTLLAEELASFIKQFGRERTCTYTSGVSFEDTQNVINITRAQAGTGRHATSSGVGRSYVRISTVVDIQQRTLRTFKHDEIATLTRLVEQVRNVNHHRSQDVGNSHRIIQNFLVINRFSFVVVNQLEVVIFHHFFQFFSEGFFVEKVANTQTATCYFIFISRPDTTTGGADRFRATRFLTRVIQRNVIIKDQRTCFRQQQTLTNGDATVFQFFHLFHQRGRRQHNKRACLHK

SEQ ID NO: 43535 - protein, 973 aa, Homo sapiens; identical to SEQ ID NO: 32607
  DOMAIN (782)..(824): CYTOCHROME C-TYPE BIOGENESIS PROTEIN CHAIN domain identified by eMATRIX, accession number DM01577B, p-value=9.379e-37, raw score of 18.96

SEQ ID NO: 43536 - protein, 1069 aa, Homo sapiens
  DOMAIN (373)..(420): Phosphoribosyl pyrophosphate synthetase proteins domain identified by eMATRIX, accession number BL00114A, p-value=1.000e- 40, raw score of 17.22
MEFTSLTPDDLRVLELYRTPFSDGYVFHSMQFHIFDLLKSGQNVVLSAPTSMGKSAIVDSLLGMGTLKRLVLVVPTVALADETRRRLQERFGDRYQIIHHSSQVCHSDQAVYVLTQERVNERDDIVDIDLFVIDEFYKLAFRQLKSGDIDHQDERVIELNIALSKLLKVSRQFYLTGPFVNSIRGLEKLGYPHTFVSTDFNTVALDVKTSASKRMTTKPSSKRWGKSRTCVDADHIKNGIGLHFGALPRALQQYTADQFNAGKLRFLLCTSTIIEGVNTIAKNVVIYDNRAGSTRTISADIINSVICGLNTLKSFDTRWALLLEQQDGKTLASVQTLDESRLPEGDVTVDVHWSSLNYKDALAIPAVRGGDIFIIQSTCAPTNDNLMELVVMVDALRRASAGRITAVIPYFGYARQDRRVRSARVPITAKVVADFLSSVGVDRVLTVDLHAEQIQGFFDVPVDNVFGSPILLEDMLQLNLDNPIVVSPDIGGVVRARAIAKLLNDTDMAIIDKRRPRGERFTGRDCVLVDDMIDTCGTLCKAAEALKERGAKRVFAYATHPIFSGNAANNLRNSVIDEVVVCDTIPLSDEIKSLPNMMRSRMKHYCEQNIFLTCDAFPRSDRRLLEFSALMKYSDIHEYSWAAPGHQGGVGFTKTPAGRFYHDYYGENLFRTDMGIERTSLGSLLDHTGAFGESEKYAARVFGADRSWSVVVGTSGSNRTIMQACMTDNDVVVVDRNCHKSIEQGLMLTGAKPVYMVPSRNRYGIIGPIYPQEMQPETLQKKISESPLTKDKAGQKPSYCVVTNCTYDGVCYNAKEAQDLLEKTSDRLHFDEAWYGYARFNPIYADHYAMRGEPGDHNGPTVFATHSTHKLLNALSQASYIHVREGRGAINFSRFNQAYMMHATTSPLYAICASNDVAVSMMDGNSGLSLTQEVIDEAVDFRQAMARLYKEFTADGSWFFKPWNKEVVTDPQTGKTYDFADAPTKLLTTVQDCWVIIRAKAGTASKIFRITGVCSTRLKSASLLREWVKMVNWKKPVFRRRWSLPGLVATALYLPAPLTSKLCSCSLWA

SEQ ID NO: 43537 - protein, 1180 aa, Homo sapiens
  DOMAIN (104)..(132): Quinone oxidoreductase / zeta-crystallin proteins domain identified by eMATRIX, accession number BL01162B, p-value=8.013e- 10, raw score of 18.11
  misc_feature (1)...(1180): Xaa = X or * as defined in Table 2
LRLRGEALPVASGCLANATDTPAGTTLWADTERHAVQXXTCEADTLGSCGYAAKPCLSPVAVWQMLLTRLLEQHYGLTLNDTPFSDEPVLTAPIDAAALRGIEFGKFQLGNMVVGDIIECGSDVTDYAVGDSVCGYGPLSETVIINAVNNYKLRKMPQGSSWKNAVCYDPAQFAMSGVRDANGARRGFWWGGLGAIRVQLAFKWLNAAGRLPGGGLGGPIPYSAHRCDIARRHGADFCLNPIGTDVGKEIKTLTGKQGADVIIETSGYADALQSALRGLAYGGTISYVAFAKPFAEGFNLGREAHFNNAKIVFSRACSEPNPDYPRWSRKRIEETCWELLMNGYLNCEDLIDPVVTFANSPESYMQNETRSGKSGTQQSGVLSGKHSGEISLYQRDGLRWFEIDGKCWLTTSKKSRAIKKRFPETFTWAHRISNRAVDFLQQPARADEPFLMVVSYDEPHHPFTCPVEYLEKYADFYYELGEKAQDDLANKPEHHRLWAQAMPSPVGDDGLYHHPLYFACNDFVDDQIGRVINALTPEQRENTWVIYTSDHGEMMGAHKLISKGAAMYDDITRIPLIIRSPQGERRQVDTPVSHIDLLPTMMALADIEKPEILPGENILAVKEPRGVMVEFNRYEIEHDSFGGFIPVRCWVTDDFKLVLNLFTSDELYDRRNDPNEMHNLIDDIRFADVRSKMHDALLDYMDKIRDPFRSYQWSLRPWRKDARPRWMGAFRPRPQDGYSPVVRDYDTGLPTQGVKTTPFGDPGENTPPEGFTPDDNDTEAPPRRAPGRQKRARAHAPSTREPADNTLVLLAIRALVKEGKTGQAVELFNQLPQELNDAQRREKTLLAVEIKLAQKDFAGAQNLLAKITPADLEQNQQARYWQAKIDASQGRPSIDLLRALIAQEPLLGAKEKQQNIDATWQALSSMTQEQANTLVINADENILQGWLDLQRVWFDNRNDPDMMKAGIADWQKRYPNNPGAKMLPTQLVNVKAFKPASTNKIALLLPLNGQAAVFGRTIQQGFEAAKNIGTQPVAAQVAAAPAADVAEQPQPQTVDGVASPAQASVSDLTGEQPAAQPVPVSAPATSTAAVSAPANPSAELKIYDTSSQPLSQILSQVQQDGASIVVGPLLKNNVEEFAEEQHSAERTGTEPAGEYRKSRQYLLLRAFTGRRSARCSASYS

SEQ ID NO: 43538 - protein, 371 aa, Homo sapiens
  DOMAIN (52)..(90): Isocitrate lyase proteins domain identified by eMATRIX, accession number BL00161D, p-value=4.162e-37, raw score of 14.58
MYAAVDPMVAGIEPGDPRYVDYFLPIVADAEAGFGGVLNAFELMKAMIEAGAAAVHFEDQLASVKKCGHMGGKVLVPTQEAIQKLVAARLAADVTGVPTLLVARTDADAADLITSDCDPYDSEFITGERTSEGFFRTHAGIEQAISRGLAYAPYADLVWCETSTPDLELARRFAQAIHAKYPGKLLAYNCSPSFNWQKNLDDKTIASFQQQLSDMGYKFQFITLAGIHSMWFNMFDLAKAYAQGEGMKHYVEKVQQPEFAAAKDGYTFVSHQQENRSSKQQQPLLTVGRIRRSRRIRQSVPRTGIGCASRRFNTAKPWADAVISNRPFAGNTGSVDDNDEIQRNLNDTNYNRMWEYNNRGVGSKVVAEAKK

SEQ ID NO: 43539 - protein, 85 aa, Homo sapiens
  misc_feature (1)...(85): Xaa = X or * as defined in Table 2
SAPPQLAPSLPDRATDPDTCWPPGXRPRYLPSRQIDCFNTRFRLLQRLTASQCAEAVDVAFFRLTVQQTPHFRCAQLRQRAFRID

SEQ ID NO: 43540 - protein, 70 aa, Homo sapiens
PPSMAQNLSKIVGSAKLAAAGVVGCCVMVVFSNRQASTFRMSTVRRCLLPPPLIARNLPGAVSRRWAFHW

SEQ ID NO: 43541 - protein, 380 aa, Homo sapiens
MIYVFVTVKHRNDHFTKNTLASYRGRTLLGTLFKGVYHLYKDETYLYQSGKGHTIQEVRIVKGLNNPDLDAAVGEDLAQQLRDELELVKGASNEFDKELFLAGEITPVFFGTALGNFGVDHMLDGLVEWAPAPMPRQTDTRTVEASEDKFTGFVFKIQANMDPKHRDRVAFMRVVSGKYEKGMKLRQVRTAKDVVISDALTFMAGDRSHAYPGDILGLHNHGTIQIGDTFTQGEMMKFTGIPNFAPELFRRIRLKDPLKQKQLLKGLVQLSEEGAVQVFRPISNNDLIVGAVGVLQFDVVVARLKSEYNVEAVYESVNVATARWVECADAKKFEEFKRKNESQLALDGGDNLAYIATSMVNLRLAQERYPDVQFHQTREH

SEQ ID NO: 43542 - protein, 498 aa, Homo sapiens
MDPKHRDRVAFMRVVSGKYEKGMKLRQVRTAKDVVISDALTFMAGDRSHVEEAYPGDILGLHNHSTIQIGDTFTHGEMMKFTGIPNFAPELFRRIRLKDPVKQKQLLKGLVQLSEEGAEQVFRSISNNDLIVGAVDVRSKMHDALLDYMDKIRDPFRSYQWSLRPWRKDARPRWMGAFRPRPQDGYSPVVRDYDTGLPTQGVKLERPVSTFRQLKSGDIDHQDERVIELNIALSKLLKVSRQFYLTGPFVNSIRVALDVKTFGIKANDDKAKLKALGEIAHACVDATIIYCKSPTVAGLVARELIKLGHGTPTENPHVYWVSEKFDADWDYTVALRNGNFYTAVLRLTFCGAVAGDWVSRAKALSTDAAGVHALGDQRAGNGIRTLLGETHVQVVTTRAVGITNHVNRRFRILFQYHCHAAAPAAAPISAPLPRSFSKKRAHKYRAQREPDWGCNYCSVAAVWRCADGTGCGNPQADACFHGGDQRQLFIITSFTSCA

SEQ ID NO: 43543 - protein, 331 aa, Homo sapiens
  DOMAIN (104)..(130): Prokaryotic molybdopterin oxidoreductases proteins domain identified by eMATRIX, accession number BL00551B, p-value=1.290e- 20, raw score of 23.29
IRYFENRGLFAHCATRTGQFPPHCILASYKCGEQPDSSSNHPRNLFVWRSNLLGSSGKGHEYMQKYLLGTESGIQGEELGASDGIKPEEVEWQTAAIEGKLDLLVTLDFRMSSTCLFSDIVLPTATWYEKDDMNTSDMHPFIHPLSAAVDPAWESRSDWEIYKGIAKAFSQVCVGHLGKETDVVLQPLLHDSPAELSQPCEVLDWRKGECDLIPGKTAPNIVAVERDYPATYERFTSLGPLMDKLGNGMDLTDYANMALSIPSANTDIWNLEQDTVGTRLTNSRHGLADNGGAWVSYFGGNFNGDNGTINYDQDVNGIMVGVDTKIDGNDG

SEQ ID NO: 43544 - protein, 480 aa, Homo sapiens
IPGKTAPNIVAVERDYPATYERFTSLGPLMDKLGNGGKGISWNTQDEIDFLGKLNYTKRDGPAQGRPLIDTAIDASEVILALAPETNGHVAVKAWQALGEITGREHTHLALHKEDEKIRFRDIQAQPRKIISSPTWSGLESAPVSYNAGYTNVHELIPWRTLSGRQQLYQDHPWMRAFGESLVAYRPPIDTRSVSEMRQIPPNGFPEKALNFLTPHQKWGIHSTYSENLLMLTLSRGGPIVWISETDARELTIVDNDWVEVFNANGALTARAVGGTWFFTVNLRNRRSQLLTTQYQMLRHAIIKVKRDRPFEINAWVVLPEHMHCIWTLPEGDDDFSSRWREIKKQFTHACGLKNIWQPRFWEHAIRNTKDYRHHVDYIYINPVKHGWVKQYGRFLEVTSGAQQRFEQADWHAVQQAMKNRIHLYDHHVGLVVEQLRCITNGQSTDAAFLLRVKEHYTRLLPDYPRFEIAESFFNSVYCR

SEQ ID NO: 43545 - protein, 332 aa, Homo sapiens
  DOMAIN (147)..(184): Adenylate cyclases class-I proteins domain identified by eMATRIX, accession number BL01092N, p-value=1.000e-40, raw score of 13.54
LPYLIALLARAWFNGLLTSRTRLYIKGNGIVDLPKLQEMVADVSHHFPLRLPAPTPKALYSPCEIRHLAINVNLEYDPTAAFRNQVVHFDFRKLDVFSFGENQNCLVGNVDLLYRNSWNEVRTLHFNGEQSMIEALKTILGKMHQDAAPPDSVEVFCYSQHLRGLIRTRVQQLVSECIELRLSSTRQETGRFKALRVSGQTWGLFFERLNVSVQKLENAIEFYGAISHNKLHGLSVQVETNHVKLPAVVDGFASEGIIQFFFEETQDENGFNIYILDESNRVEVYHHCEGSKEELVRDVSRFYSSSHDRFTYGSSFINFNLQDPYLRARVSI

SEQ ID NO: 43546 - protein, 377 aa, Homo sapiens
  DOMAIN (82)..(119): Adenylate cyclases class-I proteins domain identified by eMATRIX, accession number BL01092N, p-value=1.000e-40, raw score of 13.54
GLLILPVEHDNASDPDWWGYKVQKPSVLQNGVSVRCTRPKIRGSVDLLYRNSWNEVRTLHFNGEQSMIEALKTILGKMHQDAAPPDSVEVFCYSQHLRGLIRTRVQQLVSECIELRLSSTRQETGRFKALRVSGQTWGLFFERLNVSVQKLENAIEFYGAISHNKLHGLSVQVHSRGPKMARAGLLVIEAALAHTGKTKAPTPNTPSTPNFPRNFPPSPPSAPNYFRYGYAQWNKENRFTGWYDVDLSEKGVSEAKAAGKLLKEEGYSFDFAYTSVLKRAIHTLWNVLDELDQAWLPVEKSCAVKMTALMILITLMNSAGGKASDLFGELTGIAVLLTMLPYFYSCVDLIRFEGVNIRNFVSLICSVLGCRVLLYSR

SEQ ID NO: 43547 - protein, 80 aa, Homo sapiens
ISSARHFGALACTLELGKALTFGQNDLRQFAVTASAIAALLSRHSPSFEMHMASDTLNFMPFEKGTLLAQDGEERFTVTH

SEQ ID NO: 43548 - protein, 119 aa, Homo sapiens
LPFLPSGLRGLAAENKIRRPHSAGSFLGPPCGLRGKLVISAAALMSTTIPISRVQGLLQFLNSKSPISRAERSWSTFGASAAFLTTLASLLFLFPPLAISSLANSFAKVFPPTPCAGSP

SEQ ID NO: 43549 - protein, 545 aa, Homo sapiens
MPRSSAIIRRLIRQRKQRRSESADQIPIAPGQKPLLPSLQVQYLSLAEQSGFFTLPLVPKYPQPRPSVKSNGPQALLATRYSASNSPVPPISRAPTATCASYVTLFPQTQFEIEGFIFIRLIARERFDAAVLPDGVREANINNAAGHRLYVTLVPVSHRRFLRASVRGKESVRWHLDLHTAIRGSLHPQFGVLPQRDIPWDEKFLTWLGAAGLEALVFHQEPGGTFTHFSARHFGALACTLELGKALPFGQNDLRQFAVTASAIAALLSDTTTAAPADANPLMHHKGKFGPHQDMMFKDLNLTDAQKQQIREIMKGQRDQMKRPPLEERRAMHDIIASDTFDKVKAEAQIAKMEEQRKANMLAHMETQNKIYNILTPEQKKQFNANFEKGPTAKTDAITAQSCRPTSLLRRFHEATAQNAPDVVVWGSGTPMREFLHVDDMAAASIHVMELAHEVWLENTQPMLSHINVGTGVDCTIRELAQTIAKVVGYKGRVVFDASKPDGTPRKLLDVTRLHQLGWYHEISLEAGLASTYQWFLENQDRFRG

SEQ ID NO: 43550 - protein, 454 aa, Homo sapiens
MLNALFGAISHGEIPLRCRLLVILGNPPALKQGKRYCHSDMNRMFGGRWQLFAESGETCRARELEQCLEDFYDQGKESVRWRLDLHTAIRGSLHPQFGVLPQRDIPWDEKFLTWLGAAGLKALVFHQEPGGTFTHFSARHFGALACTLELGKALPFGQNDLRQFAVTASAIAALLYGESVGIVIVSLFLFIYQLLCVPVSRCTYPLWVILFRFKPAKKLQQSLYPADRNSCAHQRSSRNTSFPLKPHGGPRKGGVRPPALHQENVGGYLQTPAKPNWRSLGGGEERAPVITRRQRGQTGINPGSRPTAFNIMGLPAQGVGGNTLAKLLASDDIAKGGKRNKSEASVVRNAADAPKVLQDQEFKPSLANCRTHGTQFQSISEVTGGASVMPTVEELSRALRALIESHCDRMLIISTEGKKKPSFLGKCRKPASGRSLRSPQGGALAAQRTLEDPT

SEQ ID NO: 43551 - protein, 81 aa, Homo sapiens
PAVRIRGPYPRIVRAALTLTQPHLIYSQIAGDNLRTDILAGFQAGLETILVLSGVSTLDDINSMPFRPSWIYPSVAEIDVI

SEQ ID NO: 43552 - protein, 88 aa, Homo sapiens
GNCVILRRQTAVDGTGYSDVYAADRGADYYPDQNQSRVYLKKRSLPFRYDRHRGGVRYRMDGRNHVRTGLLRLLHPADLSERSGSDSV

SEQ ID NO: 43553 - protein, 118 aa, Homo sapiens
RASVSFLPLAINNVSAFSKTQPGGVITSCRLIRAIWQRFSLTVPAPPTSVFTGFFTVTLKSIAVTFMVGTRTAIASKRSLNCGKNRVIPAASLVSTGMIDWLAARVRRRSGWYASITC

SEQ ID NO: 43554 - protein, 89 aa, Homo sapiens
  misc_feature (1)...(89): Xaa = X or * as defined in Table 2
TRYAMLTRHDNHLSKFYLARGRYRADFHAPETNTGERCYRYKPLPYWLEXRRGRNRYPALQXTMFLPADGPARCLSRQAAILKESVLPK

SEQ ID NO: 43555 - protein, 88 aa, Homo sapiens
  misc_feature (1)...(88): Xaa = X or * as defined in Table 2
ELQRHVLVVFAGFWIVKNSRNLFLVCRAEHKRSVVKGLLRQQGQGFWFHFQDGFAVEVGNANVIGSEXIVFGIVFPHRERCLVDKGFV

SEQ ID NO: 43556 - protein, 138 aa, Homo sapiens
  DOMAIN (18)..(35): ACETATE KINASE FAMILY SIGNATURE domain identified by eMATRIX, accession number PR00471E, p-value=4.536e-17, raw score of 13.62
HRLAKYIGAYTALMDGRLDAVVFTGGIGENAAMVRELSLGKLGVLGFEVDHERNLAARFGKSGSQAARVLRDNQFFVGWDNHRRTGTFFVDETRFAETCSQVLFFTLATRAISCPAMAGQAMQNSNDRNRIILFISLR

SEQ ID NO: 43557 - protein, 187 aa, Homo sapiens
  DOMAIN (91)..(110): SPECTRIN PLECKSTRIN HOMOLOGY DOMAIN SIGNATURE domain identified by eMATRIX, accession number PR00683D, p-value=9.727e- 09, raw score of 15.87
MRWRMGVRNSAHTLAKLATPFAEGEALRLSSVSHPEYIGRVAKFFSDIGGRALLMHGTEGEVYDNPQRCPQINLIDREGMRVLYEKQDTAGSELLPQAKDPETTAQWIERCLAGSEPIHESLKIQMACCLVATGEAGTIKKRGNKLGVSQKATPAPLSYSDPFNSKNTTGVNILPSKTAPPYQGKPK

SEQ ID NO: 43558 - protein, 247 aa, Homo sapiens
MNAQVGITSPGFIGADVSHTSRIVSSYTTEEAGFHRQAWCQMPVIVSGNEKQAITHSITVGSRITVQGFISCHKAKNGLSKMVLHDNGEETTRLRRDERQATPLQYGLIQSESGIGFITGVDLEVKNISMVNERDAIIPAHYWHMLKAHHKRRTSSPTALGGNCWNRVDLWLYRFLYVRCRVFFDGVSTLGRLGLRERRNNFFPIHSTRTSSQQAFRYSRSSTKNIIQTTTKHQGTNYSDRTPTTIL

SEQ ID NO: 43559 - protein, 346 aa, Homo sapiens
  DOMAIN (277)..(306): kw REPLICATION REPB REPA INITIATION domain identified by eMATRIX, accession number DM00653A, p-value=2.773e-12, raw score of 20.40
FSACIVRIPRCLIRVTREHSQYITCISIRFTGIASKETAHSADMEAITNGMMNLNRQRHQHLVALRIIFAHGENVFIRDKLMERRNRRTGRTEKARIWEVTDRTVRTWIGEAVAAAAADGVTFSVPVTPHTFRHSYAMHMLYAGIPLKVLQSLMGHKSISSTEVYTKVFALDVAARHRIRKSDGTLQEHDGICEIHVAKYAEIFGLTSAEASKDIRQALKSFAGKEVVFYRPEEDAGDEKGYESFPWFIKRAHSPSRGLYSVHINPYLIPFFIGLQNRFTQFRLSETKEITNPYAMRVTNPCVSIVCVNEINSRTPMRLSYIEKKKGRQTTHIVFSFRDITSMTTG

SEQ ID NO: 43560 - protein, 657 aa, Homo sapiens
  DOMAIN (36)..(63): Mrp family proteins domain identified by eMATRIX, accession number BL01215A, p-value=4.964e-11, raw score of 9.75
MEIRGRVEQRVGYTIEQINHMRDVFGTRLRRAEDVFPPVIGVAAHKGGVYKTSVSVHLAQDLALKGLRVLLVEGNDPQGTASMYHGWVPDLHIHAEDTLLPFYLGEKDDVTYAIKPTCWPGLDIIPSCLALHRIETELMGKFDEGKLPTDPHLMLRLAIETVAHDYDVIVIDSAPNLGIGTINVALQNFQRYTGIQHVHRIGMAERMWCDRNRERHTVSSSGGNRLPNPGPDRSDLALKGLRVLLVEGNDPQGTASMYHGWVPDLHIHAEDTLLPFYLGEKDDVTYAIKPTCWPGLDIIPSCLALHRIETELMGKFDEGKLPTDPHLMLRLAIETVAHDYDVIVIDSAPNLVFRICFVIWAQERIDIKGFEPDVRILLTKYSNSNGSQSPWMEEQIRHAWGSMVLKNGYVKRMKLVKTPAFGRRVSGVIEIPDGSRRRKAAALTESDYRVLVAELYDEQMAALSRLGLDYRPTSDYERGQRYASRLQNEFAGNISALADAQNISPQVNVSKSDDTLKINGVEDHKTIFDGDGKTYQNVQQFIDEGNYTSGDNHTLRDPHYVEDKGHKYLVFEANTGTENGYQGEESLFNKAYYGGGTNFFRKESQKLQQSAKKRDAQLANGALGIIELNNDYTLKKVMKPLITSNTELMNRARNVSQ

SEQ ID NO: 43561 - protein, 77 aa, Homo sapiens
  DOMAIN (51)..(65): Phage integrase family domain identified by eMATRIX, accession number PF00589B, p-value=1.621e-11, raw score of 16.17
EVFIRDKLMERRNRRTGRTEKARDRTVRTWIGEAVAAAAADGVTFSVPVTPHTFRHSYAMHMLYAGIPVKVLQSQCI

SEQ ID NO: 43562 - protein, 115 aa, Homo sapiens
  DOMAIN (87)..(101): Phage integrase family domain identified by eMATRIX, accession number PF00589B, p-value=1.621e-11, raw score of 16.17
  misc_feature (1)...(115): Xaa = X or * as defined in Table 2
KTTSFPAKLFNACRISLLASAEVNPNISAYLATWISQIPSCSCRVPSDFLIWSTNRYSIRFXSRERLVGEAVAAAAADGVTFSVPVTPHTFRHSYAMHMLYAGIPLKVLQSLMGH

SEQ ID NO: 43563 - protein, 246 aa, Homo sapiens
MFYQKAGKTRAVSLKTAHKFDANDPILKDQTQEWSGSATFTSDGKIRLFYTDYSGKHYGKQSLTTAQAAKLEFLVIHTSWPFTGLREHGQEEATGSRPPDAPAPSSPKSGLEQVLGKGLLFDTGNSYDHDYEFELGTPVELMDLCPIRLCKNFQRYTGIQHVHRIGMAERMWCDRNRERHTVSSSGGNRLPNPGSGSEGATCFARGRFCSNPNTSPVKDEGHNPGCQVSGNCPSMPCRTVTGLLES

SEQ ID NO: 43564 - protein, 430 aa, Homo sapiens
  DOMAIN (7)..(54): kw TRANSCRIPTASE REVERSE II ORF2 domain identified by eMATRIX, accession number DM01354V, p-value=1.000e-40, raw score of 12.97
MSEVPFTIASKRIKYLGIQLTRDVKGHFKENYKPLLNEIKEDTNKWKNIPCSWIGRINIMKMAILLKVFIRDKLMERRNRRTGRTEKARIWEVTDRTVRTWIGEAVAAAAADGVTFSVPVTPHTFRHSYAMHMLYAGIPLKVLQSLMGHKSISSTEVYTKVFALDVAARHRCDNLKTCHTSHGSVMAETAVINHKKRKNSPRIVQSNDLTEAAYSLSRDQKRMLYLFVDQIRKSDGTLQEHDGICEIHVAKYAEIFGLTSAEASIEEFRGEGSGNYRPEEDAGDEKGYESFPWFIKRAHSPSRGLYSVHINPYLIPFFIGLQNRFTQFRLSETKEITNPYAMRLYESLCQYRKPDGSGIVSLKIDWIIERYQLPQSYQRMPDFRRRFVQVCVNEINSRTPMRLSYIEKKKGRQTSHIVFSFRDITSMTTG

SEQ ID NO: 43565 - protein, 343 aa, Homo sapiens
  DOMAIN (276)..(290): Phage integrase family domain identified by eMATRIX, accession number PF00589B, p-value=1.621e-11, raw score of 16.17
MKLMETLNQCINAGHEMTKAIAIAQFNDDSPEARKITRRWRIGEAADLVGVSSQAIRDAEKAGRLPHPDMENSRDRFEQRGFEPDVRILLTKYSNSNGSQSPWMEEQIRDAWGSMVLKNVVRETDEVGKDPRPLPYLGHDEPYTFDINLSVNLKSMVVGGTDMGQEPLKQMGAWGPLSLKAMFGFFIRGYGFFTPFGRTLFPLGFGSTPPFTFPLLTKTIGVFILDKLMERRNRRTGRTEKARIWEVTDRTVRTWIGEAGAAAAADGVTFSVSVTPHTFRHSYAMHMLYAGIPLKDLQSLMGHKSISSTEGYTKDFSLDVGARHRVQFAMPESDAVAMLKQLF

SEQ ID NO: 43566 - protein, 103 aa, Homo sapiens
  DOMAIN (30)..(44): Phage integrase family domain identified by eMATRIX, accession number PF00589B, p-value=1.621e-11, raw score of 16.17
RNGTHPRYIEAVPWGALPADGVTFSVPVTPHTFRHSYAMHMLYAGIPLKVLQSRLALRELQQAVHAGLPQQAKILFDGGSEIGKIPHIVLYKPVQCSLWAFVH

SEQ ID NO: 43567 - protein, 125 aa, Homo sapiens
  DOMAIN (29)..(43): Phage integrase family domain identified by eMATRIX, accession number PF00589B, p-value=1.621e-11, raw score of 16.17
LKCLKMFWIGEAVAAAAADGVTFSVPVTPHTFRHSYAMHMLYAGIPLKVLQSRFGDVGFGVHVVHIEAQILLFLKEIVEDEFAHEVWVQRVINHLGPSELPPLMAGPALRVKHHHGVGLGEGIKV

SEQ ID NO: 43568 - protein, 122 aa, Homo sapiens; identical to SEQ ID NO: 35366
  DOMAIN (55)..(69): Phage integrase family domain identified by eMATRIX, accession number PF00589B, p-value=1.621e-11, raw score of 16.17

SEQ ID NO: 43569 - protein, 260 aa, Homo sapiens; identical to SEQ ID NO: 35367
  DOMAIN (193)..(207): Phage integrase family domain identified by eMATRIX, accession number PF00589B, p-value=1.621e-11, raw score of 16.17

SEQ ID NO: 43570 - protein, 108 aa, Homo sapiens
  DOMAIN (85)..(99): Phage integrase family domain identified by eMATRIX, accession number PF00589B, p-value=1.621e-11, raw score of 16.17
PDKERNEIWVDMYTVKPSGWTVRTFDKPRERFIAFFIAGILFRAIKNHFLPRETLQCLPYILTWIGEAVAAAAADGVTFSVPVTPHTFRHSYAMHMLYAGIPLKVLQS

SEQ ID NO: 43571 - protein, 238 aa, Homo sapiens
  DOMAIN (121)..(135): Phage integrase family domain identified by eMATRIX, accession number PF00589B, p-value=1.621e-11, raw score of 16.17
MKEKPSSPRQYSYSFLSSMILLGGGESWNLLRADQRLIFAKSWPRASRYQQGHQDLFILRSDLPSQVFIRDKLMERRNRRTGRTEKARIWEVTDRTVRTWIGEAVAAAAADGVTFSVPVTPHTFRHSYAMHMLYAGIPLKVLQSLMGHKSISSTEVYTKVFALDVAAPHPESTPVHLPSRENKIPPPIMRIPCGLPTSPIEQKQGKISATGTQWRRLKQETRLSSVSARLMSYVGVMC

SEQ ID NO: 43572 - protein, 163 aa, Homo sapiens
  DOMAIN (96)..(110): Phage integrase family domain identified by eMATRIX, accession number PF00589B, p-value=1.621e-11, raw score of 16.17
AMFGFFIRGYGFFTPFGRTLFPLGFGSTPPFTFPLLTKTIGVFILDKLMERRNRRTGRTEKARIWEVTDRTVRTWIGEAGAAAAADGVTFSVSVTPHTFRHSYAMHMLYAGIPLKDLQSLMGHKSISSTEGYTKDFSLDVGARHRVQFAMPESDAVAMLKQLF

SEQ ID NO: 43573 - protein, 181 aa, Homo sapiens; identical to SEQ ID NO: 35369
  DOMAIN (114)..(128): Phage integrase family domain identified by eMATRIX, accession number PF00589B, p-value=1.621e-11, raw score of 16.17

SEQ ID NO: 43574 - protein, 244 aa, Homo sapiens; identical to SEQ ID NO: 35370
  DOMAIN (105)..(132): Mrp family proteins domain identified by eMATRIX, accession number BL01215A, p-value=4.964e-11, raw score of 9.75

SEQ ID NO: 43575 - protein, 533 aa, Homo sapiens
  DOMAIN (466)..(480): Phage integrase family domain identified by eMATRIX, accession number PF00589B, p-value=1.621e-11, raw score of 16.17
MVLIVAATVVVVVVVGLCWMAKSECRSAMRLSSLQVRIFTYLIGREAAFADNLKWMACANKESALLDRFIFLILLLCKEPWECHCLPLFKVAMPSKCDIPVICAHINIGFTLRQLRGFGPCNIGSFEAKDSKNPQVRVISQKHKALRCIWFITCSICNPEFTEGALQGNKQRKRQCLQWFRAKALESNEPGFEFIQDKLLTQSLCFFPYTFLWLTGPHPSGSSYTDPCSSKADVTPSSTAVQEHSSALELKTKIVSPITRQQHGFFTQISTLADVQENVMEYLHVLSRPKVIDQEHDVVWTEAYIDSTVCRVKRRQLLLQQVPLTRKQQFLPAPYVDLDSARTRTNKQQQNPIIYTGSKQGSHVILFHYGESWNLLRADQRLIFAKSWPRASRYQQGHQDLFILRSDLPSQVFIRDKLMERRNRRTGRTEKARIWEVTDRTVRTWIGEAVAAAAADGVTFSVPVTPHTFRHSYAMHMLYAGIPLKVLQSLMGHKSISSTEVYTKVFALDVAARHRVQFAMPESDAVAMLKQLS

SEQ ID NO: 43576 - protein, 141 aa, Homo sapiens
  DOMAIN (29)..(43): Phage integrase family domain identified by eMATRIX, accession number PF00589B, p-value=1.621e-11, raw score of 16.17
LKCLKMFWIGEAVAAAAADGVTFSVPVTPHTFRHSYAMHMLYAGIPLKVLQSIRLEPFKINVLEQITKHIEKLQCGGVVKQLSRRGNNQHISSTYDINRADTQVRRAVNNYDIIVMSNSFNGQSEHQVWIGGQFTFIKFAH

SEQ ID NO: 43577 - protein, 402 aa, Homo sapiens
  DOMAIN (335)..(349): Phage integrase family domain identified by eMATRIX, accession number PF00589B, p-value=1.621e-11, raw score of 16.17
MGLDENMGLGSSRMGWKIIAGAFKIVQRETRYRQLLSKRSSTPMIDTLRPVPFASEMAISKTVAWLNEQLELGNERLLLMDCRPQELYESSHIESAINVAIPGIMLRRLQKGNLPVRALFTRGEDRDRFTRRCGTDTVVLYDESSSDWNENTGGESVLGLLLKKLKDEGCRAFYLEGGFSKFQAEFSLHCETNLDGSCSSSSPPLPVLGLGGLRISSDSSSDIESDLDRDPNSATDSDGSPLSNSQPSFPVEILPFLYLGCAKDSTNLDVLEEFRDPLPIVFIRDKLMERRNRRTGRTEKARIWEVTDRTVRTWIGEAVAAAAADGVTFSVPVTPHTFRHSYAMHMLYAGIPLKVLQSLMGHKSISSTEVYTKVFALDVAARHRVQFAMPESDAVAMLKQLS

SEQ ID NO: 43578 - protein, 341 aa, Homo sapiens; identical to SEQ ID NO: 41036
  DOMAIN (274)..(288): Phage integrase family domain identified by eMATRIX, accession number PF00589B, p-value=7.840e-12, raw score of 16.17

SEQ ID NO: 43579 - protein, 311 aa, Homo sapiens
  DOMAIN (244)..(258): Phage integrase family domain identified by eMATRIX, accession number PF00589B, p-value=1.621e-11, raw score of 16.17
MLQIPKQQQNEKYQVPQFDQSTIKNIESAKGLDVWDSWPLQNADGTVAEYNGYHVVFALAGSPKDADDTSIYMFYQKVGDNSIDSWKNAGRVFKDSDKFDANDPILKDQTQEWSGSATFTSDGKIRLFYTDYSGKHYGKQSLTTAQTQHQVVWVTKSGGVKGLRKRQFEREMWASGGHCDCGGCEGPELWESTLFIGNSTKKHMARTEKARIWEVTDRTGMTWIGEAGAAAAADGVTFSVPVTPHTFRHSYAMHMLYAGIPLKGLQSLMGHNSISSTEVYTKVFALDVAARHRVQFAMPESDAVAMLKQLS

SEQ ID NO: 43580 - protein, 426 aa, Homo sapiens; identical to SEQ ID NO: 35376
  DOMAIN (359)..(373): Phage integrase family domain identified by eMATRIX, accession number PF00589B, p-value=1.621e-11, raw score of 16.17

SEQ ID NO: 43581 - protein, 235 aa, Homo sapiens
  DOMAIN (83)..(138): Eukaryotic RNA polymerase II heptapeptide repeat proteins domain identified by eMATRIX, accession number BL00115I, p-value= 2.232e-21, raw score of 8.33
MICKTCCHIMLSQEEKKQFLDYLKRPGLTYLQKRGLKKKISDKCRKKNICHHCGAFNDHVYCCTFRFLKYGNREKMAQELKYGDIVERHLIDGDVVLFNRQPSLHKLSIMAHLVFIRDKLMERCNRRTGRTEKARIWEVTDRTVRTWIGEAVAAAAADGVTFSVPVTPHTFRHSYAIHMLYAGIPLKVLQSLMGHKSISSTEVYTKVFALDVAARHRVQFAMPESDAVAMLKQLS

SEQ ID NO: 43582 - protein, 297 aa, Homo sapiens; identical to SEQ ID NO: 35377
  DOMAIN (230)..(244): Phage integrase family domain identified by eMATRIX, accession number PF00589B, p-value=1.621e-11, raw score of 16.17

SEQ ID NO: 43583 - protein, 114 aa, Homo sapiens
  DOMAIN (87)..(101): Phage integrase family domain identified by eMATRIX, accession number PF00589B, p-value=1.621e-11, raw score of 16.17
KRTRRTVTFLCMSDRTVSRQGQCTYHFQETSAGRVNHAGRPFAGHPWTNVGISTDFYLHFSFLSSWIGEAVAAAAADGVTFSVPVTPHTFRHSYAMHMLYAGIPLKVLQSLMGH

SEQ ID NO: 43584 - protein, 472 aa, Homo sapiens; identical to SEQ ID NO: 35378
  DOMAIN (405)..(419): Phage integrase family domain identified by eMATRIX, accession number PF00589B, p-value=1.621e-11, raw score of 16.17

SEQ ID NO: 43585 - protein, 928 aa, Homo sapiens
  DOMAIN (861)..(875): Phage integrase family domain identified by eMATRIX, accession number PF00589B, p-value=1.621e-11, raw score of 16.17
MNNSRGAALRAITLTAKVRGFILEVGSARGHLRPAPAGCARAQSREPLPGGLALGPGSASVHFAASGSVSADRARAPWPGPRGGAPARSPSVSRRVERAEPSRLTSPAATQSREIYCLSAEAQRLAEARLAAKREARAEAREIPMKELERQQKEVEERPEKYFTEKGSRNMLGPSAATLAFLGGTSSQRGSGDTSISIDTEASIREIKDSLAEVEEKCKKAMFSNAQLDNENTNFIYQVDTLKDMLLEIEEQLAEYRRQSYQDDERRVKCPQVDRGWDPRKASEVEVKNEIVANVGKREILHNTEKEQHTEDTVKDCVDIEVFTAGENTEDQKSSEDTAPFLGTLAGATYEEQVQSQILESASLPENTAQVESNEVMGAPDDRTRTPLEPSNCWSDLDGGSHTENVGEAAVTQVGEQADTVASCPLGHSDDTVYHDDRCMVEVPQQLETSIGHSLEKEFTNQEAAEPKEVPVQSTEAGRDHNEEEGEEKGLRDEKPIKTEVPGSPAGTESKGQEATGPSTVDTQSEPSDMKEPDEEKNDQQGEALDSLQKRKNKKKKKKRKKSPNTDLSEIKEEEQVKSTDRKSAVEAQNEVTENPKQKIAAESSENVDCPENPKMKLDGKLDQEGNDVKTAAEEVLAGRDTLDFEDVTVQSSGPRAGGEELDEGVAKDNAKIADTLPCENVSHPLLEQVCRHSGERREEMKGHLCRTMSGQRGGEGGTAFPASGKKRETDYSDGDPLDVHKRLPSSAGEDRAVMLGFAMMGFSVLMFFLLGTTILKPFMLSWPRASRYQQGHQDLFILRSDLPSQVFIRDKLMERRNRRTGRTEKARIWEVTDRTVRTWIGEAVAAAAADGVTFSVPVTPHTFRHSYAMHMLYAGIPLKVLQSLMGHKSISSTEVYTKVFALDVAARHRVQFAMPESDAVAMLKQLS

SEQ ID NO: 43586 - protein, 85 aa, Homo sapiens
  DOMAIN (30)..(44): Phage integrase family domain identified by eMATRIX, accession number PF00589B, p-value=1.621e-11, raw score of 16.17
RNGTHPRYIEAVPWGALPADGVTFSVPVTPHTFRHSYAMHMLYAGIPLKVLQSRLALRELQQAVHAGLPQQAKILFDGGSEIGKI

SEQ ID NO: 43587 - protein, 231 aa, Homo sapiens; identical to SEQ ID NO: 35383
  DOMAIN (164)..(178): Phage integrase family domain identified by eMATRIX, accession number PF00589B, p-value=1.621e-11, raw score of 16.17

SEQ ID NO: 43588 - protein, 285 aa, Homo sapiens
  DOMAIN (218)..(232): Phage integrase family domain identified by eMATRIX, accession number PF00589B, p-value=1.621e-11, raw score of 16.17
MLQIPKQQQNEKYQVPQFDQSTIKNIESAKGLDVWDSWPLQNADGTVAEYNGYHVVFALAGSPKDADDTSIYMFYQKVGDNSIDSWKNAGRVFKDSDKFDANDPILKDQTQEWSGSATFTSDGKIRLFYTDYSGKHYGKQSLTTAQALPQTLTLNCVCRNLLFETEKRKLMERRNRRTGRTEKARIWEVTDRTVRTWIGEAVAAAAADGVTFSVPVTPHTFRHSYAMHMLYAGIPLKVLQSLMGHKSISSTEVYTKVFALDVAARHRVQFAMPESDAVAMLKQLS

SEQ ID NO: 43589 - protein, 365 aa, Homo sapiens
  DOMAIN (158)..(170): DOPAMINE 1A RECEPTOR SIGNATURE domain identified by eMATRIX, accession number PR00565B, p-value=6.013e-09, raw score of 12.35
MLASAQLLGMPQETYNHDRGEGGADTSHGESRRKTESRELWLTAGVLKSLAADQYQSSAWPLRNPAARQEALQNFQRYTGIQHVHRIGMAERMWCDRNRERHTVSSLARNRLPNPGPDRSFICEEEGHHPPGLCEGRSTDNFHSVSGKDADTQPQLMRAAVGAKSCKATRAELSRALGAHSFTPVCPGYKGHKYLVFEANTGTENGYQGEESLFNKAYYGGGTNFFRKESQKLQQSAKKRDAELANGALGIIELNNDYTLKKVMKPLITSNTVTDEIERANVFKMNGKWYLFTDSRGSKMTIDGINSNDIYMLGYVSNSLTGPYKPLNKTGLVLQMGLDPNDVTFTYSHFAVPQPKATMWLSQAT

SEQ ID NO: 43590 - protein, 641 aa, Homo sapiens
  DOMAIN (373)..(387): Phage integrase family domain identified by eMATRIX, accession number PF00589B, p-value=1.621e-11, raw score of 16.17
  misc_feature (1)...(641): Xaa = X or * as defined in Table 2
MNRQLSDSYTEDTKEPSDVTTSERTRSPPGSAKTTMIDTLKKLQDVLKTEDSKNPTKSAADLLEQYVKATGPIIEILQKATKTMEMIMIVEEKASDELQPDPELQQRYIHSVRGKPGLVKQRTQEIETRLRLAGLTVSSPLKRSHSLAKLGSLTFSTEDLSSRPPGPPPGPPPGLHPGPPPRRPPPKLPPPAPPGCSVHCCHYPLHFVVSPLEGFYCSLMRIQIVFVTAFVHHDSALLPLDASLAPEALQNFQRYTGIQHVHRIGMAERMWCDRNRERHTVSSSGGNRLPNPAPLPNPGVLSAPPNLIQRPKADDTSAATIEKKATATISAKPQITNPKAEITXNPRVWQGSWIGEAVAAAAADGVTFSVPVTPHTFRHSYAMHMLYAGIPLKVLQSLRSQXSVRGKPGLVKQRTQEIETRLRLAGLTVSSPLKRSHSLAKLGSLTFSTEDLSSRPPGPPPGPPPGLHPGPPPRRPPPKLPPPAPPGCSVHCCHYPLHFVVSPLEGFYCSLMRIQIVFVTAFVHHDSALLPLDASLAPEALQNFQRYTGIQHVHRIGMAERMWCDRNRERHTVSSSGGNRLPNPAPLPNPGVLSAPPNLIQRPKADDTSAATIEKKATATISAKPQITNPKAEITRFCPLH

SEQ ID NO: 43591 - protein, 394 aa, Homo sapiens
  DOMAIN (36)..(63): Mrp family proteins domain identified by eMATRIX, accession number BL01215A, p-value=4.964e-11, raw score of 9.75
MEIRGRVEQRVGYTIEQINHMRDVFGTRLRRAEDVFPPVIGVAAHKGGVYKTSVSVHLAQDLALKGLRVLLVEGNDPQGTASMYHGWVPDLHIHAEDTLLPFYLGEKDDVTYAIKPTCWPGLDIIPSCLALHRIETELMGKFDEGKLPTDPHLMLRLAIETVAHDYDVIVIDSAPNTRTGTKKAQCATQRADKNHTRRRNKTTPPGRTVRTHGKEVKNLEGKLDDWLIKITNSEKSLKDLMELKTKARELCDECTSLSSQFDQLEERPSLGELDKVFIRDKLMERRNRRTGRTEKARIWEVTDRTVRTWIGEAVAAAAADGVTFSVPVTPHTFRHSYAMHMLDAGIPLKVLQSLMGHKSISSTEVYHKVFALECGCPAPGANLPLPESEFRCQA

SEQ ID NO: 43592 - protein, 82 aa, Homo sapiens
  DOMAIN (47)..(61): Phage integrase family domain identified by eMATRIX, accession number PF00589B, p-value=1.621e-11, raw score of 16.17
KGRNIQLNGLVIGTLSNCLKCLKMFWIGEAVAAAAADGVTFSVPVTPHTFRHSYAMHMLYAGIPLKVLQSSDGSFFGCAEAL

SEQ ID NO: 43593 - protein, 362 aa, Homo sapiens
  DOMAIN (317)..(334): kw REPLICATION REPB REPA INITIATION domain identified by eMATRIX, accession number DM00653B, p-value=7.070e-10, raw score of 16.63
MLQSNRTAASHSPSIQPAIQPAIQPANQLSIHNLWTQFRHSTKIPVEWVNGEWLNGRMPGDHHEWQCNYQALQNFQRYTGIQHVHRIGMAERMWCDRNRERHTVSSSGGNRLPNPDKGHKYLVFEANTGTENGYQGEESLFNKAYYGGGTNFFRKESQKLQQSAKKRDAELANGALGIIELNNDYTLKKVMKPLITSNTVTDEIERANVFKMNGKWSLMKIYSFFIKNEGSAVLRHVDPHQLVIAVGEKVPGCRVSVVHSRSTVETSMSPQPSLFRRRTGVLWPRASSWMVGISAEPHPQCVPTVISRDVGSGGYDRDFDSVCVNEINSRTPMRLSYIEKKKGRQTTHIVFSFRDITSMTTG

SEQ ID NO: 43594 - protein, 103 aa, Homo sapiens
  DOMAIN (50)..(64): Phage integrase family domain identified by eMATRIX, accession number PF00589B, p-value=1.621e-11, raw score of 16.17
GVESNLVVVVALCHRLIYLVWGTRTVRTWIGEAVAAAAADGVTFSVAVTPHTFRHSYAMHMLYAGIPLKVLQSRVVALDVAARHRVQFAMPESDAVAMLKQLS

SEQ ID NO: 43595 - protein, 161 aa, Homo sapiens
  DOMAIN (29)..(43): Phage integrase family domain identified by eMATRIX, accession number PF00589B, p-value=1.621e-11, raw score of 16.17
LKCLKMFWIGEAVAAAAADGVTFSVPVTPHTFRHSYAMHMLYAGIPLKVLQSLAEDHMLAIQPLSLGSTDEKLGTVCVGSSICHGQDARNCMLPDEVLVIKFLPVDGLATSAIMACEVSHPNSCWCRCFIGEHFLKNIPFYSSFLCFFSHLMNNLINGVGD

SEQ ID NO: 43596 - protein, 328 aa, Homo sapiens
  DOMAIN (221)..(250): kw REPLICATION REPB REPA INITIATION domain identified by eMATRIX, accession number DM00653A, p-value=7.207e-27, raw score of 20.40
MVAFYLSTHIRRAQIHATTCMPTTFLHQTIQGVPRGFSYLAVLTVAIQTCLEMQLSPASTRCSWFGCWRPSRTNLIPSDSRIERQDTYPFPSHSLQPMLNAFRFFRVSENVIMRLLVFIRDKLMERRNRRTGRTEKARIWEVTDRTVRTWIGEAVAAAAADGVTFSVPVTPHTFRHSYAMHMLYAGIPLKVLQSLMGHKSISSTEVYTKVFALDVAARHRNRFTQFRLSETKEITNPYAMRLYESLCQYRKPDGSGIVSLKIDWIIERYQLPQSYQRMPDFRRRFLQVCVNEINSRTPMRLSYIEKKKGRQTTHIVFSFRDITSMTTG

SEQ ID NO: 43597 - protein, 111 aa, Homo sapiens
  DOMAIN (85)..(99): Phage integrase family domain identified by eMATRIX, accession number PF00589B, p-value=1.675e-09, raw score of 16.17
PDKERNEIWVDMYTVKPSGWTVRTFDKPRERFIAFFIAGILFRAIKNHFLPRETLQCLPYILTWIGEAVAAAAADGVTFSVPVTPHTVRHSYAMHMLYAGIPLKVLQSLFF

SEQ ID NO: 43598 - protein, 141 aa, Homo sapiens
MASERGRHFLRKEASNGTTPKYLSIPKNICRKDDVSESQCNGADVAASPGVVRFDFFSGFEPLPSFALQNFQRYTGIQHVHRIGMAERLSPWRHATFLSPVGGFHTADRSFIRRGVEGGNKNPHKRIRRTPDPKGTRTPDH

SEQ ID NO: 43599 - protein, 544 aa, Homo sapiens; identical to SEQ ID NO: 41014
  DOMAIN (95)..(124): kw REPLICATION REPB REPA INITIATION domain identified by eMATRIX, accession number DM00653A, p-value=7.207e-27, raw score of 20.40

SEQ ID NO: 43600 - protein, 531 aa, Homo sapiens
  DOMAIN (235)..(278): 1 kw MIND INHIBITOR DIVISION CONTROL domain identified by eMATRIX, accession number DM01756B, p-value=4.822e-15, raw score of 22.91
MKLMETLNQCINAGHEMTKAIAIAQFNDDSPEARKITRRWRIGEAADLVGVSSQAIRDAEKAGRLPHPDMEIRGRVEQRVGYTIEQINHMRDVFGTRLRRAEDVFPPVIGVAAHKGGVYKTSVSVHLAQDLALKGLRVLLVEGNDPQGTASMYHGWVPDLHIHAEDTLLPFYLGEKDDVTYAIKPTCWPGLDIIPSCLALHRIETELMGKFDEGKLPTDPHLMLRLAIETVAHDYDVIVIDSAPNLGIGTINVVCAADVLIVPTPAELFDYTSALQFFDMLRDLLKNVDLKGFEPDLSSFAKQALSQAQKSIDRVLDIQEEEPSIWAETIPYGEPGIYSRFFMERRNRRTGRTEKARIWEVTDRTVRTWIGEAVAAAAADGVTFSVPVTPHTFRHSYAMHMLYAGIPLKVLQSLMGHKSISSTEVYTKVFALDVAARHRCDNLKTCHTSHGSVMAETAVINHKKSKNSPRIVQSNDLTEAAYSLSRDQKRMLYLFVDQIRKSDGTLQEHDGICEIHVAKYAEIFGLTSAEA

SEQ ID NO: 43601 - protein, 1063 aa, Homo sapiens
  DOMAIN (407)..(421): Phage integrase family domain identified by eMATRIX, accession number PF00589B, p-value=1.621e-11, raw score of 16.17
MGMTVPALLLGIVMRFKLSDRAYVTVLAVKLLFLSTNPPLLWDAGAGTLQTTLPLPAAPCYDCQKRGMVTGHVPGQAEASKQGTWDAARQEALTLCVDPAVAQPHGNAKLCPFTISNLRTQTLISDEGLMRLTALPKVTHDEAQVIISVSVFYVWPKTILLPMWLREAKRLNTAALGFHIHSPLTDSPRATSSPASSIHGCPSHLKSMPGPEIAAILVGLQNAFFCQFDIFVTVDPHVLYLKYEDTYSGIINAPSRLCSPGGGPGQQQQHPPELIRNVPAPANPRPIESKTLRVGPSHLLFNKASRCTAKFENHCATTQGIGPDVKCSWPRASRYQQGHQDLFILRSDLPSQVFIRDKLMERRNRRTGRTEKARIWEVTDRTVRTWIGEAVAAAAADGVTFSVPVTPHTFRHSYAMHMLYAGIPLKVLQSLMGHKSISSTEVYTKVFALDVAARHRVQFAMPESDAVAMLKQLAESIPGDSSSMPMCTRQRASWAQLFNARVHQDHLESGAKLKLPDHLRTRMGWSAPWERLPVWERLLHGMDPPAMVQGLPEAALCLLLWQHPGSYTEQVFIRDKLMERRNRRTGRTEKARIWEVTDRTVRTWIGEAVAAAAADGVTFSVPVTPHTFRHSYAMHMLYAGIPLKVLQSLMGHKSISSTEVYTKVFALDVAARHRVQFAMPESDAVAMLKQLAESIPGDSSSMPMCTRQRASWAQLFNARVHQDHLESGAKLKLPDHLRTRMGWSAPWERLPVWERLLHGMDPPAMVQGLPEAALCLLLWQHPGSYTEQVFIRDKLMERRNRRTGRTEKARVWEVTDRTVRTWIGEAVAAAAADGVTFSVPVTPHTFRHSYAMHMLYAGIPLKVLQSLMGHKSISSTEVYTKVFALDVAARHREHAKMSLVTVPFYQKRHRHFDQSYRNIQTRYLLDEYASKKRAGETVTLKCTMLVTPDLKRVQPRAEWYRDGAGNAQIHLVNGQPPVILVHTCIEELRPGCSLANAHGVPSLESRIMGIGWFPGGKNGIRVDGLTEGSLYEFKIAAVNLAGIGEPSDPSEHFKCEAWTMPEP

SEQ ID NO: 43602 - protein, 106 aa, Homo sapiens; identical to SEQ ID NO: 35382
  DOMAIN (39)..(53): Phage integrase family domain identified by eMATRIX, accession number PF00589B, p-value=1.621e-11, raw score of 16.17

SEQ ID NO: 43603 - protein, 91 aa, Homo sapiens
  DOMAIN (54)..(68): Phage integrase family domain identified by eMATRIX, accession number PF00589B, p-value=1.621e-11, raw score of 16.17
EAWRKCCLFILEEASVCHVACDNHIVAFGLRHWIGEAVAAAAADGVTFSVPVTPHTFRHSYAMHMLYAGIPLKVLQSMFTQRHHKYWLVLV

SEQ ID NO: 43604 - protein, 773 aa, Homo sapiens
  DOMAIN (393)..(407): Phage integrase family domain identified by eMATRIX, accession number PF00589B, p-value=1.621e-11, raw score of 16.17
MNMNIKKIVKQATVLTFTTALLAGGATQAFAKENNQKAYKETYGVSHITRHDMLQIPKQQQNEKYQVPQFDQSTIKNIESAKGLDVWDSWPLQNADGTVAEYNGYHVVFALAGSPKDADDTSIYMFYQKVGDNSIDSWKNAGRVFKDSDKFDANDPILKDQTQEWSGSATFTSDGKIRLFYTDYSGKHYGKQSLTTAQVNVSKSDDTLKINGVEDHKTIFDGDGKTYQNVQQFIDEGNYTSGDNHTLRDPHYVEDKGHKYLVFEANTGTENGYQGEESLFNKAYYGGGTNFFRKESQKLQQSAKKRDAELANGALGIIELNNDYTLKKVMKPLITSNTVFIRDKLMERRNRRTGRTEKARIWEVTDRTVRTWIGEAVAAAAADGVTFSVPVTPHTFRHSYAMHMLYAGIPLKVLQSLMGHKSISSTEVYTKVFALDVAARHRCDNLKTCHTSHGSVMAETAVINHKKRKNSPRIVQSNDLTEAAYSLSRDQKRMLYLFVDQIRKSDGTLQEHDGICEIHVAKYAEIFGLTSAEANRKPDGSSIVSLKMTDHKRSSCLRYQRCRLPAPFCRRDAPRIWFPVGEGRRRKYHRLRGDCGGRRNVILCQLSGAEVIAELAEQRRGSLESAAENLPASSRTQQLKPSGSTQHNFRDRRNTTSRQPLPFSGLDTAHGGEKISSVSNLVWTWIGEAVAAAAADGVTFSVPVTPHTFRHSYAMHMLYAGIPLKVLQSLMGHKSISSTEVYTKVFALDVAARHRVQFAMPESDAVAMLKQLS

SEQ ID NO: 43605 - protein, 204 aa, Homo sapiens
  DOMAIN (136)..(150): Phage integrase family domain identified by eMATRIX, accession number PF00589B, p-value=1.621e-11, raw score of 16.17
NHASPGIPNLLLHPRGLRAITIAVFGKQNTYIRLEPFKINVLEQITKHIEKLQCGGVVKQLSRRGNNQHISSTYDINRADTQVRRAVNNYDIIVMSNSFNGQSEHQVWIGGQFTWIGEAVAAAAADGVTFSVPVTPHTFRHSYAMHMLYAGIPLKVLQSLSFFLLLFQLFEHLLKFSFLLFSLFQCGLILFLIGHGHHSQDQIY

SEQ ID NO: 43606 - protein, 174 aa, Homo sapiens
  DOMAIN (55)..(69): Phage integrase family domain identified by eMATRIX, accession number PF00589B, p-value=1.621e-11, raw score of 16.17
VFIRDKLMERRNRRTGRTEKARIWEVTDRTVRTWIGEAVAAAAADGVTFSVPVTPHTFRHSYAMHMLYAGIPLKVLQSLMGHKSISSTEVYTKVFALDVAARHRVQFAMPEDFADFGTTIKQDFRLLGQTSVDRLLQLSQGQAIKANPPVARLRGQNKKHLGARYADRLSTRVA

SEQ ID NO: 43607 - protein, 469 aa, Homo sapiens
  DOMAIN (362)..(391): kw REPLICATION REPB REPA INITIATION domain identified by eMATRIX, accession number DM00653A, p-value=7.207e-27, raw score of 20.40
MARYRLMHLRPTGLPDWKGASRISGARGAGWGPVRLGRLCADRALDGESRPGGGGQSGVPASEASQKAAHGRRLPPSLALGASLALAPTLAALERFNPPLHCGSPFLGWPRPEPAPSACGEVWRERRVRELGLRTGLRASASSGWPRAFRYQQGHQDLFILRSDLPSQVFIRDKLMERRNRRTGRTEKARIWEVTDRTVRTWIGEAVAAAAADGVTFSVPVTPHTFRHSYAMHMLYAGIPLKVLQSLMGHKSISSTEVYTKVFALDVAARHREHDGICEIHVAKYAEIFGLTSAEASKDIRQALKSFAGKEVVFYRPEEDAGDEKGYESFPWFIKRAHSPSRGLYSVHINPYLIPFFIGLQNRFTQFRLSETKEITNPYAMRLYESLCQYRKPDGSGIVSLKIDWIIERYQLPQSYQRMPDFRRRFLQVCVNEINSRTPMRLSYIEKKKGRQTTHIVFSFRDITSMTTG

SEQ ID NO: 43608 - protein, 1098 aa, Homo sapiens
  DOMAIN (560)..(603): 1 kw MIND INHIBITOR DIVISION CONTROL domain identified by eMATRIX, accession number DM01756B, p-value=4.822e-15, raw score of 22.91
MERDQWWGLQVAKRAGLAGGQSGRTVLRERVRIEIASTHIALAARHSDWRCCRNGRYPARGPAALQNFQRYTGIQHVHRIGMAERMWCDRNRERHTVSSSGGNRLPNPGPDRSCDNLKTCHTSHGSVMAETAVINHKKRKNSPRIVQSNDLTEAAYSLSRDQKRMLYLFVDQIRKSDGTLQEHDGICEIHVAKYAEIFGLTSAEASKDIRQALKSFAGKEVVFYRPEEDAGDEKGYESFPWFIKLHPEGFTVYISTHISFPSLSGYRTGLRSFGLVKQKKSPIRMPCVYTNTLCQYRKPDGSGIVSLKIDWIIERYQLPQSYQRMPDFRRRFLQCINAGHEMTKAIAIAQFNDDSPEARKITRRWRIGEAADLVGVSSQAIRDAEKAGRLPHPDMEIRGRVEQRVGYTIEQINHMRDVFGTRLRRAEDVFPPVIGVAAHKGGVYKTSVSVHLAQDLALKGLRVLLVEGNDPQGTASMYHGWVPDLHIHAEDTLLPFYLGEKDDVTYAIKPTCWPGLDIIPSCLALHRIETELMGKFDEGKLPTDPHLMLRLAIETVAHDYDVIVIDSAPNLGIGTINVVCAADVLIVPTPAELFDYTSALQFFDMLRDLLKNVDLKGFEPDVRAAAVHHYLHLSKPQLKTLMVLEMLIIVLKAWKEMEPAPAKRIYVIEYAGDHHSTFCVYEFDYLRYCMKGLVEQPVKPVLTTTYLDPAVHQDNQIKLKLHGGKKKVKIIQGDIIASNGLLHILDRAMDKLEPTFESNNEETNLGHALDEDGVGGPYTIFVPNNEALNNMKDGTLDYLLSPEVFIRDKLMERRNRRTGRTEKARIWEVTDRTVRTWIGEAVAAAAADGVTFSVPVTPHTFRHSYAMHMLYAGIPLKVLQSLMGHKSISSTEVYTKVFALDVAARHRCDNLKTCHTSHGSVMAETAVINHKKRKNSPRIVQSNDLTEAAYSLSRDQKRMLYLFVDQIRKSDGTLQEHDGICEIHVAKYAEIFGLTSAEANTKEITNPYAMRLYESLCQYRKPDGSGIVSLKIDWIIERYQLPQSYQRMPDFRRRFLQVCVNEINSRTPMRLSYIEKKKGRQTTHIVFSFRDITSMTTG

SEQ ID NO: 43609 - protein, 402 aa, Homo sapiens
  DOMAIN (302)..(316): Phage integrase family domain identified by eMATRIX, accession number PF00589B, p-value=1.621e-11, raw score of 16.17
VGVNSIDSWKNTGRVFKDSDKFDANDPILKDQTQEWSGSATFTSDGKIRLFYTDYSGKHYGKQSLTTAQALQNFQRYTGIQHVHRIGMAERMWCDRNRERHTVSSSGGNRLPNPGPDRSDLALKGLRVLLVEGNDPQGTASMYHGWVPDLHIHAEDTLLPFYLGEKDDVTYAIKPTCWPGLDIIPSCLALHRIETELMGKFDEGKLPTDPHLMLRLAIETVAHDYDVIVYVEVEELIGEIGEVRTPHVFIRDKLMERRNRRTGRTEKARIWEVTDRTVRTWIGEAVAAAAADGVTFSVPVTPHTFRHSYAMHMLYAGIPLKVLQSLMGHKSIQSTEVYTKGFALDVAAPHRVQFAMPEVFHAVFQPVGNRFSWSFLSVPVGGSGLEASAAPWLGYMGGYKET

SEQ ID NO: 43610 - protein, 85 aa, Homo sapiens
  DOMAIN (57)..(71): Phage integrase family domain identified by eMATRIX, accession number PF00589B, p-value=1.621e-11, raw score of 16.17
SQVFIRDKLMERRNRRTGRTEKARIWEVTDRTVRTWIGEAVAAAAADGVTFSVPVTPHTFRHSYAMHMLYAGIPLKVLQSPAVRL

SEQ ID NO: 43611 - protein, 269 aa, Homo sapiens
  DOMAIN (176)..(190): Phage integrase family domain identified by eMATRIX, accession number PF00589B, p-value=1.621e-11, raw score of 16.17
  misc_feature (1)...(269): Xaa = X or * as defined in Table 2
GSAAXLPPPLPAAFSGSCWLSQRHPELHVXNEIYHLLHXKSFTSCXHNLSSXPRYPYLSSERVLWXCLSFISKIXSVTMPXSDLISLWXKLEPLTCRSTSHFRQKLAQRLPAYQQGHQDLFILRSDLPSQVFIRDKLMERRNRRTGRTEKARIWEVTDRTVRTWIGEAVAAAAADGVTFSVPVTPHTFRHSYAMHMLYAGIPLKVLQSLMGHKSISSTEVYTKVFALDVAARHRVQFAMPESDAVAMLKHYPEINALALYLKCGTEWIC

SEQ ID NO: 43612 - protein, 604 aa, Homo sapiens
  DOMAIN (116)..(154): Chloramphenicol acetyltransferase proteins domain identified by eMATRIX, accession number BL00100D, p-value=7.677e-36, raw score of 17.22
MSHQALQNFQRYTGIQHVHRIGMAERMWCDRNRERHTVSSSGGNRLPNPEHRKEHFEAFQSVAQCTYNQTVQLDITAFLKTVKKNKHKFYPAFIHILARLMNAHPEFRMAMKDGFIENMFFVSANPWVSFTSFDLNVANMDNFFAPVFTMGKYYTQGDKVLMPLAIQLHAQLKMMTIPDREGLRLRALQNFQRYTGIQHVHRIGMAERMWCDRNRERHTVSSSGGNRLPNPAAPMVDSLIARVGVMARGNAITLPVCGRDVKFTLEVLRGDSVEKTSRVWSGNERDQELLTEDALDDLIPSFLLTGQQTPAFGRRVSGVIEIADGSRRRKAAALTESDYRVLVGELDDEQMAALSRLGNDCRPTSAYERGQRYASRLQKEFAGNISALADAEKYLRISDKLGNNTETSMSQKPCKMKRIILEKSWQFEKWIIIVILFHYGESWNLLRADQRLIFAKSWPRASRYQQGHQDLFILRSDLPSQVFIRDKLMERRNRRTGRTEKARIWEVTDRTVRTWIGEAVAAAAADGVTFSVPVTPHTFRHSYAMHMLYAGIPLKVLQSLKLRLAIETDAHDYDVIVIDSAPNLGIGNDNVVCAADVVNVPTAC

SEQ ID NO: 43613 - protein, 591 aa, Homo sapiens
  DOMAIN (235)..(278): 1 kw MIND INHIBITOR DIVISION CONTROL domain identified by eMATRIX, accession number DM01756B, p-value=4.822e-15, raw score of 22.91
MKLMETLNQCINAGHEMTKAIAIAQFNDDSPEARKITRRWRIGEAADLVGVSSQAIRDAEKAGRLPHPDMEIRGRVEQRVGYTIEQINHMRDVFGTRLRRAEDVFPPVIGVAAHKGGVYKTSVSVHLAQDLALKGLRVLLVEGNDPQGTASMYHGWVPDLHIHAEDTLLPFYLGEKDDVTYAIKPTCWPGLDIIPSCLALHRIETELMGKFDEGKLPTDPHLMLRLAIETVAHDYDVIVIDSAPNLGIGTINVVCAADVLIVPTPAELFDYTSALQFFDMLRDLLKNVDLKGFEPDRSLIDVVGVINSNLSPEIKEWRVRRIALTPLLILCCYMRLFGQAEAPHPQHRIWLQALDFLGHQDKILSVEKKMIWGSGIYPEQGCKLEKAQERRVGAGFTPVPAMPLSGALPVRNSSVGQDAQELILFHYGESWNLLRADQRLIFAKSWPRASRYQQGHQDLFILRSDLPSQVFIRDKLMERRNRRTGRTEKARIWEVTDRTVRTWIGEAVAAAAADGVTFSVPVTPHTFRHSYAMHMLYAGIPLKVLQSLMGHKSISSTEVYTKVFALDVAARHRVQFAMPESDAVAMLKQLS

SEQ ID NO: 43614 - protein, 56 aa, Homo sapiens
  DOMAIN (29)..(43): Phage integrase family domain identified by eMATRIX, accession number PF00589B, p-value=1.621e-11, raw score of 16.17
LKCLKMFWIGEAVAAAAADGVTFSVPVTPHTFRHSYAMHMLYAGIPLKVSAKLDLE

SEQ ID NO: 43615 - protein, 423 aa, Homo sapiens
  DOMAIN (48)..(62): Phage integrase family domain identified by eMATRIX, accession number PF00589B, p-value=1.621e-11, raw score of 16.17
  misc_feature (1)...(423): Xaa = X or * as defined in Table 2
MERRNRRTGRTEKARIWEVTDRTVRTWIGEAVAAAAADGVTFSVPVTPHTFRHSYAMHMLYAGIPLKVLQSLMGHKSISSTEVYTKVFALDVAARHRXHKTIFDGDGKTYQNVQQFIDEGNYTSGDNHTLRDPHYVEDKGHKYLVFEANTGTENGYQGEESLFNKAYYGGGTNFFRKESQKLQQSAKKRDAELANGALGIIELNNDYTLKKVMKPLITSNTVTDEIERANVFKMNGKWYLFTDSRGSKMTIDGINSNDIYMAWDHPVYCGMFSSIHGLYLLATSSIRFPADSRKWLRTLPNVLRGDTETGVCEVSPGTRSYEQRKNLSYRNHNYSMALVYLSCGGCKLQTTQEELGFCSNAEVGFDDAAAGDWELLPSWWWNGKIFLEGRSIPLPNTEHPTRNLALSKQTPSRPCPDPVDAFS

SEQ ID NO: 43616 - protein, 413 aa, Homo sapiens
  DOMAIN (346)..(360): Phage integrase family domain identified by eMATRIX, accession number PF00589B, p-value=1.621e-11, raw score of 16.17
RIPLKVLQSLMGHKSISSTEVYTKVFALDVAAPHRVQFAMPESDAAYYGGGTNFFRKESQKLQQSAKKRDAELANGALGIIELNNDYTLKKVMKPLITSNTVGGEIERANVFKMNGKWDLFTDSRGSKMTIDGINSNDIYMLGYVSNSLTGPYKPLNKTGLVLQMGLDPNDVTFTYSHFAVPQAKGNNVVITSYMTNRGFFEDKKATFAPSFLMNIKGNKTSVVKNSILEQGQLTWLQVAKRAGLGGGQSGRTVLRERVRIEIASTHIALAARHSDWRCCRNGRYPARGPAVFIRDKLMERRNRRTGRTEKARIWEVTDRTVRTWIGEAVAAAAADGVTFSVPVTPHTFRHSYAMHMLYAGIPLKVLQSLMGHKSISSTEVYTKVFALDVAARHRVQFAMPESDAVAMLKQLS

SEQ ID NO: 43617 - protein, 751 aa, Homo sapiens
  DOMAIN (641)..(655): Phage integrase family domain identified by eMATRIX, accession number PF00589B, p-value=1.621e-11, raw score of 16.17
HGRRWMSERWCCGRTVKRCCAARTQEDGCLQARKRFCTRNWINWHLDLGLPSLQNYEMRNKCLLFKPPSLWYFVIATQDDKDNKPKMKNGKVTKMSFKREQEAKVFIYLLPPPTSGALPPGTVHVPALLGLHRWNKRYKKPKPWGTRQKVEVTPLSLIYGGRSQMLHFPEFQGADLYALEQGQGVCDLRNLTTYRVVHKVSLGSLVYMTSNTGRTMMPGDVAGDGGGLGEAVFLSFRYSQGCHDKVPQWEWIKTQFWNVKVQDQDVMLLLKVLLQVTYSQVPPSMEYRELKGGELGVVPEPEKERCVATLQETVSLQEEGFVEKSSDFESKDTTRPRSDARQAISFYLCIQGHRVGSLKTAMLGIVTPWELPNSTQQRNASSMEISTQGLSCSQVGSFQMGNRCPVVNLLKRKKGPRIVEAAGMKKPHSETVPDWTDPGKNTTITIITPIIIYNRHHSHHHHFHQHYHAIITINITIILIINSITIIHILEKNWKTGFGIRESGFKIWLFFLGWIPKSLKTTSLASSKTEGSEYRCCLKAHVIMLLPIRQCCKDQMGKFREHQLHNYLASALSIALIPDDQLSEKKVFIRDKLMERRNRRTGRTEKARIWEVTDRTVRTWIGEAVAAAAADGVTFSVPVTPHTFRHSYAMHMLYAGIPLKVLQSLMGHKSISSTEVYTKVFALDVAARHRDTESSSVYVKWTGLVHMDRHLMNTDQDVAVLYTSNLAQLTTGQLRLTEEHRDSPIYMLQDS

SEQ ID NO: 43618 - protein, 199 aa, Homo sapiens
  DOMAIN (103)..(117): Phage integrase family domain identified by eMATRIX, accession number PF00589B, p-value=1.621e-11, raw score of 16.17
  misc_feature (1)...(199): Xaa = X or * as defined in Table 2
SYFIMVKVGTSYVPINVSFSPKVGPGASRYQQGHQDLFILRSDLPSQVFIRDKLMERRNRRTGRIYKARIWEVTDRTVRTWICRGGLPAAAADGVTFSDPGPPHTFRHSYAMHMLYARXYRXKFLQSLMGHKSHPINGKATPKVFGPGMGLARAHRGAGWQWPKSDAVGMPKQLSLRINALGLYMETGKPEGIMLFFGC

SEQ ID NO: 43619 - protein, 107 aa, Homo sapiens
VANDPEALGAMRRHYRSPGCALVPDIFGSGIPTIPEDSFMLYPRALTTHQTGFSACWGKPAWTACLQLSQGQAVKGNQLLPVSLVKRKTTLGAQYANRLSPRVGPIH

SEQ ID NO: 43620 - protein, 111 aa, Homo sapiens
  DOMAIN (51)..(65): Phage integrase family domain identified by eMATRIX, accession number PF00589B, p-value=1.621e-11, raw score of 16.17
DKLMERRNRRTGRTEKARIWEVTDRTVRTWIGEAVAAAAADGVTFSVPVTPHTFRHSYAMHMLYAGIPLKVLQSLMGHKCIRSTGRLPQRFLGLEWGLPGHPGGRLAMAEV

SEQ ID NO: 43621 - protein, 82 aa, Homo sapiens
  DOMAIN (49)..(69): kw TRANSCRIPTASE REVERSE II ORF2 domain identified by eMATRIX, accession number DM01354W, p-value=1.180e-22, raw score of 12.64
MIAILTGVRWYLIVVLICISLMAKENYKPVLKEIKEDTNKWKNISCSWVGRINIVKMAILPKVIYRLNAIPIKLPMTFFKEL

SEQ ID NO: 43622 - protein, 418 aa, Homo sapiens
  DOMAIN (57)..(104): kw TRANSCRIPTASE REVERSE II ORF2 domain identified by eMATRIX, accession number DM01354V, p-value=1.000e-40, raw score of 12.97
MIVYLENPIVSAQNLLKLIGSFSKVSGYKINVQKSQAFLYTNNRQTESQIMSELPFTIASKRIKYLGIQLTRDVKDLFKENYKPLLNEIKEDTKKWKNIPCSWVGRINIVKMAILPKVIYRFNAVPIKLPMTFFTELKKTTLKFIWNQKRARIAKSILSQKNKAGGITLPDFKLYYKATVTKTAWDWYQNRDIDQCNRTEPSEITPHIYNYLICDKPEKNKQWGKVSLFNKWCWENWLAICRKLKLDPFLTPYTKINSRWIKDLNVRPKAIKTLEENLGNTIQDIGMDKDFMSKTPKAMATKAKIDKWDLIKLKSFCTAKETTIRVNRQPTQWEKIFATYSSDKGLISRIYNALRQIYKKKTNNPIKKDMDETGNHHSQHTIARTKNQTPHVLTHGWELNNENTWTQEGEHHTLGTVV

SEQ ID NO: 43623 - protein, 359 aa, Homo sapiens
  DOMAIN (50)..(97): kw TRANSCRIPTASE REVERSE II ORF2 domain identified by eMATRIX, accession number DM01354V, p-value=1.000e-40, raw score of 12.97
MDKFLDTYTLPRLNQEEVESLNRPITGSEIVAIINSLPTKKDPGPDGFTAEFYQRIKYLGIQLTRDVKDLFKENYKPLLKEIKEDTNKWKNIPCSWVGRINIMKMAILPKVIYRFNAIPIKLPMTFFTELEKTTLKFIWNQKRARITKSILSQKNKAGGITLPDFKLYYKATVTKTAWYCYQNRDIDQWNRAEPSEIMLPIYNYLIFDKPDKNKQWGKDSLFNKWCWENWLAICRKLKLDPFLTPYTKINSRWIKDLHVRPKTIKTLEENLGNTIQDIGMGKDFMSKTPKAMATKAKIDKWDLIKLKSFCTAKETTIRVNRQPTKWEKIFTTYSSDKGLISRIYNELKQIYKKKTTPSK

SEQ ID NO: 43624 - protein, 324 aa, Homo sapiens
  DOMAIN (144)..(191): kw TRANSCRIPTASE REVERSE II ORF2 domain identified by eMATRIX, accession number DM01354V, p-value=1.000e-40, raw score of 12.97
TSLSTPAAPMVDSLIARVGVMARGNAITLPVCGRDVKFTLEVLRGDSVEKTSRVWSGNERDQELLTEDALDDLIPSFLLTGQQTPAFGRRVSGVIEIADGSRRRKAAALTESDYRVLVGELDDEQMAALFRLGNDYRPTSAYERVASKRIKYLGIQLTRDMKDLFKENYKLLLNEIKEDTNKWKTIPCSWVGRINIVKMAILPKVIYRFSAIPLKLPMTFFTELEKTTLTFIWNQKRARIAKSILSQKNKAGGIRLPDFKLYYKTTVTKTAWYWYHSRDRGQWNRTEPSEIMLRIYNHLIFDKPDKTSNWGRIPLFNNDAGKTD

SEQ ID NO: 43625 - protein, 334 aa, Homo sapiens
  DOMAIN (207)..(254): kw TRANSCRIPTASE REVERSE II ORF2 domain identified by eMATRIX, accession number DM01354V, p-value=1.000e-40, raw score of 12.97
MGKKQNRKTGNSKKQSASPPPKERSSSPAKEQSWMENDFEELREEGFRLSNYSELREDIQTKGKEVENFEKNLAVCITRITNTENCLKELMELKTKARELREECRSLRSRCDQLEERWLEVLARAIRQEKEIKGIQLGKEEVKLSLFADDMIVYLENPIVSAQNLLKLISNFSKVSGYKINVQKSQAFLYTNNRQTESQIMSELPFTIASKRIKYLGIQLTRDVKDLFKENYKPLLKEIKEDTNKWKNIPCSWVGRINIVKMAILPKVIYRFNAIPIKLPMTFVTELEKTTLKFIWNQKRARIAKSILSQKNKAGGITLPDFKVYYKASVTKTA

SEQ ID NO: 43626 - protein, 97 aa, Homo sapiens
  DOMAIN (36)..(83): kw TRANSCRIPTASE REVERSE II ORF2 domain identified by eMATRIX, accession number DM01354V, p-value=1.000e-40, raw score of 12.97
  misc_feature (1)...(97): Xaa = X or * as defined in Table 2
WRKIYEANGKKRKQRLQSXSLMKQTLNQQRSKETKKASASMRIKYLGIQLTRDVKDLFKENYKPLLNEIKEDTNKWKNIPCSWVGRINIVKMAIPPK

SEQ ID NO: 43627 - protein, 674 aa, Homo sapiens; identical to SEQ ID NO: 35784
  DOMAIN (109)..(154): kw TRANSCRIPTASE REVERSE II ORF2 domain identified by eMATRIX, accession number DM01354N, p-value=1.000e-40, raw score of 13.17

SEQ ID NO: 43628 - protein, 754 aa, Homo sapiens; identical to SEQ ID NO: 32653
  DOMAIN (208)..(254): kw TRANSCRIPTASE REVERSE II ORF2 domain identified by eMATRIX, accession number DM01354O, p-value=1.000e-40, raw score of 8.73

SEQ ID NO: 43629 - protein, 92 aa, Homo sapiens; identical to SEQ ID NO: 35470
  DOMAIN (31)..(78): kw TRANSCRIPTASE REVERSE II ORF2 domain identified by eMATRIX, accession number DM01354V, p-value=1.000e-40, raw score of 12.97

SEQ ID NO: 43630 - protein, 415 aa, Homo sapiens
  DOMAIN (37)..(83): kw TRANSCRIPTASE REVERSE II ORF2 domain identified by eMATRIX, accession number DM01354O, p-value=1.000e-40, raw score of 8.73
MDKFLDTYTLPRLNQEEVESLNRPITGAEIVAIINSLPTKKSPGPDGFTAEFYQRYKEELVPFLLKLFQPIEKEGILPNSFYETSIILIPKPGRDTTKKENFRPISLMNIDAKILNKILANRIQQHIKKLIHHDQRIKYLGIQLKRDVKDLFKENYKPLLNEIKEDTNKWKNIPCSWLGRINIMKMAILPKVIYRFNAIPIKLPMTFFTELEKTTLKFIWNQKRAHIAKSILSQKNKAGGITLPDFRLYSKATVTKTAWYWYQNRDIDQWNRTEPSEITPHIYNYLIFDKPEKNKQWGKDSLFNKWCWENWLAICRKLKLDPFLTPYTKINSRWIKDLNVIPKTIKTLEENLGITIQDIGMGKDFMSKTPKAMETKAKIDKWDLIKLKSFCIAKETTIREQATHKMGENFRNLLI

SEQ ID NO: 43631 - protein, 401 aa, Homo sapiens
  DOMAIN (174)..(219): kw TRANSCRIPTASE REVERSE II ORF2 domain identified by eMATRIX, accession number DM01354N, p-value=1.000e-40, raw score of 13.17
MGKKQSRKTGNSKKQSTSPPPKERSSSPAMEQSWMENDFDELREEGFRRSNYSELQEEIQTKGKEDENFEKNLDECITRITNTENCLKELMELKAKTREIHEECRSLRRRCDQLEERVSVMEDEMNEMKINKIDRPLARLVKKKREKNQIDAIKNDKGDITTDPTEIQTTIRKYYKHLYANKLENLEEMDKFLDTYTLPRLNQEEVDSLNRPITGSEIVAIVNSLPTKKSPGPDGFTAKFYQRYKEELLISNFSKVSGYKINVQKSQAFLYTDNRQTESQIMSELTFTIASKRIKYLGIQLTRDVKDLFKENYKLLLNEIKEDTNKWKNIPCSWVGRINIMKMAILPKVIYRFNAIPIKLPMTFFIELEKNYFKVHMEPKKSPHSQVNPKPKEQSWRHHTT

SEQ ID NO: 43632 - protein, 229 aa, Homo sapiens
  DOMAIN (7)..(54): kw TRANSCRIPTASE REVERSE II ORF2 domain identified by eMATRIX, accession number DM01354V, p-value=1.000e-40, raw score of 12.97
MSELPFTIASKRIKYLGIQLTRDVKDLFKENYNPLLNEIKEDTNEWKNIPCSWVGRINIVKMAILPKATVTKIAWYWYQNRDIDQWNRTERSEIMPHIYNYLIFKKPEKNKQWGKDSLFDKWCSENWLAICRKLKLDPFLTPYTKINSRWIKDLNVRPKTIKTLEENLGITIQDIGIGKDFMSKTPKAMATKAKIDKWDLIKLKLLHSKRNYHQSEQAIYKMGNYIFFR

SEQ ID NO: 43633 - protein, 456 aa, Homo sapiens; identical to SEQ ID NO: 35471
  DOMAIN (291)..(338): kw TRANSCRIPTASE REVERSE II ORF2 domain identified by eMATRIX, accession number DM01354V, p-value=1.000e-40, raw score of 12.97

SEQ ID NO: 43634 - protein, 747 aa, Homo sapiens; identical to SEQ ID NO: 35787
  DOMAIN (322)..(368): kw TRANSCRIPTASE REVERSE II ORF2 domain identified by eMATRIX, accession number DM01354O, p-value=1.000e-40, raw score of 8.73

SEQ ID NO: 43635 - protein, 276 aa, Homo sapiens
  DOMAIN (165)..(212): kw TRANSCRIPTASE REVERSE II ORF2 domain identified by eMATRIX, accession number DM01354V, p-value=1.000e-40, raw score of 12.97
LKKCIKTPEIPSKHVRNWVPKVLEQRRQGLETYLQVASITLIPKADEDTPKKKTTDKNSWTGTDAKVFNKILEIKFSSILKRLYWPVLEVLARAMRQEKEIKGIQLGKEEVKLSRFADDMIVYLENPIVSAQNLLKLISNFSKVSGYKINVQKSQAFLYTNNRQTESQIRIKYLGIQLTRDVKDLFKENYKPLLKEIKEDTNKWKNIPCSWVGRINIVKMAILPKRYPFCQLCHQSAISTTKGVFTSILPLLMIEQLVSGRSCPSVAWSSMECTTV

SEQ ID NO: 43636 - protein, 438 aa, Homo sapiens
  DOMAIN (99)..(124): 7 kw REVERSE TRANSCRIPTASE RNA POLYMERASE domain identified by eMATRIX, accession number DM00895E, p-value=3.333e-11, raw score of 15.72
MDQFLDTYTLPRLNQEEVESLNRPIAGSEIVEIMNSLPTKKSPGPDGLTAEFYQRYKEELVPFLLKLFQSIEKEGILPNSFYETSIILIPKPGRDITKKENFRPISLMNIDAKILNKILANRIQQHIKKLIHHDQLISNFSKVSGYKINVQKSQAFLYTNNRQTESQIMSELPFTIASKRIKYLGIQLTREVKDLFKENYKPLLNEIKEDTKKWKNIPCSWVGRIKIMKMAILAKACLTRAPEGRTKHEKEQPVPATAKTCQIVKTIDARKKLHELLSKITAPHHTYSKIDRIVGSKALLSKCKRTEIITNCLSDHSAIKLELRIKKLTQNHSTTWKLNNLLLNDYWLHKEMKAEIKMFFETNENKDTTYQNLWDAFKAVCRGKFIALNAHKRKQKRSKIDTLTSQLKELEKQEQTHSKASRRQEITKIRAELKEIET

SEQ ID NO: 43637 - protein, 281 aa, Homo sapiens; identical to SEQ ID NO: 43396
  DOMAIN (109)..(156): kw TRANSCRIPTASE REVERSE II ORF2 domain identified by eMATRIX, accession number DM01354V, p-value=1.000e-40, raw score of 12.97

SEQ ID NO: 43638 - protein, 336 aa, Homo sapiens
  DOMAIN (7)..(54): kw TRANSCRIPTASE REVERSE II ORF2 domain identified by eMATRIX, accession number DM01354V, p-value=1.000e-40, raw score of 12.97
MSELPFTIASKRIKYLGIHLTRDVKDLFKENYKPLLKEIKEDKNKWKNIPCSWVGRINIMKMAILSKVIYRFNAIPIKLPMTFFTELEKTTLKFIWNQKRARIAKSILSQKNKAGGIMLPDFKLCYKATVTKTAWYWYQNRDIDQWNRTEPSEITPHIYNYLIFDKPDKNKQWGKDSLFNKWCWENWLAICRKLKLDPFLTPYTKINSRWIKDLNVKPKTIKTLKENLGITIQDIGTGKDFMSKTPKAMATKAKIDKWDLIKLKSFCTAKETTIRVNRQPTKWEKVFATYSSDKGLISRICNELKQIYKKKTNNPIKKWVKDMNRHRNTFTLLVGL

SEQ ID NO: 43639 - protein, 57 aa, Homo sapiens
RIKYLGIQLTRDVKDLFKENYKPLLKEIKEDTNKWKNIPCSWVGRINIVKMAILPKE

SEQ ID NO: 43640 - protein, 107 aa, Homo sapiens
  DOMAIN (43)..(63): kw TRANSCRIPTASE REVERSE II ORF2 domain identified by eMATRIX, accession number DM01354W, p-value=5.610e-13, raw score of 12.64
RIKYLGIQLTRDVKDLFKENYKPLLKEIKEDTNKWKNIPCSWVGRINIVKMAILPKRYPFCQLCHQSAISTTKGVFTSILPLLMIEQLVSGRSCPSVAWSSMECTTV

SEQ ID NO: 43641 - protein, 672 aa, Homo sapiens
  DOMAIN (357)..(404): kw TRANSCRIPTASE REVERSE II ORF2 domain identified by eMATRIX, accession number DM01354V, p-value=1.000e-40, raw score of 12.97
SLSLGLASVEHTECPSAFDLRDSLFIGLFWKLYGDVPFIEERHRHRFEVNPNLIKQFEQNDLSFVGQDVDGDRMEIIELAKLFLRANRTEIKASELRKNTEVVVSNQAGTPCTDFQTVLSELESGLLREQAMGALGSFLLQLSSSTLSGSCAMVLQERFHLKKSFLCSETAQLMPLIGHPNVVPCQMWAVTLCSRFTIPVILDSHTERKDKMHTNPYGTACSSLNSPEGFACCVLIHIPDLLSERGIGIYILLEWLFTDSLGEQGESEVTRWRIGGELLGELQLLNVFALAFLVLLIVMLGCQFWIFPAFSAQNLLKLISNFSKVSGYKINVQKSQAFLYTNNRQTESQIMSELPFTIASKRIKYLGIHLTRDVKDLFKENYKPLLNEIKEDTNKWKNIPCSWVGRINIVKMAILPKVIYRFNAIPIKLPMTFFTELEKTTLKFIWNQKRALIAKSILSQKNKAGGITLPDFKLYCKATVTKTTWYWYQNRDIDQWNRTEPSEITPHICNYLIFDKPEKNKEWGKDSLFNKWCWENWLAICKRLKLDPFLTPYTKINSRWIKDLNVRPKTIKTLEENLGITIQDIGMGKDFMCKTPKAMATKAKIDKWDLIKLKSFCTAKETTIRVNRQPTKWEKIFATYSSDKGLISRIYNELKQIYKKKQTTPSKSGRRT

SEQ ID NO: 43642 - protein, 491 aa, Homo sapiens
  DOMAIN (289)..(336): kw TRANSCRIPTASE REVERSE II ORF2 domain identified by eMATRIX, accession number DM01354V, p-value=1.000e-40, raw score of 12.97
MHVLIQQYSLGDCYRPANCCRHWKLKGQAYGLTEADILVESGTRLYLVESVLLLWEREGSRAGTVRLTVFLSADLSESIPIFMILLSDWLSKEDCFCEDGEVICMRGNFKLQECISQDTDKKGNPSQVVQTKGSQCKGYLQSPMGLVLVGSLLPHAPSGTQAFVPLSSVRRELSIQLACEEKEKAKISQGNFLDHSKKSMLEVLARAIRQEKEIKGIQLGKEEVKLSLFADDMIVYLENPIVSAQNLLKLISNFCKVSGYKINVQKSQAFLYTNNRQTESQILSELPFTIDSKRIKYLGIQLTRDVKDLFKENYKPLLNEIKEDTNKWKNILCSWVGRINIVKMAILPKVIYRFNAILIKLPMTFFTELEKTTLKFIWNEKRAHIAKSILSQKNKAGGVMLPDFKLYYKATVTQTACYWYQNRHIDQWNRTEPSEIMPHIYNYLIFDKPDKNKQWGKDSLFNKWCWENWLAICRKLKLDPFLTPYTKINSR

SEQ ID NO: 43643 - protein, 212 aa, Homo sapiens
  DOMAIN (57)..(100): kw TRANSCRIPTASE REVERSE II ORF2 domain identified by eMATRIX, accession number DM01354T, p-value=1.000e-40, raw score of 9.48
MIISVDAEKAFDKIQQPFMLKPLNKLGIDGTYCKIIRAIYDKPTANIILNGQKLEAFPLKTGTRQGCPLSPLLFNIVLEVLARAIRKEKEIKCIQLGKEEVKLSLFADDMIVYLENHIVSAQNLLNLISNFSKVSGYQINVQKSQAFLNTNSRQTKSQIMSELPFTVATKRIKYLGIQLTRDVKDLFKENYKPLLKEIKEDTNKWKNIPCSW

SEQ ID NO: 43644 - protein, 152 aa, Homo sapiens
  DOMAIN (7)..(54): kw TRANSCRIPTASE REVERSE II ORF2 domain identified by eMATRIX, accession number DM01354V, p-value=1.000e-40, raw score of 12.97
MSEFSFIIASKRIKYLGIQLTRDVKDLFKENYKPLLNEIKEDTKKWKNIPCSWVGRINIVKMAILPKVSSGPGEAGAKAGAFIGHIGTAAVSTERERERERNRVWKLFSKSWEMQSHRRMTGPSSNPNEITSKYLGAFQLLLVELDKSDLRQ

SEQ ID NO: 43645 - protein, 206 aa, Homo sapiens
  DOMAIN (57)..(104): kw TRANSCRIPTASE REVERSE II ORF2 domain identified by eMATRIX, accession number DM01354V, p-value=1.000e-40, raw score of 12.97
MIVYLENPIVSAQNLLKLISNFSKVSGYKINVQKSQAFLYTNNRQTESQIMGELPFTIASKRIKYLGIQLTRDVKDLFKENYKPLLKEIKEDTNKWKNIPCSWVGRINIVKMAILPKVLKMVCPEFVLSDVRMCSEFLPSGGFVVLLASGVKVQTFVVSVTALKLACLELFVLPVRSCPFFLSGVVHSSRWAPGLAGLRSEPADLC

SEQ ID NO: 43646 - protein, 431 aa, Homo sapiens; identical to SEQ ID NO: 35797
  DOMAIN (198)..(245): kw TRANSCRIPTASE REVERSE II ORF2 domain identified by eMATRIX, accession number DM01354V, p-value=1.000e-40, raw score of 12.97

SEQ ID NO: 43647 - protein, 320 aa, Homo sapiens
  DOMAIN (175)..(222): kw TRANSCRIPTASE REVERSE II ORF2 domain identified by eMATRIX, accession number DM01354V, p-value=1.000e-40, raw score of 12.97
MGRRRTIDPFTTGLFDGVANDRHCILVTIHRARPTAISRSEGTTVFRRSVQRTNVTVNRSRVLTIKRVFLDDGTLENDLTTSDGLDSRIKTEGWLGLRVRVWRWDGTWGFKGVYDLTDNEREGDFFDGEAQNLLKVISNFSKVSGYKINVQKSQAFLYTNNRQTESQIMSELPFTIASKRIKYLGIQLTRDVKHLFKENYKPLLNEIKEDTNKWKNIPCSWVGRINIVKMAILPKVIYRFNAIPIKLPMTFPAAMEKTTLKFIWNQKRARIAKSILSQKNKAGGITLPDFKLYYKATVTKIAWYWYQNRDIDQWNRSEPS

SEQ ID NO: 43648 - protein, 238 aa, Homo sapiens; identical to SEQ ID NO: 43403
  DOMAIN (58)..(105): kw TRANSCRIPTASE REVERSE II ORF2 domain identified by eMATRIX, accession number DM01354V, p-value=1.000e-40, raw score of 12.97

SEQ ID NO: 43649 - protein, 204 aa, Homo sapiens
  DOMAIN (57)..(104): kw TRANSCRIPTASE REVERSE II ORF2 domain identified by eMATRIX, accession number DM01354V, p-value=1.000e-40, raw score of 12.97
MIVYLENPIVSAQNLLKLISNFSKVSGYKINVQKSQAFLYTNNRQTESQIMSELPFTIASKRIKYPGIQLTRDVKDLFKENYKPLLKEIKEDTNKWKNIPCSWVERINIVKMAILPKTAKNGPVLPPLHSEEKIPFNSPLIIPLNNYGNQSLTKAQVNVSKSDDTLKINGVEDHKSIFDGDGKTYQTVQQFIDEGNYTSGDNHT

SEQ ID NO: 43650 - protein, 330 aa, Homo sapiens; identical to SEQ ID NO: 40440
  DOMAIN (10)..(65): kw TRANSCRIPTASE REVERSE II ORF2 domain identified by eMATRIX, accession number DM01354Q, p-value=1.000e-40, raw score of 9.23

SEQ ID NO: 43651 - protein, 412 aa, Homo sapiens
  DOMAIN (106)..(149): kw TRANSCRIPTASE REVERSE II ORF2 domain identified by eMATRIX, accession number DM01354T, p-value=1.000e-40, raw score of 9.48
MDKFLDTYTLPRLNQEEVESLTRPITGSEIVAIINSLPTKKSPGPDGFTADFYQRCRKGLDKIQQPFMLKTLNKLGIDGMYFKIIRAIYDKPTANIILNGQKLEAFPLKTGTRQGCPLSPLLFNIVLEVLARAIRQEKEIKGIQLGKEEVKLSLFADDMIVYLENPIVSAQNLLKLISNFSKVSGYKINVQKSQAFLYTNRQTESQIMSELPFTIASKRIKYLGIQLTRDVKDLFKENYKPLLNEIKEDTNKWKNIPCSWVGRINIMKMSILPKVIYRFNAIPIKLPMTFFTELEKTTLKFIWNQKRARIAKSILSQKKKAGGVTLPDFKLYYKATVTKTAWSYLFRGKNGKWKDEVSFLVMFSRMNTCEGQARNLFLEKVNPENLEGPSEWQIEDRNLKENKSKKIGRLNP

SEQ ID NO: 43652 - protein, 357 aa, Homo sapiens; identical to SEQ ID NO: 35805
  DOMAIN (148)..(193): kw TRANSCRIPTASE REVERSE II ORF2 domain identified by eMATRIX, accession number DM01354N, p-value=1.000e-40, raw score of 13.17

SEQ ID NO: 43653 - protein, 296 aa, Homo sapiens
  DOMAIN (169)..(216): kw TRANSCRIPTASE REVERSE II ORF2 domain identified by eMATRIX, accession number DM01354V, p-value=1.000e-40, raw score of 12.97
KLPMGVAVVKLLHLPKVIIVFWLASWMMSRWLHYPDWVTIIAQQVLMNVVSVMQADCRMNLLEIFLRWLMRKIFHVRLLPAVSTPPNCLNQLLLFFLTPVNYLPGQVMHFKKPLQIKRNYLSSRHLTFMSRKKLGKVSGYKIHVQKSQAFLSANSGQTESQIMSELPFTMASKRIKYLGIQLTRDVKDLFKEKYKSLLNEIKEDTNKWKNNPCSWVGRINIMKMAILPKVIYRFNAIPIKLPMTFFTELEKTTFKFIWNQKRAHIAKSNLSQKNKAGGITLPDFKLYYKATVTKTT

SEQ ID NO: 43654 - protein, 312 aa, Homo sapiens
  DOMAIN (127)..(174): kw TRANSCRIPTASE REVERSE II ORF2 domain identified by eMATRIX, accession number DM01354V, p-value=1.000e-40, raw score of 12.97
TPTDLHLRVLTVRRKTNKQKGHPHQNPICTSPSSKTKVLEVLARAIRQEKEIKGIQVGKEEVKLSLFADDMIVYLENPIVSAQNLLKLISNFSKVSGYKINVQKSQAFLYTNNRQTESQITSELPFTIASKRIKYLGIQLTRGVKDLFKENYKPLLNEIKEDTNKWKNIPCSWVGIINIVKMAILPKVIYRFNAIPIKLPMTFFTELETTTLKFIWNQKRARIAKSILSQKNKAGGITLPDFKLYYKATVTKTAWYWYQNRDIDQWNRIEPSEIMPHIYKKVQIAKATLNKMNKPGGITLPDFKIYYKDIVT

SEQ ID NO: 43655 - protein, 757 aa, Homo sapiens
  DOMAIN (44)..(89): kw TRANSCRIPTASE REVERSE II ORF2 domain identified by eMATRIX, accession number DM01354N, p-value=1.000e-40, raw score of 13.17
VLLSFGTPLVLTTDLLQALSSLPFMESGLFQGEGDEIQITSIEYYKHLYANKLENLEEMDKLLDTYTLPRLNQEGVESLNRPITGSEIEAIINSLPTKKGPGPDGFTAKFCQRYKEELHIKKLIHHDQVGFIPGMQGWFNIRKSINVIEHINRTKDKNHMIILIDAEKAFDKIQQPFMLKTLNKLGIDGTYLKIIRAIYGKPTVNIILNRQKLEAFPLKTGTRQGCPLSPLLFNIVLEVLAKAIRQEKEIKGIQLGKEEVKLSLFADDMIVYLENPIISAQNLLKLTGNFSKVSGYKINVQKSQAFLYTNNRQTESQIMSELPFTIASKRIKYLGIQLTRDVKDLVKENYKPLLKEIKEDTNKWKNIPCSWVGRINILKMAILPKVIYRFNAIPIKLPMTFFTELEKTTLKFIWNQKRACIAKSILSQKNKAGGITLPDFKRCYKATVTKTAWYWYQNRGIDQGNRTEPSEIMPHIYNHVIFDKPDKNKQWGNDSLVNKWCWENWLAMCRKLKLDPFLTPYTKINSRWIKDLHVRPKTIKTLEENLGNIIQDIGMGKDFISKAPKATATKANIDKWDLIKLKSFCTAKATTIRVNRQPTEWEKIFAIYSSDKGLISRIYNELKQIYKKKTNNPIKKWAKDMNRHFSKEDIYAAKRHMKKCSSSLAIREMQIETTMRYHLTPVRMAIIKKSGNNRNIQTVLLLRIPFQGLVPSPSGQTHPVGDQPAAHVDSIDADTRLRGQNHIPEELGRGVVSNPVE

SEQ ID NO: 43656 - protein, 367 aa, Homo sapiens
  DOMAIN (259)..(300): kw TRANSCRIPTASE REVERSE II ORF2 domain identified by eMATRIX, accession number DM01354I, p-value=1.000e-40, raw score of 15.55
RAIRQEKEIKGIQLGKEEVKLSPFADDMIVYLENPIVSAQNLLKLISNFSKVSGYKINVQKSQAFLYSNKRQTENQIMSELPFTIASKRIKYLGIQLTRDVKDLFKENYKPLLNEIKEDKNKWKNIPCSRVGRINIVKMAILPKVIYRFKFPLTTDQENVVRLTRQKVNKGIQELNSALPRVDLIDIYRTLQPKSTEYTFFSVPHHNYSKIDHIVGSKALLSKCKRTEIITNCLSDHSAIKLELRIKKHTQNRSTTWKLNNLLLNDYWVHNKMKAEIKMFFETNENKDTTYQNLWDTFKAVCRGKFIALNAHKRKQERSKIDTLTSQLKELEKQEQTHSKASRRQQITKIRAELKEIETQKNPSKNQ

SEQ ID NO: 43657 - protein, 705 aa, Homo sapiens
  DOMAIN (171)..(214): kw TRANSCRIPTASE REVERSE II ORF2 domain identified by eMATRIX, accession number DM01354T, p-value=1.000e-40, raw score of 9.48
MELKTKARELREECRSLRSRCDQLEERVSAMEDEMNEMKREGKFREKRIKRNEQSLQEIWDYVKRPNLRLIGVPESDGENGTKLENTLQDIIQENFPNLARQANHINRAKDKTHMIISIDAEKAFDKIQQLFMLKTLNKLGIDGTYFKIIRAIYDKPTANIILNGQKLEAFPLKTGTRQGCPLSPLLFNIVLEVLARAIRQEKEIKGIQLAKEEVKLSLFADDMIVYLENPIVSAQNLLKLISNFGKVSGYKINVQKSQAFLYTNTRQTESQIMSELPFTIASKRIKYLGIQLTRDVKDLFKENYKPLLKEIKEDTNKWKNIPCSWVGRINIVKMAILPKVIYRFNAIPIKLPMTFFTELEKTTLKFIWNQKRARIAKSILSQKNKAGGITLPDFKLYYKATVTKTAWYWYQNKDIDQWNRTEPSEIMSHIYNYPIFDKPDKNKKWGNNSLFNKWCWENWLAICRKLKLDPFLTPYTKINSRWIKDLHVRPKTIKTLEENLSNTIQDIGMGKDFMSKTPKAMATKAKIDQWDLIKLKSFCTAKETTIRVNRQPTEWEKIFATHSSDKGLLSRIYNELKQIYKKKTDNPINKWAKDMNRHFSKEDIYAAKRHMKKCSSSLAIREMQIKTTMRYHLTPVRMAIIKKSGNNRWNISEDPGLALSCIKEASITVPSLRCAVSIIQGILSNWVQKITGSGSMRASVFREA

SEQ ID NO: 43658 - protein, 482 aa, Homo sapiens; identical to SEQ ID NO: 40449
  DOMAIN (197)..(244): kw TRANSCRIPTASE REVERSE II ORF2 domain identified by eMATRIX, accession number DM01354V, p-value=1.000e-40, raw score of 12.97

SEQ ID NO: 43659 - protein, 556 aa, Homo sapiens
  DOMAIN (151)..(198): kw TRANSCRIPTASE REVERSE II ORF2 domain identified by eMATRIX, accession number DM01354V, p-value=1.000e-40, raw score of 12.97
MESFQCALKEVGLDEPLRLAGFRGDSAHYQLWWLQGKSKEAKAEAKVKATLSCTLGTKTATVLEVLARAIRQEKEIKGIQLGKEEVKLSLFADDMIVYLENPIVSAQNLLKLISNFSKVSGYKINVQKSQAFLYTNNRQTESQIMSELPFTIASKRIKYLGIQLTRDVKDLFKENYKPLLKEIKEDTNKWKNIPCSWVGRINIVKMAILPKGIYRFNAIPIKLPMIFFTELEKTTLKFIWNQKRARIAKSILSQKNKSGGITLPDFKLYYKATVTKTAWYWSQNRDIDQWNRTEPSEITPRIYNYLIFDKPEKNKQWGKDSLFNKWCWENWLAICRKLKLDPFLTPYTKINSRWIKDLNVRPKTIKTLEENLGITIQDIGVGKDFMSKTPKAMATKAKIDKWDLIKLKSFCTAKETTIRVNRQPTTWEKIFATYSSDKGLISRIYNELKQIYKKKTNNPIKKWAKDMNRHFSKEDIYAAKKHMKKCSSSLAIRKILFKKISSTFILDSGVTLQRLDFNILLNLVDLLCHPDSEFYVCHFRHFNLVRIHQGANAIFA

SEQ ID NO: 43660 - protein, 941 aa, Homo sapiens
  DOMAIN (479)..(526): kw TRANSCRIPTASE REVERSE II ORF2 domain identified by eMATRIX, accession number DM01354V, p-value=1.000e-40, raw score of 12.97
MARTSYGQHFFPTLISMNIDSGRQNNGIPKLSTSYSLKPMNTLCYLVKRDLEGVLKLRILTWESSLDYPGGPSVITKVLIRQKEGQSQRTRYDNGSRGWSDAIAVKRPQAKECGWPLEAGKGKEWILRKECIPANTLMLAQCPPTLRVGGSVCSAWRMIQNSDGERRKRNRIQLQAVRLSKVIHDTFRNFPRFVHSRELSKGAEKSSSLKKGLEQVIIWTKCRQCGESRCTKKVEERKVLHNTFISTSTTITTLGQKHQFAVKKYARITTYLTSSRENQGKGLCPQLNKIAASFTKGPISTDPGIAEPCAGVADGVRPLETTISFFGSVNFEHFSMPQIPEQSQPDLYLPDRSLKIFHKEIQSTKEKTKKKMVESIREKKWKTRWFCTGLKNYLARAIRQEKEIKGIQLGKEEVKLSLFADDMIVYLENPIVSAQNLLKLISNFSKVSGYKINVRKSQAFLYTNNRQTESQIMSELPFTIASKRIKYLGIQLTRDVKDLFKENYKPLLNEIKEDTNKWKNIPCSWVGRINIMKMAILPKVIYRFNAIPIKLPMTFFTELEKTTLKFIWNQKRARIAKSILSQKNKAGGITLPDFKLYYKATVTKTAWYWYQNRDTDQWNRTEPSEIMPLIYNYLIFDKPDKNKQWGKDSLFNKWCWENWLAICRKLKLDPFLTSYTKINSRWIKDLNVRPKTIKTLEENLGITIQDIGMGKDFMSKTPKAMATKAKIDKWDLIKLKSFCAAKETTIRVNRQPTQWEKIFATYSSDKGLIPRIYNELKQIYKEKTNNPIKKWAKNMNRHFSKEDIYAANRHMKKCSSSLAIREMQIKTTMRYHLTPVRMAIIKKSGNNSLILVPLLKKEERALQSDTTTKPSRTSVQRSPIQDKPRFGIHLKSPVKIQRTSCQFKCGRPGLTNTGLRNNCFHTDRVVKLNIESQSPYTKPGI

SEQ ID NO: 43661 - protein, 483 aa, Homo sapiens
  DOMAIN (188)..(235): kw TRANSCRIPTASE REVERSE II ORF2 domain identified by eMATRIX, accession number DM01354V, p-value=1.000e-40, raw score of 12.97
GPRTLQSACGECCQDWDSPFRAMASPLTQEFCPRATISVNALSLTWSQPISETDQDPQCSTWVLLLVMQGRRALQLADDKSWQEWVLSFKAAGSLLAQVLEVLAKAIRQEKEIKGIQLGKEEAKLSLFADDMTVYLEYPIVSAQNLLKLIGNFSKVSGYKINVQKSQAFLYTNNRQTESQIMSELPFTIASKRIKYLGIQLTRDVKDLFKENYKPLLNEVKEDTNKWKNFPCSWVGRINIVKMAILPKVIYRFNAISIKLPMTFFTELEKTTLKFIWNQKRACIAKSILSQKNKAGGITLPDFKLYYKATVTKTAWYWYQNRDIDPWNRTEPSEIMPHIYNHLIFDKPDKNKQWGKDSLFNKWCWENWLAICRKLKLDPFLTPYTKINSRWIKDLNVRPKTMKTLEENLGNTIQDIGMGKDFMSKTPKAMATKAKIDIWDLIKLKNFCTAKETTIRVNRQPTEWEKIFAIYSSDKGLISRIYK

SEQ ID NO: 43662 - protein, 595 aa, Homo sapiens
  DOMAIN (190)..(235): kw TRANSCRIPTASE REVERSE II ORF2 domain identified by eMATRIX, accession number DM01354N, p-value=1.000e-40, raw score of 13.17
MAYPGHENVLMRSVISGSMIDFYTLHLPYLCAIAPLTVGCSQSVTKTGSSAAGLLEFARGPLQTLFAWVSAAVATEQRILVNRKCCCLIVPLEVLSQRSTQLCAQTHSKASRRQEITKIRAELKEIETQKTLQKINESRSWFLGKINKIDRPLTRLIKKKREKNQIDAIKNHKGDITTDPTEIQTTIREYYEHLYANKLENLEEMDKFLNTYILPRLNQEEVESLNRPITGSEIEAIINSLPTKKSPGPDGFIAKFYQRYKEELVPFLLKLFQSIEKEGILPNSFYEASIIMIPKPGKDTTKKENFRPISLMNINAKILNKILANQIQQHIKKPIHYDQVGFIPGMQGWFNKCKSINVIQHINRTKDKDNMIISIDAEKAFDKIQQRFMLKTLNKLVLEVLARAIRQEKEIKGIQLGKEEVKLSLFADDMIVYLENPIISAQNLLKLISNFSKVSGYKINVQKSQAFLYTNNRQTESQIMSELPFAIASKRIKYLGIQLTRDVKDLFKENYKPLLNEIKEDTNKWKNIPCSWVGRINIMKMAILPKERSSSPATEQSWMENDFDELREEGFRRSNFSELKEKVRTHHKQDKNLEK

SEQ ID NO: 43663 - protein, 538 aa, Homo sapiens
  DOMAIN (29)..(72): kw TRANSCRIPTASE REVERSE II ORF2 domain identified by eMATRIX, accession number DM01354T, p-value=1.000e-40, raw score of 9.48
EDKFREKRVKRNEKASKKYGTMQQKLEAFPLKTGTRQGCPLSPLLFNIVLEVLARAIRQEKEIKGIQLGKEEVKLSLFADDMIVYLENPIVSAQNLLKLISNFSKVSGYKINVQKSQAFLYTNNRQTESQIMSELPFTIASKRIKYLGIQLTRDVKDLFKENYKPLLKEIKEDTNKWKNIPCSWVGRINIVKMAILPKVIYRFNAIPIKLPMTFFTELEKTTFKFIWNQKRAHIAKSILSQKNKAGGITLPDFKLYYKATVTKTAWYWYQNRDIDQWNRTEPSEITPRLKRAADLPAQYLSSAEGQTASSRGSLTPLAPDEETPLSRGQQTPHTGELQLALGGCPSGTNLPEEGTGNNLCCSAASAGDTRQQDLEWSSSELQQTCSRGNPSEGHQHQRSKVDKSMKMRKNQCKKAENSKNQNTSSPPKDQNSLPAREQNWTENWFDEFSEVGFRRWVITNSSELKEHVLSQCKEAKNLEKRLEELLTGIISVEKNINVLMELKSTAQELHDTCRSFNSQFNQVEERVSVIEDQINEMK

SEQ ID NO: 43664 - protein, 914 aa, Homo sapiens
  DOMAIN (317)..(363): kw TRANSCRIPTASE REVERSE II ORF2 domain identified by eMATRIX, accession number DM01354O, p-value=1.000e-40, raw score of 8.73
MEDEMNEMKQEEKFREKRIKRNEQTLQEIWDYVKRPNLHLIGVPESDGENGTKLENTLQDIIQENFPNLARQANVQIQEIQRMPQRYSSRRATPRHIIVRFTKVEMKEKMLRAAREKDRSMRQKVNKDTQELNSALHQADLIDIYRTLHPKSTEYTFFSAPHHTYTKIDHILGSKALLRKCKRTEIITNYLSDHSAIKLELRIKNLTQNRSTTWKLNNLLLNDYWVHNKMKAEIKMFFETNENKDTTYQNLWDAFKAKYKLPSRNTTNTSMQINSKIWKKWINSWTHNTLPRLNQEEVESLNRPITGAEIVAIINSLPTKKSPGPDGFTAEFYQRYKEELVPFLLKLFQSIEKQGILPNSFYEASTILIPKPGRDTTEKENFRPISLMNIDAKILNKILAKRIQQHIKKLIHHDQVGFIPGMQGWFNIHKSINVIQHINRAKDKNHMIISIDAEKAFDKIQQRFMLKTLNKLGIDGTYFKIIRAIYDKPTANIILNGQKLEAIPLKAGTRQGCPLSPLLFNIVLEVLARVIRQEKEIKGIQLGKEEVKLSLFADDMIVYLENPIVTAQNLLKLISNFSKVSGYKKKINVQKSQAFLYTNNRQTESQIMSKLPFTIASKRIKYLGIQLTRDVKDLFKENYKPLLKEIKEDTNKWKNIPCSWVGRINIVKMAILPKVIYRFNAIPIKLPVTFFTELEKTTLKFIWNQKRARIAKSILSQKNKAGGITLPDFKLYYKATVTKTACSQSAPMELGFRPIPVDSGTRTIPEPGLTPWTQASGWTPKTCASGFFLQIQLTSPLWWTPVLGLHHKPRIQVYTEGPSPRPAPLDSDASSTHLLTQASERRIKTMNNHTVNRKSKREHCCTKGFPGSGLGSRCSVQPRHRVSSVPAAQAFALPKRGQGTAQAVALEGESPKPS

SEQ ID NO: 43665 - protein, 687 aa, Homo sapiens
  DOMAIN (540)..(585): kw TRANSCRIPTASE REVERSE II ORF2 domain identified by eMATRIX, accession number DM01354N, p-value=1.000e-40, raw score of 13.17
MVISIDAEKASGKIQQPFMLKIVNKLGIDGTYLKIIRAIYDKPTANIILNGQKLEAFPLKTGTRQGCPLSPLLFNIVLEVLARAIRQEKEIKGIQLGKEEVKLSLFADDMTVYLENPIVSAQNLLKLVSNFSKVSGYKINVQKSQAFLYTNNRTESQIMSEIPFTIASKRIKYLGIQLTRDVKDLFKENYKPLLNEIKEDTNKWKNIPCSWVGRINIMKMATLPKVIYRFNVIPIKLPMTFFTELEKTTLKFIRNQKRARIAKSILSQKNKAGGIMLPDFKPYYKATVTETAWTPNSCYITSIFSPSTEEEWKGQRAVMTPHNPSVRILPLGPTKNNKVILSGDMGWCGTNGTQELLQAIYLNEYGNMTKALTQIFTDKTGDGLKLLMAAAAHLEWLLPRCQLQWGGRCSQGCMLPVAGRSWEQVEAPTPSKLEGQESGPLGCSCSRPPSHGCRPRHLCTLSGPGKPPRPCRLGTPIGWPLPAHSAQSDFRPKLWPSPGAVKTLAGVLDSGHADKQPLLSQHENRKEAGGREIQTTIREYYKHLYANKLENLEEMDKFLDTYTLPRLNQEEVESLNRPITGAEIVAIINSLPTKKSPGPDGFTAKFYQRYKEELVPFLLKLCQSTEKEGILPNSFYETSIILIPKPGRDTMKKENFRPISWMNIDAKILNKDTGKSNPAAHQKAYPP

SEQ ID NO: 43666 - protein, 1460 aa, Homo sapiens
  DOMAIN (105)..(160): kw TRANSCRIPTASE REVERSE II ORF2 domain identified by eMATRIX, accession number DM01354Q, p-value=1.000e-40, raw score of 9.23
MDKFFDTYTLPRLNQEEVESLNRPITGSEIEAIINSVTTKKSPGPDGFTAEFYQRYEEELKKRESSLTHFMRSIILIPKPGRDITKKENFRPISLMNIDAKILNKILANQIQQYIKKLIHHDQVGFIPGMQGWFNIRKSIKVTQHINRTKDKNHMIISIDAVKAFDKIQQRFMLKTLNKLGIDGTYLKIIRAIYDKPTANIILNGQKLEAFPLKTGTRQGCPLSPLLFNIALEVLSRAIRQEKEIKDIQLGKEEVKFSLFADDMIVYLENPIVSAQNLLKLIGNFSKVSGYKINAQKSQAFLYTNNRQTESQIMSELPFTIASKRIKYLGIQLTMDVKDFFKENYKPMLNEIKEDTNKWKNIPCSWVGRINIVKMAILPKIHSRVTVLLRSDTVLHIVKLAVKIPTIVLLLEGSPRALRKHRQKPGSGSSRPRVRPSAVLASGLSQCSHSGGGNRGAYVTPPQALAEKAFDKIQQPFMLKTLNKLGIDGTYLKIIRAIYDKPTANIILNGQKLEAFPLKTGTRQGCPLSPLLFNIALEVLARAIRQEKEIKGIQFGKEEVKLSLFADDMIVYLENPIVSAQILLKLISNFSKVSGYKINVQKPQAFLHTNNRQTENQIMSELPFTIASKRIKYLGIQLTRDVKDLFKENYKPLLKEIKEDTNKWKNIPCSWVGRINIVKMAILPKVIYRFNAIPSKLPMTFFTELEKNTLKFIWNQKRARIAKSILSQKNKAGGITLPDFKLYYKATVTKTAWYWYQNRDIDQWNRTEPSEITPHIYNYLIFDKPEKNKQWGTDSLFNKWCWENWLAICRKLKLDPFLTPYTKINSRWIKDLNFRPKTIKTLEENLGITIQDIGMGKDFMSKTPKAMATTDKIDKWDLIQLKSFCTAKETTIRVNRQPTKWEKIFATYSSDKGLISRIYNELKQIYKKKTNNPIKKWAKDMNRHFSKEDIYAAKKHMKKCSPSLAIREMQIKTTMRYHLTPVRMAIIKKSGNNSTFDFGQHEFELHRSTYTRIVFSKITPILEVLARAIRQEKEIKGIQLGKEEVKLSLFADDMIVYLENPIVSAQNLLKLIGNFSKVSGYKINVQKSQAFLYTNNRQTESQIMSELPFTIASKRIKYLGIQLTRDVKDLFKENYKPLLNEIKEDTNKWKNIPCSWVGRINIVKMAILPKVIYRFNAIPIKLPMTFFTELEKTTLKFIWNQKRACIAKAILSQKNKAGGITLPDFKLYYKATVTKTACLLNRRALPLANRGRKNPVFGGPPKTVPISPAKVGGHPETREQPPLSRNPPVFSLGPPEWGNPKLGATKAFGSKRASQPNPPEKRPGLKSPPGANPPRPLDPPVARENHQNPICGPPSPPQIPVTKPRSPHDRQTALSHRTSTFHGPTPEPPLAHPAPTVSTPASTQHPARRHQVARPDRSSTPLPARIALRVFCPTPSTAPPEHPRQNPNPAPQTDSALPGA

SEQ ID NO: 43667 - protein, 1115 aa, Homo sapiens
  DOMAIN (323)..(369): kw TRANSCRIPTASE REVERSE II ORF2 domain identified by eMATRIX, accession number DM01354O, p-value=1.000e-40, raw score of 8.73
MGDFNIPLSTLDRSTRQKVNKDTQELNSALHQADLIDSYRTLHPKSTEYTFFSAPHHTYSKIDHILGSKALLSKCKRTEIITNYLSDHSAIKLELRIKNLTQNCSTTWKLNNLLLNDYWVHNEMKAEIKMFFETNENKDTTYHNLWDAFKAVCRGKFIALNAHKRKQERSKIDTLTSQLKELEKQEQTHSKASRRQEITKIRAELKEIETQKTLQKINESRSWVFERINKIDRPLARLTKKKSEKNQIDAIKNDKGDITTDPTEIQTTIREYYKHLYANKLENLEETDKFLDTYTLPRRNQEEVESLNRPITGAEIVAIINNLPTKKSPGSDGFTAEFYQRYKEELVPFLLKLFQSIEKEGILPNSFYEASIILIPKPGRDTTKKENFRPISLMNIDAKILNKILANQIQQHIKKLIHHDQVGFIPGMQGWFNICKSINVIQHINRTKDKNHMIISIDAEKAFDKIQQPFMLKTLNKLGIDGTYLKIIRAIYDEPTANIILNGQKLEAFPLKTGTRQGCPLSPLLFNIVLEVLARAIRQEREIKGIQLGKEEVKLSLFADDMIVYLENPIVSAQNLLKLISNFGKVSGYKINVQKSQAFLNTNNRQTESQIMSELPFTIASKRIKYLGIQLTRDVKDLFKENYKPLLKEIKEDTNKWKNIPCSWVGRINIMKMAILPKVIYRFNAIPIKLPMTFFTELEKTTLKFIRNQKRACVAKSILSQKNKAGSITLPDLKLYYKATVTKTAWYWYQNRDIDQWNRTEPSEITLHIYNYLIFDKPEKNKQWGKDSLFNKWCWENWLAICRKLKLDPFLTPYTKINSRWIKDLNIRPKTIKTLEENLGITIQDIGMGKDFMSKTPKAMATKAKIDKWDLIKLKSFCTAKETTIRVNRQPTKWGKIFATYSSDKGLISRIYNELKQIYKKKTNNPIKKFAKDMNRHFSKKDIYAAKKHMKKCSPSLAIREMQIKTTMRYHLTPVRMAIIKKSGNNRTGRGLHPGRDWSVTCARSPGDPEPSGIKGGCGSGTPSPSPSKQTVRRPWTQIPEMKPLLLAVSLGLIAALQAHHLLASDEEIQDVSGTWYLKAMTVDREFPEMNLESVTPMTLTTLEGGNLEAKVTML

SEQ ID NO: 43668 - protein, 789 aa, Homo sapiens
  DOMAIN (345)..(392): kw TRANSCRIPTASE REVERSE II ORF2 domain identified by eMATRIX, accession number DM01354V, p-value=1.000e-40, raw score of 12.97
MVKSKTLTTSDSGEDVGQQELSFIAGQPLAIFIQTRGVHAPGSNPGAHFSPRVADQCHPASTKASLTRHPLMTNSILPSLGGGPTVNTPRERAAETEHRREGVETREELKHENGALDSPPTHRGNHRAQQPSADCTSPEKFLEVQEWLLYVDSLSHLRHPVSLIFQNRSLHHAVTAGYGEGVALVIQYCFSYLFDTSFSDAKLKPDAMSAHLCFDSHERTSLENIFFQLEKNKQILKVKSRSFLPGAHMRASTDSLLEVLARAIWPEKEIKGIQLGKKEVILSLFADDMIVYLENPIVSAQNLLKLISNFSKVSGYKINVQKSQAFLYTNNRQTESQIMSELPFTIVSKRIKYLGIQLTRDVKDLFKENYKPLLKEIKEDTNKWKNIPCSWVGRINIVKMAILPKVMYRFNAIPIKLPMPFFTELEKTTLKFIWNQKRARIAKSILSQKNKAGGITLPDFKLYCKATVTKTAWYWYQNRDIDQCNRTEPSEMRPHIYNYLIFDKPDKNKQWGKDSLFNKWCWENWLAICRKLKLDPFLTPYTKINSRWIKDLNVRPKTIKTLGENLGITIQDIGMGKDFLSKTPKAMATEAKIDKWDLIKLKSFCTPKETTIRVNRQPTKWEKIFATYSSDKGLIFRIYNELKQIYKKKTNNPIKKWAKDMNRPFSKEDIYAAKKYMKKCSPSLAIREMQIKTTMRYHLTPVRMAIIKKSGNNRQTESQIMSELPITIASKRIKYLGIQLTKDVKDLFKENYKPLLNEIKEDTNKWKNIPCSWIGRINIVKNGHTAQDY

SEQ ID NO: 43669 - protein, 372 aa, Homo sapiens
  DOMAIN (7)..(54): kw TRANSCRIPTASE REVERSE II ORF2 domain identified by eMATRIX, accession number DM01354V, p-value=1.000e-40, raw score of 12.97
MSELPFTIASKRIKYLGIQLTRDVKDLFKENYKPLLSEIKEDTKKWKNIPCSWVGRINIMKMAILPKVLEKNVLGRDMETMKKVQIKLLEISTIMKNEMKNVLDGINCALDSEQMKVFNTYSNEDYDRRNDEVDPVAASAEYELEKRVEKLELFPVELEKGMYGEEDRVQLGSRWVSHRNNKWPLRMRFQTSLRESYEDGLGISIIGMGVGADAGLEKLGIFVKTVTEGGAAQRDGRKSGVLLKRHLKMWKRLWNWTTGRGWNSLEGSEEDRKMWENLELPRDLLNGFDQNADSDMNNKVQAEVSSDGEEELVGNCSKGHSCYVKRLAAFCHCQNDMVWLCPHTNLILNCSSHISHMLGQYGHFHDIDSSYP

SEQ ID NO: 43670 - protein, 365 aa, Homo sapiens
  DOMAIN (252)..(299): kw TRANSCRIPTASE REVERSE II ORF2 domain identified by eMATRIX, accession number DM01354V, p-value=1.000e-40, raw score of 12.97
MDKFLEKYISSSLNQEALDTLNRPITNSEVDKLPTKKSPGPDGFTAEFYQTFKEPILLTLFHNIEKEGTFPNSFYKASITLIPKPGKDITKKENYRLISLTNIDVPEVLAGAIRPEKEIKGIHIDKEEVKLSLFADNTIVYLENPKDSSRKFLKLIKEFSKVSGYKINRATWQLCSTSKGNPTTASGLAWETYLTLWAEDSFPQLGKTRKPRLWKLFLSPQQILVQTETATYQGCQLKTLQAYLVHALSLTKLLCIRIKYLGIQLTRDVKELFKENYKPLLNEIKEDTNKWKNIPCSWVGRINIVKMAILPKVIYRFNAIPINLPMTFFTELEKNYFKVHMEPKKSPHSQVNPKPKEQSWRHHTT

SEQ ID NO: 43671 - protein, 276 aa, Homo sapiens
  DOMAIN (117)..(164): kw TRANSCRIPTASE REVERSE II ORF2 domain identified by eMATRIX, accession number DM01354V, p-value=1.000e-40, raw score of 12.97
  misc_feature (1)...(276): Xaa = X or * as defined in Table 2
QTESSSTSKSLSTMIKWASSLGWQGWFNIRKSINVIQHIKGIQRQKPHDYLNRCRKSLXQNSTTLHAKNSQXIAQNLLKLISNFNKVSGYKINVQKSQAFLYTSNRQTESQIMSELPFTIASKRIKYLGIQLTRDVKDLFKENYKPLLKEIKEDTNKWKNIPCSWVGRINIVKMAILPKVIYRFNAIPIKLPMTFFTELEKTTLKFIWNQKRAHIAKSILSQKNKAGGITLPDFKLYYKATVTKTAWYWYQNMCYRSMEQNRALSYYVAYLQPSDL

SEQ ID NO: 43672 - protein, 897 aa, Homo sapiens
  DOMAIN (712)..(759): kw TRANSCRIPTASE REVERSE II ORF2 domain identified by eMATRIX, accession number DM01354V, p-value=1.000e-40, raw score of 12.97
VGRINIVKMAILPKDKTSKYIDVDENEGSHCGKRKYKYGMEKALEILARAIRQEKEIKGIQLGKEEVKLSLFADDMIVHLENPIISAQNLLKLISNFSKVSGHKINVQKSQTFLYTNNRQTESQIMSGLPFKIATKRIKYLGIQLTRDVRDLFKENYKPLLNEIKEDTNKWKKNILSSWIGRINIVKMAILPKVIYRFNAILINLPMTFFTELEKTTLKFIWNQKRACIAKSILSQKNKAGGITLPDFKLYYKATVTKTAWDMDEAGNHHSQQTIARTKNQTLRFLSHGWEFNNENTWTQEGEHHTPGPVRGTLGQLTFARLNLSPISYKSLEASAVTSVSMETQIRLPKMRFWYQDDAGLIKCVGEELLFFYCLEPFQKEWYQLLSVPLVEFGCESVWSWAFFGWDMDEAGNHHSQQTNTPTENRTAHLLTHKWELNNENTWTHGGKHHTPGPVGGCSLIQVEIRWFIEMVCKREVYRYDHSWWWQLQQQQQDPQGRLQASGGWALRRVPGHSQNAQAEARWLYCEPREGRSPLAGTVKARVLNVLAPLPCSSSSRDTHFWASSGMSQISDTLSLKLQETLTFLNILLFQRKGEGKNSMSTTLSKEFLTLSFFDFNLFQNSMLEVLARAIRQEKEIKGIQLGKEEVKLSLFADDMIVYLENPLVSAQNLLKLISNFSKVSEYKINVQKSQAFLHTNNRQTESQIMSELPFTIASKRIKYLGIQLTRDVKDLFKENYKPLLNEIKEDTNKWKNIPCSWVGRINIVKMAILPKVIYRFNAILIKLPMTFFTELEKTTLKFIWNQKRAHVAKSILSQKNKAGGITLPDFKLYCKATVTKTACQEVAVVTNGKILRHCLYQLLIVLRTLPGSNLMLMKVISFFRKHQAQTKTNFILQIKT

SEQ ID NO: 43673 - protein, 1669 aa, Homo sapiens
  DOMAIN (1571)..(1607): Ribosomal protein L11 proteins domain identified by eMATRIX, accession number BL00359A, p-value=3.250e-18, raw score of 20.66
MGDFNTLLSALDRSTRQKVNKDIQELNSALHQADLIDIYRTLHPKSTEYTFFSAPHRTYSKIDHLVGSKALLRKCKRTEIITNCLSDHSAIKLELRIKKLTQNHSTTWQLNNLLLNDYWVHNEMKAEIKMFFETNENKDTTYQNLWYVKDTRISGMLWYVKAVCRGKFIALNAHKRKQERSKIDTLTSQLKELEKQEQTHSKTSRRQEITKIRAELKEIETQKTLQKINECRSWFFEKINKIDRPLARLIKKKREKNQIDAIKNDKGDIITDPTEIQTTIREYYKHLYGNKLENLEEMDKFLDTYTLPRLNQEEVESLNRPITGSEIEAIINSLPTKKSPGPDGFTAEFYQRYKEELRIKYLGIQLTRDVKDLFKENYKPLLNEIKEDTNKWKNIPCSWVGRINIMKMAILPKVIYRFNAIPIKLPMTFFTELEKTTLKFIWNQKRARIAKSILSQKNKAGGITLPDFKLYYKATVTKTAWYWYQNRDTDQWNRTEPSEIMLHIYNHLIFDKPDKNKQWGKDSLFNKWCWENWLAICRKLKLDPFLIPYTKINSRWIKDLNVRPKTIKSLEEDLGNTIQDIGMGKDFMSKTPKAMATKAKIDKWDLIKLKSFCTAKETTIRVNRQPTEWEKFFAIYSSDKGLISRREMQIKTTIRYHLTPVRMAIIKKSGNNRCWRGCGEIGTLLHCWVDCSIIVKVPSSLQAHLQLSGKEVDVNSEVHVQEMAEVRKDDVVTVTEFYQTFKEELVPILLTLFRKTEKEGTLPNSSYEASITLIPKPGKDTTKKENYRLISLMNTDAKILNKILANRIQQHIKKTIHHDQVGSIPGMEGWFNICKSINVIHHINRIKNKNHMIISIDAEKALDKIQHLFMIKTLSKIGIQGTYLNVIKAIYDKPTANIILNGEKLKAFPLRNETRQGCPLSPLLFNTVLKVLARAVRQEKEIKGIQIGKEEVILSLFADDMIVYLKNPKDSSRKLLELIKGFNKVSRYKINVHKSVALLNTNSNQAENQINNSTPFTIAAKKNEVLRNIPSQGGERPLQGKLQTTAQRNKRGYKQNGRTFHAHAMATKAKIDKWDLIKLKSFCAEKETTIRVNRQPTKWEKIFATYSSDKGLISRIYNELKQIYKKKTNNPIKKWVKDMNRHFSKEDIYAAKKHMKKCSSSLAIREMQIKTTMRYHLTPVRMAIIKKSGDNRDMDEGGNHHSQQTIARTKNQTLHVLTHSEETVAQEDDVPLTRSWLLKALKPQEVQSRAKSPDGQYKEEEKEKDSRGCSLLDFPSMPASHCADKAKSDRSGEEVGSGSRSTSWYASKSFQTPPPHKPSELQIINLLNSIAETSAAGVLEVLARAIRQEKEIKGIQLGKEEFKLSLFADDMIVYLENPIVSAQNLLKLISNFSKVSGYKINVQKSQAFLYTNNRQTESQIMSELPFTIASKRIKYLGIQLTRDLKDLFKENYKPLLNEIKEDTNKWKNIPCSWVGRINIVKMAILPKRDVTANCPGSWRFEQRIGQNTQQRKNEATKERKQLSRLSARRRPRCNFLRSSRIRVHPTPAASTMPPKFHPNEIKVVYFTCTGVEVGATSALAPKIGPAGLSPKEVGDDIAKVTGDWKGLRITVKLTIQNRQAQIEVVPSASALIIKRNYQETERNRKTLNTGGISLFMRSSTLLDRCSTDP

SEQ ID NO: 43674 - protein, 338 aa, Homo sapiens; identical to SEQ ID NO: 38988

SEQ ID NO: 43675 - protein, 63 aa, Homo sapiens
  misc_feature (1)...(63): Xaa = X or * as defined in Table 2
MDPPAGAARRLLCPALLXLPAGXPLRPRLAGAAPAPGTALLHERAMPLXLRPGLHDVHGVPDL

SEQ ID NO: 43676 - protein, 238 aa, Homo sapiens
  DOMAIN (70)..(102): ABC transporters family proteins domain identified by eMATRIX, accession number BL00211B, p-value=2.800e-26, raw score of 13.37
KLRAERISMIFQDPMTSLNPYMRVGEQLMEVLMLHKNMSKAEAFEESVRMLDAVKMPEARKRMKMYPHEFSGGMRQRVMIAMALLCRPKLLIADEPTTALDVTVQAQIMTLLNELKREFNTAIIMITHDLVVVAGICDKVLVMYAGRTMEYGNARDVFYQPVHPYSIGLLNAVPRLDAEGETMLTIPGNPPNLLRLPKGCPFQPRCPHAMEICSSAPPLEEFTPGRLRACFKPVEELL

SEQ ID NO: 43677 - protein, 151 aa, Homo sapiens
SRQGWMVLNGPKKPPKGYIEGLEMLASMRLCANTALGGYQSISEFITPGGRLYDHGNRAWELINDIPGVSCVKPRGALYMFPKIDAKRFNIHDDQKMVLDFLLQEKVLLVQGTAFNVAWPDHFRHLVLPRVDDIELSLSKFARFLSGYHQL

SEQ ID NO: 43678 - protein, 163 aa, Homo sapiens
VPGDPALERERLTGALEEAANEFRRYSKRFAAGAQKETAAIFDLYSHLLSDTRLRRELFAEVDKGSVAEWAVKTVIEKFAEQFAALSDNYLKERAGDLRALGQRLLFHLDDANQGPNAWPERFILVADELSATTLAELPQDRLFGVVVRDGAANSHAAIMVRA

SEQ ID NO: 43679 - protein, 399 aa, Homo sapiens
  DOMAIN (359)..(377): GLYCOPROTEIN C SIGNATURE domain identified by eMATRIX, accession number PR00668A, p-value=4.574e-10, raw score of 14.26
QLLAQAQQLSGYTLGELAALVGLVTPEWAVKTVIEKFAEQFAALSDNYLKERAGDLRALELLMEIVEIARQHNLIIFADEIYDKILYDDAEHHSIAPLAPDLLTITFNGLSKTYRVAGFRQGWMVLNGPKKHAKGYIEGLEMLASMRLCANVPAQHAIQTALGGYQSISEFITPGGRLYEQRNRAWELINDIPGRFCVKPRGALYMFPKIDAKRFNIHDDQKMVLDFLWQEKVLLVQGTAFNWPWPDHFRIVTLPRVDDIELSLSKFARFLSANSGRNRNVQGRNASSHRDADQLIAMFTSQATHTFTFRTHHQRQASGHFALIECMIRLACRTDDPDILFLQHTHGARKVSHPNQRNAFCRAAGYFFRRSVELCGAIFRHNHRMNACGVRTTQARAER

SEQ ID NO: 43680 - protein, 103 aa, Homo sapiens
MEGSRMKYRIALAVSLFALSAGSYATTLCQEKEQNILKEISYAEKHQNQNRIDGLNKTLSEIRANCSDSQLRADHQKKNAKQKDEGAERQQNLAEAKQKGDAD

SEQ ID NO: 43681 - protein, 357 aa, Homo sapiens
LRLTLTNPAFPVLHLTGIASSAVLAPRGLCPTTRKLAAKTSPKSTSIVSPALTEHEPSELIVPDSVTLTGSMLAIDAPVIASGATTPNNRVADDQGFLRQWSKVAKERKLQRFYIGEPSAEAVAAQMPDLILISATGGDSALALYDQLSTIAPTLIINYDDKSWQSLLTQLGEITGHEKQAAERIAQFDKQLAAAKEQIKLPPQPGVVTRIYTSGLRGPLAEEISRGLLAEPVQIHSHGGRVHLVQSGELNIDVAFIGVPSCDEFGNANGYTGKACCGSLGYAIVDADNAKQVVMLTEELLPYPHNPASIEQDQVDLIVKVDRVGDAAKIGAGATRMTTNPRELLIARSAADVIVNS

SEQ ID NO: 43682 - protein, 1289 aa, Homo sapiens
  DOMAIN (203)..(253): Respiratory-chain NADH dehydrogenase 24 Kd subunit proteins domain identified by eMATRIX, accession number BL01099B, p-value= 1.000e-40, raw score of 24.43
CIVKHAAMRSAMTSLAARITVLNPTRATTPNTRVADDQGFLRQWSKVAKERKLQRLYIGEPSAEAVAAQMPDLILISATGGDSALALYDQLSTIAPTLIINYDDKSWHPRLSFNKADEITTVFCGSKKSLANGIPMANILFPTSVIATQQTQHFRFVDDFNAQFLRFASLDPAASPAITISGKATLEIPGTELVFYAALEKKLNIKPGQTTFDGRFTLLPTCCLGNCDKGPNMMIDEDTHAHLTPEAIPELLERKNGYEGARKALTGLSPDEIVNQVKDAGLKGRGGAGFSTGLKWSLMPKDESMNIRYLLCNADEMEPGTYKDRLLMEQLPHLLVEGMLISAFALKAYRGYIFLRGEYIEAAVNLRRAIAEADSRDPRVNKFQDEVGGKLRFGDPGVRLFETSENGLDYFTSVPARFQPQDGKSRIAPYYHLFGSDELSQRAPVFQSRMPQPYIKLNPADAAKLGVNAGTRVSFSYDGNTVTLPVEIAEGLTAGQCRHLTFRDRARCGVALSERRQLRRALQYYAVKYSGRQQYWFGSGDSGRYRITQNVRQLSYSASHDALTHLANRASFEKQLRILLQTSIDAISSGTIDISDGTVLRLTGQDTSVALNASLFNGDGTLVNATDGVTLTGELNTNLETDSLTYLSNVTVNGNLTNTSGAVSLQNGVAGDTLTVNGDYTGGGTLLLDSELNGDDSVSDQLVMNGNTAGNTTVVVNSITGIGEPTSTGIKVVDFAADPTQFQNNAQFSLAGSGYVNMGAYDYTLVEDNNDWYLRSQEVTPPSPPDPDPTFAERIPKTGTTYMNQNLLVTKRDGSTERINLDKIHRVLDWAAEGLHNVSISQVEKPTASLMPPALYDHVVKMVEMGKYDNHLLEDYTEEEFKQMDTFIDHDRDMTFSYAAEKQLEGKYLVQNRVTGEIYDLQALLQKGKTRIAGSDFCKGFAVSGAAVLCSSTVADYLLQFARHLIYSTSMPPLRRRHYVRRWRSFAVMRVMHGAKNWRHSLRVFVPEISTVCWRCCMATVNKQAIAAAFGRAAAHYEQHADLQRQSLTPYWQCFHSVNTPTYWTRVVDSRGIPGRRRIGFAVAHHPLFVIVGLQPDLPAPIPRGQLHNKLFIGFVPTLQAGAVAKSVIHAHVSVSPDGLDLVFFVVNQWAGVVFCFDLFSRKRGRFSVWRNKGFGRYCQRLANFRDRQAFQLLNQIHFTRCKQVDNGGTEFKATHFLAFQQCHRTVVFPGRPGPALDDTFGGGVMVPAQTVSMLPTIVAPTRICAIGPNSVSKRQITRSLRANRFGTF

SEQ ID NO: 43683 - protein, 194 aa, Homo sapiens
DPHSALALYDQLSTIAPTLIINYDDKSWQSLLTQLGEITGHEKQAAERIAQFDKQLAAAKEQIKLPPQPVTAIVYTAAAHSANLWTPESAQGQMLEQLGFTLAKLPAGLNASQSQGKRHDIIQLGGENLAAGLNGESLFLFAGDQKDADAIYANPLLAHLPAVQNKQVYALGTETFRLDYYSAMQVLDRLKALF

SEQ ID NO: 43684 - protein, 105 aa, Homo sapiens
  DOMAIN (54)..(97): Acyl-CoA dehydrogenases proteins domain identified by eMATRIX, accession number BL00072E, p-value=1.659e-26, raw score of 24.12
MIQEKRPLMAIKIDNMRNMVMKVAWQADQHQSLRTSAALEKLYCARTAMEVIDDAIQIMGGMGYTDEARVSRFWRDVRCERIGGGTDEIMIYVAGRQILKDYQNK

SEQ ID NO: 43685 - protein, 69 aa, Homo sapiens
WEFAVRAIGVRSDGVNIVALVSKNIANRHEFLLRLVKCPVDVRCERIGGGTDEIMIYVAGRQILKDFQP

SEQ ID NO: 43686 - protein, 28 aa, Homo sapiens
LILILGGEMIGRVHFYGLHMTVGMAIAG

SEQ ID NO: 43687 - protein, 549 aa, Homo sapiens
  DOMAIN (219)..(251): ROK family proteins domain identified by eMATRIX, accession number BL01125C, p-value=1.360e-15, raw score of 21.60
MDVRIIIVLTAGLLISLLLIVLFSRRLSANIDIITDGLSTLAQNIPTRLPQLPGEMGQISQSVNNLAQALRETRTLNDLIIENAADGVIAIDRQGDVTTMNPAAEVITGYQRHELVGQPYSRLMHRRRRRCCPKSKNCWHRHRKLWPDHTINLALEIHGQVDPVTGVSQTMPKAPWTTPVEVKYLLEEKLGIRVMVDNDCVMLALAEKWQNNSQERDFCVINVDYGIGSSFVINEQIYRGSLYETNQFMWEGIGAKHRQRNRRYAVLLRQRLAKLNIIQDTDVALDVPVPNEEEERNMKHYAALLTGRTSYFLKGEEMKSMYTTYNPQNVVATARFLFHKKNLYYSFYTSSRIGRPRAIQFVDDAGVILEEHQLETTLAGTLSVYQNATGKICGVWRRVPRDYTGILRDDRLHVVLLWGNKQQAELALAGKTSCDRLRELHVSEVFTVITETREAAAVKLISVVVKRFTDVCLFIREFNLCRDIPVTGEKNPFRPVKKFAQQHFECSIRPRCVARCQRMTLVHPKQCLLSRCFARQVGSQNESLERLAE

SEQ ID NO: 43688 - protein, 884 aa, Homo sapiens
  DOMAIN (76)..(97): O-SIALOGLYCOPROTEIN ENDOPEPTIDASE (M22) METALLO-PROTEASE FAMILY SIGNATURE domain identified by eMATRIX, accession number PR00789B, p-value=5.821e-19, raw score of 10.48
MRVLGIETSCDETGIAIYDDEKGLLANQLYSQVKLHADYGGVVPELASRDHVRKTVPLIQAALKESGLTAKDIDAVAYTAGPGLVGALLVGATVGRSLAFALGRFGDPCTPYWRASVSARCWKIPAPNFRCALLGSAAYAVNHGTGLSKKPTTLGSDHSKTPAQLAKRAGEARRNGWQGALFPWESARSGEEETPEFAAINIRTGLRQKVASAQAEHHLVADIAWAVIQYWQTTGDESFIAHEGMALLLETAKFWISRAVRVNDRLEIHDVIGPDEYTEHVNNNAYTSYMARYNVQQALNIARQFGCSDDAFIHRAEMFLKELWMPEIQPDGVLPQDDSFMAKPAINLAKYKAAAGKQTILLDYSRAEVNEMQILKQADVVMLNYMLPEQFSAASCLANLQFYEPRTIHDSSLLRTTHNKIIALCSNEPVDCVLWVKNSQLMPNDYNPNNVAPPEKKLLQKSIEIDGFTQPIVVTHTDKNAMEIVDGFHRHEIGKGSSSLKLRLKGYLPVTCLEGTRNQRIAATIRHNRARGRHQITAMSEIVRELSQLGWDDNKIGKELGMDSDEVLRLKQINGLQELFADRQYSRAWTLKLAQAFSCCQQRRFLLGKTETNQFMWERIGANPLATDSYMCSTDLIARMHNIVYAQQKFTTQCAAWRDSEGIAHNQRGGGAAVGSRFPLLGELQSILKQAVEEATVKAPLRHNAVEIFDEVNTGKNTGSGVPWVTWDIIPDNDDAEIEVYMAGGGCTLPGRSKVLMPSEGYEGVVKFVFENISTLAVNACPPVLVGVGIATSVETAAVLSRKAILRPIGSRHPNPKAAELELRLEEGLNRLGIGPTRADRQQFSDGRTYRICRPPFVNHRRCCLYRLLGALTRDACWSCRSHL

SEQ ID NO: 43689 - protein, 497 aa, Homo sapiens
  DOMAIN (95)..(130): Phosphorylase pyridoxal-phosphate attachment site proteins domain identified by eMATRIX, accession number BL00102G, p-value= 2.333e-38, raw score of 14.65
MVQSLFADFAKIFPGRFTNVTNGVTPRRWLAVANPSLSAVLDEHLGRNWRTDLSLLNELQQHCDFPMVNHAVHQANSENKKRLAEYIAQQLNVVVNPKALFDVQIKRIHEYKRQLMNVLHVITRYNRIKADPDAKWVPRVNIFGAKVINNDPQIGDKLKVVFIPNYSVTLAQLIIPAADLSEQISLGRTEASGTSNMKFALNGALTIGTLERANVEMLDHVGADNILFLVTQRESEDCVKKGIEVPQTQQGDIGAKDIPSWRRICKVLLNNDYWCRALSFSPTKSKNYQRYNERIKGKRQDLTQFLASLPEDDRIKAINEIRMAIHQVSPFREEPVDCVLWVKNSQLMPNDYNPNNVAPPEKKLLQKSIEIDGFTQPIVVTHTDKNAMEIVDGFHRHEIGKGSSSLKLRLKGYLPVTCLEGTRNQRIAATIRHNRARGRHQITAMSEIVRELSQLGWDDNKIGKELGMDSDEVLRLKQINGLQAVVCRPSIFPRLDG

SEQ ID NO: 43690 - protein, 250 aa, Homo sapiens
MQLAGPGVFGPPRDRHVAITVLREALALGVNHIDTSDFYGPHVTNQIIREALYPYSDDLTIVTNIGYLPVTCLEGTRNQRIAATIRHNRARGRHQITAMSEIVRELSQLGWDDNKIGKELGMDSDEVLRLKQINGLQELFADRQYSRAWTLKLAQAFSCCQQRRFLLGKTETNQFMWEGIGAKHRQRNRRYAVLLRQPLAKLNIIQGFWERGQLKAPLASSLAEGSLELSEATSLGSLCCPLMYLKPSQA

SEQ ID NO: 43691 - protein, 171 aa, Homo sapiens
  DOMAIN (34)..(44): Response regulator receiver domain proteins domain identified by eMATRIX, accession number PF00072B, p-value=6.571e-10, raw score of 11.11
MTLCREIRRFSDIPIVMVTAKIEEIDRLLGLEIGADDYICKPYSPREVVARVKTILRRCKPQRMLQQQDAESPLIIDEGRFQASWRGKMLDLTPAEFRLLKTLSHEPGKVFSREQLLNHLYDDYRVVTDRTIDSHIKNLRRKLESLDAEQSFIRAVYGVGYRWEADACRIV

SEQ ID NO: 43692 - protein, 751 aa, Homo sapiens
  DOMAIN (220)..(275): Mandelate racemase / muconate lactonizing enzyme family signa domain identified by eMATRIX, accession number BL00908B, p-value= 7.600e-35, raw score of 37.71
MYWYLKAAAQGSVSAYVNIGYMYKHGQGVEKDYQAAFEWFTKAAECNDATAWYNLAIMYHYGEGRPVDLRQALDLYRKVQSSGTRDRQHFRCVDREMEVTFLADQISQPDHFSAVINPMMIEVLENFAPFKLRFIGDVCQLLPQAFFNHPHKDAVRFFFQALFIAHAYSWVGGDRPADVIDGIKTLREIGFDTFKLNGCEELGLIDNSRAVDAAVNTVAQIREAFGNQIEFGLDFHGRVSAPMAKVLIKELEPYRPLFIEEPVLAEQAEYYPKLAAQTHIPLAAGERMFSRFDFKRVLEGSGISILQPDLSHAGGITECYKIAGMAEAYDVTLAPHCPLGPIALAGWLHITLFSNNPTFKNKVWEFITKAQLAEQALRSGHIEALINIWENDNYSHYRPEKSVWNLYLLAQLPREMALTFWLRINEKKHLFAGEDYFLSILGLDALPGLLLAFSHRPKETFPLILNFGATELALPVAHVWRRFAAQRDLARQWILQWLEHTASALIPLVFTKPSDNSEAALLALRLLYEQGHGELLQTVANRWQRTDVQWTFTRHAFKTGRLALESLGLGPYEARERADVFRRFNIQMVEEMAMVENDTKARAAVYKRTSAMLKLIKDQLNQYLKPFGYFFAPELSTSNRATLGGMINTDASGQGSLVYGKTSDHVLGVRAVLLGGDILDTQPLPVELAETLGKSNTTIGRIYNTVYQRCRQQRQLIIDNFPKLNRFLTGYDLRHVFNDEMTEFDLTRILI

SEQ ID NO: 43693 - protein, 248 aa, Homo sapiens
  DOMAIN (54)..(69): TRKA POTASSIUM UPTAKE PROTEIN SIGNATURE domain identified by eMATRIX, accession number PR00335A, p-value=5.500e-14, raw score of 10.09
MANVLEPEWAKSLTLAVALSMAATPILLVILNRLEQSSTEEAREADEIDEEQPRVIIAGFGRFGQITGRLLLSSGVKMVVLDHDPDHIETLRKFGMKVFYGDATRMDLLESAGAAKAEVLINAIDDPQTNLQLTEMAGVEKPERETFEGALKTGRLALESLGLGPYEARERADVFRRFNIQMVEEMAMVENDTKARAAVYKRTSAMLSEIITEDREHLSLIQRHGWQGTEEGKHTGNMADEPETKPSS

SEQ ID NO: 43694 - protein, 141 aa, Homo sapiens
  DOMAIN (92)..(132): AMINOTRANSFERASE PROTEIN AMIDOTRA domain identified by eMATRIX, accession number PD00718D, p-value=3.880e-18, raw score of 29.33
LGDDFVRAANIILHCEGKVVVSGIGKSGHIGKKIAATLASTGTPAFFVHPAEALHGDLGMIESRDVMLFISYSGGAKELDLIIPRLEDKSIALGKPTSPLGLAAKAVLDISVEREACPMHLAPTSSTVNTLMMGDALAMAV

SEQ ID NO: 43695 - protein, 477 aa, Homo sapiens
  DOMAIN (417)..(429): ABC transporters family proteins domain identified by eMATRIX, accession number BL00211A, p-value=1.000e-09, raw score of 12.23
MTDEESPIEIKDNNPISNGEYLTTEDESHAVKVDDGVTGYINNASVMTSGDGSYGISVDSQNKVLYISDSDIKTSGSVSDKENGGITASAVVSEFGGTIFMNGDNSVESEREPCPMHFAPTSSTVNTLMMGDALAMAVMQARGFNEEDFARSHPAGALGARLLNKVHHLMRRDDAIPQVALTASVMDAMLELSRTGLGLVAVCDAQQQVQGVFTDGDLRRWLVGGGALTTPVNEAMTVGGTTLQSQSRAIDAKEILMKRKITAAPVVDENGKCTGAIKLDLQACILPSPPIMSPRFWDLIDSIRQRQSNMSVLVATAYMEEAERFDWLVAMNAGEVLATGSAEELRQQTQQATLEEAFINLLPQAQRQAHQAVVIPPYQPENAEIAIEARDLTMRFGSFVAVDHVNFRIPRGEIFGFLGSNGCGKSTTMKMLTGLCPPAKATTRVQLPRRRRRSFTRDRRNGQIRPARRALSANGEA

SEQ ID NO: 43696 - protein, 513 aa, Homo sapiens
  DOMAIN (299)..(312): HTRA/DEGQ PROTEASE FAMILY SIGNATURE domain identified by eMATRIX, accession number PR00834F, p-value=2.946e-09, raw score of 10.91
PLDAANLSNRQGRRQAFISGEGPFAGGLWCPPQEACVHGRGDLVDVMPHPGKKGAPGKYLEKGPPGPWGHMVQICGRAGKRVMGCLLREGGCLLGWGRLELRAGTRDLVEALLSLAGSGHQVDAVWLGLVGVGEHGRVLGGRRRWGMEARLRLGRGGGRAGARPCWLLIIHAHQDLEAVPRHDALAPMQRAEPPAVQALRVLLQRRQKTRCSSIRAAIIAAGPVANFIFAIFAYWLVFIIGVPGVRPVVGEIAANSIGHWAFEPDKEDPVSSLGIRPRGPQIEPVLENVQPNSAASKAGLQAGDRIVKVDGQPAPLIFQFHWRREFAQQRRHRLEVDIIKDKGLFRLSDVQHGIHRMTAFLQRDHFAFVIIQFDGKRNMQRLFFCLIRRGWRALADGQGVLLGFRIVVVFDGHNRCTGLAVPTAEMGEIDIRRIFHRLHKVVTGRCTTIMTLEIKLHPFLEVFFAKQGVDHANHFRALLVNGQGVEVVHLNDHIRADRVRHRAGVFCKLQSAH

SEQ ID NO: 43697 - protein, 260 aa, Homo sapiens
MQMLRKHLHLSVVLFDQLRCYLTHRIGVVRRTPARFRPECTIAVIPQVIKSDTHIWLNSVYDDISQRAPLSRKLRRTHYPAPNAVATRSGHIDFYTSDNIAGANFETQLAPAQAVSTAPGDTPSGRPTVQNQRYPRGNAQFSRLSDDDRKRSREKFSRYVPEDITTLLPMTHPSKCPGFQKWDVSCNAVNNMMNNPSITCPTVKALLVALRSDDQISAELVQMRLLAPEQWGMPLHVTFCSKPLIPAEHDGPTGDEYQNP

SEQ ID NO: 43698 - protein, 241 aa, Homo sapiens
RPKRDSPIKFFVRKNPASLRAPDDGLLWACGPNMVIPGNAPLSRCLQMIESVQGQKFSRYVPEDITTLLSMTQPLKLRGFQKWDVFCNAVNNMMNNPILPAHGKGVLVALRPVPGIRVEQALTLCRPNRTGDIMTIGGNRLVLFLSFCRINDLDTALNHIFPLPTGDIFSNRMVWFEDDQISAELVQMRLLAPEQWGMPLPLTQSSKPVINAEHDGRHWRRIPEPMRLWSIKLAMKAPPLQ

SEQ ID NO: 43699 - protein, 281 aa, Homo sapiens
  DOMAIN (65)..(91): DNA topoisomerase II proteins domain identified by eMATRIX, accession number BL00177I, p-value=1.173e-14, raw score of 21.82
MTRTKKRSGKQRSRATTPRRGSRTTNKSKKRRTGRQERRPADEKRRRGGAGDGGGDPPKTDPSRMTKPGLGEMNPMQLRETTLDPNTRRLVQLTIDDEDDQRTDAMMDMLLAKKRSEDRRNWLQEKGDMAEIECFFLMSISPFQARQGANIGLFRRGSRVPRRPLRTKSHLVELTQFKRGSQEKLLEGQKPVQGSPIKTTWHRLQSAPKWRLQAKVQDPLLMCPWGQGLQATEEMAATPNAQWRKVTTEDVPSCSLAHHPVFGSLIKHVLCRGTELQARML

SEQ ID NO: 43700 - protein, 41 aa, Homo sapiens
GRKEVLKHVHRLWGFDVMLEQQNEDGSIELLERCPPRMGNL

SEQ ID NO: 43701 - protein, 45 aa, Homo sapiens
INQQAPLIPIYYQPLIKLLKPYVGGFPLHNPQDYVSSKELYIKAH

SEQ ID NO: 43702 - protein, 164 aa, Homo sapiens
MSHTIRDKQKLKARASKIQGQVVALKKMLDEPHECAAVLQQIAAIRGAVNGLMREVIKGHLTEHIVHQGDELKREEDLDVVLKSRVGSTSVVVVQLVVTNPVSNVAIRNAKHREDIAWKPPVSWYVLDLQVDLAPPSAFPESGWGLNKVLKPFGAPGTGNLAVL

SEQ ID NO: 43703 - protein, 205 aa, Homo sapiens
  DOMAIN (86)..(138): Malate synthase proteins domain identified by eMATRIX, accession number BL00510G, p-value=8.322e-33, raw score of 17.24
GMAAFIPSKDEEHNNQVLTKVKADKSLEANNGLDGTWIAHPGLADTAMAVFSDILGSRKNQLEVMREQDAPITADQLLAPCDGERTEEGMRANIRVAVQYIEAWISGNGCVPTYGLMDNATKVEISSASLCQWIHHQKTLSNGKPVTKALFRQMLGEEMKVIASELGEERFSQGRFDDAARLMEQITTSDELIDFLTLPGYRLLA

SEQ ID NO: 43704 - protein, 533 aa, Homo sapiens
  DOMAIN (159)..(200): Malate synthase proteins domain identified by eMATRIX, accession number BL00510D, p-value=1.000e-40, raw score of 14.13
  misc_feature (1)...(533): Xaa = X or * as defined in Table 2
GQACHASSSPLKGSRGSPPNFEILYGPIFEDSLAPDXPKVIAGQITLRDAVTGPISSPNEAGKIYQLKPNPAVLICRVRGLHLPEKHVTWRGEAIPGSLFDFALYFFHNYQALLAKGSGPYFYLPKTQSWQEAAWWSEVFSYAEDRFNLPRGTIKATLLIETLPAVFQMDEILHALRDHIVGLNCGRWDYIFSYIKTLKNYPDRVLPDRQAVTMDKPFLNAYSRLLIKTCHKRGAFAMGGMAAFIPSKDEEHNNQVLNKVKADKSLEANNGHDGTWIAHPGLADTAMAVFNDILGSRKNQLEVMREQHAPITADQLLAPCDGERTERKFNALMESEKGQSQNLWKFAVYSGLRHGELAALAWEDVDLEKGIVNVRRNLTILDMFGPPKTNAGIRTVTLLQPALEALKEQYKLTGHHRKSEITFYHREYGRTEKQKLHFVFMPRVCNGKQKPYYSVSSLGARWNAAVKRAGIRRRNPYHTRHTFACWLLTAGANPAFIASQMGHETAQMVYEIYGMWIDDMSDEQIAMLNARVM

SEQ ID NO: 43705 - protein, 92 aa, Homo sapiens
AAELGQSIGGIFPSDEIVKGSISGYVFEQFEIACYTSLLAAAKNAGDTASIPTIEAILNEEKQMADWLIQNIPQTTEKFLIRSETDGVEAKK

SEQ ID NO: 43706 - protein, 219 aa, Homo sapiens
GHLWIRIDLSQSAVSHSVKELENHTGVRLLDRTTREVVLTDAGQQLALRLERLLDELNSTLRDTGRMGQQLSGKVRVAASQTISAHLIPQCIAESHRRYPDIQFVLHDRPQQWVMESIRQGDVDFGIVIDPGPVGDLQCEAILSEPFFLLCHRDSALAVEDYVPALPLPEGSPLVVKRITPVVERQLMLVRRKNRSLSTAAEALWDVVRDQGNALMAAA

SEQ ID NO: 43707 - protein, 214 aa, Homo sapiens
GQQLSGKVRVAASQTISAHLIPQCIAESHRRYPDIQFVLHDRPQQWVMESIRQGDVDFGIVIDPGPVGDLQCEAILSEPFFLLCHRDSALAGGDYVPWQALQGAKLVLQDYASGSRPLIDAALARNGIQANIVQEIGHPATLFPMVAAGIGISILPALALPLPEGSPLVVKRITPVVERQLMLVRRKNRSLSTAAEALWDVVRDQGNALMAGRE

SEQ ID NO: 43708 - protein, 356 aa, Homo sapiens
MVLRNGDGGEESPQNAAAYQMTERLDEFSKQKNEKVFQDVLTRLVGIKTLCSRDGWNLLVSLGKEDLQTQVHALLTLCLPHSAENLNEYVEALITLKQKIINTDKQSGDLFPMVAAGIGISILPALALPLPEGSPLVVKRITPVVERQLMLVRRKNRSLSTAAEALWDVCNCAIQPFFTAITRCIGSVTVKLKTQKSPQDIERAVASWERRLWVTYREGSCRTGHFLHKTSKGHTQNDFHGKKKLEAKVKKLQEGKFPEATFLLQRRDIHLRTLIYCVTEGTGHRRATAQRCSGHNFVIGVVQVPVEELAQDVQGKEEDSHTSRKQRWLIPRYHDHTVPENECVKALKALKECGMG

SEQ ID NO: 43709 - protein, 127 aa, Homo sapiens
  DOMAIN (34)..(62): MYELIN P0 PROTEIN SIGNATURE domain identified by eMATRIX, accession number PR00213C, p-value=9.151e-09, raw score of 15.94
DVDRKYSLAELIHTWSDLAGLSYDGYDPTRSVVNPQFKETTRWIGNPYKKNALIDYDTLPYGDQIAAVGWIRRLRHIRQYNCRNVYIELPSGHTFQVAFFNNASYCVPVYIPKGITCITTSAICAPA

SEQ ID NO: 43710 - protein, 210 aa, Homo sapiens
IQNLLLHPRGLRAITIAVFGKQNTYIRLEPFKINVLEQITKHHRKTAVRRDFADFGTTIKQDFRLLGQTSVDRLLQLSQGQAVKGNQLLPVSLVKRKTTLAPNTQTASPRALADSLMQLARQVSRLESGQDFADFGTTIKQDFRLLGQTSVDRLLQLSQGQAVKGNQLLPVSLVKRKTTLAPNTQTASPRALADSLMQLARQVSRLESGQ

SEQ ID NO: 43711 - protein, 585 aa, Homo sapiens
CSWHDRFPDWKAGRILPISEPPSNRIFACWGKPAWTACCNFSQGQAVKGNQLLPVSLVKRKTTLAPNTQTASPRALADSLMQLARQVSRLESGQDFADFGTTIKQDFRLLGQTSVDRLLQLSQGQAVKGNQLLPVSLVKRKTTLAPNTQTASPRALADSLMQLARQVSRLESGQDFADFGTTIKQDFRLLGQTSVDRLLQLSQGQAVKGNQLLPVSLVKRKTTLAPNTQTASPRALADSLMQLARQVSRLESGQDFADFGTTIKQDFRLLGQTSVDRLLQLSQGQAVKGNQLLPVSLVKRKTTLAPNTQTASPRALADSLMQLARQVSRLESGHYDHDYEFELGTRFRAVIIKLCNGDSLRHFMTSVYALVKCFHEGDPLHKTGCQHLIPKQQQNEKYQVPQFDQSTIKNIESAKGLDVWDSWPLQNADGTVAEYNGYHVEMLLREAGKAGFCRFRNHHQTGFSPAGANQRGPLAATLSGPGGEGQSAVARLTGEKKNHPGAQYANRLSPRVGRFINAAGTTGNSYDHDYEFELGTHQRLGAVARIVGDDLLNELRRDVVDARAGDVDQHAHAEKGDFRARMGIL

SEQ ID NO: 43712 - protein, 465 aa, Homo sapiens
  DOMAIN (289)..(316): Mrp family proteins domain identified by eMATRIX, accession number BL01215A, p-value=4.964e-11, raw score of 9.75
MISGQESSQSCETFLEIANKTWSRFSSQFAAVGKRLSWGSYYRDFADFDTTIKQDFRLLGQTSVDRLLQLSQGQAVKGNQLLPVSLVKRKTTLAPNTQTASPRALADSLMQLARQVSRLESGQVLLIHKGFCRFRNHHQTGFSPAGANQRGPLAATLSGPGGEGQSAVARLTGEKKNHPGAQYANRLSPRVGRFINAAGTTGFPTGKRAFNDDSPEARKITRRWRIGEAADLVGVSSQAIRDAEKAGRLPHPDMEIRGRVEQRVGYTIEQINHMRDVFGTRLRRAEDVFPPVIGVAAHKGGVYKTSVSVHLAQDLALKGLRVLLVEGNDPQGTASMYHGWVPDLHIHAEDTLLPFYLGEKDDVTYAIKPTCWPGLDIIPSCLALHRIETELMGKFDEGKLPTDPHLMLRLAIETVAHDYDVIVIDSAPNLGIGTIRGSSRVGGRHAQTESLNHECTPIHNCFQEN

SEQ ID NO: 43713 - protein, 688 aa, Homo sapiens
  DOMAIN (378)..(424): kw TRANSCRIPTASE REVERSE II ORF2 domain identified by eMATRIX, accession number DM01354O, p-value=1.000e-40, raw score of 8.73
DKLNPVAHQKAYLAQSSQCHPQNARLVQHTQIRILPISEPPSNRIFACWGKPAWTACCNFSQGQAVKGNQLLPVSLVKRKTTLAPNTQTASPRALADSLMQLARQVSRLESGQDFADFGTTIKQDFRLLGQTSVDRLLQLSQGQAVKGNQLLPVSLVKRKTTLAPNTQTASPRALADSLMQLARQVSRLESGQDFADFGTTIKQDFRLLGQTSVDRLLQLSQGQAVKGNQLLPVSLVKRKTTLAPNTQTASPRALADSLMQLARQVSRLESGQDFADFGTTIKQDFRLLGQTSVDRLLQLSQGQAVKGNQLLPVSLVKRKTTLAPNTQTASPRALADSLMQLARQVSRLESGQLKHKEVESPNRPITSSEIQVLIKSLPIKKSPGPDGFTAEFYERYKEELVPFLLKLFQTIEQERLLPNSFYEASIILTSKPSRDATKKDNFRPTSLMNIYAKILNKIGQTESSSTSKSLFSTIKSVSSPECKAGSTYANQDFADFGTTIKQDFRLLGQTSVDRLLQLSQGQAVKGNQLLPVSLVKRKTTLAPNTQTASPRALADSLMQLARQVSRLESGQETTPWSPFSDPVLAFDYKVFMAFVYNVVRVSQRMVVAGCISAFNDKLLNDLICFPVAPVSSKQIFPSDVKVAEPDHSCVSSYRIGSMAPNLTLSEMPRHNYFPAGNSVDHDNEFEL

SEQ ID NO: 43714 - protein, 94 aa, Homo sapiens
FIRIFADFGTTIKQDFRRLGQTSVDRLLQLSQGQAVKGNQLLPVSLVKRKTTLAPNTQTASPRALADSLMQLARQVSRLESGQHPRSVEEYLVS

SEQ ID NO: 43715 - protein, 439 aa, Homo sapiens
MQLARQVSRLESGQDCADFGTTIKQDFRLLGQTSVDRLLQLYQVQAVKGNQLLPVSLVKRKTTLAPNTQTASPRALADSLMQLARQVSRLESGQLPRNPETPKWGATGFSNCRILPISEPPIKQDFRLLGQTSVDRLLQLSQGQAVKGNQLLPVSLVKRKTTLAPNTQTASPRALADSLMQLARQVSRLESGQDFADFGTTIKQDFRLLGQTSVDRLLQLSQGQAVKGNQLLPVSLVKRKTTLAPNTQTASPRALADSLMQLARQVSRLESGQDFADFGTTIKQDFRLLGQTSVDRLLQLSQGQAVKGNQLLPVSLVKRKTTLAPNTQTASPRALADSLMQLARQVSRLESGQDFADFGTTIKQDFRLLGQTSVDRLLQLSQGQAVKGNQLLPVSLETAMTMITNSSSVPIPESFNAIIPFDIGPYADFRAPKCEVVIR

SEQ ID NO: 43716 - protein, 334 aa, Homo sapiens; identical to SEQ ID NO: 42707

SEQ ID NO: 43717 - protein, 121 aa, Homo sapiens
  misc_feature (1)...(121): Xaa = X or * as defined in Table 2
FRQRSVAFPPTVPNACVSVRSRERDFADFGTTIKQDFRLLGQTSVDRLLQLSQGQAVKGNQLLPVSLVKRKTTLAPNTQTASPRALADSLMQLARQVSRLESGQXAQRNXCRKHRLSIPRK

SEQ ID NO: 43718 - protein, 243 aa, Homo sapiens
  misc_feature (1)...(243): Xaa = X or * as defined in Table 2
MRDIFWVPDICKVMLYLVFFRSMGTPLRAVAMGLVITSWKIAQKPRDFADFGTTINQDFRLLGQTSVDRLLQLSQGQAVKGNQLLPVSLKTDTKAKNLYLTKAYYGGGTNFFRKESQKLQQSAKKRDAELANGALGIIELNNDYTLKKVMKPLITSNTGFADFGTTIKQDFRLLGQTSVDRLLQLSQGQAVKGNQLLPVSLVKRKTTLAPNTQTASPRALADSLMQLARQVSRLESGQXAQRN

SEQ ID NO: 43719 - protein, 88 aa, Homo sapiens
  misc_feature (1)...(88): Xaa = X or * as defined in Table 2
FIRDFADFGTTIKQDFRLLGQTSVDRLLQLSQGQAVKGNQLLPVSLVKRKTTLAPNTQTASPRALADSLMQLARQVSRLESGQXAQRN

SEQ ID NO: 43720 - protein, 545 aa, Homo sapiens
  DOMAIN (274)..(303): kw REPLICATION REPB REPA INITIATION domain identified by eMATRIX, accession number DM00653A, p-value=2.317e-21, raw score of 20.40
MALAWAVTLCCLLVPAWGTISWGIFRAPVQAFKPGSIHEVVLGNLEKGCRLSPSSYNRGLPLGFEFSALRHLDPKKLIWDFRLLGQTSVDRLLQLSQGQAVKGNQLLPVSLVKRKTTLAPNTQTASPRALADSLMQLARQVSRLESGQDFADFGTTIKQDFRLLGQTSVDRLLQLSQGQAVKGNQLLPVSLVKRKTTLAPNTQTASPRALADSLMQLARQVSRLESGQTVLLHTDECPCEQIASPACSESPTLLANGFSEQAASDAGLESGARTGFTQFRLSEQKEITNPYAMRLYESLCQYRKPDGSGIVSLKIDWIIERYQLPQSYQQNNDSIDEEARKELREQVYDSMGEKEEAKKTEDKSFAKPETDKEQDCEMEKGGREDMDISESAEEPQEKVDLTLGWLTEISEGAKGGGAPEGPNEAEVTSGKPEQEVPDVEEEKSVSETDVQEECREKEVGRSTERDFADFGTTIKQDFRLLGQTSVDRLLQLSQGQAVKGNQLLPVSLVKRKTTLAPNTQTASPRALADSLMQLARQVSRLESGQ

SEQ ID NO: 43721 - protein, 890 aa, Homo sapiens
  DOMAIN (751)..(794): 1 kw MIND INHIBITOR DIVISION CONTROL domain identified by eMATRIX, accession number DM01756B, p-value=4.822e-15, raw score of 22.91
MDINAKILSKLLASHIQQHIRKLIHHVQVGFIPRERGSSTVDWIQPVGITGVEDHKTIFDGDGKTYQNVQQFIEEGNYTPGDNHTLRDPHYVEDKGHKYIVFEANTGTENGYQGEESLFNKAYYGGGTNFFRKESQKLQQSAKKRDAELANGALGIIELNNDYTLKKVMKPLITSNTVTDEIERANVFKMNGKWYLFTDSRGSKMTIDGINSNDIYMLGYVSNSLTGPYKPLNKTGLVLQMGLDPNDVTFTYSHFAVPQAKGNNVVITSYMTNRGFFEDKKATFAPSFLMNIKGNRGTEGKQGIQYFPHKPLGVGSPHIRFDYLLVSILPSIRNPTGKFVVKDLAKRKNYAPVAMLQSAMTRTHNHRSCEEPVKDMLLAFPNDRAATIRSKDHHKHFRDFADFGTTIKQDFRLLGQTSVDRLLQLSQGQAVKGNQLLPVSLVKRKTTLAPNTQTASPRALADSLMQLARQVSRLESGQDFADFGTTIKQDFRLLGQTSVDRLLQLSQGQAVKGNQLLPVSLVKRKTTLAPNTQTASPRALADSLMQLARQVSRLESGQDFADFGTTIKQDFRLLGQTSVDRLLQLSQGQAHAIVTGDAVGMDDIPQEARQYRHNQAYAYSIQGDGAEDDDERIVRFHTRVTVDSDTLASDAARLTCRHGLGNQGTAPMYHGWVPDLHIHAEDTLLPFYLGEKDDVTYAIKPTCWPGLDIIPSCLALHRIETELMGKFDEGKLPTDPHLMLRLAIETVAHDYDVIVIDSAPNLGIGTINVVCAADVLIVPTPAELFDYTSALQFFDMLRDLLKNVDLKGFEPDVRILLTKYSNSNGSQSPWMEEQIRDAWGSMVLKNVVRETDEVGKGQIRMRTVFEQAIDQRSSTGAWSNALSILGTCLQ

SEQ ID NO: 43722 - protein, 428 aa, Homo sapiens
  DOMAIN (8)..(63): kw TRANSCRIPTASE REVERSE II ORF2 domain identified by eMATRIX, accession number DM01354Q, p-value=1.000e-40, raw score of 9.23
  misc_feature (1)...(428): Xaa = X or * as defined in Table 2
MDAKILNKILANQIQQHIKKLIHYDPVGLIPGMQGWFNIHKSINVIQHINRTKDKNHMIISIDAEKAFDKIQQPFMLKILNKLGIDGTYLKIIRAIYDKPTANIILNGQKLEAFALKTGTRQGCPLSPLLFNIVLEVLARAIRQEKEIKGIQLGKEEVKLSLFADDMIVYLENPIGDFADFGTTIKQDFRLLGQTSVDRLLQLSQGQAVKGNQLLPVSLVKRKTTLAPNTQTASPRALADSLMQLARQVSRLESGQKRFLTHLMFQSQHLAESFPHMVPHPLGGLSSETRTLLSSNFVEDPLRLSPVLPAGGGRSPSGRENPLDHQITNERGEPSCDRLTDPHRAPSDTGSQSSPWEQDHRMMFPPPGQSYPDSALPPQREDRFYSNSDRLPGPSELRSFNMPSLDKTDGSMPSEMESTRHDAKDDPX

SEQ ID NO: 43723 - protein, 409 aa, Homo sapiens
  DOMAIN (39)..(79): Chloramphenicol acetyltransferase proteins domain identified by eMATRIX, accession number BL00100B, p-value=4.333e-30, raw score of 25.01
  misc_feature (1)...(409): Xaa = X or * as defined in Table 2
MEKKITGYTTVDISQWHRKEHFEAFQSVAQCTYNQTVQLDITAFLKTVKKNKHKFYPAFIHILARLMNAHPEFRMAMKDGNGALFEGFSFGSLLAGQLGHPPVAMGQVKPCVLPFGIKTSRPAEHNVAGIGSKNCASGSLGVILNGATFPSLDSWTCEFWLCKKQYHVLDADSEHAQPSGELCPSLAKYSHLDGIVIVTSKGHSTVLSIQLLQDDEEHVNSCSKLEQHSTLSRAILLIYKEFCRFRNHHQTGFSPAGANQRGPLAATLSGPGGEGQSAVARLTGEKKNHPGAQYANRLSPRVGRFINAAGTTGFPTGKRAAIRDAKKAGRLPHPDMEIRGRVEQRVGYTIEQINHMRDVFGTRLRRAEDVFPPVIGVAAHKGGVYKTSVSVHLAQDLALKGLRVLLVEX

SEQ ID NO: 43724 - protein, 119 aa, Homo sapiens
GDFADFGTTIKQDFRLLGQTSVDRLLQLSQGQAVKGNQLLPVSLVKRKTTLAPNTQTASPRALADSLMQLARQVSRLESGQTSPYRTQSGPQWLLRKTCVHGQWLVLKVAGDVLFSSAS

SEQ ID NO: 43725 - protein, 1248 aa, Homo sapiens
  DOMAIN (244)..(287): 1 kw MIND INHIBITOR DIVISION CONTROL domain identified by eMATRIX, accession number DM01756B, p-value=4.822e-15, raw score of 22.91
MSSPKVPENSSYPAVVASPYEPVVGGDFADFGTTIKQDFRLLGQTSVDRLLQLSQGQAVKGNQLLPVSLVKRKTTLAPNTQTASPRALADSLMQLARQVSRLESGQDFADFGTTIKQDFRLLGQTSVDRLLQLSQGQADLALKGLRVLLVEGNDPQGTASMYHGWVPDLHIHAEDTLLPFYLGEKDDVTYAIKPTCWPGLDIIPSCLALHRIETELMGKFDEGKLPTDPHLMLRLAIETVAHDYDVIVIDSAPNLGIGTINVVCAADVLIVPTPAELFDYTSALQFFDMLRDLLKNVDLKGFEPDVRILLTKYSNSNGSQSPWMEEQIRDAWGSMVLKNVVRETDEVGKGFSPAGANQRGPLAATLSGPGGEGQSAVARLTGEKKNHPGAQYANRLSPRVGRFINAAGTTGFPTGKRAMELKVICQSSVTADTGDNVGNNVGEMEVSSLLIAEAGLSYQNTIVNISMFLTKVELFSLYTWVKTKTAYPLSSTFPYKGQGIYSQDNGGSLESPTGLQARVARPVPRISRRDFADFGTTIKQDFRLLGQTSVDRLLQLSQGQAVKGNQLLPVSLVKRKTTLAPNTQTASPRALADSLMQLARQVSRLESGQDFADFGTTIKQDFRLLGQTSVDRLLQLSQGQADLALKGLRVLLVEGNDPQGTASMYHGWVPDLHIHAEDTLLPFYLGEKDDVTYAIKPTCWPGLDIIPSCLALHRIETELMGKFDEGKLPTDPHLMLRLAIETVAHDYDVIVIDSAPNLGIGTINVVCAADVLIVPTPAELFDYTSALQFFDMLRDLLKNVDLKGFEPDVRILLTKYSNSNGSQSPWMEEQIRDAWGSMVLKNVVRETDEVGKGFSPAGANQRGPLAATLSGPGGEGQSAVARLTGEKKNHPGAQYANRLSPRVGRFINAAGTTGFPTGKRAMELKVICQSSVTADTGDNVGNNVGEMEVSSLLIAEAGLSYQNTIVNISMFLTKVELFSLYTWVKTKTAYPLSSTFPYKGQGIYSQDNGGSLESPTGLQARVARPVPRISRRDFADFGTTIKQDFRLLGQTSVDRLLQLSQGQAWAIALIDGFSPLTLESTFFNSGSWSKLEHHSTLSRAILLIYKGFCRFRNHHQTGFSPAGANQRGPLAATLSGPGGEGQSAVARLTGEKKNHPGAQYANRLSPRVGRFINAAGTTGNSYDHDYEFELGTRRLRVIYDNGTESDILQRSLQRALHRDEVARLISEPSAGPCLVMHLSLTISKAELF

SEQ ID NO: 43726 - protein, 384 aa, Homo sapiens
RSWLRSSLSGSIPIATEISCTSCEASTSSVRDFPGVKDLTFQWHDRLIFAIARLLGRSACGVTFHKEQLGTVKVLRGTISQFARQRRAAGQLFTHHFFGRTHTALGAGNRHLRQQFSRLNVLVQPQDKGIFHHARNECRALTRRETPAFFRIRAVFNSQLSQTQLHIFFTARPAGLASKCRKPPQACYLWDFADFGTTIKQDFRLLGQTSVDRLLQLSQGQAVKGNQLLPVSLVKRKTTLAPNTQTASPRALADSLMQLARQVSRLESGQNIESAKGLHVWDSWPLHNADGTVDEYNGYHVVFALAGSPKDADDTSIYMFYQKVGDNSIDSWKNAGRVFKDSDKFDANDPILKDQTQEWSGSATFTSDGKIRLFYTDYSGEHYG

SEQ ID NO: 43727 - protein, 222 aa, Homo sapiens
MRVFEKVDTADLSVGLPLPSGHSFSPPARQQGPSHSWAPPPHCPQGKWKARDFADFGTTIKQDFRLLGQTSVDRLLQLSQGQAVKGNQLLPVSLVKRKTTLAPNTQTASPRALADSLMQLARQVSRLESGQDFADFGTTIKQDFRLLGQTSVDRLLQLSQGQAWLQVAKRAGLGGGQSGRTVLRERVRIEIASTHIALAARHSDWRCCRNGRYPARGPAVPA

SEQ ID NO: 43728 - protein, 265 aa, Homo sapiens
  DOMAIN (158)..(187): kw REPLICATION REPB REPA INITIATION domain identified by eMATRIX, accession number DM00653A, p-value=7.207e-27, raw score of 20.40
RDFADFGTTIKQDFRLLGQTSVDRLLQLSQGQAVKGNQLLPVSLVKRKTTLAPNTQTASPRALADSLMQLARQVSRLESGQSENLMPPYRNMNGICEIHVAKYAEIFELTSAKAKDAGDEKGYESFPWFIKRAHSPSRGLYSVHINPYLIPFFIGLQNRFTQFRLSETKEITNPYAMRLYESLCQYRKPDGSGIVSLKIDWIIERYQLPQSYQRMPDFRRRFLQVCVNEINSRTPMRLSYIEKKKGRQTTHIVFSFRDITSMTTG

SEQ ID NO: 43729 - protein, 432 aa, Homo sapiens
  DOMAIN (81)..(95): Phage integrase family domain identified by eMATRIX, accession number PF00589B, p-value=1.621e-11, raw score of 16.17
MKAIAKYDFKVIAETEVRFKRGDILKVFIRDKLMERRNRRTGRTEKARIWEVTDRTVRTWIGEAVAAAAADGVTFSVPVTPHTFRHSYAMHMLYAGIPLKVLQSLMGHKSISSTEVYTKVFALDVAARHRVQFAMPEDFADFGTTIKQDFRLLGQTSVDRLLQLSQGQAVKGNQLLPVSLVKRKTTLAPNTQTASPRALADSLMQLARQVSRLESGQRVSGVIEIADGSRRRKAAALTESDYRVLVGELNDEQMPALSRLGNDYRPTSAYERGQRYASRLQNEFAGNISALADAENISRKIITRCINTAKLPKSVVALFSHPGELSARSGDALQKAFTDKEELLKQQASNLHEQKKAGVIFEAEEVITLLTSVLKPSSASRTSLSSRHQFAPGATVLYKGDKMVLNLDRSRVPTECIEKIEAILKELGKPAP

SEQ ID NO: 43730 - protein, 719 aa, Homo sapiens
MQAEVAHRVISRCLALLLLQTWEHSSSPAMEQSWTKNDFDELTEAGFRPLFFDMLRDLLKNVDLKGFEPDVRILLTKYSNSNGSQSPWMEEQIRDAWGSMVLKNVVRETDEVGKAAPMVDSLIARVGVMARGNAITLPVCGRDVKFTLEVLRGDSVEKTSRVWSGNERDQELLTEDALDDLIPSFLLTGQQTPAFGRRVSGVIEIADGSRRRKGGGLPAKAGVHQKVAVQGHSLQLLSQLCSHGMEAALKAFWDNLVIQGNKSPSSKDFADFGTTIKQDFRLLGQTSVDRLLQLSQGQAVKGNQLLPVSLVKRKTTLAPNTQTASPRALADSLMQLARQVSRLESGQDFADFGTTIKQDFRLLGQTSVDRLLQLSQGQAVKGNQLLPVSLVKRKTTLAPNTQTASPRALADSLMQLARQVSRLESGQGLPAKAGVHQKVAVQGHSLQLLSQLCSHGMEAALKAFWDNLVIQGNKSLQSKDFADFGTTIKQDFRLLGQTSVDRLLQLSQGQAVKGNQLLPVSLVKRKTTLAPNTQTASPRALADSLMQLARQVSRLESGQDFADFGTTIKQDFRLLGQTSVDRLLQLSQGQAVKGNQLLPVSLVKRKTTLAPNTQTASPRALADSLMQLARQVSRLESGQDFADFGTTIKQDFRLLGQTSVDRLLQLSQGQAVKGNQLLPVSLVKRKTTLAPNTQTASPRALADSLMQLARQVSRLESGQ

SEQ ID NO: 43731 - protein, 126 aa, Homo sapiens
  misc_feature (1)...(126): Xaa = X or * as defined in Table 2
FIRDFADFGTTIKQDFRLLGQTSVDRLLQLSQGQAVKGNQLLPVSLVKRKTTLAPNTQTASPRALADSLMQLARQVSRLESGQSXNSSKTKNTKCLNSINQRLKILSLQKDLMCGTAGRCKTLTEQ

SEQ ID NO: 43732 - protein, 125 aa, Homo sapiens
  misc_feature (1)...(125): Xaa = X or * as defined in Table 2
SLILFLRRRRAVEKRGKVWKDSCPNGTTLTLSGAIFLFIRDFADFGTPITQDFRLLGQTSVDRLLHLSQGQAVKGNQLLPVSLVKRKTTLAPNTQTASPRALADSLMQLARQVSRLESGQXAQRN

SEQ ID NO: 43733 - protein, 901 aa, Homo sapiens
  DOMAIN (404)..(437): ESICULAR LUMEN DOMAIN domain identified by eMATRIX, accession number DM01292C, p-value=4.672e-09, raw score of 12.45
MKRAPVIPKHTLNTQPVEDTSLSTPAAPMVDSLIARVGVMARGNAITLPVCGRDVKFTLEVLRGDSVEKTSRVWSGNERDQELLTEDALDDLIPSFLLTGQQTPAFGRRVSGVIEIADGSRRRKAAALTESDYRVLVGELDDEQMAALSRLGNDYRPTSAYERGQRYASRLQNEFAGNISALADADFADFGTTIKQDFRLLGQTSVDRLLQLSQGQAGFTDSPHYSDHLNDSRLGAHEGLSPTPFMNSNLMVDSCSKLEQHSTLSRAILLIYKGFCRFRNHHQTGFSPAGANQRGPLAATLSGPGGEGQSAVARLTGEKKNHPGAQYANRLSPRVGRFINAAGTTGFPTGKRAVSATQLIQAPCMKSNNALIVILGHRHLGCGIGLVMPVRRAFLRDIVHSDSIASHYGVLLALYALMQFLCAPVLGALSDRFGRRPVLLASLLGATIDYAIMATTPVLWIYPLLTVSCPCSRMLFLTTDVLLPLMFIKKLGANVAFLSSKQASVCHVACDNPTVAFGLRHCEVRKHKAIVQNLESPENGGSESGTYSSPPLETTVPPPAPGLPRAPGQGFFVVHRLGYGPGLCKQKHTPSLMSVEPEQFCLHLVSKALDGEYKLQRLKRSELNWTLWQKNKNHFVHFAIPVYLVFQDLALNGLRALLVQGNDPQGSASMYHGWVPDFHIHAEDTLLPFYPGEKDDVTYAIKPTCWPGLDIIPSCLALHRIETELLGKFDEGKLPTHPHLMLRLAIETVAHDYDVIVIDSAPNLGIGTINVSLEEVCDLLHAAPFQNILPRVHVKVKNWTGRMDQLFSDSDLLLRGRKQVRDFADFGTTIKQDFRLLGQTSVDRLLQLSQGQAVKGNQLLPVSLVKRKTTLAPNTQTASPRALADSLMQLARQVSRLESGQ

SEQ ID NO: 43734 - protein, 767 aa, Homo sapiens
  DOMAIN (597)..(650): Clathrin light chain proteins domain identified by eMATRIX, accession number BL00224B, p-value=4.764e-09, raw score of 16.94
NPRILPISEPPSNRIFACWGKPAWTACCNFSQGQAVKGNQLLPVSLVKRKTTLAPNTQTASPRALADSLMQLARQVSRLESGQDFADFGTTIKQDFRLLGQTSVDRLLQLSQGQAVKGNQLLPVSLVKRKTTLAPNTQTASPRALADSLMQLARQVSRLESGQSRVHSHSLGPLPTTTTGSLINQKKGGVSGGPGSKEQAEISCLKERKDLGLGILGSTVGILKVKHQGASTKQGHSQDLIKILLSDTSLSTPAAPMVDSLIARVGVMARGNAITLPVCGRDVKFTLEVLRGDSVEKTSRVWSGNERDQELLTEDALDDLIPSFLLTGQQTPAFGRRVSGVIEIADGSRRRKAAALTESDYRVLVGELDDEQMAALSRLGNDYRPTSAYERGQRYASRLQYMNLLPIFLRWLMRKIFHDEHGVPQDQQEEEPISETIIEEEIPSINSDLGNELYFVKLPKFLSIEPKDFADFGTTIKQDFRLLGQTSVDRLLQLSQGQAVKGNQLLPVSLVKRKTTLAPNTQTASPRALADSLMQLARQVSRLESGQPHSTDSATHRKMTLSLADRCSKTQKIRILPMAGRDPECQRTEMIKSSDLMAEIIQEHKEDQLPELEQLEHIGLFSHAEIKAIIKKASDLQYRIQERALFKDDFINYVLHEIPLFEQIQRRTRIGYSLKHGIRAVKATIVRALYGRIKPAGVVVTRSVPATLASALAPAPFAFFLSFLATFAGFPVKFKSGAPLGFRFSALRHLDPKKLDLGDGSRSGPSP

SEQ ID NO: 43735 - protein, 1319 aa, Homo sapiens
  DOMAIN (940)..(995): Actins proteins domain identified by eMATRIX, accession number BL00406D, p-value=1.231e-33, raw score of 12.58
MKLMETLNQCINAGHEMTKAIAIAQFNDDSPEARKITRRWRIGEAADLVGVSSQAIRDAEKAGRLPHPDMEIRGRVEQRVGYTIEQINHMRDVFGTRLRRAEDVFPPVIGVAAHKGGVYKTSVSVHLAQDLALKGLRVLLVEVSVHLAQDLALKGLRVLLVEGNDPQGTASMYHGWVPDLHIHAEDTLLPFYLGEKDDVTYAIKPTCWPGLDIIPSCLALHRIETELMGKFDEGKLPTDPHLMLRLAIETVAHDYDVIVIDSAPNLGIGTINVVCAADVLIVPTPAELFDYTSALQFFDMLRDLLKNVDLKGFEPDVRILLTKYSNIDGLLACRGCRDFADFGTTIKQDFRLLGQTSVDRLLQLSQGQAVKGNQLLPVSLVKRKTTLAPNTQTASPRALADSLMQLARQVSRLESGQVKLGACNKITFRTALLAGGATQAFAKENNQKAYKETYGVSHITRHDMLQIPKQQQNEKYQVPQFDQSTIKNIESAKGLDVWDSWPLQNADGTVAEYNGYHVVFALAGSPKDADDTSIYMFYQKVGDNSIDSWKNAGRVFKDSDKFDANDPILKDQTQEWSGSATFTSDGKIRLFYTDYSGKHYGKQSLTTAQVNVSKSDDTLKINGVEDHKTIFDGDGKGVFRVPQWIKDLNVGGSLESPYEHASLSPNEMDSVSILGGILAEEPHHVATATTSPQVVLPVYCQCSLKAQEIQTTIREYYKHLYANKLENLEEMDKFLDTYTLPRLNQEEVESLNRPKTGSEIVAIINSLPTKKSPGPDGFTAEFYQRDFADFGTTIKQDFRLLGQTSVDRLLQLSQGQAVKGNQLLPVSLVKRKTTLAPNTQTASPRALADSLMQLARQVSRLESGQDFADFGTTIKQDFRLLGQTSVDRLLQLSQGQAVKGNQLLPVSLVKRKTTLAPNTQTASPRALADSLMQLARQVSRLESGQVSATQLIIMKCDIDIRKDLYANNVLSGGTTMYPGIADRMQKEITALAPSTMKIKKKLAAMPDHTDVSLSPEERVRALSKLGCNITISEDITPRRYFRILLGTILVKELPEMGLGLSLTINMVTYKLKEVPSSKIKSLRDKRGGARTRGKGPPKTSLEGGGGTGKEPERTNASRGGCRPVIIIIIIIIKSFHHHQKCLYIILMYTKATVWKETKIKVQKAIAIAQFNDDSPKARKIPRRWRIGEAADLVGVSSQAIRDAEKAGRLPHPDMEIRGRVEQRVGYTIEQINHMRDVFGTRLRRAEDVFPPVIGVAAHKGGVYKTSVSVHLAQDLALKGLRVLLRGRDFADFGTTIKQDFRLWGKPAWTACCNSLRARR

SEQ ID NO: 43736 - protein, 140 aa, Homo sapiens
SVTSCLKVTSVCLTSAAASCRDFADFGTTIKQDFRLLGQTSVDRLLQLSQGQAVKGNQLLPVSLVKRKTTLAPNTQTASPRALADSLMQLARQVSRLESGQTGLRSFGLVKQKKSPIRMPCVYTNPCVSIVSRMAQASSL

SEQ ID NO: 43737 - protein, 154 aa, Homo sapiens
  misc_feature (1)...(154): Xaa = X or * as defined in Table 2
LNTTAITLCLLLREARKTLMTHQSTCFIKRDFADFGTTIKQDFRLLGQTSVDRLLQLSQGQAVKGNQLLPVSLVKRKTTLAPNTQTASPRALADSLMQLARQVSRLESGQXAQRNXXPVPKEKRRRGDRQEHQQPCRNTEGTALRVWAARDQTL

SEQ ID NO: 43738 - protein, 88 aa, Homo sapiens; identical to SEQ ID NO: 43719
  misc_feature (1)...(88): Xaa = X or * as defined in Table 2

SEQ ID NO: 43739 - protein, 346 aa, Homo sapiens; identical to SEQ ID NO: 43559
  DOMAIN (277)..(306): kw REPLICATION REPB REPA INITIATION domain identified by eMATRIX, accession number DM00653A, p-value=2.773e-12, raw score of 20.40

SEQ ID NO: 43740 - protein, 97 aa, Homo sapiens
  DOMAIN (57)..(71): Phage integrase family domain identified by eMATRIX, accession number PF00589B, p-value=1.621e-11, raw score of 16.17
HLASWVVALVLHWGCVWVTAESSTSKTRSPFRARSWIGEAVAAAAADGVTFSVPVTPHTFRHSYAMHMLYAGIPLKVLQSLMGHKSISSTGVPSSNS

SEQ ID NO: 43741 - protein, 430 aa, Homo sapiens; identical to SEQ ID NO: 43564
  DOMAIN (7)..(54): kw TRANSCRIPTASE REVERSE II ORF2 domain identified by eMATRIX, accession number DM01354V, p-value=1.000e-40, raw score of 12.97

SEQ ID NO: 43742 - protein, 350 aa, Homo sapiens; identical to SEQ ID NO: 35365
  DOMAIN (283)..(297): Phage integrase family domain identified by eMATRIX, accession number PF00589B, p-value=1.621e-11, raw score of 16.17

SEQ ID NO: 43743 - protein, 244 aa, Homo sapiens; identical to SEQ ID NO: 35370
  DOMAIN (105)..(132): Mrp family proteins domain identified by eMATRIX, accession number BL01215A, p-value=4.964e-11, raw score of 9.75

SEQ ID NO: 43744 - protein, 122 aa, Homo sapiens; identical to SEQ ID NO: 35366
  DOMAIN (55)..(69): Phage integrase family domain identified by eMATRIX, accession number PF00589B, p-value=1.621e-11, raw score of 16.17

SEQ ID NO: 43745 - protein, 544 aa, Homo sapiens; identical to SEQ ID NO: 41014
  DOMAIN (95)..(124): kw REPLICATION REPB REPA INITIATION domain identified by eMATRIX, accession number DM00653A, p-value=7.207e-27, raw score of 20.40

SEQ ID NO: 43746 - protein, 260 aa, Homo sapiens; identical to SEQ ID NO: 35367
  DOMAIN (193)..(207): Phage integrase family domain identified by eMATRIX, accession number PF00589B, p-value=1.621e-11, raw score of 16.17

SEQ ID NO: 43747 - protein, 94 aa, Homo sapiens
  DOMAIN (45)..(59): Phage integrase family domain identified by eMATRIX, accession number PF00589B, p-value=1.621e-11, raw score of 16.17
SSVTGRTEKARIWEVTDRTVRRPWIGEAVAAAAADGVTFSVPVTPHTFRHSYAMHMLYAGIPLKVLQSLMGHKSISSTEVYTKVFALDVAARHR

SEQ ID NO: 43748 - protein, 170 aa, Homo sapiens
  DOMAIN (128)..(140): Phage integrase family domain identified by eMATRIX, accession number PF00589C, p-value=9.609e-10, raw score of 14.62
RLTWGIGTINVVCAADVLIVPTPAELFDYTSALQFFDMLRDLLKNVDLKGFEPDVRILLTKYSNSNGSQSPWMEEQIRDAWGSMVLKNVVRETDEVGKEPPSTNTFRHSYAMHMLYAGIPLKVLQSLMGHKSISSTEVYTKVFALDVAARHRVQFAMPESDAVAMLKQLS

SEQ ID NO: 43749 - protein, 181 aa, Homo sapiens; identical to SEQ ID NO: 35369
  DOMAIN (114)..(128): Phage integrase family domain identified by eMATRIX, accession number PF00589B, p-value=1.621e-11, raw score of 16.17

SEQ ID NO: 43750 - protein, 370 aa, Homo sapiens; identical to SEQ ID NO: 35371
  DOMAIN (303)..(317): Phage integrase family domain identified by eMATRIX, accession number PF00589B, p-value=1.621e-11, raw score of 16.17

SEQ ID NO: 43751 - protein, 290 aa, Homo sapiens; identical to SEQ ID NO: 35373
  DOMAIN (223)..(237): Phage integrase family domain identified by eMATRIX, accession number PF00589B, p-value=1.621e-11, raw score of 16.17

SEQ ID NO: 43752 - protein, 474 aa, Homo sapiens; identical to SEQ ID NO: 35385
  DOMAIN (407)..(421): Phage integrase family domain identified by eMATRIX, accession number PF00589B, p-value=1.621e-11, raw score of 16.17

SEQ ID NO: 43753 - protein, 533 aa, Homo sapiens; identical to SEQ ID NO: 43575
  DOMAIN (466)..(480): Phage integrase family domain identified by eMATRIX, accession number PF00589B, p-value=1.621e-11, raw score of 16.17

SEQ ID NO: 43754 - protein, 208 aa, Homo sapiens; identical to SEQ ID NO: 35375
  DOMAIN (141)..(155): Phage integrase family domain identified by eMATRIX, accession number PF00589B, p-value=1.621e-11, raw score of 16.17

SEQ ID NO: 43755 - protein, 341 aa, Homo sapiens; identical to SEQ ID NO: 41036
  DOMAIN (274)..(288): Phage integrase family domain identified by eMATRIX, accession number PF00589B, p-value=7.840e-12, raw score of 16.17

SEQ ID NO: 43756 - protein, 233 aa, Homo sapiens
  DOMAIN (191)..(203): Phage integrase family domain identified by eMATRIX, accession number PF00589C, p-value=9.609e-10, raw score of 14.62
MPDSGLSLVSADYVDDDMFFQVINLGTALGPNEKLHPNHLRVWVIGGTDKGKTLCHCPRTPSGGEGGRGLLVDLLGAVIDNVLFRPQEDEQGDENKARGNWSSKLDFILSMVFIRDKLMERRNRRTGRTEKARIWEVTDRTVRTWIGEAVAAAAADGVIFSVPVTPHAVRHSYAMHMLYAGIPLKVLQSLMGHKSISSTEVYTKVFALDVAARHRVQFAMPESDAVAMLKQLS

SEQ ID NO: 43757 - protein, 426 aa, Homo sapiens; identical to SEQ ID NO: 35376
  DOMAIN (359)..(373): Phage integrase family domain identified by eMATRIX, accession number PF00589B, p-value=1.621e-11, raw score of 16.17

SEQ ID NO: 43758 - protein, 224 aa, Homo sapiens
  DOMAIN (157)..(171): Phage integrase family domain identified by eMATRIX, accession number PF00589B, p-value=1.621e-11, raw score of 16.17
LPEIRQIADRISVMRDGTIALSGKTSELSTDDIIQAITPAVREKSLSASQKLWLELPGGETEASVHASVGRQATDASFELKSELRPNAAQLCMNVRAYGQRTVFIRDKLMERRNRRTGRTEKARIWEVTDRTVRTWIGEAVAAAAADGVTFSVPVTPHTFRHSYAMHMLYAGIPLKVLQSLMGHKSISSTEVYTKVFALDVAARHRVQFAMPESDAVAMLKQLS

SEQ ID NO: 43759 - protein, 235 aa, Homo sapiens; identical to SEQ ID NO: 43581
  DOMAIN (83)..(138): Eukaryotic RNA polymerase II heptapeptide repeat proteins domain identified by eMATRIX, accession number BL00115I, p-value= 2.232e-21, raw score of 8.33

SEQ ID NO: 43760 - protein, 297 aa, Homo sapiens; identical to SEQ ID NO: 35377
  DOMAIN (230)..(244): Phage integrase family domain identified by eMATRIX, accession number PF00589B, p-value=1.621e-11, raw score of 16.17

SEQ ID NO: 43761 - protein, 211 aa, Homo sapiens
  DOMAIN (144)..(158): Phage integrase family domain identified by eMATRIX, accession number PF00589B, p-value=1.621e-11, raw score of 16.17
CAGAGGIARRRAEKEKALSAVNLDPTSRRLSSTSLPGAPPNPRVAAAGLSRRRPTPESAGRKSGRWPRASRYQQGHQDLFILRSDLPSQVFIRDKLMERRNRRTGRTEKARIWEVTDRTVRTWIGEAVAAAAADGVTFSVPVTPHTFRHSYAMHMLYAGIPLKVLQSLMGHKSISSTEVYTKVFALDVAARHRVQFAMPESDAVAMLKQLS

SEQ ID NO: 43762 - protein, 472 aa, Homo sapiens; identical to SEQ ID NO: 35378
  DOMAIN (405)..(419): Phage integrase family domain identified by eMATRIX, accession number PF00589B, p-value=1.621e-11, raw score of 16.17

SEQ ID NO: 43763 - protein, 255 aa, Homo sapiens
  DOMAIN (188)..(202): Phage integrase family domain identified by eMATRIX, accession number PF00589B, p-value=1.621e-11, raw score of 16.17
MYWTDWGEVPKIERAGMDGSSRFIIINSEIYWPNGLTLDYEEQKLYWADAKLNFIHKSNLDGTNRKNVDSILQDYANCKKSRGNTDNEYAVNEVVAGIEEYFNVMLGTQLLCKFDRPQYAEILADHPHALMSKVFIRDKLMERRNRRTGRTEKARIWEVTDRTVRTWIGEAVAAAAADGVTFSVPVTPHTFRHSYAMHMLYAGIPLKVLQSLMGHKSISSTEVYTKVFALDVAARHRVQFAMPESDAVAMLKQLS

SEQ ID NO: 43764 - protein, 172 aa, Homo sapiens
  DOMAIN (140)..(152): Phage integrase family domain identified by eMATRIX, accession number PF00589C, p-value=9.609e-10, raw score of 14.62
MSELPFTIALKRIKYLGIQLTRDVKDLFKENYKPLLNEIKEDTNKWENIPCSWIGRINIVKMAILPKNWKKLKFIWNQKRARVAKTILSQKNKAGGTTLPDFKLYYKATVTKTAWSTLEDPLCDAHAVCRYTAESSANLMGHKSISSTEVYTKVFALDVAARHRVLVCDAGV

SEQ ID NO: 43765 - protein, 928 aa, Homo sapiens; identical to SEQ ID NO: 43585
  DOMAIN (861)..(875): Phage integrase family domain identified by eMATRIX, accession number PF00589B, p-value=1.621e-11, raw score of 16.17

SEQ ID NO: 43766 - protein, 208 aa, Homo sapiens
  DOMAIN (141)..(155): Phage integrase family domain identified by eMATRIX, accession number PF00589B, p-value=1.621e-11, raw score of 16.17
MSLWVRGPHARALPAAAGVPINHAALTALICVLAATEIQSELAQGASAGNSVRVLSPTSGTTEPAGKDRPGKGKNAALILLGRHIPVFIRDKLMERRNRRTGRTEKARIWEVTDRTVRTWIGEAVAAAAADGVTFSVPVTPHTFRHSYAMHMLYAGIPLKVLQSLMGHKSISSTEVYTKVFALDVAARHRVQFAMPESDAVAMLKQLS

SEQ ID NO: 43767 - protein, 122 aa, Homo sapiens; identical to SEQ ID NO: 35366
  DOMAIN (55)..(69): Phage integrase family domain identified by eMATRIX, accession number PF00589B, p-value=1.621e-11, raw score of 16.17

SEQ ID NO: 43768 - protein, 231 aa, Homo sapiens; identical to SEQ ID NO: 35383
  DOMAIN (164)..(178): Phage integrase family domain identified by eMATRIX, accession number PF00589B, p-value=1.621e-11, raw score of 16.17

SEQ ID NO: 43769 - protein, 769 aa, Homo sapiens
  DOMAIN (702)..(716): Phage integrase family domain identified by eMATRIX, accession number PF00589B, p-value=1.621e-11, raw score of 16.17
NKKNITNLSRLVVRPHTDAVYHACFSEDGQRIASCGADKTLQLQARASGSTEQAGPLPPGAAVAAQAVAADSGIPVLLGDLEGPPALVFKAETGEKLLEIKAHEDEVLCCAFSTDDRFIATCSVDKKVKIWNSMTGELVHTYDEHSEQVNCCHFTNSSHHLLLATGSSDCFLKLWDLNQKECRNTMFGHTNSVNHCRFSPDDKLLASCSADGTLKLWDATSANERKSINVKQFFLNLEDPQEDMEVIVKCCSWSADGARIMVAAKNKIFLFDIHTSGLLGEIHTGHHSTIQYCDFSPQNHLAVVALSQYCVELWNTDSRSKVADCRGHLSWVHGVMFSPDGSSFLTSSDDQTIRLWETKKVCKNSAVMLKQEVDVVFQENEVMVLAVDHIRRLQLINGRTGQIDYLTEAQVSCCCLSPHLQYIAFGDENGAIEILELVNNRIFQSRFQHKKTVWHIQFTADEKTLISSSDDAEIQVWNWQLDKCIFLRGHQETVKDFRLLKNSRLLSWSFDGTVKVWNIITGNKEKDFVCHQGTVLSCDISHDATKFSSTSADKTAKIWSFDLLLPLHELRGHNGCVRCSAFSVDSTLLATGDDNGEIRIWNVSNGELLHLCAPLSEEGAATHGGWVTDLCFSPDGKMLISAGGYIKVFIRDKLMERRNRRTGRTEKARIWEVTDRTVRTWIGEAVAAAAADGVTFSVPVTPHTFRHSYAMHMLYAGIPLKVLQSLMGHKSISSTEVYTKVFALDVAARHRVQFAMPESDAVAMLKQLS

SEQ ID NO: 43770 - protein, 201 aa, Homo sapiens
  DOMAIN (159)..(171): Phage integrase family domain identified by eMATRIX, accession number PF00589C, p-value=9.609e-10, raw score of 14.62
MEAPTAAARAPALPAPATRSPLGRPPGGQPVRPGNLGAAWERGARQAAHKPCCDVTATIELQGSVGLAHVGSGVVEGDLAAIEAYKSSGGDIARQLTADEVRLLNRPSAFDVGYTLVHLAIRFQRQDMLAILLTEGKTHSYAMHMLYAGIPLKVLQSLMGHKSISSTEVYTKVFALDVAARHRVQFAMPESDAVAMLKQLS

SEQ ID NO: 43771 - protein, 255 aa, Homo sapiens
  DOMAIN (188)..(202): Phage integrase family domain identified by eMATRIX, accession number PF00589B, p-value=1.621e-11, raw score of 16.17
MVPHSTGKSWNGCDPTSATLDQLVTVFFMKLFSIGDARIPCLGPRSHSYRRSDYYSGTTIHSCCRADYWSGTTAHLYCRSDYHPVPSFILVTSTTNHQPLKPSISEASWNPLFASLHHLQLITESWYMSLATTVFIRDKLMERRNRRTGRTEKARIWEVTDRTVRTWIGEAVAAAAADGVTFSVPVTPHTFRHSYAMHMLYAGIPLKVLQSLMGHKSISSTEVYTKVFALDVAARHRVQFAMPESDAVAMLKQLS

SEQ ID NO: 43772 - protein, 254 aa, Homo sapiens
  DOMAIN (187)..(201): Phage integrase family domain identified by eMATRIX, accession number PF00589B, p-value=1.621e-11, raw score of 16.17
MWKRLWSWVTGRGWNSLEDSEEDKKMWESLEPPRDLLNGFDKNADSDMNNKVQAEVVSDVGEELVGNWSKELVPSIMSNLLNSDAIFSNNEMSLSDIEIYGFDYDYTLVFYSKHLHTLIFNAARDLLINEHRVFIRDKLMERRNRRTGRTEKARIWEVTDRTVRTWIGEAVAAAAADGVTFSVPVTPHTFRHSYAMHMLYAGIPLKVLQSLMGHKSISSTEVYTKVFALDVAARHRVQFAMPESDAVAMLKQLS

SEQ ID NO: 43773 - protein, 205 aa, Homo sapiens
  DOMAIN (138)..(152): Phage integrase family domain identified by eMATRIX, accession number PF00589B, p-value=1.621e-11, raw score of 16.17
MGYGKTFLSVLRQQCSFLKRHKIQRVTCHMHFEGRRVANSSAAIALAVTANWRRSFCPKVNALPSSSVQASAPKCLALEMFGPVFIRDKLMERRNRRTGRTEKARIWEVTDRTVRTWIGEAVAAAAADGVTFSVPVTPHTFRHSYAMHMLYAGIPLKVLQSLMGHKSISSTEVYTKVFALDVAARHRVQFAMPESDAVAMLKQLS

SEQ ID NO: 43774 - protein, 106 aa, Homo sapiens; identical to SEQ ID NO: 35382
  DOMAIN (39)..(53): Phage integrase family domain identified by eMATRIX, accession number PF00589B, p-value=1.621e-11, raw score of 16.17

SEQ ID NO: 43775 - protein, 285 aa, Homo sapiens; identical to SEQ ID NO: 43588
  DOMAIN (218)..(232): Phage integrase family domain identified by eMATRIX, accession number PF00589B, p-value=1.621e-11, raw score of 16.17

SEQ ID NO: 43776 - protein, 309 aa, Homo sapiens
  DOMAIN (57)..(100): kw TRANSCRIPTASE REVERSE II ORF2 domain identified by eMATRIX, accession number DM01354T, p-value=1.000e-40, raw score of 9.48
MIISTDSEKAFHKIQHPFVIKTLCKISIQGTYLTVIKAICDKPTANIILNGEKLKAFPLRTGTRQGCPLSPLLFNVVLEVLARAIKQEKEVKGIQISKEDSNCYCLLICCCFLELEKIILKFVWNQKRPCIAKARLSKKNKSGGITLSKFKLYYKAIVTKTACWPRASRYQQGHQDLFILRSDLPSQVFIRDKLMERRNRRTGRTEKARIWEVTDRTVRTWIGEAVAAAAADGVTFSVPVTPHTFRHSYAMHMLYAGIPLKVLQSLMGHKSISSTEVYTKVFALDVAARHRVQFAMPESDAVAMLKQLS

SEQ ID NO: 43777 - protein, 307 aa, Homo sapiens
  DOMAIN (240)..(254): Phage integrase family domain identified by eMATRIX, accession number PF00589B, p-value=1.621e-11, raw score of 16.17
MSPQWSAKLGYGPLTTHQAVTECGLPQGKAHDLEGKGSEAEDCQPVAQPAMLSSPSLLTKLPGRSPLIQWSWPLRDQRRSVTGLDGALLVDESTFITVGEGNSHLLLDGRSQTTSTIKHLEYMHSARHLEDDYLASERSSAITYSKAVQKVYSQGRWKAKRKTVAMQPMPCALASNSPGLGVLGPVFIRDKLMERRNRRTGRTEKARIWEVTDRTVRTWIGEAVAAAAADGVTFSVPVTPHTFRHSYAMHMLYAGIPLKVLQSLMGHKSISSTEVYTKVFALDVAARHRVQFAMPESDAVAMLKQLS

SEQ ID NO: 43778 - protein, 1072 aa, Homo sapiens
  DOMAIN (597)..(626): kw REPLICATION REPB REPA INITIATION domain identified by eMATRIX, accession number DM00653A, p-value=7.207e-27, raw score of 20.40
MKLMETLNQCINAGHEMTKAIAIAQFNDDSPEARKITRRWRIGEAADLVGVSSQAIRDAEKAGRLPHPDMEIRGRVEQRVGYTIEQINHMRDVFGTRLRRAEDVFPPVIGVAAHKGGVYKTSVSVHLAQDLALKGLRVLLVEGNDPQGTASMYHGWVPDLHIHAEDTLLPFYLGEKDDVTYAIKPTCWPGLDIIPSCLALHRIETELMGKFDEGKLPTDPHLMLRLAIETVAHDYDVIVIDSAPNLGIGTINVVCAADVLIVPTPAELFDYTSALQFFDMLRDLLKNVDLKGFEPDLSSFAKQALSQAQKSIDRVLDIQEEEPSIWAETIPYGEPGIYSRFFMERRNRRTGRTEKARIWEVTDRTVRTWIGEAVAAAAADGVTFSVPVTPHTFRHSYAMHMLYAGIPLKVLQSLMGHKSISSTEVYTKVFALDVAARHRCDNLKTCHTSHGSVMAETAVINHKKSKNSPRIVQSNDLTEAAYSLSRDQKRMLYLFVDQIRKSDGTLQEHDGICEIHVAKYAEIFGLTSAEASKDIRQALKSYAAKEVVLYRPEEDAGDEEGYESFPWFIKRAHSPSRGLYSVHINPYLIPFFIGLQNRFTQFRLSETKEITNPYAMRLYESLCQYRKPDGSGIVSLKIDWIIERYQLPQSYQRMPDFRRRFLQCINAGHEMTKAIAIAQFNDDSPEARKITRRWRIGEAADLVGVSSQAIRDAEKAGRLPHPDMEIRGRVEQRVGYTIEQINHMRDVFGTRLRRAEDVFPPVIGVAAHKGGVYKTSVSVHLAQDLALKGLRVLLVEGNDPQGTASMYHGWVPDLHIHAEDTLLPFYLGEKDDVTYAIKPTCWPGLDIIPSCLALHRIETELMGKFDEGKLPTDPHLMLRLAIETVAHDYDVIVIDSAPNLGIGTINVVCAADVLIVPTPAELFDYTSALQFFDMLRDLLKNVDLKGFEPDVFIRDKLMERRNRRTGRTEKARIWEVTDRTVRTWIGEAVAAAAADGVTFSVPVTPHTFRHSYAMHMLYAGIPLKVLQSLMGHKSISSTEVYTKVFALDVAARHRVQFAMPESDAVAMLKQLS

SEQ ID NO: 43779 - protein, 658 aa, Homo sapiens
  DOMAIN (470)..(499): kw REPLICATION REPB REPA INITIATION domain identified by eMATRIX, accession number DM00653A, p-value=7.207e-27, raw score of 20.40
MKELSSTIALTYCLATVYRMQYGKRESRQCLAVSMRSVPQILAEMSTQTQRPESSPEKLELLAFIQCRHNAKNLGPTQPVGNVMHGDDQRDTHEIWCHDSDQGTSLGRSIPCPPALCSVRKIHLRPQVLRPTSPRNITPISNPRQRRHILSVDPKLWRRSWTGKAAFPWCFIIAGTPLIIHPCFRGVRPCRDTWLGPSPLAASPAFLGEGQRIKYLGIQLMRDVKDLFKENYKPLLNEIKVDKHKWKNIPCSWIGRINIMKMATVPKVFIRDKLMERRNRRTGRTEKARIWEVTDRTVRTWIGEAVAAAAADGVTFSVPVTPHTFRHSYAMHMLYAGIPLKVLQSLMGHKSISSTEVYTKVFALDVAARHRIRKSDGTLQEHDGICEIHVAKYAEIFGLTSAEASKDIRQALKSFAGKEVVFYRPEEDAGDEKGYESFPWFIKRAHSPSRGLYSVHINPYLIPFFIGLQNRFTQFRLSETKEITNPYAMRLYESLCQYRKPDGSGIVSLKIDWIIERYQLPQSYQRMPDFRRRFLQVFIRDKLMERRNRRTGRTEKARIWEVTDRTVRTWIGEAVAAAAADGVTFSVPVTPHTFRHSYAMHMLYAGIPLKVLQSLMGHKSISSTEVYTKVFALDVAARHRVQFAMPESDAVAMLKQLS

SEQ ID NO: 43780 - protein, 407 aa, Homo sapiens
  DOMAIN (300)..(329): kw REPLICATION REPB REPA INITIATION domain identified by eMATRIX, accession number DM00653A, p-value=7.207e-27, raw score of 20.40
MHAEVLAPTLDGNADEKVRTTRLKPSCVHLAPSQMTAKILSLIEMQGEIKRVFIRVQAALDTLLQLEPRQTQMLIEQGSPYVPDTPHWSLGTLKNASPAIGVQSVKVFIRDKLMERRNRRTGRTEKARIWEVTDRTVRTWIGEAVAAAAADGVTFSVPVTPHTFRHSYAMHMLYAGIPLKVLQSLMGHKSISSTEVYTKVFALDVAARHREHDGICEIHVAKYAEIFGLTSAEASKDIRQALKSFAGKEVVFYRPEEDAGDEKGYESFPWFIKRAHSPSRGLYSVHINPYLIPFFIGLQNRFTQFRLSETKEITNPYAMRLYESLCQYRKPDGSGIVSLKIDWIIERYQLPQSYQRMPDFRRRFLQVCVNEINSRTPMRLSYIEKKKGRQTTHIVFSFRDITSMTTG

SEQ ID NO: 43781 - protein, 778 aa, Homo sapiens
  DOMAIN (721)..(735): Phage integrase family domain identified by eMATRIX, accession number PF00589B, p-value=1.621e-11, raw score of 16.17
MNMNIKKIVKQATVLTFTTALLAGGATQAFAKENNQKAYKETYGVSHITRHDMLQIPKQQQNEKYQVPQFDQSTIKNIESAKGLDVWDSWPLQNADGTVAEYNGYHVVFALAGSPKDADDTSIYMFYQKVGDNSIDSWKNAGRVFKDSDKFDANDPILKDQTQEWSGSATFTSDGKIRLFYTDYSGKHYGKQSLTTAQVNVSKSDDTLKINGVEDHKTIFDGDGKTYQNVQQFIDEGNYTSGDNHTLRDPHYVEDKGHKYLVFEANTGTENGYQGEESLFNKAYYGGGTNFFRKESQKLQQSAKKRDAELANGALGIIELNNDYTLKKVMKPLITSNTVTDEIERANVFNMNGKWYLFTDFTRFKMTIDGINSNDIYMLGYVSNSLTGPYKPLNKTGAVLQMGLDQRCDIPYSHFASSVSLVIYYSLLHPKSTDIWQGCLRKSCGIAGGDKTERRDSPRATDLAGKRTESSGSCQGASYEPTILGKPPTPEQVPPEAGLGTQVAVEDSFLSHHHWLWVKLALKTGNVSKINAAFGDNSPAYCPPAWGLSQQDYLQRKALSAQQELPSSSRDPSTLENSSAFEGVPKAEADPLETSSYVSFASDQQDEAPTQNPAATQGGGHPKEGADAVSGTQGKGTVNNRPLTADDDSILSGGTWGTQLEKPEKPQGGSYHMVLCFALKGQKDRESADLGSDGQNGQDLDWGGGCATAADGVTFSVPVTPHTFRHSYAMHMLYAGIPLKVLQSLMGHKCISSTEVYTKVFALDVAARHRVHVCDAGV

SEQ ID NO: 43782 - protein, 424 aa, Homo sapiens
  DOMAIN (323)..(337): Phage integrase family domain identified by eMATRIX, accession number PF00589B, p-value=1.621e-11, raw score of 16.17
MTKDSQNKWEVNQRKIRSSVIEKPREVSVLRRKWLTVWADADHQVKIDENKEWAFSLTHRAAWSLGRTATQACMEAQDTQACMEAQELYLLWHWAFRQNDCHSVRVQNRGEAEMAEMTEVEFRMWINTIFTDLKEHIVTQCRKAKNHKILQEVTDKIASIEKNVMNLMELKNTIQEFHNAITSINSRKDQVEERISEFEDCVSEIRQTDKNREKRMKRNEQNLQEIWDCVKRLDLQLIGVPERDVGPGLLDQQGHQDLFILRSDLPSQVFIRDKLMERRNRRTGRTEKARIWEVTDRTVRTWIGEAVAAAAADGVTFSVPVTPHTFRHSYAMHMLYAGIPLKVLQSLMGHKSISSTEVYTKVFALDVAARHRVQFAMPESDAVAMTLGVFQHPCGLLHFRGTGNNHWHRRPALPRVPMEAVFTE

SEQ ID NO: 43783 - protein, 417 aa, Homo sapiens
  DOMAIN (307)..(321): Phage integrase family domain identified by eMATRIX, accession number PF00589B, p-value=1.621e-11, raw score of 16.17
MRTSDRRSTDLRYSSSSNLLSIAKALLLKQYSIKHPPSRPMDYHRRGGHMRFQAPCMKSNNALIVILGTVTLDAVGIGLVMPVLPGLLRDIVHSDSIASHYGVLLALYALMQFLCAPVLGALSDRFGRRPVLLASLLGATIDYAIMATTPVLWIYPLVSTAEQCRSSPKSMICCNKKSLYLPQEMSAVYIEFTEYYYPDGKDFPRNKKNSTTNYRGTAESVNAGANLQNYGETSPDAISTNSEGAQENHDDLVFIRDKLMERRNRRTGRTEKARIWEVTDRTVRTWIGEAVAAAAADGVTFSVPVTPHTFRHSYAMHMLYAGIPLKVLQSLMGHKSISSTEVYTKVFALDVAARHRDTESSSVYVKWTGLVHMDRHLMNTDQDVAVLYTSNLAQLTTGQLRLTEEHRDSPIYMLQDS

SEQ ID NO: 43784 - protein, 413 aa, Homo sapiens; identical to SEQ ID NO: 43616
  DOMAIN (346)..(360): Phage integrase family domain identified by eMATRIX, accession number PF00589B, p-value=1.621e-11, raw score of 16.17

SEQ ID NO: 43785 - protein, 591 aa, Homo sapiens; identical to SEQ ID NO: 43613
  DOMAIN (235)..(278): 1 kw MIND INHIBITOR DIVISION CONTROL domain identified by eMATRIX, accession number DM01756B, p-value=4.822e-15, raw score of 22.91

SEQ ID NO: 43786 - protein, 210 aa, Homo sapiens
  DOMAIN (24)..(37): Beta-ketoacyl synthases proteins domain identified by eMATRIX, accession number BL00606C, p-value=9.526e-10, raw score of 11.94
  misc_feature (1)...(210): Xaa = X or * as defined in Table 2
AQALIATYGRDRDPGRPLWLGSVKSNIGHTQAAAGVAGVIKMVMAMRHGQLPRTLHVESPSPEVFIRDKLMERRNRRTGRTEKARIWEVTDRTVRTWIGEAVAAAAADGVTFSVPVTPHTFRFSYAMHMLYAGIPLXVLQSLMGHKSISSTEVYTKVFALDVAARHRVQFAMPESDAGGPGTCACSQQGCRLRGSSVSPGRQHPQPHVRV

SEQ ID NO: 43787 - protein, 832 aa, Homo sapiens
  DOMAIN (176)..(190): Phage integrase family domain identified by eMATRIX, accession number PF00589B, p-value=1.621e-11, raw score of 16.17
TSVELMDLCPIRLCKNFQRYTGIQHVHRIGMAERMWCDRNRERHTVSSSGGNRLPNPGPDRSVRHFPDPRFLCPSCATVTPLHELIANKYLNRQRHQHLVALRIIFAHGENGGEEVVHIGHVFIRDKLMERRNRRTGRTEKARIWEVTDRTVRTWIGEAVAAAAADGVTFSVPVTPHTFRHSYAMHMLYAGIPLKVLQSLMGHKSISSTEVYTKVFALDVAARHRVQFAMPESDAVAMLKQLAESIPGDSSSMPMCTRQRASWAQLFNARVHQDHLESGAKLKLPDHLRTRMGWSAPWERLPVWERLLHGMDPPAMVQGLPEAALCLLLWQHPGSYTEQVFIRDKLMERRNRRTGRTEKARIWEVTDRTVRTWIGEAVAAAAADGVTFSVPVTPHTFRHSYAMHMLYAGIPLKVLQSLMGHKSISSTEVYTKVFALDVAARHRVQFAMPESDAVAMLKQLAESIPGDSSSMPMCTRQRASWAQLFNARVHQDHLESGAKLKLPDHLRTRMGWSAPWERLPVWERLLHGMDPPAMVQGLPEAALCLLLWQHPGSYTEQVFIRDKLMERRNRRTGRTEKARVWEVTDRTVRTWIGEAVAAAAADGVTFSVPVTPHTFRHSYAMHMLYAGIPLKVLQSLMGHKSISSTEVYTKVFALDVAARHREHAKMSLVTVPFYQKRHRHFDQSYRNIQTRYLLDEYASKKRAGETVTLKCTMLVTPDLKRVQPRAEWYRDGAGNAQIHLVNGQPPVILVHTCIEELRPGCSLANAHGVPSLESRIMGIGWFPGGKNGIRVDGLTEGSLYEFKIAAVNLAGIGEPSDPSEHFKCEAWTMPEP

SEQ ID NO: 43788 - protein, 708 aa, Homo sapiens
  DOMAIN (641)..(655): Phage integrase family domain identified by eMATRIX, accession number PF00589B, p-value=1.621e-11, raw score of 16.17
HGRRWMSERWCCGRTVKRCCAARTQEDGCLQARKRFCTRNWINWHLDLGLPSLQNYEMRNKCLLFKPPSLWYFVIATQDDKDNKPKMKNGKVTKMSFKREQEAKVFIYLLPPPTSGALPPGTVHVPALLGLHRWNKRYKKPKPWGTRQKVEVTPLSLIYGGRSQMLHFPEFQGADLYALEQGQGVCDLRNLTTYRVVHKVSLGSLVYMTSNTGRTMMPGDVAGDGGGLGEAVFLSFRYSQGCHDKVPQWEWIKTQFWNVKVQDQDVMLLLKVLLQVTYSQVPPSMEYRELKGGELGVVPEPEKERCVATLQETVSLQEEGFVEKSSDFESKDTTRPRSDARQAISFYLCIQGHRVGSLKTAMLGIVTPWELPNSTQQRNASSMEISTQGLSCSQVGSFQMGNRCPVVNLLKRKKGPRIVEAAGMKKPHSETVPDWTDPGKNTTITIITPIIIYNRHHSHHHHFHQHYHAIITINITIILIINSITIIHILEKNWKTGFGIRESGFKIWLFFLGWIPKSLKTTSLASSKTEGSEYRCCLKAHVIMLLPIRQCCKDQMGKFREHQLHNYLASALSIALIPDDQLSEKKVFIRDKLMERRNRRTGRTEKARIWEVTDRTVRTWIGEAVAAAAADGVTFSVPVTPHTFRHSYAMHMLYAGIPLKVLQSLMGHKSISSTEVYTKVFALDVAARHRVQFAMPESDAVAMLKQLS

SEQ ID NO: 43789 - protein, 694 aa, Homo sapiens
  DOMAIN (205)..(214): Zinc finger C3HC4 type (RING finger), proteins. domain identified by eMATRIX, accession number BL00518, p-value=7.000e-11, raw score of 12.23
MLGMVAHACNPSTLGGRDGKNSSGSKRYNRKRELSYPKNESFNNQSRRSSSQKSKTFNKMPPQRGGGSSKLFSSSFNGGRRDEVAEAQRAEFSPAQFSGPKKINLNHLLNFTFEPRGQTGHFEGSGHGSWGKRNKWGHKPFNKELFLQANCQFVVSEDQDYTAHFADPDTLVNWDFVEQVRICSHEVPSCPICLYPPTAAKITRCGHIFCWACILHYLSLSEKTWSKCPICYSSVHKKDLKSVVATESHQYVVGDTITMQLMKREKGVLVALPKSKWMNVDHPIHLGDEQHSQYSKLLLASKEQVLHRVVLEEKVALEQQLAEEKHTPESCFIEAAIQELKVFIRDKLMERRNRRTGRTEKARIWEVTDRTVRTWIGEAVAAAAADGVTFSVPVTPHTFRHSYAMHMLYAGIPLKVLQSLMGHKSISSTEVYTKVFALDVAARHRVQFAMPEDFADFGTTIKQDFRLLGQTSVDRLLQLSQGQAVKGNQLLPVSLVKRKTTLAPNTQTASPRALADSLMQLARQVSRLESGQRVSGVIEIADGSRRRKAAALTESDYRVLVGELNDEQMPALSRLGNDYRPTSAYERGQRYASRLQNEFAGNISALADAEKYLRISDKLGNNTETSMSQKPCKMKRIILEKSWQFEKWIIIVILFHYGESWNLLRADQRLIFAKSWPRGFPVSTGTPGFIYSAK

SEQ ID NO: 43790 - protein, 33 aa, Homo sapiens
EKIACLINQCGVRSIRVAADLIRSRVASSSLTP

SEQ ID NO: 43791 - protein, 358 aa, Homo sapiens
  DOMAIN (258)..(290): ABC transporters family proteins domain identified by eMATRIX, accession number BL00211B, p-value=4.857e-20, raw score of 13.37
MGVKLDDATRERIKSAATRIDRTPHWLIKQAIFSYLEQLENSDTLPELPALLSGAANESDEAPTPAEEPHQPFLDFAEQILPQSVSRAAITAAYRRPETEAVSMLLEQARLPQPVAEQAHKLAYQLADKLRNQKNAMSRRSFAGLVGSGRTELMNCLFGVDKRAGGEIRLNGKDISPRSPLDAVKKGMAYITESRRDNGFFPNFSIAQNMAISRSLKDGGYKGAMGLFHEVDEQRTAENQRELLALKCHSVNQNITELSGGNQQKVLISKWLCCCPEVIIFDEPTRGIDVGAKAEIYKVMRQLADDGKVILMVSSELPEIITVCDRIAVFCEGRLTQILTNRDDMSEEEIMAWAFPQE

SEQ ID NO: 43792 - protein, 119 aa, Homo sapiens
MQLIKDRWRHQAIQALMRFSWCKHFAVIGVLASGVLNALLITGFPPTLTTYWGQLLLLKAILVMIIEVIALANRYVLVPRMRQDEDRAAPWFVWMTKLEWAIGAVVLVIISLLATLEPF

SEQ ID NO: 43793 - protein, 159 aa, Homo sapiens
SHPFFSTDWSTDTGFRSKSIWCHRNCRWRVAVVKLLHLPKVIIVFWLASWMMSRWLHYPDWVTIIAQQVLMNVVSVMQADCRMNLLEIFLRWLMRKIFHVRLLPAVSTPPNCLNQLLLFFLTPVNYLPGQVMHFKKPLQIKRNYLSSRHLTFMSRKKLG

SEQ ID NO: 43794 - protein, 103 aa, Homo sapiens
SHPFFSTDWSTDTGVRSKSIWCHRNCRWRVAVVKLLHLPKVIIVFWLASCMMSRCPHYPDWVTIIAQQVLTPRKDVMQADCRMNLLEIFLRWLMRKIFHGFGM

SEQ ID NO: 43795 - protein, 104 aa, Homo sapiens
  misc_feature (1)...(104): Xaa = X or * as defined in Table 2
WHYREPLLLRAQLTNPPSGQLVSITKYLQPVEYXAYVLEXQAHLHYQLKSVDQWPVQKQFSSGSDLYQLHPFHVQHFLEPCFPRHPEFAPPSTGTESHYYCCIW

SEQ ID NO: 43796 - protein, 497 aa, Homo sapiens
  DOMAIN (79)..(121): Chloramphenicol acetyltransferase proteins domain identified by eMATRIX, accession number BL00100C, p-value=1.000e-39, raw score of 23.60
MENKITGYTTVDISQWHRKEHFEASQSVAQCTYNQTVQLDITAFLKTVKKNKHKFYPAFIHILARLMNAHPEFRMAMKDGELVIWDSVHPCYTVFHEQTETFSSLWSEYHDDFRQFLHIYSQDVACYGENLAYFPKGFIENMFFVSANPWVSFTSFDLNVANMDNFFAPVFTMGKYYTQGDKVLMPLAIQVHHAVCDGFHVGRMLNELQQYCDEWQGGAQEEPPKFCMFQINALSSALVSTGRGAYTKAFSQKGDCIDLHLQFLWNLSKVHHWSGVTVAQEGQRKRDLGSDGQTVRTWIGEAVAALLLTCDNLKTCHTSHGSVMAETAVINHKKRKNSPRIVQSNDLTEAAYSLSRDQKRMLYLFVDQIRKSDGTLQEHDGICEIHVAKYAEIFGLTSAEAKITNPYAMRLYESLCQYRKPDGSGIVSLKIDWIIERYQLPQSYQRMPDFRRRFLQVCVNEINSRTPMRLSYIEKKKGRQTTHIVFSFRDITSMTTG

SEQ ID NO: 43797 - protein, 184 aa, Homo sapiens
  misc_feature (1)...(184): Xaa = X or * as defined in Table 2
MTARKARKITRRWRIGEAADLVGVSSQAIRDAEKAGRLPHPDMEIRGRVEQRVGYTIEQINHMRDVFGTRLRRAEDVFPPVIGVAAHKGNDPQGTASMYHGWVPDLHIHAEDTLLPFYLGEKDDVTYAIKPTCWPGLDIIPSCLALHRIETELMGKFDEAQPNLGIGTNXCRMCCXCADCSHAC

SEQ ID NO: 43798 - protein, 98 aa, Homo sapiens
  DOMAIN (28)..(42): Phage integrase family domain identified by eMATRIX, accession number PF00589B, p-value=1.621e-11, raw score of 16.17
DTYSVSWIGEAVAAAAADGVTFSVPVTPHTFRHSYAMHMLYAGIPLKVLQSQYPIFKLSYKNPVTQTAWFWFPNRIFGPVPINVSFSPKVGPGLPGII

SEQ ID NO: 43799 - protein, 70 aa, Homo sapiens
EWRNVCGVTGTENVTPSAAARQPPPQPVSPGIKNVCCICSLTRSENLMAPYRNMTVSARSMLLNMLKYSD

SEQ ID NO: 43800 - protein, 140 aa, Homo sapiens
VHQFHGSLHEGFCAGCGCPAPGTVCDAGGFCRFRNHHQTGFSPAGANQRGPLAATLSGPGGEGQSAVARLTGEKKNHPGAQYANRLSPRVGRFINAAGTTGFPTGKRAKSIWCHRNCRWRVAVVKLLHLPKVIIVFWLAS

SEQ ID NO: 43801 - protein, 22 aa, Homo sapiens
HGRRWMSERWCWGRTVKRLCAV

SEQ ID NO: 43802 - protein, 58 aa, Homo sapiens
  misc_feature (1)...(58): Xaa = X or * as defined in Table 2
EWRNVCGVTGTENVTPSAAAAQPPPQSRPFSWILRPFXRPXRKISTSFIRPLFTFLPA

SEQ ID NO: 43803 - protein, 794 aa, Homo sapiens
  DOMAIN (681)..(710): kw REPLICATION REPB REPA INITIATION domain identified by eMATRIX, accession number DM00653A, p-value=7.207e-27, raw score of 20.40
  misc_feature (1)...(794): Xaa = X or * as defined in Table 2
RKNPFILHXLFRXTLRQTKPDNSAGKCVKIXXHTQNQRSGRSQSDFXRRRKNISERSAAYRXRQLYIRRQPYAERPSHVEDKGHKYLVFEANTGTENGYQGEESLFNKAYYGGGTNFFRKESQKLQQSAKKRDAELANGALGIIELNNDYTLKKVMKPLITSNTVTDEIERANVFKMNGKWYLFTDSRGSKMTIDGINSNDIYMLGYVSNSLTGPYKPLNKTGLVLQMGLDPNDVTFTYSHFAVPQAKGNNVVITSYMTNRGFFEDKKATFAPSFLMNIKGNKTSVVKNSILEQGQLTWLQVAKRAGLGGGQSGRTVLRERLPNYKNFKGTIQELGQNQYAVSGEIFVVDRNTVEITELPVRTWTQVYKEQVLEPMLNGTDKTPALISDYKEYHTDTTVKFVVKMTEEKLAQAEAAGLHKVFKLQTTLTCNSMVLFDHMGCLKKYETVQDILKEFFDLRLSYYGLRKEWLVGMLGAESTKLNNQARFILEKIQGKITIENRSKKDLIQMLVQRGYESDPVKAWKEAQEKCDNLKTCHTSHGSVMAETAVINHKKRKNSPRIVQSNDLTEAAYSLSRDQKRMLYLFVDQIRKSDGTLQEHDGICEIHVAKYAEIFGLTSAEASKDIRQALKSFAGKEVVFYRPEEDAGDEKGYESFPWFIKRAHSPSRGLYSVHINPYLIPFFIGLQNRFTQFRLSETKEITNPYAMRLYESLCQYRKPDGSGIVSLKIDWIIERYQLPQSYQRMPDFRRRFLQVCVNEINSRTPMRLSYIEKKKGRQTTHIVFSFRDITSMTTG

SEQ ID NO: 43804 - protein, 65 aa, Homo sapiens
  misc_feature (1)...(65): Xaa = X or * as defined in Table 2
WRKKSLDIPPLIIPNGIVKNILRHFSQLLNVPITRPFSWILRPFXRPXRKISTSFIRPLFTFLPA

SEQ ID NO: 43805 - protein, 629 aa, Homo sapiens
  DOMAIN (235)..(278): 1 kw MIND INHIBITOR DIVISION CONTROL domain identified by eMATRIX, accession number DM01756B, p-value=4.822e-15, raw score of 22.91
MKLMETLNQCINAGHEMTKAIAIAQFNDDSPEARKITRRWRIGEAADLVGVSSQAIRDAEKAGRLPHPDMEIRGRVEQRVGYTIEQINHMRDVFGTRLRRAEDVFPPVIGVAAHKGGVYKTSVSVHLAQDLALKGLRVLLVEGNDPQGTASMYHGWVPDLHIHAEDTLLPFYLGEKDDVTYAIKPTCWPGLDIIPSCLALHRIETELMGKFDEGKLPTDPHLMLRLAIETVAHDYDVIVIDSAPNLGIGTINVVCAADVLIVPTPAELFDYTSALQFFDMLRDLLKNVDLKGFEPDVRILLTKYSNSNGSQSPWMEEQIRDAWGSMVLKKCSAPMVDSLIARVGVMARGNAITLPVCGRDVKFTLEVLRGDSVEKTSRVWSGNERDQELLTEDALDDLIPSFLLTGQQTPAFGRRVSGVIEIADGSRRRKAAALTESDYRVLVGELDDEQMAALSRLGNDYRPTSAYERGQRYASRLQNEFAGNISALADAENISRKIITRCINTAKLPKSVVALFSHPGELSARSGDALQKAFTDKEELLKQQASNLHEQKKAGVIFEAEEVITLLTSVLKTSSASRTSLSSRHQFAPGATVLYKGDKMVLNLDRSRVPTECIEKIEAILKELEKPAP

SEQ ID NO: 43806 - protein, 235 aa, Homo sapiens
ECRKHTKLKLQPTIWHVLKIYNSEKLLVYRKLLQVLTGLYKRSNLGVRLYACCGLLLCPAYPQHFAHGYVDKIPGYPGRAGTLTGLHPMQCDNLKTCHTSHGSVMAETAVINHKKRKNSPRIVQSNDLTEAAYSLSRDQKRMLYLFVDQIRKSDGTLQEHDGICEIHVAKYAEIFGLTSAEAILRYFIKHSADMEAITNGMMNLNRQRHQHLVALRIIFAHGENGGEEVVHIGHV

SEQ ID NO: 43807 - protein, 83 aa, Homo sapiens
  misc_feature (1)...(83): Xaa = X or * as defined in Table 2
EPCFPAHPEFAPLSTGAESHHYCCIWXAKYVHQARTLXDQRSXADHEAYRKTAVRRCSQTTQQAWEQLVHQQHILPSSCRYPG

SEQ ID NO: 43808 - protein, 659 aa, Homo sapiens
  misc_feature (1)...(659): Xaa = X or * as defined in Table 2
MKAIRDAEKAGRPPHPDMEIRGRVEQRVGYTIEQINHMRDVFGTRLRRAEDVFPPVIGVAAHKGNERDQELLTEDALDDLILSFLLTGQQTPAFGRRVSGVIEIADGSRRRXAAALTESDYRVLVGELDDEQMAALSRLGNDYRPTSAYERGQRYASRLQNEFAGNISALADAENISRKIITRCINTAKLPKSVVALFSHPGELSARSGDALQKAFTDKEELLKQQASNLHEQKKAGVIFEAEEVITLLTSVLKTVQSKNLSHFTWICHAETAVINHKKRKNSPRIVQSNDLTEAAYSLSRDQKRMLYLFVDQIRKSDGTLQEHDGICEIHVAKYAEIFGLTSAEASKDIRQALKSFAGKEVVFYRPEEDAGDEKGYESFPWFIKHWVTISPQTSAYERGQRYASRCKNEFAGNISALADAENISRKIITRCINTAKLPKSVVALFSHPGELSARSGDALQKAFTDKEELLKQQASNLHEQKKAGVIFEAEEVITLLTSVLKTSSASRTSLSSRHQFAPGATVLYKGDKMVLNLDRSRVPTECKRKLRPFLRNLKSQGGPLESTGIPNLLLHPRGLRAITIAVFGKQNTYIRLEPFKINVLEQITKHIEKLQCGGVVKQLSRRGNNQHISSTYDINRADTQVRRAVNNYDIIVMSNGVF

SEQ ID NO: 43809 - protein, 46 aa, Homo sapiens
LRIRARYPKLPMGVAVVKLLHLPKVIIVFWLASWMMSRWPVHKRGS

SEQ ID NO: 43810 - protein, 643 aa, Homo sapiens
  DOMAIN (280)..(309): kw REPLICATION REPB REPA INITIATION domain identified by eMATRIX, accession number DM00653A, p-value=7.207e-27, raw score of 20.40
  misc_feature (1)...(643): Xaa = X or * as defined in Table 2
MVDSLIARVGVMARGNAITLPVCGRDVKFTLEVLRGDSVEKTSRVWSXVSGVIEIADGSRRRKAAALTESDYRVLVGELDDEQMAALSRLGNDYRPTSAYERGQRYASRLQNEFAGNISALADAECDNLKTCHTSHGSVMAETAVINHKKRKNSPRIVQSNDLTEAAYSLSRDQKRMLYLFVDQIRKSDGTLQEHDGICEIHVAKYAEIFGLTSAEASKDIRQALKSFAGKEVVFYRPEEDAGDEKGYESFPWFIKLHPEGFTVYISTHISFPSLSGLQNRFTQFRLSETKEITNPYAMRLYESLCQYRKPDGSGIVSLKIDWIIERYQLPQSYQRMPDFRRRFLQGFCRFRNHHQTGFSPAGANQRGPLAATLSGPGGEGQSAVARLTGEKKNHPGAQYANRLSPRVGRFINAAGTTGFPTWKAGSERNAINDDVTYAIKPTCWPGLDIIPSCLALHRIETELMGKFDEGKLPTDPHLMLRLAIETVAHDYDVIVIDSAPNLGIGTINVVCAADVLIVPTPAELFDYTSALQFFDMLRDLLKNVDLKGNSNGSQSPWMEEQIRDAWGSMVLKNVVRETDEVGKGQIRMRTVFEQAIDQRSSTGAWRNALSIWEPECNEISIGVSLDQDGGSNSVLRKLVERE

SEQ ID NO: 43811 - protein, 334 aa, Homo sapiens
  DOMAIN (158)..(205): kw TRANSCRIPTASE REVERSE II ORF2 domain identified by eMATRIX, accession number DM01354V, p-value=1.000e-40, raw score of 12.97
RKVFFIALKRMPAMKKAMNLFLGLSNVRTVHPEGFTVYISTHISFPSLSGYKTRLRSFGLVKQKKSPILLEVLAREIRQEKEIKGIQFGKEEVKLSLFADDMIVYLENPIVSAQNLLKLISNFSKVSGYKINVQKSQAFLYTNNRQTESQIMSELPFTIASKRIKYLGIQLTRDVKDLFKENYKPLLNEIKEDTNKWKNIPCSWVGRINIVKMAILPKLSRMHGRPHQPPNAASTLPFPKRRSHYGQKSERLSRSGDNRKSHPECRHWQSCAKKSRCLAFTRTVRHTPRSAYLLTRTIELLESSALWHVQTQRIYAPLYETLDPGNRTHCEWDT

SEQ ID NO: 43812 - protein, 298 aa, Homo sapiens
  DOMAIN (232)..(261): kw REPLICATION REPB REPA INITIATION domain identified by eMATRIX, accession number DM00653A, p-value=6.211e-22, raw score of 20.40
MFYQKVGDNSIDSWKNAGRVFKDSDKFDANDPILKDQTQEWSGSATFTSDGKIRLFYTDYSGKHYGKQSLTTAQCDNLKTCHTSHGSVMAETAVINHKKRKNSPRIVQSNDLTEAAYSLSRDQKRMLYLFVDQIRKSDGTLQEHDGICEIHVAKYAEIFGLTSAEASKDIRQALKSFAGKEVVFYRPEEDAGDEKSYESFPWFIKRAHSPSRGLYSVHINPYLIPFFIGLQNRVTQFRLSETKEITNPYAMRLYQSLCQYRKPDGSSIVSLEIDWVIKRYQLPQNYQRMPDFPRRFWR

SEQ ID NO: 43813 - protein, 39 aa, Homo sapiens
CRWRFRDFARFRKPPSNRIFACWGKPAWTACCNSLRARR

SEQ ID NO: 43814 - protein, 49 aa, Homo sapiens
SHPFFSTDWSTDTGVRSKSIWCHRNCRWRVAVVKLLHLPKVIIVFSSAS

SEQ ID NO: 43815 - protein, 141 aa, Homo sapiens
SHPFFSTDWSTDTGVRSKSIWCHRNCRWRVAVVKLLHLPKVIIVFWLASWMMSRWLHYPDWVTIIAQQVLMNVVSVMQADCRMNLLEIFLRWLMRIIFHVRLLPAVSTPTNCLNQLLLFFLTPVNYLPGQSGTTVPLVSSV

SEQ ID NO: 43816 - protein, 138 aa, Homo sapiens
SHPFFSTDWSTDTGVRSKSIWCHRNCRWRVAVVKLLHLPKVIIVFWLASWMMSRWLHYPDWVTIIAQQVLMNVGSVMPADCRMNLLEIFLRWLMRKIFTTGLRSFGLVKQKKSPIRMPCVYTNPCVSIVSRMGQASSL

SEQ ID NO: 43817 - protein, 350 aa, Homo sapiens; identical to SEQ ID NO: 34650

SEQ ID NO: 43818 - protein, 622 aa, Homo sapiens
  DOMAIN (144)..(173): kw REPLICATION REPB REPA INITIATION domain identified by eMATRIX, accession number DM00653A, p-value=7.207e-27, raw score of 20.40
  misc_feature (1)...(622): Xaa = X or * as defined in Table 2
MAETAVINHKKRKNSPRIVQSNDLTEAAYSLSRDQKRMLYLFVDQIRKSDGTLQEHDGICEIHVAKYAEIFGLTSAEASKDIRQALKSFAGKEVVFYRPEEDAGDEKGYESFPWFIKRAHSPSRGLYSVHINPYLIPFFIGLQNRFTQFRLSETKEITNPYAMRLYESLCQYRKPDGSGIVSLKIDWIIERYQLPQSYQRVWTPGINCPEPCPGVWTPGINCPGAWGIHGPHGSAENTGPLHPGQTSAQLETSLLPSLRSARELELAQLSPRRKQNRSLQNIGVTPSLRVPWPKASNVQQFIDEGNYTSGDNHTLRDPHYVEDKGHKYLVFEANTGTENGYQGEESLFNKAYYGGGTNFFRKESQKLQQSAKKRDAELANGALGIIELNNDYTLKKVMKPLITSNTVTDEIERANVFKMNGKWYLFTDSRGSKMTIDVPQAKSNNVGITSYMTNRSFFEDKKPHLRQASYGTSKPLKLPXIPGTINVVCAADVLIVPTPAELFDYTSALQFFDMLRDLLKNVDLKGFEPDVRILLTKYSNSNGSQSPWMEEQIRDAWGSMVLKNVVRETDEVGKGQIRMRTVFEQAIDQRSSTGAWRNALSIWEPVCNEIFDRLIKPRWEIR

SEQ ID NO: 43819 - protein, 103 aa, Homo sapiens
EDLSDTGVRSKSIWCHRNCRWRVAVVKLLHLPKVIIVFWLASWMMSRWLHYPDWVTIIAQQVLMNVVSVMQADCRMNLLEIFLRWLMRKIFHSSLEDPRNWHL

SEQ ID NO: 43820 - protein, 59 aa, Homo sapiens; identical to SEQ ID NO: 35368
  DOMAIN (17)..(29): Phage integrase family domain identified by eMATRIX, accession number PF00589C, p-value=9.609e-10, raw score of 14.62

SEQ ID NO: 43821 - protein, 47 aa, Homo sapiens
  misc_feature (1)...(47): Xaa = X or * as defined in Table 2
TSMDKGLQGALKKKIXDLXKKXLKNIPVDKWITPREVFSGIVCKQNI

SEQ ID NO: 43822 - protein, 58 aa, Homo sapiens
KAICHNTFSKPSMDKGLLRRSKKEGFKTYKKNIYKNIPVDKWITPREVFSGIVCKQNI

SEQ ID NO: 43823 - protein, 41 aa, Homo sapiens
  misc_feature (1)...(41): Xaa = X or * as defined in Table 2
HRTKISIVPEGIFKSFSLPLAGIMTEQYFLXTLHRLLRLIM

SEQ ID NO: 43824 - protein, 633 aa, Homo sapiens; identical to SEQ ID NO: 34397
  DOMAIN (230)..(273): 1 kw MIND INHIBITOR DIVISION CONTROL domain identified by eMATRIX, accession number DM01756B, p-value=4.822e-15, raw score of 22.91

SEQ ID NO: 43825 - protein, 178 aa, Homo sapiens
  DOMAIN (71)..(100): kw REPLICATION REPB REPA INITIATION domain identified by eMATRIX, accession number DM00653A, p-value=7.207e-27, raw score of 20.40
LWREASKDIRQALKSFAGKEVVFYRPEEDAGDEKGYESFPWCYQTWHSPSRGLYSVHINPYLIPFFIGLQNRFTQFRLSETKEITNPYAMRLYESLCQYRKPDGSGIVSLKIDWIIERYQLPQSYQRMPDFRRRFLQVCVNEINSRTPMRLSYIEKKKGRQTTHIVFSFRDITSMTTG

SEQ ID NO: 43826 - protein, 474 aa, Homo sapiens; identical to SEQ ID NO: 35385
  DOMAIN (407)..(421): Phage integrase family domain identified by eMATRIX, accession number PF00589B, p-value=1.621e-11, raw score of 16.17

SEQ ID NO: 43827 - protein, 333 aa, Homo sapiens
  DOMAIN (68)..(83): LIM domain proteins domain identified by eMATRIX, accession number BL00478B, p-value=1.000e-16, raw score of 14.79
MAVPVPKAAQDICPTSPTLARALRIGVPFDRYGNGDFTEARRFGTKCAGCAQGISPSDLVRKARSKVFHLNCFTCMVCNKQLSTGEELYVIDENKFVCKDDYLSSSSLKEGSLNSAVHHMLYLFVDQIRKSDGTLQEHDGICEIHVAKYAEIFGLTSAEASKDIRQALKSFAGKEVVFYRPEEDAGDEKGYESFPWFIKRAHSPSRGLYSVHINPYLIPFFIGLQNRFTQFRLSETKEITNPYAMRLYESLCQYRKPDGSGIVSLKIDWIIERYQLPQSYQRMPDFRRRFLQVCVNEINSRTPMRLSYIEKKKGRQTTHIVFSFRDITSMTTG

SEQ ID NO: 43828 - protein, 580 aa, Homo sapiens
  DOMAIN (466)..(480): Phage integrase family domain identified by eMATRIX, accession number PF00589B, p-value=1.621e-11, raw score of 16.17
  misc_feature (1)...(580): Xaa = X or * as defined in Table 2
MVLIVAATVVVVVVVGLCWMAKSECRSAMRLSSLQVRIFTYLIGREAAFADNLKWMACANKESALLDRFIFLILLLCKEPWECHCLPLFKVAMPSKCDIPVICAHINIGFTLRQLRGFGPCNIGSFEAKDSKNPQVRVISQKHKALRCIWFITCSICNPEFTEGALQGNKQRKRQCLQWFRAKALESNEPGFEFIQDKLLTQSLCFFPYTFLWLTGPHPSGSSYTDPCSSKADVTPSSTAVQEHSSALELKTKIVSPITRQQHGFFTQISTLADVQENVMEYLHVLSRPKVIDQEHDVVWTEAYIDSTVCRVKRRQLLLQQVPLTRKQQFLPAPYVDLDSARTRTNKQQQNPIIYTGSKQGSHVILFHYGESWNLLRADQRLIFAKSWPRASRYQQGHQDLFILRSDLPSQVFIRDKLMERRNRRTGRTEKARIWEVTDRTVRTWIGEAVAAAAADGVTFSVPVTPHTFRHSYAMHMLYAGIPLKVLQSLMGHKSISSTEVYTKVFALDVAARHRVQFAMPESDAVAMLKQLXQPQWWWWSWXDCAGWRKVNAAQPCVCLPFRFASSHTSLDERLRLQTI

SEQ ID NO: 43829 - protein, 206 aa, Homo sapiens
HTLPYGHPSRGRCQLPRCLWVPLDGRGWHGLSISLRDSADPAPPRRPRPLPPRPHPPHASRATVPVPPPRSRPGSRRPAGRGPRVPPHPRGLPDSPAGGAPTPRRSREPWAASPRPPGLSPAGAWGSYWDPGLWTWPMWPQCMRPRHSPLRARGAALPGGLPRTHPPLGLAGASPANGRQVWGKFLAMSRIILDYLCGCNAITMVL

SEQ ID NO: 43830 - protein, 426 aa, Homo sapiens; identical to SEQ ID NO: 35376
  DOMAIN (359)..(373): Phage integrase family domain identified by eMATRIX, accession number PF00589B, p-value=1.621e-11, raw score of 16.17

SEQ ID NO: 43831 - protein, 19 aa, Homo sapiens
CHSNPLQTALWKHIPCSSS

SEQ ID NO: 43832 - protein, 374 aa, Homo sapiens
  DOMAIN (267)..(296): kw REPLICATION REPB REPA INITIATION domain identified by eMATRIX, accession number DM00653A, p-value=7.207e-27, raw score of 20.40
MEENERDLEINMINMSKELKVENIKKHIGMLEKDEIEIIVTKSILIEIEIPTQCLRNLNTLHLAASAGNHMSNTACWYGCEDFTSVSTFAHQGVGSWDAYEPAASLLLSCDNLKTCHTSHGSVMAETAVINHKKRKNSPRIVQSNDLTEAAYSLSRDQKRMLYLFVDQIRKSDGTLQEHDGICEIHVANYAEIYGLTSAEASKDIRQALKSFAGKEVVFYRPEEDAGDEKGYESFPWFIKRAHSPSRGLYSVHINPYLIPFFIGLQNRFTQFRLSETKEITNPYAMRLYESLCQYRKPDGSGIVSLKIDWIIERYQLPQSYQRMPDFRRRFLQVCVNEINSRTPMRLSYIEKKKGRQTTHIVFSFRDITSMTTG

SEQ ID NO: 43833 - protein, 376 aa, Homo sapiens
MVDSLMARVGVMARGNPITLPVCGRDVKFTLEVLRGDSVEKTSRTPAFGRRVSGVIEIADGSRRRKAAALTESDYRVLVGELDDEQMAALSRLGNDYRPTSAYERGQRYASRLQNEFAPHISALADAENIITCAFIPKHTPNINRLKDISLTTPVAPMVDSLFARVGVMARGNANTLPVCGRDVKFTLKVLRGDSVEKTSRVWSGNERDQELLTEDALDDLIPSFLLTGQQTPAFGRRVSGVIEIADGSRRRKAAALTESDYRVLVGELDDEQMAALSRLGNDYRPTSAYARGQRYASRLQNEFAPHISALADAENKKRKKITRCINTAKLPKSVVALFSHPGELSAPSGTGKEVILEVQLIHNVFQYTLLACFGT

SEQ ID NO: 43834 - protein, 179 aa, Homo sapiens
  DOMAIN (86)..(100): C2H2-TYPE ZINC FINGER SIGNATURE domain identified by eMATRIX, accession number PR00048A, p-value=8.560e-09, raw score of 10.52
  misc_feature (1)...(179): Xaa = X or * as defined in Table 2
SHPFFSTDWSTDTGVRSKSIWCHRNCRWESPSXSCWHLPKVIIVFWLASWMMSRWLNYPDWVTIIAQQVLMNVVSVMQADCKRICWKYFCAGXCGKIFTYQXXTWNNTETSMSQKPCKMKRIYSREELAVXKMDHHSDLISLWXKLEPLTCRSTSHFRQKLAQGFPVSTGTPGFIYSAK

SEQ ID NO: 43835 - protein, 328 aa, Homo sapiens; identical to SEQ ID NO: 43596
  DOMAIN (221)..(250): kw REPLICATION REPB REPA INITIATION domain identified by eMATRIX, accession number DM00653A, p-value=7.207e-27, raw score of 20.40

SEQ ID NO: 43836 - protein, 197 aa, Homo sapiens
  misc_feature (1)...(197): Xaa = X or * as defined in Table 2
LVGWLDGWLDGWLIVALPFMMIPWHSSIQPFTIHPFNWNFGXMPELCPQIGMDSWLAGWMCWLDGWLDGWXMAKLRKPVLXPDKEGNEIWVDMYTVKPSGWTVRTFDKPRKRFIAFFIAGILFRAIKNHFLPRETLQCLPYILTGFRRGQSEYFSIFSNMDLADTVMFLIVALPFMMIPWHSSIQPFTIHPFNWNFG

SEQ ID NO: 43837 - protein, 38 aa, Homo sapiens
WVQLEVIVLSKISQAQKDRYHMFSLKGLEKPSKSQVLE

SEQ ID NO: 43838 - protein, 111 aa, Homo sapiens
  misc_feature (1)...(111): Xaa = X or * as defined in Table 2
THGIRIGDFFCFTKRKLRKPVLXPDKEGNEIWVDMYTVKPSGWTVRTFDKPRKRFIAFFIAGILFRAIKNHFLPRETLQCLPYILTGFRRGQSEYFSIFSNMDLADTVMFL

SEQ ID NO: 43839 - protein, 89 aa, Homo sapiens
  misc_feature (1)...(89): Xaa = X or * as defined in Table 2
SSSWGRSSPQLVCGIFQTAGPQSLCKWNQXVLAQTNKKTAGTSADLYVPVXQLXRKAVVLPTNAPWRFWRTRQEWFSSRGRSGYQSQET

SEQ ID NO: 43840 - protein, 806 aa, Homo sapiens
  DOMAIN (352)..(381): kw REPLICATION REPB REPA INITIATION domain identified by eMATRIX, accession number DM00653A, p-value=3.750e-23, raw score of 20.40
DSEYVFVVVDFLIGVLIFATIVGNIGSMISNMNAARAEFQARIDAIKQYVRGRNQDLMLSSNICTFRNVSKDMEKRVIKWFDYLWTNKKTVDEKEVLKYLPDKLRAEIAINVHLDTVGKVYSPGDYICKKGDIGREMYIIKEGKLAVVADDGVTQFVVLSDGSYFGEISILNIKGSKAGNRRTANIKSIGYSDLCDNLKTCHTSHGSVMAETAVINHKKRKNSPRIVQSNDLTEAAYSLSRDQKRMLYLFVDQIRKSDGTLQEHDGICEIHVAKYAEIFGLTSAEASKDIRQALKSFAGKEVVFYRPEEDAGDEKGYESFPWFIKRAHSPSRGLYSVHINPYLIPFFIGLQNRFTQFPLSETKEITNSYAMRLYESLCQYLLEVLARAIRKEKEIRVFKIRREVVKLSLFSDDMILYLENPSISAPNLLKQIGNFSKVLGYKINVEKSQAFLYTNNRPTESQIMSELPFTIATKKIKFLGIQRDPLESTAVMHGILPISEPPSHRIFACGANQRGPLAATLSGPGGEGQSAVARLTGEKKNHPGAQYANRLSPRVGRFINAAGRTGFPTGKRAVSATQLIVRFSSHGLRDGSAIQKETGKGVCRFRNHHQTGFSPAGANQRGPLAATLSGPGGEGQSAVARLTGEKKNHPGAQYANRLSPRVGRFINAAGTTGFPTGKRAVSATQLMDFADFGTTIKQDFRLLGQTSVDRLLQLSLGQAVKGNQLLPVSLVKRKTTLAPNTQTASPRALADSLMQLARQVSRLESGQGGEQMQGLPEKSRQDTKQLSPALHGPKNLENDLMLAAGI

SEQ ID NO: 43841 - protein, 615 aa, Homo sapiens
  DOMAIN (439)..(468): kw REPLICATION REPB REPA INITIATION domain identified by eMATRIX, accession number DM00653A, p-value=7.207e-27, raw score of 20.40
MEKLLLENDSLSKDVSRLETVFVPPEKHEKEIIALKSNIVELKKQLSELKKKCGEDQEKIHALTSENTNLKKMMSNQYVPVKTHEEVKMTLNDTLAKTNRELLDVKKKFEDINQEFVKIKDKNEILKRNLENTQNQIKAEYISLAEHEAKMSSLSQSMRKVQDSNAEILANYRKGQEEIVTLHAEIKAQKKELDTIQECIKIMKRAPVIPKHTLNTQPVEDTSLSTPAAPMVDSLIARVGVMARGNAITLPVCGRDVKFTLEVLRGDSVEKTSRVWSGNERDQELLTEDALDDLIPSFLLTGQQTPAFGRRVSGVIEIADGSRRRKAAALTESDYRVLVGELDDEQMAALSRLGNDYRPTSAYERGQRYASRLQNEFAGNISALADAENISRKIITRCINTAKLPKSVVALFSHPGELSARSDKSGISSWFGSITGELNRFTQFRLSETKEITNPYAMRLYESLCQYRKPDGSGIVSLKIDWIIERYQLPQSYQRMPDFRRRFLQAPCMKSNNALIVILGTVTLDAVGIGLVMPVLPGLLRDIVHSDSIASHYGVLLALYALMQFLCAPVLGALSDRFGRRPVLLASLLGATIDYAIMATTPVLWIYPLVNSPSC

SEQ ID NO: 43842 - protein, 100 aa, Homo sapiens
  misc_feature (1)...(100): Xaa = X or * as defined in Table 2
EWRNVCGVTGTEKVTPSAAAAATASPIQVLTVLSVTSQIRAFSVLPVRRLRRSMSLSRINTCVNRFCNPIKKGMRYGLICPLXSLLDGLCARLINQGKDS

SEQ ID NO: 43843 - protein, 119 aa, Homo sapiens
  misc_feature (1)...(119): Xaa = X or * as defined in Table 2
SLLFKCSGVIVLRRPLGYRQVMNVTRRCLLRTHWMISSLLFYXLVNRHRRSVEEYLVSYTLPMGVAVVKLLHLPKNFVSLITPRGRLEKERAFLFQHMRSISTGLKIFVMHTSCPMVVC

SEQ ID NO: 43844 - protein, 415 aa, Homo sapiens
  DOMAIN (343)..(372): kw REPLICATION REPB REPA INITIATION domain identified by eMATRIX, accession number DM00653A, p-value=2.773e-12, raw score of 20.40
  misc_feature (1)...(415): Xaa = X or * as defined in Table 2
QQRRXMCQNLMTHQNQRSGRSQNDFXRRRKNISERSAVYRXRQLYIRRQPYAERPSHVEDKGHKYLVFEANTGTENGYQGEESLFNKAYYGGGTNFFRKESQKLQQSAKKRDAELANGALGIIELNNDYTLKKVMKPLITSNTVFIRDKLMERRNRRTGRTEKARIWEVTDRTVRTWIGEAVAAAAADGVTFSVPVTPHTFRHSYAMHMLYAGIPLKVLQSLMGHKSISSTEVYTKVFALDVAARHRIRKSDGTLQEHDGICEIHVAKYAEIFGLTSAEASKDIRQALKSFAGKEVVFYRPEEDAGDEKGYESFPWFIKRAHSPSRGLYSVHINPYLIPFFIGLQNRFTQFRLSETKEITNPYAMRVTNPCVSIVCVNEINSRTPMRLSYIEKKKGRQTTHIVFSFRDITSMTTG

SEQ ID NO: 43845 - protein, 231 aa, Homo sapiens
  DOMAIN (131)..(145): Phage integrase family domain identified by eMATRIX, accession number PF00589B, p-value=1.621e-11, raw score of 16.17
MRKSTPGGLPPQSGEASPDHSKWLGFGGATGRGAPRPLVYRLPLSPPRFRIATRLLPPSARGCLSASFISVLRNTDVFIRDKLMERRNRRTGRTEKARIWEVTDRTVRTWIGEAVAAAAADGVTFSVPVTPHTFRHSYAMHMLYAGIPLKVLQSLMGHKSISSTEVYTKVFALDVAARHRVQFAMPEVFHAVFQPVGNRFSWSFLSVPVGGSGLEASAAPWLGYMGGYKET

SEQ ID NO: 43846 - protein, 73 aa, Homo sapiens
  misc_feature (1)...(73): Xaa = X or * as defined in Table 2
SGLLPIKVAFTKPQFLFILLRIWXAKYVHQARTLXDQRFXADHEAYRKTAVRRCSQTTQQAWEQSAHQQHIRH

SEQ ID NO: 43847 - protein, 1273 aa, Homo sapiens
  DOMAIN (751)..(765): Phage integrase family domain identified by eMATRIX, accession number PF00589B, p-value=1.621e-11, raw score of 16.17
  misc_feature (1)...(1273): Xaa = X or * as defined in Table 2
MLDGPLFSEGPDSPRELQDEESGSCLWVQKSKLLVIEVKTISCHYSRRAPSRQPMDFQASHWARGFQNRTCGPRPGSPQPPPRRPWASRVLQEATNWRAGPLAEVRAREQEKRKAASQEREAKETERKRRKAGGARRSPPGRPRPEPRNAPRVAQLAGLPAPLRPERLAPVGRAPRPSAQPQSDPGSAWAGPWGGRRPGPPSYEAHLLLRGSAGTAPRRRWDRPPPYVAPPSYEGPHRTLGTKRGPGNSQVPTSSAPAATPARTDGGRTKKRLDPRIYRDVLGAWGLRQGQGLLGGSPGCGAARARPEPGKGVVEKSLGLAAADLNSGSDSHPQAKATGSAGTEIAPAGSATAAPCAPHPAPRSRHHLKGSREGKEGEQIWFPKCWIPSPKKQPPRHSQTLPRPWAPGGTGWRESLGLGEGAGPETLEGWKATRRAHTLPRSSQGLSRGEGVFVIDATCVVIRSQYVPTPRTQQVQLLPSGVTRVVGDSPSQSKPGKEEGEGATVFPSPCQKRLSSSRLLHQPGGGRGGEAEGGRPGDSTLEERTFRILGLPAPEVNLRDAPTQPGSPEHQALGPAASGAQGRAEGSEVAVVQRRAGRGWARTPGPYAGALREAVSRIRRHTAPDSDTDEAEELSVHSGSSDGSDTEAPGASWRNERTLPEVGNSSPEEDGKTAELSDSVGEILDVISQTEEVLFGVFIRDKLMERRNRRTGRTEKARIWEVTDRTVRTWIGEAVAAAAADGVTFSVPVTPHTFRHSYAMHMLYAGIPLKVLQSLMGHKSISSTEVYTKVFALDVAARHRVQFAMPEDFADFGTTIKQDFRLLGQTSVDRLLQLSQGQAVKGNQLLPVSLVKRKTTLAPNTQTASPRALADSLMQLARQVSRLESGHALHISLITPSFPTEGKSQFVLQLRPSLRGALLSLLDHYEWNCFVFLYDTDRXVMARGNAISLPVCGRDVKLLFEVLRGDSVEKTSRVWSGNERDQELLTEDALDDLILSFLLTGQQTPAFGXRVSGVIEIADGSRRRKAAALTESDYRVLVGELDDEQMAALSRLGNDYRPTSAYERGQRYASRLQNEFAGNISALADAENISRKIITRCINTAKLPKSVVALPSHPGELSARSGDALQKAFTDKEELLKQQASNLHEQKKAGTVFRLLTLESTSLIVDSCPKLKQHSTLSRVILLIYKGFCRFRNHHQTGFSPAGANQRGPLAATLSGPGGEGQSAVARLTGEKKNHPGAQYANRLSPRVGRFINAAGTTGFPTGKRAVSATQLM

SEQ ID NO: 43848 - protein, 210 aa, Homo sapiens
  misc_feature (1)...(210): Xaa = X or * as defined in Table 2
VNVTSFGSRPICSTSPVLFSGLXGPVKEFDTXPSMXISFELIPSIVIFEPRESVNKYHLPFILKTFARSISSVTVFEVISGFITFFNVXSLFNSMIPRAPFANSASRFLALCXSFWLSLRKKFVPPPXYALLNKDSSPWSSVFCSRVGFEYKVFMAFVFNVVRVSQRMVVAGCIIAFIDKLLNVLICFSVSVKNRFVIFHSVDFECVIRF

SEQ ID NO: 43849 - protein, 732 aa, Homo sapiens
  DOMAIN (410)..(439): kw REPLICATION REPB REPA INITIATION domain identified by eMATRIX, accession number DM00653A, p-value=7.207e-27, raw score of 20.40
MEWGKFKRLVLPSQGKSKPEQRCQYRHTVGDQATLPLRSRVEKRNGEAEGRIYRKLWDVALLCCVQEVINGERKPLRALTEVKSGFRLREDSDKFDANDPILKDQTQEWSGSATFTSDGKIRLFYTDYSGKHYGKQSLTTAQNVQQFIDEGNYTSGDNHTLRDPHYVEDKGHKYLVFEANTGTENGYQGEESLFNKAYYGGGTNFFRKESQKLQQSAKKRDAELANGALGIIELNNDYTLKKVMKPLITSNTCDNLKTCHTSHGSVMAETAVINHKKRKNSPRIVQSNDLTEAAYSLSRDQKRMLYLFVDQIRKSDGTLQEHDGICEIHVAKYAEIFGLTSAEASKDIRQALKSFAGKEVVFYRPEEDAGDEKGYESFPWFIKRAHSPSRGLYSVHINPYLIPFFIGLQNRFTQFRLSETKEITNPYAMRLYESLCQYRKPDGSGIVSLKIDWIIERYQLPQSYQRMPDFRRRFLQHFLAHAGCPKGTQNFTFRMKFIIFSIKKVLPPVDTILAHDPVIHTCHLRESFGSVSPSSPKSNRLPCPEVILFHYGESWNLLRADQRLIFAKSWPRASRYQQGHQDLFILRSDLPSQVFIRDKLMERRNRRTGRTEKARIWEVTDRTVRTWIGEAVAAAAADGVTFSVPVTPHTFRHSYAMHMLYAGIPLKVLQSLMGHKSISSTEVYTKVFALDVAARHRVQFAMPESDAVAMLKHYPEINALALYLKCGTEWIC

SEQ ID NO: 43850 - protein, 103 aa, Homo sapiens
  misc_feature (1)...(103): Xaa = X or * as defined in Table 2
SGLLPIKVAFTKPQFLFILLRIWXAKYVHQARTLXDQRSXADHEAYRKTAVRRCSQTTQQAWEQSAHQQHIRHXSCRYPSXARCQXLTGQIVHRGEKKEQQLI

SEQ ID NO: 43851 - protein, 91 aa, Homo sapiens
  misc_feature (1)...(91): Xaa = X or * as defined in Table 2
IRCFTYSPAPGYFPRFRAVIIKLCNGDSLRHFMTSVYALQEAAAEVRHTLVTLRQLVTLYDPVDFQRDDAXAIRAYDTDTGIRINAWHTDW

SEQ ID NO: 43852 - protein, 497 aa, Homo sapiens
  DOMAIN (244)..(258): Phage integrase family domain identified by eMATRIX, accession number PF00589B, p-value=1.621e-11, raw score of 16.17
HKTIFDGDGKTYQNVQQFIDEGNYTSGDNHTLRDPHYVEDKGHKYLVFEANTGTENGYQGEESLFNKAYYGGGTNFFRKESQKLQQSAKKRDAELANGALGIIELNNDYTLKKVMKPLITSNTVTDEIERANVFKMNGKWYLFTDSRGSKMTIDGINSNDIYMLGWPRASRYQQGHQDLFILRSDLPSQVFIRDKLMERRNRRTGRTEKARIWEVTDRTVRTWIGEAVAAAAADGVTFSVPVTPHTFRHSYAMHMLYADFFHAASRLFSLVFKLLISQALEYAGFSYLKAFAIAGPSAYKSLPESLDAQGRLCSQAPHGQYLNCRRLPSPNRCNAAGLQIRGLTDSNKQKITKNILLNDIIQDNFPNLARQANIQIQEIQRMPQRYSSRRATPRHIIVRFTKVEMKEKILRADREKGQVTHKGKPIRLPADLSAETLQARREWGPIFNILKEKNFQPRISYPAKLSFISEGEIKYFTDKQMLRDFVTTRPALRELLK

SEQ ID NO: 43853 - protein, 467 aa, Homo sapiens
MQGMQALARTVDGKEESLNLDQAFQWAGKSSSFGTCPNKFRSSINPAGDRILSGACYPKLRQYSTGGETSYSTPAAPMVDSLIARVGVMAPGNAITLPVCGRDVKFTLEVLRGDSVKKTSRVWSGNERDQELLTEDALDDLIPSFLLTGQQTPAFGRRVSGVIEIADGSRRRKAAALTESDYRVLVGELDDEQMAALSRLGNDYRPTSAYERGQRYASRLQNEFAGNISALADAENISRKIITRCINTAKLPKSVVALFSHPGELSARSGDALQKAFTDKEELLKQQGGSSRVGDNSIDSWKTRGRVFKDSDKFDANDPILKDQTQEWSGSATFTMDGQIPFILPGIFPVTIPANQSLPPAQVIVSNSVDHLKITGVEDHKPIFAGAGKPYQNLRQFIDEGNYTSGDNHTLRDPHYVEDKAHKYLVFEANTGTENGYQGEESLFNKAYYGGGTNFFRGSSRVDLQAC

SEQ ID NO: 43854 - protein, 47 aa, Homo sapiens
NKINMFIAALFTIAKTWNQPKCPTMIDWIKKRGSSRVASSSSPTRTR

SEQ ID NO: 43855 - protein, 163 aa, Homo sapiens
SHPFFSTDWSSDTGVRSKSIWCHRNCRWRVAVVKLLHLPKVIIVFWLASWMMSRWLHYPDWVTIIAQQVLMNVVSVMQADCRMNLLEIFLRWLMRKIFHVRLLPAVSTPPNCLNQLLLFFLTPVNYLPGQGFAGFRNPPSNRIFACWGKPAWTACCNSLRARR

SEQ ID NO: 43856 - protein, 130 aa, Homo sapiens
  DOMAIN (72)..(101): kw REPLICATION REPB REPA INITIATION domain identified by eMATRIX, accession number DM00653A, p-value=7.207e-27, raw score of 20.40
MSFAVPNKDIRQALKSFAGKEVVFYRPEEDAGDEKGYESFPWFIKRAHSPSRGLYRVHINPYLIPFFIGLQNRFTQFRLSETKEITNPYAMRLYESLCQYRKPDGSGIVSLKIDWIIERYQLPSKIPAYA

SEQ ID NO: 43857 - protein, 117 aa, Homo sapiens
  misc_feature (1)...(117): Xaa = X or * as defined in Table 2
HRDSYKRMAYGLVISVVSLSRKLRKPVLXPDKEGNEIWVDMYTVKPSGWTVRTFDKPRKRFIAFFIAGILFRAIKNHFLPRETLQCLPYILTGFRRGQSEYFSIFSNMDLADTVMFL

SEQ ID NO: 43858 - protein, 716 aa, Homo sapiens
  DOMAIN (235)..(278): 1 kw MIND INHIBITOR DIVISION CONTROL domain identified by eMATRIX, accession number DM01756B, p-value=4.822e-15, raw score of 22.91
MKLMETLNQCINAGHEMTKAIAIAQFNDDSPEARKITRRWRIGEAADLVGVSSQAIRDAEKAGRLPHPDMEIRGRVEQRVGYTIEQINHMRDVFGTRLRRAEDVFPPVIGVAAHKGGVYKTSVSVHLAQDLALKGLRVLLVEGNDPQGTASMYHGWVPDLHIHAEDTLLPFYLGEKDDVTYAIKPTCWPGLDIIPSCLALHRIETELMGKFDEGKLPTDPHLMLRLAIETVAHDYDVIVIDSAPNLGIGTINVVCAADVLIVPTPAELFDYTSALQFFDMLRDLLKNVDLKGFEPDRSLIDVVGVINSNLSPEIKEWRVRRIALTPLLILCCYMRLFGQAEAPHPQHRIWLQALDFLGHQDKILSVEKKMIWGSGIYPEQGCKLEKAQERRVGAGFTPVPAMPLSGALPVRNSSVGQDAQELILFHYGESWNLLRADQRLIFAKSWPRASRYQQGHQDLFILRSDLPSQVFIRDKLMERRNRRTGRTEKARIWEVTDRTVRTWIGEAVAAAAADGVTFSVPVTPHTFRHSYAMHMLYAGIPLKVLQSLMGHKSISSTEVYTKVFALDVAAPARIPKQQQNEKYQVPQFDQSTIKNIESAKGLDVWDSWPLQNADGTVAEYNGYHVVFALAGSPKDADDTSIYMFYQKVGDNSIDSWKNAGRVFKDSDKFDANDPILKDQTQEWSGSATFTSDGKIRLFYTDYSGKHYGKQSLTTAQ

SEQ ID NO: 43859 - protein, 668 aa, Homo sapiens
  DOMAIN (397)..(440): 1 kw MIND INHIBITOR DIVISION CONTROL domain identified by eMATRIX, accession number DM01756B, p-value=9.289e-14, raw score of 22.91
  misc_feature (1)...(668): Xaa = X or * as defined in Table 2
RSDPDENCCXTGHXSTLFNWCWRNALSIWEPVCNEIFYRLIKPRWEIRWGKRAPVIPKHTLNTQPVEDTSLSTPAAPMVDSLIARVGVMARGNAITLPVCGRDVKFTLEVLRGDSVEKTSRVWSGNERDQELLTEDALDDLIPSFLLTGQQTPAFGRRVSGVIEIADGSRRRKAAALTESDYRVLVGELDDEQMAALSRLGNDYRPTSAYERGQRYASRLQNEFAGNISALADAENISRKIITRCINTAKLPKSVVALFSHPRQAPCMKSNNALIVILGTVTLDAVGIGLVMPDLALKGLRVLLVEGNDPQGTASMYHGWVPDLHIHAEDTLLPFYLGEKDDVTYAIKPTCWPGLDIIPSCLALHRIETELMGKFDEGKLPTDPHLMLRLAIETVAHDYDVIVIDSAPNLGIGTINVVCAAHALIVPTPAELFDYTSALQFFDMLRDLLKNVDLKGFEPDVRILLTKYSNSNGSQSPWIEEQISDAWGSMVLKNVHAIVTGDAVGMDDIPQEARQYRHNQAYAYSIQGDGAEDDDERIVRFHTRVTVDSDTLASDAARLTCRHGLGNQRNGGVLIEDKFECFFSLTAVFATRAYYAVYHLTGARHSDIVVAHGYAGCNVRFVALLGTNTTLETYLSNQGSNGFSCLHFGEDVGQERIPICEIHVAKIC

SEQ ID NO: 43860 - protein, 237 aa, Homo sapiens
  misc_feature (1)...(237): Xaa = X or * as defined in Table 2
CSHLLIIQLANQNTIITFGKCSSFTTATPIGNFYDTRYSSTERRCLLTSQXKRRDEIIQCVLSKQLRARSLPDPTRKVFSTLSPRSTFRVNFTSRPHTGKVWAFREPFLLPPHLRKPDTDTGYLYKRMAYGSVISICFTKPKLRKPVLXPDKEGNEIWVDMYTVKPSGWTVRTFDKPRKRFIAFFIAGILFRAIKNHFLPRETLQCLPYILTGFRRGQSEYFSIFSNMDLADTVMFL

SEQ ID NO: 43861 - protein, 68 aa, Homo sapiens
SAPLQRNTARRFLLFLKACSNRFCYRWRHMTAIPSYNRSKLREIKGGLYHMGIFRRFLASKETPTFCY

SEQ ID NO: 43862 - protein, 2424 aa, Homo sapiens
  DOMAIN (1590)..(1632): Chloramphenicol acetyltransferase proteins domain identified by eMATRIX, accession number BL00100C, p-value=1.000e-39, raw score of 23.60
MQEQQQASSLIRSGNGRLPGSGAQRTPCHIRRDGSQRRVCDDCKQQWWKAKYNIPSGLHACTATLEETHILDSGAHVQVFYKGQLHVMRVPCTDYFDTQKNPNLSHLHGSVMAETAVINHKKRKNSPRIVQSNDLTEAAYSLSRDQKRMLYLFVDQIRKSDGTLQEHDGICEIHVAKYAEIFGLTSAEASKDIRQALKSFAGKEVVFYRPEEDAGDEKGYESFPWFIKRAHSPSRGLYSVHINPYLIPFFIGLQNRFTQFRLSETKEITNPYAMRLYESLCQYRKPDGSSIVSLKIDWDIEPYPAGLKEQIKSDVFLLSSCVEVLPNAEIGFLKCLAIIGLWAVSLFSYNNCFICTPAFGRRVSGVIEIADGSRRRKAAALTESDYRVLVGELDDEQMAALSRLGNDYRPTSAYERGQRYASRLQNEFAGNISALADAENISRKIITRCINTAKLPKSVVALFSHPGELSARSGDALQKAFTDKEELLKQQASNLHEQKKAGAINTQLVETLLSDSRRIPDFMSKTPKAMVTKAKIDKWDLIKLKSFCTAKETTIRVNRQPTEWEKIFATYSSDKGLISRIYKELKQSYRKKTTLSTSGGHEKWRRNLKLNVALLIWFCCDPTQISFLIVAAKIPMSCEGSGGRRNPMITRQTGSGVDLQQTPADLQKRDFTGRRKTNKQKGIAPTSTKITSTWKPHPKDCNSSPAREQNWMENEFDKLTEVGFRRWTITNSSKLKERVLTQCKEATNLAKRLEKLLTRITSLEKNKNDLMELKNTAQELREAYTSISGRINQAEQRTSEIEDQLNEIKRRGVSVCPQPSEDTPRSTARVPKGMVPFRPRVPLVTPPREKKEAPWLACLRTRALRILIDPPSQVWDIVSCDAENETKLENTLQDIIQENFPNLARQANVQIQEIQRTPQRYSSRRATPRHIIVRFTKVEMKEKMLRAAREKGRVTLKGKPIRLTADLSAETLQARREWGPIFNTLKEKNFQPRISYPAKISFISEGEIKYFTDKQMLRDFVTSRPALEDLLKEALNMERNNRLVKSLAWASQNGFRSPALLPLSLMLCAPLQEADGTNLGWLAHCGLLCTGDHPSGLGKPGRHGADRHHPEGLDRELTGDNRGQLVGGATQAFAKENNQKAYKETYGVSHITRHDMLQIPKQQQNEKYQVPQFDQSTIKNIESAKGLDVWDSWPLQNADGTVAEYNGYHVVFALAGSPKDADDTSIYMFYQKVGDNSIDSWKNAGRVFKDSDKFDANDPILKDQTQEWSGSATFTSDGKIRLFYTDYSGKHYGKQSLTTAQVNVSKSDDTLKINGVEDHKTIFDGDGKTYQNVQQFIDEGNYTSGDNHTLRDPHYVEDKGHKYLVFEANTGTENGYQGEESLFNKAYYGGGTNFFRKESQKLQQSAKKRDAELANGALGIIELNNDYTLKKVMKPLITSNTVTDEIERANVFKMNGKWYLFTDSRGSKMTIDGCQPTCSEALQNFQRYTGIQHVHRIGMAERMWCDRNRERHTVSSSGGTRLPNPGPARSEHFEAFQSVAQCTYNQTVQLDITAFLKTVKKNKHKFYPAFIHILARLMNAHPEFRMAMKDGELVIWDSVHPCYTVFHEQTETFSSLWSEYHDDFRQFLHIYSQDVACYGENLAYFPKGFIENMFFVSANPWSSLELAVIMGPILANKCDNLKTCPPSTWICHGGNQRVINSQETVKIGPLIVQSNAVTEAAYSLSQGSKTYAVFCSLTSSKNLMAPYKNHAGICEIPCCLNMLKYFGLPFAEATRDGLKASSLLKIDWIIERYQPASKLPAVCLDFRRPLPGRAVFIGDQQAELPMPPFITLKKKKGRQTTHIDLALKGLRVLLVEGNDPQGTASMYHGWVPDLHIHAEDTLLPFYLGEKDDVTYAIKPTCWPGLDIIPSCLALHRIETELMGKFDEGKLPTDPHLMLRLAIETVAHDYDVIVIDSAPNLGIGTINVVCAADVLIVPTPAELFDYTSALQFFDMLRDLLKNVDLKGFEPDVRILLTKYSNSNGSQSPWMEEQIRDAWGSMVLKNVVRETDEVGKAAPMVDSLIARVGVMARGNAITLPVCGRDVKFTLEVLRGDSVEKTSRVWSGNERDQELLTEDALDDLIPSFLLTGQQTPAFGRRVSGVIEIADGSRRRKAAALTESDYRVLVGELDDEQMAALSRLGNDYRPTSAYERGQRYASRLQNEFAGNISALADAENISRKIITRCINTAKLPKSVVGLFSPPRRGSSTVDLDSCPHVVGVSFAGKEGVFYRPEEEAGDEKGYDPFPWFIKRVHSPSRGLYSVHINPYLIPFFIGLQNRFTQFRLSETKEITNPYAMRLYESLCQYRKPDGSGIVSLKIDWIIERYQLPQSYQRMPDFRRRFLQVCVNEINTRTPMRLSYIEKKKGRQTTHIVFSFRDITSMTTG

SEQ ID NO: 43863 - protein, 293 aa, Homo sapiens
MGKDFMTKTPKAMATKAKIDKWDLIKLKSFCTAKETTIRVNRQLTEWEKIFAVYSSDKGLISRIYKEHKQIYKKKTNNPISNWAKDMNRHFSKEDIYAGNRHMKKCSSPLAIREMQIKTTSQWMFGVLGVSVEHLCLPSSGEAFAMEKKQSCKFSRLLLFILRGMFYPSFYKNTLMMFTIGSQYHSYHPDHQDLGRLPVGFTTYVVEVGRLPQQRQFEKACFASNPFPKEGTGFIRNFVTLRLEGKTSPQVILFHYGESWNLLRADQRLIFAKSWPRGFPVSTGTPGFIYSAK

SEQ ID NO: 43864 - protein, 332 aa, Homo sapiens
  DOMAIN (28)..(42): Phage integrase family domain identified by eMATRIX, accession number PF00589B, p-value=1.621e-11, raw score of 16.17
DDRSGPGLGSVAAAAAADGVTFSVPVTPHTFRHSYAMHMLYAGIPLKVLQSLMGHKSISSTYVYTKVFALDVAARHRVQGPYNRETGGSERRQKQELELRTLKIEGGAINQRKYVAFRREKNQHGEQQNGYQGEESLFNKAYYGGGTNFFRKESQKLQQSAKKRDAELANGALGIIELNNDYTLKKVMKPLITSNTVTDEIERANVFKMNGKWYLFTDSRGSKMTIDGINSNDIYMLGYVSNSLTGPYKPLNKTGLVLQMGLDPNDVTFTYSHFAVPQAKGNNVVITSYMTNRGFFEDKKATFAPSFLMNIKGNKTSVVKNSFLEQGQLTVN

SEQ ID NO: 43865 - protein, 41 aa, Homo sapiens
  misc_feature (1)...(41): Xaa = X or * as defined in Table 2
NRCEPPVXGTRFSQQLLLALKATLLIEELYALTVHSWRPKW

SEQ ID NO: 43866 - protein, 84 aa, Homo sapiens
YERLLAAVRVTLSGTEGALDSLRVREVTRRRGVGQYLLEEVLRNNPGVSCWWMADAGVEDRGVMTAFMQALGFTAQQGGFINVS

SEQ ID NO: 43867 - protein, 786 aa, Homo sapiens
  DOMAIN (34)..(51): Regulator of G protein signalling domain proteins domain identified by eMATRIX, accession number PF00615B, p-value=9.625e- 16, raw score of 16.25
MAPAIHQMTLASARSWWIVVDVRCPDGVAAFRAFLKTEFSEENLEFWLACEEFKKTRSTAKLVSKAHRIFEEFVDVQAPREITSTRVSGTLSGPALPFHMAPNTVPGTTRCQPYISLQAAPVCSKSLPQVCRAGAAASTRRDLNADGQLGFSVRLGNSSPNLTTQNHEIVGIAEPCAREGKLRRSGAQEVPARGKDWRADEAGGGLHSAWRGSDASDPRGAGALRRSHFSPCCSGDTRGRADSSVQNVSGFPGQRFRARLAGGGAELQPPGSLAWRHVGPSRAAADIKRGGGCRAERLHGQERRPGRFKVCKGSKLLRSVVICAKKFSKLPLPPDGRQSRRGAKTTLLNNSDNLLLLNSKAFGKFHTENTDQFHAENTGKGSDDDADISWTSLTDSCLRGAGGSPEFRERQSSEGMAEGKRVVVARTGARGSIMEKWGECDASVCKGPFGESGQNLLDSLGQSPEQLWSGERQPEAEPGVSLGIPPWTGTSFLLKEKPGRTMLMVTFSGRNAEVSDCGQQPLSQKDEPEVLPDDTRALTDPWTTFLVHLSPLSPLPCYSCEMLLVTSNCLNAQAVAKAIYCAWKYYISHDQKIEKQKATEIAHSHTASPATTDLHLSPRETELKQNPKRNRIDSAVGAVDNQHLQLEGEIPKMLSNLDGTMVFSEALETLHKAVAARPPPGIALPEAARQMPAVEPQVDISGMRTLTNTDNIQGQKKEKGQKKEDTHQHLFSGHCKSLLSLQSILHGTAIVIFQTYKDDQVIALQTLQWADTSNTISLLIEAYKAQ

SEQ ID NO: 43868 - protein, 58 aa, Homo sapiens
GCCGLLGVHFRPYSSGSLPCLEMSLEETGEQQRWMPAPSSGISDLEGHQCDASRNAPI

SEQ ID NO: 43869 - protein, 378 aa, Homo sapiens
MEIHEQRTEGGVGATLQSGNHLEQEPCRGLLWILELYLQALGTRSLQRVLGFQSPPRGLWRSFQPSIPFGFTILIQAVFLLYQAWWLLLGAPQALSTGDCSSLFMGQSRLQDQKLHEASTPTSNTSVRNAQQRSQCWDYELKKSIDVSDDPEIPLFLSGPESDVKQPVSKGPNDLAPTRRPSSKSQRQNQGSSPLPEVKQATRQRWKQGEYSTLFSSRRKRGNTENIGVFIIFVPLQGIGGSQAARVLPVNRTRGENDSILDGSIEILPSQVHTVTFSLPHAVFPLLRGASRVLTSVNGPALMAEYGDPGKRCWGHVFSPVLFSEHRSGELHVVKQLGACDILLAGRTEHVWLLMLATLSYSTIESLGVNPSYTLRQG

SEQ ID NO: 43870 - protein, 276 aa, Homo sapiens
GSCSLLGVHFRPYSSDLFQCLEMSFKEAGEQQRWVPTPSSGTSDLERHQPDAKLPGGEAKSAGLQRQWPPLPQGAQAQEDPKSVPVLLAGVIGDPAGKPCPLRKDGSGLNLKRHSGCRLPQPELKRLRQQAATADAGHPSPQEFRRLKQIPAERLVLPVSRTRGENDSILDGSIEILPSQVHTVTFSLPHAVFPLLRGASRVLTSVNGPALMAVSSRPCKGATGKHTRVDRIQDFTSIHGEMYISLNNCPWNSEEEAGRWEGSLKPMESDPVLSRE

SEQ ID NO: 43871 - protein, 126 aa, Homo sapiens
  misc_feature (1)...(126): Xaa = X or * as defined in Table 2
SPPEVVRLGYHPPRHGHQHLFASCRKGDVGRVRPXTRPDPGSDLLPAQVPAGAARRGGTMPACVGTRSWYSTFWPMEPAARPTPSMVSAASMGHXVTPSAGLYAITSRSRLPAGGGITMTTSCSGF

SEQ ID NO: 43872 - protein, 364 aa, Homo sapiens
MELQEFQEFSPQDLEKVMQAQWLLFYLDVTVALALSCIAGHCERAEHLGEGYLQQAVEATSRECVTVHVQEGEGCWGGAGEVFRQHRGPQLLALVEEVLPRHGSGHHGAWHISLSKPSEKEQHLLMTLVGEQGVVPTQDVLSMLGDIRRSLEEIGIQNYSTTSSCQARASQVRSDYGTLFVVLVVIGAICIIIIALGLLYNCWQRRLPKLKHVSHGEELRFVENGCHDNPTLDVASDSQSEMQEKHPSLNGGGALNGPGSWGALMGGKRDPEDSDVFEEDTHLSFGSGTILRAVDTSDLFAFCWVGDVGRVRCGPRNTRRGVRESGPPPKTPPGPCDGQNGRPPKSAGAYAWPQPLPAAPGVGQ

SEQ ID NO: 43873 - protein, 29 aa, Homo sapiens
MRDCSKFLEILLGLKQIRTSCTKISAQKL

SEQ ID NO: 43874 - protein, 164 aa, Homo sapiens
  misc_feature (1)...(164): Xaa = X or * as defined in Table 2
QLGILRVNLLGIDLRVTGHQAAPPLHLLDLLQMHSSPPCRPQXATSSPPPSLRCRAPHRXSLAAPXAPPPRPSLSAGSPHRKGPPGPAPTGSWSSGNQAGLPCCLGWASVFLCPSHLPPPHLPQSSASLAFHRVKHLIHLHNSVIDKMKYQLKFLCLLGEYLSV

SEQ ID NO: 43875 - protein, 320 aa, Homo sapiens
  DOMAIN (2)..(51): kw TRANSCRIPTASE REVERSE II ORF2 domain identified by eMATRIX, accession number DM01354Z, p-value=6.753e-12, raw score of 9.06
MQKEVLQSEKKNTVSNKKTPEGIKLIVNNEWIKKIWYIYAMEYHSAIKKKVILSFATTWIELEDAILREIKQALKDKHCIFPLSVGAKNQIIRGQKDSYQRLGRGRTSQPGSLATSYCAFGPAAGAQLPGMKLPEGGSRCHLCCFIAFTGDTSRAITLIAWPKIPFLGIREAKNPRSENMRLATILEAARHLFGSGPPPSWELWEQEPPVTEGIFTCFHQEKTVLQEIPLDNAEIEWYTDWSYLKGEDGNFRAVYAVVSLLEVIEASSLPQARSAQAAELIAMTQACQLAKYKVANLYTNSCHAFRVPMTLGFYGRREDT

SEQ ID NO: 43876 - protein, 52 aa, Homo sapiens
  misc_feature (1)...(52): Xaa = X or * as defined in Table 2
RDFHPKXHTIGIQYIWQQLEINQCDTSLSMVLPRXRDFHPKSHLLPGAAQIQ

SEQ ID NO: 43877 - protein, 57 aa, Homo sapiens
VCLFKNSMYLLLLPGGPCSQSSQDGGRPLPKWWQASCSLTWGSWPHRFQGMESWAMR

SEQ ID NO: 43878 - protein, 42 aa, Homo sapiens
MRDCSKFLEILLGLKQIRTSCTKISAQKLQVRSFSIRETQLL

SEQ ID NO: 43879 - protein, 41 aa, Homo sapiens
  misc_feature (1)...(41): Xaa = X or * as defined in Table 2
CSLRSLAQMLPFYPRRSLCLSCSLXXPHCCLWLAALRSESK

SEQ ID NO: 43880 - protein, 76 aa, Homo sapiens
  DOMAIN (49)..(60): Trp-Asp (WD) repeat proteins proteins domain identified by eMATRIX, accession number BL00678, p-value=3.842e-09, raw score of 9.67
MGFEFQVRVCDSCYDSIKDEDRTSLATFHEGKHNISHMSMDIARGLMVTCGTDRIVKIWVITPVVGCSLQSGFSPH

SEQ ID NO: 43881 - protein, 113 aa, Homo sapiens
SRSTASGSTGSKLKSDELQTIKKELTQIKTKIDSLLGRLEKIEKQQKAEAEAQKKQLEESLVLIQEECVSEIADHSTEEPAEGGPDADGEEMTDGIEEDFDEDGGHELFLQIK

SEQ ID NO: 43882 - protein, 807 aa, Homo sapiens
MHQTLCLNPESLKMSACSDFVEHIWKPGSCKNCFCLRSDHQLVAGPPQPRAGSLPPPPRLPPRPENCRLEDEGVNSSPYSKPTIAVKPTMMSSEASDVWTEANLSAEVSQVIWRRAPGKLPLPKQEDAPVVYLGSFRGVQKPAGPSTSPDGNSRCPPAYTMVGLHNLEPRGERNIAFHPVSFPEEKAVHKEKPSFPYQDRPSTQESFRQKLAAFAGTTSGCHQGPGPLRESLPSEDDSDQRCSPSGDSEGGEYCSILDCCPGSPVAKAASQTAGSRGRHGGRDCSPTCWEQGKCSGPAEQEKRGPSFPKECCSQGPTAHPSCLGPKKLSLTSEAAISSDGLSCGSGSGSGASSPFVPHLESDYCSLMKEPAPEKQQDPGCPGVTPSRCLGLTGEPQPPAHPREATQPEPIYAESTKRKKAAPVPSKSQAKIEHAAAAQGQGQVCTGNAWAQKAASGWGRDSPDPTPQVSATITVMAAHPEEDHRTIYLSSPDSAVGVQWPRGPVSQNSEVGEEETSAGQGLSSRESHAHSASESKPKERPAIPPKLSKSSPVGSPVSRSAGGPPVSPLADLSDGSSGGSSIGPQPPSQGPADPAPSCRTNGVAISDPSRCPQPAASSASEQRRPRFQAGTWSCQCRIEEEEEVEQELLSHSWGRETKNGPTDHSNSTTWHRLHPTDGSSGQNSKVGTGMSKSASFAFEFPKDRSGIETFSPPPPPPKSRCSSASLAATNLYNSEIPENPRKGRDGKDQREKKVFFWLLSFKDCHILTAIGGPAILAGKRRGRKKWGSTQKRGRESKILAEGVGDTQQ

SEQ ID NO: 43883 - protein, 207 aa, Homo sapiens
MTQKLSLTSEAAISSDGLSCGSGSGSGSGASSPFVPHLESDYCSLMKEPAPEKQQDPGCPGVTPSRCLGLTGEPQPPAHPREATQPEPIYAESTKRKKAAPVTNSPTEVTKGLPALSQFISIQKDTSFLLERNAYSLGATKKESGIQTKSFLRQDNFTFWQERGAAHSGNPGHESTMNKERQEYLSLMHWVLTAVSCLHWLELDLTV

SEQ ID NO: 43884 - protein, 302 aa, Homo sapiens
MVRKAVETTRNIDTAFHPGTANERTGQWWSKKEVLQAGFLNPSKTITSEKYAQQIEMHRKLQCPRLALINKKGPILIHNNAQMHVTQPTLQKLTEARHGMKLQTLMVSVTAHKGSSADPKSEQQQDLLVIFHLQSVESKDTKPWIQTDDCICGSLDTPGLKVKNICSALPKKEFSSLNGETGYLLSFLVFFSSTAQQATAIKDSYRFILGKRRGLGVLAAAISELRNPLSGRALVMEKSRRLAGPEGPETQMGEEGLLASIARPSYHQTCPRTQSTVSSLDTSSPESLLMPKHGSATCRLCM

SEQ ID NO: 43885 - protein, 189 aa, Homo sapiens
MCSCALRTEDLESDTFLCFEIELLGHATVQSMLICKLTGILPISEPPIKQDFRLLGQTSVDRLLQLSQGQAVKGNQLLPVSLVKRKTTLAPNTQTASPRALADSLMQLARQVSRLESGQHKGSPRPHQTQEPSWLHPVDPAPGLQVELPASPARAPALLSPWVVNGTGCPGAGGSAHRGGSGRRGAYGG

SEQ ID NO: 43886 - protein, 30 aa, Homo sapiens
LSNLFLHATNDGALTSTTIPHPPMRQPTSL

SEQ ID NO: 43887 - protein, 95 aa, Homo sapiens
  misc_feature (1)...(95): Xaa = X or * as defined in Table 2
GGASGVCSFXCSELSSFWWVRGLAGSGVKLQTFATQEPSWLHPVDPVPGLQVELPASPAPCARTPQPLGGRWDSAPWSRGRRSSGAHGIDVALLP

SEQ ID NO: 43888 - protein, 39 aa, Homo sapiens
  misc_feature (1)...(39): Xaa = X or * as defined in Table 2
IWILWFFVSLTXRSRGPSQXVLQLIKAPHVDLLVVTFGC

SEQ ID NO: 43889 - protein, 48 aa, Homo sapiens
  misc_feature (1)...(48): Xaa = X or * as defined in Table 2
IHQSALCIXLKFYTSLTHPVISLVVETLVWWXYLKMXKKLWSWIRGRG

SEQ ID NO: 43890 - protein, 167 aa, Homo sapiens
WAHPWEMFSLQLWKPREVWRERREREPGLRAALASQLEFQMGVVLAARTRSSRPCRCRAMRGLAPGPAAAEGVLGPPAVPAHRRCARFLAGALAAFPWGRARDLQPAVPEPPTPSVGSCAARASPMSAAPCSMAPSPIDHPRAEEYGHKAPGLAGSSTCSPGAGSTG

SEQ ID NO: 43891 - protein, 245 aa, Homo sapiens
CLLAILIPRLDLVISLVGSVSSSALALIIPPLLEVTTFYSEGMSPLTIFKDALISILGFVGFVVGTYQALDELLKQKTLTPFPTPPLLFDSGAQLASPSGSHTGVQVELPASPAPWARTPHPWVVDGTGRRGAGGSAIGEALAAQEPMKRGLHSELNSLDNGPQSPSESAVALLQRMSILLEKLDFTAEDFCELWRATMYGLETCPNTWLRAQQCGEGDSISQQPTLDGKLEDLLAVLWYSHLHI

SEQ ID NO: 43892 - protein, 137 aa, Homo sapiens
  DOMAIN (23)..(55): Protein phosphatase 2A regulatory subunit PR55 proteins domain identified by eMATRIX, accession number BL01024G, p-value= 1.000e-40, raw score of 11.09
YMLTRDYLTVKVWDLNMEARPIETYQVHDYLRSKLCSLYENDCIFDKFECAWNGSDSVIMTGAYNNFFRMFDRNTKRDVTLEASRESSKPRAVLKPRRVCVGGKRRRDDISVDSLDFTKKILHTAWHPAENIIAIAA

SEQ ID NO: 43893 - protein, 518 aa, Homo sapiens
  DOMAIN (33)..(84): Protein phosphatase 2A regulatory subunit PR55 proteins domain identified by eMATRIX, accession number BL01024F, p-value= 1.000e-40, raw score of 9.42
MPAQDTMNRDNYWPKVPGPVSARATSSAQSVFEEPEDPSNRSFFSEIISSVSDVKFSHSGRYMLTRDYLTVKVWDLNMEARPIETYQLRGQPCAWSWAPDKMSRAVLGCVTVEVSRVPGRGPPDKMSRAVLGCVTVGVHDYLRSKLCSLYENDCIFDKFECAWNGSDSWLCSARLEPLSLFASRNGWGALGGYYDSTCSEPFTGDLSVIMTGAYNNFFRMFDRNTKRDVTLEASRESSKPRAVLKPRRVCVGGKRRRDDISVDSLDFTKKILHTAWHPAENIIAIAATNNLYIFQDKPTLTNCQLWDLADVIKVMDLKMEFSLDYPCGTHLITQVRESVGPFLVVLETAVATEKGSARHDMKTRPASPKVLITKLYPGPSGYLVGPQASEGDILPRPPGTGTDTDARESKKGSKQRERELDRGLEDGKQEGTWGSGNSLETERAEPKPARKEAKMLPERGPNPDPKRGLLDLVEERIQGKSMEKSESKFIRKVKEYKNGYSMDRAARGLLVAHFYGYF

SEQ ID NO: 43894 - protein, 121 aa, Homo sapiens; identical to SEQ ID NO: 42780

SEQ ID NO: 43895 - protein, 322 aa, Homo sapiens [sequence omitted]

SEQ ID NO: 43896 - protein, 85 aa, Homo sapiens
NTIGHKSTEVLALTWMLPLKLVKLSIYNYDIGCFFFFFLTESCSVAPQFINKLLTALIECTEWGQIFILDCLTNYTPKDDREAQR

SEQ ID NO: 43897 - protein, 59 aa, Homo sapiens
GVASPARNLCGKCCLCPSFAQAHWACSAHLTQQAVLGFHYWPRSHGCQRQARCRAARGA

SEQ ID NO: 43898 - protein, 609 aa, Homo sapiens
MKSSSLMDILTHWPGCSWNKSDELLRAFALTVPQPKLFPQPCGWLTPLLQEMSDGNGAMRVHVPLSLQDLKQIRGDLGQFSDDPDRYIETFQNLTQAFDLTQRDVMLLLGQTLTAAEKQAVLQAAEKCGDEQHVSYSRPKREKGMGKYLQSDNGSVFKAAVTQGVSKALDIEYHLRCAWRPQSAGKPQLVLEQLGHRAPSPSDGSCSPSGAAAAKMLAAVGKAQPDLLALQSQRDPGTGRSPSPFRVGAEGAPCSWVQLQPPSCGLGHSYALGGPGCLSSPTCSEVPAPTAWPLPIPSAHSDFGEKLWPSPGTDMTWPGPPMATHGPISTHFLPSEAHKNRKLSQTLADDRTTCLQVRATHLGLLSTEDCTLDKMTCLQRGVVHVAHSSWTQYRNSGPAKWQDQTSCNTNCVKYTLLLAMLWVTMRRQERREELQPFREPGLRSSPSQGCDILFVALQLPASPSFWVPPCSTVLVVGATCGTPVPATARSRRPYWHLDLPAPPQPPCLAVHTVPRARSLMHPLLLCTWLAVGSRGIWASSENQAQPAGSSGQNKPSGPEQNLGKGNTCHRGFWLVKRHPKDPVIPRLHTAAGPWAHSTKTFFSPRPPGL

SEQ ID NO: 43899 - protein, 136 aa, Homo sapiens
PLVHVVEFGLIGRTQRSAGVDQNHPRAVLVPSSLRIGIIPAGSTDCVCYSTVGTSDAQTSALHIVVGDSLAMDVSSVHHNSTLLRYSVSLLGYGFYGDIIKDSEKKRWLGLARYDFSGLKTFLSHHCYEGTVSFLP

SEQ ID NO: 43900 - protein, 746 aa, Homo sapiens
  DOMAIN (429)..(439): HIGH POTENTIAL IRON SULPHUR PROTEIN SIGNATURE domain identified by eMATRIX, accession number PR00374A, p-value=2.154e- 09, raw score of 11.57
MIHGWFPPYRQDSHKELAGLADEPGGGDGGDGGGGAAAIRAVGEAAALRREPGARAGSAALVAEPGARSRRPRRGLTKAQPSFPDSPSTGYFAVCSKTGQRLHLLFSWFLWHCSSRERRWYCQGPAPTLLPHSSDVPEARAGDKPSSQLLTLHAGLSSQRACCCGSLVSPVHCLFLVSCPELSVIAGREADAGFPRPDSMEWGRRVFCVEMPAEGRGVFTDACSVPVSEIIAVEETDVHGKHQGSGKWQKMEKPYAFTVHCVKRARRHRWKWAQVTFWCPEEQLCHLWLQTLREMLEKLITEHANQAKETLYEINIDKYDGIVCVGGDGMFSEVLHGLIGRTQRSAGVDQNHPRAVLVPSSLRIGIIPAEHVGPGENAGGLDGSTDCVCYSTVGTSDAETSALHIVVGCCPEARKPPASRHTACGSGHGQLCLGCQLWNACLCEASRLQSRMQSPGDSLAMDVSSVHHNSTLLRYSVSLLGYGFYGDIIKDSEKKRWLGLARYDFSGIKTFLSHHCYEGTVSFLPAQHTVGSPRNRKPCRAGCFVCRQSKQQLEEEQKKALYGLEAAEDVEEWQVVCGKFLAINATNMSCACRRSPRGLSPAAHLGDGSSDLILIRKCSRFNFLRFLIRHTNQQDQFDFTFVEVYRVKKFLFTSKHMEDEDSDLKEGGKKRFGHICSSHPSCCCTVSNSSWNCDGEVLHSPAIEVRAVVMARGCRKVPGTPATPGSRAQGLSSVNSFDKFGKWDYF

SEQ ID NO: 43901 - protein, 136 aa, Homo sapiens
  misc_feature (1)...(136): Xaa = X or * as defined in Table 2
GATDCVCYYTVGFNDTKTSALHMVVGDSLAMDVSSVHHNSTLLRYSVTLLGYGFYGDIIKDSDKKRRLGLARYDFLCIKTFFSHHXYEGTVTFLPAQHTVGSPRDRKPCRAGCFVCRQSKQQLEEEQKTALYGLEL

SEQ ID NO: 43902 - protein, 727 aa, Homo sapiens
  DOMAIN (265)..(275): HIGH POTENTIAL IRON SULPHUR PROTEIN SIGNATURE domain identified by eMATRIX, accession number PR00374A, p-value=2.154e- 09, raw score of 11.57
TEHANQAKETLYEINIDKYDGCYTAHSRMPCPRNHSPAGKAAPVQGVGYGEGQRAFPWEPGPKQMPAKGQVCRLPLLKLEASGLLRSEGRTCRSPDRLCSSCSIVCVGGDGMFSEVLHGLIGRTQRSAGVDQNHPRAVLVPSSLRIGIIPAGFANDLAGDEVSVLSGPVSGPEGGGMVHTFTLVTALGCEHRSHPHFMDEDRRTGEHVGPGENAGGLDGSTDCVCYSTVGTSDAETSALHIVVGCCPEARKPPASRHTACGSGHGQLCLGCQLWNACLCEASRLQSRMQSPGDSLAMDVSSVHHNSTLLRYSVSLLGYGFYGDIIKDSEKKRWLGLARYDFSGLKTFLSHHCYEGTVSFLPAQHTVGSPRDRKPCRAGCFVCRQSKQQLEEEQKKALYGLEAAEDVEEWQVVCGKFLAINATNMSCACRRSPRGLSPAAHLGDGSSDLILIRKCSRFNFLRFLIRHTNQQDQFDFTFVEVYRVKKFQFTSKHMEDEDSDLKEGGKKRFGHICSSHPSCCCTVSNSSWNCDGEVLHSPAIEVRNLASRQPKVTSECSPKKEFIQEQQGDCSQDMRATLEGILGGVRDKGNTLKGKEVHVSCSRTKFTGHSSSWQEAVLFTAGVAVTGRAPSSQSRGFWAPLVARYSREMPLSKPPMPTSNRTLLLSPTSPHSRHSGRISTQTPRRRQPWGPREWRAGSGTEGLGLVAQLAQAAYNACGPAKEADSPEP

SEQ ID NO: 43903 - protein, 454 aa, Homo sapiens
  DOMAIN (137)..(147): HIGH POTENTIAL IRON SULPHUR PROTEIN SIGNATURE domain identified by eMATRIX, accession number PR00374A, p-value=2.154e- 09, raw score of 11.57
EIKNRAKNLSKRRAAPCGGSGNTCQRPPVGELAPAHLRAGHVDGSGTTEGWHTEECGRSSRSRRNCPLRVSLKLPAPSSIPAQHVVCGHATASAGENTPDPGGQMLWEHLAKGGRGCCPEARKPPASRHTACGSGHGQLCLGCQLWNACLCEASRLQSRMQSPGDSLAMDVSSVHHNSTLLRYSVSLLGYGFYGDIIKDSEKKRWLGLARYDFSGLKTFLSHHCYEGTVSFLPAQHTVGSPRDRKPCRAGCFVCRQSKQQLEEEQKKALYGLEAAEDVEEWQVVCGKFLAINATNMSCACRRSPRGLSPAAHLGDGSSDLILIRKCSRFNFLRFLIRHTNQQDQFDFTFVEVYRVKKFQFTSKHMEDEDSDLKEGGKKRFGHICSSHPSCCCTVSNSSWNCDGEVLHSPAIEVRAVVMARGCRKVPGTPATPGSRAQGLSSVNSFDKFGKWDYF

SEQ ID NO: 43904 - protein, 82 aa, Homo sapiens
  misc_feature (1)...(82): Xaa = X or * as defined in Table 2
TWDYIRPNEXYMXMAKKKMPMDVWCNGKNWRPAGEFVDDGTETHFSIGNHDCYIKAVSSGKRKEGIIHTLIVDNREIPEIAS

SEQ ID NO: 43905 - protein, 125 aa, Homo sapiens
SVLHGRNAVLDVLLLEGQDSLQHHNGTVAQGMVHTLLSLPFSARHFPFSVHKSSSTTWLHCSLRACSGSRDRLIHESFIAQLNSFKFNSAEVFIICHAKVFACYFKGNEKLCTDFKRQGENGLAF

SEQ ID NO: 43906 - protein, 255 aa, Homo sapiens
MEDRAEGEEEERGGGGRNVEEEGGTEFYRSRTALGNYSTWPLFFGKGEFVDDGTETHFSIGNHDCYIKAVSSGKRKEGIIHTLIVDNREIPEIAKASRVLPPTVQVGGVSEASRGPVTVTQGCPQATPSARCGGHLAREKDWHRTKDQVDASTDPRYRKKYTVVESFSSLLSRGSLEQLSEGAELPKTMGTYFLHQRNLDVRHGSKGDHFGALRFDCLAESHASMRQAAPFVLANFSDLKWVYLPNACTPIVSRK

SEQ ID NO: 43907 - protein, 168 aa, Homo sapiens
AGVHKIEFEHGTTSGKRVVYVDGKEEIRKEWMFKLVGKETFYVGAAKTKATINIDAISGFAYEYTLEINGKSLKKYMEDRSKTTNTWVLHMDGENFRIVLEKDAMDVWCHGKKIRRPAGEFVDDGTETPLQYPGPMTCYIKAVSSGKRKEGIIHTLIVDNREIPEIAS

SEQ ID NO: 43908 - protein, 80 aa, Homo sapiens
SRKAGMSSPKLQMWLLISEKLCLSVACITTIVALASIVIFEPRESVNKYHLPFILKTFARSISSVTVFEVISGFITFFNV

SEQ ID NO: 43909 - protein, 373 aa, Homo sapiens
MQNDVDIADVAHYFEKDVKGESLFHSSKKMDLRVNGEQLDLDPGQTLIYYVDRNAPEFSMQALKAGVCAVIVVVMIAVVAGIVVLVISRKKRMAKYEKAEIKEMAHTMITVMFFGDIIIKEHPLVSVVHEKGINNETEQGPLIRSVLFSVLGGWFTRFLSSFLKTEYRKFDRSVLIKNAEEGPATVIGPLEGKKKPPTPVIGHTIFHWGLLPSPYPLFFSKESLNTRHETDAPALLEAVARKEDGPFACIQKLEVVSKAKFYCQPPAGLLPGLINPTLRCAWGLGISISSKRDANASLLGPHESGHQHTPCSLSLSLLSIVSVKRAAFKASDKRRAASCQRGVCMHVATRSPFLQDSSLCLHKAQLPVTAGSM

SEQ ID NO: 43910 - protein, 107 aa, Homo sapiens
MAPPQVLAFGLLLAAATATFAAAQEECVCENYKLAVNCFVNNNRQCQCTSVGAQNTVICSKLAAKCLVMKAEMNGSKLGRRAKPEGALQNNDGLYDPDCDESGLFKA

SEQ ID NO: 43911 - protein, 86 aa, Homo sapiens
  misc_feature (1)...(86): Xaa = X or * as defined in Table 2
GWRKYLQGAADMGIAEGGGSVWSSWASSSLISVPVRXLCESTQRSAPGWPPLTGGSCSESVALWLCVNDFEFQMRLMPSRDSEPAC

SEQ ID NO: 43912 - protein, 167 aa, Homo sapiens
MRSTRRVSVWPVAFVGGLRYEAPRVNGAGKVVGWKTVFDPHRPFAIDMAGFAVNLRLILRAFSTCDLMAADIRAFSTCHLMAVDVRAFSTCDLMAVDIRAFSMCDLMAADVTAFSVCDLMAVDIRAFSTCELMAVDIRAFISSYPCVSSSLCFSPPCTSSPYLSSSL

SEQ ID NO: 43913 - protein, 2503 aa, Homo sapiens; identical to SEQ ID NO: 37597
  DOMAIN (1086)..(1097): Ras GTPase-activating proteins domain identified by eMATRIX, accession number BL00509B, p-value=2.080e-11, raw score of 10.28

SEQ ID NO: 43914 - protein, 2871 aa, Homo sapiens; identical to SEQ ID NO: 37602
  DOMAIN (897)..(918): COAGULIN SIGNATURE domain identified by eMATRIX, accession number PR00763G, p-value=5.688e-09, raw score of 3.24

SEQ ID NO: 43915 - protein, 2891 aa, Homo sapiens; identical to SEQ ID NO: 37599
  DOMAIN (897)..(918): COAGULIN SIGNATURE domain identified by eMATRIX, accession number PR00763G, p-value=5.688e-09, raw score of 3.24

SEQ ID NO: 43916 - protein, 819 aa, Homo sapiens
MMKFIPAALKICIPSSPIMTVPRYRHPSPAIVARTVRILHTLLTLVNKHRNCDKFEVNTQSVAYLAALLTVSEEVRSRCSLKHRKSLLLTDISMENVPMDTYPIHHGDPSYRTLKETQPWSSPKGSEGYLAATYPTVGQTSPRARKSMSLDMGQPSQANTKKLLGTRKSFDHLISDTKAPKRQEMESGITTPPKMRRVAETDYEMETQRISSSQQHPHLRKVSVSESNVLLDEEVLTDPKIQALLLTVLATLVKYTTDEFDQRILYEYLAEASVVFPKVFPVVHNLLDSKINTLLSLCQDPNLLNPIHGIVQSVVYHEESPPQYQTSYLQSFGFNGLWRFAGPFSKQTQIPDYAELIVKFLDALIDTYLPGIDEETSEESLLTPTSPYPPALQSQLSITANLNLSNSMTSLATSQHSPECVPVVKRHMTAMKFSPGRKRRSNWLFSFSPGIDKENVELSPTTGHCNSGRTRHGSASQVQKQRSAGSFKPLSIPVSGLQSVLFTSLQEHMGEVVKVGKERGGHERLPHTQHNVGAQQKRDNPRKNACDVLCWPQQHSASSGMNAVTERANAGGPQDILSARETPGAAAGTGSGKGRDPAESSGRAGPLGGSGCPEEGEPRLRPPPGILAKPAPAFCPPEPVPERHASRLGWLCAHLPSSAMQVLLSGLHIHPCLGERAARIRAIGSPPHPALRRPRCKGLCTSCWTGPGGERDRPAKPFRFSSGSHLGQAEQTPGMGIVALLPLRTQTAGRIKKLPALAETWSPRTQSLSSGKGLPTTSGRGHRPQPRAQQASPTSPPAGQFLPLEPSPSYTLETDLLVT

SEQ ID NO: 43917 - protein, 189 aa, Homo sapiens
IQKNKLQQEFFYEFEGGVKLGSGAFNLMLSLLPARIIRLLEFIGFSGNRELGLLQLREGASGRSMRSALCCLTILAFHTYISLILGTGEVNVAEAERLLAPFLQQFPNGSLVLFYHARIELLKGNLEEAQEVFQKCVSVQEEWKQFHHLCYWELMWINVFQQNWMQAYYYSDLLCKESKWSKATYVFLK

SEQ ID NO: 43918 - protein, 289 aa, Homo sapiens
MINFIKGGLKIRTSYQIYKECLSILHEIQKNKLQQEFFYEFEGGVKLGSGAFNLELGLLQLREGASGRSMRSALCCLTILAFHTYISLILGTGEVNVAEAERLLAPFLQQFPNVRSVFQSGSLVLFYHARIELLKGNLEEATYVFLKAAILSMLPEEDVVATNENVVTLFSLSILGICTFRSGAELVAGIYMSYMFGHKVLTLLQNNVPQAETKGGKREEGKRKETREADDFRNTSNEEVWRISKDKAPKYMLLGVLLVILGSYFYREVDEKGMDEGVRKKKRMSGETG

SEQ ID NO: 43919 - protein, 746 aa, Homo sapiens
MGLFGESRQLPNGFKWLLRTGKGYRARIRILESLIQLRSVYGITRRSIRNKVLDFSVVFVFFPMPSTASKTLVDFLPFCKILSENYGAKECDFLRHRTKTSRLTRQPCESFPKPWVYNNRCCSVCSGGGAERLQGVRCDMLPEAVGWQPVVLRLLAESWSTYAVTFFLQPRECLSILHEIQKNKLQQEFFYEFEGGVKLGSGAFNLTKESLQYALQTLTMNGCSVEDLGLDFTLPGFPNIELKKGGKDIPVTIHNLEEYLRVCNCVFGGFVACYNRTTKHEVSGGRGSLVLFYHARIELLKGNLEEATYVFLKAAILSMLPEEDVVATNENVVTLFRQVDSLKQRIAGKSIPTEKFAVRKARRYSASLPAPVKLILPALEMMYVWNGFSIVSKRKDLSENLLVTVEKAEAALQSQNFNSFSVDDECLVKLLKGCCLKNLQRPLQAELCYNHVVESEKLLKYDHYLVPFTLFELASLYKSQGEIDKAIKFLETARCSGCLNTSALVDYFRHPCPRTFMDATPGTYLTNTSNDFHAKLSGVQQKAWQSGLKHLPEPAAPAAPKPNGRFSVGQTPLMDELHTGGRQEYDKASELRWKLFGKALVGDAAFLTLCQFYDQDGSFYDLEAEESGCSSECACCNWRAHGEPTSTGELRETNTGGALGNLCKYFSVHAEVCEEEEKAQKAPRSGLSMYPIVGRFRRCLGNHLNMPVFAQKQLFCSTELDGLILALSGSQNIIQNDSCDGDAFDS

SEQ ID NO: 43920 - protein, 74 aa, Homo sapiens
  DOMAIN (39)..(54): G-PROTEIN BETA WD-40 REPEAT SIGNATURE domain identified by eMATRIX, accession number PR00320B, p-value=9.743e-10, raw score of 12.19
YSQNQILVWKYPPLTQVAKLTGHSYRVLYLAMSPDGEAIVTGAGDETLRFWNVFSKTRSTKESVFVLNLFTRIR

SEQ ID NO: 43921 - protein, 1313 aa, Homo sapiens
  DOMAIN (1004)..(1019): G-PROTEIN BETA WD-40 REPEAT SIGNATURE domain identified by eMATRIX, accession number PR00320B, p-value=9.743e-10, raw score of 12.19
MQPQSVSTEALPEARPRASQLSQAQSNCVRHCLLLLKVTNQRIPETGFPNEALPVPPPARPGPHTVIAASGTPHRALETQDPSARPVTAGASATTASPAATPAVRSGGRHFLAHVTVPDGTNAAAGCLRRTSRGPGAVLTQEGYEGRVPGVTGPKDAPQEEIIPGCRTQISKPQPKARPVGHLAVFEPGMLLSAPTVPRTAQYRKQPVPNVWTVSPVRAPLDSAQSQSPFLGHLCSRPGTFMSPVAPGPCVRWQTQVSFRSEGVIKSDRAVGTRWYQEAGDEQPRVFYLQAPFGSVESSSHGSGLEVGAAPHTGKRRSEAASSACSSAAQLSEGLRGVAGGPGAELSTASSTGQVSRRWALAPVHEALQRGHEISHENPLPQDCGLHALVPQSLTGPMWPSQGPHASLDCGPSQRCLRALAEETALRLILSPTPGRELVRGHLELWRLTLPRAEPCLAMDQDYERRLLRQIVIQNENTMPRVTEMRRTLTPASSPVSSPSKHGDRFIPSRAGANWSVNFHRINENEKSPSQNRKAKDATSDNGKDGLAYSALLKNELLGAGIEKVQDPQTEDRRLQPSTPEKKGLFTYSLSTKRSSPDDGNDVSPYSLSPVSNKSQKLLRSPRKPTRKISKIPFKVLDAPELQDDFYLNLVDWSSLNVLSVGLGTCVYLWSACTSQKGERMGERMGEQMGERMGERMGERMGERMGERMGERMDERMGERMDWGFETSGKAHTDLCLQVTRLCDLSVEGDSVTSVGWSERGRVGFSSILDYDENISAAALKHIMGRGNLVAVGTHKGFVQIWDAAAGKKLSMLEGHTARVGALAWNAEQLSSGSRDRMILQRDIRTPPLQSERRLQGHRQEVCGLKWSTDHQLLASGGNDNKLLVWNHSSLSPVQQYTEHLAAVKAIAWSPHQHGLLASGGGTADRCIRFWNTLTGQPLQCIDTGSQVCNLAWSKHANELVSTHGYSQNQILVWKYPSLTQVAKLTGHSYRVLYLAMSPDGEAIVTGAGDETLRFWNVFSKTRSTKAASSLGLRLSASAIPMCLQESVSVLNLFTRIRARTTLDGPGSDRLYSERRMPPGTLTASVCSSPAHRSRMLFLELPTSAQNRPPDARADCSLSGSICVMAIARRSVGFRWACASWPSVTLTLEEDVCSGLITPGELNPDLLTALAGEEHNRCHVFVHSPTLVKYSERLSSPSLEATSPRSWEEGVVSVVAETLGGLYAVNGGLRGLLAGARGIQADMQTLRQEAARPCIPSGTLEASFPAPLYSGRSLWGLQTWRQAKNKCVCGRLQGLQTHWELRPQKCSPSEIQA

SEQ ID NO: 43922 - protein, 22 aa, Homo sapiens
GAGVLRLWTAGVARSCPAGLPD

SEQ ID NO: 43923 - protein, 453 aa, Homo sapiens
  DOMAIN (9)..(24): G-PROTEIN BETA WD-40 REPEAT SIGNATURE domain identified by eMATRIX, accession number PR00320B, p-value=9.743e-10, raw score of 12.19
AMSPDGEAIVTGAGDETLRFWNVFSKTRSTKAASSLGLRLSASAIPMCLQESVSVLNLFTRIRARTTLDGPGSDRLYSERRMPPGTLTASVCSSPAHRSRMLFLELPTSAQNRPPDARADCSLSGSICVMAIARRSVGFRWACASWPSVTLTLEEDVCSGLITPGELNPDLLTALAGEEHNRCHVFVHSPTLVKYSERLSSPSLEATSPRSWEEGVVSVVAETLGGLYAVNGGLRGLLAGARGIQADMQTLRQEAARPCIPSGTLEASFPAPLYSDDYLSLEGSRWPPAIRQATRWKYTPMGRDAAGQLWYTGLTNSDAWEAWYNLPRAPASPFREAYNRWHSCYQHPYTQHLRETAWHDPIVPAQYQAPSTRWGSALWKDRPIRGKEYVLNRNRYGVEPLWRASDYVPSLSAPQRPPGTTQNYREVGPGTILPLHLAWFPASLTTHSPLKPC

SEQ ID NO: 43924 - protein, 50 aa, Homo sapiens
  misc_feature (1)...(50): Xaa = X or * as defined in Table 2
MXXXXXXXXXXXXXXXXXXXXXXXXXXXXXXXXXXXXXXXXXXXXXXXXX

SEQ ID NO: 43925 - protein, 170 aa, Homo sapiens
  DOMAIN (12)..(37): MEVALONATE KINASE SIGNATURE domain identified by eMATRIX, accession number PR00959A, p-value=4.732e-16, raw score of 21.94
PSHDHSKLGTRASGKVILHGEHAAVHGKVALAVSLNLRTFLRLQPHSNGKGDLSLPNIGIKRAWDVARLQSLDTSFLRWTKEDLELINKWAFQGERMIHGNPSGVDNAVSTWGGALRYHQGKISSLKRSPALQILLTSTRGPRNIRALVGGGRNRLLEVPDMGGPLLLSW

SEQ ID NO: 43926 - protein, 440 aa, Homo sapiens
  DOMAIN (175)..(197): LMBP PROTEIN SIGNATURE domain identified by eMATRIX, accession number PR00960B, p-value=6.952e-14, raw score of 8.92
  misc_feature (1)...(440): Xaa = X or * as defined in Table 2
RVDDFVGELLRLRRGGAADVEAAAAAGFPGAMLSQVLLVSAPGKVILHGEHAVVHGKVALAVSLNLRTFLRLQPHSNGKVDLNLPNIGIMRAWDVARLHSLDTSFLGECKEEKPEQGDVTTPTSEQVEKLKEVAGLPDDCAVTERLAVLAFLYLYLSICRKQRALPSLDIVVWSELPPGAGLGSSAAYSVCLAAALLTVCEEIPNPLKDGDCVNRWTKEDLELINKWAFQGERMIHGNPSGVDNAVQHLGEGALRLPSRGRFSFLXRGSPVFQILGLTNTKVPSAITRALVAGVRNRLLKFPEIVAPLLTSIDAISLECERVLGEMGEAPAPEQYLVLEELIDMNQHHLNALGVGHASLDQLCQVTRARGLHSKLTGAGGGGCGITLLKPGLEQPEVEATKQALTSCGFDCLETSIGAPGVSIHSATSLDSRVQQALDGL

SEQ ID NO: 43927 - protein, 316 aa, Homo sapiens
  DOMAIN (10)..(35): MEVALONATE KINASE SIGNATURE domain identified by eMATRIX, accession number PR00959A, p-value=3.455e-19, raw score of 21.94
MLSEVLLVSAPGKVILHGEHAVVHGKVALAVSLNLRTFLRLQPHSNGKVDLSLPNIGIKRAWDVARLQSLDTSFLGECKEEKPEQGDVTTPTSEQVEKLKEVAGLPDDCAVTERLAVLAFLYLYLSICRKQRALPSLDIVVWSELPPGAGLGSSAAYSVCLAAALLTVCEEIPNPLKDGDCVNSNSDDNMLKNIELFDKLSLRFNGRVLFIKDVIGDEICCWSFYGQGRKIAEVCCTSIVYATEKKQTKVEFPEARIYEETLNILLYEAQDGRGPDNALLGGHRRGGGALPTTWDEDEERERIERVAEDPHSSALD

SEQ ID NO: 43928 - protein, 551 aa, Homo sapiens
  DOMAIN (263)..(308): Transglutaminases proteins domain identified by eMATRIX, accession number BL00547D, p-value=1.000e-40, raw score of 20.72
MIPQNQKAIANYLKSWNETLTSRLATLPENPPAIDWTYYKANVAKAGLVDDFEKKFNVLKLPVPEDKYTAQVDAEEKEDGKTCAEWVSLSKARQMLPCLLSSLRHVPNLNCSQLVLSNKLVSKGGKLLFPLLGLEVALTDLQSSRNNVRHHTEEITVDHLLVRRGQAFNLTLYFRNRSFQPGLDNIIFVVETEVSLCAPPTAAVGRYLLKIHIDSFQGSVTAYQLGEFILLFNPWCPDGANPAEWTGSVAILKQWNATGCQPVRYGQCWVFAAVMCTVMRCLGIPTRVITNFDSGHDTDGNLIIDEYYDNTGRILGNKKKDTIWNFHVWNECWMARKDLPPAYGGWQVLDATPQEMSNGVYCCGPASVRAIKEGEVDLNYDTPFVFSMYSQYLSTDKLIRISALGEEKSSPEKILVNKIITLSYPSITINNSYAKVAYLEVAYPATLQNGALRKYLVLGAAVVNQPLSIQVIFSNPLSEQVEDCVLTVEGSGLFKKQQKVFLGVLKPQHQASIILETVPFKSGQRQIQANMRSNKFKDIKGYRNVYVDFAL

SEQ ID NO: 43929 - protein, 867 aa, Homo sapiens
  DOMAIN (235)..(286): Transglutaminases proteins domain identified by eMATRIX, accession number BL00547B, p-value=1.000e-40, raw score of 29.05
MIPQNQKAIANYLKSWNETLTSRLATLPENPPAIDWTYYKANVAKAGLVDDFEKKFNVLKLPVPEDKYTAQVDAEEKEDGKTCAEWVSLSKASNTAKKNLRARLEVALTDLQSSRNNVRHHTEEITVDHLLVRRGQAFNLTLYFRNRSFQPGLDNIIFVVETGPLPDLALGTRAVFSLARHHSPSPWIAWLETNGATSTEVSLCAPPTAAVGRYLLKIHIDSFQGSVTAYQLGEFILLFNPWCPEDAVYLDSEPQRQEYVMNDYGFIYQGSKNWIRPCPWNYGQFEDKIIDICLKLLDKSLHFQTDPATDCALRGSPVYVSRVVCAMINSNDDNGVLNGNWSENYTDGANPAEWTGSVAILKQWNATGCQPVRYGQCWVFAAVMCTVMRCLGIPTRVITNFDSGHDTDGNLIIDEYYDNTGRILGNKKKDTIWNFHVWNECWMARKDLPPAYGGWQVLDATPQEMSNGVYCCGPASVRAIKEGEVDLNYDTPFVFSMVNADCMSWLVQGGKEQKLHQDTSSVGNFISTKSIQSDERDDITENYKYEEGSLQERQVFLKALQKLKARSFHGSQRGAELQPSRPTSLSQDSPRSLHTPSLRPSDVVQVSLKFKLLDPPNMGQDICFVLLALNMSSQFKDLKVNLSAQSLLHDGSPLSPFWQDTAFITLSPKEAKTYPCKISYSQYSQYLSTDKLIRISALGEEKSSPEKILVNKIITLSYPSITINANKGKLESFSYICFFSIVFGSKNSYAKVAYLEVAYPATLQNGALRKYLVLGAAVVNQPLSIQVIFSNPLSEQVEDCVLTVEGSGLFKKQQKVFLGVLKPQHQASIILETVPFKSGQRQIQANMRSNKFKDIKGYRNVYVDFAL

SEQ ID NO: 43930 - protein, 170 aa, Homo sapiens
QPGSVKDPKMAGRKLALKTIDWVAFAEIIPQNQKAIASSLKSWNETLTSRLAALPENPPAIDWAYYKANVAKAGLVDDFEKKFNALKVPVPEDKYTAQVDAEEKEDVKSCAEWVSLSKARIVEYEKEMEKMKNLIPFDQMTIEDLNEAFPETKLDKKKYPYWPHQPIENL

SEQ ID NO: 43931 - protein, 106 aa, Homo sapiens
  DOMAIN (79)..(103): INTERLEUKIN-8 SIGNATURE domain identified by eMATRIX, accession number PR00436D, p-value=5.615e-12, raw score of 12.23
NLQLLTFNMKVSAVLLCLLLMTAAFNPQGLAQPDALNVPSTCCFTFSSKKISLQRLKSYVITTSRCPQKAVIFRTKLGKEICADPKEKWVQNYMKHLGRKAHTLKT

SEQ ID NO: 43932 - protein, 211 aa, Homo sapiens
  DOMAIN (1)..(13): Small cytokines (intercrine/chemokine) C-C subfamily signatur domain identified by eMATRIX, accession number BL00472A, p-value= 8.875e-12, raw score of 7.45
MKVSAVLLCLLLMTAAFNPQGLAQPGLGLPSVNEVAAQDVWFARWGTAKAPGAYELNFLDPSPGFNLVYQGGAEQPENILTISSLSAEGAQKPRPPIGKGAFLKSLKETMKAHNLKGCQKSLQNSALTSAKASHTIAEYVQCLKDKLVSSCGEKFSQKQGLSLCASIKLKSVLMSGLQREPAVKTFTSIKDSVKDLPSEVQPQDSTLQHNG

SEQ ID NO: 43933 - protein, 369 aa, Homo sapiens
  DOMAIN (24)..(47): ARRESTIN SIGNATURE domain identified by eMATRIX, accession number PR00309A, p-value=9.500e-27, raw score of 9.68
MGDKGTRVFKKASPNGKLTVYLGKRDFVDHIDLVDPVDGVVLVDPEYLKERRVYVTLTCAFRYGREDLDVLGLTFRKDLFVANVQSFPPAPEDKKPLTRLQERLIKKLGEHAYPFTFEIPPNLPCSVTLQPGPEDTGKACGVDYEAKAFCAENLEEKIHKRNSVGLVIRKVQYAPERPGPQPTAETTRQFLMSDKPLHLEASLDKEIYYHGEPISVNVHVTNNTNKTVEKIKISVRQYADICLFNTAQYKCPVAMEEADDTVAPSSTFCKVYTLTPFLANNREKRGLALDGKLKHEDTNLASSTLLREGANREILGIIVSYKVKVKLVVSRGGDVAVELPFTLMHPKAQRGTPASGSSRERDASRYHIS

SEQ ID NO: 43934 - protein, 308 aa, Homo sapiens
  DOMAIN (207)..(224): Arrestins proteins domain identified by eMATRIX, accession number BL00295F, p-value=3.455e-16, raw score of 10.46
LTHRVHEVDVVHKVPLSQMRTLRPGEIFMPSTTASGAAAAEKLGSCSDIYWPIRVGAESALTFLGIHASSAGGDGKVPFFVQSTIQQVCALMARCDYTTGPLCNTPHQQFQTFSIMPYPPINLPWEPREPSQERGGFHFFLGPEEVSSSSSQADRGSEWQNWGWRASFGSTSSDGKTLCSPRTDRASTSSLTACESAQGSLGLGLCFSDVAVELPFTLMHPKPKEEPPHREATHGQKGPHGEFTEGEAAGVGWGPSEKDFSAEVVLQLGLEDGHTDHLGQPSSGKETTATQKRHIYILRTNRTESRIF

SEQ ID NO: 43935 - protein, 285 aa, Homo sapiens
  DOMAIN (16)..(68): Ubiquitin domain proteins domain identified by eMATRIX, accession number BL00299, p-value=5.645e-29, raw score of 28.84
MQIFVKTLTGKTITLEVEPSDTTENVKAEIQDKEGVPLDQQCLIFVGKQLEDGRTLSDCNIQKESILHLGLHLAQLRVLMDAEIRGTELFLKVATVKAERGHWRPKMLTWEVDATEGDLVGQQRAEDAEAHVEKGGKTRPYGEVLYRQNKRAKTQNLSYPLKGVEKETLVVVIDSGGGDAQIWWKGEAGRGLRTVCAVMATSLSIRVKEAEFGGDLGLSVQGAAEGSMVAFPLSKQVAQGAQGGNDGSGWEPHDQEVKEVLLPFTDYRLLVGLPNVMFTDLILYD

SEQ ID NO: 43936 - protein, 145 aa, Homo sapiens
  DOMAIN (34)..(86): Ubiquitin domain proteins domain identified by eMATRIX, accession number BL00299, p-value=1.000e-40, raw score of 28.84
GSTHASADAWGGGRADANMQIFVKTLTGKTITLEVEPSDTIENVKAKIQDKEGIPPDQQRLIFAGKQLEDGRTLSDYNIQKESTLHLGLRLRGGIIEPSLRQLAQKYNCDKMICRKCYARLHPRAVNCRKKKCGHTNNLRSKKKD

SEQ ID NO: 43937 - protein, 76 aa, Homo sapiens
  DOMAIN (40)..(60): ATP SYNTHASE C SUBUNIT SIGNATURE domain identified by eMATRIX, accession number PR00124A, p-value=2.125e-17, raw score of 8.81
EAGDGSTVFNGAQNGVSQLIQREFQTSAISRDIDTAAKFIGAGAATVGVAGSGAGIGTVFGSLIIGYARVIISIPK

SEQ ID NO: 43938 - protein, 198 aa, Homo sapiens
  misc_feature (1)...(198): Xaa = X or * as defined in Table 2
AEFDLCCSPCRRRLLGREEAGEEPTSPVTQYLQPRSPEECKMFACAKLACTPSLIRAGSRVAYRPISASVLSRPEASRTGEGSTVFNGAQNGVSQLIPKGSFKTSAISKKTLDTAAKFIGAGAGNSXGVGWFLVAGIGTVFWASLIHWVMARKPFRWKQQLFSYAILGICLVLKAMGSPFVLMVAFLILFAHVTEITA

SEQ ID NO: 43939 - protein, 706 aa, Homo sapiens
  DOMAIN (434)..(470): Granins proteins domain identified by eMATRIX, accession number BL00422E, p-value=6.077e-09, raw score of 26.86
DSLANLHTRMACEIMPLQSSQEDERPLSPFYLSAHVPQVSNVSATGELLERTIRSAVEQHLFDVNNSGGQSSEDSESGTLSASSATSARQRRRQSKEQDEVRHGRDKGLINKENTPSGFNHLDDCILNTQEVEKVHKNTFGCAGERSKPKRQKSSTKLSELHDNQDGLVNMESLNSTRSHERTGPDDFEWMSDERKGNEKDGGHTQHFESPTMKIQEHPSLSDTKQQRNQDAGDQEESFVSEVPQSDLTALCDEKNWEEPIPAFSSWQRENSDSDEAHLSPQAGRLIRQLLDEDSDPMLSPRFYAYGQSRQYLDDTEVPPSPPNSHSFMRRRSSSLGSYDDEQEDLTPAQLTRRIQSLKKKIRKFEDRFEEEKKYRPSHSDKAANPEVLKWTNDLAKFRRQLKESKLKISEEDLTPRMRQRSNTLPKSFGSQLEKEDEKKQELVDKAIKPSVEATLESIQRKLQEKRAESSRPEDIKDMTKDQIANEKVALQKALLYYESIHGRPVTKNERQVMKPLYDRYRLVKQILSRANTIPIIGSPSSKRRSPLLQPIIEGETASFFKEIKEEEEGSEDDSNVKPDFMVTLKTDFSARCFLDQFEDDADGFISPMDDKIPSKCSQDTGLSNLHAASIPELLEHLQEMREEKKRIRKKLRDFEDNFFRQNGRNVQKEDRTPMAEEYSEYKHIKAKLRLLEVLISKRDTDSKSM

SEQ ID NO: 43940 - protein, 139 aa, Homo sapiens
IFGDIVLLLQSPTMKIQEHPSLSDTKQQRNQDAGDQEESFVSEVPQSDLTALCDEKNWEEPIPAFSSWQRENSDSDEAHLSPQAGRLIRQLLDEDSDPMLSPRFYAYGQSRQYLHDTEVPASAPNSHSFMRRRSSSLGP

SEQ ID NO: 43941 - protein, 119 aa, Homo sapiens
MKIQEHPSLSDTKQQRYQDAGAQEESCVSEVPQSDLTALCDEKNWKGLLRDKLGSYDVAFYLAGVPPLIGGAVLCFIPWIHSKKQREISKTTGKRKDGENVGKPELSAVKFIWNVQERI

SEQ ID NO: 43942 - protein, 47 aa, Homo sapiens
GTLSDITMSEEQRQWMYKNVPPEKKPTQGNPLPPQIFNGDRYCGVSG

SEQ ID NO: 43943 - protein, 158 aa, Homo sapiens
SSAGREPDPSDLPRRLCFTHRLPAARRWVQLCVHASPEPGGQGVCPGRSERMVIRVFIASSSGFVAIKKKQQDVVRFLEANKIEFEEVDITMSEEQRQWMYKNVPPDKKPTQGNPLPPQIFNGDRYCGDYDRLFESKESNTVFSFLGLKPRLASKAEP

SEQ ID NO: 43944 - protein, 142 aa, Homo sapiens
  DOMAIN (85)..(132): Hypothetical hesB/yadR/yfhF family proteins domain identified by eMATRIX, accession number BL01152C, p-value=5.615e-12, raw score of 25.93
  misc_feature (1)...(142): Xaa = X or * as defined in Table 2
CRDGKDVVSLVRATVWALSKRKLQPTRAALTPTPSAVNKIKQFLKDKPELVDVKVGVRTRGCNGLSYTVEYTKTKGNSDEVIQDEARVFIEKKAQLTPLGTEMDYVEDKLSSEFMFNNPTXTCGCGAPGKLVETLGLTEEIM

SEQ ID NO: 43945 - protein, 459 aa, Homo sapiens
MPESQPHCASLTRAALYSTGSQQGSASHKRSDRADTSQASPLPRLFQTRPTPLLTPTRAPLSARLAHSCRSPATRLRNALLARLASRAPRLAALSRLASHNQLSPLTTPNTRPLRLSITREHRCRTSTSHYCLLSPLLVLNTRSLACLPHLDKPPRPHAPRPTPPTHSLTRSRTHSNSQRAPLAPVSISAASAPCPRLPCHAANRPRLRTLPPPHHTTLFLAAPMLEAPTPPLPATDSTTPPTQPDHGRTCAIRCLFNESSIRPHSVSGCSPRTWCTDKARLSVTPTSHELPCAACVHGDVGRQGNLKNLQEGQRVDLDATQPAIEKLGPPSQGQGHTSAITTHKQRSMYELGQDTRNYLMIAPEEAAAEYTKTKGDSDEEVIQDGVRVFIEKKAQLTLLGTEMDYVEDKLSSTHNVTAFANTILTRQFSQNTDSANPTSPRASTTNRTPDTPTTTHIA

SEQ ID NO: 43946 - protein, 405 aa, Homo sapiens
MQNAIDGLISRLAMAEDRMSELEDISTERSKPEKSREKRPGTFTQILTIVSELCTVFSTVTCSTGVRVFIEKKAQLTLLGTEMDYVEDKLSILAADSPHSPGETISGVSHLPGFASLFFLLVPHEGHPSPKQVPHVLRTRALSLPGVLFPLSSELLCEPPPRRFSAVHSGTVVSTDSPLALSFHRSSKTVPTSESFKSANETPAKSIDHHVLVVISAVVNCIPCQSIVLSIHPLTTKAEGLKLLSAYSVPAAMSDKRLPWEDSQTQGSPQNILSFLDLSESNILYLLQVQEPCKETVDKIPGQSFQRAFYQLHKVNHDSSKQSAHIQNYVIPVKVLCRQMEISGESYQLRKNLNILITSRDPPTKGSPKVRESHQCVQSLLPAFEHFTLTEQMTNDPQTVRGLPL

SEQ ID NO: 43947 - protein, 149 aa, Homo sapiens
  DOMAIN (98)..(145): Hypothetical hesB/yadR/yfhF family proteins domain identified by eMATRIX, accession number BL01152C, p-value=1.375e-14, raw score of 25.93
  misc_feature (1)...(149): Xaa = X or * as defined in Table 2
REAEAADLRSEAPGRRDGEDVGFLSSGQLSGLCSKRKLQPTRAALTLTPSAVNKIKQLLKEXPXACRLKVGVRTRGCNGLSYTLEYTKTKGDSDEEVIQDGVRVFIEKKAQLTLLXTEMDYVEDKLSKGVGVHSPNIKGTCGCGESFNI

SEQ ID NO: 43948 - protein, 253 aa, Homo sapiens
VSGNRPHEPGAALSFRRRPRGARFPRTPPPKCPRGPATQPPQVRPWPLSRESVPHLADREWRPSAPVRTQPAAAAVLARSPRGLLSPNSEATAPGSPSSGGCRSRDAPANIKGGREGVQKHAEMIRDGRCTLALNSSKPHTEQAIPFSILSVLRRRKFKLVPVYTAAKGPSSWSTLHHEGGWRILFVSLTKMQASPKCGLQTCLDHLHSKLPSPLPQAAQMLLSRSSEHQAVTQGPSVWLIVAFHSHSHTVDG

SEQ ID NO: 43949 - protein, 102 aa, Homo sapiens
MGGRAEALLTSQTMGGRAEVLLTSQTMGGRAEALLTSQMMGGRAEGRIVAPRGCQDFGWDPCFQPDGYEQTYAEMPKAEKNAVSHRFRALLELQEYFGSLAA

SEQ ID NO: 43950 - protein, 94 aa, Homo sapiens
  misc_feature (1)...(94): Xaa = X or * as defined in Table 2
GQHHPETKAWQRHNKKREFXTNILDEHXCKNPHXNTGKPNPATHQKAYPPXSSGLHPWDARLVQHTKINKCNPAYKQNQRQKPHDYLNRCRKGL

SEQ ID NO: 43951 - protein, 169 aa, Homo sapiens
QKIDLPEYQGEPDEISIQKCQEAVRQVQGPVLVEDTCLCFNALGGLPGPYIKWFLEKLKPEGLHQFLAGVEGKSAYALCTFALSTGDPSQPVRLFRGRTSGRIVAPRACQDFGWDPCFQPDGYEQTYAEMPKAEKNAVSHRFRALLELQEYFGKFGQLDFCKLEAGPFR

SEQ ID NO: 43952 - protein, 73 aa, Homo sapiens
  DOMAIN (20)..(55): Prion protein domain identified by eMATRIX, accession number BL00291A, p-value=4.724e-09, raw score of 4.49
RSPGPRGGRESGTCRPAAAPAPAPAGGCRAGTGAWPPGSATSPRLLKPGSPSGGGPPTGVWGFSWRNCQNVCL

SEQ ID NO: 43953 - protein, 138 aa, Homo sapiens
FRPVSNCCLLPLGLGIMEVLSLPNSFQTQALWDSLHSPGVPGSVFHFKPTTVVTSCQPKNPRELHRRRKLDPGKMHAKIWLMKTSLRSGRAALRELRSRENFLSKLNRELIETIQEMENSTTLHVRALLQQQDTLATI

SEQ ID NO: 43954 - protein, 91 aa, Homo sapiens
TERKGTAGEKGEAKWPPTKGRKAKMNEEQSYLGKWYGFCHWDLLDSREGTSPCKVRLASKLVTIFSGAETGEGSWRMETGYKVAGNAQSWE

SEQ ID NO: 43955 - protein, 133 aa, Homo sapiens
FFFFYLQFGHCLLHQLAYPNISGVTKSQKQPLYPVSNPHTSSQVPPPTWLDPSQSLHFACMKAVGLLDWRQSRWLGFLLGLLPWNIIRNLELLDYGVSPRVLGSGKSWEGKELPLSPAQGESSSNSKQDVDAA

SEQ ID NO: 43956 - protein, 228 aa, Homo sapiens
MENSTTLHVRALLQQQDTLATIIDILEYSNKKRLQQLKSELQEWEEKKKCKMSYLEQQAEQLNAKIEKTQEEVNFLSTYMDHEYSIKSVQISTLMRQLQQVKDSQQDELDDLGEMRRKVLESLSDKIQKKKKKILSSVVAETQRPYEEALLQKMWESQDFLKCMQRFREIIDQFEENMPVLRAEVEELQAQTREPREVIFEDVLLRRPKCTPDMDVILNIPVEEPLPF

SEQ ID NO: 43957 - protein, 201 aa, Homo sapiens
  DOMAIN (36)..(63): Mrp family proteins domain identified by eMATRIX, accession number BL01215A, p-value=4.964e-11, raw score of 9.75
MEIRGRVEQRVGYTIEQINHMRDVFGTRLRRAEDVFPPVIGVAAHKGGVYKTSVSVHLAQDLALKGLRVLLVEGNDPQGTASMYHGWVPDLHIHAEDTLLPFYLGEKDDVTYAIKPTCWPGLDIIPSCLALHRIETELMGKFDEVPQAKGNNVVITSYMTNRGFFEDKKATFAPSFLMNIKGNKTSVVKNSILEQGQLTVN

SEQ ID NO: 43958 - protein, 858 aa, Homo sapiens
  DOMAIN (587)..(630): 1 kw MIND INHIBITOR DIVISION CONTROL domain identified by eMATRIX, accession number DM01756B, p-value=4.822e-15, raw score of 22.91
  misc_feature (1)...(858): Xaa = X or * as defined in Table 2
MQFSLLWPFVHASQLTLEDPRINAGHEMTKAIAIAQFNDDSPEARKITRRWRIGEAADLVGVSSQAIRDAEKAGRLPHPDMEIRGRVEQRVGYTIEQINHMRDVFGTRLRRAEDVFPPVIGVAAHKGGVYKTSVSVHLAQDLALKGLRVLLVEGNDPQGTASMYHGWVPDLHIHAEDTLLPFYLGEKDDVTYAIKPTCWPGLDIIPSCLALHRIETELMGKFDEGKLPTDPHLMLRLGIETVAHDYDVLVIDSPPNLGIGTINVVPVQSWFDDMTDTELLDLIPFFEGLSREDDVYSMLHRLCNRGSPTLLIPHTHENGYYKKQTNKQTKTEDNKCDEDVETLKPLCTVGGNAVENSMERYEHAIVTGDAVGMDDIPQEARQYRHNQAYAYSIQGDGAEDDDERIVSFMEIRGRVEQRVGYTIEQINHMRDVFGTRLRRAEDVFPPVIGVAAHKGGVYKTSVSVHLAQDLALKGLRVLLVEGNDPQGTASMYHGWVPDLHIHAEDTLLPFYLGEKDDVTYAIKPTCWPGLDIIPSCLALHRIETELMGKFDEXESPTELMGKFDEGKLPTDPHLMLRLAIETVAHDYDVIVIDSAPNLGIGTINVVCAADVLIVPTPAELFDYTSALQFFDMLRDLLKNVDLKGFEPDVRILLTKYSNSNGSQSPWMEEQIRDAWGSMVLKNVVRETDEVGKEETALCQYRKPDGSGIVSLKIDWIIERYQLPQSYQRMPDFRRRFLQWLANLSLKPVGDSKEPPYDDSPEARKITRRWRIGEAADLVGVSSQAIRDAEKAGRLPHPDMEIRGRVEQRVGYTIEQINHMRDVFGTRLRRAEDVFPPVIGVAAHKGSGSEGATCFARGR

SEQ ID NO: 43959 - protein, 393 aa, Homo sapiens
  DOMAIN (32)..(59): Mrp family proteins domain identified by eMATRIX, accession number BL01215A, p-value=4.964e-11, raw score of 9.75
MATTQLDMIFEHGINHMRDVFGTRLRRAEDVFPPVIGVAAHKGGVYKTSVSVHLAQDLALKGLRVLLVEGNDPQGTASMYRGWVPDLHIHAEDTLLPFYLGEKDDVTYAIKPTCWPGLDIIPSCLALHRIETELMGRFDEEPQGLSTCAGSNRDLGHVLIPCLIHVLVPNKELGSPAERKGHQQAYNWDTCQSFETMKVKNCAYNAKLRVKDVKLGNLEIEKLIPYMDLEKHYVSYQQMFTIYHFLLFLKAMADCPSSIQLLCDHGASVNAKDVDGRTPLVLATQMSRPTICQLLIDRGADVNSRDKQNRTALMLGCEYGCRDAVEVLIKNGADISLLDALGHDSSYYARIGDNLDILTLLKTASENTNKVNQARVDSGYLDHEVLSRYYHLA

SEQ ID NO: 43960 - protein, 137 aa, Homo sapiens
  DOMAIN (32)..(70): Ribosomal protein L21e proteins domain identified by eMATRIX, accession number BL01171, p-value=5.500e-36, raw score of 19.94
ATMTITKGNKTGTPYKYSTSFRRHGVVPLATYMPNYKKGDIVDIKGMGTAQKGMPHKCYHGKTGRVYNVTQHAVGIVVNKQDKGTILAKRINARIEHIKHSKSRDSFLKRVKENDQNMKEAPEKGSWDQLKRQPCSP

SEQ ID NO: 43961 - protein, 89 aa, Homo sapiens; identical to SEQ ID NO: 43128
  DOMAIN (29)..(67): Ribosomal protein L21e proteins domain identified by eMATRIX, accession number BL01171, p-value=7.983e-22, raw score of 19.94
  misc_feature (1)...(89): Xaa = X or * as defined in Table 2

SEQ ID NO: 43962 - protein, 345 aa, Homo sapiens; identical to SEQ ID NO: 36807
  DOMAIN (30)..(68): Ribosomal protein L21e proteins domain identified by eMATRIX, accession number BL01171, p-value=9.719e-36, raw score of 19.94

SEQ ID NO: 43963 - protein, 184 aa, Homo sapiens
  DOMAIN (46)..(84): Ribosomal protein L21e proteins domain identified by eMATRIX, accession number BL01171, p-value=9.667e-39, raw score of 19.94
  misc_feature (1)...(184): Xaa = X or * as defined in Table 2
GPFGRNRHLPVIRQNDGPQRGKRRGTPKYVFXRPFRKHGGGPLGPPYMRIYRKGDIVDIKGMGTVQNGMPHKCYHGKTGRVYNVTQHAVGIVVNKQVKGKILAKRINVRIEHIKHSKSPRXASLKRVLKENDQEKERSPKKKGTWGSNLKRHPAPPQKKHTLXRTNGKEPELLEPIPYEFHGHN

SEQ ID NO: 43964 - protein, 54 aa, Homo sapiens
MKSLVLLLCLAQLWGCHSAPHGPGLIYRQPNCDDPETEEYKEARLVLDSVKLEA

SEQ ID NO: 43965 - protein, 132 aa, Homo sapiens
PTRTWTRGRIPRLSAPPSRGARGTMADPRVRQIKIKTGVVKRLVKEKVLYEKEPKQQEEKIEKMRAEDGENYDIKKQAEILQESRMMIPDCQRRLEAAYLDLQRILENEKDLEEAEEYKEARLVLDSVKLEA

SEQ ID NO: 43966 - protein, 145 aa, Homo sapiens
  DOMAIN (98)..(114): INTERLEUKIN-8 RECEPTOR SIGNATURE domain identified by eMATRIX, accession number PR00427E, p-value=9.446e-18, raw score of 7.08
LLLACRSMDCYLAIVHATRTLTQQRHLVKFICLGLRNLFLLLSLRILLFRRTFYPSNVSPVCYEDMGNNTANWWMLLRILPQSFGFIVPLLIMLFCYRFTLHTLFKAHMGQKHWTMWVIFADVLIILLCWLPYNLVLLADTIMGT

SEQ ID NO: 43967 - protein, 235 aa, Homo sapiens
  DOMAIN (215)..(231): INTERLEUKIN 8B RECEPTOR SIGNATURE domain identified by eMATRIX, accession number PR00573D, p-value=1.450e-20, raw score of 15.57
MVYEKGLTVKVGGWKETRLTRCLLLGNQLLASHSCYSHHQPPLLSWESLVPDTHLIQWLLYRKAESATVTDVYLLTLALADLFFSLTLPILAASKMNGWIFGTICARFTLHTLFKAHMGQKHWTMWVIFAVVLIFLLCWLPYNLVLLADTLMGTQMTNETCERRNDINQALDATEILGILHSYLNPLIYAFIGQKFCHGLLKIIAIHGLISKDSLPKDSRPSFVGSSSGHTSTTL

SEQ ID NO: 43968 - protein, 399 aa, Homo sapiens
  DOMAIN (313)..(330): INTERLEUKIN-8 RECEPTOR SIGNATURE domain identified by eMATRIX, accession number PR00427F, p-value=4.130e-22, raw score of 11.77
GTVKTSVATPITAGHSCSSGGVLQVKSPATQSGFKFTSKMEDFNMESDSFEDFWKGEDLSNYSYSSTLPPFLLDAAPCEPESLEINKYFVVIIYALVFLLSLLGNSLVMLVILYSRVGRSVTDVYLLNLALADLLFALTLPIWAASKVNGWIFGTFLCKVVSLLKEVNFYSGILLLACISVDRYLAIVHATRTLTQKRYLVKFICLSIWGLSLLLALPVLLFRRTVYSSNVSPACYEDMGNNTANWRMLLRILPQSFGFIVPLLIMLFCYGFTLRTLFKAHMGQKHRAMRVIFAVVLIFLLCWLPYNLVLLADTLMRTQVIQETCERRNHIDRALDATEILGILHSCLNPLIYAFIGQKFRHGLLKILAIHGLISKDSLPKDSRPSFVGSSSGHTSTTL

SEQ ID NO: 43969 - protein, 257 aa, Homo sapiens
  DOMAIN (164)..(196): Fumarate reductase / succinate dehydrogenase FAD-binding site proteins domain identified by eMATRIX, accession number BL00504G, p-value=2.588e-30, raw score of 10.93
RRLYHQRTDHHRNTFRNRGAVLLYPTGIAGAGVLVTEGCRGEGGYLLNKHGERFMERYAPNAKDLAGRDVVARSIMIEIREGRGCDGPWGPHAKLKLDHLGKEVLESRLPGILELSRTFAHVDPVKEPIPVIPTCHYMMGGIPTKVTGQALTVNEKGEDVVVPGLFAVGEIACVSVHGANRLGGNSLLDLVVFGPAASLHLQKSIAEQGALHNTQEQGGQGANAPLLFSHKHYLISCLGSHSLPMLGHEIGVRFSSP

SEQ ID NO: 43970 - protein, 130 aa, Homo sapiens
  DOMAIN (35)..(86): Fumarate reductase / succinate dehydrogenase FAD-binding site proteins domain identified by eMATRIX, accession number BL00504E, p-value=3.813e-11, raw score of 24.86
LPSDYLLGTVFWINGIPEPLLGRLRGQYMCGIRHMQCEGCTLWKPEGFNICRKPFHVAQNGIAGAGVLVTEGCRGEGGYLLNKHGERFMERYECTHHSHVVGGSRIWFILQHDASLCWKRNRHTFARFSR

SEQ ID NO: 43971 - protein, 196 aa, Homo sapiens
  DOMAIN (6)..(16): PHTHALATE DIOXYGENASE REDUCTASE FAMILY SIGNATURE domain identified by eMATRIX, accession number PR00409G, p-value=1.818e- 09, raw score of 11.40
  misc_feature (1)...(196): Xaa = X or * as defined in Table 2
TYPEAWKLYYRSRXSRDLRKYHAHSVSPXQDQRYTSXKILKCDEHIQKLGSCITDPGNRETSGNTMHTVFHRDKTKDTHPESCCSSEKGGQPLPWFEHRKNVPQFAEPTETLFGPDSGKGAKSLVELLDESECTSDEEIFISQDEIQSFMANNQSFYSNREQYRQHLKEKFNKYCRLNDHKRPICSGWVDNGWEAN

SEQ ID NO: 43972 - protein, 67 aa, Homo sapiens
DESECTSDEEIFISQDEIQSFMANNQSFYSNREQYRQHLKEKFNKYCRLNDHKRPICSGWLTTAGAN

SEQ ID NO: 43973 - protein, 231 aa, Homo sapiens
VRAGYSYSLTNSQMNKEVSQEKETDFIENSSCKACGSTEDGNTCVEVIVTNENTSCTCPSSGNLLGSPKIKKGLSPHCNGSDCGYSSSMEGSETGSREGSDVACTEGICNHDEHGDDSCVHHCEDKEDDGDSCVECWANSEENDTKGKNKKKKKKSKILKCDEHDESECTSDEEIFISQDEIQSFMANNQSFYSNREQYRQHLKEKFNKYCRLNDHKRPICSGWLTTAGAN

SEQ ID NO: 43974 - protein, 522 aa, Homo sapiens
  DOMAIN (11)..(56): Cytosolic fatty-acid binding proteins domain identified by eMATRIX, accession number BL00214B, p-value=4.767e-19, raw score of 26.51
MAKPDCIITCDSKNLTIKTESTLKTTQFSGTLGEKFEENTADGRRTQTVCNFTDGRSEDTEMNVLISALQEHSSRNPVKNLLFRLGFRASLQPTVASPLSAGHGQHSPFSPGAAPAAGTEPKGEPKESGRGGAPPAERLAAVQTLANVIRPCYGPHGRQKFLVTMKGETVCTGCATAILRALELEHPAAWLLREAAQTQAENSGDGTAFVVLLTEALLEQAEQLLKFGLPRPQLREPTPQPLQRKASRPAGAAGINVAVVLGEVDEETLTLADKYGIVVIQARSRMEIIYLSEVLDTPLLPRLLPPQRPGKCQRVYRQELGDGLAVVFEWECTGTPALTVVLRGATTQGLRSAEQAVYHSIDAYFQPCQDPRLIPGAGATEMALAKMLSDKGSRLEGPNGPAFLAFARALKYLPKTLAENAGLAVSDVVAEMSGVHQGGNLLMGVGAEGIINVAQEGVWDTLIVKAQGFRAVAEVVLQLVTVDEIVVAKKSPTHQQIWNPDSKKTKKRPPPVEKKKILGMNN

SEQ ID NO: 43975 - protein, 79 aa, Homo sapiens
CTWKIKTFTLFLQTVCNFTDGALVQHQEWDGKESTITRKLKDGKLVVVSVKLLCLSQLLVCIHSSHNCSISLIINRTQF

SEQ ID NO: 43976 - protein, 181 aa, Homo sapiens
  misc_feature (1)...(181): Xaa = X or * as defined in Table 2
RRPARAAVIKQPPAPGASQHAATPTQTPLCTPARPLPPMAHVQQLEGRWRLVDSKGFXXNTMKELGVTIALRKMGRNAQAQICIITSDGXNPSPLKTESTLKTTQFSCTLWGEKFEETTADGQKKLTNCLSTFPDGALVQHQEWDGERKSTITKKNXKDGEISWLECVMNNVTCTPDSMKK

SEQ ID NO: 43977 - protein, 31 aa, Homo sapiens
MVNVSGSNGSPLTQWNSSPTLRSPNPRAPSA

SEQ ID NO: 43978 - protein, 101 aa, Homo sapiens
  misc_feature (1)...(101): Xaa = X or * as defined in Table 2
LCELQKAIDLFTDAIKLNPRLAILYAKRASVFVKLQKPNAAIRDCDRAIEINPDSAQPYKWRGKAHRXILAWPFCMPRGPVSSSNYRSQMLPSETVTEPLK

SEQ ID NO: 43979 - protein, 577 aa, Homo sapiens
  DOMAIN (486)..(504): C-type lectin domain proteins domain identified by eMATRIX, accession number BL00615A, p-value=4.462e-10, raw score of 16.68
MDPRKVNELRAFVKTCKQDPSVPHAEKMHFLRERVESMAGKVPPATQKAKSEENTKEEKPDSTDAPQEMGDENAEITEEMMDQANEKVAAIEALNDGELQTAIDLFPDAIKLNPHLAILYAKTAAQPYKWREKAHRLSLQLDYDEDASAMLKEVQPGAQKIAEHRRKYERKREEQEIKERIERVKKAQEEHERAQREEEARRQSGAQYCSFPSGFPAGVPGNCPRRMSGMGGGMAGMARIPGLNEILSDPEILAAMQDPEIMLAFQDVAQDPANMSKYQRNTKTMHLISRLSAKFGEKSLEQLRETFDHEKLSADSNHLIISALLSVAMALANCHYTPQTYLRKKCPVEDSTVSVLIVRTFLSFIKSLGVKSQPLPPSAVAPGQPGRKALIFPEPPCTVPANFIPIFTDEAEARGPEGLLRRSGSGYEGSTSWKAALEDTTTRLLLGAIAVLLFAILVVMSILASKGCIKCEAPCPEDWLLYGRKCYFFSEEPRDWNTGRQYCHTHEAVLAVIQSQKELEFMFKFTRREPWIGLRRVGDEFHWVNGDPFDPDTFTIAGPGECVFVEPTRLVSTECLM

SEQ ID NO: 43980 - protein, 369 aa, Homo sapiens
  DOMAIN (235)..(270): Troponin domain identified by eMATRIX, accession number PF00992A, p-value=8.461e-09, raw score of 16.67
MDPRKVNELRAFVKMCKQDPSVLHTEEMRFLREWVESMGGKVPPATQKAKSEENTKEEKPDSKKVEEDLKADEPSSEESDLEIDKEGVIEPDTDAPQEMGDENAEITEEMMDQANDKKVAAIEALNDGELQKAIDLFTDAIKLNPRLAILYAKRASVFVKLQKPNAAIRDCDRAIEINPDSAQPYKWRGKAHRLLGHWEEAAHDLALACKLDYDEDASAMLKEVQPRAQKIAEHRRKYERKREEREIKERIERVKKAREEHERAQREEEARRQSGAQYGSFPGGFPGGMPGNFPGGMPGMGGGMPGMAGMPGLNEILSDPEVLAAMQDPEVMVAFQDVAQNPANMSKYQSNPKVMNLISKLSAKFGGQA

SEQ ID NO: 43981 - protein, 148 aa, Homo sapiens
  DOMAIN (17)..(32): WILM'S TUMOUR PROTEIN SIGNATURE domain identified by eMATRIX, accession number PR00049D, p-value=7.143e-10, raw score of 0.00
MEADGPASLQELPPSPRSPSPPPSPPPLPSPPSLPSPAAPEAPELPEPAQPSEAHARQLLLEEWGPLSGGLELPQRLTWKLLLLRRPLYRNLLRSPNPEELSQIPPFSPVLCLLLVQPHHASPEQGGTSTWALATPIPTVLSEAARGR

SEQ ID NO: 43982 - protein, 262 aa, Homo sapiens [sequence omitted]

SEQ ID NO: 43983 - protein, 247 aa, Homo sapiens
KCYSHSWHLLQLPVLPTPFFPFPNPSLGQSPEKTGSNPSSAMTCRLKQVVSQLSDLIPPLQNGKYDFPHKDIATAFMFESSLSLAVTKWGLKASRPSPKAPGHLCQQHVSARQQKQEESWLEDTYPPKTEEEAVRILSSSYIRLRHFLFTGHYKTPVPSSFALTFYKSVNVLENLKVQVLLERDANLDAKRGFLDLAKERIQASLILQSSSIQEPDDFPEMKIQSCLSCLIPSVTLTAIRLEPKLFM

SEQ ID NO: 43984 - protein, 450 aa, Homo sapiens
  misc_feature (1)...(450): Xaa = X or * as defined in Table 2
RREKMAELKYISGFGNECSSEDPRCPGSLPEGQNNPQVCPYNLYAEQLSGSAFTCPRSTNKRSWLYRILPSVSHKPFESIDEGHVTHNWDEVDPDPNQLRWKPFEIPKASQKKVDFVSGLHTLCGAGDIKSNNGLAIHIFLCNTSMENRCFYNSDGDFLIVPQKGNLLIYTEFGKMLVQPNEICVIQRGMRFSIDVFEETRGYILEVYGVHFELPDLGPIGANGLANPRDFLIPIAWYEDRQVPGGYTVINKYQGKLFAAKQDVSPFNVVAWHGNYTPYKYNLKNFMVINSVAFDHADPSIFTVLTAKSVRPGVAIADFVIFPPRWGVADKTSGPPYYHRNCMKRFMELIRGQFEQKQGWFLPGGRGSLHSTMTPHGPDADCFEKASKVKLALKRIADGTMAFMFXSSFNLAGPKWGLQAPRVLDKNYPKCWEPLKSPFTPNSRNPAEPN

SEQ ID NO: 43985 - protein, 52 aa, Homo sapiens
MLLSPHTKYSIMINEARPYNYPVPVCNDGNMPDVPSHPQDPQGPSLEWLKKL

SEQ ID NO: 43986 - protein, 99 aa, Homo sapiens
SLLLSICQTHSPSSFLPLLARSCDPLEENRHSGFWNFLPFALVSPHLHGFPYLWCLMLVTCQRPAGALLYEVSVGPYWKVSPSQETWGSVTHLRRQSDL

SEQ ID NO: 43987 - protein, 380 aa, Homo sapiens
  DOMAIN (279)..(322): kw TRANSCRIPTASE REVERSE II ORF2 domain identified by eMATRIX, accession number DM01354T, p-value=1.000e-40, raw score of 9.48
MRRNQRKKAENSKNQNASSPPKDHNSSPAREQNWTENEFDKLTEVGFRSDGENGTKLENTLQDIIQENFPNLARQANIQIQEIQTMPQRYSSRRATSGHITIRFTKVEMREKMLRAAKEKEIQTAIREYYKHLYTNKLENLEETDKFLDTCTLPSLNQEEFESLNRSITSSEIEAVIDYQPKRVQDQMDSQPNFTRGMQDWFNICKSINVIHHISRTNDKKHMIISIDAEKAFDKIQDVLMLKTLNKLGIDGTYIKIMRVIYDKHTVNIILNGKKLEVLPWKTGTRQGCPLSPLLFNIVLEVLARAIRQEKETKGIQIGREEVKLSLLADDMMVYLENPMVSAQNLLKLISNFSKVSGYKINVQKSQAFLYTNNKQTAKS

SEQ ID NO: 43988 - protein, 517 aa, Homo sapiens; identical to SEQ ID NO: 40924
  DOMAIN (349)..(360): RNase H domain identified by eMATRIX, accession number PF00075B, p-value=1.000e-13, raw score of 12.56
  misc_feature (1)...(517): Xaa = X or * as defined in Table 2

SEQ ID NO: 43989 - protein, 166 aa, Homo sapiens
FLKMMCPQFVPSDVQMCPEFLPPGGFVVSLTSGVKLQTFTTEKFSKSPPVPEAQSASPLTGIHCGTLRHLVWALWQPRGSSSQTIKRKRGEARKRWRPGIVANHPVKREWRSMHGIQPLIKPSRHQPAALTIIMFFVATWMQLEALILSKLMQKQKTKYHMFLFIS

SEQ ID NO: 43990 - protein, 1361 aa, Homo sapiens
  DOMAIN (1236)..(1286): ENV polyprotein (coat polyprotein) domain identified by eMATRIX, accession number PF00429, p-value=3.631e-17, raw score of 31.08
  misc_feature (1)...(1361): Xaa = X or * as defined in Table 2
SNDRTEDDCGKHPFMSSPPTEPWVCLIIEGQEIDFLLDTGTTFSVLIPCLGRLSSRSVTIQGILGQPVTRYFSHLLSCNWETLLFSHAFLVMPESPTPLLGRDILAKAGAIISMKTGNKLPICCPLLEGINPEVWALEGQFGRAKNAHPLQIRLKDPISFPYQRQYPLRPEAHKGLQDIVKHLKAQDSVRKCSSPCNTPILGVQKLNSQWRLVQDLRLINEAVIPLYPVVRNPYTLLSQVPEEAEWFTVLDLKDAFFCIPLHSDSQFLFAFEDPTDHTSQLMWMVLPQRFRDSPHLFGQAQAQDLGHFSSPGTLVLQYSEIAKTLYTLIKEMERANTHLVEWEPEAETAFETLKQALVQAPALSLPTGQNFALYVIERAGIALGVLTQTHRTTPQPVAYLRTSTQLAELVALTRALELGKGKRINVYTDSKYAYLILHAHAAIWKEREFLTSGGTPLNHHKEIMELLHTVQKPKEVAVLHCQSHQKGXEERDKFPTSQQAVPSMDAHWDLDSDHGDWSRKHLLTCVLEGLRRIRKKPMNYSMMSTITQGKEENPSAFLEQLQEALRKYTPLSPNSLVGQLILKDKFITQSTTDIRRKLQNRDQEEQAQKEKRDQRKAIALVMALRQTLVVQRGQKMEQANHLVGLVTSVVCKDTLKKIVQRETSRPIVHVHYTEAITGSHTTQRAKLLWARSPQPDDPMTGLRMTAASTRSCHHPLTEPWVCLIIEGQEIDFLLDTGTTFSVLIPCLGRLSSRSVTIQGILGQPVTRYFSHLLSCNWETLLFSHAFLVMPESPTPLLGRDILAKAGAIISMKTGNKLPICCPLLEGINPEVWALEGQFGRAKNAHPLQIRLKDPISFPYQRQYPLRPEAHKGLQDIVKHLKAQDSVRKCSSPCNTPILGVQKLNSQWRLVQDLRLINEAVIPLYPVVRNPYTLLSQVPEEAEWFTVLDLKDAFFCIPLHSDSQFLFAFEDPTDHTSQLMWMVLPQRFRDSPHLFGQAQAQDLGHFSSPGTLVLQYSEIAKTLYTLIKEMERANTHLVEWEPEAETAFETLKQALVQAPALSLPTGQNFALYVIERAGIALGVLTQTHRTTPQPVAYLRTSTQLAELVALTRALELGKGKRINVYTDSKYAYLILHAHAAIWKEREFLTSGGTPLNTTRKLWSYCTQCKNPKRWQSYTAKAIRRARNGYCYRNWNSQFIYFSILLPHTLKGFLSLQEITKSILTLQSQIDCLAAVTLQNCQGLDLLTAEKGGLCTFLGEECCFYTNQSAIVRDAARHLQEKASEIRQCLSNSYTNHWSWATWLLPFLGPVAAILLSFAFGPCIFNPLVKFVSSRIKAIKLQMILQMEPQISSANNFYRGPLE

SEQ ID NO: 43991 - protein, 106 aa, Homo sapiens
MGRNQRKKAENSKNQNASSPPKDHNSSPAREQNWTENEFDKLTEVGFRSDGENGTKLENTLQDIIQENFPNLARQANIQIQEIQTMPQRYSSRRATSGHITIRFTK

SEQ ID NO: 43992 - protein, 1724 aa, Homo sapiens; identical to SEQ ID NO: 35679
  DOMAIN (316)..(361): kw TRANSCRIPTASE REVERSE II ORF2 domain identified by eMATRIX, accession number DM01354N, p-value=1.000e-40, raw score of 13.17

SEQ ID NO: 43993 - protein, 697 aa, Homo sapiens; identical to SEQ ID NO: 40926
  DOMAIN (569)..(580): RNase H domain identified by eMATRIX, accession number PF00075B, p-value=1.000e-13, raw score of 12.56

SEQ ID NO: 43994 - protein, 584 aa, Homo sapiens
  DOMAIN (242)..(253): RNase H domain identified by eMATRIX, accession number PF00075B, p-value=1.000e-13, raw score of 12.56
  misc_feature (1)...(584): Xaa = X or * as defined in Table 2
GPRGTGPKGKARSEKGCSLSHGPQTNKPLVVQKGQKMEQANHPVGLVISVVYKDILKKIVQRETSHPLIHVRYAEAITGRRTAPEDKGSLGRDMLAKAGAIIYMNMGNKLPIWCHLLEEGIYLEVWALEGQFGRAKNACPVQIRLKDPTTFPYQRQYPLRPEAHKGLQDIVKHVKAQGLVKKCSSPCNTPILGVQKPNGQWSLVQDLRLISEAVIPLYPVVPNPYTLLSQIPEEAEWFPVLDLKDAFFCIPLHYDSHDSQFLFAFEDPTDHTSQLIWTVLPQGFRDSPHLFGQALAQDLGHFSSPGTLVLQYVDDLLLATSSEASCQQATLDLLNFLANQGYKASRSKAQLCLQQVKYLGLILARGTRTLGKERIQPILAYPHPKTLKQLWGFLEITGFCXLWIPGYSKIARPLYTLIKETQRANTHLVEWESEAETAFKTLKQALVQAPGLSLPTGQNFSLYVTERAGIALGVLTQTRGTTPQPVAHLSKETDVVAKGWPHCLRVVAAVAVLVSEAIKIIQGKDLIVWTTHEVNGILGAKGSLWLSDKRLFRYQALCLEGLVLQIRTSCGSHLAVTRLWALYF

SEQ ID NO: 43995 - protein, 295 aa, Homo sapiens
  DOMAIN (13)..(23): Eukaryotic  RNA-binding region RNP-1 proteins domain identified by eMATRIX, accession number BL00030B, p-value=4.789e- 09, raw score of 7.03
IQLTIDSETGRSKGYGFITFSDSECAKKSLEQFNGFELAGRPMKVGHVIERADASSTSSFLDSDELERTRIDLGTTGRLQLVARLAEDTEAITIPMSIPIDSFGSSGSTYKWNHMEADRRIRVSHVEKNQGILAALKRIMAHEDVHILIPGTCEYFILHVNFEQHFHCSGTWMEHEAIIFGKLTQEKKNQTPHVLTYKLELNDENAWTHREEQYTLGPIKGWRVGESDLSNHEGSGCLGRTWVAWGVCASKRSQEARASKITLENSHPRQAGRGKPAPFAEPRSLGELEAIAAAR

SEQ ID NO: 43996 - protein, 580 aa, Homo sapiens
  DOMAIN (15)..(30): POLLEN ALLERGEN POA PI SIGNATURE domain identified by eMATRIX, accession number PR00833H, p-value=6.250e-10, raw score of 2.30
GWAVPRPGPRGLTVATEAAAAAAAAAAAAISSRTRAPQAPEGRNRRLEKMADDIDIEAMLEAPYKKDENKLSSANGHEERSKKRKKSKSRSRSHERKRSKSKERKRSRDRERKKSKSRERKRSRSKERRRSRSRSRDRRFRGRYRSPYSGPKFNSAIRGKIGLPHSIKLSRRRSRSKSPFRKDKSPVREPIDNLTPEERDARTVFCMQLAARIRPRDLEEFFSTVGKVRDVRMISDRNSRRSKGIAYVEFVDVSSVPLAIGLTGQRVLGVPIIVQASQAEKNRAAAMANNLQKGSAGPMRLYVGSSHFNITEDMLRGIFEPFGRIESIQLMMDSETGRSKGYGFITFSDSECAKKALEQLNGFELAGRPMKVGHVTERTDASSASSFLDSDELERTGIDLGTTGRLQLMARLAEGTGLQIPPAAQQALQMSGSLAFGAVGRNLFCYRFAKQDFSHQTETSALSAAASVQPLATQCFQLSNMFNPQTEKEVGWDTEIKDDVIEECNKHGGVIHIYVDKNSAQGNVYVKCPSIAEAIAAVNALHGRWFAGKMITAAYVPLPTYHNLFPDSMTATQLLVPSRR

SEQ ID NO: 43997 - protein, 66 aa, Homo sapiens
  misc_feature (1)...(66): Xaa = X or * as defined in Table 2
LHEGLLPXRGHALLSGALHGXCVGSCLFSTPRCLTSSTACGYPSSCTPGSCTAWCPSASRRLSCWT

SEQ ID NO: 43998 - protein, 140 aa, Homo sapiens
  DOMAIN (24)..(48): MYOGLOBIN SIGNATURE domain identified by eMATRIX, accession number PR00613B, p-value=2.581e-10, raw score of 9.02
MTLGKSRGIPQVWDLIAGHEAQFGAELLLRLFTVYPSTKVYFPHLSACQDATQLLSHGQRMLAAVGAAVQHVDNLRAALSPLADLHALVLRVDPANFPLLIQCFHVVLASHLQDEFTVQMQAAWDKFLTGVAVVLTEKYR

SEQ ID NO: 43999 - protein, 396 aa, Homo sapiens
  DOMAIN (70)..(81): ALPHA HAEMOGLOBIN SIGNATURE domain identified by eMATRIX, accession number PR00612B, p-value=3.483e-10, raw score of 10.92
MLSAQERAQIAQVWDLIAGHEAQFGAELLLRSVEAGSPGAQEVEMRVLGAWAANAIQGPSGADPRGSGRLFTVYPSTKVYFPHLSACQDATQLLSHGQRMLAAVGAAVQHVDNLRAALNPLAELHALVLRVDPANFSVRPFRPGQWTRMGETAASRHLGTPGDTWGGVRGEDWETLLHLRDTTWGRGQGPREPVVSMEEGGQLMDLLVNTGADFSVVTRPISTHKKNYAAIMGATRAKDVTPFSKYRRCVIGGQEVQHEFLYMPNSSMPLLRRDLLQKLQAQISFTPKGNVTLEIGKPKAMMTVLRDLEKLASWHRITIIYLLSGVTGNLAKCHLPAIPSRGGSCWAPSSASWPASSVEALPELGRSWARPWRAFFKLAGCGCSSSFTFGACCRGI

SEQ ID NO: 44000 - protein, 87 aa, Homo sapiens; identical to SEQ ID NO: 38944
  misc_feature (1)...(87): Xaa = X or * as defined in Table 2

SEQ ID NO: 44001 - protein, 233 aa, Homo sapiens
MAVNKTYKISILMGFNLWKIYKHKDLIRIDDISCTLANNEEGIITKMLVTESVPIERGLDPHPKRGFLVLAQERIQGESIVQSKSQFIMKAGIQQARREGDSEVWQFPVRIHPPDQQGNITATFEPFPFKFGKAHLVDYIKACDDIRAEQDCEWFAFTIPAVKNLQPAKHFHCFTDGSSHGKAYYSESRGQNQQPIWIPSRHLKTYHEPDAEEKISGGNCGPHPHPRLQPCPD

SEQ ID NO: 44002 - protein, 160 aa, Homo sapiens; identical to SEQ ID NO: 34931
  DOMAIN (89)..(106): GLYCERALDEHYDE-3-PHOSPHATE DEHYDROGENASE SIGNATURE domain identified by eMATRIX, accession number PR00078C, p-value=5.500e- 20, raw score of 15.99

SEQ ID NO: 44003 - protein, 120 aa, Homo sapiens
  DOMAIN (97)..(115): GLYCERALDEHYDE-3-PHOSPHATE DEHYDROGENASE SIGNATURE domain identified by eMATRIX, accession number PR00078D, p-value=2.800e- 21, raw score of 11.49
RRFRAGAGYVVESTGVFTTMEKAGAHLQGGAKRVIISAPSADTPMFVMGVNHEKYDNSLKIISNASCTTNCLAPPASTGAAKAVGKVIPELNGKLTGMAFRVPTANVSVVDLTCRLEKPA

SEQ ID NO: 44004 - protein, 83 aa, Homo sapiens; identical to SEQ ID NO: 34933
  DOMAIN (52)..(71): GLYCERALDEHYDE-3-PHOSPHATE DEHYDROGENASE SIGNATURE domain identified by eMATRIX, accession number PR00078B, p-value=8.116e- 17, raw score of 7.45
  misc_feature (1)...(83): Xaa = X or * as defined in Table 2

SEQ ID NO: 44005 - protein, 357 aa, Homo sapiens
  DOMAIN (252)..(270): GLYCERALDEHYDE-3-PHOSPHATE DEHYDROGENASE SIGNATURE domain identified by eMATRIX, accession number PR00078D, p-value=2.800e- 21, raw score of 11.49
GTRRQSAASSFASPAEPHRSDTMGKVKVGVNGFGRIGRLVTRAAFNSGKVDIVAINDPFIDLNYMVYMFQYDSTHGKFHGTVKAENGKLVINGNPITIFQERYPSKIKWGDAGAEYFVESTGVFTTMEKAGAHLQGGAKRVIISAPSADAPMFVMGVNHEKYDNSLKIISNASCTTNCLTPLAKVIHDNFGIVEGLMTTVHAITATQKTVDGPSGKLWRDGRGALQNIIPASTGAAKAVGKVIPELNGKLTGMAFRVPTANVSVVDLTCRLEKPAKYDDIKKVVKQASEGPLKGILGYTEHQVVSSDFNSDTHSSTFDAGAGIALNDHFVKLISWYDNEFGYSNRVVDLMAHMASKE

SEQ ID NO: 44006 - protein, 160 aa, Homo sapiens; identical to SEQ ID NO: 34931
  DOMAIN (89)..(106): GLYCERALDEHYDE-3-PHOSPHATE DEHYDROGENASE SIGNATURE domain identified by eMATRIX, accession number PR00078C, p-value=5.500e- 20, raw score of 15.99

SEQ ID NO: 44007 - protein, 120 aa, Homo sapiens; identical to SEQ ID NO: 44003
  DOMAIN (97)..(115): GLYCERALDEHYDE-3-PHOSPHATE DEHYDROGENASE SIGNATURE domain identified by eMATRIX, accession number PR00078D, p-value=2.800e- 21, raw score of 11.49

SEQ ID NO: 44008 - protein, 83 aa, Homo sapiens; identical to SEQ ID NO: 34933
  DOMAIN (52)..(71): GLYCERALDEHYDE-3-PHOSPHATE DEHYDROGENASE SIGNATURE domain identified by eMATRIX, accession number PR00078B, p-value=8.116e- 17, raw score of 7.45
  misc_feature (1)...(83): Xaa = X or * as defined in Table 2

SEQ ID NO: 44009 - protein, 357 aa, Homo sapiens; identical to SEQ ID NO: 44005
  DOMAIN (252)..(270): GLYCERALDEHYDE-3-PHOSPHATE DEHYDROGENASE SIGNATURE domain identified by eMATRIX, accession number PR00078D, p-value=2.800e- 21, raw score of 11.49

SEQ ID NO: 44010 - protein, 67 aa, Homo sapiens
MWSVGVIIYVSLSGTFPFNEDEDIHDQIQNAAFMYPPNPWKEISHEDVDLIQYNTYILGCLSSHCTA

SEQ ID NO: 44011 - protein, 990 aa, Homo sapiens
  DOMAIN (375)..(391): Phorbol esters / diacylglycerol binding domain proteins domain identified by eMATRIX, accession number BL00479B, p-value= 5.235e-17, raw score of 12.57
NSFSPPPRPSPRPPPPPRPPLPILIPLPSPSPGTFPESFYFPSGLSEKEAPGSAAAKLSCCRAASPRPPLPGPAPRRAMSAPPVLRPPSPLLPVAAAAAAAAAALVPGSGPGPAPFLAPVAAPVGGISFHLQIGLSREPVLLLQDSSGDYSLAHVREMACSIVDQKFPECGFYGMYDKILLFRHDPTSENILQLVKAASDIQEGDLIEVVLSRSATFEDFQIRPHALFVHSYRAPAFCDHCGEMLWGLVRQGLKCEGCGLNYHKRCAFKIPNNCSGVRRRRLSNVSLTGVSTIRTSSAELSTSAPDEPLLQKSPSESFIGREKRSNSQSYIGRPIHLDKILMSKVKVPHTFVIHSYTRPTVCQYCKKLLKGLFRQGLQCKDCRFNCHKRCAPKVPNNCLGEVTINGDLLSPGAESDVVMEEGSDDNDSERNSGLMDDMEEAMVQDAEMAMAECQNDSGEMQDPDPDHEDANRTISPSTSNNIPLMRVVQSVKHTKRKSSTVMKEGWMVHYTSKDTLRKRHYWRLDSKCITLFQNDTGSRYYKEIPLSEILSLEPVKTSALIPNGANPHCFEITTANVVYYVGENVVNPSSPSPNNSVLTSGVGADVARMWEIAIQHALMPVIPKGSSVGTGTNLHRDISVSISVSNCQIQENVDISTVYQIFPDEVLGSGQFGIVYGGKHRKTGRDVAIKIIDKLRFPTKQESQLRNEVAILQNLHHPGVVNLECMFETPERVFVVMEKLHGDMLEMILSSEKGRLPEHITKFLITQILVALRHLHFKNIVHCDLKPENVLLASADPFPQVKLCDFGFARIIGEKSFRRSVVGTPAYLAPEVLRNKGYNRSLDMWSVGVIIYVSLSGTFPFNEDEDIHDQIQNAAFMYPPNPWKEISHEAIDLINNLLQVKMRKRYSVDKTLSHPWLQDYQTWLDLRELECKIGERYITHESDDLRWEKYAGEQRLQYPTHLINPSASHSDTPETEETEMKALGERVSIL

SEQ ID NO: 44012 - protein, 200 aa, Homo sapiens
  DOMAIN (108)..(124): Protein kinases ATP-binding region proteins domain identified by eMATRIX, accession number BL00107B, p-value=6.824e-09, raw score of 13.31
MRARTKAAEVRMKNLHHPGVVNLECMFETPERVFVVMEKLHGDMLEMILSSEKGRLPEHITKFLITQVKLCDFGFARIIGEKSFRRSVVGTPAYLAPEVLRNKGYNRSLDMWSVGVIIYVSLSGTFPFNEDEDIHDQIQNAAFMYPPNPWKEISHEGGKPGPPSSGEGESLWTLPVRTPLSEEIEFRPVSEEWKERDIAF

SEQ ID NO: 44013 - protein, 107 aa, Homo sapiens
  misc_feature (1)...(107): Xaa = X or * as defined in Table 2
MGRNQSRKAENTKNESASSPPKDRNSSPVREQSWTENEFDELTEVGFRKLVITNFSELKEHVLTDHKEAKNLEKSLEVVAREISQEKEIKVFNXEKRKSNCPCLQMT

SEQ ID NO: 44014 - protein, 327 aa, Homo sapiens
  DOMAIN (266)..(307): kw TRANSCRIPTASE REVERSE II ORF2 domain identified by eMATRIX, accession number DM01354I, p-value=1.000e-40, raw score of 15.55
MGRNQSKKAENSKNQSTSSPPKDLSSSPATEQSWMENDFDELTEVGFRRINSVEKTLNDLMELKTVAQELHDACTSFNSRFNQAEERLSVIEDQMNEIKREDKIKRDKEGHYLMVKGSIRQEELTILNIYATNTGAPRFIKKVLRDLQRDLDSHTVIVGDFNTPLSILDRSMRQKVNKDIQDLNSALHQADLIDIYRTLHPKSIECTFLAPHHTYSKIDHIVGSKALLSECKRTEIITNCLSDHSAIKLELRIKKLTQNCTTTWELNNLLLNDYWVNNEMKAEIKMFFETNENKDTTYQNLWDTFKAVCSGKLTPTRESRKDLKWTP

SEQ ID NO: 44015 - protein, 245 aa, Homo sapiens
MGRNQSRKAENSKNQSTSSPPKDCSSSPAREQNWTKNEFDELTEVGFRRSLIANFSKLKECVLTHRKEAKNLEKSDRENGTKLENTLQDIIQENFPNLARQANIQIQEIQRIPQRYSLRRATPRHIIVRFTKVEMKEKMSRAAREKGRVTHKGKPIRLTADLSAENLQARREWGPVFNILKNFQPRIPYPAKLSFISGGEIKSFTDKQMLRDFFTTRPALQELLKEALNMERNNQYKPLQKHAKW

SEQ ID NO: 44016 - protein, 425 aa, Homo sapiens
MKEQNGGGGREEDHKDKGIRQLPSLLPSAGEAKSDKPEHHNRYRKEIASFEDEKRAMGVAKMAEQEQLQSAAPSMTNAEVGTAHGGRAEAGRGVDSPGKRKVLGDFPFLAKGSRDRLPGKAGHSLPKYYAFTKVLATGRQERNSINISKKVIYTKTTSTGHQHQRPKIDKTTKMGRNQSRKAENSKNESTSSPPKGHSSSPATEQSGTENDFDELTEVGFRRSVTTNFYELKEDVQTHRKEAKNLEKRLDKWLTRINSVEKTLSDMMELKTMARELRDTCSSFKSRFNQVEERVSVIEDPIYELSREDKVRDKKVRNKQSLQEIWDYVKRPNLRVIGVPESDGENGTKLENMLQDIIQENFPNLARQANIQIQEIQRTPQRYSSRRATPRHIIVRFTKVEMKQKVLRAAREKGPVTHKGNSGSLS

SEQ ID NO: 44017 - protein, 528 aa, Homo sapiens
MVRSLSPGASAPPKAYQDAVLPSGALAEMQDPIIVSETPRVTRSAFLRDVHKGIASSVVSGMKNKKRPNSPEHETGLINSNIVRGNVWETLTEVIEKPANEGSALENGLPAHIPAEEGDKGLILLANFAKQIDKPTNKSPANAGIQPTSRKVPQGKMYAVSEWHCDVSSPFHTEPQIQQALWAESCPSRLEHEEAGRRQSRSPARLRTLGLYPCRSAPWMPATSLSNATVYSAHILAADKAIHLRSQRLFGILATHRKWEHVPITCTGASRKCFSPGNKKKKEEEMTIFCKHREKLAGQGAPVRTVSHSCSPHLGSFAQPNWETPPSRGRQIPRQTGSGVYLQQTPTDLQLRNLTVRRKTNKHKGTAATSTKRTTHTKTPSVGHHHQRRKVDKTTKMGRNQSRRAENSKNQSASSPSKDRSSSPATEQSWMENDFDELTEVGFRRSVITNFSELKEDVRIHRKEAKNLEKRLDEWLTRINSVEKNLNDLMELKTMAQELHDTCTSFNTQFDQVEERVSVIEDQINEIK

SEQ ID NO: 44018 - protein, 164 aa, Homo sapiens
  misc_feature (1)...(164): Xaa = X or * as defined in Table 2
SHLPMNPANTRSQRNPTKKKQKKNVCDNIRELEQQMEDAYRGTKRKMLPSSSSRMRSDGFDEESQRYYWRPKNEISGTLEDDFLKAKSWNRKFYDYEANMPDRWGQVAIKSYTLKNLKQTVVISKILPTGRKHLPRXSHLPMNPANTRSQRNPTKKKQKKNVCG

SEQ ID NO: 44019 - protein, 218 aa, Homo sapiens
  DOMAIN (125)..(177): MARCKS family proteins domain identified by eMATRIX, accession number BL00826B, p-value=7.698e-09, raw score of 12.51
MGRNQSRKAEDSKNESTSSPPKDRSSSPAREQSWTENDFDELTEVGFRSRMRSDGFDEESQRYYWRPKNEISGTLEDDFLKAKSWNKKFYDYEANMPDRWGHSGYKELYPEEFETDSSDQQDITNGKKTSPQVKSSTHESRKHKKSKKSHKKKQKKRSHKKQKKSKKEATDITADSSSEFSEETGASGTRKGKQPHKRKKKSRKKSLKKPDFILRGRK

SEQ ID NO: 44020 - protein, 554 aa, Homo sapiens; identical to SEQ ID NO: 37596

SEQ ID NO: 44021 - protein, 788 aa, Homo sapiens
HRCQYNRCRPQCSSPPYKAPTTLPPRAPSYHSSRAAVSVAATNLVRPAAEPYAGSSLPQAVEQKIVPLTHHPQPAVHISAHNLPPSTTPATAGSVASDSQPTPPQPPAIPQRVPRTSCLPQGVQPWAVSPKRTPNPCPQRKSSHCRPPFDRSIPTTNRRQPVPWLQLAADGELLRAQLRGPGMGNHRPYAGGWSRGRTARLAAVCGDGNGESSVVQEPGQEQLYWDTLKQLSKHIKPLHRVVNKIDKSEGPLKTLPKCEITLEKLKNDMAVVSGMLGTPGGSGLPQELLGAPLEGPSWSGWPAAPGAADQTAVPMPAAPGCCPSQYLLTLFSHSLYRTFAPAMTAIHGPLITYIQLGWALQRADGQPWTMCAHCVVCTRKHRLEDDERQSIPSMLQGEVARLDPKCMINLDSSRCSNNGTVHLSLIFKEKVTSLKFKEKPTGLETRSCKYLLLSMVKLIHADPELLLCTSLEVALYMFLRNPDTEAVLVAMSCFRHLCEEADTRCGVDEVSTWEDTHAKWEQATKLILSYPKAQMEDGQLHKTIVKRRMSHVSGGGPIDLSDTDSLQAWINMTSFLCALGGVCLQQRRNSGLATYSPPMGPVSEHKGSMISVMSSEGNADTPVSKYMDQLLSLMVCKLEKVGLQIRTNGKDLVLLTDTNTQFVEETLAILKNLLDNHTEGSSEHLEQASIETMMLNLVRYVCVLGNMVHAIQIKTKLCQLVEVTMARRDDLSFCREMKFRNKMVEYLTDWVMGTSNQAADDDVKCLTRLSGKINVRERYVWEVIVVSL

SEQ ID NO: 44022 - protein, 74 aa, Homo sapiens
VLLTDTNTQFVEQTLDIMKNLLDNHTEGSPEHLEQASIETMMLNLVRNKMVEYLTDWVMGTSNQAADDDVKCLT

SEQ ID NO: 44023 - protein, 2159 aa, Homo sapiens
  DOMAIN (742)..(753): Ras GTPase-activating proteins domain identified by eMATRIX, accession number BL00509B, p-value=2.080e-11, raw score of 10.28
ICRQAQTKLEVALYMFLWNPDTEAVLVAMSCFRHLCEEADIRCGVDEVSVHNLLPNYNTFMEFASVSNMMSTGRAALQKRVMALLRRIEHPTAGNTEAWEDTHAKWEQATKLILNYPKAKMEDGQAAESLHKTIVKRRMSHVSGGGSIDLSDTDSLQEWINMTGFLCALGGVCLQQRSNSGLATYSPPMGPVSERKGSMISVMSSEGNADTPVSKFMDRLLSLMVCNHEKVGLQIRTNVKDLVGLELSPALYPMLFNKLKNTISKFFDSQGQVLLTDTNTQFVEQTIAIMKNLLDNHTEGSSEHLGQASIETMMLNLVRYVRVLGNMVHAIQIKTKLCQLVEVMMARRDDLSFCQEMKFRNKMVEYLTDWVMGTSNQAADDDVKCLTRDLDQASMEAVVSLLAGLPLQPEEGDGVELMEAKSQLFLKYFTLFMNLLNDCSEVEDESAQTGGRKRGMSRRLASLRHCTVLAMSNLLNANVDSGLMHSIGLGYHKDLQTRATFMEVLTKILQQGTEFDTLAETVLADRFERLVELVTMMGDQGELPIAMALANVVPCSQWDELARVLVTLFDSRHLLYQLLWNMFSKEVELADSMQTLFRGNSLASKIMTFCFKVYGATYLQKLLDPLLRIVITSSDWQHVSFEVDPTRLEPSESLEENQRNLLQMTEKFFHAIISSSSEFPPQLRSVCHCLYQVVSQRFPQNSIGAVGSAMFLRFINPAIVSPYEAGILDKKPPPRIERGLKLMSKILQSIANHVLFTKEEHMRPFNDFVKSNFDAARRFFLDIASDCPTSDAVNHSLSFISDGNVLALHRLLWNNQEKIGQYLSSNRDHKAVGRRPFDKMATLLAYLGPPEHKPVADTHWSSLNLTSSKFEEFMTRHHQVHEKEEFKALKTLSIFYQAGTSKAGNPIFYYVARRFKTGQINGDLLIYHVLLTLKPYYAKPYEIVVDLTHTGPSNRFKTDFLSKWFVVFPGFAYDNVSAVYIYNCNSWVREYTKYHERLLTGLKGSKRLVFIDCPGKLAEHIEHEQQKLPAATLALEEDLKVFHNALKLAHKDTKVSIKVGSTAVQVTSAERTKVLGQSVFLNDIYYASEIEEICLVDENQFTLTIANQGTPLTFMHQECEAIVQSIIHIRTRWELSQPDSIPQHTKIRPKDVPGTLLNIALLNLGSSDPSLRSAAYNLLCALTCTFNLKIEGQLLETSGLCIPANNTLFIVSISKTLAANEPHLTLEFLEECISGFSKSSIELKHLCLEYMTPWLSNLVRFCKHNDDAKRQRVTAILDKLITMTINEKQMYPSIQAKIWGSLGQITDLLDVVLDSFIKTSATGGLGSIKAEVMADTAVALASGNVKLVSSKVIGRMCKIIDKTCLSPTPTLEQHLMWDDIAILARYMLMLSFNNSLDVAAHLPYLFHVVTFLVATGPLSLRASTHGLVINIIHSLCTCSQLHFSEETKQVLRLSLTEFSLPKFYLLFGISKVKSAAVIAFRSSYRDRSFSPGSYERETFALTSLETVTEALLEIMEACMRDIPTCKWLDQWTELAQRFAFQYNPSLQPRALVVFGCISKRVSHGQIKQIIRILSKALESCLKGPDTYNSQVLIEATVIALTKLQPLLNKDSPLHKALFWVAVAVLQLDEVNLYSAGTALLEQNLHTLDSLRIFNDKSPEEVFMAIRNPLEWHCKQMDHFVGLNFNSNFNFALVGHLLKGYRHPSPAIVARTVRILHTLLTLVNKHRNCDKFEVNTQSVAYLAALLTVSEEVRSRCSLKHRKSLLLTDISMENVPMDTYPIHHGDPSYRTLKETQPWSSPKGSEGYLAATYPTVGQTSPRARKSMSLDMGQPSQANTKKLLGTRKSFDHLISDTKAPKRQEMESGITTPPKMRRVAETDYEMETQRISSSQQHPHLRKVSVSESNVLLDEEVLTDPKIQALLLTVLATLVKYTTDEFDQRILYEYLAEASVVFPKVFPVVHNLLDSKINTLLSLCQDPNLLNPIHGIVQSVVYHEESPPQYQTSYLQSFGFNGLWRFAGPFSKQTQIPDYAELIVKFLDALIDTYLPGIDEETSEESLLTPTSPYPPALQSQLSITANLNLSNSMTSLATSQHSPASLPCSNSAVFMQLFPHQGIDKENVELSPTTGHCNSGRTRHGSASQVQKQRSAGSFKRNSIKKIV

SEQ ID NO: 44024 - protein, 2871 aa, Homo sapiens; identical to SEQ ID NO: 37602
  DOMAIN (897)..(918): COAGULIN SIGNATURE domain identified by eMATRIX, accession number PR00763G, p-value=5.688e-09, raw score of 3.24

SEQ ID NO: 44025 - protein, 2891 aa, Homo sapiens; identical to SEQ ID NO: 37599
  DOMAIN (897)..(918): COAGULIN SIGNATURE domain identified by eMATRIX, accession number PR00763G, p-value=5.688e-09, raw score of 3.24

SEQ ID NO: 44026 - protein, 1682 aa, Homo sapiens; identical to SEQ ID NO: 37598
  DOMAIN (57)..(100): kw TRANSCRIPTASE REVERSE II ORF2 domain identified by eMATRIX, accession number DM01354T, p-value=8.531e-40, raw score of 9.48

SEQ ID NO: 44027 - protein, 766 aa, Homo sapiens
  DOMAIN (636)..(653): Zinc finger C2H2 type, domain proteins. domain identified by eMATRIX, accession number BL00028, p-value=4.522e-12, raw score of 16.07
MTIVRSRMSHLSGGGCADLSDTDSLQEWINMTGFLCALGGVCLQQRSNSGLATYSPPMGPVSECQGSMISVMSSEGNAGTPVSKCMDQLLSLMVCNHEKVGLQIQANVKELVGLELSPALYLMLFNKLKNAISKFFDSQGQVLLTDTNTQFVEQTIAIMKNLLDNHTEGSSEHLGQASIEPMMLYLVRYVRVLGNMVHAIQIKTKLCQLVEVTMARRDDLLFCQEMKFRNKIVEYLTVWVMGTSNQAADDDVKCITRYFTLFMNLLSDCSEAEDESAQTGGRKRGMSRRLASRRHCAVLAMSNLLSASIDGGLMHSIETVLADGFEQLVELVTVMGDQGELPIAMALASVVPCSQWVPKNSHPSMVQIIELLICLCKPANLIIEKSASLLMTTYGSSLSDPVHLLEDWLPVSAEKDPFSSEYHCKVKQEEWKGILPEQGIEESFKKATLGKATLGRYESCGLENLCLWKNWESIGEGQKECYNLCSQYLTTSHNKNLTVKGDEEHRIFLKKPQFLPATPTEPCIPKTITNVMNVRKCFINPQSIHIQEKPYNPNECGETSNPSSKLTQHRRTYIGESSQRCNKKCIIVFSQSHLKRHKIINTGEKSVKCKERGKAFTRGLQLGHQKIHTGEKPYKCEKCDKAFKKSSHLAQHQRIHTGNKPIKESILERKPSNVKNVAKPLIEAHTLLSIREFTLEGNLSSVKKCGKAFNRASHLTQHQRIHTGEKHFTHKECGKAFNRGSHLTRHQRIHTGEKSFKCKECSKAFI

SEQ ID NO: 44028 - protein, 787 aa, Homo sapiens
  DOMAIN (115)..(136): PHOSPHOLIPASE C SIGNATURE domain identified by eMATRIX, accession number PR00390B, p-value=1.000e-19, raw score of 12.57
DLYLLLLSYSDKKDHLTVEELAQFLKVEQKMNNVTTDYCLDIIKKFEVSEENKVKNVLGIEGFTNFMRSPACDIFNPLHHEVYQDMDQPLCNYYIASSHNTYLTGDQLLSQSKVDMYARVLQEGCRCVEVDCWDGPDGEPVVHHGYTLTSKILFRDVVETINKHAFVKNEFPVILSIENHCSIQQQRKIAQYLKGIFGDKLDLSSVDTGECKQLPSPQSLKGKILVKGKKLPYHLGDDAEEGEVSDEDSADEIEDECKFKLHYSNGTTEHQVESFIRKKLESLLKESQIRDKEDPDSFTVRALLKATHEGLNAHLKQSPDVKESGKKSHGRSLMTNFGKHKKTTKSRSKSYSTDDEEDTQQSTGKEGGQLYRLGRRRKTMKLCRELSDLVVYTNSVAAQDIVDDGTTGNVLSFSETRAHQVVQQKSEQFMIYNQKQLTRIYPSAYRIDSSNFNPLPYWNAGCQLVALNYQSEGRMMQLNRAKFKANGNCGYVLKPQQMCKGTFNPFSGDPLPANPKKQLILKVISGQQLPKPPDSMFGDRGEIIDPFVEVEIIGLPVDCCKDQTRVVDDNGFNPVWEETLTFTVHMPEIALVRFLVWDHDPIGRDFVGQRTVTFSSLVPGYRHVYLEGLTEASIFVHITINEIYGKWSPLILNPSYTILHFLGATKNRQLQGLKGLFNKNPRHSSSENNSHYVRKRSIGDRILRRTASAPAKGRKKSKMGFQEMVEIKDSVSEATRDQDGVLRRTTRSLQARPVSMPVDRNLLGALSLPVSETAKDIEGKENSLVQI

SEQ ID NO: 44029 - protein, 682 aa, Homo sapiens
  DOMAIN (66)..(79): C2 DOMAIN SIGNATURE domain identified by eMATRIX, accession number PR00360A, p-value=7.395e-09, raw score of 14.59
MSKSSLQPPQRSQADAGTMLLVQPVECTFNPFSGDPLPANPKKQLILKVISGQQLPKPPDSMFGDRGEIIDPFVEVEIIGLPVDCCKDQTRVVDDNGNIKRWQEPNVSEDEAVEFSNTTYGCAHLCKHSSSENNSHYVRKRSIGDRILRRTASAPAKGRKKSKMGFQEMVEIKDSVSEATRDQDGVLRRTTRSLQARPVSMPVDRNLLGALSLPVSDHAKAIEGKEHSLAEDKDGRRKGKASIKDPHFLNFNKKLSSSSSALLHKDTSQGDTIVSTAHMSVTGEQLGMSSPRGGRTTSNATSNCQENPCPSKSLSPKQHLAPDPVVNPTQDLHGVKIKEKGNPEDFVEGEKHLESVISHLIDNVTLTNENEPGSSISALIGQFDETNNQALTVVSHLHNTSVMSGHCPLPSLGLKMPIKHGFCKGKSKSSFLCSSPELIALSSSETTKHATNTVYETTCTPISKTKPDDDLSSKAKTAALESNLPGSPNTSRGWLPKSPTKGEDWETLKSCSPASSPDLTLEDVIADPTLCFNSGESSLVEIDGESENLSLTTCEYRREGTSQLASPLKLKYNQAKAQSRATLLNFVKAERGEEAAEEKSGASRVWYMKFKARIHLHNIKVQGEAASVGGEAAARDLQGLAKIIDEGSTSSSLVISNTSTVTFSTEVLNPSTSSIRIGIIFF

SEQ ID NO: 44030 - protein, 501 aa, Homo sapiens
MCNAAPGIVSVLFLDVLPNLVKKKKRKMDTTKCPLYSSPPPTGSMRGCTHMHTHTHAHTHTHTHTLPEWKGWQLNAVSLTFIPALDAIIRSPPRGLTKHCWPATNTGEEGTPKYTSFVGAGLVLKKQTLEGSALHAPAVCNATQGCIHPEDEGCGAKTNTHAAMAFSEIQNSQQEKLQLKLKKDTSEPAPPRRKRVPSGSGLWTHQLHGKHSALNSFPRRLFKNKQHKRKTPTDFMEGTILKLEAAARFAGKMLNSSVFVGTTRLGGVVRGKGLPTDPAGTDLASITCHMLALKLSARAPQRLQNPIVCGVPLLYKPNTDYAYRAAFTNTTEDALLGKTREAILPSMLVRAAAVSARQALGTGNPLHRVSHRGAKKSASRDVNIHYQEQPLDGNLNLFPWNSSIKGDPRRLEAPSMGCTTWTELRRTSLLDLSVRQCGDERIENPTPTSTVGFFSISRLLWGLGRSGYRLCSQTAQEHGNLSSSMAHSHWVSHQTEMQVDR

SEQ ID NO: 44031 - protein, 271 aa, Homo sapiens
MHFKKWAKDLNRRLSKEDIQMTRKFLKKHSTSLIISYKASHTVAPDFIHENVSQKSLLAQHVSAATPFSLFLKDAKLIRSLAYLHKLFPPPKVPFTLNISRLLLQLSSINSSSGISFLICKIGATDPVSQDYYQDEIINMRKKEAYERGAKQERQGSSWGERGLVGLFVGTGSFAKKLNGPDNPIAAETTGQAQQRVLLSAWSKFPWLFEWSGSQNINIWEKFILTFMGDFERFKPSVEEVAGDVMEIARKRGLEMDHGDVTELLPSKEQT

SEQ ID NO: 44032 - protein, 183 aa, Homo sapiens
NPYDCRASKDAVGQISVHVDITATPGTGDHKVTVKVIAINDLNWQTTAMFRPFVEVCILGPNLGDKKRKQGTKTKSNTWSPKYNETFQFILGKENRPGAYELHLSVKDYCFAREDRIIGMTVIQLQNIAEKGSYGAWYPLLKNISMDETGLTILRILSQRTSDDVAKEFVRLKSETRSTEESA

SEQ ID NO: 44033 - protein, 199 aa, Homo sapiens
  misc_feature (1)...(199): Xaa = X or * as defined in Table 2
XIILFDSEYALCPSLPKAQSSVVYSPDFPDTYATGRVCYWTIRVPGASHIHFSFPLFDIRDSADMVELLDGYTHRVLARFHGRSRPPLSFNVSLDFVILYFFSDRINQAQGFAVLYQGKTSLPPWGFFRANQTVAEVITEQANLSVSAARSSKVLYVITTSPSHPPQTVPGSNSWAPPMGAGSTVTAIVAKILLHVTFN

SEQ ID NO: 44034 - protein, 289 aa, Homo sapiens
  DOMAIN (105)..(132): Mrp family proteins domain identified by eMATRIX, accession number BL01215A, p-value=4.964e-11, raw score of 9.75
MKLMETLNQCINAGHEMTKAIAIAQFNDDSPEARKITRRWRIGEAADLVGVSSQAIRDAEKAGRLPHPDMEIRGRVEQRVGYTIEQINHMRDVFGTRLRRAEDVFPPVIGVAAHKGGVYKTSVSVHLAQDLALKGLRVLLVEGNDPQGTASMYHGWVPDLHIHAEDTLLPFYLGEKDDVTYAIKPTCWPGLDIIPSCLALHRIETELMGKFDEEATTVAYQTQRALGFSGALSSEPWSAGLSPNPSPSPQASRQEDLSETFPLIQVTSLSQVFVHESRVMKRLFRSGDL

SEQ ID NO: 44035 - protein, 774 aa, Homo sapiens
  DOMAIN (95)..(106): Zinc finger C-x8-C-x5-C-x3-H type (and similar) domain identified by eMATRIX, accession number PF00642, p-value=8.855e-09, raw score of 11.59
MASRPLARLTVCLASTLFPPGCVLQAPLPGITSISASPAKTKSTAPRLCRGYYISWLLPWRSPSKSGQKDSSMMLATNDHAVGRTGQFTEKGKKCTYGHKCKYYHPERGSQPQRSVADELRAMSRNTAAKTANEGGLVKSNSVPCSTKADSTSDVKRGAPKRQSDPSIRTQVYQDLEEKLPTKNKLETRSVPSLVSIPATSTAKPQSTTSLSNGLPSGVHFPPQDQRPQGQYPSMMMATKNHGTPMPYEQYPKCDSPVDIGYYSMLNAYSNLSLSGPRSPERRFSLDTDYRISSVASDCSSEGSMSCGSSDSYVGYNDRSYVSSPDPQLEENLKCQHMHPHSRLNPQPFLQNFHDPLTRGQSYSHEEPKFHHKPPLPHLALHLPHSAVGARSSCPGDYPSPPSSAHSKAPHLGRSLVATRIDSISDSRLYDSSPSRQRKPYSRQEGLGSWERPGYGIDAYGYRQTYSLPDNSTQPCYEQFTFQSLPEQQEPAWRIPYCGMPQDPPSLTEPMSLEMCFFSLEDAFGSRNSEPLRGSFGQSFSHGGRGGGVRLALGRLQASRLCDVALVPSEATTVAYQTQRALGFSGALSSEPWSAGLSPNPSPSPQASRQEDLSETFPLIQVTSLSQVFVHESRVMKVLYWAVWFDLQASGWHLWVKASCSHTDGCILDPCYRKKLSFFLRQWVDLCSAPWSELPAQPPEGETKMVGLMTLGEMRDRSEQHCGKESVELSSPHSLRAQRRRVELEVSAFSTQKAAKAAAGCLSPTFSCAGPGAQ

SEQ ID NO: 44036 - protein, 143 aa, Homo sapiens; identical to SEQ ID NO: 43452
  DOMAIN (33)..(88): Histone H2A proteins domain identified by eMATRIX, accession number BL00046, p-value=1.000e-40, raw score of 12.95

SEQ ID NO: 44037 - protein, 289 aa, Homo sapiens; identical to SEQ ID NO: 43453
  DOMAIN (33)..(88): Histone H2A proteins domain identified by eMATRIX, accession number BL00046, p-value=1.000e-40, raw score of 12.95

SEQ ID NO: 44038 - protein, 159 aa, Homo sapiens
  DOMAIN (27)..(50): HISTONE H2A SIGNATURE domain identified by eMATRIX, accession number PR00620A, p-value=2.636e-27, raw score of 11.03
  misc_feature (1)...(159): Xaa = X or * as defined in Table 2
CLSRRASPVYLASMSGRGKTGGKARAKAKSRSSRAGLQFPVGRVHRLLRKGHYAERVGAGAPVYLAAVLEVAQPLRVLELAGNAARSNKKTRIIPRHLQLAIRNDEELXKLPGLPXRIAQGSRVLPNIQAVLLPKKTSATVGPKAPSGGKKATQASQEY

SEQ ID NO: 44039 - protein, 312 aa, Homo sapiens
MVVITVLLSVAMFLLVLGFIIALALGSRKSLKLSEERVAPLHQQVVSMALSREGTPSAAGCPIVTCYQQKGAGGLGLQLRLGGCSGSGSSLPNSEGAGLPLAPQSMQTQPRLPAAADMMPAATAITGITDVEAARKAIRAAQVERYVPEHERCCWCLCCGCEVREHLSHGNLTVLYGGLLEHLASPEHKKATNKFWWENKAEVQMKEKFLVTPQDYARSHLYGTPMGSAVPSQACLEALLLIVPWGACGVSQEEEESPAEGSKDEPGEQVELKEEAEAPVEDGSQPPPPEPKGDATPEGEKATEKENGDKSE

SEQ ID NO: 44040 - protein, 365 aa, Homo sapiens
  DOMAIN (33)..(88): Histone H2A proteins domain identified by eMATRIX, accession number BL00046, p-value=6.738e-17, raw score of 12.95
MSGRGKTGGKARAKAKSRSSRAGLQFPVGRVHRLLRKGHYAERVGAGAPVYLAAVLERPTCGNLTSIGESKGSILVPLVRIPKAMLIFISKNMKHHTLEASTSYLFGRRLSFISAALILNKSSIQIAFEEVPQLPPRASISHVTCVDQSEHTMVLRCQLSAEEVRFPVSVTQQSPAAVSMETYHVTLTLPPTQLEVNLEEIPGEGLLISWAFTDRPDLSLTVLPKLQARERGEEQVELSTIEELIKDAIVSTQPAMMVNLRACSAPGGLVPSEKPPMMPQAQPAIPRPNRLFLRQLRASHLGNELEGTEELCCVAELDNPMQQKWTKPARAGSEVEWTEDLALDLGPQSRELTLQSAEEQQLWRQ

SEQ ID NO: 44041 - protein, 476 aa, Homo sapiens
NIYSNLMFFPLFRLLLWDCDDRSYSYYVEVSTNQQQWTMVADRTKVSCKSWQSVTFERQPASFIRIVGTHNTANESHCVKRVPPRNLWFKRGSIGNDGSKCNSLGGKSEDAVTAALFILNPTGYHERPSTEDGVFIDLFILVQEPEQVFHCVHFECPEQQSSQKEENSEESGTGDTSLAGSRHQRQCECGPAHVQRERMPGWACMLKSVAQRGFQRRWQTASLEGKLTVLTKMECVQKPSWGSRSLRDKDARKWLLLLANPSFPSELLEARAPGASPPAVCLCRAPHPAVACTRNHTFTFVAGSFHFAECFRGSPGLPLGATQRVISSQDKELIPEETSACCPFVRTVLSADPTALPLRVLGHSGRPQLVALNTSSMQVTRNCVSHLYTDIHSSLIHSNYNMEATPVPTDKGVGKHVCFIIRCSSIHLKKDTDISTMWMSPEDIVLGEIGQTQTDEYCMIPLPVLEMDGGNGCTTL

SEQ ID NO: 44042 - protein, 791 aa, Homo sapiens; identical to SEQ ID NO: 43343
  DOMAIN (286)..(319): Bacterial extracellular solute-binding proteins family 3 sig. domain identified by eMATRIX, accession number BL01039B, p-value= 8.457e-18, raw score of 20.00

SEQ ID NO: 44043 - protein, 378 aa, Homo sapiens
AKKGNYAFLWDVAVVEYAALTDDDCSVTVIGNSISSKGYGIALQHGSPYRDLFSQRPCGSIWSLPGRLRVSVGSLIGAAHDPSCESSKSGQWSVLKGSRSQEDREKKSDLQDTLATTVDLHWQSQVFEKHYPSLSKHVAQTRPDLSSMSNGYFITITQMQGTVFSVDSTKPTPNGQWVKTLMKTYKGINVVFMPVITTSILQPMDQGIILTFKFYHLRNTLHKAVAAIDSDSSDGSGQNEQRKWLLEIEYTPGENTMNIVEMTTKGLEYSIHIVDEEVARFEKCDSNVHRSSTVKMSLLVFHFFHLSLPDIVGLDVASSDAMSFVFPSIHISNGMAHSQQLTHMGMSKAASLPQGGIKSVGPLGIQSSCGIRLELVST

SEQ ID NO: 44044 - protein, 120 aa, Homo sapiens
LVGFILVSCFYSSSRYIYLYLDPLILFSVSFVIVVLNRLFLGFFVFILFHCVFGISDICLFILILGLFCRFCFFSFCFMSCWNVCVFWAWFLFISVFSQPINWVSWIAYKFALKECYVEA

SEQ ID NO: 44045 - protein, 852 aa, Homo sapiens
  DOMAIN (414)..(464): Sigma-70 factors family proteins domain identified by eMATRIX, accession number BL00715, p-value=3.118e-30, raw score of 24.82
LDRHIPTLVTYGPGPIFTATTRLGSVIDIDREAKTITIAELRDEKGELLVPERKIAYDTLVMALGSTSNDFNTPGVKENCIFLDNPHQARRFHQEMLNLFLKYSANLGANGKVNIAIVGGGATGVELFAELHNAVKQLHSYGYKGLTNEALNVTLVEAGERILPALPPRISAAAHNELTKLGVRVLTQTMVTSADEGGLHTKDGEYIEADLMVWAAGIKAPDFLKDIGGLETNRINQLVVEPTLQTNRDPDIYAIGDCASCAASEGGFVPPRAQAAHQMATCAMNNILAQMNAAFLLRLHDWHNCKEGGVPVNKSMLAGIGIGVAAALGVAAVASLNVFERGPQYAQVVSANPIKETFRSLPRDRALETRCFAWPRIGQPLGPPLANPKYPECHNPGAKGGGSPWDKALGARTNSQNKGDSQLALLDLIEEGNLGLIRAVEKFDPERGFRFSTYATWWIRQTIERAIMNQTRTIRLPIHIVKELNVYLRTARELSHKLDHEPSAEEIAEQLDKPVDDTGFKRLVMAGGVSANRTLRAKLAEMMKKRRGEVLYARPELCTDNGAMIAYNEKTYPFIAPFMDNLERTDDDKRKIFFDTIQTVRGRSLNHTFFLLDEAQNVDIQTMCAVATRPGMNAKFVFCGNFAQVDNAKLRNLHTNGLYRLLNGLYERQAYEYFDHVNLTEVKRFCCYVSQPYTGSMGNTETLFGMSGTKLKEISRGEVQRGDIFISGNGRPQRRLTKVAAILNRFTMPAETSAIEILVKLTAPDLTSPALSGAREATLPLQFGSAHSRSLASPNSQCPLQFRTKVAAEPRSVATRPACPFKYVAVHTLVSSHLEDRNFGVYVSDVKIISSS

SEQ ID NO: 44046 - protein, 126 aa, Homo sapiens
MHGLNKDIIFPLQIFALSNNVLYNFPEQGVVPVLYVIYAQDKADSLEKRLSVRPAHLARLQLLHDEGRLLTAGPMPAVDSNDPGAAGFTGSTVIAEFESLEAAQAWADADPYVAAGVYEHVSVKTI

SEQ ID NO: 44047 - protein, 232 aa, Homo sapiens
  DOMAIN (4)..(16): Ferrochelatase proteins domain identified by eMATRIX, accession number BL00534H, p-value=2.800e-12, raw score of 9.94
MCPGFAADCLETLEEIAEQNREVFLGAGGKKYEYIPALNATPRTYRKCMANLAGYRSSQFVNPCSHATPFPRRRKTWSMPSLLYNANRATRQQAQRERTRANTAAHHISEYPSPHLNSAARYRSITALPATPAYPRHQSNIERQRGTHRQTEARAEQNELRRQKEGRQAKTGTTRNERTTERGGERTNTPERTEEQQQRNERRRKSGTAKKEPRHKEAEKREEAVQLDLQRL

SEQ ID NO: 44048 - protein, 132 aa, Homo sapiens
  DOMAIN (45)..(62): Ferrochelatase proteins domain identified by eMATRIX, accession number BL00534G, p-value=1.720e-18, raw score of 13.77
LLLSYHGIPQRYADEGDDYPQRCRTTTRELASALGMAPEKVMMTFQSRFGREPWLMPYTDETLKMLGEKGVGHIQVMCPGFAADCLETLEEIAEQTREVFLGAGGKKYEYIPALNATPEHIEMMANLVAAYR

SEQ ID NO: 44049 - protein, 74 aa, Homo sapiens
  misc_feature (1)...(74): Xaa = X or * as defined in Table 2
KLHPYTTRQYCHFRIXTDVMAKRSRNAVKGLSALVWCALSDFAAGFTPDDGCTRATFFTGGWRKRDCRGAVAGG

SEQ ID NO: 44050 - protein, 137 aa, Homo sapiens
RRYSVVGDQSYQFWREGTEIDLGADPHSCDDGIHAAATGAIWLGAIQGFAGVTPRDGELHLNPALPEQWQQLSFPLFWQGCELQVTLDAQRIAIRTSAPVSLRLNGQLITGAEESVFCLGDFILPFNGTATKHQEDE

SEQ ID NO: 44051 - protein, 25 aa, Homo sapiens
FARDADNWFPNLFRKAAELSSTQPL

SEQ ID NO: 44052 - protein, 309 aa, Homo sapiens
  DOMAIN (229)..(252): PROLYL OLIGOPEPTIDASE SERINE PROTEASE (S9A) SIGNATURE domain identified by eMATRIX, accession number PR00862F, p-value=7.000e- 24, raw score of 19.54
MATDIIDLAAQRDQEPSLKWFSNPGVDENILWGLKMDFSSEYSDAETSCRHPVQITIGKPEELQRGSSQGAKSDLHYSSIRFITNVRSRRKPDHRQSCITARLDYSALAGTRRPHDGRQINVAKHRNILWNHDACDALLKLGYGSPSLCYAMGGSAGGMLMGVAINQRPELFHGVIAQVPFVDVVTTMLDESIPLTTGEFEEWGNPQDPQYYEYMKSYSPYDNVTAQAYPHLLVTTGLHDSQVQYWEPAKWVAKLRELKTDDHLLLLCTDMDSGHGGKSGRFKSYEGVAMEYAFLVALAQGTLPATPAD

SEQ ID NO: 44053 - protein, 66 aa, Homo sapiens
MVRGLLNDGLAVVGGFKIGDIDPRGETADFTSVSDKARAIGGGVLEALMMLMHQGVKATKEVLEVA

SEQ ID NO: 44054 - protein, 178 aa, Homo sapiens
  misc_feature (1)...(178): Xaa = X or * as defined in Table 2
MMQRLNKMFDGDWLLTVAAYNSGEGRVMKAIKTNKARGKSTDFWSLPLPQETKQYVPKMLALSDILKNSKRYGVRLPTTDESRALARVHLSSPVEMAKVADMAGISVSKLKTFNAGVKGSTLGASGPQYVMVPKKHADQLRESLASGEIAAVQSTLVADNTPLNSRVYTVRSGDTLSX

SEQ ID NO: 44055 - protein, 244 aa, Homo sapiens
  DOMAIN (217)..(229): CLASS IC CYTOCHROME C SIGNATURE domain identified by eMATRIX, accession number PR00605A, p-value=7.750e-10, raw score of 6.07
MRVVTEKLVRQSSKIRGSHWAQRSRGSGIGSQDPARYGTNKVSRIKQVASGRFGVTPAYLVNADVIQIKVAQGAKPGEGGQLPGDKVTPYIAKLRYSVPGVTLISPPPHHDIYSIEDLAQLIFDLKQVNPKAMISVKLVSEPGVGTIATGVAKAYADLRRCRRHSLRWSQGYGCSPFKVVRELGLERRETVRSLSAVGAGELRGAAPSTRGPEWTHHWCSGCHANGKGAPSARSSIYTTRDTRQ

SEQ ID NO: 44056 - protein, 1481 aa, Homo sapiens
  DOMAIN (268)..(323): ELEMENT INSERTION TRANSPOSABLE SEQUENCE TRANSPOSASE FOR domain identified by eMATRIX, accession number PD02662D, p-value= 3.973e-10, raw score of 21.71
MCELDILHDSLYQFCPELHLKRLNSLTLACHALLDCKTLTLTELGRNLPTKARTKHNIKRIDRLLGNRHLHKERLAVYRWHASFICSGNTMPIVLVDWSDIREQKRLMVLRASVALHGRSVTLYEKAFPLSEQCSKKAHDQFLADLASILPSNTTPLIVSDAGFKVPWYKSVEKLGWYWLSRVRGKVQYADLGAENWKPISNLHDMSSSHSKTLGYKRLTKSNPISCQILLYKSRSKGRKNQRSTRTHCHHPSPKIYSASAKEPWVLATNLPVEIRTPKQLVNIYSKRMQIEETFRDLKSPAYGLGLRHSRTSSSERFDIMLLIALMLQLTCWLAGVHAQKQGWDKHFQANTVRNRNVLSTVRLGMEVLRHSGYTITREDLLVAATLLAQNLLTHGVPASPLPSSMTRYGGVDANQQLVLDKPHHQTPRGLKFELAAESPLMIDHAIIALSKQIYQRYPQATIKLRNWDYDSLDAITRGEVDIGFSGRESHPRSRELLSSLPLAIDSCKCCLVMCPASGYAKIIRHCIKRGICDTVLYDYPTYQHLLGTERYLGAGQCVTGAGTRTHDCYEPAGIRAVTVYGSATRQSATGDRAALLTTINSINCRWLLFLSRLTKASKKSWKFLLPCCGINGTAIIRRSSGYGKPLKTFTRRWHNRICHQEARNIPPHRQSRFLASRGLLAELMFMLYGIGELPEIVTLPKGAAGGQLRGPKTGEVPQRVTNPQGPNQAREQGEQVREHRVTRGTGDTGKQQLGTEKIVSERSTPYTTLSRMESRIILGSTASPSMVGEESALPDLCGHMGQQSYLDRIEILLGRKKGELGEPDAERSTNSKRLLVSGIGRSRANCPSNPLTVQPFGVTSYYRISALPTQVDEFLNSYHENVPLIPAAVGPWLTDSPAACSPAFAPGRAPHSNPRLLPANARPLGELVLSHSCGSPPPGSALSYPAFLPPPAAWRQSFTSEPPSKSPVCLIPSWHMLLRDLRRSLLSYLPTQWVNVFHCVVTIVLKSCHVHGPPVTCHRVHTSSYGQCPCPWSGSRAHVRSRCRTLSFLSCSVCPRVTGPSVSIVATQWVRCCGEVVSRYGGSRGWFHGGVCCQYGFQGVVPGVGNQGFKGVQGSVVGVSGVVVRWFSVMVRVTDRVHVSGRVRVWSVTAQGTVRSGSGHGSRAQVGVSVVVSLSRKSRDRVLLSAACLPPLNEHEIPDPGRRTLQGARDLCPLPLPALGGPGVGTPILKNKYNTIRNHAHWNRKPSLQGVNSSVACRFPSKLAALALIDGMVDHASDDELFASGYLRGHLTLAIAELESGDDHSAQAVHTTVSQSLEKAIGAGAGDRYVGKPVSAGVTAVSCGVWSSMPDATLIASYQAYTSHVAYWHPSESVRRSSAPPESPAHSGAEHNRENQSRKHKEIVKNRRAYRLIFLLRQRRIFHECCLIIGNIAYHWQMIAGGTTHTAARLFITDINLFCPLCLRETSRYRAILCCLGIPG

SEQ ID NO: 44057 - protein, 120 aa, Homo sapiens
PGAGDRYVGKPVSAGVTAVSCGVWSSMPDATLIASYQAYTSHVGRIRRSRRIRTNTARADYPALTALPFNNFRTHNRFGFNAASVLASIGIGSSLICAARISAHSGAEHKPREPKAANIK

SEQ ID NO: 44058 - protein, 157 aa, Homo sapiens
  misc_feature (1)...(157): Xaa = X or * as defined in Table 2
KLPGQRRFVQTPSHVLHTTLSYPTAPAQSSYPAPLSPSQDRAPTLAHQTTXFSASYTANAQWQRVAADHLKSVRETYAHVRQFSPALGNAPPDLQPLSXASCVPKSGARYSSVIRQNRRDFFRATDHMYVTVPTNRPKMWNPVNTQMNSFRADTCER

SEQ ID NO: 44059 - protein, 248 aa, Homo sapiens
  misc_feature (1)...(248): Xaa = X or * as defined in Table 2
GSPGLRPGGAAGKALAPSGCTGNSHRAPMXPGAQAQTRPEKWAXQRPHVSTGARGARVRALAAVAAAEAQRAGAAVRAAALHTRAAVSAGAARAVVQVVLAARTREAGAAAAAQGVAQVQAESAIAAWLQAAPVHPLLTVGALETGWAVADVGRVRVCTPDTQAAVEAGSICTCHPAHLTPQPVEPTRAGAFKGPGCLTTAASIGTRVPVTGPRPRDKASGGSRGRAPGAEAAAGGDRDRAEGSSPAL

SEQ ID NO: 44060 - protein, 412 aa, Homo sapiens
  DOMAIN (79)..(104): Prokaryotic transglycosylases proteins domain identified by eMATRIX, accession number BL00922A, p-value=4.971e-21, raw score of 18.42
MDDGTSIAPDGDLWAFIGDELKMGIPENDRIREQKQKYLRNKSYLHDVTLRAEPYMYWIAGQVKKRNMPMELVLLPIVESAFDPHATSGANAAGIWQIIPSTGRNYGLKQTRNYDARRDVVASTTAALNMMQRLNKMFDGDWLLTVAAYNSGEGRVMKAIKTNKARGKSTDFWSLPLPQETKQYVPKMLALSDILKNSKRYGVRLPTTDESRALARVHLISPVKCARFSRFVFCPAVCRDSGGADERRTDSDGCQYAGGVKPESVMGAEIVEGFSHISVTSAWSRGDNSPAPMAFSRLWLTVFSMVFKRRETVRSLSAVGAGELRGAAPSTRGPEWTHHWCSGCHANGTARSAVVPPDPMPNSEVKRRSADGSVGSPHARVGNCQASNKTKGSVERLGLTTVFNNCDTTAEK

SEQ ID NO: 44061 - protein, 152 aa, Homo sapiens
  DOMAIN (68)..(87): GLUCOSE-6-PHOSPHATE ISOMERASE SIGNATURE domain identified by eMATRIX, accession number PR00662D, p-value=7.000e-17, raw score of 13.14
MVPCDFIAPAITHNPLSDHHQKLVSNFFAQTEALAFGKSREVVEQEYRDQGKDPATLDYVVPFKVFEGNRPTNSILLREITPFSLGALIALYEHKIFTQGVILNIFTFDQWGVELGKQLANRILPELKDDKEISSHDSSTNGLINRYKAWRG

SEQ ID NO: 44062 - protein, 73 aa, Homo sapiens
SPLEDPPSVRSNSPQEERYEKKTASNGKFYFNLKAANHQIVGSSQMYATAQSRETGIASVKANGTSQTVKDNT

SEQ ID NO: 44063 - protein, 48 aa, Homo sapiens
YWFETGRHASLTGDYSNQHLVPMKQVVPPRYQARNDFDVFAELSERRC

SEQ ID NO: 44064 - protein, 205 aa, Homo sapiens
QLATFFFGGGLPGGSAPWDPPGEACLWVLVRLPGRTVWVIQFVQLRSFFAPPFAHNGRASSGRVSVHYGIAQTAEWAAEICGVGARKIRELAAIFHQNTIMHFANGGNPTRRSAVLSSMQGSLPGGCDAVDIHPVARIVEALENPGGAYQHNGMNRHFPDIRFIWWAGGANFTHHQDTNRLIRAWQNDSYFRKGRIKAKMGPKLF

SEQ ID NO: 44065 - protein, 84 aa, Homo sapiens
  misc_feature (1)...(84): Xaa = X or * as defined in Table 2
ANWIKWRWHRAMHSSSSMWQTANSLASFISAPVTSSSACRSTLPATRYWCIXWRSSAIWKWVILSGPVATRICTATIWIQLICN

SEQ ID NO: 44066 - protein, 816 aa, Homo sapiens
  DOMAIN (376)..(402): Prokaryotic molybdopterin oxidoreductases proteins domain identified by eMATRIX, accession number BL00551B, p-value=1.871e- 20, raw score of 23.29
MTPGEVRRLYFIIRTFLSYGLDELIPKMRITLPLRLWRYSLFWMPNRHKDKLLGERLRLALQELGPVWIKFGQMLSTRRDLFPPHIADQLALLQDKVAPFDGKLAKQQIEAAMGGLPVEAWFDDFEIKPLASASIAQVHTARLKSNGPDVVITVDFFGDKMEWVAPHMGTDVALMLGIAHTLVENGWHDEAFLARCTTGYAVFASYLLGESDGIAKTAEWAAEICGVGAAKIRELAAIFHQNTTMLMAGWGMQRQQFGEQKHWMIVTLAAMLGQIGTPGGGFGLSYHFANGGNPTRRSAVLSSMQGSLPGGCDAVDKIPVARIVEALENPGGAYQHNGMNRHFPDIRFIWWAGGANFTHHQDTNRLIRAWQKPELVVISECFWTAAAKHADIVLPATTSFERNDLTMTGDYSNQHLVPMKQVVPPRYEARNDFDVFAELSERWEKGGYARFTEGKSELQWLETFYNVARQRGASQQVELPPFAEFWQANQLIEMPENPDSERFIRFADFCRDPLAHPLKTASGKIEIFSQRIADYGYPDCPGHPMWLEPDEWQGNAEPEQLQMLAGMIDLMPSSMALLAPNVNSYRRFQPGMRPWGHNNRTVALRIPCGDRHNHRVEYRVAGADANPYLVMAAIFAGILHGLDNELPLQEEVEGNGLEQEGLPFPIRQSDALDLCFSDILVSPNMYIDDGMKRDWPVMKQCALQRRWRILPDHYGTEPAEKRPGFAPHYCFSYALLVHMMAQQCDLEVGDFVWTGGDTHLYSNHMDQTHLQLSREPRPLPKLIIKRKPESIFDYRFEDFEIEGYDPHPGIKAPVAI

SEQ ID NO: 44067 - protein, 536 aa, Homo sapiens
  DOMAIN (132)..(152): Binding-protein-dependent transport systems inner membrane co domain identified by eMATRIX, accession number BL00402B, p-value= 5.909e-15, raw score of 16.55
WKLALGFSVEQADGRITPPPFPVLLWLWNSVKVAGISPIGIVALSTTCAYAFARMRFPGKATLLKGMLIFQMFPAVLSLVALYALFDRLGEYIPFIGLNTHGGVIFAYLGGIALHVWTIKGYFETIDSSLEEAAALDGATPWQAFRLVLLPLSVPILAVVFILSFIAAITEVPVASLLLRDVNSYTLAVGMQQYLNPQNYLWGDFAAAAVMSALPITIVFLLAQRWLVNGLTAVATLGGLLFGYDTAVISGTVESLNTVFVAPQNLSESAANSLLCPENDLKAFIAFPSSLYFDDPNWIPPLFIERNEHLSAKNPGTDHIIWQAWVAKKAGQIVGRITAQIDTLHRERYGKDTGHFGMIDAIDDPQVFAALFGAAEAWLKSQGASKISGPFSLNINQESGLLIEGFDTPPCAMMPHGKPWYAAHIEQLGYHKGIDLLAWWMQRTDLTFSPALKKLMDQVRKKVTIRCINRQRFGEEMQILREIFNSGWKHNWRFVPITEHEFPTMGRPLKYLVPDDMIYIAEIDSAPARLLSACQQ

SEQ ID NO: 44068 - protein, 542 aa, Homo sapiens
MDIWLCESYVADQAIRCGMGSAVEVQPKKRRLERDKEEADVWRQWAGTGARGLCQTRDKAGRALGESDARSELAATAAAAAKTDWRGCPGYTRRRQRKTGRRTRPPAIAEVCARGARDWRRTGEEKKQSCAGLRPTTQHTKRDLEQQTAAREDLSWDYLSYTLAVGMQQYLNPQNYLWGDFAAAAVMSALPITIVFLLAQRWLVNGLTAEVASSRKHWNKFCACGADENGAPNWKIVLMRHKRSLCEKRSDASGSQRHEHRRAAGAKPEGAEYIGELAAAISDIGRRVKTSDEPARETNSNEQPRARASSCNRHGPPASAGLRAQATNCDRDATTATSMRPHGTAGASCRNASNSNVLPAAATGCERPPASSERAGSMQAAGKTAATDQPAEQQTRVDNPADTSERAARRAAHEPTQRDRPAATQDNKARQTAGPHEPEGPSRTSQRQPDQRAQSKRQASSEARINERRTRGDEGTAERRQHRRERGAHTDKRNRDGSTLPTAETDTRDKTGALPCHRLTARPGAHSLATTLCARDVRHRAG

SEQ ID NO: 44069 - protein, 38 aa, Homo sapiens
QIARKEIAAIASKKGAEYRRRYEMLDAIQPQMATMFRG

SEQ ID NO: 44070 - protein, 73 aa, Homo sapiens
FSSSHWRSSTGAAFRLLDPRVIVAMPAPSSFFNSRWLISPRNSSSTIRTRVPNASRSSGVSIRFNNGKWRSYR

SEQ ID NO: 44071 - protein, 245 aa, Homo sapiens
LAFPDGMASLIMMSLPAMRTLAWAMAVSGNCIPEGQFSALSCADFGISPKLIGIEQFRAQRTLIIGNRVGTVTGQREFEIYTDERRPDKTRERRIRQSALLPDAGVNALSGLRRVREFVGLIRRASVASGSRYHCRMRRKRLIRPTEGAGIRRPDKTRKRRIRQSAPMPELPGPPVIETSTRNFKENWEENFCYLEFTIAKLGTTRKRIQENCKGQPLGPAGVQVSLRNTGTEAKIQSTVTQPGG

SEQ ID NO: 44072 - protein, 31 aa, Homo sapiens
  misc_feature (1)...(31): Xaa = X or * as defined in Table 2
IILLNSAPAWMXTFKLGPGVDVNYMLHTQNK

SEQ ID NO: 44073 - protein, 285 aa, Homo sapiens
MNGTIYQRIEDNAHFRELVEKRQRFATILSIIMLAVYIGFILLIAFAPGWLGTPLNPNTSVTRGIPIGVGVIVISFVLTGIYIWRANGEFDRLNNEVLHERGRRAPANELAGDSYVPDFRRVYARHYLLGIKRVRSRRIRRLPRIRQRCRLPDATLARLIRPTNSRTLRRPDKGVYAASGNSANCLMRRLRVLSGLQIPAPSVGRIRRLRRIRQSGARCPDATLARLIRPTNSRTLRRIRRLRRIRQWCRLPDATLARLIRPTNSRTLRRPDKAFTPHPATVPTA

SEQ ID NO: 44074 - protein, 534 aa, Homo sapiens
  DOMAIN (440)..(476): Transaldolase proteins domain identified by eMATRIX, accession number BL01054D, p-value=3.368e-36, raw score of 20.64
MQFAVSGNRFSLETGTINFLLGNETTIFDVNPVQITFTVTDHQVAIIQHRRSQQAMQQIALCPQRNAAINGQRHHPVILIDQIDAIAVDDEIIHRTQFAFPHNLTTAQIKRRQVTIIPQRENNAVNNDGSRVNIAQTVNFGDPLERLRKELTAEEIANSVSHGIGLVFGIVGLVLLLVQPVDLNASATAITSYSLYGGSMILLFLASTLYHAIPHQRAKMWLKKFDHCAIYLLIAGTYTPFLLVGLDSPLARGLMIVIWSLALLGILFKLTIAHRFKILSLVTYLAMGWLSLVVIYEMAVKLAAGSVTLLAVGGVVYSLGVIFYVCKRIPYNHAIWHGFVLGGNDAIAWGKKNGKTQDQQVVAACDKLPVNFGAEILKIVPGRVSTEVDARLSFDKEKSIEKARHLVDLYQQQGVEKSRILIKLASTWEGIRAAEELEKEGINCNLTLLFSFAQARACAEAGVFLISPFVGRIYDWYQARKPMDPYVVEEDPGVKSVRNIYDYYKQHHYETIVMGASFRRTEQILALTGCEGIL

SEQ ID NO: 44075 - protein, 196 aa, Homo sapiens
MKQCNATGEITWPNIVVVQEISPKTVRRHPTQAVKAVSIAAVILKMIRNAHLKRVKKAVNKAVLTIAHRFKILSLVTYLAMGWLSLVVIYEMAVKLAAGSVTLLAVGGVVYSLGVIFYVCKRIPYNHAIWHGFVLGGSRIPQRLDMQCIRIVAYAEDAIRFHIVIHDDLYHDLTIFQFYRSQYRTGTTPVLAHFQL

SEQ ID NO: 44076 - protein, 923 aa, Homo sapiens
  DOMAIN (843)..(881): Bacterial regulatory proteins lacI family proteins. domain identified by eMATRIX, accession number BL00356B, p-value=5.800e- 23, raw score of 26.17
MIEPFTIAANVTGHGQPTENDTVLVYGAGPIGLTIVQVLKGVYNVKNVIVADRIDERLEKAKESGADWAINNSQTPLGEIFTEKGIKPTLIIDAACHPSILKEAVTLASPAARFEQWLHIVSVFESNVTTGIMQYGYRIVEDMASGLSHYLADQGFDSLQEMVGLANNNIVPAEDLDRSYIVYPRINLDKCVGCGRCYISCYDGGHQAMEWSEKTRTPHCNTEKCVGCLLCGHVCPVGCIELGEVKFKKGEKEHPRRIRHLVPVAGCGLNALSGLQNHTNQYVELIVGPDKTPQRLHTGFGFLVAGYCVERLYLAYKTRLDELYYGPAALLRGWGYNVALANSGRQALEQVREQVFDLVLCDVRMAEMDGIATLKEIKALNPAIPVLIMTAYSSVETAVEALKTGALDYLIKPLDFDNLQATLEKALAHTHSIDAETPAVTASQFALILYEAQRQRQNAGMYLRENSMLPEAEQQRLLFEGGYPVLAKVAKRKGLPYPHVNQQGEIEADADWWATMQAAGSLTGVGAALSNKLAKINLHTVQDLLLHLPLRYEDRTHLYPIGELLPGVYATVEGEVLNCNISFGGRRMMTCQISDGSGILTMRFFNFSAAMKNSLAAGRRVLAYGEAKRGKYGAEMIHPEYRADPPIRAKAAEIAVAHAHYLSIEFYRIVRIDPHAEEFLSNEQVERQLKSAMERWIINVLSAQVDDVERLIQIQHTVAEVHARIGIPVEIVEMGFRVLKKILYPVIFSSDYSAAEKLQVYHFSINSIDIAMEVMTRAFTFWRLLFRYGWRISSSLLSGCVTSARGRWNGSGVVNMITIRDVARQAGVSVATVSRVLNNSTLVSADTREAVMKAASELDYRPNANAQALATQVSDTIGVVVMDVSDAFFGALVKTVDLGPQQHQKYVLIGNSYYEAEKQALID

SEQ ID NO: 44077 - protein, 175 aa, Homo sapiens
  DOMAIN (103)..(115): 3FE-4S FERREDOXIN SIGNATURE domain identified by eMATRIX, accession number PR00352A, p-value=4.188e-09, raw score of 11.15
THPDKSGSVFHDPASPERIPAQRNRLSPAARQQNESLLLWLPLCDRGRCSPRLVSLRCRVAWAAPTFGPDQGFDSLQEMVGLANNNIVPAEDLDRSYIVYPRINLDKCVGCGRCYISCYDGGHQAMEWSEKTRTPHCNTEKCVGCLLCGHVCPVGCIELGEVKFKKGEKEHPVTL

SEQ ID NO: 44078 - protein, 332 aa, Homo sapiens
  DOMAIN (89)..(136): BINDING-PROTEIN-DEPENDENT TRANSPORT SYSTEMS INNER MEMBRANE domain identified by eMATRIX, accession number DM00914C, p-value= 1.000e-40, raw score of 21.08
MAGFLGLALLRRPLRTLFPRTPSPLVQAPVGPTSSRIQPVRCVKPRCFPIAISGFDSGFSTFAQGFVALGSFRLSYITFYALIAVAFVWVLWNKTRFGKNIFAIGGNPEAAKVSGVNVGLNLLMIYALSGVFYAFGGMLEAGRIGSATNNLGFMYELDAIAACVVGGVSFSGGVGTVIGVVTGVIIFTVINYGLTYIGVNPYWQYIIKGAIIIFAVALDSLKYARRIRRSRRIRQWCTNAGYLHQRPHNLQLQLIRHFVIRQHMQPRRKQPCITRQQRAQLRWHQQHRVFPRRFHLLFHLWHRTLELVEHIRIDRHAVEHHFPALLRLIHHS

SEQ ID NO: 44079 - protein, 93 aa, Homo sapiens
  DOMAIN (26)..(38): 4Fe-4S ferredoxins iron-sulfur binding region proteins. domain identified by eMATRIX, accession number BL00198, p-value= 4.115e-10, raw score of 10.43
LQWAGVETAGFLFPPALGNQSNLDKCVGCGRCYISCYDGGHQAMEWSEKTRTPHCNTEKCVGCLLCGHVCPVGCIELGEVKFKKGEKEHPVTL

SEQ ID NO: 44080 - protein, 444 aa, Homo sapiens
  DOMAIN (367)..(397): TETRAHYDROFOLATE DEHYDROGENASE/CYCLOHYDROLASE FAMILY SIGNATURE domain identified by eMATRIX, accession number PR00085E, p-value=2.038e-31, raw score of 15.79
MDGRLDAVVFTGGIGENAAMVRELSLGKLGVLGFEVDHERNLAARFGKSGSQAARVLRDNQFFVGWDNHRRTGTFFVDETRFAETCSQVLFFTLATRSISVQQWLDRRCKTVMTETELFSSSAYVEWDAYIVPESAAKRKLCRTLTRMTINKVRLDRTYREEMQIGSRGSLESSLDLMNTIINMIAAGPCFRRYYILPTYPSDLAAIQFDRSGTTHIGRFVINHSFILPGLIGVSVSCVFGWIFAAIVADFDGETIMKVEPEALRPAGAASLSRRFFYAPPGTPETGCGYSSRSRSQRKRQVRGAAILKKLRKSPKGVSRPASIPHAIIVGQRVWTGGGDEETLPGCTTTVTHRFTKNLRHHVENADLLIVAVGKPGFIPGDWIKEGAIVIDVGINRLENVAMLLILLISLGTLDPLESFDSLPWYQIITDYLWHITLPVLAYW

SEQ ID NO: 44081 - protein, 1145 aa, Homo sapiens
  DOMAIN (466)..(485): NADH-Ubiquinone/plastoquinone (complex I) various chains. domain identified by eMATRIX, accession number PF00361B, p-value= 2.875e-16, raw score of 14.16
  misc_feature (1)...(1145): Xaa = X or * as defined in Table 2
MPITLRRSVEKEQLIEIANTIMPFGKYKGRRLIDLPEEYLLWFARKDEFPAEARYTHIDLHVPAPLLVMFTLDTRQSACDRNPHLPIHVCSSWTSPKCAPRLWTRALLPRTRTPPYATGTTIGSRASWFVTFPDASFYRRKAPRQEFHTSLQGRSLYVRQRSTANPTEITRRTLIHKMVEVNACLKQLDNKDIADYEHNQLMRRLRQLIAQSWHTDEIRKLRPSPEAIMTEQEKTSAVVEETREAVDTTSQPVATEKKSKNNTALILSAVAIAIALAAGIGLYGWDRNILKTRVWQTKLPLIAILRGITPDEALAHVGAVIDAGFDAVEIPLNSPQWEQSIPAIVDAYGDKALIGAVGRAARVARGMLYCNAAANYRSYVIDTMHQLSPGYSDVYAADRGADYYPDQNQSRVYLKKRSLPFRYDRHRGGVRYRMDGRNHVREAIRVVLAIIAFASIIFGNLMALSQTNIKRLLGYSSISHLGYLLVALIRCKPARCRWKRSLGAFGVVSLMSSPYRGPDADSLFSYRVMTVMMLSLAGNPMKLIYRTVIRASGRCLDTLVDAQTFAANAANYDTWTYIDNPVTALDWDHMDKAGTVDGNYVNYSGFVYYNNTNGDSDQSFSGDKDMIFAILKQHAKSGEDIFGDGVLDVMQDGFGFLRSADSSYLAGPEGLKVAVIAVDPSSPVTGGSILGDKTRMNDLARAEAAFIRPVPSSGHMGGASQRARELMLLCEAAGYDVVIVETVGVGQSETEVARMVDCFISLQIAGGGDDLQGIKKGLMEVADLIVINKDDGDNHTNVAIARHMYESALHILRRKYDEWQPRVLTCSALEKRGIDEIWDLQACKNKLKNPPQSLKELVESDQNWRVIYQDPRTSTPGLGLLLWMQKVYGDDAPQAWQKLAKKTVTVTKGWSEAYGLFLKGESDLVLSYTTSPAYHILEEKKDNYAAANFSEGHYLQVEVAARTAASKQPELAQKFLQFMVLRFPECDCQPSWRLDKTKSIAFWIDLQSKSIMLELLFVIGFFVMLMVTGVSLLGIIAALVVATAIMFLGGMLALMIKLLPWQLLAIAVVRSXVLVIQMFMLLTGALIIILTKTNPASISKNEVFRSGMIAIVAVYGIAWMAETMFAKRFAWCWRLSPLPPSSSVT

SEQ ID NO: 44082 - protein, 668 aa, Homo sapiens
  DOMAIN (275)..(295): w LOW TRANSPOSASE SAPA 12K domain identified by eMATRIX, accession number DM00475B, p-value=1.300e-15, raw score of 12.12
MTQQITLIKDKILSDNYFTLHNITYDLTRKDGEVIRHKREVYDRGNGATILLYNTKKKTVVLIRQFRVATWVNGNESGQLIESCAGLLDNDEPEVCIRKEAIEETGYEVGEVRKLFELYMSPGGVTELIHFFIAEYSDNQRANARGGVEDEDIEVLELVQCGGQIGVPDTVLAVFATGIGFLAMSVTKPRINAQPYPMPWRNLAQLVEHINRTRIHRNLQFTDAFKRRLIDNICRKNNIIGTHTGQSKFSGQTQQIFGEIPQVVPASELAAAMKQIKELQRLLGKKTMENELLKEAVEYGRAKKWIAHAPLLPGDGERTDDWMDGRRSRHTDDTDVLLRIHHVIGELPTYGYRRVWALLRRQAELDGMPAINAKRVYRIMRQNALLLERKPAVPPSKRAHTGRVAVKESNQRWCSDGFEFCCDNGERLRVTFALDCCDRLSSRGRNAAAKRQRDDPLRWKFRLPSGGTKLLMPLDQQAPARFAPFVTCTLTILCGTGHVVYTILPIIYDVAIKNNIRPERPMAASSIGAQMGIIASPVSVAVVSLVAMLGNVTFDGRHLEFLDLLAITIPSTLIGILAIGIFSWFRGKDLDKDEEFQKFISVPENREYVYGDTATLLDKKLPKSNWLAMWIFLGAIAVIALLGADSDLRSSFGGKPLAMVLVIKMFML

SEQ ID NO: 44083 - protein, 305 aa, Homo sapiens
  DOMAIN (160)..(187): Insulinase family zinc-binding region proteins. domain identified by eMATRIX, accession number BL00143A, p-value=3.864e- 15, raw score of 20.91
  misc_feature (1)...(305): Xaa = X or * as defined in Table 2
DKTRKRRIRQXIPNATSFLYQNSPNGLSEXLPAGTWFAGNAPASSCGFRDRYLIVCSHQTPHVPGQITVAAPDARAQAILRIVRQLQRFFHRFEGGHRQHRAKNLLLEHPHIVLTKQNRRFEADALQPDPAWQQGTLSNGLQWQVLTTPQRPSDRVEIRLLVNTGSLAESTQQSGYSHAIPRIALTQSGGLDAAQARSLWQQGIDPKRPMPPVIVSYDTTLFNLSLPNNRNDLLKEALSYLANATGKLTITPETINHALQSHDMVATLVFRYLKKGWWRYRLKGSTLLSHDPAHPLKQPVEAEKI

SEQ ID NO: 44084 - protein, 819 aa, Homo sapiens
  DOMAIN (690)..(745): COMPONENT PHOSPHOTRANSFERASE SYST domain identified by eMATRIX, accession number PD02963D, p-value=1.000e-40, raw score of 24.36
MCPIEETASSFGGKPLSMVLVIQMFMLLTGALIIILTKTNPASISKNEVFRSGMIAIVAVYGIAWMAETMFAPACYGYYILPTYPSDLAAIQFDRSGTTHIGRFVINHSFILPGLIGVSVSCVFGWIFAAIKRDAAAGRAKENVIFHHFPFQSVKADIATNPFKRPGGAFIRITQTFRTVQTFRLSAYRLDFAGDRLRISTPRAKMRTAFKKDHLRQRRRCIRQRAPPARHNLVGAVALPATVAGVNFTFSNVPLDSSVLSSLLTDFSTAVGSIVMLAVIMGLMLAFDMGGPVNKVAYAFMLICVAQGVYTVVAIAAVGICIPPLGMGLATLIGRKNFSAEERETGKAALVMGCVGVTEGAIPFAAADPLRPSFGGKPLSMVLVIQMFMLLTGALIIILTKTNPASISKNEVFRSGMIAIVAVYGIAWMAETMFAPACYGYYILPTYPSDLAAIQFDRSGTTHIGRFVINHSFILPGLIGVSVSCVFGWIFAAIKRDAAAGRAKENVIFHHFPFQSVKADIATNPFKRPGGAFIRITQTFRTVQTFRLSAYRLDFAGDRLRISTPRAKMRTAFKKDHLRQRRRCIRQRAPPARHNLVGAVALPATVAGVNFTFSNVPLDSSVLSSLLTDFSTAVGSIVMLAVIMGLMLAFDMGGPVNKVAYAFMLICVAQGVYTVVAIAAVGICIPPLGMGLATLIGRKNFSAEERETGKAALVMGCVGVTEGAIPFAAADPLRVIPSIMVGSVCGAVTAALVGAQCYAGWGGLIVLPVVEGKLGYIAAVAVGAVVTAVCVNVLKSLARKNGSSTDEKEDDLDLDFEIN

SEQ ID NO: 44085 - protein, 727 aa, Homo sapiens
CISRYSAGSVYYYPSYHHQHNPVQVQKLQKELQRYLTRKIGFEAVMRIRCTKEEESQTKSKQQDSDKLNSLSVPSVSKRVVLGDSVSTGTTDQQGGVAECSSDVNLELRQRNRGDLTADSVQRGSRHGLEQYLSRFEEAMKLRKQLISEKPSQEDGNTTEEFDSFRIFRLVGCALLALGVRAFVCKYLARSNIGKCGRLQRCKAPEREERHVGNAIVGQSINHCIISTVRDVVFVLHTDNFGNLARLCNLRRCDVAQANMFYQALLLHLCQHGQAGLNRSFRWAMTIPHHNAQVNHIQHVQPEITSAGENAGNQDAYLRPSFGGKPLSMVLVIQMFMLLTGALIIILTKTNPASISKNEVFRSGMIAIVAVYGIAWMAETMFGAHMSEIQGVLGEMVKEYPWAYAIVLLLVSKFVNSQAAALAAIVPVALAIGVDPAYIVASAPACYGYYILPTYPSDLAAIQFDRSGTTHIGRFVINHSFILPGLIGVSVSCVFGWIFAAISRSKEKTDGGESSKEKKKDKDDKEDEKEKDAGEGKIIKKSSGFSGKGFKFDETEQALANERKKLQKAALGLQDSDDEDAAVDPAFFHESDILSLHCVNKDMLVRTRHLVGLISGVLILSVLLPVGLSIWLAHQQVETSFIEELDTYSSRVAIRANKEVAYIDNNVPQCSSLEHESPPDTFPEPGKISKDGYRVWLTSHNEFRHYPLHGRHGNGTLCRHDRPRFLY

SEQ ID NO: 44086 - protein, 306 aa, Homo sapiens
MGIIASPVSVAVVSLVAMLGNVTFDGRHLEFLDLLAITIPSTLIGILAIGIFSWFRGKDLDKDEEFQKFISVPENREYVYGDTATLLDKKLPKSNWLAMWCFLGAIAVVALLGADSDLRPSFGGKPLSMVLVIQMFMLLTGALIIILTKTNPASISKNEVFRSGMIAIVAVYGIAWMAETMFGAHMSEIQGVLGEMVKEYPWAYAIVLLLVSKFVNSQAAALAAIVPVALAIGVDPAYIVASAPACYGYYIMPTYPSDLAAIQFDRPATTHIGGFVINHSFILPGLIGVSVSCVFGWIFAAMYGFL

SEQ ID NO: 44087 - protein, 76 aa, Homo sapiens
  misc_feature (1)...(76): Xaa = X or * as defined in Table 2
TQRVDWRSRSSISPGDGLHAFPAFGKEGGKMLDRLRERRDVKTLQQSGSAAGAEFALAGAHPHTGTTAXIQQAINV

SEQ ID NO: 44088 - protein, 313 aa, Homo sapiens
  DOMAIN (41)..(61): CHLORIDE CHANNEL SIGNATURE domain identified by eMATRIX, accession number PR00762C, p-value=4.203e-13, raw score of 9.29
MVLGREGPTVQIGGNIGRMVLDIFRLKGDEARHTLLATGAAAGLAAAFNAPLAGILFIIEEMRPQFRYTLISIKAVFIGVIMSTIMYRIFNHEVALIDVGKLSDAPLNTLWLYLILGIIFGIFGPIFNKWVLGMQDLLHRVHGGNITKWVLMGGAIGGLCGLLGFVAPATSGGGFNLIPIATAGNFSMGMLVFIFVARVITTLLCFSSGAPGGMFAQVAQKLAAEQVDLYLTWGEPPELVKEKIEQVRAKAAAHGRKIRFGIRLHVIVRETNDEAWQAAERLISHLDDETIAKAQAAFRPDGFRRATANGGVT

SEQ ID NO: 44089 - protein, 128 aa, Homo sapiens
  DOMAIN (7)..(27): CHLORIDE CHANNEL SIGNATURE domain identified by eMATRIX, accession number PR00762C, p-value=4.203e-13, raw score of 9.29
MLATAAAAGLAAAFNAPLAGILFIIEEMRPQFRYTLISIKAVFIGVIMSTIMYRIFNHEVALIDVGKLSDAPLNTLWLYLILGIIFGIFGPIFNKWVLGMQDLLHRVHAGTITKGVLYYIGDRNKRIK

SEQ ID NO: 44090 - protein, 173 aa, Homo sapiens
VRQPSDYIMNKTEFYADLNRDFNALMAGETSFLATLANTSALLYERLTDINWAGFYLLEDDTLVLGPFQGKIACVRIPVGRGVCGTAVARNQVQRIEDVHVFDGHIACDAASNSEIVLPLVVKNQIIGVLDIDSTVFGRFTDEDEQGLRQLVAQLEKVLATTDYKKFFASVAG

SEQ ID NO: 44091 - protein, 182 aa, Homo sapiens
MSRLGPKAFEQCAGFLRINHGDNPLDASTVHPEAYPVVERILAATQQALKDLMGNSSELRNLKASDFTDEKFGVPTVTDIIKELEKPGRDPRPEFKTAQFADGVETMNDLQPGMILEGAVTNVTNFGAFVDIGVHQDGLGSKVTGDVEESVISATQSHEKDWVQMKDVECADAVVMAYSAVG

SEQ ID NO: 44092 - protein, 360 aa, Homo sapiens
  DOMAIN (261)..(306): Respiratory-chain NADH dehydrogenase subunit 1 proteins domain identified by eMATRIX, accession number BL00667C, p-value= 4.857e-29, raw score of 15.17
  misc_feature (1)...(360): Xaa = X or * as defined in Table 2
MFSHNCCVDQLNLQLQYDGHGWLTDISHLSEGHRVAVHYGYDDKGRLTGECQTVENPETGELLWQHETKHAYNEQGLANRVTPDSLPPVEWLTYGSGYLAGMKLGGTPLVEYTRDRLHRETEYRDIIKLLGRQSVGPDASGWVFRLTPYVMVGVMLTIATALPVVTVGSPLPQLGDLITLLYLFAIARFFFAISGLDTGSPFTAIGASREAMLGVLVEPMLLLGLWVAAQVAGSTNISNITDTVYHWPLSQSIPLVLALCACAFATFIEMGKLPFDLAEAEQELQEGPLSEYSGSGFGVMKWGISLKQLVVLQMFVGVFIPWGQMETFTAGGLLLALVIAIVKLVVGVLVIALFENSMAX

SEQ ID NO: 44093 - protein, 54 aa, Homo sapiens
  misc_feature (1)...(54): Xaa = X or * as defined in Table 2
VSRRIKLDVTEEFARAGDNKRCICQXRHGLAERDIARLLVEIVVIWCDIGVIQA

SEQ ID NO: 44094 - protein, 32 aa, Homo sapiens
PVPSDCRSAGATAAHAWRAGATDWRFRQDHPA

SEQ ID NO: 44095 - protein, 297 aa, Homo sapiens
  DOMAIN (186)..(206): RIBOSOMAL PROTEIN S1 SIGNATURE domain identified by eMATRIX, accession number PR00681H, p-value=9.471e-11, raw score of 11.58
RFFNPINECLQLLHRAIKYIKIHRTIDAIYLSTVGMLPEAPGHSVIVRTTLIVNRQQLLKVSRLGPKAFEQCAGFLRINHGDNPLDASTVHPEAYPVVERILAATQQALKDLMGNSSELRNLKASDFTDEKFGVPTVTDIIKELEKPGRDPRPEFKTAQFADGVETMNDLQPGMILEGAVTNVTNFGAFVDIGVHQDGLVHISSLSNKFVEDPHTVVKAGDIVKVKVLEVDLQRKRIALTMRLDEQPGETNARRGGGNERPQNNRPAAKPRGREAQPAGNSAMMDARYPGRASLLSR

SEQ ID NO: 44096 - protein, 528 aa, Homo sapiens
  DOMAIN (327)..(346): ALDO-KETO REDUCTASE SIGNATURE domain identified by eMATRIX, accession number PR00069B, p-value=4.923e-16, raw score of 11.33
MVKEGTFREDLFYRLNVIHLILPPLRDRREDISLLANHFLQKFSSENQRDIIDIDPMAMSLLTAWSWPGNIRELSNVIERAVVMNSGPIIFSEDLPPQIRQPVCNAGEVKTAPVGERNLKEEIKRVEKRIIMEVLEQQEGNRTRTALMLGISRRALMYKLQEYDATGFFRDGMTIMVGGFMGIGTPSRLVEALLESGVRDLTLIANDTAFVDTGIGPLIVNGRVRKVIASHIGTNPETGRRMISGEMDVVLVPQGTLIEQIRCGGAGLGGFLNPTGVGTVVEERQTSIDTSTRKRPFELGRPSRNNDKGIRPDQALDRKNIREALHDSLKRLQTDYLDLYQVHWPLRPFYCFGKLGYSWTDSAPAVSQLDTLDALAEYQRAGKIRYIGVSNETAFGVMRYLHLADKHDLPRIVTIQNPYSLLNRSFEVGLAEVSQYEGVELLAYSCLGFGTLTGKYLNGAKPAGARNTLFSRFTRYSGEQTQKAVAAYVDIARRHGLDPAQMALAFVRRQPFVASTLLGATTMDQLKT

SEQ ID NO: 44097 - protein, 206 aa, Homo sapiens
MAVSRMNLVGSGLKTALDSFADLNLFMPSALLDRFMKKHNLNRPIKGKEIESEIKRYSSKKSPRTGHSVAAYVDIARRHGLDPAQMALAFVRRQPFVASTLLGATTMDQLKTNIESLHLELSEDVLAEIEAVHQRRYCQRKQRTEANANGHDRDAYHYRQRVNAQHQQHGAVFAKQRIERNDKKAPITPISSGDMCILGALDQSDQ

SEQ ID NO: 44098 - protein, 377 aa, Homo sapiens
  misc_feature (1)...(377): Xaa = X or * as defined in Table 2
RPGIVALNAILPLSRTRQSKPTRLKKRAIANCAPTWKKRFVALVYRTAXRFPSITLSVAVTXPASAKNKAIKMTQKIEQSQRQERVAAWNRRAECDLAAFQNSPKQTYQAEKARDRKLCANLEEAIRRSGLQDGMTVSFHHAFRGGDLTVNMVMDVIAKMGFKNLTLASSSLSDCHAPLVEHIRQGVVTRIYTSGLRGPLAEEISRAYCADSHHGPFAMVNNMTDLTAQEPAWQTRDHLDDPVIGELRNRFGPDAFTVQATRTGVPVVWIKREQLLEVGDFLKKLPKPYVMLFDLHGMDERLRTHREGLPAADFSVFYHLISIDRNRDIMLKVALAENDLHVPTFTKLFPNANWYERETWDLFGITFDGHPNLRWIP

SEQ ID NO: 44099 - protein, 301 aa, Homo sapiens
  misc_feature (1)...(301): Xaa = X or * as defined in Table 2
RLLRPLPQPRSSVLPGLTTFHASSTSETRQSKPTRLKKRAIANCAPTWKKRFVALVYRTAXRFPSITLSVAVTXPCVNIITIGCQVKTVTTIATAQIQRFTRFNHFSRFQYFRNSPKQTYQAEKARDRKLCANLEEAIRRSGLQDGMTVSFHHAFRGGDLTVNMVMDVIAKMGFKNLTLASSSLSDCHAPLVEHIRQGVVTRIYTSGLRGPLAEEISRGLLAEPVQIHSHGGRVHLVQNGELNIDVAFLGVPSCDEFGNANGYTGKACCGSLGYAIVDADNAKQVVMLTEELLPYTDNPEA

SEQ ID NO: 44100 - protein, 371 aa, Homo sapiens
MAELVRPLTVHCNVIRRELPLMLMVSVVPGSVLYDGQLSRSDGIFLLFLAVLWLLFIVKLARQAERQGTDSLTREQLAELPRDGGLPVAFLWLGIALIIMPVATRMVVDNATVLANFFAISELTMGLTAIAIGTSLPELATAIAGVRKGENAIAVGNIIGANIFNIVIVLGLPALITPGEIDCIRNSHWKLTRVKKAICWPTFMDYGWLLTKRFEAPDKSTSHNLHFLNLPGIDRSKLERIDIRTSQLITPLFEYSDNAEFGLGFRLTVDQHRVRVLRLLDQFADKIPAELLTALKSDATPEVRREQVAALRQQLNDVAEAHELLRDADALVEKSIWLIGGDGWAYDIGFGGLDHVLSLTEKGATLFNLSL

SEQ ID NO: 44101 - protein, 2267 aa, Homo sapiens
  DOMAIN (1710)..(1722): 6 kw INDUCING XPMC2 MUSHROOM SPAC22G704. domain identified by eMATRIX, accession number DM01417C, p-value=9.325e-12, raw score of 12.93
  misc_feature (1)...(2267): Xaa = X or * as defined in Table 2
LRRDSGRLRSCWHPRSPTSMGSLGQREDLQDEDRNSGADPGQRGRCSIHLEGPGQQPCLQRAVQGEGDPVLAKEEIQDQCHPHGQVQLLLVPAAEPVRAVPPRVQPVLPHHHHPAELSGIREEXGNQNDAENXTISTTRTGSGLESSRXMSILPLSRTRQSKPTRLKKRAIANCAPTWKKRFVALVYRTAXRFPSITLSVAVTXPYWSGAPGGPCRRPYCHFRHRGARGSGAPGDGGEAPPAAAFLGGDVGFGLEKKRDIARKVVEGGLSSVMSFRLPCYLCPLIVALCFTQPLTSFVPDFLIGRSLCPTERQDTVFQEREPFRGGLQESPGLSRVAQRPSETKREPALPQEQALGRQDLEAMEVGLRSPELATAPCTTAEEEVDFRGAVLQTPLPRGSVMGWALPWTQPAPALRFARPPGPGLPLSLQGSREQEGPSAFAVGVGCSINEGQIAFAVPHGTAGLVWARAPLLESDLTGFVELLFKGLGYDPYNPELPKPPAQRENGTLGLGEEPRPDVLELELVNQAIEAVRSEVELEQRRYRELLETTREHRSAEAPALAPRGPNASPTVGPDEDAFPLAFDYSPGSHGLLSPDAGYQPTPLAAPAEPGSKYSLASLDRGQGRGGGGGGALEYVPKAVSQPRRHSRPVPSGKYVVDNSRPPTDLEYDPLSNYSARHLSRASSRDERAAKRPRGSRGSEPYTPAPKKLCDPFGSCDARFSDSEDEAATVPGNEPTTASTPKARADPEIKATGQPPSKEGLEAEGGGLRETKETAVQCDVGDLQPPPAKPASPAQVQSSQDGGCPKEGKPKKKKTGAPPAPSCKDGAQGKDKTKDKGRGRPVEKPRADKKGPQASSPRRKAERPEGTKKKPSSATPVATSGKGRPDRPARRPSPTSGDSRPAAGRGPPRPLQLPDRKSTKAPSGKLVERKARSLDEGASQDAPKLKKRALSHADLFGDESEDEAAGPGVPSVWPSALPSLSSDSDSDSDSSLGFPEAQGPPKRLKASPPPSPAPSSSSSSSSSTSSAGADVDYSALEKEVDFDSDPMEECLRIFNESTSVKTEDRGRLARQRSLARGHQPGFCGHVHTPPKEEKSEEKGLSGLTTLFPGQKRRISHLSKQGQEVPPLCCQALAFVVTQVEPPRRGPAVPPARPPTAQEVCYLRAQQAQRASASLLQAPARLAEKSPSVHISAPGEKRRIAHIPNPRLAAGPDGISRDVALRLGPDVPAHSSPSWVGAEPPVQKPPCHTDVHAQMHVLLALSGRGCLVLRHVVMGSHSPCAHTPCAPPAPTGAKRTLAASGSQSSNGPEPGGQQLKTRTLSGMASKTTTTIIPKRIAHSPSLQSLKKPIIPKEFGGKVPTVIRQRYLNLFIEECLKFCTSNQEAIEKALNEEKVAYDRSPSKNIYLNVAVNTLKKLRGLAPSAVPGLSKTSGRRVVSHEVVLGGRLAAKTSFSLSRPSSPRVEDLKGAALYSRLREYLLTQDQLKENGYPFPHPERPGGAIIFTAEEKRPKDCESLACDGLASCRTCCRCGTEYLVSSSGRCIRDEECYYHWGRLRRNRGNHAATLRAHGQPCTALWRPLKPSPQGYLEGAARGSAAKRPLQRALVSLDPGLGVLAATRLPGPVAGGWETQYMCCSAAAGSVGCQVAKQHVQDGRKERLEGFVKTFEKELSGDTHPGIYALDCEMSYTTYGLELTRVTVVDTDVHVVYDTFVKPDNEIVDYNTRFSGVTEADLADTSVTLRDVQAVLLSMFSADTILIGHSLESDLLALKVPCRPGSRAVLQQDLRRPHVIHSTVVDTSVLFPHRLGLPYKRSLRNLMADYLRQIIQDNVDGHSSSEDAGACMHLVIWKDRWHRANGSTTSAALDARGLPPPASPAPTPRSTRAGPEPSPAPPGPGDTGDSDVTQEGSGPAGIRGAPPAWAASAREKISKMRTGTQVLILGRGGGAAFTWKVQANNRAYNGQFKEKVILCWQRKKYKTNVIRTAKYNFYSFLPLNLYEQFHRVSNLFFLIIIILQNFPASAKNKAIKMTQKIEQSQRQERVAAWNRRAECDLAAFQNSPKQTYQAEKARDRKLCANLEEAIRRSGLQDGMTVSFHHAFRGGDLTVNMVMDVIAKMGFKNLTLASSSLSDCHAPLVEHIRQGVVTRIYTSGLRGPLAEEISRGLLAEPVQIHSHGGRVNLVQSGELNIHVAFLGVPSCDEFGNPNGYTACCGSLGYAIVDADNAKQVVMLTEELLPYPHNPASIEQDQVDLIVKVDRVGDAAKIRLARPV

SEQ ID NO: 44102 - protein, 62 aa, Homo sapiens
  misc_feature (1)...(62): Xaa = X or * as defined in Table 2
CRGDGGKLIIQCQRRMGIXPCGXLRQRKAELFQHLPLCXFWRPEIGTVCSGSIDNGSDRLRR

SEQ ID NO: 44103 - protein, 771 aa, Homo sapiens
  DOMAIN (43)..(55): 4Fe-4S ferredoxins iron-sulfur binding region proteins. domain identified by eMATRIX, accession number BL00198, p-value= 4.429e-11, raw score of 10.43
  misc_feature (1)...(771): Xaa = X or * as defined in Table 2
XIRAKVVPPEAMENAPASLHSLDVKSRDMRGQKYVLQVAPEDCTGCNLCVEVCPAKDRQNPEIKAINMMSRLEHVEEEKINYDFFLNLPEIDRSKLERIDIRTSQLITPLFEYSGACSGCGETPYIKLLTQLYGDRMLIANATGCSSIYGGNLPSTPYTTDANGRGPGCANSLFEDNAEFGLGFRLTVDQHRVRVLRLLDQFADKIPAELLTALKSDATPEVRREQVAALRQQLNDVAEAHELLRDADALVEKSIWLIGGDGWAYDIGFGGLDHVLSLTENVNILVLDTQCYSNTGGQASKATPLGAVTKFGEHGKRKARKDLGVSMMMYGHVYVAQISLGAQLNQTVKAIQEAEAYPGPSLIIAYSPCEEHGYDLALSHDQMRQLTATGFWPLYRFDPRRADEGKLPLALDSRPPSEAPEETLRLTLTNPAFPVLHLTGIASSAVLAPRGLCPTTRKLAAKTSPKSTSIVSPALTEHEPSELIVPDSVTLTGSMLAIDAPVIASGATTPNNRVADDQGFLRQWSKVAKERKLQRFYIGEPSAEAVAAQMPDLILISATGGDSALALYDQLSTIAPTLIINYDDKSWQSLLTQLGEITGHEKQAAERIAQFDKQLAAAKEQIKLPPQPGVVTRIYTSGLRGPLAEEISRGLLAEPVQIHSHGGRVHLVQSGELNIDVAFIGVPSCDEFGNANGYTGKACCGSLGYAIVDADNAKQVVMLTEELLPYPHNPASIEQDQVDLIVKVDRVGDAAKIGAGATRMTTNPRELLIAX

SEQ ID NO: 44104 - protein, 133 aa, Homo sapiens
  DOMAIN (72)..(107): Initiation factor 2 proteins domain identified by eMATRIX, accession number BL01176G, p-value=1.857e-34, raw score of 16.71
IEAESLDLRYYSVIYNLIDEVKAAMSGMLSPELKQQIIGLAEVRDVFKSPKFGAIAGCMVTEGVVKRHNPIRVLRDNVVIYEGELESLRRFKDDVNEVRNGMECGIGVKNYNDVRTGDVIEVFEIIEIQRTIA

SEQ ID NO: 44105 - protein, 329 aa, Homo sapiens
  DOMAIN (260)..(305): kw TRANSCRIPTASE REVERSE II ORF2 domain identified by eMATRIX, accession number DM01354N, p-value=1.000e-40, raw score of 13.17
MELKAKTRELREECRSLRSRCNQLEERVSAMEDEMNEMKREGKFREKRIKRNEQSLQEIWDYVKRPNLRLIGVPESDGENGTKLENTLQDIIQENFPNLARQANVQIQEIQRTPQRYSSRRAPPRHIIVRFTKVEMKEKMLRAAREKALNAHKRKQERSKIDTLTSQLKELEKQEQTHSKASRRQEITKIRAELKEIETQKTLQNINESRSWFFERINKIDRPLARLIKKKRENQIDAIKNDKGDITTDPTEIQTTIREYYKHLYAIKLENLEEMDKFLDTYTLPRLNQEEVESLNRPITGAEIVAIINSLPTKKSPGPDGFTAEFYQS

SEQ ID NO: 44106 - protein, 539 aa, Homo sapiens
  DOMAIN (32)..(62): kw TRANSCRIPTASE REVERSE II ORF2 domain identified by eMATRIX, accession number DM01354R, p-value=2.301e-15, raw score of 8.50
  misc_feature (1)...(539): Xaa = X or * as defined in Table 2
VLLTAKFFPSMYSPIKTAGGPASTXVLXMIISIDAEKAFDKIHQPFMLKALNKSENKIPRNPTYNGCEGPLQGELQTTAQGNKRGYKQTQQHDMHMSTKNQYHENGHTAQGMKGITQPSAFIPTAESNSFQPQVKTLPSPIDAKQQLQRKIQKKQQEQKLQSPLPGESAAKKSESATSNGVTNLPNGNPSILSPQPIGIVVAAVPSPIPVQRTRQLVTSPSPMSSSDGKVLPLNVQSHQNCWWTRFNMSSLNVVKMTTISLTPSNSNTPLKHSASFISATGTTEESRSVPQIKNGSVVSLQSPGSRSSSAGGTSAVEVKVEPETSSDEHPVQCQENSDEAKAPQTPSALLGQKSNTDGALQKPSNEGVIEIKATKERRSSPATEQSWMENVFEEQREEGFRRSNHSQIREDSQTKGKEEKRLKELMELKTKVRELREECRSLRSRCDQLEERVSAMDDEMNEMKREGNFREKRIKRNEQSLQEIWDYVKRPNLRLIGVPESDGENGTKLENTLQDIIQENFPNLARQANIQIQEIQRTP

SEQ ID NO: 44107 - protein, 75 aa, Homo sapiens
MSVRSAWCRAEFNSWVSLLTFCLIDLSNVDSGVLKSPIINVWESKSLCRSLRTCFMNLGAPVLGAYMFRIVSSSC

SEQ ID NO: 44108 - protein, 101 aa, Homo sapiens
  misc_feature (1)...(101): Xaa = X or * as defined in Table 2
KGRNIQLNGPSSRVSLWRSLYFLNLNTGLPCXIGEVLLDNILQSVFQLGSILPITFRYTNQTXIWSFHIVPYFLEALLISFYSFFSKLPFSLHFIHFIFHR

SEQ ID NO: 44109 - protein, 1244 aa, Homo sapiens
  DOMAIN (343)..(390): Aldehyde dehydrogenases glutamic acid proteins domain identified by eMATRIX, accession number BL00687D, p-value=4.774e- 24, raw score of 26.00
MNSVIVKELTATSCVASHPGRSHALLAMAKGFTTEQRLRIRRAICVEDSSAALRRVRDVGARSTREHICYRRTCLEATSRKHRTLLIQYIIRLHTLNHALRRYSSLTWLKQRITTTPTHLANSKSRQASVADYEETVKKATEAWKIWADIPAPKRGEIVRQIDDALWEKIQVLGSVVSLEMGKILVEGVGEVQEYVDICDYAVGLSRMIGGPILPSERPGHALIEQWNPVGLVGIITAFNFPVAVYGWNNAIVMICGNVCLWKGAPTTSLISVAVTKIIAKVLEDNKLLGAICSLTCGGADTGTAMAKDERVNLLSFTGSTQVGKQMALMVQERFGRSLLELGGNSTIIAFEDADLSLVVPSALFTAVGIAGQKCTTARRLFVHESIHHEVVNRLKKAYAQIRVGNPWDPNVLYGPLHTKQAVSMFLGAAEEAKKEAELEPVRAPSLIAFFHGHSACMCPFRWRYSRFSLKQQRILAHDPITNGTRSATIHEATAAGRLTTEESIEFGTLSKEYHQSTFAGHFLEVGVHSATGEVRVRRMLAVCPAGRILNPKTARSQVIGAMTMGMGAALMEELAVDDRLGYFVNHDMAGYEVPVHPDIPIQEVIFLDDTRPHILPDEGQSCRMWFKEEQCHTRFLDKDEHWHKPEQAFLTDDHRTILRFAVEALMSGKERAVKCEMSVAFRYPGSRAIFPIIPCSAKPVRMSTCSWRATVIAMSLRLTEVLGQQNRYGSNNPYAHGPNVRPSFCVATVRAVSSIPTAPKSALYDGRSVHLKSPLTGCRCSVPVAGEVKHTYHGQYSIRSPYVRPKPPPAFLIISVKSALYDGSLLYVLLVNRTPPPSLFGLSLLPVVLQMRTHPELRDFPISGIGGIETWEDAAEFLLLGAATLQVTTGIMQYGYRIVEDMASGLSHYLADQGFDSLQEMVGLANNNIVPAEDLDRSYIVYPRINLDKCVGCGRCYISCYDGGHQAMEWSEKTRTPHCNTEKCVGCLLCGHVCPVGCIELGEVKFKKGEKEHPGLVLVKIRCSGTLFHREWLSTRLCKKESHPGKDKGKQQEMEKKCVQSSSSCLMRRLRVLSGLQIPAPSVGRIRRLRRIRQRCRLPDATLARLIRPTNSRTLRRIRRLRRIRQWCRLPDATLARAYRGRTNSPHPPAGQRRELPFRNAISRYRHRPRQCAHCRKRHHDERCHAVRKSQYSGFTLCSFATVETGARSLAVNPRKRANGFANHVEVSIATGSHKHQFRQTTS

SEQ ID NO: 44110 - protein, 72 aa, Homo sapiens
  misc_feature (1)...(72): Xaa = X or * as defined in Table 2
HFFLHFNFGESDNYVSWSFSSRGVSLWRSLYFLNLNVGLPCXIGEVLLDNILQSVFQLGSILHITFRYTNQT

SEQ ID NO: 44111 - protein, 317 aa, Homo sapiens
MVLTVMFFVFSCVLSLTPADLGCGKSIEINKLNRITALFMLVTTWIVATLNPSILGMIETLGGPIIAMILFLMPMYAIQKVPAMPYGRNVKRNDPATIWVIVPDICDPFFSEIIRGIEVTPANHGYLVLIGDCAHQNQQEKPFIDLIITKQIDGMLLLGSRLPFDASIEEQRNLPPMVMANEFAPELELPTVHIDNLTAAFDAVNYLYEQGHKRIGCIAGPEEMPLCHYRLQGYVQALRRCGIMVDPQYIARGDFTFEAGSKAMQQLLDLPQPPTAVFCHSDVMALGAFLRRDDVGLAIYAQNSPPAGVAENLISQM

SEQ ID NO: 44112 - protein, 50 aa, Homo sapiens
LMPSLPVMVLPLLAFAGGMAGLILLKMLAKTHQPMKWRSPAWRFLHAGPA

SEQ ID NO: 44113 - protein, 97 aa, Homo sapiens
  misc_feature (1)...(97): Xaa = X or * as defined in Table 2
SHRLLRLLHSSRSSPGLVSSSISSFKHFSVLVILFTLMIVSFAVQKLFSLIRSHLSILALVAIAFGVLVMKSLPTPMSSMVLSRSFFXGFYGFRSYI

SEQ ID NO: 44114 - protein, 298 aa, Homo sapiens
MGKKQSRKTGNSKKQSASPPPKECSSSPATEQSWTENDFDELREEGFRRSNYSELQEEIQTKGKEVKNFEKNLDECITTITNTVKCLKEPMELKAKARELHEECRGLRGRCDQLEERVSVMEDEMNEMKREGKFREKRIKRNEQSLQEIWDYVKRPNLRLIGVPESDGENGTKLENTLQDIIQENFPNLARQANIQIQEIQRMPQRYSSRRATPRHIIVRFTKVEMKEKMLRAAREKEDLTSHNIPLNQSLIQSKALTLINSVKPERGEEAAEGKFETGRDRFMTFKERRCLHNIKPQ

SEQ ID NO: 44115 - protein, 452 aa, Homo sapiens
  DOMAIN (216)..(257): kw TRANSCRIPTASE REVERSE II ORF2 domain identified by eMATRIX, accession number DM01354I, p-value=1.000e-40, raw score of 15.55
MEDQMNEMKREDKFREKRIKRNEQSLQEIWDYVKRPNLRLIGVPESDGENGSKLENTLQDIIQENFPSLARQANIQIQEIQRTPQRYSLRRATPRHIIVRFTKVEMKEKMLRAAREKDRSTRQKVNKDTQELNSALHQADLIDIYRTLHPKSTEYTFFSAPHHTYSKTDHIVGSKALLSKCKRTEIITNYLSDHSAIKLELRIKNLTKSRSTTWKLNNLLLNDYWVHNEMKAEIKMFFETNENKDTTYQNLWDAFKAVCRGKFIALNAYKRKQERSKIDTLTSQLKELEKQEQTHSKASRRQEITKIRAELKEIETQKTLQKINESRSWFFERINKIDRPLARLMKKKREKNQIDTIKNDKGDITTNPTEIQTTIREYYKHLYANKLANLEEMDTFLDTYTLPRLNQEEVESLNRPITGSEIVAIINSLPTKKSPGPDGFTAEFYQRYKEEL

SEQ ID NO: 44116 - protein, 122 aa, Homo sapiens
  misc_feature (1)...(122): Xaa = X or * as defined in Table 2
LALLVELIPLPLCNGLLCLFXSLLVXSLFYQRLGLQPLPFFVFHLLGRSSSILLFXAYVXLFWHDFAAAGTGCSFPCLALPSGALVGQAWWXQKSLSICLSVKDFISPSLMKLSLAGYEILG

SEQ ID NO: 44117 - protein, 378 aa, Homo sapiens
MNEMKREDRFREKRIESNEQSLQQRGEYVKRPNLRLIGVPESDGQNGTKLENTLQDIIQENFPNLARIYQTLTMSYHGLIYYPGKHLAAGHHGGDYGANLVYGDMAEQKCSKILAFAHIMMVLTVMFFVFSCVLSLTPADLAAAKEQNISILSYLANHFNAPVIAWMAPIIAIIAITKSFLGHYLGAREGFNGMVIKSLRGKGKSIEINKLNRITALFMLVTTWIVATLNPSILGMIETLGGPIIAMILFLMPMYAIQKVPAMRESLECLTEVTIMPLSPYLSFAGNCSDAIAYYQRTLGAELLYKISFGEMPKSAQDSAENCPSGMQFPDTAIAHANVRIAGSDIMMSQCHAVRKSQLLRLYAGARFATGRRRKTLV

SEQ ID NO: 44118 - protein, 43 aa, Homo sapiens
ERASLSCASFQRECFQFLPIQYDIGCGFVIDSSYYFEIRPINT

SEQ ID NO: 44119 - protein, 577 aa, Homo sapiens
  DOMAIN (291)..(338): Glucose inhibited division protein A family proteins domain identified by eMATRIX, accession number BL01280G, p-value=4.393e- 32, raw score of 14.50
MAPVAHNGYWLVDGAVVNPIPISLTRALGADIVIAVDLQHDAHLMQQDLLSFNVSEENSENGDSLPWHARLKERLGSITTRRAVTAPTATEIMTTSIQVLENRLKRNRMAGDPPDILIQPVCPQISTLDFHRAHAAIAAGQLAVERKMDELLPLKGDRANAVANLEKALALDPHSSNNDKWNSLLKVNRYWLAIQQGDAALKANNPDRAERLFQQARNVDNTDSYAVLGLGDVAMARKDYPAAERYYQQTLRMDSGNTNAVRGLANIYRQQSPEKAEAFIASLSASQRRSIDDIERSLQNDRLESKFIQGLFFAGQINGTTGYEEAAAQGLLAGLNAARLSADKEGWAPARSQAYRVRARGRVSVVLGHVFSPSDAQLAQLNDGVPVSGSSGLFDLVQNMSPEQQQILLQASAASTFSGLIGNAILAGGVILIIQLVSAGQRVSALRAIGASAPILPKLFILIFLTTLLVQIGIMLVVVPGIIMAILLALAPVMLVQDKMGVFASMRSSMRLTWANMRLVAPAVLSWLLAKTLLLLFASSFAALTPEIGAVLANTLSNLISAILLIYLFRLYMLIRQ

SEQ ID NO: 44120 - protein, 147 aa, Homo sapiens
  DOMAIN (24)..(41): Zinc finger C2H2 type, domain proteins. domain identified by eMATRIX, accession number BL00028, p-value=2.059e-14, raw score of 16.07
MVDHQAATLADHKKIHTGEKPHKCDKCGKAFNCSSNLTRHKKIHTDEKLYKPKRYDNDFDNTSNFSKYTKNHPGEKPLKCEELQMLWYELPGYLRLPCKQLWPDWVPGRGQQTKECSVGPASSDLQDHPAEIRPNSSVGLKSLMGDS

SEQ ID NO: 44121 - protein, 105 aa, Homo sapiens
RWCWLGAGYWPVKVLMPSLCPPRKSDCSECGRLPCSLHSVSTKAGVEFSGSLPTKVSSTMAVAGSGRGILHFHLLVGQAKPNSPLQTCASKVIWGVAMVLGEAGV

SEQ ID NO: 44122 - protein, 105 aa, Homo sapiens
  misc_feature (1)...(105): Xaa = X or * as defined in Table 2
GPGSLQSSPLLSPPWPRASSPLLLRPSVRGWHLGEPXNCFPSPLAASEQAPKRSSXPQCNHRXRETAARGLAYPPDRPLPSMLSCESPETPAKAGPGRERGCEKC

SEQ ID NO: 44123 - protein, 74 aa, Homo sapiens
CPCRQPAAPRPVLGRCAQQQRAPPGEAWPAARPRPATAPAVLLPPSAVPAAAQNWNCPGRPQLCISPRSVDKKK

SEQ ID NO: 44124 - protein, 74 aa, Homo sapiens; identical to SEQ ID NO: 44123

SEQ ID NO: 44125 - protein, 159 aa, Homo sapiens
  DOMAIN (91)..(103): High potential iron-sulfur proteins domain identified by eMATRIX, accession number BL00596B, p-value=6.657e-09, raw score of 13.07
  misc_feature (1)...(159): Xaa = X or * as defined in Table 2
XTLFFVFTCPWLTRAVSPAVPVYNGIIFLFVLANFSMATFMDPGVFPRADEDEDKEDDFRAPLYKNVDVRGIQVRMKWCATCHFYRPPRCSHCSVCDNCVEDFDHHCPWVNNCIGRRNYRYFFLFLLSLSAHMVGVVAFGLVYVLNHAEGLGAPHTTIT

SEQ ID NO: 44126 - protein, 232 aa, Homo sapiens
MLLAACGAHPAPACRAQRSPPGPAWTLPRCPARTGVPTQGTHPGARDAGTPLQLPQPQRVERDCHRLQPAPRPPTARGPASPRDRCPRARAVRALPIAARVPPDAAPTHVNTKKRVLEPTSSAAAVATGMYLAGCQDCHLPPPAEPWSKLPNADSGKKRNQAYLHHRILQCQQAASSNAPCNTAPPQDGTVSQPFRGAFSLLGTLPWRHFSHPQMKEVSLEFYWNPKSNTEC

SEQ ID NO: 44127 - protein, 119 aa, Homo sapiens
ISSRPDSASSHCQHLAVYSRVQLVEEGDSPGTPPSTSRWPRPPRCWSAPAPSSSCSRESAPRLGARGQRWAGPAQPGHGGSGRGGWRGPGQWAGGAPAAGDGSPSPPAGAPFHQSGVET

SEQ ID NO: 44128 - protein, 42 aa, Homo sapiens
WCGAGGRGARGEGGRAARVSGSGGSGISFGDRVIRSLLTHKP

SEQ ID NO: 44129 - protein, 30 aa, Homo sapiens
TWMKLETIILSKLLQGQKTKHRMFSLVGGN

SEQ ID NO: 44130 - protein, 181 aa, Homo sapiens
MGKDFMTKTPRAMATKAKIDKWNLIKLKSFCTAKETTVSMNRQPTEWEKIFAIYPSDKGLISRIYKELKQIYKKKNNPIKKWTKDMNRHFSKEDIYAANIHMKKCSSSLVIREMQIKTTMICHLIVAVRMAIIKSGNNRCWRGCGEIGTLLHCWDMDEAGNHHSEQTIARTENRTLHVLTH

SEQ ID NO: 44131 - protein, 47 aa, Homo sapiens
LSLLSGTWMKLETIILSKLSQGQKNRHRMFSLTGMMAYSCGTSYLGD

SEQ ID NO: 44132 - protein, 29 aa, Homo sapiens
WMKLETIILSKLSQRQKAKHCMFSLIGGN

SEQ ID NO: 44133 - protein, 123 aa, Homo sapiens; identical to SEQ ID NO: 43218

SEQ ID NO: 44134 - protein, 71 aa, Homo sapiens; identical to SEQ ID NO: 42433

SEQ ID NO: 44135 - protein, 31 aa, Homo sapiens; identical to SEQ ID NO: 42437

SEQ ID NO: 44136 - protein, 29 aa, Homo sapiens
WMKLETIILSKPSQGQKTKHCMLSLIGGN

SEQ ID NO: 44137 - protein, 96 aa, Homo sapiens
MEYYAAVKNDEFMSFAETWMKLETIILSKLSQGQKTKHCMFSLKDGRRCQQDQKTLDSCGRCRAGPSLNTTLKPKRVKTVSGNRIKSNQTNKLQKK

SEQ ID NO: 44138 - protein, 332 aa, Homo sapiens
MEYYAAIKKDEFLSFLGTWMKLETIILSKLSQGQKTKHCDSRGLPATERNHLVTEEGECWFDSPIIAEYIELMNVAPAMLPRDPLESLRVRKIEALADGIMDAGLVSVREQKRFQLTSAKRTKSTFYGGKNPWGIRIDANVMQGIWQMTKQGDAITGSMVFFCVIGAPLILVTSIAYLWFGNRLGMNLRPVLLMLERLKEWVMLDIYLVGIGVASIKVQDYAHIQAGVGLFSFVALVILTTVTLSHLNVEELWERFYPQRPATRRDEKLRVCLGCHFTGYPDQRGRCPRCHIPYRLRTCTPERLAASGRKTEGKPQTVYREEERETQRERES

SEQ ID NO: 44139 - protein, 64 aa, Homo sapiens
MEYYAAIKNDEFMSFVGTWMKLENIILSKLLQGQKTEHRMFSLIGLCEIRGDKVGSSVHETFPK

SEQ ID NO: 44140 - protein, 88 aa, Homo sapiens
WMKLETIILSKLSQGQKTKHRMFLLIVQGHRWPEPLAAGTPVDRRTSHRRAHSHTHSHSLTLGPLTHTFTLAHTGTTQICQFIPLAQL

SEQ ID NO: 44141 - protein, 59 aa, Homo sapiens
WMKLETTILSKLLQGQKTKHCMFSLIGILPISEPPSNRIFACWGKPAWTACCNSLRARR

SEQ ID NO: 44142 - protein, 56 aa, Homo sapiens
MESYAAIKNDEFMSFVGTWMKLETLILSKLSQGQKTKHCMFSLTDVIARRRSWTSI

SEQ ID NO: 44143 - protein, 50 aa, Homo sapiens
  misc_feature (1)...(50): Xaa = X or * as defined in Table 2
KRRRRRGQIRKMKEEEGNRRTWMKLETIILSKLXQRQKTKHRMFLLIGGN

SEQ ID NO: 44144 - protein, 78 aa, Homo sapiens
YQGSFLLERTTGCLSIWGFQGTRMKLETIVLSKLSQGQKTKHCMFSLIGGNWAMRTLGHRKGIITHQGLLWGGGRGER

SEQ ID NO: 44145 - protein, 363 aa, Homo sapiens
MDEAGNHHSEKTIARTENQTLHVLTHRWELNNENTRTQGGEHHTPGPVMGAAKLNKSDIMDKASNKISTSKRRNNYASGKNDKRKKSKILMSDHNKSAEQKTRIEEVKRQPLAPTLGTIRLISGSNQRCDRCGGGTGRTLSDRSVCSRACRQPPGECATAARASGEGARGLFSRELPLSSPLSQKHRSLVASTKITQKQRFCMGTWAPDARGLHLCFHKPVEIARGHLRLKADNKARSCGGGHYGWETPGPEHCGFAELFEGSSDPGIPGEADKHLGIPGLGGWGRHLFANARLLLPHRPPSQLPTPYKIKEAQGRKFLIGKSNIQMLSALKCPFENIVDDGYYPDNAVNFCSLQKIFPQIEK

SEQ ID NO: 44146 - protein, 210 aa, Homo sapiens
  misc_feature (1)...(210): Xaa = X or * as defined in Table 2
MLNEKFKFYSKCSRKLLSEGDHQICIFERSLLLLQEKRIEERPARKVVGVITGNRQVTVVGLGLELGQWKWKCVEDQRLQSKFGDRFDIADEMGNCQMTPSRLLATRDMDEAGNHHSQQTIARTKNQTPHVLIHRRELNNEDTWTQEGEHHTLGPVVGKEKAEGENRIQTPADLQICDKKMSGIFPLVVSVFSKKHEASHQLKACAVSAX

SEQ ID NO: 44147 - protein, 35 aa, Homo sapiens; identical to SEQ ID NO: 42446

SEQ ID NO: 44148 - protein, 72 aa, Homo sapiens
  misc_feature (1)...(72): Xaa = X or * as defined in Table 2
WARTSCLKHQKQWQQKPKLANGIXLNXRASAQQKKLPSEWTGTWMKLETIILSKLLQGQKTKHRMFSLIGGN

SEQ ID NO: 44149 - protein, 61 aa, Homo sapiens
  misc_feature (1)...(61): Xaa = X or * as defined in Table 2
GVDQRAVCSSRIWXSHLFLFHSVVVHLPWAGTWMKLETIILSKLSQGQKTRHRMFSLIGGN

SEQ ID NO: 44150 - protein, 105 aa, Homo sapiens
  misc_feature (1)...(105): Xaa = X or * as defined in Table 2
YSYKLEIIIGKQPEIYRDPCYRPAVXSQTAVLAISEAPWAXDLPSQVSDTISWWTVCXAHWKSAVLGWEXPGFPGTWMKLETVSLSKLSQGQKTKHHMFSLIGGN

SEQ ID NO: 44151 - protein, 50 aa, Homo sapiens
HDFKSGCRWAASHHGTWMKLETIILSKLSQGQKTKHRMFSLAGVETGIKR

SEQ ID NO: 44152 - protein, 54 aa, Homo sapiens; identical to SEQ ID NO: 41470

SEQ ID NO: 44153 - protein, 97 aa, Homo sapiens; identical to SEQ ID NO: 41455
  misc_feature (1)...(97): Xaa = X or * as defined in Table 2

SEQ ID NO: 44154 - protein, 201 aa, Homo sapiens
  DOMAIN (99)..(140): TRANSFERASE METHYLTRANSFERASE BI domain identified by eMATRIX, accession number PD01427B, p-value=5.154e-32, raw score of 22.45
PPLTCQCSHLCVTLVGHWIKLETIILSKLSQGQKTKHRVFSLIGGAGALAKECMSLYPGCKITVFDIPEVVWTAKQHFSFQEEEQIDFQEGDFFKDPLPEADLYILARVLHDWADGKCSHLLERIYHTCKPGGGILVIESLLDEDRRGPLLTQLYSLNMLVQTEGQERTPTHYHMLLSSAGFRDFQFKKTGAIYDAILARK

SEQ ID NO: 44155 - protein, 227 aa, Homo sapiens
MEQLSPMASSYHSDHAAVSLAIFFDYKGIKLGIKLAAVPSALPTPAGPSDSAGPLWHPCPVPVTTQFFPLDPGIQSKQGGPLLQLAANNYNLKPKQHFGSWFGTMKRLGTWMKLETIILSKLSQGQKTKHRMFSLIGSTDQQRLVVKNVQGRVCPGSTGHGAWEAWTAMRKVDSPLQTGSLRPGWCRQVGSHARSGSAEAAGNPGLHPGICPRVEDGIQVAENFPEV

SEQ ID NO: 44156 - protein, 82 aa, Homo sapiens
MEYYAAIKKDEFVFFAGTWMKLETIILSKLSQGQKTKHRMFSLIEAPDVPTAPGVRPGLRTGRGDPTPRARCSGQVRGRKGC

SEQ ID NO: 44157 - protein, 58 aa, Homo sapiens; identical to SEQ ID NO: 43228

SEQ ID NO: 44158 - protein, 681 aa, Homo sapiens
  DOMAIN (359)..(381): OLFACTORY RECEPTOR SIGNATURE domain identified by eMATRIX, accession number PR00245A, p-value=9.135e-15, raw score of 18.03
MDEAGNYHSKQTITRTENQTQHVLTHSEETVAQEDDVPLTRSWLLKALKPQEVQSRAKSPDGQYKEEEKEKDSRGCSLLDFPSMPASHCADKAKSDRSGEEVGSGSRSTSWYASKSFQTPPPHKPSELQIINLLNSIAETSAAGVLEVLARAIRQEKEIKGIQLGKEEFKLSLFADDMIVYLENPIVSAQNLLKLISNFSKVSGYKINVQKSQAFLYTNNRQTESQIMSELPFTIASKRIKYLGIQLTRDLKDLFKENYKPLLNEIKEDTNKWKNIPCSWVGRINIVKMAILPKKEVLQMRGFNKTTVVTQFILVGFSSLGELQLLLFVIFLLLYLTILVANVTIMAVIRFSWTLHTPMYGFLFILSFSESCYTFVIIPQLLVHLLSDTKTISFMACATQLFFFLGFACTNCLLIAVMGYDRYVAICHPLRDMDEAGNHHSQETIARTENQTLHVLTHRWELNIENTWTQEGEHHTLGPVVGSCFPLPAVCCSQGCLEQLHNCWCPWQEDDIDSKIFSFVNQSWARGEGSGWLDELQTHGWDSESGTIIILHNWSKGNFSNEELSDLELLFRFYLFGLTREIQDHASQDYSKYPFEVQVKAGCELHSGKSPEGFFQVAFNGLDLLSFQNTTWVPSPGCGSLAQSVCHLLNHQYEGVTETVYNLIRSTCPRFLLGLLDAGKI

SEQ ID NO: 44159 - protein, 126 aa, Homo sapiens
  DOMAIN (37)..(83): kw TRANSCRIPTASE REVERSE II ORF2 domain identified by eMATRIX, accession number DM01354O, p-value=3.455e-13, raw score of 8.73
MDKFFDTYTLPKLNQEEVESLNRPITGSEVEAIINSLPTEKSPGPDGFTAEFHRTWMKLETIILSKLSQGEKTKHRMFSLIASHCYGVATVCSSPPNLMLKFDPQCGGIDRLGLVEGFWVMEVDTS

SEQ ID NO: 44160 - protein, 227 aa, Homo sapiens
MAFLETSAPLYEHIWTLQVAFSTVGLGETLKVAMISMSTSSGYFLQLLQYCCSSTITITGYKGFLRDLKVETRADGVMRTMAPEKLLKSMPILQGQIDALLEFDVHPNELTNGVINAAFMLLFKDLIKLFACYNDGVINLLGTWMKLETIILSKLLQRQKTKHCMFSLIGGNRTMRTLGHRKGNITHQGLSWGGQMPHQRTSKQHKKFMWTGTESWLQAKGLNYQQL

SEQ ID NO: 44161 - protein, 324 aa, Homo sapiens
MDKFLDTYTFPRLNQEEAESLNRPITDSEIEAIINRLPTKKSPGNRQIHSRILPEVQGGADLQREGTESGERKDPEAGGMRGKAGNPIQDYSTPRLVPGPQWLWGNRDMDEAGNRHSQQTIARTKNRTLHVLTHRWELNNENTWTQEGEHHTMGPVIGPMGTLLDSTGLNTDTWKPYNCICPASDRVPDQILPEDTCRQEYNFGNTENGVMMQPREATEAEDTDAHSTQVTVPGQIAENKIPRNPTYKGCEGPLQEKLQTTTQRNKRGQKLMEEHSMLMDRKNQHHENGRTAQGTWMKLETVILSKLSQGQKTKHRMFSLIGGN

SEQ ID NO: 44162 - protein, 32 aa, Homo sapiens; identical to SEQ ID NO: 43226

SEQ ID NO: 44163 - protein, 158 aa, Homo sapiens
MGKDFMAETPKAMGTKVKIDRWDLIKLKSFCTAKETTIRVNRQPTKWEKIFAIYLSNKGLIPRIYNELKQIYKKKSNNPIKKWAKDMNRHISKEDIYAANRHMKKCSSSLAIREMQIKTTMRYHLTPVRMVIIKKSGNNRCWRGCGENRNTFTLLVGL

SEQ ID NO: 44164 - protein, 155 aa, Homo sapiens
  DOMAIN (140)..(151): GTP cyclohydrolase II domain identified by eMATRIX, accession number PF00925F, p-value=9.850e-09, raw score of 13.23
MGCREKFGPRNSAVRWTLAHFTKEESICAPFGAAADGKGAGPCYTDVVRGPQRCVTWDPVRTPMFHYQVHFPPKSSSKQALGLEVTCCERCVSSMELCHLWLLRPLKASWLNIPSPVNRPISEPETEDEKKRFEEGKGRYLQMKAKRQGHAEPQP

SEQ ID NO: 44165 - protein, 389 aa, Homo sapiens
  DOMAIN (373)..(384): GTP cyclohydrolase II domain identified by eMATRIX, accession number PF00925F, p-value=9.850e-09, raw score of 13.23
  misc_feature (1)...(389): Xaa = X or * as defined in Table 2
FFSSQAAALLVVLGSSHTLQRARKHSAPGLPDTCALLQPPAASAAAAPSMSGPDVETPSAIQICRIMRPDDANVAGNVHGGTILKMIEEAGAIISTRHCNSQNGERCVAALARVERTDFLSPMCIGEVAHVSAEITYTSKHSVEVQVNVMSENILTGAKKLTNKATLWYVPLSLKNVDKVLEVPPVVYSRQEQEEEGRKRYEAQKLERMETKWRNGDIVQPVLNPEPNTVSYSQSSLIHLVGPSDCTLHGFVHGGVTMKLMDEVAGIVAARHCKTNIVTASVDAINFHDKIRKGCVITISGRMTFTSNNSMRFKVLLDPAPVVDSFQKRYRGRQCLSSTXVSLSQERQVPLPVPQLVPETEDEKKRFEEGKGRYLQMKAKRQGHAEPQP

SEQ ID NO: 44166 - protein, 80 aa, Homo sapiens
  misc_feature (1)...(80): Xaa = X or * as defined in Table 2
SLFELENRSKFSVATAGLVPSRRLSINCIRRAFITSSNGFPLWFCLHQKGPVDCCVAVYXCGTEDGSWAPTHPGVGPSLP

SEQ ID NO: 44167 - protein, 154 aa, Homo sapiens
MAGAPPPASLPPCSLISDCCASNQRDSVGVGPSEPGVGYSLMVRRFLSRSEKRNIRVGVTRFSSTVQNNQDLEVKLASLSGVSSPEVLSLTAQDIKDEDTPRVRSGGGKSKIKALEGLVSGEGPVSASKMAPFLLRPPEKMNVVHIVEEMEGQK

SEQ ID NO: 44168 - protein, 94 aa, Homo sapiens
PCSLSSDCCASNQRDSVGIGPSEPRVGYNILVIRFLSPSEKRSPRVGVTRFSSAWEPSQLAGILPISEPPSNRIFACWGKPAWTACCNSLRARR

SEQ ID NO: 44169 - protein, 444 aa, Homo sapiens; identical to SEQ ID NO: 42476

SEQ ID NO: 44170 - protein, 251 aa, Homo sapiens
MVGSPPPASLLPCSLISDCCASNQGDSVGVGPSEPGLLRVLFPLPTLPPCPTFVPLYPVHLSLPSCLQITSSCVRNWWVLGLPDFKNEAADPQGGNAVVDGCGKAQNSTELAAEEYTLMSIDTIINGKEGVFPGLIPILNSYLENMEVDVDTRCSILNYLKLIKKRASVVSLMEKIFTRSTYSREAQGPDMNTPSVGIFKELSEVPAARSPKSRCQQGHAPSEGSMEKLFLASSSFWWLLAILGVPGFAAV

SEQ ID NO: 44171 - protein, 172 aa, Homo sapiens
MVGAPPPASLPPCSLISDCCASNQPDSVGVGPSEPGPAVKGNQLLPVSLVKEKPPWRPIRKRPLPARGRFINAAGTTGFPTGKRAVSATQLMDFADFGTTIKQDFRLLGQTSVDRLLQLSQGQAVKGNQLLPVSLVKRKTTLAPNTQTASPRALADSLMQLARQVSRLESGQ

SEQ ID NO: 44172 - protein, 69 aa, Homo sapiens
  misc_feature (1)...(69): Xaa = X or * as defined in Table 2
IYFNTQESFCPPRPLKLCDGRGCHKGLXNAFKAFSPFSWPLALGSFLLMQISAACLNSFPENGLFFSTT

SEQ ID NO: 44173 - protein, 364 aa, Homo sapiens
  DOMAIN (167)..(178): dUTPase domain identified by eMATRIX, accession number PF00692B, p-value=9.804e-09, raw score of 8.14
MEDEMNEMKREGKFREKRIKRNEQSLQEIWDYVKRPNLRLTGVPESDAENGTKLENTLQDIIQENFPNLARQANVQIQEIQRTPQRYSSRRATPRHIIVRFTKVEMKEKMLRAAREKEVFVPEGGTLPRGNTTMIPLNWKLRLPPGLFGLLLALRQQAKNGVTVLAGVVDPDYQDEISLLLHNREILNVSTLQQSYSSGEKQVSFLISDCCASNQRDSVGVGPSEPGVGYSLMVHRFLSLSEKRSIRVGVTRFSRCVRHPFLRLRKGTPDPLRFPKIQKLLKLQCSHGASITWEAASKQHAALSETAPPRVRMALEAKRKDSNRNENLDKRTLCAAQGKSTVEVQGRVCAQGRATGLWADSRDA

SEQ ID NO: 44174 - protein, 247 aa, Homo sapiens
MVGAPSPASLLPCSLSSDCCASNQRDSVGIGPSEPRVGYNILVIRFLSPSEKRSIWVGVTRFSSIRFASSLVDAAFLQPLEATMGNKRNCKSKPVNLRSQRMTTNKLKNFTRLKQYYLDDKDNSYQLLFNKSLNVCYYLSQSEMKGDVCTTVQEEWILCGSNPCVLLELPGAAQANWGKECAARNVLWARELEMGVWGLGFKSHLGQLTLALSPHLKIIGLHSVICGLQPGKPGNHRLKQQQQRQQQ

SEQ ID NO: 44175 - protein, 872 aa, Homo sapiens
  DOMAIN (402)..(437): RECEPTOR INTERLEUKIN-1 PRECURSOR domain identified by eMATRIX, accession number PD02870D, p-value=5.800e-10, raw score of 15.74
  misc_feature (1)...(872): Xaa = X or * as defined in Table 2
WLLQKHKLHVSRXLGLPDTSWILPSRPDAGGRFPIRTPPCVLVVHKPSRHCREWTANTVLPKGALAKWLLEPKADLQGWHLPADGQYTKPSISYNIKLYINCYNRTVTTAAQHQQVQRKHGASIFLAENVAVREKDKEERKVTRAPTEQAWTAGSWIETAYREIKGVGQESVCITVMHLEELVYELAWIIMSAVVEAFDPVAPSSKCRLNPDPDPYCCTPYTLHTSPPPPPSCCTPYTLHTGPPPQTPFCCTPYTLDTSPSPQTHSCCTPYTLHTVPTFHLPAAHPIHLHTIPPPQTQGQGFVSEDEYLEISDIKRDQSGEYECSALNDVAAPDVRKVKITVNYPPYISKAKNTGVSVGQKGILSCEASAVPMAEFQWFKEETRLATGLDGMRIENKGRMSTLTFFNVSEKDYGNYTCVATNKLGNTNASITLYVDHIVGSKALLSKCKRTEIITNYLSDHSAIKLELRIKNLTQNHSTTWKLNNPLLNDYWVHNEMKAEIKMFFETNKNKDTTYQNLWDAFKAVCRGKFIALNAHKRKQERSKIDTLTSQLKELEKQEQTHSKANRRQEITKIRAELKEIETQKTLQKINESRSWFFERINKIDRLLARLIKKKREKNQIDAIKNDKGDITTYPTEIQTTIREYYKHLYANKLENLEEMDKFLDTYTLPRLNQEEVESQNRPITGSEIVAIINSLPTKKSPGPDGFTAEFYQRYKEELVIYRFNAVPIKLPMPFFTELEKTTLKFIWNQKRARIAKSVLSQKNKAGGITLPDFKLYYKATVTKTAWIKSLLTWAIICYNLQHTHGPTHFSSFICSHSHSTSIYWEQIADEALDYSNETPVAHRSDHAGLSRSDKNENPVGIFEGGSRTASW

SEQ ID NO: 44176 - protein, 209 aa, Homo sapiens
AMAGSPPPASLLPCILISDCCASNQRDSVGVGPSEPGVGYSLVVRRFLSPSEKRSIRVGVTRFSRCRPSPLSLTQKGNSLTSWASQVLTPAPEKQPDNKLPLPRRGSRDPTEYFHGQEVRDKSDEHVDHVSQIHSFRDEVKRLGAEDSSNAETPTELHEFNTGGVYRPPNSTSVIQPLDQGVIRTFKPCYTKYSLEKIVSAVEENPDRT

SEQ ID NO: 44177 - protein, 484 aa, Homo sapiens
MVGAPSPASLLPCSLSSDCCASNQRDSVGIGPSEPRVGYNILVIRFLSPSEKRSIWVGVTRFSSIHFASSLVDAAFLQPLEATMGNKRNCKSKPVNLRSQRMTTNKLKNFTRLKQYYLDDKDNSYQLLFNKSLNVCYYLSQSEMKGDVCTTVQEEWILCGSNPCVLLELPGAAQANWGKECAARNVLPEQAPLHQLKSFISPILPATCSRDGSATYLRPGKFTDGSCSANNDMNNKVQAEVVSDGDEELVGKWSKGDSWYVSAKTLVAFCPCPTDLWNFEVERDDFGYLAEEIYKQQSIQESHSSTSDMWELRPSIVEVYDFRCSWKKAGRKEPAETGKVKILVSHRELDGPFEHKRTRYKCIEDAFISYLKKFETAKEESETRSERHHAGEEFCLVKMSFVVVHGESAGESSLSADPLLFLYSNLRTIVIHVQGAEAVQIETKTLSSRELILRLPNTYATLIVICVIVQLLKAFVYLYLVKQL

SEQ ID NO: 44178 - protein, 47 aa, Homo sapiens
IVYPRVEIYILYPKRRYQAANSSFWEIVDQIVSMEQLVLTYWPARNN

SEQ ID NO: 44179 - protein, 127 aa, Homo sapiens
  misc_feature (1)...(127): Xaa = X or * as defined in Table 2
SVGALQKQQGWHQRRCISLHFPSFLCVFSLAKSRRADHNQDPRASRMAFSLTSSPLARSAASAVAAFGCGTSGNGRFSSVPXAYRQVFQRIAIAVYGPLMRDRXAHPVKTPDAIDCRIRQPAIPRLQ

SEQ ID NO: 44180 - protein, 60 aa, Homo sapiens
  misc_feature (1)...(60): Xaa = X or * as defined in Table 2
MARAGKEGTPVFLVGGKPEVLAQTEAKLRNQWNVNIVGSQDGYFKPEQRQALFERIHASX

SEQ ID NO: 44181 - protein, 451 aa, Homo sapiens
  DOMAIN (368)..(392): SYNTHASE PHOSPHORIBOSYLFORMYLGLY domain identified by eMATRIX, accession number PD02711B, p-value=9.100e-19, raw score of 14.26
KAWLMTGIVRHWKGRAVPPAEQLLEHLGNGKSFDSVAQAWDAAMADAKAEDTVLWGVEAFRINAAVAKDDTQIHTHMCYCEFTDIMDSIAALDADVITIETSRSDMELLESFEEFDYPNEIGPGVYDIHSPNVPSVEWIEALLKKAAKRIPAERLWVNPDCGLKTRGWPETRAALANMVQAAQNLRRGARAGCAADFAASARLAVGEALTNIAATQIGDIKRIKLSANWMAAAGHPGEDAGLYEAVKAVGEELCPALGLTIPVGKDSMSMKTRWQEGNEEREMTSPLSLVISAFARVEDVRHTITPQLSTEDNALLLIDLGKGNNALGATALAQVYRQLGDKPADVRDVAQLKGFYDAIQALVAQRKLLAYHDRSDGGLLVTLAEMAVLSSLGQGGYFGHMIITPGSIPVNPKPAKVRQTSLHRPVSRGYRKKRSRSRWLKWATSLKLPCL

SEQ ID NO: 44182 - protein, 90 aa, Homo sapiens
SVRKKYPQAQVSRVAGADLWEELMARAGKEGTPVFLVGGKPEVLAQTEADPVGQQAVQAQPGGLDPQFGGIDRRGCIHGFSPVSPGAIRS

SEQ ID NO: 44183 - protein, 1234 aa, Homo sapiens
  DOMAIN (1132)..(1149): Zinc finger C2H2 type, domain proteins. domain identified by eMATRIX, accession number BL00028, p-value=6.478e-12, raw score of 16.07
IQWKDQDIENLYQNLGIKLSGVYQDKGIPALEEWLTSALTTPFELETRLILQVLARHRQTMRHLYSDLTVTCHQHVGFRIHQHGTAHGIGPTSLNTAEDHRYIFPRLFTTLGINQCGAIRALTRDVIRRVGIVMTSNTEKQIRFTQTHKVVFAAPVRLGDDPDAKALRFQHTTANRHPEAWVIDIRVASNQNDVAAIPAKLIHLFTRHRQKRCRSKTGGPVLRPGEQRLTVEVEREVRPGRLTEINKQLHLSVNPNGIFPASVFRERHRAIHVTDLEHYAFNMERLRLVRAYRPAFPRSFVRGDINTVDVPQLSINTRVITQTPFMPAGHQFLKESDVTAESVFFMKRRQVLKALGISATALSLPHAAHADLLSWFKGNDRPPAPAGKALEFSKPAAWQNNLPLTPADKVSGYNNFYEFGLDKADPAANAGSLKTDPWTLKISGEVAKPLTLDHDDLTRRFPLEERIYRMRCVEAWSMVVPWIGFPLHKLLALANLTAMRNARAAGPLYRAWAEISLCRRIASRRSNGSAHTDDRSVSCRSKYVHRVTFSNGKLESVENLNVPVTQPMAVLKGDLASITAQLEQWRDVSQEPPVWLDIEITTDEYLHDIQRKIQALTESLPVEVLLVRRSREQREIDFTREPFASNGLFAITGPTGAGKTTLLDAICLALYHETPRLSNVSQSQNDLMTRDTAECLAEVEFEVKGEAYRAFWSQNRARNQPDGNLQGQFAAFLNAKPKERAELLEELTGTEIYGQISAMVFEQHKSARTELEKLQAQPAASRFHAGTSAIADSEFAGANFASSMGNISFFFPKAKQGSALGINGGLGNLGVSVMQLVAPLVIFVPVFAFLGVNGVPQADGSVMSLANAAWIWVPLLAIATIAAWSGMNDIASSRASIADQLPVLQRLHLWLLSLLYLVTSFPDVNILRLAFFGPFIGAIARSVGGAISDKFGGVRVTLINFIFMAIFSALLFLTLPGTGSGNFIAFYAVFMGLFLTAGLGSGSTFQMIAVIFRQITIYRVKMKGVSRSYSMTRCPAPFAATPAHYRLKLPALADAVSLSNPSGFLQRYHQETDRYVQRFVLSRHRDIAATHRTLVERLCGRKEGNEHRETFSQIPDCHLNKKSQTGVKPCKCSVCGKVFLRHSFLDRHMRAHAGHKRSECGGEWRETPRKQKQHGKASISPSSGARRTVTPTRKRPYECKSPLFPARDPHPGTCTPHAPAVSSLRLSGEKNGIK

SEQ ID NO: 44184 - protein, 488 aa, Homo sapiens
  DOMAIN (25)..(55): Fructose-bisphosphate aldolase class-II proteins domain identified by eMATRIX, accession number BL00602A, p-value=7.968e- 23, raw score of 21.84
MSKIFDFVKPGVITGDDVQKVFQVAKENNFALPAVNCVGTDSINAVLETAAKVKAPHYFYYIHSKHITSCFIFVDDVLSCLQRLNNQHLPAVSWSCSVSDQIIARVSQSLAKEQSLESLVRQLLEMLEMVTDMESTYLTKWMSKRACSILCLPVTARKCTSRRFAVSWYRVLPAPDNFAAPHRYRVLKTGLLSPGCHHVVLDDGSRSWSGILCDPVERAASCHRSKTPRAPPKAQRDQQHHTTHDIHTTRTHTDHDRTQRPSRDQIARPTHGGTHPPPATNPTTPHPTHTAEDYDSAVNQLNEPWPDLILLDWMLPGGSGIQFIKHLKRESMTRDIPVVMLTARGEEEDRVRGLETGADDYITKPFSPKELVARIKAVMRRISPMAVEEVIEMQGLSLDPTSHRVMAGEEPLEMGPTEFKLLHFFMTHPERVYSREQLLNHVWGTNVYVEDRTVDVHIRRLRKALEPGGHDRMVQTVRGTGYRFSTRF

SEQ ID NO: 44185 - protein, 924 aa, Homo sapiens
  DOMAIN (183)..(228): Cytosolic fatty-acid binding proteins domain identified by eMATRIX, accession number BL00214B, p-value=2.098e-20, raw score of 26.51
MNIDAKILNKILANRIQQHIKKLIHHNQVSFIPGMQGWFNIHKSMKVIQHINRTKDKNYMIISIDAEKAFDKIQQPFMLKTLKKLVAGMMAVAAPDDPPPPSVSSSKPSTVAPPGRISPSGRALCTSLPSALSSSSKFSLLRIFQVPAKLGMVAVAAAAGVNAMLRKVAVAAASKPHVEIRQDGDQFYIKTSTTVRTTEINFKVGEGFEEETVDGRKCRVRPQSHYSVPVSPLGAHGPLLLEEPVSPFAACGAPSLQVPQGAQRWAHSASLRLASSECARCTYAVGPSRNSLCPHAQFRRHLNNAQRAENFSYLLKALGYELARILPLLNERFYPVLSIRTHTGVSFVFIQCLASVLDISLATWENENKIRCTQTLLEGDGPKTYWTRELANDELILLIEFGVVAAPEGQQSTAVYHWCNTAVLDPLACMLLILMNLAKLLSTELGYRARSFPSTQKNLFKNTSRHCMFTQCGSENDVYSSGSLTHGTQVNKLLQNIRERVKTTIFSHNPNQVLTVFVQLLTTNCDKRLGERFWRKRAREKLCHLFVFGYLGGKRQHVLPAFYTLVFDGKVKSCFGFSDKFIHDVAVSSFIHGTFDDLLGASNSQDSNLLTQLFTGTFTLGFNFRLRLGHDFTGRSRWPLQGQGPYVLVLRKQGRQQFLFDVFRWLPLMAAIRTSCRTERTGQTRWPGRGLLRSDSPHKGLSQESYPYAETMRKVIGHLAHGNLEYKHPYLEDRDVKRVGYLVVSTDRGLCGGLNINLFKKLLAEMKTWTDKGVQCDLAMIGSKGVSFFNSVGGNVVAQVPTISQLLPLPASDDDDLKHKSWDYLYEPDPKALLDTLLRRYVESQVYQGVVENLASEQAARMVAMKAATDNGGSLIKELQLVYNKARQASITQELTEIVSGGRRGLNRLFRRGFKDGYLERLSS

SEQ ID NO: 44186 - protein, 442 aa, Homo sapiens
  DOMAIN (157)..(189): ABC transporters family proteins domain identified by eMATRIX, accession number BL00211B, p-value=2.125e-18, raw score of 13.37
MARRILVVEDEAPIREMVCFVLEQNGFQPVEAEDYDSAVNQLNEPWPDLILLDWMLPGGSGIQFIKHLKRESMTRDIPVVMLTARGEEEDRVRGLETGADDYITKPFSPKELVARIKAVMRRISPMAVEELPTNYRLKQVKQLALKCHSVTQKITDLSGGNQQKVLISKWLCCCPQVIIFDEPTRGINVGAKAEIYKVMRQLADDGKVILMVSSELPEIITVCDRIAVFCEGRLTQILTNRDDMSEEEIMAWALPQDHMANDSWSGQDKAQHFIASAMLSAAGNELLKLWLIFWQNRAEQAAFTVFQFYPFFQLMRIRAHCQPTLVIAFKRRDIQSSCDLRMQEPPVWLDIEITTDEYLHDIQRKIQALTESLPVEVLLVRRSREQRERVLASQQRETLSELSVEEVFNRRLALEELDESQQQRLQHLFTTTLHTLAGEHEA

SEQ ID NO: 44187 - protein, 384 aa, Homo sapiens
  DOMAIN (144)..(162): GLYCOSYL HYDROLASE FAMILY 1 SIGNATURE domain identified by eMATRIX, accession number PR00131D, p-value=4.462e-14, raw score of 14.81
MPDALRLSVHHSARVFREKGVTINKAPGDDEILKNTVDFVSFSYYASRCASAEMNANNSSAANVVKSLRNPYLQVSDWGWGIDPLGLRITMNMMYDRYQKPLFLVENGLGAKDEFAANGEINDDYRISYLREHIRAMGEAIADGIPLMGYTTWGCIDLVSASTGEMSKRYGFVFVDRDDAGNGTLTRTRKKSFWWYKKVIASNGEDLENCKESQYSPPESSTAAGRVNTQAIRMLVTVLRCKPPPSTTIVPATEEESFSGWVPCGGFGPFRRFSEESLSPWPSRLQLPGRFSGRRFQSGQWREKFQLCEMNAHITKRFLRMLLCSFYVKIFPVKLLASKRSKYPLVDSRKRLFHNCSIERKVQLYETNAHIKKKFHRILLWSFM

SEQ ID NO: 44188 - protein, 841 aa, Homo sapiens
  DOMAIN (723)..(751): Glycosyl hydrolases family 1 proteins domain identified by eMATRIX, accession number BL00572E, p-value=3.455e-22, raw score of 19.00
MREEFAHRWLARAGEKTPPDALEKLTDPLMFAAAMVSAGKADVCIAGNLSSTANVLRAGLRIIGLQPGCKTLSSIFLMLPQYSGPALGFADCSVVPQPTAAQLADIALASAETWRAITGEEPRVAMLSFSSNGSARHPCVANVQQATEIVRERAPKLVVDGELQFDAAFVPEVAAQKAPASPLQGKANVMVFPSLEAGNIGYKIAQRLGGYRAVGPLIQGLAAPMHDLSPCIAATDAGSAAAQRIGDLVSVHVIPRPHVDLEQVFPIGLKAYTATCNHPVSLRFTIKSSSDRIKLSNQTLQSKNLFIMRFYCFSLCLSLSAFYHCRGVIVNIQAVFWLQKGTEAADILTTCAQLWIMMYALLSVFSLLDVILNLAQKFPAASQLPLKGIFQGIKLIGAILVGILMISLLIGQSPAILISGLGAMAAVLMLVFKDPILGLVAVRNWDNTITTIPTWSLVSDSFKNWSGMSASGGRRIKRSISIDVTSIRFLDEDEMQRLNKAHLLKPYLTSRHQEINEWNRQQGSTESVLNLRRMTNIGTFRAYLNEYLRNHPRIRKDMTLMVRQLAPGDNGLPLEIYAFTNTVVWLEYESIQADIFDHIFAIVEEFGLRLHQSPTGNDIRSLAGVTINKAPGDDEILKNTVDFVSFSYYASRCASAEMNANNSSAANVVKSLRNPYLQVSDWGWGIDPLGLRITMNMMYDRYQKPLFLYLREHIRAMGEAIADGIPLMGYTTWGCIDLVSASTGEMSKRYGFVFVDRDDAGNGTLTRTPFQSLINGFYRIFNRLGHRVVKADDIRLNAEENHFANIFFQLVDKVIQRHVMGSHHKHLGDIIRVDDADLAGV

SEQ ID NO: 44189 - protein, 790 aa, Homo sapiens; identical to SEQ ID NO: 43506
  DOMAIN (720)..(762): Sodium:dicarboxylate symporter family proteins domain identified by eMATRIX, accession number BL00713F, p-value=3.471e- 22, raw score of 16.13

SEQ ID NO: 44190 - protein, 94 aa, Homo sapiens
LLAQLDSGKLDCVILALVKESEAFIEVPLFDEPMLLAIYEDHPWANRECVPMADLAGEKLLMLEDGHCLRDQAMGFCNANSISVPIGATWEHTL

SEQ ID NO: 44191 - protein, 238 aa, Homo sapiens
  DOMAIN (171)..(185): Phage integrase family domain identified by eMATRIX, accession number PF00589B, p-value=1.621e-11, raw score of 16.17
MAGTGPALLLGQHDLQCEKGKPKSPSNENIKVNASQVWHYAKFKQQVQKQQLSGVDRKLEDPLSFSAELDGNDATGQPSILNNEEFVLIFYPERQQFVSSFQNLKSKYNSYYAIKPERSSIASTPAIKQQRPPGKLMQLGKLDLSTVYKSKFLPHIGCGFDSRGSPVPVTPHTFRHSYAMHMLYAGIPLKVLQSLMGHKSISSTEVYTKVFALDVAARHRVQFAMPESDAVAMLKQLS

SEQ ID NO: 44192 - protein, 167 aa, Homo sapiens
VIPAFDFREMVTTLDNKIITTSLKVADYFGKRHKDVLRAIRNLKCSDDFTQRNFAPIDFIDKNGDVQPMYNITRDGCMMLVMGFTGKTAAAVKECYINAFNWMAEQLNRRMAMGEELQHRYAIKETRSKLKGTIGSRLMNERKKEKRVLELEHEHIMQVTQPELLIG

SEQ ID NO: 44193 - protein, 30 aa, Homo sapiens
MRYPRRCTPSLYARQKRLFQRPNALAVTKA

SEQ ID NO: 44194 - protein, 30 aa, Homo sapiens; identical to SEQ ID NO: 44193

SEQ ID NO: 44195 - protein, 340 aa, Homo sapiens
  DOMAIN (112)..(128): Prokaryotic molybdopterin oxidoreductases proteins domain identified by eMATRIX, accession number BL00551A, p-value=3.182e- 10, raw score of 17.41
MSKLLERFRYFKQKGETFADGHGQVMHSNRDWEDSYRQRWQFDKIVRSTHGVNCTGSCSWKIYVKNGLVTWEIQQTDYPRTRPDLPNHEPRGCPRGASYSWYLYSANRLKYPLIRKRLIELWREALKQHSDPAADNDLIARFQSFTNQPFIANRLTGNDRARFNLTFIVNNQHATAITTTGTFLPEWTTEYSPDVVTGLITRITTPDGRASAFYNNHHSQLTSATGPDGLEIRREYDEWGRLIQETAPDGDITRYRYDNPHSDLPCATEDATGSRKTMTWSRYGQLLSFTDCSGYVTRYDHDRFGQVTAVHREEGLSQYRAYDSRGQLIAVKDTQGHETR

SEQ ID NO: 44196 - protein, 45 aa, Homo sapiens
TTQRTVCDELGVLGKPANTKVGITIDTDWFWGLVEECVRGYIKTH

SEQ ID NO: 44197 - protein, 411 aa, Homo sapiens
  DOMAIN (224)..(252): EXCINUCLEASE ABC SUBUNIT SOS RESPONSE E domain identified by eMATRIX, accession number PD01039C, p-value=1.000e-22, raw score of 15.42
  misc_feature (1)...(411): Xaa = X or * as defined in Table 2
SKSGAIEIARLAGRVHGVVVQITSEIGPLTLLTANFAFSASXSTAWKATSMDGEVLSXYSTSASASAERQSTHQXTGFAPLCRXPLPMIVAQRADDVGFSFEVHGQVRVRPVAQHAQTDKVFALTVNLGRRVFAALGAELGGARSAVRPVPECYAVRETLALLQKIFPIRQCENSVYRNRSRPCLQYQIGRCLGPCVEGLVSEEEYAQQVEYVRLFLSGKDDQVLTQLISRMETASQNLEFEEAARIRDQIQAVRRVTEKQFVSNTGDDLDVIGVAFDAGMACVHVLFIRQGKVLGSRSYFPKVPGGTELSEVVETFVGQFYLQGSQMRTLPGEILLDFNLSDKTLLADSLSELAGRQINVQTKPRGDRARYLKLARTYAATALTSNFRSIYRSPATDRACQRVETAGNER

SEQ ID NO: 44198 - protein, 146 aa, Homo sapiens
NHGLTVDLTRSRSGIEIAVHPDRLPGKQRRWTEKFCRNTQLPQAEVVLVLGSKNSSNSNRLAELAQRMGKRAFLIDDAKDIQEEWVKEVKCVGVTAGASAPDILVQNVVARLQQLGGGEAIPLEGREENIVFEVPKELRVDIREVD

SEQ ID NO: 44199 - protein, 400 aa, Homo sapiens
  DOMAIN (149)..(179): ALDO-KETO REDUCTASE SIGNATURE domain identified by eMATRIX, accession number PR00069D, p-value=1.771e-22, raw score of 19.36
MAIPAFGLGTFRLKDDVVISSVITALELGYRAIDTAQIYDNEAAVGQAIAESGVPRHELYITTKIWIENLSKDKLIPSLKESLQKLRTDYVDLTLIHWPSPNDEVSVEEFMQALLEAKKQGLTREIGISNFTIPLMEKAIAAVGAENIATNQIELSPYLQNRKVVAWAKQHGIHITSYMTLAYGKALKDEGIARIAAKHNATPAQVILAWAMGGGPVEMAKVADMAGIFVSKLKTFNAGVKGSTLGASGPQYVMVPKKHADQLRESLASGEIAAVQSTLVADNTPLNSRVYTVRSGDTLSSIASRLGVSTKDLQQWNKLRGSKLKPGQSLTIGAGSSAQRLANNSDSITYRVRKGDSLSSIAKRHGVNIKDVMRWNSDTANLQPGDKLTLFVKNNNMPDS

SEQ ID NO: 44200 - protein, 100 aa, Homo sapiens
MSVKVVAVQNGRGAIEQTQQLILQGQIHKPITIVLQLPTAFSTVTAFTGELLVREAGGIVSDFTGGHNYMLTGNIVAGNPRVVKAMLANMRDELSDALKR

SEQ ID NO: 44201 - protein, 143 aa, Homo sapiens
  DOMAIN (64)..(90): TRANSPORT POLYSACCHARIDE PROTEIN OUTER MEMBRANE PRECURSO domain identified by eMATRIX, accession number PD02099E, p-value= 2.406e-22, raw score of 20.49
MFSLTDELLLSLNSTGANNGRLLRAFVLYPGDILYVPRNDDLKVFVMGEVKKQSTLKMDFSGMTLTEALGNAEGIDMTTSNASGIFVIRPLKGEGGQFRLQPYDVVYVTTAPVSRWNRLINQLLPTISGVRYMTDTASDIHNW

SEQ ID NO: 44202 - protein, 487 aa, Homo sapiens
  DOMAIN (227)..(238): Neutral zinc metallopeptidases zinc-binding region proteins. domain identified by eMATRIX, accession number BL00142, p-value= 1.000e-12, raw score of 8.38
YCEGMKVLPASGLAVFLIMALKFSTAAPSLVAASPRTWRNNYRLAQAYLDKYYTNKEGHQIGEMVARGSNSMIRKIKELQAFFGLQVTGKLDQTTMNVIKKPRCGVPDVANYRLFPGEPKWKKNTLTYRISKYTPSMSSVEVDKAVEMALQAWSSAVPLSFVRINSGEADIMISFENGDHGDSYPFDGPRGTLAHAFAPGEGLGGDTHFDNPEKWTMGTNGFNLFTVAAHEFGHALGLAHSTDPSALMYPTYKYKNPYGFHLPKDDVKGIQALYGPRKVFLGKPTLPHAPHHKPSIPDLCDSSSSFDAVTMLGKELLLFKDRIFWRRQVHLRTGIRPSTITSSFPQLMSNVDAAYEVAERGTAYFFKGPHYWITRGFQMQGPPRTIYDFGFPRHVQQIDAAVYLREPQKTLFFVGDEYYSYDERKRKMEKDYPKNTEEEFSGVNGQIDAAVELNGYIYFFSGPKTYKYDTEKEDVVSVVKSSSWIGC

SEQ ID NO: 44203 - protein, 171 aa, Homo sapiens
  DOMAIN (105)..(138): ESICULAR LUMEN DOMAIN domain identified by eMATRIX, accession number DM01292C, p-value=4.672e-09, raw score of 12.45
MKPIDKDENFWMIRGYAVLPDYPKSIHTLSFPGRVKKIDAAVCDKTTRKTYFFVGIWCWSQAPCMKSPNALIVILGTVTLDAVGIGLVMPVLPGLLRDIVHSDSIASHYGVLLALYALMQFLCAPVLGALSDRFGRRPVLLASLLGATIDYAIMATTPVLWIYPLVNSPSC

SEQ ID NO: 44204 - protein, 177 aa, Homo sapiens
  DOMAIN (6)..(26): Matrixins cysteine switch domain identified by eMATRIX, accession number BL00546G, p-value=9.449e-11, raw score of 16.84
RDKILVFKDENFWMIRGYAVLPDYPKSIHTLGFPGRVKKIDAAVCDKTTRKTYFFVGIWCWRFDEMTQTMEKGFPQRVVKHFPGISIRVDAAFQYKGFFFFSRGSKQFEYDIKTKNITRIMRTNTWFQCKEPKNSSFGFDINKEKAHSGGIKILYHKSLSLFIFGIVHLLKNTSIYQ

SEQ ID NO: 44205 - protein, 292 aa, Homo sapiens
  DOMAIN (15)..(29): MATRIXIN SIGNATURE domain identified by eMATRIX, accession number PR00138E, p-value=1.750e-15, raw score of 6.01
MFPNYVSLDPRKYPLSQDDINGIQSIYGGLPKEPAKPKEPTIPHACDPDLTFDAITTFRREVMFFKGRHLWRIYYDITDVEFELIASFWPSLPADLQAAYENPRDKILVFKDENFWMIRGYAVLPDYPKSIHTLGFPGRVKKIDAAVCDKTTRKTYFFVGIWCWRFDEMTQTMDKGFPQRVVKHFPGISIRVDAAFQYKDNTQAPNITALSKAYVLTDEKLRSRRAAGPKVTGGEGQRRPSSGSSCLEGISQGCSQPGLWSPQGLFGGKSTSKLTNEVVVRIQLFMCCWNDD

SEQ ID NO: 44206 - protein, 130 aa, Homo sapiens
  DOMAIN (16)..(40): Receptor tyrosine kinase class III proteins domain identified by eMATRIX, accession number BL00240B, p-value=6.745e-09, raw score of 24.70
PLQLGTRVPVGQKGTLQCEASAVPSAEFQWYKDDKRLIEGKKGGKVENRPFLSKLIFFNGSEHDYGNYTCVASNKLGHTNASIMLFEVKTTALTPWKGPGAVSEVSNGTSRRAGCVWLLPLLVLHLLLKF

SEQ ID NO: 44207 - protein, 141 aa, Homo sapiens
  misc_feature (1)...(141): Xaa = X or * as defined in Table 2
QERGPHQVIQRKECLREYSPVVSXAKGTGVAVGQKGTLQCEASAVSSAEFHWYKDDKRLIEGNKGVKVENRPFLSKLIFFNVSEHDYGNYSCVASNKLGHTNASIMLFGPGAVSEVSNGTSRRAGCVWLLPLLVLRLLLKF

SEQ ID NO: 44208 - protein, 81 aa, Homo sapiens
TGCFLTHLAIKWVVHSSIPSSNGSGIYVTGLDRVLKAQTTHGECVLSTGPGAVSEVSNGTSRRAGCVWLLPLLVLHLLLKF

SEQ ID NO: 44209 - protein, 110 aa, Homo sapiens
GHDSSLQALCGASQHGADPQKNSEGRSKETKHRHPGRAPGIATGPLRSATGGVCPLSVVSRAAESPAWKQGFSIPLHGPGAVSEVSNGTSRRAGCVWLLPLLVLHLLLKF

SEQ ID NO: 44210 - protein, 220 aa, Homo sapiens
MFPLKTETQQTEAHTAHLAEGEGDLEMQVPSFLSVLARTRFCLSVPLMWLEPFPGGEVALTSKFEKQVQDQKRQQPDAACPPRRAVAHLADGAWTCGENTLAVSGLGENGRKARWLPGLLSFGLAPESNYYVSTETITRRSPFVDAHSVIYRAHSLESKERSLRRMPSRAGEWLALCDHIQSAQPTPQVHALTTPGTCLFSSTSRTPDLDQVGQKEKETG

SEQ ID NO: 44211 - protein, 144 aa, Homo sapiens
  misc_feature (1)...(144): Xaa = X or * as defined in Table 2
RFSRVDDFVLTMDDGPPPRRARGDLTHSGLWRVCCIEGIYKGHCFRINHFPEDNDYDHDSSEYLLRIVRASSVFPILSTILLLLGGLCIGAGRIYSRKNNIVLSAGILFVAAGLSNIVGIIVYISSNTGDPSDKRDEDKXNHYN

SEQ ID NO: 44212 - protein, 364 aa, Homo sapiens
MHVCSLILAWLPESTGDLADLAGPMDLQESGLSLNTPAPWRQQLKGPNGGKSLGTAAGIYKGHCFRINHFPEDNDYDHDSSEYLLRLPAHLALGLVPLSKSAFPVRWITSVPGRRGLVSGLLGVHSVPGGADDDDDDQGIVRASSVFPILSTILLLLGGLCIGAGRIYSRKNNIVLSAGILFVAAGLSNIIGIIVYISSNTGDPSDKRDEDKKNHYNYGWSFYFGALSFIVAETVGVLAVNIYIEKNKELRFKTKREFLKASSSSPYARMPSYRYRRRRSRSSSRSTEASPSRDVSPMGLKITGAIPMGELSMYTLSREPLKVTTAASYSPDQEASFLQVHDFFQQDLKEGFHVSMLNRRTTPV

SEQ ID NO: 44213 - protein, 401 aa, Homo sapiens
MFVSSLIHQQALNGTHLDSEDSAANKTSAIVSPCLHVVNSSHTDPPVSSVPIPPIISLSSIIKSLPAKTGRLQTPCSVEPMIIEIKELGKFHSTQVHKSPEREATALMLPHAHQNGYQGTGHYFPATVRHPVTSETTAIYPHDQTRRIKIGIPGMASPTLSFRGLFIYYVIMAQRLGPPLKGKNLIIFAQSPHWSPPTLETNSGRELSWMGNMKDQKYESVLDDYRDVCNIESAGPDPAITENGPTSLKEEAESCLSKGLEATAASPLISSTVQLWPNSASLPQRSPVAALTSPHKSGCVSEDSRLPTVFAAAQHGELGNEHTSSLRVFSCTCPPPVERWTAPLESQPVGEWKQPSPPPGPISEGIWELTPSEAATPNCPVIRTGTPTHCASASGLLPGFS

SEQ ID NO: 44214 - protein, 451 aa, Homo sapiens
MFVSSLIHQQALNGTHLDSEDSAANKTSAIVSPCLHVVNSSHTDPPVSSVPIPPIISLSSIIKSLPAKTGRLQTPCSVEPMIIEIKELGKFHSTQVHKSPEREATALMLPHAHQNGYQGTGHYFPATVRHPVTSETTAIYPHDQTRRIKIGIPGMASPTLSFRGLFIYYVIMAQRLGPPLKGKNLIIFAQSPHWSPPTLETNSGRELSWMGNMKDQKYESVLDDYRDVCNIESAGPDPAITENGPTPLKEEAESCLSKGLEATAASPLISSTVQLWPNSASLPQRSPVAALTSPHKRCLIKVPLAPTLRFPRDKHPGKYSFVCFHYLFPGMPNAPELPGILALLPVSGCVSEDSRLPTVFAAAQHGELGNEHTSSLRVFSCTCPPPVERWTAPLESQPVGEWKQPSPPPGPISEGIWELTPSEAATPNCPVIRTGTPTHCASASGLLPGFS

SEQ ID NO: 44215 - protein, 148 aa, Homo sapiens
  DOMAIN (87)..(130): RNA polymerases H / 23 Kd subunits proteins domain identified by eMATRIX, accession number BL01110A, p-value=6.538e-37, raw score of 24.61
ERPRRTDLTVLVAHNDDPTDQMFVFFPEEPKVGIKTIKVYCQRMQEENITRALIVVQQGMTPSAKQSLVDMAPKYILEQFLQQELLINITEHELVPEHVVMTKEEVTELLARYKLRENQLPRIQAGDPVARYFGIKRGQVVKIIRPRA

SEQ ID NO: 44216 - protein, 75 aa, Homo sapiens
FPGRRFRAAAEAAMDDEEETYRLWKIRKTIMQLCHDRGYLVTQDELDQTLEEFKAQFGDKPSEGRPQYIGWKSWR

SEQ ID NO: 44217 - protein, 280 aa, Homo sapiens
  DOMAIN (99)..(142): RNA polymerases H / 23 Kd subunits proteins domain identified by eMATRIX, accession number BL01110A, p-value=9.654e-24, raw score of 24.61
MDDKEEMYQLWKIRKTIMQLCHDRGYLDELNQTLKEFKVQFGDKPSEGQRRRTDLTALVAHNDDPTDKMFVFFPEEPKCLVHMAPKYILEQFLQQKLLIDITEYELVPEYVVMTKEEVTVLLALYKLRENQLPRIQAGDAVARYFGIKHGQVVKIIRPTEMAGRMDAPALPESSPPALSRLLLLWAPQGRQPPLKSSHPGMSLPMAQPVPFTCVFMRDPASGGSPHLLEIFEDLAEGEDHKFIKDRFRAKSRYVIIGDDSSMHVIAPEDLSVGQDVKVED

SEQ ID NO: 44218 - protein, 78 aa, Homo sapiens
MMYRTHCQRILDTVIRANFDEVQSFLLHFWQGMPPHMLPVLGSSTVVNIVGVCDSILYKAISGVLMPTVLQALPDSLT

SEQ ID NO: 44219 - protein, 101 aa, Homo sapiens
ASRTVIHSADITFQMLEDWRNVDLNSITKQTLYTMEDSRDEHRKLITQCKLSHQGLLSSVNICSCPGEQGLPTCRLQVYCSKYQPHVGRMFDLGTLVRPSS

SEQ ID NO: 44220 - protein, 24 aa, Homo sapiens
DPLDSPCFAGPDDVEGALLIHGRS

SEQ ID NO: 44221 - protein, 700 aa, Homo sapiens
  DOMAIN (346)..(370): PROTEIN DNA-BINDING BINDING DNA domain identified by eMATRIX, accession number PD02699B, p-value=7.938e-11, raw score of 18.28
TGLPSEGSEFFIPEGIQIDSRCPLSRNITEWYHYYGIAVKESSQYYDVMYSKKGAAWVSETGKKEVSKQTVAYSPRSKLGTLLPEFPNVKDLNLPASLPEEKVQSFLLHFWQGMPPHMLPVLGSSTVVNIVGVCDSILYKAISGVLMPTVLQALPDREKGLGGTSCFFHSNSCSLPPNMYLSERLLLSSCPVPSLPHEHLVTAVITVVAVVTASLLMGIQGATSVELRCRRRAEAGAVDLAASRTRGRKSVSLEVEDRPWHPSLGKERGGGKAEEGGRAAGIHPQRTVCQEGIDAAGDGVSWGLGRHLLEQVIRSLTQVIRKFAKQLDEWLKVALHDLPENLRNIKFELSRRFSQILRRQTSLNHLCQASRTVIHSADITFQMLEDWRNVDLNSITKQTLYTMEDSRDEHRKLITQYVALVKYNCSDACGVLLCLTVYQEFDHLLEEQSPIESYIEWLDTMVDRCVVKVAAKRQGSLKKVAQQFLLMWSCFGTRVIRDMTLHSAPSFVNEVQRQVTCQGHNCSEEEPRFAYKQFKFRTSTLNYHTDLVLESMKLCEGIFKVLIKDIPTTCQVSCLEVLRILSRDKKVLVPVTTKENMQILLRLAKLNELDDSLEKVSEFPVIVESLKCLCNIVFNSQMAQQLSLELNLAAKLCNLLRKCKDRKFINDIKCFDLRLLFLLSLFAHPTSGHNCAMSSRDYRC

SEQ ID NO: 44222 - protein, 160 aa, Homo sapiens
  misc_feature (1)...(160): Xaa = X or * as defined in Table 2
RCAATSGYGERVQRTVPTHTVWXASLSQSSAHRVVAINSIANKRSSMPPKSWATVALTSTKLKCRFMAKVRNKSFSVLHNVXMTISISPWVILSSGVDEKLFPRAVRVAMTAGASGFLAGRAVWASVVGLPDNELMLRDVCAPKLQQLGDIVDEMMAKRR

SEQ ID NO: 44223 - protein, 38 aa, Homo sapiens
  misc_feature (1)...(38): Xaa = X or * as defined in Table 2
VHSWQRYSGRXRGYXPQNQSATDQTRRWQSLKTAGAVA

SEQ ID NO: 44224 - protein, 149 aa, Homo sapiens
  misc_feature (1)...(149): Xaa = X or * as defined in Table 2
FFADLQQPVCADSYPLLVQMKLAPHKSXNAVLWQRSATKSFSVLAQGLNDHINMPWVILSSGVDEKLFPRAVRVAMTAGASGFLAGRAVWASVVGLPDNELMLRDVCAPKLQQLGDIVDEMMAKRRFIPLLRRWVDLALTRWLITVSKP

SEQ ID NO: 44225 - protein, 207 aa, Homo sapiens
  misc_feature (1)...(207): Xaa = X or * as defined in Table 2
WLHASAALLRWXYQLPGQPHHRRCRSADGSHVPSLCAAVPDQRPLITVRRIGMQAMTTSTTGDRQRSWQIAMDGSQKLPQRMLDSVRWHLAHDSKFDLLALGVAGWMRYVGGVDEQGNPIEISDPLLNRMAANRFVHITQLPVIYRAFRNSFTQVARLQLCHKRFQQRHTSVREQIVTVLSGIRDNHVHFVQTLTGDGVGNQRQLVQ

SEQ ID NO: 44226 - protein, 65 aa, Homo sapiens
HRFCPAARHRSWSGLREMAVSISMPRRIINSGRYCAICWYKRRSRCARNMLIFPVARSTPIPGPS

SEQ ID NO: 44227 - protein, 149 aa, Homo sapiens
  DOMAIN (36)..(57): OBESITY FACTOR (LEPTIN) SIGNATURE domain identified by eMATRIX, accession number PR00495C, p-value=7.492e-26, raw score of 10.22
  misc_feature (1)...(149): Xaa = X or * as defined in Table 2
XVPIQIVQDDTKTLIKTIVTRINDISHTQSVSSKQKVTGLDFIPGLHPILTLSKMDHTLAVYQQILTSMPSRNVIQIFNDLGEPPGSSSRAGPSFKSCHLPWASGWGDLGTAGGVFWEVSGYSTEVVALSRLQGSLQDMLWQLDLSPGC

SEQ ID NO: 44228 - protein, 788 aa, Homo sapiens
  DOMAIN (34)..(72): Mannitol dehydrogenases proteins domain identified by eMATRIX, accession number BL00974F, p-value=9.550e-39, raw score of 24.50
AGVACEPFRQWVIEDNFVAGRPEWEKAGAELVSDVLPYEEMKLRMLNGSHSFLAYLGYLAGYQHINDCMEDEHYRYAAYGLMLQEQAPTLKVQGVDLQDYANRLIARYSNPALRHRTWQIAMDGSQKLPQRMLDSVRWHLAHDSKFDLLALGVAGWMRYVGGVDEQGNPIEISDPLFPVIQKAVQSSAEGKARVQSLLAIKAIFGDDLPDNSLFTARVTETSCRDESRPVVPLSLHNLQQLRFFRGGFAQRSDLQYQSTGSCSVTGAANHNTAAHVDFRNGTIQSVSSKQKVTGLDFIPGLHPILTLSKMDQTLAVYQQVLTSMPSRNVIQISNDLENLRDLLHSYGGCQFRVYIASPYSSAFSINVIQTLRLTFIFRLSRRQHFAKVTPLLHRHGDYFVFIGFDYGTANCSVAVMRDGKPHLLKMENDSTLLPSMLCAPTREAVSEWLYRHHDVPADDDETQALLRRAIRYNREEDIDVTAKSVQFGLSSLAQYIDDPEEVWFVKSPKSFLGASGLKPQQVALFEDLVCAMMLHIRQQAQAQLPEAITSAPNYIPGLIAVVGCDGTGKSTLTTDLVKSLQQHWQTERRYLGLLSGEDGDKIKRLPLVGVWLERLMPVISSLSEAMAVMKMRKRLDMVKEFNELCHSHGLVSIIEPVVRPPRRGDKFDREQAIIDAAKELGDSGADLYKVEMPLYGKGPQQELLCASQRLNDHINMPWVILSSGVDEKLFPRAVRVAMTAGASGFLAGRAVWASVVGLPDNELMLRDVCAPKLQQLGDIVDEMMAKRR

SEQ ID NO: 44229 - protein, 307 aa, Homo sapiens
  misc_feature (1)...(307): Xaa = X or * as defined in Table 2
ELPASPAPCARTPQPLGGRWEAARRKERVLCLFDVDGTLTPARQGRTLKIGSSHRECHADTPEAECGVCSSVTEVRAKWRSQTCXKPECYASPLPPXKIDPEVAAFLQKLRSSYLPVGSQTWSHTLSSSCPLCDPEVIGRDTVPVSGSGSPGHAQSPVFLGQTIQNHLGPGGARFEFRACSGSLWLPALPHHRGTFIEFRNGNCVPSQGLAHSRSSELPSAPSPLQKEQAALLLALSAPPSREXQSPPLPTGGMISFDVFPEGWDKQVRSSQCGEGLHLNIPPLPILCVQGGNDFEIFADPRTVGHS

SEQ ID NO: 44230 - protein, 103 aa, Homo sapiens
  misc_feature (1)...(103): Xaa = X or * as defined in Table 2
HSVLEVGPWWEVFGSWGQILHSLVSSHHVRHWLLPSPSAMTESSLTFQQKPSRCQHHASCKAYHSHQLLLVPTAGRLEDRSHHXIPCKHSPAPAWSLAAPVGN

SEQ ID NO: 44231 - protein, 128 aa, Homo sapiens
  misc_feature (1)...(128): Xaa = X or * as defined in Table 2
SSSGGYQQQLMRVIGTRDTAVNKASNVPSFGAXIPSGRGQQAKLIALTRALTLAKELHVNIYADCKYAFHILHQHDVIWAERGFLTVQGSSSIINASLIKTLLKATLLPKEAGVIHYKGHQKASAPIA

SEQ ID NO: 44232 - protein, 355 aa, Homo sapiens
  DOMAIN (190)..(201): RNase H domain identified by eMATRIX, accession number PF00075F, p-value=5.500e-12, raw score of 12.87
AEALPVQFYFHLSDIRGMLLHEPDLQKGIKAVSQEDPQWSYQADSPGIARRDYMVSRLVEGLKKAAYKAVNYDKLKKTTQVTIVPGPDFNLASHIIPDTTPDPHDCYLSDTPGIHSISHISFFAIPHPDHTWFIDGSSTTPNRHTPAKAGYAIVPSTSIIEAAALPPSATSRQAKLIALTRTLTLAKELCVNIYTDSKYAFHILHHHAVIWAERGFLTKQGWSNINASLIKTLLKATLLPKEAGVIHCKGHQKASDPIAQGNTYADKIAKEAASGPTSVPHGQFFSFSSVTPTYSPTETSTYQSLSKQGKWFLDQGKYLLPASQAHSILSSFHNVFHVGYKPLANLLEPLISFPL

SEQ ID NO: 44233 - protein, 72 aa, Homo sapiens
KRPPGRRGTASAGGCRGRAPRGAAAAPWRTRWSRPARAAALAQGPPLGVQLAGAPGAGDPPGRARRAARGAA

SEQ ID NO: 44234 - protein, 304 aa, Homo sapiens
  misc_feature (1)...(304): Xaa = X or * as defined in Table 2
GGPARAEFSRHLGCKGHHPLPKDVASEVPAGSSTSVSSLIRTNGCPGLGSWEPPXFFSENKRLSTLMSFTLRDSKMFSPQSGLFLGCSAGEHSALRDPTASGLPGTASGVRPGRRQRVGSDIEASTQGESKPCILSIXTLPNAXLKTKTLTPLEIAACTNPHSFSITARIGPAHLAAPRPVTPAGRGGARAPGRXCAAARPPPASQXVSGSPAPGGGPSYAPAARTSXPSSLAPGAKRLRFSRVATFCCSFLAWSSSSNKAFCTXEHMSLLSSWISQSLEKVASCCPCEQFDSWKRLENILLFS

SEQ ID NO: 44235 - protein, 153 aa, Homo sapiens
MTCLHERARIEKAYAQQLTEWARRWRQLVEKGPQYGTVEKAWMAFMSEAERVSELHLRVKASLMNDDLRKIKNWQKEAFHKQMMGGFKETKEAEDGFRKAQKPWAKKLKEVEAAKKAHHAACKEEKLAISREANSKADPSLNPEQLKKLQDKI

SEQ ID NO: 44236 - protein, 400 aa, Homo sapiens
  misc_feature (1)...(400): Xaa = X or * as defined in Table 2
VEAAKKAHHAACKEEKLAISREANSKADPSLRPQAHTYALSPLFLTAMPSVXQGEHVIYTRVRHSDQVSESSGKPLSLPLLEPGIWAFEAAQVPPRWDQVRSLEPTTEWEAPGLKKRRVSQGLNGNEPLSCAWIFLXTKEKYEKSLKELDQGTPQYMENMEQVFEQCQQFEEKRLGWDKGXLAPAFXKSHVSLXFSYKAIYHDLEQSIRAADAVEDRRGFRKXXTFGFSPSAPVAXEWSADLNRTLSRREKKKATDCQDPHGPLQSWDPLKALSLHSTLNVPSNPAQSAQSQSSYNPRGPHTLCRPVLRALWPPLSCSVSSYEKTQSYPTDWSDDESNNPFSSTDANGDSNPFDDDATSGTEVLCSPPSVSYLSWRRLPLCLAGDELTKMEDEDEQGWCK

SEQ ID NO: 44237 - protein, 160 aa, Homo sapiens
  DOMAIN (116)..(148): REV protein (anti-repression transactivator protein) domain identified by eMATRIX, accession number PF00424A, p-value=4.176e- 11, raw score of 14.34
AAAFGTRLSRRGRGCGVTGSGGGRRRVPAPRRPRSPLQPPHQPPRRPSRRTPGCGSRGAPSRGRRLVPPPPEPPRAAQQRARHHRTSRPAARQPPRRPPAQPRSCPRRVRPTPAWSPPGRRGPRRSRRRRRRGGRARARRPRRRGQVPRPQSATGAGHAR

SEQ ID NO: 44238 - protein, 69 aa, Homo sapiens
  DOMAIN (20)..(40): ALPHA-2A ADRENERGIC RECEPTOR SIGNATURE domain identified by eMATRIX, accession number PR00558C, p-value=7.527e-09, raw score of 6.54
PRHSPGASPRLRRRIRLLKPGRVPHPAAGACPPGTQRRRRRTGSGSGSSWLRRRSPCWGPRVWRPPGSV

SEQ ID NO: 44239 - protein, 1797 aa, Homo sapiens
  DOMAIN (190)..(221): Protein kinases ATP-binding region proteins domain identified by eMATRIX, accession number BL00107A, p-value=2.059e-20, raw score of 18.39
  misc_feature (1)...(1797): Xaa = X or * as defined in Table 2
MSAKVRLKKLEQLLLDGPWRNESALSVETLLDVLVCLYTECSHSALRRDKYVAEFLEWAKPFTQLVKEMQLHREDFEIIKVIGRGAFGEVAVVKMKNTERIYAMKILNKWEMLKRAETACFREERDVLVNGDCQWITALHYAFQDENHLYLVMDYYVGGDLLTLLSKFEDKLPEDMARFYIGEMVLAIDSIHQLHYVHRDIKPDNVLLDVNGHIRLADFGSCLKMNDDGTVQSSVAVGTPDYISPEILQAMEDGMGKYGPECDWWSLGVCMYEMLYGETPFYAESLVETYGKIMNHEERFQFPSHVTDVSEEAKDLIQRLICSRERRLGQNGIEDFKKHAFFEGLNWENIRNLEAPYIPDVSSPSDTSNFDVDDDVLRNTEILPPGSHTGFSGLHLPFIGFTFTTESCFSDRGSLKSIMQSNTLTKDEDVQRDLEHSLQMEAYERRIRRLEQEKLELSRKLQESTQTVQSLHGSSRALSNSNRDKEIKKLNEEIERLKNKIADSNRLERQLEDTVALRQEREDSTQRLRGLEKQHRVVRQEKEELHKQLVEASERLKSQAKELKDAHQQRKLALQEFSELNERMAELRAQKQKVSRQLRDKEEEMEVATQKVDAMRQEMRRAEKLRKELEAQLDDAVAEASKERKLREHSENFCKQMESELEALKVKQGGRGAGATLEHQQEISKIKSELEKKVLFYEEELVRREASHVLEVKNVKKEVHDSESHQLALQKEILMLKDKLEKSKRERHNEMEEAVGTIKDKYERERAMLFDENKKLTAENEKLCSFVDKLTAQNRQLEDELQDLAAKKESVAHWEAQIAEIIQWVSDEKDARGYLQALASKMTEELEALRSSSLGSRTLDPLWKVRRSQKLDMSARLELQSALEAEIRAKQLVQEELRKVKDANLTLESKLKDSEAKNRELLEEMEILKKKMEEKFRADTGLKLPDFQDSIFEYFNTAPLAHDLTFRTSSASEQETQAPKPEASPSMSVAASEQQEDMARPPQRPSAVPLPTTQALVLAGPKPKAHQFSIKSFSSPTQCSHCTSLMVGLIRQGYACEVCSFACHVSCKDGAPQVCPIPPEQSKRPLGVDVQRGIGTAYKGHVKVPKPTGVKKGWQRAYAVVCECKLFLYDLPEGKSTQPGVIASQVLDLRDDEFSVSSVLASDVIHATRRDIPCIFRVTASLLGAPSKTSSLLILTENENEKRKWVGILEGLQSILHKNRLRNQVVHVPLEAYDSSLPLIKAILTAAIVDADRIAVGLEEGLYVIEVTRDVIVRAADCKKVHQIELAPREKIVILLCGRNHHVHLYPWSSLDGAEGSFDIKLPETKGCQLMATATLKRNSGTCLFVAVKRLILCYEIQRTKPFHRKFNEIVAPGSVQCLAVLRDRLCVGYPSGFCLLSIQGDGQPLNLVNPNDPSLAFLSQQSFDALCAVELESEEYLLCFSHMGLYVDPQGRRARAQELMWPAAPVACSCSPTHVTVYSEYGVDVFDVRTMEWVQTIGLRRIRPLNSEGTLNLLNCEPPRLIYFKSKFSGAVLNVPDTSDNSKKQMLRTRSKRRFVFKVPEEERLQQRREMLRDPELRSKMISNPTNFNHVAHMGPGDGMQVDRSLACTVPLRSMSDPDQDFDKEPDSDSTKHSTPSNSSNPSGPPSPNSPHRSQLPLEGLEQPACDTXASFRVGLGPGASPVRVRSEALGVLEATMRESGAHVWGSSAAGLAGGVAAAVLLALLVLLVAPPLLRRAGRLRWRRHEAAAPAGAPLGFRNPVFDVTASEELMEQHRPQQLCQDETRCGPTAHETMRP

SEQ ID NO: 44240 - protein, 345 aa, Homo sapiens
MGVLGRVLLWLQLCALTQAVSKLWVPNTDFDGAGFGVSNVGLAPGLWRGRTCPSSATLTASLWHDPAPVALWGRGTWPSFLVDAERVPCRHEERSSFRLVPPFRVGLGPGASPVRVRSISALGRTFTRDEDLAVFLASRAGPPTLPRAGRAERGPRGLRGPVGLASPGNAEAQPMDLRGQDSSPLGGRCPQAACHSALRPQGQCCDLCGAVVLLTHGPAFDLERYRARILDTFLGLPQYHGLQVAVSKVPRSSRLREADTEIQVVLVENGPETGGAGRLARALLADVAENGEGPRRPGGDHAGVGRTRLGQLRGWAGGRRGGCRAAGAAGPAGGAAAAAPRGEAQ

SEQ ID NO: 44241 - protein, 108 aa, Homo sapiens
  misc_feature (1)...(108): Xaa = X or * as defined in Table 2
NEGKNAKGSQRERSGYPQREAHQTNSGSLGRNPTSQKRVGANIQHSXRKEFSTQHFISSQTKLHKXRRNKILYRQANAERFCHHQEGSTKHGKEQPVPAAAKSCQNVK

SEQ ID NO: 44242 - protein, 131 aa, Homo sapiens
  misc_feature (1)...(131): Xaa = X or * as defined in Table 2
KYDCCISSTFCRALVHFSRTTFQVNSPLSPNISAFGYMPLKYSIYFLHHLRPNILXAASYFLKYKGTLKLPALRGCLSXSTRCWCKIHICIXNDECLQFLGPWFENEFCFLPSTSQFVEFVLDILVLQNEP

SEQ ID NO: 44243 - protein, 411 aa, Homo sapiens
  DOMAIN (258)..(299): kw TRANSCRIPTASE REVERSE II ORF2 domain identified by eMATRIX, accession number DM01354I, p-value=9.357e-38, raw score of 15.55
  misc_feature (1)...(411): Xaa = X or * as defined in Table 2
PANIIMTGSNSHITILTLNVNGLNAPIXRHRPAIASWLKSQDPSVVCIQETHLTCRDTHRLEIKGWRNIYQANGKQKKAGVAILVSDKTDFKPTKIKRDKEGHYIMAKGSIQEEELTILNIYAPNTGAPRFIKQVLSDLQRDLDAHTIIMGDFNTPLSTLDRSTRQKVNKDIQELDSALHQADLIDIYRTLHPKSTEYTFFSAPHHTYSKTDHIVGSKALLSKCKRTETITNCLSDHSAIKLELRIKKLTQNHSATWKLNSLLLNDYWVHNKMKAEIKMFFETNENKDTAYQNLWDTFKAVCRGKFIALNAHKRKQERSKIDILTSQLKELKKQEQTNSKATRRQEITKIRAELKEIETQKTLQKKQPNKDPAMEKNNKTDRVLARLIKKKREKNEFSAHILYKFSKQNGS

SEQ ID NO: 44244 - protein, 96 aa, Homo sapiens
  misc_feature (1)...(96): Xaa = X or * as defined in Table 2
RSRKPRGNPKSHPEDTDPTKAPRKRQISSRGHRSHRXEPGPQSAAPGFREQRRRGQMGXIWYLTPTPPGGQRPSSAASPRGFPPTNNSSRLPAEPE

SEQ ID NO: 44245 - protein, 116 aa, Homo sapiens
  misc_feature (1)...(116): Xaa = X or * as defined in Table 2
SEGMSGKASEKQEAFACPRHLTRAVDGPSXSGLLGSRLPPSCSPGKEAPGGSELYLCLMRGLQTLXARSGTGLRPNPAEIRXEPGPQSAAPGFREQRRRGQMGXIWYLTPTPPGGQ

SEQ ID NO: 44246 - protein, 76 aa, Homo sapiens
  misc_feature (1)...(76): Xaa = X or * as defined in Table 2
RSRKPRGNPKSHPEDTDPTKAPRKRQISSRGHQSHRXEPGPQSAAPGFREQRRRGQMGXIXTPCRPALPKSKPRPL

SEQ ID NO: 44247 - protein, 120 aa, Homo sapiens
  misc_feature (1)...(120): Xaa = X or * as defined in Table 2
PCPRASSQGLKATHGQRXSSEPPGASFPGLQDGGRREPRRPDXDGPSTGLVRCLGHANVGDPCLKVFVFFKNLSPTYLRASAEQTLPLLLPHLHGLCLHQPLHLGFTAAWAQLTFWEASQ

SEQ ID NO: 44248 - protein, 122 aa, Homo sapiens
MPQAPDKTSRWTILIRPPRFPPSSILQSWEGGTGWLRTLPLPHAWPSDPVSPLGDRVTANPAEILAKHPGNESEKGPKQSRPKDNPRPHLSKCQPSRSQALWTSISMPLQRPQIFSHSSSRS

SEQ ID NO: 44249 - protein, 297 aa, Homo sapiens
  misc_feature (1)...(297): Xaa = X or * as defined in Table 2
HAGRHARGSLFPGARPSETRAHCVRTARPNCKEEDTPMVRGKNSGGEHCTWGPSLAAGGXGIGDPGGLPGTPHPGLQLLLHGFAGPHMASLCCGVSSPAGVRQWPAXGSGNHQVKSWLGLPKNVSXAPSMLXNPKMQRLMKAQPHGRCEVRRGRVCSALGPIGMSGKASEKQEAXDEGHPHLHAPGTXQDQVDGPSXSGLLGSRLPPSCSPGKEAPGGSELYLCLMRGLQTLXARSGTGLRANPAEIRXEPGPQSAAPGFREQRRRGQMGXIWYLTPTPPGGQRPSSAASPRGFPLV

SEQ ID NO: 44250 - protein, 71 aa, Homo sapiens
  misc_feature (1)...(71): Xaa = X or * as defined in Table 2
RPQHHTFCCDGRVMMARQKGIFYLTLFLILGTCTLFFAFECSFGXVELPDYGYFGSRGRTCFLGSLGLVLG

SEQ ID NO: 44251 - protein, 390 aa, Homo sapiens
FQSWAQPLFLLSCNRKTHFGTRIPIMSVMVVRKKVTRKWEKLPGRNTFCCDGRGMMARQKGIFYLTLFLILGTCTLFFAFECGRYLAVQLSPAIPVFAAMLFLFSMATLLRTSFSDPGVIPRALPDEAAFIEMEIEATNGAVPQGQRPPPRIKNFQINNQIVKLKYWYTCKIFRASRASHCSICDNCVERFDHHCPWVGNCVGKRNYRYFYLFILSLSLLTIYVFAFNIVYVALKSLKIGFLETLKETPGTVLEVLICFFTLWSVVGLTGFHTFLVALNQTTNEDIKGSWTGKNRVQNPYSHGNIVKNCCEVLCGPLPPSVLDRRGILPLEESGSRPPSTQETSSSLLPQSPAPTEHLNSNEMPEDSSTPEEMPPPEPPEPPQEAAEAEK

SEQ ID NO: 44252 - protein, 201 aa, Homo sapiens
  misc_feature (1)...(201): Xaa = X or * as defined in Table 2
DYSAQHGKASQKHVARLISSGTFQGATVSRPFQLSTSSSSFCSSSSSLSSSSSLSSSLLLSCSSESVFLSLSFFFCSEASFLPFCSRLYASRASFNGVTNRWNSISSMAESTSLAFSVFRFPFIAKLLAQDVAYSTKTLAAREIGAPGLLGDVDTVRELRGDRGXAKLPFQHLLPSCPFVRPPRAAHRLLDDPGDHGIGQV

SEQ ID NO: 44253 - protein, 305 aa, Homo sapiens
MRLLAASRLYMLVHWRDDDNDTDFNSHENTQKRFMSRMALSSKIFSLSHRQLVLNLSRTAPNQYYKIGIKGIGLFRKYILCDDHEAMNSAGISTDIAQEDVKVIQGPAPNSPESRFFPWTQSNHNQVTLLNRNSLKGEEECTCPQDEEKGQVENALLPGHHDAAITAKGVVLWPLFTDTTCPTLAGLRRKPAARRTEGETANSRAGEGKERIDEQKNEPRNALPTHDELVFLSNICFSEAWAAITDIEDPGWQEQKGKKGASEQKKKDKDKKTDSEEQDKSRDENNDEDEERLEEEQNEEEEVDN

SEQ ID NO: 44254 - protein, 390 aa, Homo sapiens; identical to SEQ ID NO: 44251

SEQ ID NO: 44255 - protein, 201 aa, Homo sapiens; identical to SEQ ID NO: 44252
  misc_feature (1)...(201): Xaa = X or * as defined in Table 2

SEQ ID NO: 44256 - protein, 27 aa, Homo sapiens
  misc_feature (1)...(27): Xaa = X or * as defined in Table 2
XLLCGPSLLDEHHPLLHGAQSHRPPKG

SEQ ID NO: 44257 - protein, 68 aa, Homo sapiens
QRAGSPHSPRSLSAPPLPELPLWRHLRSPSAHRCTVGAPFWDGQGLEPAPSAALAAFPRSRARDLQLA

SEQ ID NO: 44258 - protein, 148 aa, Homo sapiens; identical to SEQ ID NO: 30426

SEQ ID NO: 44259 - protein, 107 aa, Homo sapiens
  misc_feature (1)...(107): Xaa = X or * as defined in Table 2
MWLEPMQMGFLHMMEKMAARTSAILDXGTLKXFHFTLTTSLKALSSHTPIFPGTGELQLPVSPSVCLDQGMQLKPSTSSHLLKTVKPRMKRQSLLHMKQSFEPKIYL

SEQ ID NO: 44260 - protein, 215 aa, Homo sapiens
MKPQTLTVSVTAFKVAHLEFVPSDVQMCSEFLPSGGFVVSLASGVKLQTFAVSFTAHKSSVDPKNSEAQLASPSGFCTRAADGAACQSLPCTCTPQPLGGRWDWALWSRGWLLVEEAWAAQEPTEELRERALALASPERGSHSAAVGQRAPQVPPKWEPRQRRRRERARAVRTASTLSPLNPPSKQDTLTAVGNLADDHSSYFLLDRGEEGALQL

SEQ ID NO: 44261 - protein, 98 aa, Homo sapiens
EIERSAGGLALLGDPVHPPQLLARVLSPSLPGASRAGRLLRVRGPPSPRPPGTPAGRQARHTAPVPARASPSTPPRKLKERAPALASPERGSHSAAEG

SEQ ID NO: 44262 - protein, 888 aa, Homo sapiens
RQGGTHAYKGHERLGAARMTSAQCPALACVMSPLRFWGPWPLLMWQLLWLLVKEAQPLEWVKDPLQLTSNPLGPPEPWSSHSSHFPRESPHAPTLPADPWDFDHLGPSASSEMPAPPQESTENLVPFLDTWDSAGELPLEPEQFLASQQDLKDKLSPQERLPVSPKKLKKDPAQRWSLAEIIGIIRQLSTPQSQKQTLQNEYSSTDTPYPGSLPPELRVKSDEPPGPSEQVGPSQFHLEPETQNPETLEDIQSSSLQQEAPAQLPQLLEEEPSSMQQEAPALPPESSMESLTLPNHEVSVQPPGEDQAYYHLPNITVKPADVEVTITSEATNETESSQAQQETPIQFPEEVEPSATQQEAPIEPPVPPMEHELSISEQQQPVQPSETSREVESSPTQQETPGQPPEHHEVTVSPPGHHQTHHLDSPSVSVKPPDVQLTIAAEPSAEVGTSLVQQEATTRLSGSGNDIEPPAIQHGGPPLLSESSEEAGPLAVQQETSFQSPEPINNENPSPTQQEAAAEHPQTAEEGESSLTHQEAPAQTPEFPNVVVAQPPEHSHLTQATVQPLDLGFTITPESMTEVELSPTMKETPTQPPKKVVPQLRVYQGVTNPTPGQDQAQHPVSPSVTVQLLDLGLTITPEPTTEVGHSTAPKRTIVSPKHPEVTLPHPDQVQTQHSHLTRATVQPLDLGFTITPKSMTEVEPSTALMTTAPPPGHPEVTLPPSDKGQAQHSHLTQATVQPLDLELTITTKPTTEVKPSPTTEETSTQPPDLGLAIIPEPTTETGHSTALEKTTAPRPDRVQTLHRSLTEVTGPPTELEPAQDSLVQSESYTQNKALTAPEEHKASTSTNICELCTCGDEMLSCIDLNPEQRLRQVPVPEPNTHNGTFTIL

SEQ ID NO: 44263 - protein, 959 aa, Homo sapiens
MSHSQGQPELPPLPASANEEPSGLYQTVMSHSFYPPLMQRTSWTLAAPFKEQHHHRGPSDSIANNYSLMAQDLKLKDLLKVYQPATISVPRDRTGQGLPSSGNRSSSEPMRKKTKFSSRNKEDSTRIKLAFKTSIFSPMKKEVKTSLTFPGSRPMSPEQQLDVMLQQEMEMESKEKKPSESDLERYYYYLTNGIRKDMIAPEEGEVMVRISKLISNTLLTSPFLEPLMVVLVQEKENDYYCSLMKSIVDYILMDPMERKRLFIESIPRLFPQRVIRAPVPWHSVYRSAKKWNEEHLHTVNPMMLRLKELWFAEMPEPSPASVSSCAAGASPRSAAPCSTAPSPIYRPRAEQCERMAQDWQAAPPATPVQDPLAPDAKNCRITTLISVDVKKDHQESGKIAVEYRPSEEIVDVRWEEELHGLIQVCGDKNSRTQQESPAQPLEEMEPSAIQDEAPTEPPGPPIEPELSPSEQKQPAQPSESSGEVESSPAQQDNPPIPTEQADFSLAQPDLPSPPLCSPEKTESPVQQEATAQTPDPPREAEPSPVQQEFPAEPPEPPKEAEPSATQQEASSHPLKSTEEQEVPAQIPEPSMEAEPSPTQQEATVQAPEPPKEVESSSQQMVPAQLPEPPKEVAAQPPAHYEVTVPTPGQDQAQHWTLPSVTVQPLDLGLTITPEPTKEVEHSTALKKAIVPPKHPKVTLPHPDQVQIQHLHLTQATVQPVDLGLTITPESTTEVELSPTTQETPTQPPKKVVPQLPVYQEVTIPTPGQDQAQHQISPSVIVQPVDLGLTITPEPTMEVEHSTPLKKTIVLPKHPKVTLPHPDQVQAQHSHLTQATVQPLDLGLTITPESTTEFEPSTALTTTPPPKHSEVTLPPSDKGQVQHSNLTQVTVQPLDLELTITTQLTTGVKPSSTMEETSTQPPDLGLPSLQNPLQRLDIYRPGEDYSSSSRPGSDSASKPD

SEQ ID NO: 44264 - protein, 91 aa, Homo sapiens
KTRVLPRPGKPPQLQEGNQGARLWTQNVQLNKEMTLASNRSLAEGNLLYQPQLDTLKARLTQKYQELQVLFEAYQIKKTKLGNFLRVIIRE

SEQ ID NO: 44265 - protein, 202 aa, Homo sapiens
  DOMAIN (100)..(146): Sulfotransferase proteins domain identified by eMATRIX, accession number PF00685C, p-value=5.100e-09, raw score of 26.03
  misc_feature (1)...(202): Xaa = X or * as defined in Table 2
RISGPGAVLLPVMPALWRLRHRMFSLTKKXHLPAHRSLAEGYLLYQPQLDTLKARLTQKYQELQVLFEAYQIKKTKLDRQSSSASLETLLALLQAEGAKIEEDTENMAEKFLDGELPLDSFIDVYQSKRKLAHMRRVKIEKLQEMVLKGQRLSTRPWPRCPPGCPNWHLPPPFPTLPQSQWASCRCTSAHPPPTTPGAAGRL

SEQ ID NO: 44266 - protein, 103 aa, Homo sapiens
DHQHVPIDIQTSKLLDWLVDRRHCSLKWQSLVLTIREKINAAIQDMPESEEIAQLLSGSCTEASTKNIFGRYSSQRMKASVGQGPVDWQEIIALYEKDNTYCS

SEQ ID NO: 44267 - protein, 211 aa, Homo sapiens
  DOMAIN (49)..(66): PROTEIN RNA-BINDING RNA REPEAT HYD domain identified by eMATRIX, accession number PD00567A, p-value=8.071e-10, raw score of 25.14
  misc_feature (1)...(211): Xaa = X or * as defined in Table 2
MEAVTVVPVGTEEGMGEEEQDSGTTTGCGLPSVEKMLATNPGKTPISLLQKYGTRIGKTPVYYLLKAEGHQPNFTFWVVGNTSCTAQGPRKKVVKHKAAEVALRHLKVESMLEPAPEDSSSFSPLDSSLPEDFPVFTAAAAATPVSSVFLTRSTPMEKQPPLLPQQSECIPVGALQKLVVQKGWWLPEHTVTXESRPDQHEELTXRVERFT

SEQ ID NO: 44268 - protein, 178 aa, Homo sapiens
  DOMAIN (54)..(81): C1q domain proteins domain identified by eMATRIX, accession number BL01113A, p-value=1.000e-09, raw score of 17.99
  misc_feature (1)...(178): Xaa = X or * as defined in Table 2
AFFPMSTAGVCGNVEGEPETPWSLPLSQVPFSPNACPQGTLGRSXAGVAGAPGPGVPGRSPAAGIPEPAARPGRPALSRLPGLGGAGARSGAAXGXGSRPGGPLPAADPVQSWGPXEAPSHPXPGTSADSPPSGVSGATGDCLWGSGRAELFGFATTSSAAPFPGLPTFFFIPVSPPH

SEQ ID NO: 44269 - protein, 1281 aa, Homo sapiens; identical to SEQ ID NO: 30702
  DOMAIN (125)..(170): kw TRANSCRIPTASE REVERSE II ORF2 domain identified by eMATRIX, accession number DM01354N, p-value=1.000e-40, raw score of 13.17
  misc_feature (1)...(1281): Xaa = X or * as defined in Table 2

SEQ ID NO: 44270 - protein, 135 aa, Homo sapiens
  DOMAIN (96)..(107): 5-HYDROXYTRYPTAMINE 1D RECEPTOR SIGNATURE domain identified by eMATRIX, accession number PR00514E, p-value=7.409e-09, raw score of 6.62
  misc_feature (1)...(135): Xaa = X or * as defined in Table 2
DAWAAARPGRSCALPPPGAPEEPGHVPGAAXGXGSRPGGRFQLPDPVQSWGPXEAPSHPXPRNFPQTRRHLGVKQHGCSQPSPHGSRASQAHPGISGLFGPHHPGPPLFIHGPRCCCAQATASNHLFACGTSSDP

SEQ ID NO: 44271 - protein, 57 aa, Homo sapiens
MPPTRVYSQNVGFFLFFNVWEKNVKFQFFSNCVSEIRSQLPAFLCGCSVPGAQLTGS

SEQ ID NO: 44272 - protein, 638 aa, Homo sapiens
  DOMAIN (60)..(79): BINDIN PRECURSOR SIGNATURE domain identified by eMATRIX, accession number PR00761E, p-value=1.663e-09, raw score of 14.32
PERRPAERSSPGQTPEEGAQALAEFAALHGPALRASGVPERYWGRLLHKLEHEVFDAGEVFGIMQVEEVEEEEDEAAREVRKQQPNPGNELCYKVIVTRESGLQAAHPNSIFLIDHAWTCRVEHARQQLQQVPGLLHRMANLMGIEFHGELPSTEAVALVLEEMWKFNQTYQLAHGTAEEKMPVWYIMDEFGSRIQHADVPSFATAPFFYMPQQVAYTLLWPLRDLDTGEEVTRDFAYGETDPLIRKCMLLPWAPTDMLDLSSCTPEPPAEHYQAILEENKEKLPLDINPVVHPHGHIFKVYTDVQQVASSLTHPRFTLTQSEADADILFNFSHFKDYRKLSQERPGVLLNQFPCENLLTVKDCLASIARRAGGPEGPPWLPRTFNLRTELPQFVSYFQQRERWGEDNHWICKPWNLARSLDTHVTKSLHSIIRHRESTPKVVSKYIESPVLFLREDVGKVKFDIRYIVLLRSVRPLRLFVYDVFWLRFSNRAFALNDLDDYEKHFTVMNYDPDVVLKQVHCEEFIPEFEKQYPEFPWTDVQAEIFRAFTELFQVACAKPPPLGLCDYPSSRAMYAVDLMLKWDNGPDGRRVMQPQILEVNFNPDCERACRYHPTFFNDVFSTLFLDQPGGCHVTCLV

SEQ ID NO: 44273 - protein, 756 aa, Homo sapiens
  DOMAIN (89)..(108): BINDIN PRECURSOR SIGNATURE domain identified by eMATRIX, accession number PR00761E, p-value=1.663e-09, raw score of 14.32
  misc_feature (1)...(756): Xaa = X or * as defined in Table 2
GQGRRTAGGGGGGGAGVGAGAGAMEAERGPERRPAERSSPGQTPEEGAQALAEFAALHVWSGEGIGVGSPAHTPADGNSGPQVFDAGEVFGIMQVEEVEEEEDEAAREVRKQQPNPLAPPTSLCPMPTRQPHIVACARSIFLIDHAWTCRVEHARQQLQQVPGLLHRMANLMGIEFHGELPIWVPEGSSGGWMGEREVPYVLCLQTAEEKMPVWYIMDEFGSRIQHADVPSFATAPLEEGPQPSVPSPPLMGTHDLGTEEVTRDFAYGETDPLIRKCMLPLSSSHRGMETPCVHTSRASLPLQACELPSWSLLLINEPPRPAFPSLPXPHLYFRCVSFXAIPGLVLESRLDTWEPGSPSSGSPHRVYTDVQQVASSLTHPALPVRASRHCRPPLELAHLPPPCRKLSQERPGVLLNQFPCENLLTVKDCLASIARRAGGPEGPPWWVLGWHHLGTQAPGAPQTALLLPRGEDNHWICKPWNLGLCVLGSPRGLCPGHQRACTCVLQVVSKYIESPVLFLREDVGKVKFDIRYIVGGTSLAGTRPLKNPYVSAHLSSRAFAQGRRGRGGPTWSGWLLARDPARVXDLLSSLVHSVERCPMQWALSEWQLHHLSTWSSGLCGLAGXXVFQMHRTPTPPXXQAACSRPSGGLYRAXWALCLLPGAADPLLRGCSEQASXLRLPGPQAEIFRAFTELFQVACAKPPPLGLPQATVPAEWRPTSLHTLLRSLPSGRRVMQPQILEVNFNPDCERACRYHPT

SEQ ID NO: 44274 - protein, 200 aa, Homo sapiens
  misc_feature (1)...(200): Xaa = X or * as defined in Table 2
MEEQRVQFTLWLHFSPHGICQFESGRQEAKKLKGSGQPLKTGEIKTGIQKYRREALLQHYLGPASLAGRSKALTGTAERSCSSGSDSSIFTLCVNYNDSRAIMKTLAAIGTGFDCASKAEIQLVQILGMPPERFMYANSCKQMSQIKYTANNGVQMMIFGNEVKLMSVARTHSKQPCHISVKSGAMLKASRLLLEXAKEL

SEQ ID NO: 44275 - protein, 680 aa, Homo sapiens
MSSENGFSRRDHFEEHTAKRGQLQQPDRSVCFKNNHFLNLPAGLSKAALPLPPEPYPIAQHLPQAGQDLPTSASVPNTLRVSLPPHLRIYNKTAKLHSLSLNQTRLPSKPQTLCLNRKMSDRKSTREFVNSLDSKLSPTTRGSGKNRGPEGNQAQPLDALSAQAQVTPTLSHQEPRRRHEPQDHLTSPGHLEPLRRPEPWAISVHHAKFPTGALSNRRQMANTQRPPPDTPRRGQISSTLKRAYLQQVREVARLGFQQIPENRFTAKSTSAAIQITRGTVKTPDAQPEPTDAHVPGGGSQLGVQKLQAPLMVARPDHLLAAPRTVSNRIRTLKPHTDQRGSSTESAASNPDHRGPGYSDLSGFCTLTFSCRESKQERRLLNAVVKVSAKTTAESSASQTSGKLESTFLYHFKEKGSCASLAVINPTTWASLRGTLALLSTAQEKAERNYSSGPQGKYAVGMHILGSARSRCSWDPIQSRPKVLPAPGPAQLSRTQAQKNLEKEFKVFLNSSEVLGRRRGPERRGKESAMEGPPWTGPSQREPALRTGGAHGPSAGPQQELSWEPCTGGNRWLRWQPHENGGLLPKATVESRAPVNVLAETMLSPQALYNLLSQVEAAWWISHGYATCRILHTHELLSVLDWLYVKHRSETNQKIIRRPNGTLCQSFTDTCGMALTDTLKK

SEQ ID NO: 44276 - protein, 78 aa, Homo sapiens
  misc_feature (1)...(78): Xaa = X or * as defined in Table 2
LYFLETGVFCVQVPAQQCXCSVPGSCRRPLEEAGWRGLGLSGRLAGTGLPSGSRGNRTERGERGKLVRGRRGVTRWLS

SEQ ID NO: 44277 - protein, 116 aa, Homo sapiens
  misc_feature (1)...(116): Xaa = X or * as defined in Table 2
KTGVFCVPGPRPTVLMXCSFVGGKKNQYCLTGDAGCLQEKHSLGPAGVHLEEAGWRGLGLSGRLAGTGLPSGSRGNRTERGERGKLVRGRRGVTRWLSHPQVQRQADAGTCSPFEP

SEQ ID NO: 44278 - protein, 137 aa, Homo sapiens
  misc_feature (1)...(137): Xaa = X or * as defined in Table 2
VRKGHHAVRGLCGRAQFRCISGDPGKRPLGLPGGNAPKSGSLARRPQPVRIPGSRPQRGSVSHLGPAGVHXRRAGWRGLGLSGRLAGTGLPSGSRGNRTERGERGKLVRGRRGVTRWLSHPQVQRQADAGTCSPFEP

SEQ ID NO: 44279 - protein, 500 aa, Homo sapiens
  DOMAIN (41)..(80): PROTEIN ZINC FINGER ZINC-FINGER METAL-BINDING NU domain identified by eMATRIX, accession number PD01066, p-value=9.143e-32, raw score of 19.43
  misc_feature (1)...(500): Xaa = X or * as defined in Table 2
VRVAHIPIAAAEIAAIPDRGGHLSVGKRKLTFWFFYGVLPFRDVAIEFSPEEWECLDSAQQHLHRDAMLENYGNLVSLAAGDQSLPGDAAASAVCRQLSPSACGAILGLPPVNGVAPVRLRGEIVTYTWSQLTGLALALSKDGADGLRRLTRPTRRAPPALLLAPQTAAERWRGKCDPRHGGGCALALQGWTLYPRESPSRESKELGGLWSFRADLDSRRQGFEEQWYPRPLRELRGRGGRRPEARRWEGGSPGPCRLLPLSAPELAPYRKLKVNGLRGAGLGDGETGGTGEGRGGRRRKRCCRTLSRDEGFNDICQDWWLRQFVGWVLYEQEVTLPEQWTQHLRTRVVLRIASAHSYATVVSAARSRQGRGIGGLIYTLGMPFFLSGWQVPEPHAAGYVRECLIAGPLLMPTTCCPLLISPVSAVGEWGRHARAXGADSSSLVQNTDFDFFNYAGLQRSVLLYTTLTTYIDDITITTGVEHDSAEIPIFPEYLRVNTGN

SEQ ID NO: 44280 - protein, 102 aa, Homo sapiens
  DOMAIN (16)..(41): Glycosyl hydrolases family 2 proteins domain identified by eMATRIX, accession number BL00719B, p-value=5.333e-22, raw score of 17.24
TSKYPKGYFVQNTYFDFFNYAGLQRSVLLYTTPTTYIDDITVTTSVEQDSGLVNYQISVKGSNLFKLEVRLLDAENKVVANGTGTQGQLKVPGVSLWWPYLM

SEQ ID NO: 44281 - protein, 69 aa, Homo sapiens
  misc_feature (1)...(69): Xaa = X or * as defined in Table 2
MSTLPFPSLQMFRRPPYGSPSTCRSQDNRSYSRVTEELQERRRWNSGDANXDQSPEARRQRPRHIEEAA

SEQ ID NO: 44282 - protein, 1345 aa, Homo sapiens
  DOMAIN (5)..(38): Chloramphenicol acetyltransferase proteins domain identified by eMATRIX, accession number BL00100E, p-value=2.929e-33, raw score of 15.41
  misc_feature (1)...(1345): Xaa = X or * as defined in Table 2
MGKYYTQGDKVLMPLAIQVHHAVCDGFHVGRMLNELQQYCDEWQGGAYPKGYFVQNTDFDFFNYAGLQRSVLLYTTPTTYIDDITITTGVEHDSAAAPMVDSLIARVGVMARGNAITLPVCGRDVKFTLEVLRGDSVEKTSRVWSGNERDQELLTEDALDDLIPSFLLTGQQTPAFGRRVSGVIEIADGSRRRKAAALTESDYRVLVGELDDEQMAALSRLGNDYRPTSAYERGQRYASRLQNEFAGNISALADAENISRKIITRCINTAKLPKSVVALFSHPGELSARDFADFGTTIKQDFRLLGQTSVDRLLQLSQGQAVKGNQLLPVSLVKRKTTLAPNTQTASPRALADSLMQLARQVSRLESGQDFADFGTTIKQDFRLLGQTSVDRLLQLSQGQAVKGNQLLPVSLVKRKTTLAPNTQTASPRALADSLMQLARQVSRLESGQYPKGYFVQNTDFDFFNYAGLQRSVLLYTTPTTYIDDITITTGVEHDSAAAPMVDSLIARVGVMARGNAITLPVCGRDVKFTLEVLRGDSVEKTSRVWSGNERDQELLTEDALDDLIPSFLLTGQQTPAFGRRVSGVIEIADGSRRRKAAALTESDYRVLVGELDDEQMAALSRLGNDYRPTSAYERGQRYASRLQNEFAGNISALADAENISRKIITRCINTAKLPKSVVALFSHPGELSARDFADFGTTIKQDFRLLGQTSVDRLLQLSQGQGXRAISCCPSTGEKKNHPGAQYANRLSPRVGHSLMQLARQVSRLESGQDFADFGTTIKQDFRLLGQTSVDRLLQLSQGQAVKGNQLLPVSLVKRKTTLAPNTQTASPRALADSLMQLARQVSRLESGQYPKGYFVQNTDFDFFNYAGLQRSVLLYTTPTTYIDDITITTGVEHDSAESLCLEYQGPPLMFTEEYQKSLPEQYHLGLDQKRRKYVVGELIGNSADFTTMQYADDTSIYMFYQKVGDNSIDSWKNAGRVFKDSDKFDANDPILKDQTQEWSGSATFTSDGKIRLFYTDYSGKHYGKQSLTTAQVNVSKSDDTLKINGVEDHKTIFDGDGKTYQNVQQFIDEGNYTSGDNHTLRDPHYVEDKGHKYLVFEANTGTENGYQGEESLFNKAYYGGGTNFFRKESQKLQQSAKKRDAELANGALGIIELNNDYTLKKVMKPLITSNTVTDEIERANVFKMNGKWYLFTDSRAPQTAAERWRGKCDPRHGGGCALALQGWTLYPRESPSRESKELGGLWSFRADLDSRRQGFEEQWYPRPLRELRGRGGRRPEARRWEGGSPGPCRLLPLSAPELAPYRKLKVNGLRGAGLGDGETGGTGEGRGGRRRKRCCRTLSRDEG

SEQ ID NO: 44283 - protein, 978 aa, Homo sapiens
  DOMAIN (855)..(893): Glycosyl hydrolases family 2 proteins domain identified by eMATRIX, accession number BL00719D, p-value=3.634e-30, raw score of 22.90
  misc_feature (1)...(978): Xaa = X or * as defined in Table 2
MITFDFMSHIQVTLMQEVSFHGLGQLRPCGFAGYSPPPGCFHRLASSVCSFSRCTVQAAVDLPFWGLEGTSPLLAASLGSAPVGTLCGGSDPTFPSWTALADVLHEEGHTPASNFCLRNLAGEASQSWRKEGLGTPRPTASSTEELQTLNEDSRLMTSPHNLEETRDCDTELPKKSLGWKEIRVYGQNKTLGFWLQAQLLICDGGNLRMFRLLPYGSPSTCRSQDNRGYGGVTEELMERKRWNSTDGFHIQGVLEQGVNLESELTGDDRSIGPAYSHQLSRIPGLALALSKDGADGLRRLTRPTRRAPPALLLAPQTAAERWRGKCDPRHGGGCALALQGWTLYPRESPSRESKELGGLWSFRADLDSRRQGFEEQWYPRPLRELRGRGGRRPEARRWEGGSPGPCRLLPLSAPELAPYRKLKVNGLRGAGLGDGETGGTGEGRGGRRRKRCCRTLSRDEGFNDICQDWWLRQFVGWVLYEQEVTLPEQWTQHLRTRVVLRIASAHSYATVVSAARSRQGRGIGGLIYTLGMPFFLSGWQVPEPHAAGYVRECLIAGPLLMPQPAAPSSYLLCLQWVNGVDTLEHEGPTAAVWSRDHLLHDQHLQVDTDLVSTACTYLPIPPCGLPARDRVALAEWRTWIXGDLXAEVKGPGQGPSEPLSSDPRYPKGYFVQNTDFDFFNYAGLQRSVLLYTTPTTYIDDITITTGVEHDSAGILGMLSGGIDRLISPEVIGLVNYQISVKCSNQIQLEVHLLEAENKAMATGAFTQGQLKVRLTAQTSLGPLSDFYTLPVGIRTVAVTESQFFINGKPFYFHSINKHEDADLRLCSWVLVGAASGHLPLLPSILGKGFNWLLLVKDFNLLHWLGANAFCTSHYPYAGEVLQMCDRYGIVVIDECPAVGLVLVQLFNNVSVHQHMWVMEELVCRDKNHPAVVMWSVANKPASYLEPAGYYFRLEISDMILALYNLRFPGLSDYFASGS

SEQ ID NO: 44284 - protein, 119 aa, Homo sapiens
  misc_feature (1)...(119): Xaa = X or * as defined in Table 2
SHILPGAPGAPAWWTRWPSTLPEPFPRGRGSPAGTSPISRPGLVQSSXASRGSDSRLPVGPASCQASGPGPDSRRPPPCTPAGPHHGSLPSAGRVGASAAAAGPPSPAVPLPPAERPAP

SEQ ID NO: 44285 - protein, 132 aa, Homo sapiens
  DOMAIN (7)..(25): FLAVIN-CONTAINING AMINE OXIDASE SIGNATURE domain identified by eMATRIX, accession number PR00757H, p-value=6.936e-09, raw score of 9.22
  misc_feature (1)...(132): Xaa = X or * as defined in Table 2
TAFSLNFQGGVEGEVWAGTRAARGACAGERGLGGSRTRSGWPGTAGPGQAGHGTCSLPCPSLPPAMGSCVSEPPRQAPPPAPWRLVPSTAQGLRSVGTQCGTGGSSACGPCGDPGFXTHQSAPCQNGPISSL

SEQ ID NO: 44286 - protein, 114 aa, Homo sapiens
CAWNSAIRAGRSWFSGPAAPAAAMSFFPELYFNVDNGYLEGLVRGLKAGVLSQADYLNLVQCETLEAAFFQDCISEQDLDEMNIEIIRNTLYKVMPHTSHGGLACRWVGLWEVV

SEQ ID NO: 44287 - protein, 420 aa, Homo sapiens
  misc_feature (1)...(420): Xaa = X or * as defined in Table 2
EDLLQEAQALAEVTAQGKGLGQVRSLDLSLEACAGSPPLQVLDLQDREPRSLTSLPSSAANRGKLEKAQSNPCGHRRHQAAGLKLPLFSAQAPQGQPTPAPRFRAATRKPGTAQSHAPLWSPAMSFFPELYFNVDNGYLEGLVRGLKALGELSQADYLNLVQCETLEDLKLHLQSTDYGNFLANEASPLTVSVIDDRLKEKMVVEFRPHEGTMPYEPTSPSFPXTSITLQFTXFDNVILWLIHRARLHQRSIAELVPQVAHPLGSFEQMEAVNIAQTPAELYNAILVDTPLAAFFQDCISEQDLDEMNIEIIRNTLYKAYLESFYKFCTLLGGTTADAMCPILEFEANRRAFINTINFFGTKTVPKKDRCPAFFPHCGAGFFPEGPAAMGFGLNNLLTGAKKRGPYNFPEVQLAFLRGDG

SEQ ID NO: 44288 - protein, 394 aa, Homo sapiens
MDHCSWIKPYQIKAKKSLVYLSFPSFPNTVPISITVPTTSNSNPTLERFYGLGAEVTGKDPIGFFKMRFVLPALPPTTAPFTNLRNKTMPRLMPNDKSKVSVVEIGDLRQTIAIDRSSSYALVQLAIPFTLAFHQPEEGKIRHHKVREAPYRSFNSHVYLDAIGVPRGIPDQFKARNQIAAGFESIFWWVTINKNIDWINYIYYNQQQFMNYTRDAVKGIAEQLGTNCQMAWENRIALDMILAERGGVCIMIKTECCAFIPNNTAPNGSITKALQGLTALSNELASSSGVNDPFTGWLEKWFGKWKGITASILTSLTAVMGVLILVGCCVIPCICGLVQRHRGPPLVVIETKPLGLERLAGLPVGHALKLGSGIQATPQNGENADRREAFPAAS

SEQ ID NO: 44289 - protein, 104 aa, Homo sapiens
  misc_feature (1)...(104): Xaa = X or * as defined in Table 2
ARFLAGPXLPSRRTGLRDLQPAMPEPPPTPWAPVRPEPPRRAPPPAPRRPVPSTGKEQTTQGLRSAGAGHRDWQAAPPAAPVRDPLGEASWAPESGGDVESLYV

SEQ ID NO: 44290 - protein, 132 aa, Homo sapiens
VLWRKCKKGRRVSARMAVALLRKVNTVSIIDKVTIEQKPEEGDIGHWLDMGAKYFVGAQEIFVAIYCPENMVSWASTLSRAADVASAAFDTKTGLRVAVKKLSRPFQSIIHAKRTYRELRLLKHMKHENVMS

SEQ ID NO: 44291 - protein, 480 aa, Homo sapiens
  DOMAIN (260)..(291): Protein kinases ATP-binding region proteins domain identified by eMATRIX, accession number BL00107A, p-value=4.375e-21, raw score of 18.39
NRDHWSLSGRSSWNGSTATQPGVGLVGAKVQGDRGGRSLERRSASLPLAGLAPVAGAHPAAAADSSRARGSLRGRGSRTCAGDQRKVPARLGGQQGPGRGCGCRRGPHRATFLPGGCRWKMSQERPTFYRQELNKTIWEVPERYQNLSPVGSGAYGSVCAAFDTKTGLRVAVKKLSRPFQSIIHAKRTYRELRLLKHMKHENVIGLLDVFTPARSLEEFNDVYLVTHLMGADLNNIVKCQKLTDDHVQFLIYQILRGLKYIHSADIIHRDLKPSNLAVNEDCELKILDFGLARHTDDEMTGYVATRWYRAPEIMLNWMHYNQTVDIWSVGCIMAELLTGRTLFPGTDHINQLQQIMRLTGTPPAYLINRMPSHEARNYIQSLTQMPKMNFANVFIGANPLAVDLLEKMLVLDSDKRITAAQALAHAYFAQYHDPDDEPVADPYDQSFESRDLLIDEWKSLTYDEVISFVPPPLDQEEMES

SEQ ID NO: 44292 - protein, 211 aa, Homo sapiens
  misc_feature (1)...(211): Xaa = X or * as defined in Table 2
NSFLMVGFFPFFSLCAAFDTKTGLRVAVKKLSRPFLRPDGYYTEFNIYLLFNFYILTSSAVXVVLSHSVVIECLLSIRHCSRYFRKSSEDKNFLRGSRLLCNFSLISRYLVTHLMGADLNNIVXRYRXYKXXFFKMNSPFLPLPVGGELIMHHKVDPVCFVFFSLPVSKSXQFVCSSSALXILDFGLARHTDDEMTAKGQPECFVRWACAS

SEQ ID NO: 44293 - protein, 243 aa, Homo sapiens
RHIQDPASQRLTWNKSPKSVLVIKKMRDASLLQPFKELCTHLMEARGAGGGHDARSLTTAPVSREPPCRRVGSAGGMSRLALCFQENMIVYVEKKVLEDPAIASDESFGAVKKKFCTFREDYDDISNQIDFIICLGGDGTLLYASSLFQGNAAVVLRSRLKVRVVKELRGKKTAVHNGLGEKGSQAAGLDMDVGKQAMQYQVLNEVVIDRGPSSYLSNVDVYLDGHLITTVQGDGVIVSTPTG

SEQ ID NO: 44294 - protein, 477 aa, Homo sapiens
  misc_feature (1)...(477): Xaa = X or * as defined in Table 2
PESRHQCFSDRSANFLTMEMEQEKMTMNKELSPDAAAYCCSACHGDETWSYNHPIRGRAKSRSLSASPALGSTKEIRRTRSLHGPCPVTTFGPKACVLQNPQTIMHIQDPASQRLHVEQRPPRTVLVIKKMRDASLLQPFKELCTHLMEENMIVYVEKKVLEDPAIASDESFGAVKKKFCTFREDYDDISNQIDFIICLGVDGTLLYASSLFPGQPSPPVMAFHLGSLGFLTPISFENFQSQVTQVIEGNASCCSSGSRLKGQGWXRSLRGKKTAVHNGLGEKGSQACRPGTMDVGKAQAMQVPRSXNEVVIDRGPSSYLSNVDVYLDGHLITTVQGDGKARSTVLGPXASLGREXRLRLSLSGVIVSTPTGSTAYAAAAGASMIHPNVPAIMITPISRSVLPTAGGPHLSLLDPQIMLSPEARNAGGGPFWKPWLRLLLSRPSISITTSCYPLPSICVRDPVSDWFESLAQCLHWN

SEQ ID NO: 44295 - protein, 46 aa, Homo sapiens
SISPIFQPLTLHNPLKNCSPELSGMMNLKVCSCLLTQKPVIIKLFL

SEQ ID NO: 44296 - protein, 64 aa, Homo sapiens
EFPGRPSEKRGSATEKFGATSAVTENPPLGAAGERANKTLGAATVTPTLGPRPRMEKGGYGATT

SEQ ID NO: 44297 - protein, 285 aa, Homo sapiens
  misc_feature (1)...(285): Xaa = X or * as defined in Table 2
WRKCGCETAGSASATRAAATEKMEAPRNKMCRDQENSAWRNAVPGPXEXRQPEEFPRTTSILAEPTVLSRRKCRPSEKRGSATEKFGATSAVTENPPLGAAGERANKTLGAATVTPTLGPRPRMEKGGTRCPSTLXPSVQERQPESPSGNHPETQKIEFAGRRVTFQHRWATTLRTRISGTGASPRDRSAFFGFPWCGAAQPSDEESTPATQEEAQAQAGVAAAASSEEPGHCAPRPPHAPRSALFEDWSREPERSDDGDLSECRRPATEPWRPPGSAWRLPCAA

SEQ ID NO: 44298 - protein, 217 aa, Homo sapiens
  DOMAIN (135)..(170): 2-oxo acid dehydrogenases acyltransferase component lipoyl bi domain identified by eMATRIX, accession number BL00189A, p-value= 2.895e-20, raw score of 19.58
  misc_feature (1)...(217): Xaa = X or * as defined in Table 2
SARGLLPGSGPLSHAGPQLQVEWFGCLPPPDSTLELVVCGTVAISRVRMSAVCVLRTWSRNAGQLICFTVFQPCSNVHVLKGPNYVCFFGYPSFKYSHPHNFLKTINAVCGQLVQFRFPDTEEGIRKVTVKCYVKEGDTVSQFDNIGKVQSDKASVTIASPYDGVIRKLXHSLDDIAYVGKPLVNIETEALKGTVNLFYQIDYCPPFVIGSQLKVTL

SEQ ID NO: 44299 - protein, 96 aa, Homo sapiens
  misc_feature (1)...(96): Xaa = X or * as defined in Table 2
LFSRVPSKGPPRYHHTSSRGXTRADXLISSGNSXAHCIPSGLQGMLNLLPTPRAPVRPEPPRRAPPPAPRRPVPFDHPRACGTGRQLHLQPRCGIH

SEQ ID NO: 44300 - protein, 281 aa, Homo sapiens
  misc_feature (1)...(281): Xaa = X or * as defined in Table 2
MQAVLLTVLQKHNQSVIYWYMKYIYYEGLVIMDDYDYVIMDYMTMETEKSHDLQAGGPGKPVVQFQFKPKILQASRGNGVKSWSKSKGLRTRCANVQGQENREGPAKHSPFLCLFVLFGSSTGRMIPNHTGDTSKVIAGTEERGVPKKVTLKFDACAAIDRPWAHQLDCTYHFKGSNDEHDSRLHTNAGXLXLCRLWITXLWRLRNPMICRLEAQESQWYSFSSSPKSCKPVEAMALSPGPSPKAXEPGVLMSKGRKIGRAQLSIHLSSAFLFFSAPQQVE

SEQ ID NO: 44301 - protein, 217 aa, Homo sapiens
  misc_feature (1)...(217): Xaa = X or * as defined in Table 2
VEKKKKPMSAPALRLPDLTKLFTLYVSETKKMAVRVLTQTVGPWPRPVALLSKQLDEVSKRWPPCPKSLVAIALLAQEADKLTLRQNLNIKSPCAVVILINTKGHHXLMNARLARYQSLLCEHPRITLGSLQHLNPATFLPVSESPVKHNCVEVLDSVYSYVGPNHRDHPLNISRLGAVTWMGSSFHQPLQSDTLKKTTSPGSSHTRKLTGPRTAEA

SEQ ID NO: 44302 - protein, 224 aa, Homo sapiens
  misc_feature (1)...(224): Xaa = X or * as defined in Table 2
MAPPLRPLARLRPPGMLLRALLLLLLLSPLPGLREGIGELITPIGTSLPDLDPARRRWEGGIGRVGSEVADLCPGKEGGKVPEAEKEGVWCFSELSFVKEPQDVTVTRKDPVVLDCQAHGEVPIKVTWLKNGAKMSENKRIEVLSNGSLYISEVEGRRGEQSDEGFYQCLAMNKFXAILNQKAHLALSRIGSTXRRRPDRPXEDEAFVMTTHCFQDLLTSLIES

SEQ ID NO: 44303 - protein, 104 aa, Homo sapiens
MKLPGAILLVGCRPPLPLRGGSKIANWRRPVWPPALGEPGWGVTRRPLGAEEAPVRRLRAPDKSGAGESSAVSMEEQETEEVGGRSSRKNAATVNAASLPPCFG

SEQ ID NO: 44304 - protein, 168 aa, Homo sapiens
  DOMAIN (147)..(168): GLUTELIN SIGNATURE domain identified by eMATRIX, accession number PR00211B, p-value=7.063e-12, raw score of 0.86
  misc_feature (1)...(168): Xaa = X or * as defined in Table 2
WASSDTPTGFTQRWRPDWAGGGGGEERGDGTGVVWEGEKVYRFRRVTGGSSFPSPAVLVRAPNTGMPKLTYIQTXGPLGERGKEPVPPNPTLPQTFGGLLNASVVRKTEIPSPSPPPVCYLRASAERQPAGGSPQAKWRRAASSPPPLPPVHLPPPPPPPRPPPPPPP

SEQ ID NO: 44305 - protein, 369 aa, Homo sapiens [sequence omitted]

SEQ ID NO: 44306 - protein, 142 aa, Homo sapiens
  misc_feature (1)...(142): Xaa = X or * as defined in Table 2
YPEPQGWRVAHTVQYPIHIQPLKPGPRGRXSIMDIQVPPKEGGVLILKNSSRLLNSWTQGCLQISAFSPTSSTLPGTPWSNVGPYKIAPITSFGEPFIRVIWKQLPSWISIIQVSHKQXQIHRSVDIGWSPGQECGPKGCFV

SEQ ID NO: 44307 - protein, 472 aa, Homo sapiens; identical to SEQ ID NO: 35776
  DOMAIN (57)..(100): kw TRANSCRIPTASE REVERSE II ORF2 domain identified by eMATRIX, accession number DM01354T, p-value=1.000e-40, raw score of 9.48

SEQ ID NO: 44308 - protein, 1150 aa, Homo sapiens
  DOMAIN (353)..(394): kw TRANSCRIPTASE REVERSE II ORF2 domain identified by eMATRIX, accession number DM01354I, p-value=1.000e-40, raw score of 15.55
HTKNPSVHHHRQRPKVDKTTKMGKKQNRKTGKSKTQSAFPPPKERSSSPAMEQSWMENDFDELREEGFRRSNYSELREDIQTKGKEVENFEKNLEECITRITNTEKCLKELMELKTKARELREECRSLRNWIKSQDPSLCCIQETHLMCRDTHRLKIKGRRKIYQANGKQKKAGVAILVSDKTDFKPTKIKRDKEGHYIMVKGSIQQEELTILKIYAPNTGSPRFMKQVLSDLQRDLDSHTLIMGDFNTPLSTLDRSTRQKVNKDTQELNSALHQADLIDIYRTLHPKSTEYTFFSAPHHTYSKIDHILGSKALLSKCKRTEIITNYLSDHSAIKLELRIKNLTQNGSTTWKLNNLLLNDYWVHNEMKAEIKMFFETNENKDTTYQNLWDAFKAVCRGKFIALNAHKRKQERSKIDTLTSQLKELEKQEQTHSKASRRQEITKIRAELKEIETRKTLQKINESRSWFFERINKIDRPLARLIKKKREKTQIDTIKNDKGDITTDPTEIQTTIREYYKHLYANKLENLEEMDTFLDIYTLPRLNQEEVESLNRPITGAEIVAIINSLPTVGFIPGMQGWFNIRKSTNVIQHINRAKDKNHMIISIDAEKAFDKIQQPFMLKTLNKLGIDGTYFKIIRAIYDKPTANIILNGQKLEAFPLKTGTRQGCPLSPLLFNIVLEVLARAIRQEKEIKGIQLGKEEVKLSLFADDMIVYLENPIISAQNLLKLISNFSKVSGYKINVQKSQAFLYTNNRQTESQIMSELPFTIASKRIKYLGIQLTRDVKDLFKENYKPLLKEIRGHKQMVPKVIYRFNAIPMKLPMTFFTELEKTTLKFIWNQKRARIAKSILSQKNKAGGITLPDFKLYYKATVTKTAWYWYQNRDIDQWNRTEASEIMPHIYNYLIFDKPEKNKQWGKDSLFNKWCWENWLAICRKLKLDPFLTPYTKINSRWIKDLNVRPKTIKTLEENLGITIQDIGVGKDFMSKTPKAMATKAKIDKWDLIKLKSFCTAKETTIRVNRQPTTWEKIFATYSSDKGLISRIYNELKQIYKKKTNNPIKKWAKDMNRHFSKEDIYAAKKHMKKCSSSLAIREMQIKIPVSQINLFYLQITQPHVCLSSRTNGLKQKIGMKECSFVIKIPEDVEVALELGNEQQ

SEQ ID NO: 44309 - protein, 1056 aa, Homo sapiens; identical to SEQ ID NO: 38235
  DOMAIN (554)..(599): kw TRANSCRIPTASE REVERSE II ORF2 domain identified by eMATRIX, accession number DM01354N, p-value=1.000e-40, raw score of 13.17

SEQ ID NO: 44310 - protein, 810 aa, Homo sapiens
  DOMAIN (138)..(183): kw TRANSCRIPTASE REVERSE II ORF2 domain identified by eMATRIX, accession number DM01354N, p-value=1.000e-40, raw score of 13.17
MRTKTQHTRISGTHSKPVCRGKFIALNAHKRKQEKSKIDTLTSQLKELEKQEQTHSKASRRQEITKIRAELKEIDTQKTLQKINESRSWFFERINKIDRPLARLIKKKREKNQTDTIKNCKGDITTDPTEIQTTIREYYKHLYANKLENLEEMDKFLNTYTLPRLNQEEVESLNRPITGAEIVAIISSLPTKESRTGWIHSRILPEVQGGTEKEGILPNSFYEASIILIPKPGRDATKKENFRPISLMNIDAKILNKILAKRIQQHIKKLIHHDQVGFIPGMQGWFNIRKSINVIQHINRTKDKNHMIISIDAEKAFDKIQQRFLLKTLNKLGIDGTYFKIIRAIYDKPTANIILNGQKLEAFPLKTGTRQGCPLSPLLFNIVLEVLARAIRQEKEIKGIQLGKEEVKLSLFADDMIVYLENPIVSAQNLLKLISNFSKVSGYKINVQKSQAFLYTNNTQTESQIMSELPFTIASKRIKYLGIQLTRDVKDLFKENYKPLLKEIKDDTNKWKNIPCSWVGRINIVKMAILPKNWKKTTLKFIWNQKRAHITKSILSQKNKAGGITLPDFKLYYKATVTKTAWYWYQNRDIDQWNRTEPSEIMLHTYNYLIFDKPEKNKQWGKDSLFNKWCWENWLAICRKLKLDPFLTPYTKINSKWIKDLNVRPKTIKTLEENLGITIQDIGMGKDFMSKTPKAMATKAKIDKWDLIKLKSFCTAKEATIRVNRQPTKWEKIFATYSSDKGLISRIYNELKQIYKKKTNNPIKKWVKDMNRHFAKEDIYAAKKMKKCSSSPAIREMQIKTTMRYHLTPV

SEQ ID NO: 44311 - protein, 341 aa, Homo sapiens
  DOMAIN (22)..(65): kw TRANSCRIPTASE REVERSE II ORF2 domain identified by eMATRIX, accession number DM01354T, p-value=1.000e-40, raw score of 9.48
MGAIYDKPTANIILNGQKLEAFPLKTGIRQGCPLSLLLFNIVLEVLARAIRQEKEIKVIQVGKEEVKLSLFADDMIVYLEDPIISAPNLLKLISNFSKVSGYKINVQKSQAFLYTNNRQTESQIMSELPFTIASKRIKYLGIQLTRDVKDLFKENYKPLLKEKEDTNKWKNIPCSWVGRINIVKMAILPKAICRKLKLDPFLTPYTKINSRWIKDLNVRPKTIKTLEENLGNTIQDIGMDKDFTSKTPKAMATKAKIDKWDIIKLKSFCTAKETTIRVNRQPTEWEKIFAIYSSDKGLISRIYNELKQIYKKKSNNPIKKWAKDMNRHFSKEDIYAAKRHM

SEQ ID NO: 44312 - protein, 736 aa, Homo sapiens
  DOMAIN (14)..(59): kw TRANSCRIPTASE REVERSE II ORF2 domain identified by eMATRIX, accession number DM01354N, p-value=1.000e-40, raw score of 13.17
  misc_feature (1)...(736): Xaa = X or * as defined in Table 2
MTDPTEIQTTIREYYKHLYKNKLENLEEMDKFLDTYTPPRLNQEEVESLNRPITGSEVVAIINSLPTKKSPGPDGFTAEFYKRYKEELIPFLLTLFQSIEKEGILPNSFYEASIILIPKLGRDTTKKENFRPISLMNTDAKILNKILAKRIQQHIKKLIHHDPVGFIPGMQGWFNIHKSINVIQHINRAKDKNHMIISIDAEKAFDKIQQHFMLKTLNKLGIDGTYFKIIRAIYDKPTANIILNGQKLEAFPLKTCTRQGCPLSPLLFNIVLEVLARAIRQEKEIKVIQLGKEEVKLSLFADDMIVYLENPIVSAQNLLKLISNFSKVSGYKINVQKSQAFLYTNNRQTESQIMSELPFTIASKRIKYLGIQLTRDVKDLFKENYKPLLKEIKEDTNKWKDIPCSWIGRINIVKMAILPKVIYRFNAIPIKLPMPFFTELEKTTLKFIWNQKRAHITKSILKNKAGGITLPDFKLCYKATVAKTAWYWYQNRDTHQWNRTEPSEITPHIYNYLIFDKPEKNKQWGKDSLFNKWCWENWLAICRKLKLDPFLTPYTKINSRWIKDLNVRPKTIKTLEENLGNTIQDISMGKDFMAKTPKAMATKDKICKWDPIKLKSFCTAKETTIRVNRQPTKWEKIFATYSSDKGLISRIYNELQQIYKKKTNNPIKKSAKDMNRHFPKEDIYAAKKHMKKCSSSLAIREIQIKTTMRYHLTPVRMAIIKKSGNNRMKLQTFMAX

SEQ ID NO: 44313 - protein, 563 aa, Homo sapiens
  DOMAIN (260)..(307): kw TRANSCRIPTASE REVERSE II ORF2 domain identified by eMATRIX, accession number DM01354V, p-value=1.000e-40, raw score of 12.97
MGRNQRKKAENSKNQNASSPAKDHNSSPAREQNWTKNEFDELTEVGFRRITSVEKNINDLMKLKNTARELHEVCRGINSRIDQAEERLSEIEDQLNEIKCRKGLRQNSTAFYAKNSQKLGIDGRYLKIIRAIYNKPRANIILNGQNQEALPLKTGTRQGCPLSPLLFNIALEVLARSIRQEKAIKRIQIGREKVKLSLFADDMIVYLENPIVSAPNLLTLISNFSKVSGYKINVQKSQAFLYTNNRQETEIQIMSELPFTVATKRIKYLGIQLTRDVKDLFKENYKPLLNEIREDINKWKNIPCSWIGRINIMKMAVLPKVIYRFNAIHIKLPLTFFTELEKTTLNFIWNQKRAHIAKKSRSKKNKAGGIILPDFKLYYKATVTKTAWYWYQNRYIDQWNRTEACKITPHVYNHLIFDKPDKNELWGKDSLFHEWSSENWIAICRKLKLDPFLTPYTKINSRWIKDLNVRPKTIKTLEENLGNSIQDIGMGKDFMIKTPKAMATKAKIDKWDLIKLKSFCTAKETIIRVNRKPTEWEKIFVICPSDKGLISRIYKELKQIYKK

SEQ ID NO: 44314 - protein, 840 aa, Homo sapiens; identical to SEQ ID NO: 34061
  DOMAIN (525)..(568): kw TRANSCRIPTASE REVERSE II ORF2 domain identified by eMATRIX, accession number DM01354T, p-value=1.000e-40, raw score of 9.48
  misc_feature (1)...(840): Xaa = X or * as defined in Table 2

SEQ ID NO: 44315 - protein, 956 aa, Homo sapiens; identical to SEQ ID NO: 36625
  DOMAIN (338)..(379): kw TRANSCRIPTASE REVERSE II ORF2 domain identified by eMATRIX, accession number DM01354I, p-value=1.000e-40, raw score of 15.55

SEQ ID NO: 44316 - protein, 1033 aa, Homo sapiens
  DOMAIN (272)..(317): kw TRANSCRIPTASE REVERSE II ORF2 domain identified by eMATRIX, accession number DM01354N, p-value=1.000e-40, raw score of 13.17
  misc_feature (1)...(1033): Xaa = X or * as defined in Table 2
MGELITPLSTLDRSTRQKVNKDTQELNSALHQGDLIDIYRTLHPKSTEYTFFSAPHHTYSKIDHILGSKALLSKCKRTEIITNYLSDHSAIKLELRIKNLTQNRSTTWKLNNLLLNDYWIHNEMKAEIKMFFETNENKDTTYQNLWDAFKAVCRGKFIALNAHKRKQERSKIDTLTSQLKELEKQEQTHSKASRRQEITKIRAELKEIETQKTLQKINESRSWFFERINKIDRPLARLIKKKREKNQIDTIKNDKGDIATNPTEIQTTIREYYKHLYANKLENLEEMDKFLDTYTLPRLNQEEVESLNRPITGAEIVAIINSLPTKKSPGPDGFTAESYQRYKEELVPFLLKLFQSIEKEGILPNSFYEASIILIPKPGRDTTKKENFRLISLMNIDAKILNKILANRIQQHIKKLIHHDQVGFIPGMQGWFNIRKSINVIQHINRAKDKNHMIISIDAEKAFDKIQQPFMLKTLNKLGIDGTYFKIIRAIYDKPTANIILNGQKLEAFPLKTGTRQGCPLSPLLFNIVLEVLARAIRQEKEIKGIQSGKEEVKLSLFADDMIVYLENPIVSDQNLLKLISNFSKVSGYKINVQKSQAFLYTNNRQTESQIMSELPFTIASKRIKYLGIQLTRDVKDLFKENYKPLLKEIKEDTNKWKNIPCSWVGRISIVKMAILPKVIYRFSAIPIKLPMTFFTELEKTTLKFIWNQKRARIAKAILSQKNKAGGITLPDFKLYYKATVTKTARYWYQNRDIDQWNRTEPSEITPHIYNYLIFDKPEKNKQWGKDSLFNKWCWENWLAICRKLKLDPFLTPYTKINSRWIKDLNIRPKTIKTLEENLGSTIQDIGMGKDFMSKTPKAMATKDKIDIWDLIKLKSFCTAKETTIRVNGQPTKWEKIFATYSSDKGLISRICNELKQIYKKKTNNPIKKWAKDMNRHFSKEDIYAAKKHMKKCSSSLAIRQMQIKTTMRYHLTPVKFRSTSHQSPXREARGPGPLANAGSPGLRQIPETCHLKHPLGMLLLSHHSALSATHNP

SEQ ID NO: 44317 - protein, 1139 aa, Homo sapiens
  DOMAIN (390)..(435): kw TRANSCRIPTASE REVERSE II ORF2 domain identified by eMATRIX, accession number DM01354N, p-value=1.000e-40, raw score of 13.17
HRLANWIKSQDPSVCYIPETHLTCRDTHRLKIKGWRKIYQANGKQKQAGVAIHISDKTDFKPTKIKRDKEGHYIMVKGSIQQEKLTILNVYAPNTGAPRFIMQVLSDLQRDLDSHTLIMGDFNTPLSTLDRLTRQKVNKDTQELNSALHQVDLIDIYRTLQPKSTEYTLFSAPHHTYSKIDHILGSKALLSKCKRTEIITNYLSDHSAIKLELRIKKLTQIRSTAWKLNNLLLNDYWVHNEMKAEIKMFFKNNENKDATCQNLWDTFKAVCRGKFLALNAHKRKQERSKINTLTSQLKELEKQEQTHSKASRRQEITKIRAELKEIETQKTLQKINESRSWFFERINKIDRPLARLIKKKREKNQIDTIKNDKGDITTDPTEIQTTVREYYKHLYANKLENLEEMDKFLDTYTLPRLNQEEFESLNRPVTGSEIVAIINSLPTKKSPGPDGFTAEFYRRYKEELHINRAKDKNHMIISIDAEKAFDKIQQPFMLKTLNKLGTAGTYFKIIRAIYDKPTANIILNGQKLEAFPLKTGTRQGCPLSPLLFNIVLEVLARAIRQEKEIKGIQLGKEEVKLSLFADDMIVYLEKLIVSAQNLLKLISNFSKVSGYKINVQKSQAFLYTNNRQTESQIMSELPFTIASKRIKYLGIQLTRNVKDLFKENYKPLLKEIKEDTNKWKNIPCSWVGRINIVKMAILPKGIYRFNAIPIKLPKTFFTELEKTTLKFIWNQKRAHITKSILSQKNKAGGITLPAFKLYYKATVTKTAWYWYQNRDIDQWNRTEPSEITPHIYNYLIFDKPERNKQWGKDSLFNKWCWENWLAICRKLKLDPFLTAYTKINSRWIKDLNIRPKTIKTLEENLGITIQDIGMGKDFMSKTPKAMATKTKIDKWDLIQLKSFFCTAKETTIRVNRQPTEWEKIFATYSSDKGLISRIYNELKQIYKKKTNNPIKKWTNDMNRHFSKEDIYAAKKHMKKCSSLPAIREMQIKTTMRYHLTPVRIAIIKKSGNNSKVDDIHAICSLLKDFLRNFKEPLLTFRLNKAFMEAAEITDEDNSISAMYQAVGELPQANRDTLVFLMIHLQRVAQSPYTKMNVANLAEVFGSTIVAHAVPNPEPVTMLQDIKCQPKVVERLPSLPLEYW

SEQ ID NO: 44318 - protein, 894 aa, Homo sapiens; identical to SEQ ID NO: 38230
  DOMAIN (272)..(317): kw TRANSCRIPTASE REVERSE II ORF2 domain identified by eMATRIX, accession number DM01354N, p-value=1.000e-40, raw score of 13.17
  misc_feature (1)...(894): Xaa = X or * as defined in Table 2

SEQ ID NO: 44319 - protein, 281 aa, Homo sapiens
  DOMAIN (93)..(140): kw TRANSCRIPTASE REVERSE II ORF2 domain identified by eMATRIX, accession number DM01354V, p-value=1.000e-40, raw score of 12.97
  misc_feature (1)...(281): Xaa = X or * as defined in Table 2
ARAEVKLSLFADDMIVYLENPIIXARAEVKLSLFADDMIVYLENPIISAQNLLKLISKFSKVSRYKINVQKSQAFLYTNNRQTESQIMSELPFTIATKRIKYLGIQLTRDVKDLFKENYKPLLNEIKEDTNKWKNIPCSWIGRINIVKMAILPKVIYRFSAIPIKLPMTFFTELEKKNWLAICRKLKLDFFFIPYTKINSRWIKDLNVRPKTMKTLEESLGNTIQDIGIGKDFMTKTPKAMATKAKKSFCTAKETTIRVNRQPTEWEKIFAIYPSDKGLIS

SEQ ID NO: 44320 - protein, 721 aa, Homo sapiens
  DOMAIN (115)..(158): kw TRANSCRIPTASE REVERSE II ORF2 domain identified by eMATRIX, accession number DM01354T, p-value=1.000e-40, raw score of 9.48
  misc_feature (1)...(721): Xaa = X or * as defined in Table 2
TLMQKSSIKYWQNESSSTSKSLSTMIKWASSLGCKAWFNIRKSIKVIQHINRAKDKNHMIISIDAEKAFDKIQQPFMLKTLNKLGIDGTYFKIIRAIYDKPTANIILNGQKLEAFPLKTGTRQGCPLSPLLFNIVLEVLARAIRQEKEIKGIQLGKEEVKLSLFADDMIVYLENPIVSAQNLLKLIRNFSKVSGYKINVQESQAFLYTINRQTESQIMSALPLTIASKRIKYLGIQLTRDVKDLFKENYKPLLKEIKEDTNKWKNIPCSGEGRINIVKMAILPKNWKKTTFRFIWNHKRACIAKTILSQKNKAGGITLPDFKLYYKATVTKTAWYWYQNIDIDQWNRTEPSKIIPRIYNNLIFDKPDKNKKWGKYSLFNKWCLENWLAICRKLKLDPFLTSYTKINSRWIKDLNVRPKTIKTLEGNLGNTIQDIGMGKDFMSKTPKAMATKAKIDKWDLNNLKSFCTAKETTIRVNMQPTEWEKIFAIYPSDKGLISRIYNELKQIYKKKTTNPIKKWAKDMNRHFSKEDIYAAKKHMKKCSSSLAIREMQIKTTMRYHLTPVRMAIIKKSGNNRCWRGCGEIGTLLHCWLDCKLVQPLWKSVWXFLRNLELEIPFDPAIPLLGIYPNDYKSCCYKDTCTRMFIAALFTIAKTWNQPKCPTIIDWIKKMWHIYTMEYYAAIKNDEFVSFVGTWMKLEIIILSKLSQEQKTTHRIFSLISGS

SEQ ID NO: 44321 - protein, 998 aa, Homo sapiens
  DOMAIN (23)..(68): kw TRANSCRIPTASE REVERSE II ORF2 domain identified by eMATRIX, accession number DM01354N, p-value=1.000e-40, raw score of 13.17
  misc_feature (1)...(998): Xaa = X or * as defined in Table 2
RHKKPFKKLTNPGAEIQTTIREYYKHLYANKLENLEEMDKFLNTYTLPRLNQEEVESLNRTITGSEIEARINSLPTKKSPGPDGFTAEFYQRYKEEMVPFLLKLFQSIEKEGILPNSFYEASIILIPKPGRDTTKKENFRPISLMNIDAKILNKILANQIQQHIKNLIHHDQVGFIPGMQGWFNICKSVNVIQHINRTKDKNHMIFSIDAEKAFDKFQQLFMLKTLNKLGIDGMYLKIIRAIYDKLTANIILNGQKLEAFPLKTATRQGCPLSPLLFNIVLEILTRAIRQEKEIKGIQLGEEEVKLSLFADDMIVYLENPIISAQNLLKLISNFSKVSGYKINVQKSQAFLYTNNRQTESQIMSELPFTIASKRIKYLGIQLTRDVKDLFKDNYKLPLIKEIREDTNKWKNIPCSWIGRMNIMKMAILPKVIYRFNAIPIKLPMTFFTELEKTTLSKVHMEPKKVLHCHDNPNPKEXSRRHHTTXLQTILQGYSTQNSMPVFQNKRLXFHQSCLLCPWSASQNNHLYSLQRVLEMWAFPGLXSVTATARRRLFRACHSAHGFXDFXIGEGAQRPRNHTCXLYRXGKEGSEALWGAAERFXTGMGQRGSLVCGFIPEVSETTNLLEGRNSRHIXTSEETNSRHIIFKNCNTHCEVPRLHSXSQRDQEPTRRNQFQTHFGNHKGTIDYRQVEENXRFCCCVSERNYSDQQGPGTVAGSWARGVSAASSPPYSSPSYXXXASSNLPHPEGNKQRHLQRTTKPSGLSVMSPSCYRGRRIWRNLELEKTTKFIWNQKRAYIAKTILSQKNKAGGFMLPDFKLYYKATVTKTALYWYQKRDIDQWNRTEPLEIIPHIYNLLIFDKPDKNKKRGKDSLLNKWCWENWLAICRKLKLDPFLTPYTKTNSRWIKDLNVRLKTIKTLEENLGNTIQDIGMGKDFMTKTPKAMAPKAMATKAKIDKWDLINLKSFCTAKETTIRVNRQPTEWEKIFTIYPSDKGLISRI

SEQ ID NO: 44322 - protein, 32 aa, Homo sapiens
ASCHLTAIIICTVDHMYLKHLILYSKTGCFCN

SEQ ID NO: 44323 - protein, 303 aa, Homo sapiens
  DOMAIN (89)..(109): INOSITOL PHOSPHATASE SIGNATURE domain identified by eMATRIX, accession number PR00378B, p-value=8.313e-23, raw score of 13.80
TVTVIHTVARVGNLDIQIQRKSELFLSLVVCEAIKNEMNVMLKSSPVDLVTATDQKVEKMLISSIKEKYPSHSFIGEESVAAGEKSILTDNPTWIIDPIDGTTNFVHRFPFVAVSIGFAVNKKKKVDETYLGLVKETCFPLQIEFGVVYSCVEGKMYTARKGKGAFCNGQKLQVSQQEDITKSLLVTELGSSRTPETVRMVLSNMEKLFCIPVHGIRSVGTAAVNMCLVATGGADAYYEMGIHCWDVAGAGIIVTEAGGVLMDVTGGPFDLMSRRVIAANNRILAERIAKEIQVIPLQRDDED

SEQ ID NO: 44324 - protein, 321 aa, Homo sapiens
  DOMAIN (141)..(161): INOSITOL PHOSPHATASE SIGNATURE domain identified by eMATRIX, accession number PR00378B, p-value=8.313e-23, raw score of 13.80
MGQRPGPVLPAVAVLGRVAKRKVAWLLRWKAVTRTETAGNSSGVYGFGKMKIFVKYFQKMADPWQECMDYAVTLARQAGEVVCEAIKNEMNVMLKSSPVDLVTATDQKVEKMLISSIKEKYPSHSFIGEESVAAGEKSILTDNPTWIIDPIDGTTNFVHRFPFVAVSIGFAVNKKIEFGVVYSCVEGKDVHCQKRKSWASSQNTQRPVKNGSFPNMEKPFLPFPVHGIRSVGTAAVNMCLVATGGADAYYEMGIHCWDVAGAGIIVTEAGGVLMDVTGGPFDLMSRRVIAANNRILAERIAKEIQVILFATRRLLLIKAAS

SEQ ID NO: 44325 - protein, 41 aa, Homo sapiens
LPSPSSKDTDSAASCCAPRGRAKGSVSNSRLSFPPSSVPLP

SEQ ID NO: 44326 - protein, 282 aa, Homo sapiens
  misc_feature (1)...(282): Xaa = X or * as defined in Table 2
GSQCSSPPPASRCGSCSSAPSRHCPCRDFEPAVAGLARTPVLTTKTNPSPPARTGLNAPSMGTSLIPALCCFPLYQGSTELQCKAPXXLPSPSSKDTDSAASCCAPYFLVLLKVLSSVDNSSIWCSAGPPAQSSSLYTIPMSSMSAKNCSVLRSGTWASFTCSXGSQRVSLGTPEALGTEDHTSRSLGHSHVCHVDLSPATASCSFQTASSEVSPPATASCSFQTASSEVSPPATASCSFQTASSEVSPAATASCSFTFSFFFVCALWFGICPSCSAAVLST

SEQ ID NO: 44327 - protein, 51 aa, Homo sapiens
  misc_feature (1)...(51): Xaa = X or * as defined in Table 2
EHQCENPQXNTGTPNPAAHQKAYPPXSSGLHPWDNQRQKPHDYLNRCRKGL

SEQ ID NO: 44328 - protein, 65 aa, Homo sapiens
GGGGGEAEDRLREPETEKALSSSLRRAPDQCRALIMQLFQAHCFFLSTQATAALQAHYAHIFPSK

SEQ ID NO: 44329 - protein, 100 aa, Homo sapiens
  misc_feature (1)...(100): Xaa = X or * as defined in Table 2
WDVSQNNKSYLXQTHSQYHTEWAKTGSIPFENWHKTGMPSLTTPIQHSVGSSGQGNQTNREPNHEXTPIHNCFKENKIPRNPTYKGCEGPLQGELQTTAQ

SEQ ID NO: 44330 - protein, 112 aa, Homo sapiens
MNEDQMNEMKREEKFREKTVKRNEQSLQEIWDYVKRPNLCLTGVPESGGENGTKLENTLQDIIHENFPNLARTEDKNHMIISIDAEKAFDKIQQPFMLKTLNKLVLMGRISK

SEQ ID NO: 44331 - protein, 516 aa, Homo sapiens
  DOMAIN (57)..(100): kw TRANSCRIPTASE REVERSE II ORF2 domain identified by eMATRIX, accession number DM01354T, p-value=1.000e-40, raw score of 9.48
MIISIDAEKAFDKIQQPFMLKTLNKLGTDGTYFKIIRAIYDKPTANIILNGQKLEALPLKTGTRQGCPLSPLLFNIVLEVLARAIRQEKEIKGIQLGKGEVKLSLFADDMIVYLENAIIAAQNLLKLISNFSKVSGYKLNVQKSQAFLYTNNRQTESQIISEFPFTIASKRIKYLGIQLTRDVKDLFKENYKPLLSEIRGYKQMEEHSMLMDRKNQYRENGHTAQKLEKITLKFIWSQKRARITKSILSQKNKGGGIMLPDFKLYYKATVTKTAWYWYQNRDIDQWNRTEPSEIMPHIYNYLIFDEPDKNKQWGKDSLFNKWCCENWLALCRKLKLDPFLTPYTKINARWIKDLHVRPKTIKTLEENLGNTIQDIGMGKDFMSKTPKAMATKAKIDKWDLIKLKSFCTAKETTIRVNSQPTEWEKIFATYSCDKGLISRIYNELNQIYKKKTNNPIKKWAKDMNRHFSKEDIYAAKKHMKKCSSSLAIREMKIKTTMRYHLISVRMEIIKKSENNS

SEQ ID NO: 44332 - protein, 469 aa, Homo sapiens
  DOMAIN (177)..(223): kw TRANSCRIPTASE REVERSE II ORF2 domain identified by eMATRIX, accession number DM01354O, p-value=1.000e-40, raw score of 8.73
  misc_feature (1)...(469): Xaa = X or * as defined in Table 2
NTGKPNPAAHRKAYPPRSSRLHPXDLQQTPTDLQLSDLTPGRKTNKQKGIASPSTKRTSTPKPHLQANAQRFCHHQACVTRVPKGSTKHGKEQLVPATAKTCQIVKNINAMKKLHQLTEIQITIREYHKHLYANKLKNLEEMDKFLDTYTLPRLKQEEVESLNRPIMGSEIEAIINSLPTKKSPGPDGFTAKFYERYKEELVSFLLKLFQSIEKEGILPNSFYEASIILIPKPGRDTTKKENFRPISLKNIDAKILNKILANRIRQPIEKLIHHDQVGFIPEMKGWFKKCKSINVIHHINQTNDKNHMIISIDAEKAFDKTQQPFMLKTLNKLGTIRQKKEIKGIQLGKEEVKLSLFADDMIVYLENSIVSAQNLLKLISNFSKVSRYKINLQKSQAFLYTNNRHMESQITSELPFTIDTKRIKYLGIQFTRDVKDLFKENYKLLLNEIKEDTNKWKNIPCSWIEESIS

SEQ ID NO: 44333 - protein, 53 aa, Homo sapiens
  misc_feature (1)...(53): Xaa = X or * as defined in Table 2
LPLFLIEYPLFLSLAXLPWPKLPTLCXIGVVREGIPVLCCFSKGMLPVFAHSV

SEQ ID NO: 44334 - protein, 99 aa, Homo sapiens
  misc_feature (1)...(99): Xaa = X or * as defined in Table 2
MQSIRKTIGIHAKYDKACRNGEDICLRETNSAADTQAKRVXSGPPANSNRPAAEGPDCXKENXQTERTSTPKPHLYVTIIKDQRGTQLLTNNGTKLDRE

SEQ ID NO: 44335 - protein, 643 aa, Homo sapiens; identical to SEQ ID NO: 43060
  DOMAIN (284)..(329): kw TRANSCRIPTASE REVERSE II ORF2 domain identified by eMATRIX, accession number DM01354N, p-value=1.000e-40, raw score of 13.17

SEQ ID NO: 44336 - protein, 288 aa, Homo sapiens
  DOMAIN (78)..(133): kw TRANSCRIPTASE REVERSE II ORF2 domain identified by eMATRIX, accession number DM01354Q, p-value=1.000e-40, raw score of 9.23
  misc_feature (1)...(288): Xaa = X or * as defined in Table 2
TRKFRRNGXIPXHIHPPKTKSGRSRIFNRPITGSEIEAIINSLPTKKSPGPDGFTAEFYQRYKEELTNILDEHRCKILNKILANGIQHDIKKLIHDDQVGFIPGMQGWFNIRKSINVIQHVNRTRDKNHMIISIDAEKAFDKIQQPFMLKTLNKLGIDGMYLKIIRAMYDKPTANIILNGQRLEAFPLKTGTRQGCPLSPLLFNIVLEVLARAIGQEKEIKGIQLGKEEVKLSLSADDMIVYLEKPIISAQNLFKLISNFSKVSDTKSMYKNHKHSYTPITDKQRAKS

SEQ ID NO: 44337 - protein, 525 aa, Homo sapiens
  DOMAIN (82)..(125): kw TRANSCRIPTASE REVERSE II ORF2 domain identified by eMATRIX, accession number DM01354T, p-value=1.000e-40, raw score of 9.48
  misc_feature (1)...(525): Xaa = X or * as defined in Table 2
MQGWFNVRKSLNIIHHINRNNDKNHIIISIDAEKAFDKIQQPFMLKTLNELGIDGTYLNIIRTIYDRPAANIILNVQKLEAFPLKTGTRQGCPLLPLLFNIMLEVLARAIRQEKEMKGIQLGKEEIKFSLFADDIIVYLENPIFSAPNFLKLISNLSKFSGYKINVQKSQAFLYIINRQTESQIMSELRFTIATKRIKYLGIHLTRDVKDLFNENYKPLLNEIKEDTNKWKNIPCSWTGSINIVKTAILPKVIYRFNAIPIKLQLTFFTELEKTALKFMWIQGYSNQNSMVLTLLVIPRKMRSAVELQQTSTDLQLRDLTVRKKTNKRKATASTSQKGHLHQNPICRSPTSKTKEVGFRRSVITNFSELKEDVRTYHKEAKNLENRLDEWLTRINSVEKTLNDLKELKTMARDLHDACTSFNRRFDQVEERVTVTEDQINEINDGENGTKLENTPQDIIQENFPNLASRPTFKFRKYREHYKDTPREEQPQDTXLSDSPRLKXRKKCXRQPERKVELPTKGSPSD

SEQ ID NO: 44338 - protein, 351 aa, Homo sapiens
  DOMAIN (232)..(279): kw TRANSCRIPTASE REVERSE II ORF2 domain identified by eMATRIX, accession number DM01354V, p-value=1.000e-40, raw score of 12.97
  misc_feature (1)...(351): Xaa = X or * as defined in Table 2
TRKSRRNGXIPGHIYPPKTKQEEGESLNRPITGSEIEAIINNLPTKKSPGPDGFTAKFYQSTNNKNHMIISIDAEKAFHKIQQPFMLKTLNKLGIDGTYLKIIRAIYDKPTANIILNGQKLEAFPLKTGTRQGCPLSPLPFNIVLEVLARAIRQEKEINCIQLHNEEVKLSPFADDMIAYLENPIVSAQNLLKLISNFSKVSGYKINVQKSQAFLYTINRQTESQIMSELPFTIATKRIKYLGIQLTRDVKYLFKENYKPLLNEIKEDTNKWKYIPCSWIGRINIVKMAILPKVIYRFNAIPIKLPMTLSSQNWKKTTLKFIWNQKRARIAKSILSKKNKAGSIMLPDFKL

SEQ ID NO: 44339 - protein, 191 aa, Homo sapiens
  DOMAIN (82)..(125): kw TRANSCRIPTASE REVERSE II ORF2 domain identified by eMATRIX, accession number DM01354T, p-value=1.000e-40, raw score of 9.48
  misc_feature (1)...(191): Xaa = X or * as defined in Table 2
MQGWFNVRKSLNIIHHINRNNDKNHIIISIDAEKAFDKIQQPFMLKTLNELGIDGTYLNIIRTIYDRPAANIILNVQKLEAFPLKTGTRQGCPLLPLLFNIMLEVLARAIRQEKEMKGIQLGKEEIKFSLFADDIIVYLENPIFSAPNFLKLISNLSKFSGYKIXFPLFLIEYPSFLSLAXLPWPALPTLC

SEQ ID NO: 44340 - protein, 114 aa, Homo sapiens
MGINQRRKAENSKNQSASSPTKDCSSSPAKEQSWTENDFEELTEVGFRRQANAERFCHHQVCPKRAPEESTKHGKKQRSISHCKNMPNCKDHRCYEETASTDSLAETQQQKREF

SEQ ID NO: 44341 - protein, 23 aa, Homo sapiens
  misc_feature (1)...(23): Xaa = X or * as defined in Table 2
DDGVFXIDNHVICKQRQFDFLFS

SEQ ID NO: 44342 - protein, 472 aa, Homo sapiens
  DOMAIN (280)..(305): 7 kw REVERSE TRANSCRIPTASE RNA POLYMERASE domain identified by eMATRIX, accession number DM00895E, p-value=9.111e-11, raw score of 15.72
  misc_feature (1)...(472): Xaa = X or * as defined in Table 2
MVREGFPEEVTFELKNELEISKGQQMGKNIPDTGASSAKALGERELGTLDKMKNSPSDGSKKDIRTHRKEAKNLEKRLDEWLTRINSVEKTLNDLMQLKTMARELHDACTSFNSQFDQVEERINKIDVRLARLIKKKREKNQIDAIKNDKGDISTDPTEIQTTIREYYKHLYANKLENLEEMDKFLDTYTLPRLNQEEFESLNRPIIGSEIEAVSNSLPTKKSPGPDGFTAEFYQRYKEELVPFLLKLFQSIEKEGILPNAFYEASIILIPKPGRDTTKKENFRPVSLMNIDAKILNKILANRIQQHIKKFIHHDQVSFIPRMQGWFNICKSINIIHHINRTNDKNHMIISIDAEKAFDRIQQPFMLNTLNKLGIDGMYLKIIRTIYDKPTANIILNGQKLEAFPLKTGTRQGCPLSATPVQHSVGSSDQGSQARERNKGYSIRKXGSQIVSVCRXHDCIFRKPHRLSPKSP

SEQ ID NO: 44343 - protein, 119 aa, Homo sapiens
  misc_feature (1)...(119): Xaa = X or * as defined in Table 2
CYSFLFVRCPSDSQVPQLQVCCEFAGGPLQTVFAWVSPAEVVEMFLQGXRKPFYMSYTSFEMALMKVWTMVRTSASPVGDVFGRGWSPFPTSTVGALTVFGVSPGSCRSSPLPSERLWV

SEQ ID NO: 44344 - protein, 154 aa, Homo sapiens
  misc_feature (1)...(154): Xaa = X or * as defined in Table 2
PANQKKSRTRRIHSQILPEAQRGAGTIPSETIPINGKRGNPPKLILXSQHHPDTKAWQRHNRKREFYTDIPDDHXCKNPQXNTGKPNPAAHQKAYPPRSSWLHLWDARLVQRTQISKRNSSYKQNQRQKPHDYLSRCRKGLQQNSAALHAKNSQ

SEQ ID NO: 44345 - protein, 65 aa, Homo sapiens
TSIHNCYKENKIPKNPTYKGCEGPLQGEVQTTAQGNKRGHKQMEQHSMLIVRKNQYCENGHTAQN

SEQ ID NO: 44346 - protein, 99 aa, Homo sapiens
  misc_feature (1)...(99): Xaa = X or * as defined in Table 2
DGQLTLVSILNHYSLAQSCEYXDGECFCLHCSASPFLXEGAQSTACTAPPECFASDLGAVXLPQHSWCSTLLLEGAPWPGTLGTAPQFQHRKLGTNLAG

SEQ ID NO: 44347 - protein, 187 aa, Homo sapiens
  misc_feature (1)...(187): Xaa = X or * as defined in Table 2
MPIGKVGEYYIKGTLRATKESEQQSSALELSSDRVYLNEKEPGDQPWNAAFVFRGCGVALALRPPHLGWGEPRWAGFRGAFGFPFSTLNPSNWSLTLIIQGCKQEGFYSPSMRPRVVPKRGSAPKVRAEENAALPSRCPPGPLPVAQPTGPADGGSCEQCPSCGCGCCQLPPPLPWFPRXTPCDKRV

SEQ ID NO: 44348 - protein, 258 aa, Homo sapiens
MFVWSNVEGHSVAMFPWYSIPFLNPPCSHTRPSNLPVTQWPPTRENNLPSWQLLLTSIHQAQFLSALHKEQGSSSEKDGRSPNKWDKDHIRCPMSAVMIFSKRHQALVRAHQGHPNQDNWTVSQMLSKWWYTLGPNERQKYHELAFQATAALQAHYVHIFPSKGRWELLHGSQRLDWGRCQLKLLGQQGQDVLHTNLGKEENSSCWGYKMECEEGFGPQGGDCGLGGVHAPLLSPEGLDSEQNTLIMGDIFHCAKKLP

SEQ ID NO: 44349 - protein, 250 aa, Homo sapiens
  DOMAIN (27)..(43): Calcium-binding EGF-like domain proteins pattern proteins domain identified by eMATRIX, accession number BL01187B, p-value= 7.300e-14, raw score of 12.04
MPESFAIYIEDVNECAENPGVCTNGVCVNTDGSFRCECPFGYSLDFTGINCVDVDECRMLAHLCAHGECINSLGSFRCHCQAGYTPDATATTCLDPIVVKEQGRKEQDSSSEKDGRSPNKSDKDHIRWPMSGAHDLQQAAPGPGGAHQGHPNQDNRTVSQMLSERWYTLGPNEMQKYNLAFQHMASEVIASDEEHTVIHEEEGADYQILCGNQAPGFLTDIHTGKPLGCWMCNVANRCPKLRTWQTVVPL

SEQ ID NO: 44350 - protein, 485 aa, Homo sapiens
  misc_feature (1)...(485): Xaa = X or * as defined in Table 2
YPRRRPSRAGVLAGPAVLAGPPSSPGRRPRRAAFFAEPPFSARRSPRRAAVLAVPPSSPRRRPRRAAVLAAPRVLAAPPSSPRRRPRPPPSSPRRRPRRAAAGSLPGAELPQSSRLAAHLAADXPDSXIAAGAVPRGWEGLTIMAEGKEEQVTFYVDGSRQRAYAEKPPVVKTIRSCTVSGHSRHNSSSGMXSSPNSPIPFQFTFQIPSLLQAALWLCLXVTWHFFVRXPVLSSRHCFSPGGLFSLSLQSAGCPAGSLQAEFVALPPGGQSRLHRTRASXVPGAFQEKCPLERVWPFHPSKQHPRNGLAFPLPXAPQRTQPAEDTLPRHPEMGLILSQGTAGPGRECQATQLPAQHSHAEVLHFGGAMSGQLSLVGPQDSKRTARLTDSQHLGSPTXQPPGLTEGTSLEQGXXSXMGWMVGVIAGAPSGWSGSSGPSEGTPLFSSPAXLPWPELPTLCXIGVVREGIPVLCQFSKGMLPVFAHSA

SEQ ID NO: 44351 - protein, 387 aa, Homo sapiens
  DOMAIN (49)..(94): kw TRANSCRIPTASE REVERSE II ORF2 domain identified by eMATRIX, accession number DM01354N, p-value=1.000e-40, raw score of 13.17
MVYDGFRPEDLMEACVELTVWDHYKLTNQFLGGLRIGFGTEIQTTIREYYKHFYANKLENLEEMDKFLDTHTLPRLNQEDVESLNRPITSSEMEAAINSLATKKSPGPDGFTAEFYRRYKEELVPFVLKLSQTTEKEGLLPNSFCGANINLIPNPGRDNTRKENFRPISLMNIDTNILNKILANRIQQHIKKLIDYDQVSFIPGMKGWCNICKSINVIHHVNRTNDKNHMIISIDAEKAFEKIQQPFLLKTLNKLGIDGTYLKIIKAIYNKPTANIILNGQKLEAFSLKTGTRQGCPLSPLLFNIVLEVLARTIRQEKKKNGIQIGREEVKLSLFADDMIVYLENLIVSAQNLLKLISNFSKVSGYKINVQKSQAFLYTNNKEPNHE

SEQ ID NO: 44352 - protein, 904 aa, Homo sapiens
  DOMAIN (554)..(579): 7 kw REVERSE TRANSCRIPTASE RNA POLYMERASE domain identified by eMATRIX, accession number DM00895E, p-value=3.333e-11, raw score of 15.72
MGKKQSRKTGNPRKQSTSLPPKEHSSSPVTEQSWTENDFDELREEGFRRSNYSELQEEIQTNGKEVKNFEKKLDEWITRITNAEKSLKELMELKAKETHLTCGDTHRLKIKGCRKIYQANGKQKKAGVAILVSDKTDFKPTKIKRDKEGHYIMVKGSIQQEELTILNTYAPNKGASRFIKQVLSDLQRDFDFHTIIIEDFNTPLSSLDRSTRQKVNKDIQELNSALHQADLIDIYKTLHPKSTEYTFFSAPHHTYSKTDHIVGSKALLSKCKRTEIITNCLSDHSAIKLELRIKKPTQNRSTTWKLNNLLLSDYWVPNEMKAEIKMFFETNENKDTTYQNLWDPFKAVYKGKFIALNAHKRKQERSKIDTLTSQLKEVEKQEQINSKASRRQEITKINKIDRLLARLIKKKREKNQIDAIKNNTGDITTDSTEIQTTMREYYKHLYANKLENLEEMDKFLDTYNFPSLNQEEVESFNRPITSSEIEAVINSLPIKKSPGTDRFTSKFYQRYKKEVVPFLLKLFQTIEKEGILPNSFYEASIILMPKPGRDKTKKENFRPISLMNIDAKILNKILANRIQQHIKKLIHHAQVGFIPGMQGWFNIRKSINVIQHINRTKDKNHMIISIDAEKAFDKIQQPFMLKTVNKLENKIHRNPTYKGCEEPLQGELQTSAQQNKKGYKQMEKHFTLMGRKNQYRENGHIAQVRVKRGFSSQQALSEEGSYTCRLWRAQGRAGRSRLELDEEWAGERPGVGQGEAVLPNTRKRHPASVAFLEEGCRCGKPYGTESKEQCTLQPRYCPCPTVFATCRPGDSLRCLPHQGPVFQAQNWAAVWADTEVAAGVVVVVFFPYPSGAWNASETEPFIPLERGAEAPGSQVVWIGGSHPHGAQQTKIHWLEILAASTAAV

SEQ ID NO: 44353 - protein, 418 aa, Homo sapiens
  DOMAIN (78)..(133): kw TRANSCRIPTASE REVERSE II ORF2 domain identified by eMATRIX, accession number DM01354Q, p-value=1.000e-40, raw score of 9.23
  misc_feature (1)...(418): Xaa = X or * as defined in Table 2
TRKFRRNGXIPXHIHPPKTKSGRSRIFNRPITGSEIEAIINSLPTKKSPGPDGFTAEFYQRYKEELTNILDEHRCKILNKILANGIQHDIKKLIHDDQVGFIPGMQGWFNIRKSINVIQHVNRTRDKNHMIISIDAEKAFDKIQQPFMLKTLNKLGIDGMYLKIIRAMYDKPTANIILNGQRLEAFPLKTGTRQGCPLSPLLFNIVLEVLARAIGQEKEIKGIQLGKEEVKLSLSADDMIVYLEKPIISAQNLFKLISNFSKLSGYKINVQKSQAFLYTNNRQTESQIMSELPFTIATKRVKYLGIQLTRDVKDLFKENYKPLLNEIKEDTNKWKNIPCSWIGRINIVKMAILPKCKTVGLLSNISTHKSAVHALVEAGGIPSLINLLVCDEPEVHSRCAVILYDIAQCENKDVIAKY

SEQ ID NO: 44354 - protein, 385 aa, Homo sapiens
  misc_feature (1)...(385): Xaa = X or * as defined in Table 2
MFVWRNVEGHSVAVFPWYSIPFLTPPCSHMRPSKLPVTQWPPTRENNLPSWQLLLMSVHQAQSLSALRKEQDSSSEKDGRSPNKWDKDHIWWPMSAVIIFSKQHQALVRAHQGHPNQDNRTISQMLSEQWYTLGPNEMQKYDLAFQNVEARIRYCHRPRKRARFLSHASPPWRQLPAAGAEASGAWNLPAGGGXHDYNRCSVPVFRTEVSTRPRPSEICGLTQEXTLLSAKSQVGNTFGFAGHTISDTTTPCGLCTSKAAIEVPEADTLPHICSWHKGEECGLRGPEPSSPPPRPSLAARVSAGRGALRRRRRPEVPPSRAPRSAATATPANEQRAVADVGQWARARGGRVRAAGRSGLLRVKMMKMKTVMIHFHLMKDEYIFSS

SEQ ID NO: 44355 - protein, 84 aa, Homo sapiens
  misc_feature (1)...(84): Xaa = X or * as defined in Table 2
SLQRKAARFASSSTVPRRPQGILPIISFSNVPVGSRRLKAPLVFIGPGXITLNRIPYLPHSAARDPFTWNTFSFLLPCEEVPST

SEQ ID NO: 44356 - protein, 416 aa, Homo sapiens
  DOMAIN (155)..(210): kw TRANSCRIPTASE REVERSE II ORF2 domain identified by eMATRIX, accession number DM01354Q, p-value=1.000e-40, raw score of 9.23
MGRNQSRKAENSKNQHTSSPPKERRSLPAMEQSWTENDFDELREEGFSSQFDQVEERVSVIEDQMSEMKRKENFREKRVKRNEQSLQELWHYVKRPNLRRIGVPESDGENGTKLENTLQDIIQENLPNLPGRDTTKKENFRPISLMNIDAKILNKILANQIQQHIKTFIHRDQVGFIPGMQGWFNIHKSVNVIHHINRTKDKNHMIISIDAEKAFDKIQQHFMLKTLNKLGIDGMYLKIVRAIYDKLTANIILNGQKLDAFPLKTGTRQGCPLSPLLFNTVLEVLARAIRQEKEIKGIQLGKEEVKLSLFADDMTVYLENPIVSAQNLLKLISNFSKVSGYQINVQKSQAFLNTNSRQTKSQIMSELPFTVATKRIKYLGIQLTRDVKDLFKENYKPLLKEIKEDTNKWKNIPCSW

SEQ ID NO: 44357 - protein, 152 aa, Homo sapiens
  DOMAIN (6)..(36): kw TRANSCRIPTASE REVERSE II ORF2 domain identified by eMATRIX, accession number DM01354R, p-value=4.000e-19, raw score of 8.50
MLLSIDAEKAFDKIQQPFMLKTLNKLGHGYEQHHLHTTNDVDEEDLSDAASKGDDFALSEQSQDAHFLQPEAYGLGEGAETATGTAHQGNMNQIQYGITADIHTELHKTGRELLITAPEGSGQSDALEIRECQTEITRPGELPPMVILVFPG

SEQ ID NO: 44358 - protein, 719 aa, Homo sapiens
  DOMAIN (380)..(421): kw TRANSCRIPTASE REVERSE II ORF2 domain identified by eMATRIX, accession number DM01354I, p-value=1.000e-40, raw score of 15.55
  misc_feature (1)...(719): Xaa = X or * as defined in Table 2
MGKKQSRKTGNSKNQSASPPPKERSSSPAMEQSWMENDFDDLREEGFRQSNYSELKEEVRTHGKEVKNLEKKLDEWLTRITNAEKSLKDLMELKTTARELHDECTSLKRVSVTEDQMNEMKREEKFREKRIKRNEQSLQEIWDYVKRPNLHLIGVPESDRENGTKLENTLQDIIQENFPNLVRQANIQIQEIQRTPQRYSSRRATPRHIIVRFTKVEMKEKMLRAAREKGRVTHKGKPIRLTADLLAETLQARREWGPIFNILKEKNFQPRISYPAKLSFIDRSTRQKVNKDTQELNSALHQADLIDIYRTLHPKSTEYTFFSAPHHTYSKIDHIVGSKALLSKCKRTEIITNCLSDHSAIKLELRIKKLTRNHSTTWKLNNLLLNDYWVHNEMKAEIKMFFETNENKDKTYQNLWDTFKTVCRGKFIALNAHKRKQERSKIDTLTSQLKGLEKQEQTHSKASRRQEITKIRAELKEIETQKTLQKINESRSWFFEKINKIDRPLARLIKNKREENQIDAIKNDKGDITTDPTEIQTAISEYYKHLYANKLENLEEMDKFLDTYTLPRLNQEEVESLNRPITGSEIEAIINSLPTKKSPGPDGFMRRILPEGQGGAGTIPSETVPINRKRGNPPXPHFMSASIMLIPKPGRDTTKKENFRPISLMNIDAKIRQXNTGKPNPAAHQKAYPPXSSGLHPWDARLVQLTQITKRNPAYKQNQ

SEQ ID NO: 44359 - protein, 598 aa, Homo sapiens
  DOMAIN (142)..(155): LUTEOVIRUS ORF6 PROTEIN SIGNATURE domain identified by eMATRIX, accession number PR00910A, p-value=5.222e-10, raw score of 2.51
  misc_feature (1)...(598): Xaa = X or * as defined in Table 2
AMLPMELGCGPLPEPLPVGCSRFSLFKXQTCISTVPGYMVTAQSMSSTPPPPSPSTLPSSPSPPPPLPQPLPPPPPSPPTLSSLSSPSPPRPPLVSPSTLPSPQPSSPQPLLPPSSSPPSLPSPPPPSPPLPSPSPSAIPSLPPPSPQPLPPPPPSSPPPSLPSPLLPPPPLSSSPSSPLSPSPPPPSPPPSLPPSPPPSPPPPPPPQPPSPPSSPLSSPPLSSSQPSLLPPSLSSLPLPSSPSPLLPLSLPLSISPPXLSLLSPLPPSPSLPPSSFQSTXTIGQCFSLVMWHVAPCTYLALAGNTLMAWPLMSASSKASGGVSMFVWRNVEPCSVAVFSWYSVPFLTPPCSRVRPSNLPVTQWPPTRAKNLPSRQLLLTSVHQAQSLSALCKEQDSSSEKDGRSPNKWDKDHIWWPMSGGHDLQQAAPGPGRAHQGHPYQDNWTISQILSERWYTLGPNEMQKYHDLAFQHMAGEDIASDEEHMVIHEEEGVMVSLLMTALAPLTLISSSRIFGKVYGPTPSSSYTYSDASSSTLAPTSFLLGPGAFKAQESGEEAEDGLRELETEKALSSSLRRALDQXLALIMQLFQAHCFFLST

SEQ ID NO: 44360 - protein, 1492 aa, Homo sapiens
  DOMAIN (6)..(36): kw TRANSCRIPTASE REVERSE II ORF2 domain identified by eMATRIX, accession number DM01354R, p-value=4.000e-19, raw score of 8.50
  misc_feature (1)...(1492): Xaa = X or * as defined in Table 2
MLLSIDAEKAFDKIQQPFMLKTLNKLGHGYEQHHLHTTNDVDEEDLSDAASKGDDFALSEQSQDAHFLQPEAYGLGEGAETATGTAHQGNHVRVEECGRSLCGCVPLVLHPLPDPSLQPHEAQQPASHSVACNQRKQPAKLPAVAHERPPGGTGSVDPGRPPGATCPESPGPATPHTLGVVEPGKSSPPTMEEEPWAPQGSPCWTAQSLSALRKEQDSSSEKDGRSPNKWDKDHIWWPMSALMIFSKRHQALVGAHQGHPNQDNRTVSQMLSERWYTLGPSEMQKYHDLAFQVKVAHCNKDRKKSSSEAKPTSQGLAGGNKGSWERRISETGTATAPGVSSELQSVAAQTLQSSDTKSSLCGAEWLHTHMASEDTASDEEHTVIHEEEGDDDVIADDGFSTTDTDLKFKEWLLAVYGHTLSSSYTYSDASSSTLAPTSFLLGPGAFKAQESGQRSRAGPLRPPTPGDGGPGTPSKVACFLPMDPATFWWRSRGQAQGTGDREGAVLFTARALDQCRPXSCSSSRPTASSCPLGHSRPPGPPMHTSSPPSPVGVLTAPHLAQTLDAALAAPPLPLPVESPLPDPTSTCSGSGTNLAALPLPLPQSWGLDSLVGRGHPSPASTPGGLHNYHRQGCKQKGFCSPSMLPXVVPKRGRAPKHTLSECRVSPAGEGLXFPGSHPPQRTAAPXGHGYEQHHLHTTNDVDEEDLSDAASKGDDFALSEQSQDAHFLQPEAYGLGEGAETATGTAHQGNHVRVEECGRSLCGCVPLVLHPLPDPSLQPHEAQQPASHSVACNQRKQPAKLPAVAHERPPGGTGSVDPGRPPGATCPESPGPATPHTLGVVEPGKSSPPTMEEEPWAPQGSPCWTAQSLSALRKEQDSSSEKDGRSPNKWDKDHIWWPMSGAHDLQQAAPGPGGAHQGHPNQDNRTVSQMLSERWYTLGPSEMQKYHDLAFQVKVAHLQQGPKEVQLRGQAHKPGASRSVTRARGSGEYQRRALPLPLGCPLNSSQLQPKHFRARIPRSSLCGAEWLHTHMASEDTASDEEHTVIHEEEGVMMSLLMMALAPPTPISSSRSGFWQSMVTPCPPPTHTRMLPPQPWRPPPSYWAQEPSKPRSLVNAAERAPYGPNPWGWGPRDAFQGGLFPPNGSCHLLVEKPRTGSGNRRPRRSCPLHCTCPGPVPALIMQLFQAHCFFLSTRPQPPSRPTMHTSSPPSPVGVLTAPHLAQTLDAALAAPPLPLPESHPCLTPPQPAQALAQTWLPCHCLCPRVGALTAWLEGDTPALPQHLGVSITTTGRAANRKDFVHRRCCPELSQSEAVPPSTHFLSAECLQQERGSSSRDPTLHRGQQHLEGQMCKGQVSGFAAIALHVGFRLMMLNSGQSSSPAWAPLPALPYSAGSQLSSLRHLAGSRLLNYQVSSRATVNYTLWHGFARHVLEASSHAGHALPHLGKQRMRKISIKFTQNDLQQDLENAQFHKIPVSKSFQCTALASGSCEDRP

SEQ ID NO: 44361 - protein, 260 aa, Homo sapiens
  misc_feature (1)...(260): Xaa = X or * as defined in Table 2
KMFVFLCISAQLSLQCFRGSFHFIKIYDFSFQLFFLFLELPYLLLLNHFKMLELVLQQGHPNQDNWTVSQMLSKWWYTLGPNERQKYHELAFQVKVAHCNKDXKKFSSEAKPTSQGLAGGNKGSWEWSMSETGTATAPGVSSELLSVAAQTLQSSDTKSSFCGAEWGHPXGIGCDDVIADDGFSTTDTDLKFKEWVTDESGDNSGEEPEGNKGFGGKVFAPVIPSSFTHCRPLLDPEPPGSPDPPAAFGKVYGPTLSSSY

SEQ ID NO: 44362 - protein, 212 aa, Homo sapiens
MSRVGSCRWVCGLADFKNGATDLCDKSLHNRELSAERPLNEQIAEAEEDKIKKTYPPENKPGQSNYSFVDNLNLLKAITEKEKIEKERQSIRSSPLDNKLNVEKDVDFNQEFGKLIDGYDSTKEWDWVHKFQDIPNVLVGTAFNVDDGNGGFVVHWLNNKEFHFTSSTEVFMHQLRKLSDKQVDHENDDADREDEEHSQEDRERGLHMKLDH

SEQ ID NO: 44363 - protein, 36 aa, Homo sapiens
  misc_feature (1)...(36): Xaa = X or * as defined in Table 2
KKRAXGSVSQRFPAETXLADXVINTGSQEAKRREQR

SEQ ID NO: 44364 - protein, 67 aa, Homo sapiens
  misc_feature (1)...(67): Xaa = X or * as defined in Table 2
NTPNQRSVASNRFVKCTHQHSVKCTQSALCKMHQSAGFLKVDNHREDXKKGHSDRAKTEHGRGQIRE

SEQ ID NO: 44365 - protein, 316 aa, Homo sapiens
  misc_feature (1)...(316): Xaa = X or * as defined in Table 2
PKPSVGRMGFLGTGTWILVLVLPIQAFPKPGGSQDKSLHXXEDLSAERPFELNRLLEAEGRTRFKKTYPPENKPGQSNYSFVDNLNLLRAITEKEKIEKERQSIRSSPLDNKLNVEDVDSTKNRKLIDDYDSTKSGLDHKFQENETADNSFSQEEEPVVAGEDLPPPSPQESDVQPVQPEEVSARDFLQRLDLQIKLSTQAAKKLKEESSSLERMREETSLSPTVPTKRWDTRILLIGAFYRVLIGAFYRVLMGAFYKPIASYRALIGVFYRALMGAFYNPLVRQKSSPRPHSTQEVQLASPLTNTQITYYVIFTV

SEQ ID NO: 44366 - protein, 348 aa, Homo sapiens
  misc_feature (1)...(348): Xaa = X or * as defined in Table 2
ILENHLSDRVAEGGPLQGLRLGVQGEAVPPGLVHQRGGLGPLDGELIGSVGQQVSDVEGAGSHRGXRHTGRTPAVSAGPAAXSATHTAPMWLAGWYEPAQPGPVLVSPPTPFGQTRQASWCSAXARCAGSWWHXHQTPGGAXRVAAPAPSWSRSCPXRPTRSPAAAPPAPSRPGRAVGLATGAGHPAQHGHGRAVPTGPRAAGAGSWSELCPPSSCAGTSRGRXAGTRRXAAPAGSGRPGPGAWAGPRCSRSTYAAAACGRGGAXAGADSGPRSGTHAGHCGARCRSSTPLVPAAAGHLPPPGPGRTGDCPASSCPGPGLPHGCSLSGSWGEGWVSAARQAGLPWAVA

SEQ ID NO: 44367 - protein, 89 aa, Homo sapiens
  DOMAIN (7)..(22): G-PROTEIN BETA WD-40 REPEAT SIGNATURE domain identified by eMATRIX, accession number PR00320C, p-value=2.800e-09, raw score of 13.01
HPSKPLLASCGLDRVLRIHRIQNPRGLEHKDEPQEPQEPNKVPLEDTETDELWASLEAAAKRKLSGLEQPQGALQTRRRKKKRPGSTSP

SEQ ID NO: 44368 - protein, 197 aa, Homo sapiens
  DOMAIN (62)..(77): G-PROTEIN BETA WD-40 REPEAT SIGNATURE domain identified by eMATRIX, accession number PR00320C, p-value=2.800e-09, raw score of 13.01
MMKEGCEAGCIGLVVVILTVIVGNTHGQLAEIDLRQGRLLGCLKGLAGSVRGLQCHPSKPLLASCGLDRVLRIHRIQNPRGLEHKLSQARLLTSFLPAQLLRLYQLMLFTLPGTPVFSYGDEIGLDAAALPGQPMEAPVMLWDESSFPDIPGAVSANMTVKGAESLAAYVVGGHGPHKSVFTSIPAASSGVPMTTFR

SEQ ID NO: 44369 - protein, 158 aa, Homo sapiens
  DOMAIN (73)..(88): G-PROTEIN BETA WD-40 REPEAT SIGNATURE domain identified by eMATRIX, accession number PR00320B, p-value=1.000e-08, raw score of 12.19
SESLVLVVEFGTLITCVDSGILRVWHDKDKDTSSDPVRLPCPDGWGRWAGLLELRVGPGVCRMRQDPAHPHVVATGGKENALKIWDLQGSEEPVFRAKNVRNDWLDLRVPIWDQDIQFLPGSQKLVTCTGYHQVRVYDPASPQRRPVLETTYGEYPLT

SEQ ID NO: 44370 - protein, 46 aa, Homo sapiens
  misc_feature (1)...(46): Xaa = X or * as defined in Table 2
XHTVLWRRLSTFGRRGSSRPSKRQPDQIRKQESPIREGNQEEPEKK

SEQ ID NO: 44371 - protein, 405 aa, Homo sapiens
  misc_feature (1)...(405): Xaa = X or * as defined in Table 2
LPPGFVMAAAAARWNHVWVGTETGILKGVNLQRKQAANFTAGGQPRREEAVSALCWGTGGETQMLVGCADRTVKHFSTEDGIFQGSETLPGGEGMFRGLAQTDGTLITCVDSGILRVWHDKDKDTSFXPTPGTESGPWGCVGCAKTQAHPHVVCHRLGKRMLLKIWDLQGSGNLCFKAKNVRNDWLDLRVPIWDQDIQFLPGSQKLVTCTGYHQVRVYDPASPQRRPVLETTYEEYPLTAMTLTPGGNSVIVGNTHGQLAEIDLRQGRLLGCLKGLAGSVRGVAVHPSKPLTXPPVRLDRVLRIHRIQNPRGLEHKVYLKVSIERALLLSGRDNLGGXAPEPSKTQTRCPXEDTEDRXTLGDPWRQLPSGKLFGVWSSPKELSKRDGERRSGLGPPAPDAPVPTL

SEQ ID NO: 44372 - protein, 55 aa, Homo sapiens
MGAPPGSGATWGDAFGGAPTPLQIPNLSRQTTGFPRNAKDREMVAHTAGDDGTRS

SEQ ID NO: 44373 - protein, 170 aa, Homo sapiens
  DOMAIN (128)..(161): PROLINE-RICH PROTEIN 3 domain identified by eMATRIX, accession number DM00215, p-value=3.288e-09, raw score of 19.43
  misc_feature (1)...(170): Xaa = X or * as defined in Table 2
HCAGSPHSPRSLSGTPLPGLPLWRHLRSPSAHRCTVGAPFWAGQDRSQLPXLAGRCGGRGPSGNPGCAPACGPAGVPGGRGLGGPRTRSSQPALPAPGNEGLSTRASGCRGRTGSPSSASPPLGLSCLPAGQGWGPGSPPCVSLPPTPWAPVRPEPPGXAAPPAPRRPVP

SEQ ID NO: 44374 - protein, 211 aa, Homo sapiens
MLAVLRALACSPHLPCLGSHFGGISGALQPLHCTVGAPFWAGQAGAHSLSLQGGVEGEARAGTGAACGACGQLEFRSSQPALLAPGSGGLSTRASGCGGCTESPSSAGPPALCLISHRALAAFPWGRARDLQPAMPEPPTYFMGSCAARASPTSTTPCSTAPSPIYHPRAEECERTARDWQAAPPATPVRDPLGEASWAPESGGDVESLYV

SEQ ID NO: 44375 - protein, 193 aa, Homo sapiens
MVAVLGESFIAKVEFKLIIDLFVNAKPTPFSKGTRAETQLGNLYPFVDFGSYIWQLPKNSRPALLAPGNEGLITRASGCGGCTGSPSSASPPALRSISHRALAAFLRGRARDLQPAMPESPTHSMGSCAAQASPTSTTPCSTAPSPIYHPRAKECECTAQYWQAAPPAAPVQDPLGEATWAPESGGDVESLYV

SEQ ID NO: 44376 - protein, 90 aa, Homo sapiens
  misc_feature (1)...(90): Xaa = X or * as defined in Table 2
SFYHLGAGEXPGKSRVPIPQFQSPWGPYCQGRARGGEVCHLQAVPPRGAGAARTLSGHPLGSPEQLPQPGPAAELPGGVVPRSTPPCPAL

SEQ ID NO: 44377 - protein, 307 aa, Homo sapiens
MGLVGLHSEQPAGPAGPGSERLGTRASGCRGCTGSPSSAGPPALCSISCRALAAFPLGRARDLQPAMPEPPTHSMGSCAARASPTSTTLCSTAPSPIDHPRAEECQRMARDWQAAPPAARTYVECVGQKEHLRNRFIILVYVLAVLSLSIKNVYSPDMPSRLPIQDIFAGLVTSIGTAIRYWFHYTLVAFAWLGVVPLTAWHQLLDLGSTLNPGCSHLVILKLTTSTKTLFPNKATFILVVLSQDKTLMEDPRMEDKWKEDRFSPFNSEALEITLGERHRPQTASVIPWFCSSRHVLNLGKINFEVD

SEQ ID NO: 44378 - protein, 114 aa, Homo sapiens
  misc_feature (1)...(114): Xaa = X or * as defined in Table 2
RLSTSPPDSGAQLASPSGSHTRAAGGAACQSRAVRSPFPSPWVVDGTGCGGAGGGARWGGSGCTGAHGVGGRPGMAGXGPEPCPEGRQLRPLAPVGCGQXREPGXKNSMGETTT

SEQ ID NO: 44379 - protein, 156 aa, Homo sapiens
  misc_feature (1)...(156): Xaa = X or * as defined in Table 2
GSASGVVRLSRWARGLAGFRSEAADLRGECYSSXGSASGVVRLSRWARGLAGFRSEAADLRGECYSSXKQRGPKELRSPAGFTXWIPLPGLQVELPASPAPCAPTPQPLSGXWDGRRGAGGGARRGGSGRTGALGVGGGSGMAGCRSRALPPREGS

SEQ ID NO: 44380 - protein, 203 aa, Homo sapiens
  misc_feature (1)...(203): Xaa = X or * as defined in Table 2
WNPHQGCRWSCLPVPRHALAFLSPWVIDGTGRHGAGGGALWGGSGRTGAHGVGGSXGMAGCRSRALPHGKAAKARXEIERSASGTGTAGGPSTPSAATGPGAKSLIARGQQGWPAAPSAGPAKPTPTGNSSWPASAAGSSGSCSRLSSPHLPASXGSGLQPWPAQKGAPTVQQQAEGLPIPRLPEEWISLPFLGHQGEHSGMA

SEQ ID NO: 44381 - protein, 118 aa, Homo sapiens
  misc_feature (1)...(118): Xaa = X or * as defined in Table 2
PPLLQSSPNFFLICYLPWHNSHENTHRTGRRGAGGGARRGGSGRTGAHGVGGRLRHGGLQVPSPAPWEGSXGPARNRAQRRYHCSCPGLQSGLPHYSGYHTXPDEKEKNGREGQKLER

SEQ ID NO: 44382 - protein, 206 aa, Homo sapiens
  misc_feature (1)...(206): Xaa = X or * as defined in Table 2
KLNIGVIYSSEIPDSGAQLASPSGSGTRAAGGAVCQSCALRSHSSALGWSMGPGRRGAGGGARWGGLGRTGAHGVGGRLRHGGLQVPSPAPREGSXGSVRNPAQRRWAGTAGGPSTPSAATGPGAKSLITRGQQGWPAAPSEGPAKPTPTRNSSWPASAARSPGSRSRRLPPHLPASXGSGLQPWPAHYFEFFLPIGQNAQTEVSY

SEQ ID NO: 44383 - protein, 71 aa, Homo sapiens
  misc_feature (1)...(71): Xaa = X or * as defined in Table 2
MVCFDGADCPWVVDGTGRRGAGGGAHRRGSGRTGAREAGGRLRHGGLQVPSPARREGSXGPASPAGCLAHL

SEQ ID NO: 44384 - protein, 203 aa, Homo sapiens
ARYTLHIPTRLGSPAGFTQWIPHRGCRWSCLPVPRRALAFLSPWVVCSFPVDGTGRRGAGGGARRGGSGRTGAHGVGGRPGMAGCRSRALPRGKAAKARREIERSAGGTGTAAGPSTPSAAAGPGAKSPFARGLAGPAAPSARPAKPTSTRNSSWPASAARSPGSRSWKMSLYMKKSASGQSQAQWIAKMWKSPRFKPLWLTS

SEQ ID NO: 44385 - protein, 180 aa, Homo sapiens
SCLPVLRRALTFLSPWVVNGTGRRGVGGGARRGGSGRTGAHGVGGRPGMAGCRSRALPRGKAAKARREIEHSAGGTGTAGGPGTPSAATGPGAKSPIAPGQQGWLAALGINGAGERLFMKVAFSLKTCSLSCSYLRLTLSRGGSVHVLRGNLTVCKPQPALLRVVFHHQRQADCGALPVP

SEQ ID NO: 44386 - protein, 223 aa, Homo sapiens
MTVFEDKAFGRIGARSAGASQAFIDILTTHVMGFSAGSLTIQPASASQPPCSKKQPVGAQMRQESSSRRPDSTSGSDSRRAICRFLRVPESNLGRYEVKTLRNNSKTFAFVTVLIFVLMPLAASKAGAVELAAECAAKKKRRTGSERARDLQSAMPEPPTHSMGSCVARASPTSSTPCSTAPSPIDHPRAEECERMAQDWQAAPPAAPVRDPLGEAQLGLLSL

SEQ ID NO: 44387 - protein, 585 aa, Homo sapiens
  misc_feature (1)...(585): Xaa = X or * as defined in Table 2
RPLRGWRRTRDARAPRRCRCGSHGARRCLRKTAATSRCGGAPGPRSRPPSTGQAAEAGDWPAGCNPXGGLRAADGPGSRPPRGSIGLLCGQGGQGGSSPWVVHGTGRCGAGGGAPWGGSGRTGAHGVGGRLRHGGLQVPSPAPQEGSXGSARNRAQPRWAGTAGGPSTPSAATGPGRDGEGGETGAHVSALKGTPGTEWPAHGLVPYSIGDQTCLIFKVTFKAVVLKCGPQTTSSTSISCPGSANSPPSPAGXGSSGCGSSSLCSAHSVQEDSQPQXKRTGLQSTYGRSGSSSNEPRYHSDLPTSRSKLRNEDTFFGRRKKLSEVQRTGQDPAXSHHTSSYTLPGLXTAEGKDRVENAAXKGSPNFQRSGTFNPKGGARKTRQAWHPRAPNCQAGTPPREGSSGPRTSLSAAFRIPQEVVNFLISGPITRAQRHGEPESPRGQTGSPPLGKTGSEGTDRKSTGADKKSTGDRQEVREPTESPQGLDRKPTGMDRRSTGNRQKVRRQIGSPLGLNRKPNGTDKKSTRNRQEVRRRQSAGARQERAGSSTFLRLSALCGLLVDVNREQVAKQKWDLYSSRFTSGNRV

SEQ ID NO: 44388 - protein, 241 aa, Homo sapiens
  DOMAIN (138)..(173): Prion protein domain identified by eMATRIX, accession number BL00291A, p-value=5.655e-09, raw score of 4.49
  misc_feature (1)...(241): Xaa = X or * as defined in Table 2
GKPSLSLHPGHKCGISRCNGNVSSRLRSPAGFTQWIPHRGCRWSCLPAPRCALALLSPWVVDGTGRHGAGGGARRGGSGRTGAHGVGGRLRHGGLQVPSPAPREGSXGPARNRAQRRWAGTAGGLSTPSAATGPGAKSPIARGQQGWPAAPSGGPPSPSPPGTPAGPQAPHAAPVPARPLPPHLPASXGSGLQPWPAQKGAPTVQGGGXRAPQMPPKWEPRQGRRIVAFTIEVGVLREDLF

SEQ ID NO: 44389 - protein, 90 aa, Homo sapiens
GHWGMVNSPCRASATVSRGSPLPGVLPTSPPSATSTCRMRCHPRRCPLPFRRLSPPSLTPPPGKPPLLPRPHSMPGLGLPLGGLPVFHPC

SEQ ID NO: 44390 - protein, 571 aa, Homo sapiens
  DOMAIN (363)..(390): C1q domain proteins domain identified by eMATRIX, accession number BL01113A, p-value=2.212e-09, raw score of 17.99
  misc_feature (1)...(571): Xaa = X or * as defined in Table 2
QSARQLRPCPGAPSLAGVENRRKKTTNLTSLAAPDTQSTCGQSCGCLHSMGSSCMQHSYYTGFLRSLWPCRCHRSAFSGQRRSEEKDSKSVRERSGRSQNVPARPALTSPLTQSPGPLAPGAGSWSRSQLGTGTGVLWWQRESATGDFRTESARSSDPSRRDWPGAKRKREEGAATVLWACATASTAIICQDNAISPLKSGNSPSNHLWRPQGQLPPVLGLAQPKRWRPNRLTTSPSPSRMMARPVDPQRSPDPTFRSSTRHSGKLEPMEATAHLLRKQCPSRLNSPAWEASGLHWSSLDSPVGPCRPXGLRPSTHGARTFSGARPGLGGYSPPPEEAMPFEFDQPAQRGCSQLLLQVPDLAPGGPGAAGVPGAPPEEPQALRPAKAGSRGGYSPPPEETMPFELDGEGFGDDSPPPGLSRVIAQVDGSSQFAAVAASSHQCLSHHIPMSPSVGRNGLLTKPPSTSRRGKLTKRDDMYYFVPFRSLNDMMHMLPFIEDSRWTHNLDINREQKTNPLAGPKGRPISRTQAAASTSNSKTESQIQEKTEEAPFSLRYININNRSMDPLNGALN

SEQ ID NO: 44391 - protein, 278 aa, Homo sapiens
  misc_feature (1)...(278): Xaa = X or * as defined in Table 2
AGPGPPRPLPPRSSEGPPGASISLCSEVPGPSCQGRFRGGRDAMSMPWREEERSLLAGEXPSXGGXSGRGVSRKCSXPGPRGVPRPRPLRSRPRAASSEDQNSPLDQSLHRTRKTIPSSGGSTAIMPRRGSSSETFFSAPSKTWVLGIPGETFISGPAAFPAPGGPRAAPRPSPSLNSLXSGGNGGPGPPRLHFSSCGKGPPRPSNSRNGGQSACQGGSHLVCXSHRGSLGEGHAYQGDPCSPGHPAKAPSRAHAQARRSAHAASLTSGPCDASCQAW

SEQ ID NO: 44392 - protein, 63 aa, Homo sapiens
CFPSRIRLALSRAPKWPAKRSPSEPEMSPPVWSPHPDPNNTAPPKEQPPSSPGRVGRHGNWSV

SEQ ID NO: 44393 - protein, 177 aa, Homo sapiens
  misc_feature (1)...(177): Xaa = X or * as defined in Table 2
DHCLCSVVRNKRDSVYPLPIPPCCKTSTISPPLVDAVRPXDISVSKRVTSCAPLEPQPHPCLPTINAGRTLARPQGAPTPNKEEGQAPGRATASGQAAPATTVLGDTTKGPQGRHRGTSASAAGPAPFAVADQLPPEDRAASAEGRKXAAAFPFCHRLVQDGGPPPPAAGVPGAGES

SEQ ID NO: 44394 - protein, 824 aa, Homo sapiens
  DOMAIN (209)..(224): WILM'S TUMOUR PROTEIN SIGNATURE domain identified by eMATRIX, accession number PR00049D, p-value=2.525e-09, raw score of 0.00
  misc_feature (1)...(824): Xaa = X or * as defined in Table 2
LAAVGMASHCFRQRRQSQSPAGLRGAGSAYSPAEGARSSHGQPPWRGRRRGPGDPVRGAARCRRPRAAAQPARPAARPPARPRPAPXAACCEVPSAANSVAPSAAMXSSAGRDGASSQRSRRPHAAPPRSSALPANGKPPSPVTRAARTCGARSSNTGAXSAARPKHSAASSRHPPPAAMPLPARHAPGGTSGRPLPTPQGSAPTSSASPRGPATPPPAGPRAPPPSPRRAAAPRPPGRQLSPAPGTPAAGGGGPPFPALRXSGSVFGRQLVGDGERGRACGARGSAAVPALRTFVVSPSTVVAGAACPLAVALPAPDPLPCSEXAPLRSGXVPQPASLFCSQFRPQAWQHPXLLRAPCPRLGAAVPCVWCHSRALDSATPRWMXGXRLPAVWLPAFPSPPFNQAFVPPCQQNCSLQNRQTLSASAKIGTEEWDIAIKIPENVEVTLELGNEQRLEEFGGLRRRQEDEGKFGTPTDWLNGCDQNADSNMDSEGQGEDGGCSFGGAGLRGSGWGDQTRETFLALKANLRWPFRSSAQSQTSQEGAAGARSGLKGGKKNPLKLPKKQAKKMNKAFKQKQEKERKKHKELKAKASWKGLRPQVEFKNLAERRGEAAVPGCPVVAGHSWRLLSLARGCAKRARQLLFPSEKLLAALREGSTRGGGAASQPQRKLRVCMRVLDSSVEDFHMDGLSREWNCCLGPAPTRLPPLASSCADPTPTGQNNGDARGPFSCDSQRSCGCFSLFSKTSSIAWTRNALHSASQRLTVIPVSFEVSEEEPRRGMRAVLPPEEGMVFLVLKTLVQRRILMLLRKRPEDEISEVEVGYPR

SEQ ID NO: 44395 - protein, 295 aa, Homo sapiens
  DOMAIN (57)..(100): kw TRANSCRIPTASE REVERSE II ORF2 domain identified by eMATRIX, accession number DM01354T, p-value=1.818e-36, raw score of 9.48
MIISIDTEKALDKILHPFILKTLNKLGIDGTYLKIIRALYDKPTANIIMNEQKLEAFPLKSNTKQGCPFLPLLFNIVLEVLARAIKQEKEIKSIQIGREEVKLSLFADDMIVYLENPIISAPNLLKLISNFSKVSGYKINVQKSQAFLYTSNRQTEIQMMSELPFTIATKGIKYLGIHPLTRDVKDLFKENSKPLLKELEKTTLNFIWNQKRAHIAKTMLSKKNKAGGVMLPDFKLYYKAAVTKTAWLGDDQVFLIPRGHISDYHMGKNLGQYPAFQDRGPCGFPQCIVPLVYRD

SEQ ID NO: 44396 - protein, 145 aa, Homo sapiens
  misc_feature (1)...(145): Xaa = X or * as defined in Table 2
LIHLSTDALRVSGWGTVRSFSSHEAIFQTIAWGETLDNTLLSRAEVPAAFHGALCPWFIETREWQXLLQSILLVNIWLTRHVLHSPRSLKPXFYTTXVFVCSKLGQSGWGKVAGAKLQMNNISAKQLFKVQVLFKIESLMSSLST

SEQ ID NO: 44397 - protein, 824 aa, Homo sapiens
  DOMAIN (279)..(304): 7 kw REVERSE TRANSCRIPTASE RNA POLYMERASE domain identified by eMATRIX, accession number DM00895E, p-value=3.444e-11, raw score of 15.72
  misc_feature (1)...(824): Xaa = X or * as defined in Table 2
KMGLAREWILRFLVLILQEIRSMRQKENKDIQDLNSALHQADLIDIYRTLHPKSTEYTFFSAPHCIRTYSKIDHTLGSKALLSKCKITEIITDSQTTVLSELRIKKLTQNRSATWKLNSYLNDYWVHNEMKAEIKMFFETNENKDTTYQNLWDTFKAVCRGKFIALNAHKRKQERSKIDTLMSQLKELEKQEQTHSKVSRRPITGSEIEAIINSFTNPKRVPGPDGFDEPNFYQRYKQELVPFLLKLFQSIEKDGILPNXFYEASIILIPKPGRGTTKKEENFRPISLMNIDAKILNKILANRIQQHIKKLLHHDQVGFIPGMQGWFNICKSINVIQHINRTSDKNHTIISIDAEKAFNKIQQLFMLKTLNKLGTNGMYLKIVRAIYDKPTANIILNGQKLEAFPLKTGTRQGCPLSPLLFNIVLEVLARAIRQEKEIQGIQLGKEEVKLSLFADDMIVYLENPIVSAQNLLKLISNFSKVSGYKINLQKSQAFLYTNNRQTESQIMSELPFTTASKRIKYLGIQLTRDVKDLFKENYKPLLNEIKEDTNKWRNIPCSWVGRINIVKMAILPKVTYRFNAIPIKLPMTFFTELEKTILKFRWNQKRAHIAKTILSQKNKAGGIRLPDFKLFYKATVTKTARYWYENRDIDQWNRTEPLEIMPHIYNHLIFDKPDKNKQWGKDSLFNKWCWENWLAICRKLKLDPFLTSYTKINSRWIEDLNVRPKTIETLEENLGNTIQDIGMGEDFMTETPKAMATKAQIDKWDLIKLKSLCTAKETTIRVNRQPTEWEKLFIVYPSDKGLISRIYKELKQIYKKKSNHPIEK

SEQ ID NO: 44398 - protein, 1115 aa, Homo sapiens
RRKMAAGKSGGSAREITFLEALARSESKRDGGFKNNWSFDHEEESEGDTDKDGTNLLSVDEDEDSETSKGKKLNRRSEIVANSSGEFILKTYVRRNKSESFKTLKGNPIGLNMLSNNKKLSENMQNTSLCSGTVVHGRRFHHAHAQIPVVKTAAQSSLDRKERKEYPPHVQKVEINPVRLSRLQGVERIMKKTEESESQVEPEIKRKVQQKRHCSTYQPTPPLSPASKKCLTHLEDLQRNCRQAITLNESTGPLLRTSIHQNSGGQKSQNTGLTTKKFYGNNVEKVPIDIIVNCDDSKHTYLQTNGKVILPGAKIPKITNLKERKTSLSDLNDPIILSSDDDDDNDRTNRRESISPQPADSACSSPAPSTGKVEAALNENTCRAERELRSIPEDSELNTVTLPRKARMKDQFGNSIINTPLKRRKVFSQEPPDALALSCQSSFDSVILNCRSIRVGTLFRLLIEPVIFCLDFIKIQLDEPDHDPVEIILNTSDLTKCEWCNVRKLPVVFLQAIPAVYQKLSIQLQMNKEDKVWNDCKGVNKLTNLEEQYIILIFQNGLDPPANMVFESIINEIGIKNNISNFFAKIPFEEANGRLVACTRTYEESIKGSCGQKENKIKTVSFESKIQLRSKQEFQFFDEEEETGENHTIFIGPVEKLIVYPPPPAKGGISVTNEDLHCLNEGEFLNDVIIDFYLKYLVLEKLKKEDADRIHIFSSFFYKRLNQRERRNHETTNLSIQQKRHGRVKTWTRHVDIFEKDFIFVPLNEAAHWFLAVVCFPGLEKPKYEPNPHYHENAVIQKCSTVEDSCISSSASEMESCSQNSSAKPVIKKMLNKKHCIAVIDSNPGQEESDPRYKRNICSVKYSVKKINHTASENEEFNKGESTSQKVADRTKSENGLQNESLSSTHHTDGLSKIRLNYSDESPEAGKMLEDELVDFSEDQDNQDDSSDDGFLADDNCSSEIGQWHLKPTICKQPCILLMDSLRGPSRSNVVKILREYLEVEWEVKKGSKRSFSKDVMKGSNPKVPQQNNFSDCGVYVLQYVESFFENPILSFELPMNLANWFPPPRMRTKREEIRNIILKLQEDQSKEKRKHKDTYSTEAPLGEGTEQCVNSISD

SEQ ID NO: 44399 - protein, 425 aa, Homo sapiens
  misc_feature (1)...(425): Xaa = X or * as defined in Table 2
RRHRLENYIPRTAQSPHPRKALARSESKRDGGFKNNWSFDHEEESEGDTDKEPGPLDAPPRPESGPRAPGKGLXRRSRSPGPSERGSAARLTAEPEARNPAASTLLRRGPSSRRARRRCGPWIKKEAAWEEEDGGRQERRLGQDLRTRTLNKSKGGIDSRIISLGQHSHPTHAKLWLDQSLREMEVLKIIGALIMKKKVKEIQIKSRARSTPLHDQIGTTSPRERTIASKRHPYYITPKGIRYEQDTLSRTPITTIRSRQRPLGPLTASPPPSFPTLAPPTQAIKPSLHLREGKPTPTPGERSTRPHHPEPPRKEYALSSLYPPTYLLAPTSTDLGNAHPTQEPQFNVDATHPRQNRFIPVAGNSPKRSSQFPIVFAPKKNTTPPYLDFAAILGLHRRPPRSRFRTSYPPKEFRSSPPERTAPRN

SEQ ID NO: 44400 - protein, 98 aa, Homo sapiens
  misc_feature (1)...(98): Xaa = X or * as defined in Table 2
VQKSVLCSFQAGTMEGVEEKKVPAVPETLKKKRRNFADAIQFLQTVFLAFXYTLLKGRQVYWLVEEXHQFYKISYRKKMVQRIRQHPQSCTVQKSWWP

SEQ ID NO: 44401 - protein, 250 aa, Homo sapiens
  DOMAIN (95)..(146): Ribosomal protein L30 proteins domain identified by eMATRIX, accession number BL00634, p-value=2.636e-31, raw score of 34.38
  misc_feature (1)...(250): Xaa = X or * as defined in Table 2
GTMEGVEEKKKEVPAVPETLKKKRRNFAELKIKRLRKKFAQKMLRKARRKLIYEKAKHYHKEYRQMYRTEIRMARMARKAGNFYVPAEPKLAFVIRIRGINGVSPKVRKVLQLLRLRQIFNGTFVKLNKASINMLRIVEPYIAXEYPNLKSVNELIYKHGYGKINKKXVALTDNTLIARPLGKYGITCMEDLIHEIYTVGKCFKEANNFLWPFKLSSALSGMKKKTTHFVEGGDGGNRVDQINTLNRRMN

SEQ ID NO: 44402 - protein, 129 aa, Homo sapiens
MAEQEQLWSAAPSMINAEGHQHQRPKVDKSTKMRKNQCKKAENSKNQNASSPPKDHKNEFDELTKVGFRRWVITNSSKLKEHVLTQCKEAKNPENRLEELLTRITSLEKNINDLMELKNTAREFREAYT

SEQ ID NO: 44403 - protein, 381 aa, Homo sapiens
  misc_feature (1)...(381): Xaa = X or * as defined in Table 2
MTRNYEWLLEAESSPQPIAFQKMEPQPYNSKELNSANNQCLLEKPKLRQRLKDKEYDQGHTAVQCQSWVYVLTPDSFCQQLILLPSTENFHECSRSDTAGHLRTGHVASNWLSEHSPQTMPAAMQWDKKMQNTSSWFPQKAPEKVKPMSKLWQTPSQNDTLYKAVKALTLSSPERNSINTNKKDVHTETSSKGHQHQRPKVDKSMKMRKNQHKKAENSQNQNASSPPRNHNSSPARERNWSENEFDELTEVVFRRWVITNSSELKEHVLTQCKEAKNLEKRLEELLTRITGLEINQAEERISETEDQLNEIKHEDKIREKRMKRNEQILQEIWAYVKRPKLRLIGVPENDRENGNKLENTLQDTIQENFPELARXANIQIQ

SEQ ID NO: 44404 - protein, 86 aa, Homo sapiens; identical to SEQ ID NO: 31095
  misc_feature (1)...(86): Xaa = X or * as defined in Table 2

SEQ ID NO: 44405 - protein, 435 aa, Homo sapiens; identical to SEQ ID NO: 31096

SEQ ID NO: 44406 - protein, 95 aa, Homo sapiens
ITLSSPPHSFIGHKTPASGPPQKIPPQPSQCKQWGDPTPVEACCVSCPTQGFISPTRGGPPCKHESLVVPLVGTPRRNQPGGHIQHSQRWAPVLT

SEQ ID NO: 44407 - protein, 165 aa, Homo sapiens
  misc_feature (1)...(165): Xaa = X or * as defined in Table 2
VHLTGCGGPGQPVPEPAPPRGLRSMRCGPXGFSPGAEAXTEPCHYGGRGFPCGPFSLGCLATNSPWLPGPRPPCSPWAGPCGLCPLPAAAAERQPALSVPGASPSCRLLPLVVLCHGSHLNGGRVLLRPGGSPCGHCHNCAGARRGLGHVLQGGAQARQREQLQR

SEQ ID NO: 44408 - protein, 292 aa, Homo sapiens
PQHTANTLTRAECDTTGQSSTYTQHTANNTLTRAECETTGQSSTYTQHTANNTLTRAECETTGESSTSSSPSVPASGFHGPPVPACRLLPSAVCHHLNPAGKRTHCPQRHEADPITSSTQGVSFWLRHPPVHSSPIPSSPRLKTAPMRITRRLNKQTVERLYDTTLLRQNQNRTRPTHTEAWRNLRNSSVKEAKHRRVLNVRFRFYEAQEQTNSKNQTKDLKSHLTRDREKAKQQLVKGCFPSHIIRKSANPNKTTKGQPRGCMGAGGQGAKGCSVAKQPKLKGPHGNPRPP

SEQ ID NO: 44409 - protein, 83 aa, Homo sapiens
  misc_feature (1)...(83): Xaa = X or * as defined in Table 2
AVGLGGNRSGQDGGPALCCGGLIRRACSSRDAEAVQKGACCVKAWAVSRLSAGGRYLVLEWIVLFRKRSGPRMCRVSFVKPGX

SEQ ID NO: 44410 - protein, 46 aa, Homo sapiens
  misc_feature (1)...(46): Xaa = X or * as defined in Table 2
XDRKLAALLKFHTLDSYEDKQKLKRTEIIKPFWFPFCPRIRLQQAS

SEQ ID NO: 44411 - protein, 198 aa, Homo sapiens
  DOMAIN (94)..(112): PROTEIN NUCLEAR BROMODOMAIN TRANS domain identified by eMATRIX, accession number PD01234B, p-value=5.821e-09, raw score of 15.53
  misc_feature (1)...(198): Xaa = X or * as defined in Table 2
QKAKKGKLKRSKQNSFPGLKKTVPSQLVQYCPSFXISWKPMVYQKVPAXPRPPRTPDHHPDPGPAPHPRQHHPPPRSPDAEPSPTTPTRRRPPTQPPDPHPKRPPPHSKPHPPQQPPTPPTATPTEQQRHTAPPTPRPPTTHPPSTPKHPAPHTAPPPTKNTKPPTPQRTTQDKGRQKKPRRQPHHSEPNKKSPKAHI

SEQ ID NO: 44412 - protein, 375 aa, Homo sapiens
MAADHIHTTLHTPRHVPTARRPNRDTTTCSTPEHTYRCANILPTTTKTTNKTKHTATTTSKTTPTHKHPTHTRAADPPTHTHQDNHKATTTPIRRPHHTSTPNKHIYNSITTYQQTHNNTHRHNHTKHDNETHSPTQATSHKQTNKINNTPTQHTTITDPYTALASPALTAKRTQSAYNEHIAAITHLSVERSRATEHELSQRRKHEHHTDRAHTDNNEHTIRVVRGAQYTSNKEHKEQLSRAGKGSDAHRQGPTTKAHPPKRDKNALSGKKHHNTVKHIQYGDKAGQGTSAPPEASPTAAQSPLHPSRLPPPQACPSPTCRQRGQEPIRGIRPTTSPESVSGLCCFPTVTGSEYETMLTEIMSWAMSESGSWPP

SEQ ID NO: 44413 - protein, 72 aa, Homo sapiens
PRPKPARVPQHPQRPSPTACPRVLLHPSPPAPTSGHCSPSPTLPPERGQEPIRGIRPHDVPRVCVRLCSLFR

SEQ ID NO: 44414 - protein, 64 aa, Homo sapiens
MVKPGTTQMQLSCSFSQVDVIEMKHFSLNWCGFWNDFCRDSHDLSHTRAMARFSPKPSDLEPMD

SEQ ID NO: 44415 - protein, 445 aa, Homo sapiens
MEKITWIRKTKREVPAASQNSPQKSNGLTLNSADKPGNCRLQPSAKQENKSLAMSSCQELGTLSQPNSQKEGQKLNPVVSEYLLGKAFYGQNENPESTTRCSRPSCLLTSATQLKAQSMPSKVPVPAWIGWLLVGHKPRTPSQQATERWAPPRQGNQPRKEGHWIQKRDKRRGEGIPRLKGKQSQGKGMRPGETWNRCEYLGLRMQIPPETPLSLRPPDPNSVRTVPQPETRLDHNRPMSRPIFPVPLARRTELPGAAPAGEPRAPHRPDPAAFGSPAGGPRRSCPRPTSSSATIGVRDAESARRRRPPAVPRGPARSAALPQLPHVLAQAESRHLSGARERGRAGRYSNRRNLDSLPRKPSTGFAALSRRVNQAISCLGTESALEKAEGPTLVTQERWQDFHPSHLTWNPWINQLPLEANPETKGAVYTETDAGINPQGVIVTD

SEQ ID NO: 44416 - protein, 106 aa, Homo sapiens
EAPKAEAENQKTFQQTSTNLKDKTWFKHLGTGAKIQEIWCEEDERKMAREFLAEFMSTYVMMEWLTGMLQLCLFAIVDQENNPALPGTHALVIGILVVIIRVYHGM

SEQ ID NO: 44417 - protein, 65 aa, Homo sapiens
MYVHHDICAHELSQELSLHLPLIFLAPYFLDLCYHGPGDHFGATGGPPVPRCLNHVLSFRFVDVC

SEQ ID NO: 44418 - protein, 28 aa, Homo sapiens
ESKDISADIYKSEGQNMVQASGHRRTYI

SEQ ID NO: 44419 - protein, 144 aa, Homo sapiens
  DOMAIN (47)..(58): MIP family proteins domain identified by eMATRIX, accession number BL00221A, p-value=5.935e-09, raw score of 6.39
VSFLSMGSGHCLRSTRGSKMVSWSVIAKIQEIWCEEDERKMVREFLAEFMSTYVMMVSGWAARSGWGSTRAVHEPPPHADPMGHIVHSLPLSWEPGEAVRKVRSGGFLIKSFWTERAHNMWGSNETMHWGIRGTAGNGEKGNPE

SEQ ID NO: 44420 - protein, 56 aa, Homo sapiens
  misc_feature (1)...(56): Xaa = X or * as defined in Table 2
SEGPSKEPTHRRMKFSHHDDLIFLDLSNXQPPNSPEPHPPQSPXKPWPQNPSSRQM

SEQ ID NO: 44421 - protein, 73 aa, Homo sapiens
  misc_feature (1)...(73): Xaa = X or * as defined in Table 2
VSFLSMGSGHCIRSTRGSKMVSWSVIAKIQEIXCEEDERKMARESLAESMSTYVMMNHTYDSXGKTHILIMKK

SEQ ID NO: 44422 - protein, 46 aa, Homo sapiens
VSACIPVFRLARRRKKFLFDCHFPDLLLTKRDSGLNRLYRVLQLMV

SEQ ID NO: 44423 - protein, 125 aa, Homo sapiens
KRQAEYIMPLLKLVHGSPLVFGEKFKLFTLVSACIPVFRLARRRKKILFYCHFPDLLLTKRDSFLKRLYRAPIDWIEEYTTGMADCILVNSQFTAAVFKETFKSLSHIDPDVLYPSLNVTSFDSV

SEQ ID NO: 44424 - protein, 437 aa, Homo sapiens
  misc_feature (1)...(437): Xaa = X or * as defined in Table 2
AGCSCGSRAMAEEQGRERDSVPKPSVLFLHPDLGVGGAERLVLDAALALQARGCSVKIWTAHYDPGHCFAESRELPVRCAGDWLPRGLGWGGRGAAVCAYVRMVFLALYVLFLADEEFDVVVCDQVSACIPVFRLARRRKKILFYCHFADLLLTKRDSFLKRLYRAPIDWIEEYTTGMADCILVNSQFTAAVFKETFKSLSHKDPDVLYPSLNVTSFDFSCSXKAGMTXSPRGKNSWLLSINRYEREGKIWTLGTGKALVQLRGRLTSQDWERVHLIVAGGYDERVLENVEHYQELKKMVQQSDLGQYVTFLRSFSDKQKISLLRQLARVCFYTPRQXGTLGIVPLGRPCYMAVPQFICCLIRVGPFGSSIXPQCSQGFCVEPDPVHFSEAIEKFIREPSLKATMGLGWEEPEXREKFSPGSILQEQLYRYVYQTAG

SEQ ID NO: 44425 - protein, 216 aa, Homo sapiens
  misc_feature (1)...(216): Xaa = X or * as defined in Table 2
MESKEEQGGVADHQKATRGIPTPQPREVVSERATQRGNRAFSTKLCNPKTNRKQQQQYQQQQKGRTKTLPKGQHPQRSKLDKLTEMRKHQQKNTKNPKGQSPCSPPNDCNVSPARVHNWTGDEMEELTEVGFKKWVRKNCAELKEHVLTQCKEAKNLDKRLEELLTRKTSLERNINDLMELKTRAXELCKAYTSINSXIDQAEERISEFEDHLAEI

SEQ ID NO: 44426 - protein, 454 aa, Homo sapiens
  DOMAIN (272)..(301): TRANSMEMBRANE FOUR FAMILY SIGNATURE domain identified by eMATRIX, accession number PR00259C, p-value=2.688e-30, raw score of 16.40
MPVKGGTKCIKYLLFGFNFIFWVSERDCRALLSGPTCSRAPDTGRGRECRQLALPAPGRHRAGRESALRLPAGSKAGSRAGRDGRDGRIRVGVSGTLFGSTTGLFNQSLAETGFTPYTQKSNDFLVKSLKIWHTYFKNFHQEARLYIRTSPGSNWNWFCTLGIESPEQPGVYEGQRPRVVTKSFASLTLKRVGTVLLLAARINADVLYVLQLAGIAVLAIGLWLRFDSQTKSIFEQETNNNNSSFYTGVYILIGAGALMMLVGFLGCCGAVQESQCMLGLFFGFLLVIFAIEIAAAIWGYSHKDEVIKEVQEFYKDTYNKLKTKDEPQRETLKAIHYAVCRLGKDTLLRFLRIVSAHRLNCCGLAGGVEQFISDICPKKDVLETFTVKSCPDAIKEVFDNKFHIIGAVGIGIAVVMPSFRSNHPDPHVSSYLLIFGMIFSMILCCAIRRNREMV

SEQ ID NO: 44427 - protein, 63 aa, Homo sapiens
  DOMAIN (12)..(36): TRANSMEMBRANE FOUR FAMILY SIGNATURE domain identified by eMATRIX, accession number PR00259A, p-value=2.241e-22, raw score of 9.27
MPVKGGTKCIKYLLFGFNFIFWLAGIAVLAIGLWLRFDSQTKSIFGQETSINNSSFFDRSLYF

SEQ ID NO: 44428 - protein, 134 aa, Homo sapiens
  misc_feature (1)...(134): Xaa = X or * as defined in Table 2
KRLPRILGIRGKPCCPDTSRAGRRVRGRAAAPCREAARGRGQRRFLPPTWRCETGAATMFPSPALTPTPFSVKDILNITVRPRSLGQAALTKRLSASLSPQSCARCRRRWSCVILSAVRGNXYAGSRAHRDCTQ

SEQ ID NO: 44429 - protein, 88 aa, Homo sapiens
  misc_feature (1)...(88): Xaa = X or * as defined in Table 2
MAPSPQSVTXXXXXXXXXXXXXXXXXXXXXXXXXKIAACSFPWKLHPRGAPARCQPELSEMPCPERRNLERQTGYSSFXXXXXXXXXL

SEQ ID NO: 44430 - protein, 215 aa, Homo sapiens
AYSTPYATDNEEINVTSTDSEVEIVTVGESYRSRSTLGHSRSHWSQGSSSHASRPQEPRNRSRISTVIQPLRQNAAEVVDLTVDEDEPTVVPTTSARMESQATSASINNSNPSTSEQASDTASAVTSSQPSTVSETSATLTSNSTTGTSIGDDSRRTTSSAVTETGPPAMPRLPSCCPQHSPCGGSSQNHHALGHPHTSCFQQHGHHFQHHHHHV

SEQ ID NO: 44431 - protein, 672 aa, Homo sapiens
  misc_feature (1)...(672): Xaa = X or * as defined in Table 2
LRLSLKFPMSQWTPEYNELYTLKVDMKSEIPSDAPKTQESLKGILLHPEPIGAAKSFPAGVEMINSKVGNEFSHLCDDSQKQEKEMNGNQQEQEKSLVVRKKRKSQQAGPSYVQNCVKENQGILGLRQHLGTPSDEDNDSSFSDCLSSPSSSLHFGDSDTVTSDEDKEVSVRHSQTILNAKSRSHSARSHKWPRTETESVSGLLMKRPCLHGSSLRRLPCRKRFVKNNSSQRTQKQKERILMQRKKREVLARRKYALLPSSSSSSENDLSSESSSSSSTEGEEDLFVSASENHQNNPAVPSVTYGQPWSKNIKEKTLEINSSQALTAYECLHSAHVINLISPFYHHFPSSQERSYLSTLSTLSNKKTGSVWFTRSPKVTQFFPGGAITGTLSQRPEREILRPLALPGKGNTPPYFCSPSMGCTHCPTSPNEMNQGISEDTAAAPVRDIYIKPPSPWDRAPGGRGGCGHSFSRLKSPYLRALKSAADFPAQHSSSDKGQAASSSGSLTPVYPVWVTPPSRGRQTPHRGELWLASDGCPSGRKLPEEGTGSNLCCSAASAGDTQANRDHNSSPAREQTWTENKFDKLTEAGLRRWVINSSELKEPVLTQCKEAKNLEKRLDESPTRITSSEKNINDLMELKNTAQELHEEHTSINSQDQAEXRISEIEDQLNEI

SEQ ID NO: 44432 - protein, 245 aa, Homo sapiens
  DOMAIN (93)..(127): 3 RETROVIRAL PROTEINASE domain identified by eMATRIX, accession number DM00892C, p-value=9.308e-10, raw score of 23.55
  misc_feature (1)...(245): Xaa = X or * as defined in Table 2
LNRGEQRAVRYYSHMKLNMAEEEDYMSGFLHXCPRRYQTRIANAKANPRSPSKREKQQEANLKNRQKSLKEEEQERRDIGLKNALGCENKGFALLQKMGYKSGQALGKSGKSGIGHEASLKRKAEEKLESYRKKIHMKNQAEEKAAEQFRMRLKNKQDEMKLEGDLRRSQRACQQLDVQKNIQVPREAWYWLRLEEETEEDEEEKEQDEDEYKSEDLSIKKTYLQIVQDQLLQIMTKIIPNKVET

SEQ ID NO: 44433 - protein, 620 aa, Homo sapiens
  DOMAIN (458)..(503): kw TRANSCRIPTASE REVERSE II ORF2 domain identified by eMATRIX, accession number DM01354N, p-value=1.000e-40, raw score of 13.17
MAESWGLTNLRCQRTELMAGTATERIGKKHTKEKEVRAIILVPTLPESLAIANYTETGVPKGKNTVNAVVPLGLDAQCGCHTLGCCLECLQGIQRYGLSSSLPAVGTSTSSDGGGRKVTQTERSSSPAMEQSWKENDFDVLREEGFRRSNYSELKEKVRTNGKEVKNLEKKVDEWLTRITNAEKSLKELRPSLRLIGVPESDGENGTKLENTLQDIIQENFPNLARQANIQIQEIQRTPQRCSSRRATPTHVIVRFTKVEMKDKMLRAAREKDHSAIKLELRIKKLTQNRSTTWKLNNLLQNDYWVHNEMKAEIKMFSETNGNKDTTYQYLWHTFKAVCRGKFIALNAHKRKQERSKIDTLTSQLKELEKQEQTHSKASRRQEITKIRAELKEIETQNTVQKINESRSWFFEKINKTDRLLARLIKKKREKNQIDAIKNDKGDITTDPTEIQTTITEYYKHLYANKLDNLEEMDKFLDTYTIPRLKQEEVESLNRPITDSEIVAIINSLPTKKSPGADGFTAKFYQTYKEELVPFLLKLFQSIEKEGILPNSLYEASIILIPKPGRDTTKKESFRPISLMNADAKILNTILANRIQQHIKKLIYHDQVGFIPGMQGWFNI

SEQ ID NO: 44434 - protein, 401 aa, Homo sapiens; identical to SEQ ID NO: 43631
  DOMAIN (174)..(219): kw TRANSCRIPTASE REVERSE II ORF2 domain identified by eMATRIX, accession number DM01354N, p-value=1.000e-40, raw score of 13.17

SEQ ID NO: 44435 - protein, 372 aa, Homo sapiens; identical to SEQ ID NO: 34165
  DOMAIN (307)..(327): kw TRANSCRIPTASE REVERSE II ORF2 domain identified by eMATRIX, accession number DM01354U, p-value=6.400e-18, raw score of 12.24

SEQ ID NO: 44436 - protein, 469 aa, Homo sapiens; identical to SEQ ID NO: 34694
  DOMAIN (182)..(228): kw TRANSCRIPTASE REVERSE II ORF2 domain identified by eMATRIX, accession number DM01354O, p-value=1.000e-40, raw score of 8.73

SEQ ID NO: 44437 - protein, 578 aa, Homo sapiens
  DOMAIN (228)..(283): kw TRANSCRIPTASE REVERSE II ORF2 domain identified by eMATRIX, accession number DM01354Q, p-value=1.000e-40, raw score of 9.23
  misc_feature (1)...(578): Xaa = X or * as defined in Table 2
ERSSSPATEQSWMENDFDELREEGFRRSNFSELKEKVRTHHKQDKNLEKRSWFFEKINKIDRPLARLIKKKREKSQINAIKNDKGDITADPTEIQTTITEYYKHLYANKLENLEAMDKFLDTYTLPRINQEEVESLNRLNNRLXNXGNNXXLTNQKNVQDQMDXQLNSTRGTRRSWYRFLLKLFQSIEKERILPNSFYEGIILLIPKPGRDNTKKDNFKPISLMNMDAKILNKILANRIQQHIKKLIHHDQVGFIPGMQGWFNICKSINVIQHINRTKDKNHMIISTDAGKAFDKIQQPFMLKTLNKLGIDGMNLKIIRAIYDKPTANIILNRQKLEAFPLKTGTRQGCPLSPLLFNIVLEVLARAIRQEKEIKGIQLGKEEVKLSLFADDMIVYLENPIVSAQNLLKLISNFSKVSGYKISVQKSQAFLYTNNRQTESQIMSEIPFPIASKRIKYLGIQLTRDVKDLFKENCKPLLKEIKENTNKWKNIPCSWIERINIVKMAILPKVIYSFNAIPIKHPMTFFTELEKTTLKFIWNQKRARITKSILRQKNKAGGITLPEFKLYYKTTVTKIAWYG

SEQ ID NO: 44438 - protein, 301 aa, Homo sapiens
MGKKQNRKTGNSENQIVSPPPKEHSSSPAMEQSWTENDFDELREEGFRWSNYSELQEEIQTNGKEVKNFEKNLNEWIPRITDAEKSLKEPMELKAKARELREECRSLRSRCDQLEERVSVMEDEMNEMNEGENGTKLENTLRDIIQENFPNLARQANIQIQEIQRTPQRYSSRTATPRHIIVRFTKVEMKEKMLRAAREKEQVTHKGKPIRLTADLLAETLQARRQWGPIFNILKEKNFQPRISYPAKLSFISEGEIKSFTDKQMLRDFVTTRPALKELLKEALNMERHNWYQLLQKHAKM

SEQ ID NO: 44439 - protein, 183 aa, Homo sapiens
  DOMAIN (87)..(133): kw TRANSCRIPTASE REVERSE II ORF2 domain identified by eMATRIX, accession number DM01354O, p-value=7.968e-23, raw score of 8.73
  misc_feature (1)...(183): Xaa = X or * as defined in Table 2
EHSSSPATEQSWMENDFDELREEGFRRSNYSELKEEVRTHGKEVKNLEKKLDEWLTRITNAEKSLKDLMELKTTAREICDECTSLSSRCDQLPRPDGFTAEFYERYKEEMVPFLLKLFQSIEKEVNPPXLTLXGQHHPDTKAWQRHNKKREFXTNIPDEHXCKNPQXNTGKPNPAAHQKAYPP

SEQ ID NO: 44440 - protein, 302 aa, Homo sapiens
  DOMAIN (149)..(194): kw TRANSCRIPTASE REVERSE II ORF2 domain identified by eMATRIX, accession number DM01354N, p-value=1.000e-40, raw score of 13.17
MKAEIKMFFETNENKDTTYQNLWDTFKAVCRGKFIAVNVHKRKQERSKIDTLTSQLKELEKQEQTHSKASRRQEITKIRAELKEIETQNTLQKINASRSWFFERTNKIDRPLARLIKKKREKNQIDAIKNDKGDITTDPTEIQTTIREYYKHLYANKLENLEEMDKFLDTYTLPRLNQEEVESLNRPITGAEIEAIINSLPTKKSPGPDGFTAEFYQRYKEELECSSSPAMEQSWTENDFDDLREEGFRRSNFSELKEEVQTHRKEAKNLEKRLEKWLTRITNVEKSLNYLRELKTMARELC

SEQ ID NO: 44441 - protein, 323 aa, Homo sapiens
  DOMAIN (182)..(227): kw TRANSCRIPTASE REVERSE II ORF2 domain identified by eMATRIX, accession number DM01354N, p-value=1.000e-40, raw score of 13.17
MGLEIPLINTKSKPGFTLECSSAPAMEQSWMENDFDELREEGFRRSNISKLKEEVQTYCKEVCRGKFKALNAHKRKQETSKIDTLTSQLKELEKQEETHSKASRRQEITKIRAELKEIETQKTLQKINESRSWFFEKINKIHRPLARLIKKKTEKNQINAIKNDKWDITNNLTEIQATIREYYKHLYANKLENLEEMDKFLDTYTLPRLNQEEVEPVNRPITGSEIEAITNSLPTNKSPGSDGFTVEFYQRHKEELVPFLLKLFQSIEKEGILPNSFYEANIILIPKPCRDTTKKENFRPISLMNIDAQILNKILANGIQQHI

SEQ ID NO: 44442 - protein, 104 aa, Homo sapiens
LLEGKLTNRKDIHTKTPSVSPPSSKTKEHSSSPAMEQSWMENDFHELREEGFRRSNFSKLKEEVRTHRKEVENLEKRLDEWLTRITKVEKALNDLMELKTMARE

SEQ ID NO: 44443 - protein, 237 aa, Homo sapiens
MAIIQRDNTALANLPFMNEEISAKDFSTVLLAVIFLKKSSQQLVANKPVLSLSLPVTWVLEPMSYGYQGMAELRLSRDYESMQMCTFRGSLSNEQCLDQELHSPFARKEKEPKKRNKQASREESEKEKKREPERHLTTTERCDFPVRKVKIQRTAIERLNKRHTRRLYPAPGLEGPTPTEPRSLLAQQSEIKLQGSSEAGERSSSPATEQSWTENDFDKLREEGFRRSNYSELKEEV

SEQ ID NO: 44444 - protein, 277 aa, Homo sapiens
  DOMAIN (159)..(204): kw TRANSCRIPTASE REVERSE II ORF2 domain identified by eMATRIX, accession number DM01354N, p-value=2.904e-39, raw score of 13.17
MGKRQSRKTGNSKNQSASPPPKECSSSPAMEQSWMENDFDEFREEGFRRSNYSELQEEIRTNGKEVKSFEKKLDEWITRITNAEKSLKDLMELKTKARELHDECTSPQSWFFEKINKIDRLLARLIKKKREKNQIDVMKNDKGDITTDPTEIQTTIREYYKHLYANKLENLEEMHKFLDTYILPRLNQEEVESLNRPITGSENEAIINSLPTKKSPGPDGFTAEFNKRGQDELVDDYKPRDTVGKLEEKNQKPTLEKKKFDRGGETEASFRTGVKAY

SEQ ID NO: 44445 - protein, 248 aa, Homo sapiens
MREKTSLQIRPGIIRIIGGYYEQLYVTKNDSTERGSPASRPQTDTSPWPVRNRTAQQEEECNLSKEILQLSHTLKKLTAISSLLTALSRAEQYGKSKVPECVIRSDGDYLSLTVNPGSFSRVDITLSSRGGHVTEAWPITDVSSSGHRDWFRDWHRIKFKPECSSSPAMEQSWMENDFDELREEGFRRSNFSKLKEAVRTHGKEVKNLEKRLDKWLTRIINEKKSLKDLMQLKTMAQELRDKCTSFSS

SEQ ID NO: 44446 - protein, 492 aa, Homo sapiens; identical to SEQ ID NO: 34169
  DOMAIN (386)..(395): PROTEIN AMINOPEPTIDASE PRECURSOR HYDROLASE SIGNA domain identified by eMATRIX, accession number PD01795A, p-value=6.667e- 09, raw score of 10.27

SEQ ID NO: 44447 - protein, 270 aa, Homo sapiens
  DOMAIN (108)..(153): kw TRANSCRIPTASE REVERSE II ORF2 domain identified by eMATRIX, accession number DM01354N, p-value=1.000e-40, raw score of 13.17
MGKKQSRKTGNSKKQSTSLLPKDRSSSPAMEHSWTENDFDELREEGFRRSNYELQEEIQTKGKEVKNFEKNLDECTTRITNTEKGLKELMELKAKARELQIQTTIREYYKHLYANKLENLEEMDKFLHTYTLPRLNQEEVESLNRPITGAEIVAIINSLSTKESRTRWIHSRILPEGLRFKKAHVTHPELKATFCLPILGVKKNPSSPLYTTLGVITKGTVIEVNVSELGLVTQGGKVIWGIHSKEMKAETQTGICTPTFIEALFTIAKR

SEQ ID NO: 44448 - protein, 216 aa, Homo sapiens
TGVPKGKNTVNAVVPLGLDAQCGCHTLGCCLECLQGIQRYGLSSSLPAVGTSTSSDGGGRKVTQTERSSSPAMEQSWKENDFDVLREEGFRRSNYSELKEKVRTNGKEVKNLEKKVDEWLTRITNAEKSLKELRPSLRLIGVPESDGENGTKLENTLQDIIQENFPNLARQANIQIQEIQRTPQRCSSRRATPTHVIVRFTKVEMKDKMLRAAREK

SEQ ID NO: 44449 - protein, 355 aa, Homo sapiens
VDGHWGTVSGPGKEGEESGWMSIQRALRKRPFSKSKRKTGSGRDRALSKSSPVRAWEINREWHINRGLAPNLPGVRSSGFLFSAKCCETVDHTLRNAPLDPQLVRSRSHGLPGTVPLRSHYILAKIISPMNFKWAELKLQAPKCTGLSNTLCCILNMMERSSSPATEQSWTENDFDELREEGFRRSNYSELQEEIQTKGKEVKNFEKNLDECITRITNTEKCLKELMELKAKARELPEECRSLRSRCNQLEERVSVMEDEMNEIKREGKFRDKRIKRNKQGLQEIWDYVKRPNLCLIGAPESDGENGTKLENTLQDIIQENFPNLARQANIQIQEIQRMPQRYSSRRATPRHIIV

SEQ ID NO: 44450 - protein, 687 aa, Homo sapiens
  DOMAIN (246)..(273): Mrp family proteins domain identified by eMATRIX, accession number BL01215A, p-value=4.964e-11, raw score of 9.75
KLHSSGSSGKGQEVAGWYELINNLFQHNLVECGVGSSGQKTAQLDQQPQVDILALGLLAPNLSVLVVADVSSHDGVSCSARTCCTFSDLPASVLIINIENDTFFSSNAPMHFSLEYEPGLQNGASLGQIRDCRLGSKDQADSGGILLKVKTCEQFLVKGFSEKVTLFLFRPMPYTTGVDPPEHSTFLLMITESELAIRDAEKAGRLPHPDMEIRGRVEQRVGYTIEQINHMRDVFGTRLRRAEDVFPPVIGVAAHKGGVYKTSVSVHLAQDLALKGLRVLLVEGNDPQGTASMYHGWVPDLHIHAEDTLLPFYLGEKDDVTYAIKPTCWPGLDIIPSCLALHRIETELMGKFDEGKLPTDPHLMLRLAIDSVAHPYDVIVIDSAPNLDLHLRVLSLRRKTNKQKGHPHQKPFCTSPSSKAKIDKTTKMGKKPNRKTGNSKNQSASPPPKERSSSPAMEQSWTENDFDELREEGFRRSNYSELREDIQTKGKEVENFEKNLEECITRITNTEKCLKELRTLHHTYSKTDHILGSKALLSKCKRTQIITNYLSDHSAIKLELRIKNLTQNFSTTWKLNNLLLNDYWVHNEMKASLMNIDAKILNKILANRIQQHIKKLIHHDQVGFIPGMQAWFNIRKSINLIQHINRAKDKNHMIISIDAEKAFDKIQQPFMLKTLNKLSTDGTYISK

SEQ ID NO: 44451 - protein, 104 aa, Homo sapiens
  misc_feature (1)...(104): Xaa = X or * as defined in Table 2
PTNAHETSGRYIAGSSEKRTSARTCGGTSAAARPAGTSMQTRCRQPPPSSXHAVPRVAQSSDSGLKATHPQAYQPCGHTPTRLPQESNCIEHERGLGKKKKKKK

SEQ ID NO: 44452 - protein, 206 aa, Homo sapiens
MTLGYGQRGANKDLRTGFDPDLCTMDNFAEGDFTVADYALLEDCPHVDDCVFAAEFMSNDYVRVTQLYCDGVNDSFLIGGLLRIGCKIENERSSSPAMEQSWTENDFDELREEGFRRSNYSELKEEVRTNGKEVRNFEKKLDEWITRITNAEKSLKDLMELKTTARELCDKCTNLSNRCDQLEERVSAMEDEMNEMKHEDKFREKE

SEQ ID NO: 44453 - protein, 170 aa, Homo sapiens
  misc_feature (1)...(170): Xaa = X or * as defined in Table 2
MGKKQNRKTENSKNQRTSSSPKERSSSPAAEQSWMENDFDELREEGFRRSNFSELKEEVRTHGKEVKNLEKRLDKWLTRITNTQKSLKDLMELKTTARELHDECTSLTNQFDQLEERINNIEDHXQDXXRRKERRIKXMQXKMIKGISPLIPQKYKLPSENTINTSMQIN

SEQ ID NO: 44454 - protein, 121 aa, Homo sapiens
  misc_feature (1)...(121): Xaa = X or * as defined in Table 2
MDTFLQAERKDYMEAYELIEQEEQGEREPVAVNNILSTEALMANAKSTLMFYAVGFLWQPGGGRGHKAASNPGVTRDVVGSLSSLTFLRGERSSSPAMEQSWTDNDFDELREEGFRXSNFS

SEQ ID NO: 44455 - protein, 342 aa, Homo sapiens
MGKKQRGGGRHYRRRKELCVRVLASQKGSSIWNLSNRVESWHWEGEKDGEDRDNDDGDDSDGGDDNGEEDDGDNSNADVNTDNCDDGEDRDDASFHSNTPETRDVGTREQRPKVDKTTKIGKKQSRKAENSKNQSTSPPPKERSSSPATEQSWTENDFDELREEGFRRSNFSKLKEEVRTHSKEVKNIAKRLDEWLTRITNAEKSLKDLMELKTTARELRDECTSLSSRFDQLEERVSVMEDQMNEMKREEKFRGKRIKRNEKSLQEIWDYVKRPNLRLIGVPETGPNFPIYHETTPCKLNTKNQKGPTDDQHVHIGYFQKYEFSDAKDRRAAAAKSFCKEG

SEQ ID NO: 44456 - protein, 1302 aa, Homo sapiens
  DOMAIN (655)..(680): 7 kw REVERSE TRANSCRIPTASE RNA POLYMERASE domain identified by eMATRIX, accession number DM00895E, p-value=3.333e-11, raw score of 15.72
MGKKQSRKTGNSKNQSASPPPKERSSSPAMEQSWMENDFDDLREEGFRQSNYSELKEEVRTHGKEVKNLEKKLDEWLTRITNAEKSLKDLMELKTTARELHDECTSLKRVSVTEDQMNEMKREEKFREKRIKRNEQSLQEIWDYVKRPNLHLIGVPESDRENGTKLENTLQDIIQENFPNLVRQANIQIQEIQRTPQRYSSRRATPRHIIVRFTKVEMKEKMLRAAREKGRVTHKGKPIRLTADLLAETLQARREWGPIFNILKEKNFQPRISYPAKLSFIDRSTRQKVNKDTQELNSALHQADLIDIYRTLHPKSTEYTFFSAPHHTYSKIDHIVGSKALLSKCKRTEIITNCLSDHSAIKLELRIKKLTRNHSTTWKLNNLLLNDYWVHNEMKAEIKMFFETNENKDKTYQNLWDTFKTVCRGKFIALNAHKRKQERSKIDTLTSQLKGLEKQEQTHSKASRRQEITKIRAELKEIETQKTLQKINESRSWFFEKINKIDRPLARLIKNKREENQIDAIKNDKGDITTDPTEIQTAISEYYKHLYANKLENLEEMDKFLDTYTLPRLNQEEVESLNRPITGSEIEAIINSLPTKKSPGPDGFMAEFYQRDKEELVPFLLKLFQSIEKEGILPNSFYEASIMLIPKPGRDTTKKENFRPISLMNIDAKILNKILANRIQQHIKKLIHHDQVGFIPGMQGWFNLRKSLNVIQHINRTNDKNHMIISIDAEKAFDKIQQPFMLKTLNKLGIDGMYLKIIRAIYDRPTANIILNGQKLEAFPLKTGTRQGCPLSPLLFNIVLEVLARAIRQEKEIKGIQLGKEEVKLSLFADDMTVYLENAIVSAPNLLKLIGNFSKVSGYKINVQKSQAFLYTNNRQTESQIMSELPFRIASKRIKYLGIQLTRDVKDLFKQNYKPLLNEIKEDTNKWKNIPCSWVGRINIVKMAILPKVIYRYNAIPIKLPMTFFTELEKTTLKFIWNQKRAYITKSILSQKDKAGGITLPDFKLHYKATQGTPTDLQLRVLSVRRKTNTKDIHTKNPSVQHHHQRPKVDKTTKMGKKQNRKTGNSKKQSASPPPKERSSSPAMEQSWMENDFDELREEGFRRSNYSELREDIQTKGKEVENFEKNLEECITRITNTEKCLKELMELKTKARELHEECRSLRRRCDQLEERVSVMEDEMNEMKINKIDRPLARLVKKKREKNQIDAIKNDKGDITTDPTEIQTTIRKYYKHLYANKLENLEEMDKFLDTYTLPRLNQEEVDSLNRPITGSEIVAIVNSLPTKKSPGPDGFTAKFYQRYKEEL

SEQ ID NO: 44457 - protein, 359 aa, Homo sapiens
  misc_feature (1)...(359): Xaa = X or * as defined in Table 2
IKPTKMGKKQSRKTGNSEKQSTSPPPKERSSSPAMEQSWMENDFDELTGAGFRRLVITDFSELKEDVQTHHKEAKNLEKRLDKCRTNGXLEWMNGITRITNAEKSLKDLMELKTKARELHDECTSLRSRFDQLEERVSVMEDQKKMNEMKREGKFREKRVKRNEQSLQEIWDYVKRPNLRLIGVPESDGENGTKLENTLQDIIQENFPNLARQANVQIQEIQRTPQRYSSRRATPRHIIVRFTKVEMKEKMLRAAREKGQVTLKGKHIRLTVDLSAETLQARREWGPIFNILKEKNFQPRISYPGKLSFISEGEIKYFTDKQMLRDFVTTRPALKELLKEVLNMERNNRYQPLQNHAKM

SEQ ID NO: 44458 - protein, 184 aa, Homo sapiens
  DOMAIN (105)..(118): PROTEIN ZINC-FINGER METAL-BINDI domain identified by eMATRIX, accession number PD00066, p-value=3.571e-12, raw score of 13.92
  misc_feature (1)...(184): Xaa = X or * as defined in Table 2
SGVTAPWRPNGTLLITAATASHPVLAIPAHLCSPRCPSFLTTVTCSGPQHHAARGRVPFHCSECGKSFRYRSDLRRHFARHTALKPHACPRCGKGFKHSFNLANHLRSHTGERPYRCSACPKGFRDSTGLLHHQVKTITTXPDCGGCLVSNIVGSYSRPPWPCTRGPRRPLGSPSPAPGSVCLC

SEQ ID NO: 44459 - protein, 183 aa, Homo sapiens
  DOMAIN (87)..(100): PROTEIN ZINC-FINGER METAL-BINDI domain identified by eMATRIX, accession number PD00066, p-value=8.200e-16, raw score of 13.92
PAPPAAAAPRVPFHCSECGKSFRYRSDLRRHFARHTALKPHACPRCGKGFKHSFNLANHLRSHTGERPYRCSACPKGFRDSTGLLHHQVVHTGEKPYCCLVCELRFSSRSSLGRHLKRQHRGVLPSPLQPGPGLPALSAPCSVCCNVGPCSVCGGSGAGGGEGPEGAGAGLGSWGLAEAAAAA

SEQ ID NO: 44460 - protein, 59 aa, Homo sapiens
  misc_feature (1)...(59): Xaa = X or * as defined in Table 2
TIHGCWWDPLSSIFXPFWGRGFISHKICQAQISFRVISGTVLSLDKLLIMFHKAIFASP

SEQ ID NO: 44461 - protein, 134 aa, Homo sapiens
  misc_feature (1)...(134): Xaa = X or * as defined in Table 2
ENGQKTWTGTSQRRYTGDRMAQIQNPDTKCWXECKATGTRIHCWWECKMVQPLWKSWQFLTKLSILLPYNLAIILLGNYPNALKMYAHTKGFTCMFIAASFIIAKTWKQPRRPSVGEWINNLXLVQTMEYYSAL

SEQ ID NO: 44462 - protein, 293 aa, Homo sapiens
  misc_feature (1)...(293): Xaa = X or * as defined in Table 2
CQPYPRPRPRTGTHGSCQPPSQGSAEPXGXCLPTLLRMALKAQPTKVNPRTLLDSDPDVCSXAAHSRVLITSPSRAPWRLPSPXRRCPAGTCMPSTATSARXCSQRPGSSWXTXTGSSLGSQACGPSSSTAPPSSSWSACTCGCAAAARCSCAASSTRSGPTCGSSPPASSCASSTPAPGTTPSSTLTSWASSPWSTPCPGSAGPSSWSSSSSATPSASASTRTLSPGSPAAPXPWPTALSRLTEQEAVWGAWGISHGNSWDKETKLVRLPHPCSKSPCFRPSLQPYRAHRAP

SEQ ID NO: 44463 - protein, 130 aa, Homo sapiens
  DOMAIN (45)..(92): Intermediate filaments proteins domain identified by eMATRIX, accession number BL00226D, p-value=9.710e-33, raw score of 19.10
SAEVGAAETTLTELRRTVQSLEIDLDSMRNLKASLENSLGILLHLESELAQTRAEGQRQAQEYEALLNIKVKLEAEIATYRRLLEDGEDFNLGDALDSSNSMQTIQKTTTRRIVDGKVVSETNDTKVLRH

SEQ ID NO: 44464 - protein, 347 aa, Homo sapiens
  DOMAIN (226)..(257): Intermediate filaments proteins domain identified by eMATRIX, accession number BL00226C, p-value=1.220e-14, raw score of 13.23
  misc_feature (1)...(347): Xaa = X or * as defined in Table 2
AKTSSQMPSPQEGMCGKACTPALSQADSLCPLLRLASEVEGYSLPACAEPYVQSECLSHLSVWSLQHALSSLASMSFTTCSAFTNYWSPGSVQVPSYGTQPVSHAASVYAGLGGSGSRISVSHFTNGGGLAGMGGIQNEKETMQSLRDRLASYLDRVRGLETENWKLESKIQEHLNVTRLXLETEIEALKKELLFMKKNNEEEAKGLQAQIASSGLTVEVDAPKSQDLAKNMADSRAQYDKLARKNREELDKYWSQQIEESTRVVTTQSAKVGAAEMTLTELRHRVQSLEIDLDSTRNLKASLENSLREVEARYALQMEPSLLFSKIIFGRVWEISYLHVFEGKQVV

SEQ ID NO: 44465 - protein, 675 aa, Homo sapiens
  DOMAIN (458)..(489): Intermediate filaments proteins domain identified by eMATRIX, accession number BL00226C, p-value=5.800e-19, raw score of 13.23
  misc_feature (1)...(675): Xaa = X or * as defined in Table 2
MPVPQLPPPVSRLAATAAASVTEPGPNPEAVRSASAEPEVKEGFPSQNHSVGHSNLIPSGGSVAPSSGRSHYGYASEDGTCSKLRVRPRLAAAPAAPFAFVADLASCCQGLSFFEGILLVRGPYRRLRATVVRDLVAVRMAEEQEFTQLCKLPAQPSHPHCVNNTYRSAQHSQALLRGLLALRDSGILFDVVLVVEGRHIEAHRILLAASCDYFSMSFTTRSTFSTNYWSLGSVLATTYGARLVSSTARVYAGAGGSGSRISVSRSTSFQGGLESGGLAAGMAGGLAGMGGIQNEKETMQSLNDRLASYLDRVRSLETENRRLESKIREHLEKKGPQVRDWSHYFKIIEDLRAQIFANTVDNARIVLQIDNARLAADDFRVKYETELAMRQSVENDIHGLRKVIDDTNITRLQLETEIEALKXELLFMKKTPEEEVKGLQAQIASSGLTVEVDAPKSQDLAKIMADIRAQYDELARKNREELDKYWSQQIEESTTVVTTQSAEVGAAETTLTELRRTVQVFGDSTWTSMRNLKANLENSLGEVEARYALQMEQLNGILLHLESQLGQTPRTEAQRQAQEYEALLNIKVKLEAEICHLTRPPSWKIGEDFNLGDSLDERNSMQTIQKTTTRRISWIGQSGVLRPIDTKVLEALSQQEASGTLLGKQEANKKFQSFK

SEQ ID NO: 44466 - protein, 91 aa, Homo sapiens
LFLKCSPRREQSRVQNNKRPSHIQVPRHQVNERAPCRGRGRLSSPNSQRHLPPGTGPASLLASEGDSQAKGGWGWRSLPTVERTGGKHCLA

SEQ ID NO: 44467 - protein, 112 aa, Homo sapiens
  misc_feature (1)...(112): Xaa = X or * as defined in Table 2
XTITAPSVRTQNRSEGENWSLQGTGCGLSQTVFASGSFHRGKRTPPPPAFACESPSLAEGKPARSREEDGAANSVRTAGPAPDKELARSPGVWEQLFAHFQVHCRFQILQGX

SEQ ID NO: 44468 - protein, 472 aa, Homo sapiens
  misc_feature (1)...(472): Xaa = X or * as defined in Table 2
MGTQCDLLAKSLEDCPVDEVEDAFQGLGKEDEEIEQFSDKTFGSGAIDDDWREAHECLAELEVKQPVAVIEQTGNGERDEMDLLDDHEENLAERLSKMVIENELEDPAIMRAVQTRPVLQPQPGSLNSSIWDGSVSSEANPRTTACSGNAYSVCIRICFASEASPRVQKMIGTFLNEHYQGGQLHLSLAVLLLELSPXAPHLNRWLYPASPNRFCVRSLSMFGPQMPPRYPAPYGERMSPNQLCSVPNSSLLGHPFPPSVPPVLSPLQRAQLLGGAQLQPGRMSPSQFARVPGFVGSPLAAMNPKSQAPMFRPDTTHLHPQHRRLLHQRQQQNRSQHRNLNGAGDRGSHRSSHQDHLRKDPYANLMLQREKDWVSKIQMMQLQSTDPYLDDFYYQNYFEKLEKLSAAEEIQGDGPKKERTKLITPQVAKLEHAYKPETIICQALCRALHINYLTKAFQQAFEVSASIITIYR

SEQ ID NO: 44469 - protein, 120 aa, Homo sapiens
  misc_feature (1)...(120): Xaa = X or * as defined in Table 2
QGYWRGCTSSGGDGGCRGCWSPGKRRXGLSRTASGPPAAVASPGRPRSPPSARTGXSXPGAXARPCSRTWPPPRCPLRPPSAARASASRVAPLGEPAPANTNIYCAALTHRATKSSTREF

SEQ ID NO: 44470 - protein, 547 aa, Homo sapiens
  misc_feature (1)...(547): Xaa = X or * as defined in Table 2
DMPWWPVLPWIKDSSPSSLEMNPDNTSGLRQKSVEAEPCSLWMVHRYTPQSTGEACTMAKAAGPSSPGSCPPRPLGADPWPMSRLSHXECXKTGTTASGYRRHQETAPPESSGSPVGLSAGLWLSWAWPVSPACLHPGPPLCPGPPALGLGPRSPAASCPPLPEAPPACSPFCPXGEISSSGPLEPVPQVXLPGDLSEPPLGTSPLGRAPGLCSLLRAPRPGAACPPASPSRPAMLLSXEAPRRPGPSGETSPSPSLAPSEASPGPPRHHNGRDSEGAGTRTPGASGSSKGLGGQPAPHGPGGRXGGGRYRGSAAGSVHSAPGGCSPHAPGCACDVRGAKPSHFHSGCQSGXGHQTSGGCPHLGLSPCSTCLCAGQLQQQKPGSSSGNLXGQGHSSGDLGSAPPHLVPGPGPLTAGGHGSLVGDSEWGSPAPGAVLGQNSSGPDPQRAGRWLCSRAEKSGCYTAPPLGXLSAQFQEEKASWVPPGSGQLEDSHPDPYTALPLAAPPWGTGTGCPPAWPRLEPDDCGPRHLSPPTCSTLPSWGGCAGS

SEQ ID NO: 44471 - protein, 127 aa, Homo sapiens
  misc_feature (1)...(127): Xaa = X or * as defined in Table 2
RCLRPGEGRSRQGRRSRTGRGKAEEGGARTRQQRRAALLPERSASQPGPRDSPRWRRRRQTTRGRARPASSGGTXGSSWLTLAWPPREPXRLRSASAQGCRRQRLQQRRRGLYQPHRPATCGPRAAD

SEQ ID NO: 44472 - protein, 308 aa, Homo sapiens
  misc_feature (1)...(308): Xaa = X or * as defined in Table 2
QSQRLRPLADTPRRSNRPCSAAGLLFPQSFWSQELSQGAFLLPPSSPCLHCLPGTAAASRHQRSPRTRPSVQERRETHGLCAHRCEWRAGSPAHGPXAHRFVSRAGSPAHGPXAHRCISRAGTPARGPYSRRXVSEAGSPAAVVSAPCSLSSXACVTGCSPAHSPXAHRCASRAASPEHTSREDAEQAPXMQGLCPVHQEQPPSRKSVVTSPHIPPETDCRLLPKNPCANKHQPTATGGRAVPPEVQHVPPRSGMTLGSHQPLALQFQMQATDAARLGLSPQGQGSPPGPRSTLLLGCLSLFQLSLLR

SEQ ID NO: 44473 - protein, 542 aa, Homo sapiens
  DOMAIN (164)..(182): SENR ORPHAN RECEPTOR SIGNATURE domain identified by eMATRIX, accession number PR00647G, p-value=4.506e-09, raw score of 6.17
  misc_feature (1)...(542): Xaa = X or * as defined in Table 2
MIIYVENPKQSTSKCVRAYTFSKVAGHKAIEKRLEKLAVDPHRDRAQMLKVENVQQAWQQWINKLPPARREDEDVKEIRWMIEELRVSYFAQQLDHTGVDRGQPGASTWSASLMCSVTQPKLKTRKPGFLLGLGERNCFSVYGAGRSWGRGLGSCGFWLPPRTRIRAADVCLARWGWRAHRVRVLAGKNSRAESMLWSFHKAAIEAARTNIIQAQTRVEAAQATERRIAADIDDSELKAPRDGRVQYRVAKPGEVLAAGGRVLNMVDLSDVYMTFFLPTEQAGTLKLGGEARLILDAAPDLRIPATISFVASVAQFTPKTVETSDERLKLMFRVKARIPPELLQQHLEYVKTGLPGVAWSFLYSINQTICLRLDSIEAKLQALEATCKSLEEKLDLVTNKQHSPIQVPMVAGSPLRTTQMCNKVRCVNPXATVVPPPVPQPTTQQYQGLDAGATTRVPRSLLRSEGSQTQKSPSCGSHSQDNSGGRKAVGARRDRWWLGAGKGPDCRGAKCGLPLSGQKCPTLDPYQVVGCTSKTGEPYVCT

SEQ ID NO: 44474 - protein, 336 aa, Homo sapiens
  misc_feature (1)...(336): Xaa = X or * as defined in Table 2
GLQTQLVPLSSPVASLDNFSNLFGADLHVEKGQVPSSDQHLSQRCHFPKAPPWSVCKALLPRSNPATSLSGTSKPNSGGDFNSVTKSQPHCELNSFVLTGHSPVLWMMSEHDLADVVQIAVEDLSPDHPVQSCGTVVVLENHVVTDEDEPALKRQRLEINCQDPSIKSFLYSINQTICLRLDSIEAKLQALEATCKSLEEKLDLVTNKQHSPIQVPMVAGSPLGATQTCNKVRCVVPQTTVILNNDRQNDHCSQDGRPLEQQGTGFPGKMSLASQXHGTNPTFPCHCAESHENKSTSLSQGTVQHTLHLCGHRVEPGRHRPSSLRSGRAGWAMLNA

SEQ ID NO: 44475 - protein, 570 aa, Homo sapiens
MWDVEGAGGASDEAQVSSLATERWLLLLLMETGTSEEEQVCLRAPPYQLGRIKLLLGQNKLWLSFGGLAKAGAHSLSLQGGVEGETRAGTGAACSACRPAGIPGGRGLGGPLTRSSRPALLAPGNKGLSTRASGCGGCTGSPSSASPPALRWISHRALAAFPRGRARDLQPAMPEPPTHSMGSCAAQASPTSTTPCSTAPSPIDHPRAEECECRAHDWQAAPPAALVPDPLGEASWAPESGISDEYITPMFSFYKSIGELKMTQEEYALLTAIVILSPAWATERHPVFKKRERKKPSNCLEGVIKAAAELAVGLPWNLGKFHTGDGTSAGLQGIAPNSVGPGQPAPEWMWGWERLLTDQDKTQGSAFSCTATFQDAQKQLLQARFIHLSGLWEQQDGLWLSNWLSLKGQIGGPALTEPLRLSVNRGTWPPKLRDARRRSAGRADRRAPTGRVLPGSPGAGPQTTPPPYDWSLRNRRRPAATDPEAQAAAAAAASMQGLERPHVRNWGIELETLRDAFRPQPSVWRTARGEAGKRKGRLVECLGSQRKVLEGVLLYAVTRGSFPNLFTPRD

SEQ ID NO: 44476 - protein, 135 aa, Homo sapiens; identical to SEQ ID NO: 36560

SEQ ID NO: 44477 - protein, 279 aa, Homo sapiens
MPYPNALLGARGKAKKSTLLEVGGWGALRPAAALWEPLSGLAKAGAHSLSLQEGVEGEARAGTGAACGACGPAGVPRGRGFGGPCTRSSRPALLAAGNERLSTRASGCGGCTGSPSSASPLALRSISHRALAAFPWGRALDLQPAMPQPPTHSMGSCAARASPKSTTPCSMAPSPIDHPRAEECKRMAWDWQAAPPAALVRVPLGEASWAPESAPSPIDHPRAEECERTAQDWQAAPLAALVRDPLGEASWAPESGGDVESISSSGIVNTPISTLCLAQ

SEQ ID NO: 44478 - protein, 140 aa, Homo sapiens
SFSRCSIDLPFWDLEDNSPLLTALPSCAPTQEPSWLHLVDPALGLQVELPASPAPCARTPQPLGGRWDWEPWSRGWCSLGRLRPHRSPWRGWEAQAWRAAGPEPCPTGRQLRPGEQSSTAPVGWHCWGTQYTLRSHWPGC

SEQ ID NO: 44479 - protein, 164 aa, Homo sapiens
  misc_feature (1)...(164): Xaa = X or * as defined in Table 2
MCIEKSKGFYKKATRTTDFIEMQSCVRNWWVLGLTDFKNEAVDPRDSGAQLASPSGSCTGAAGGAACQSCAGRSHSSALAWSMGLGAVEQGVVLVGEAQAAQEPMDWVGGSGMAGCRSRALPRGKAAKAQREIERSAATGPGAKSPIARGQQGWLAALGINGAX

SEQ ID NO: 44480 - protein, 126 aa, Homo sapiens; identical to SEQ ID NO: 36799

SEQ ID NO: 44481 - protein, 538 aa, Homo sapiens
  DOMAIN (395)..(436): kw TRANSCRIPTASE REVERSE II ORF2 domain identified by eMATRIX, accession number DM01354I, p-value=1.563e-33, raw score of 15.55
  misc_feature (1)...(538): Xaa = X or * as defined in Table 2
CPPPRRPRPRAPPHHRPPAAGARTAAAGDRSRHGPASRVGTGPGQQMRKTYCRNSEPSDLDQGGGSRGGPRRQSKCVRNWWVLGLTDFKNEAADPHDSGAQLASPSGFRTRAAGGAACQSRAMRSYSSALGWSMGLGAVEQGVVLVGEAQAAQEPMEWVGGSGMVGCRSRAPPAGRQLRPDKKLSTAPVGRHRWRPSTPSAATGLGAKSLIARGQQGRLAAPNKTDFKARAVKKDKEGHYIMIKGLVQKESITIINIYAPNTGAPKFTKQLPLDLRNKTDSNTIIVGYFSTPLTALNRSSRQKVNKETMDLNYTLEQMDLTDIYRTFYPTTAEYIFYSSEHGTFSKTDRMIGHKTSLNKFKKIEIIPSTLPDHSGIKLEINSKKNLQNQTNTWKLNNLLLSDHWVNNEIKMEILKFFKPNDNSDTTYQNLWDTAKAVLTGKFIALNAYIKKSERAQVDNLRSHLKELEKXEQTKPKPSRRKEIMKIRAELNEIKTQKIQKINKSQSWFCEKINKIGRPLARLSKKGREKIQISSIRKK

SEQ ID NO: 44482 - protein, 197 aa, Homo sapiens
  DOMAIN (135)..(150): WILM'S TUMOUR PROTEIN SIGNATURE domain identified by eMATRIX, accession number PR00049D, p-value=6.492e-09, raw score of 0.00
  misc_feature (1)...(197): Xaa = X or * as defined in Table 2
APRPLALRFGPLPSNSGAQLASPSGSCTGLQVELPANSCTVRWQVSALGWSMGPGGPGAGGSADQGGSGGTGAHGGVGRFRHGGAAGPEPCPMGEVAKAPARNRAQRQWAGTAGGPCASSNSCXPGCXAPYCPGWWGQPAAPSAGPPSPRPPRTRAGPQAPWAAPVPAHASPPHLPASXGSPLRPGIQGSKTYQKSH

SEQ ID NO: 44483 - protein, 283 aa, Homo sapiens
  DOMAIN (184)..(199): WILM'S TUMOUR PROTEIN SIGNATURE domain identified by eMATRIX, accession number PR00049D, p-value=2.525e-09, raw score of 0.00
  misc_feature (1)...(283): Xaa = X or * as defined in Table 2
FLNLLSWQNLMLCGLKKKRKQFKDYEKKVKELNEERDKYRKGSVYIYTFGKEPTLNKVLDACDGKFQAIDFITPGTQYFMGCRWSCLPVLHCALAGLSPWVVDGTRRPGAVGSAGRGGSGGTGAHGGVGRFRHGGLQVRSPAHGEVLRPSEKSSAAQWAGTAGGPCASSTAADLGAKPLTARGGGPAGPPSAGPPSPRPPRTRAGPPSTVGSPGSPPTPLPPHLPASXGSPSGLGQPRKGLPQCSGGLKGWLLKHRQSGCPGRGGAQSERGLRGLPARCHLSR

SEQ ID NO: 44484 - protein, 198 aa, Homo sapiens
  DOMAIN (142)..(161): E-CLASS P450 GROUP II SIGNATURE domain identified by eMATRIX, accession number PR00464B, p-value=9.270e-11, raw score of 20.41
  misc_feature (1)...(198): Xaa = X or * as defined in Table 2
MAALLLVGASWLLLLLVGASWLLARVLAWTYAFYDNCHRLQCFQQPPKRNCFXGHLSLCGATEEDMRLMEDLVPLFRDVQLWWLGSFYPVLSLVHPTFTAPVLQASGGXPGFTTTMGLSFKRAKWQRLASEGSVRLEMFEHISLMTLDSLQKCIFSFDSHCQMVSPGSCTTSRGPRIPGALPTGGARAPENGDPKEIE

SEQ ID NO: 44485 - protein, 684 aa, Homo sapiens
  DOMAIN (489)..(534): Synaptophysin / synaptoporin proteins domain identified by eMATRIX, accession number BL00604F, p-value=8.541e-09, raw score of 5.96
  misc_feature (1)...(684): Xaa = X or * as defined in Table 2
RWSSVSFASGMPSAPCCWGHPQCPSAAQPTGPSWAGCRGLTMPNGQASPASXVPPGAFPFLCIKQPLWENLMTGVGKFSREAATLEGPTLPTRGVGPQCRQIADLPLERTEGWRGDGNPVRGVRQKRKQLVAGETAASLLPCQASGESCSVPXQARGPPVLFLPQWGRRWAKGCASRSCFXPDFRPSHAVPGAREGAGLAAAPKRVARLSPAVPPACCGLQGGSSSAAQALXPQLSGPRLPREKXGAPCWRGGPRCCPQNSAPETLEYVEPRGTGAPGTTHTGLPSPSQGCRGAEGWWGLPGLPGPRAGSSPQPRGRAWRPRARTPPPASWAAKGRGRPLAAGGLARPRDPGPGSGVAPAGSLRPHSSGRGWGRRRLRARPTGGNRGSEWPRRPPGYPGARPGAPSVPRPQPPAAXTRPLPVGCGARPFHPVPATVVPHAGPPSGMGRRRGRYPRPASARPAGRCGAGSAEPGRGTDKGGDGGEGKTKRGGGLGGGAGAPKAAPGAAEPMGGRGAGAGGGGARXGGGGGGGSGTTGSGSSSRPRPPRTRAPPETDPAPRPRPGLVRAAGGGAASGSGTGRGAEGCGVRAARGVPASLRAALARGAQARVLVSGPAPGWAEPRPAGGARGVGVWGPVLAGPGRGPRGGAGRGPRALSRGCAAXAWTPGRGAGQRGPGSGRGSGFS

SEQ ID NO: 44486 - protein, 951 aa, Homo sapiens
  DOMAIN (784)..(797): LUTEOVIRUS ORF6 PROTEIN SIGNATURE domain identified by eMATRIX, accession number PR00910A, p-value=5.179e-09, raw score of 2.51
MHPQERTAAATNAAIIITDGAATQMGVTSTPAPGHPRDGYYQGKDVSLLAHTHSFKISAAIEAKTTWVGMCRWGCKVALDVTFDVHQGKPEGAGRNKQIPFIQDFPFALRSEKRPSLPATISGKTLPLNTKTCPQLLQCKREGHSLQCLIWLQMVPQLGRLAVGGCHSNAWFPSKKAVIWEKFKHNLSGLVSDKGGKRTGKGLGECLLMMRKMSPALEALTTFDSSLQHHFPRTFPVSALEALNPGKPRQLVTPAPAQALAGASLSSWRRTLKILYPPWTPRLLLKQPLHLHDLLNRRLLPLELDAINTKRKMQNGKQSTILKPPLMMSLVRQQKERDGTSTSQAVLRCPGRQAKEMPASTWRGIQEPANCSSYPTHEALQTVLPPNSSDTPGTKIQSHQCLHWPPFNPGIKSKFVEMAHQAYLKSISILFLQPYLQLLSTCCSLASLVFLQLFEQATRSPSPEPLHVLCPPPGDLPTFHMTKRRRYLLFHQVSVYISSPQRICPNYRISSPQLKTICIKHLRFIHNIAGITMSLQVWAPGQLEMSSQRAAQSTELIARLFSTSSDPLRNGDIGIIAPGNFLLLQQLSHDLTIHATVCLSDSSASLQVPERQAQHVIHIFSSKCYIEDAQSTGNETVSVVKSTGDSNNGQDYALAKKSRLGEQISIHYVTRAVTAACPSISPRDQKSEAGLCLFGRCICNRRRGKDTDTWKRRPDQVEIKAERAMMRPQRTLTATRSWKRQGTDCPLEPPRKCSPADTLISDCGPQNCCSFKPSQQPPHCPPLPSASPSPSPPPLPACQEEIPKLKPKADTFLPYTSLNAGNPMRDIRIKSRMREQPKPSENAGASQKRGTWVLRAARRLRQSKLQDEIGGRHKIQVIKTILIKQVAVKKPAKSHQNKDGHESDLWSSSLLHSRQRHDSLRMPWQRQEVTLYGLKGEGINNLSLVQHIIKK

SEQ ID NO: 44487 - protein, 524 aa, Homo sapiens
  misc_feature (1)...(524): Xaa = X or * as defined in Table 2
MQSATSDAGSAPKKQKKVMTLQEKSGIAWYFFTAAQEWPNTPPKLRTCTESMGCCLLDCCCTGQGDWTRVTLYCRYPFILFGTNAWVANFERPRMNANSLLASPTGLSPYLRFGCLSCRLFYFKLTDLYKKTTLGSLPDAAMAFVNCHGAGGTVAVRTSRGHSRCHFGFGVSGTRYYHLTPQVVWERQQQKVDSLLGTQQMLEAQGREFPGPCIPLPVPTNAPAAKTTPQPPSPDLXPPNYLFLCVDGHRPICXEPKQNKSDSFTSQAXSQDGXYCGCSCRAPRPHGTSATIPMSSSCKRFQPSSPFCKGPYHFRFLEERPLASRPSIHPSCGSYWLRLGCVAVGRTGSRLNLQLHSASGLQALSKQRXRYCQSAGAGSPEPPRGGTRXCCREAAPGCRAGTCPSPAANLPSLRRKPGTCXPQNPPGRCGSCGASAAVLAETPARIRRSFPRARQSCPRTWMAAGAPGSSRRQGTKHVTXXSSTLEKQLDNPTATYFSVPTRKPVHXNQQKDLXVTGXLQIFHL

SEQ ID NO: 44488 - protein, 115 aa, Homo sapiens
  misc_feature (1)...(115): Xaa = X or * as defined in Table 2
VSGPPRXAPWCPCLAAPTGSTSHGSTARDSSTACKVSGGATCVSGCGPGLGVLGRGLSSTRSCCMPAGXCPSSKDTCEKSGGRTQPVPPFEWAAQDASLVRRCRILAHRPCRGTS

SEQ ID NO: 44489 - protein, 46 aa, Homo sapiens
MAFVNCHGAVRSVAVRTTRGHSRGQLGFGGIWLASLLQSVLSAKSL

SEQ ID NO: 44490 - protein, 370 aa, Homo sapiens
  misc_feature (1)...(370): Xaa = X or * as defined in Table 2
QSAAQWFWWPGRSASLGGAKGMQPPSLASWPHPRSIRCLRAPAPXQFTNATDPRFRSAPRRSGQQQPRGSSGPAALASPSPRQPNRAGALRTGGAGWATALDTWSCPRTRRRAPMGSCLXAAAQQCVTGATWPPPSAIAXQSAAQWFWWPGRSASLGGAKGMQPPSLASWPHPRSIRCLRAPAPCSGPSASSAAVQVACCCSLACCGPSRPASQGHLDGTPITSPETCTTSLWSPQRRRAAGPPKVVDIPDXRGSRELPSGRGAPNTTCIPYGGSPGAKWIEGCPAQRPSPPGLHPAMRASALLLMPFLQRRHRSATRLLLRPGSDCTGKKGKGFLAGPETKRQKRLCPSPKTLGRALGQQEALPANVRC

SEQ ID NO: 44491 - protein, 83 aa, Homo sapiens
RHSQAGLRENPQQEAWAIEDPYISPVFSVWSLSCTQHCQSMLWGQLDPHHSGSLADQSHVLARSYAGIFESLQCYNVAEGKRL

SEQ ID NO: 44492 - protein, 385 aa, Homo sapiens
MIKHPVVKQRASKVKLRRRLPSTSSSAPPLADSCVVTDLSIPSRLRGTTRLLENRSFSRGFVLICLEKNEALSSTQEKPLKPGRGSDSGACSLSPWWGSRQRTLAPGWRKGGVAVTQLRTRSCSLPAYYRAAEVPEWAPVVLGVQSAPLMRNPAEAAPRVKSAFPVLLSPTPGAANSRQSDSCSSTRKAHTFENRPSWIAPQRNLLQGTFLVGTDNPFRLLTSPHGRRQPGALEDGDSGAPGVPRSVCGAPRQVWAPTWPSNKRAIRLRAGSLSALYPHGSPLPAPPQAASRAERAPGKEQAERATHPKLPAADFHVALLDYVVKVGGHGQRDRAPAPRDPLSGVESRRPPPGLRGSRIQPAAASSSAAARSSPSSRRNLHLEPV

SEQ ID NO: 44493 - protein, 135 aa, Homo sapiens
  DOMAIN (4)..(23): POLYCYSTIC KIDNEY DISEASE PROTEIN SIGNATURE domain identified by eMATRIX, accession number PR00500A, p-value=7.231e-09, raw score of 5.70
  misc_feature (1)...(135): Xaa = X or * as defined in Table 2
SPPCGAPPPPVFCAPAPRAPAPPRAPPLAEAALPGFASAAGSAPARSGPAGAGXGSRSRPRARASASLAPASAGDHLGYPSATAAAAPASRPWLWRPSLNAARLGDPACGWQASQWAAGSAXRAGSQWAAGEARA

SEQ ID NO: 44494 - protein, 424 aa, Homo sapiens
  misc_feature (1)...(424): Xaa = X or * as defined in Table 2
FFFFHPLRSLLGDLGLHSQERSAPEIKPGALESTWSQARGAALRLAEARXRAAPAAGTACSAGGAASSPRXGSRATRRRRRGPTAPSRAATAPGRGAAASAAPAARPARTALMASARGPPTAASPAQALTRSAPGHLPPMSELGAVTALCESCPVTAAPRSGGGEAGGTLASEWGRTCRNYGPAPGIWPRPPLSAARPAAASPPARRIWSPPAPVHSAASPIGLRVAAPCSSGSAVPLRSRRASPPCGAPPPPVFCAPAARAPAPPRAPPLAEAALPGFASAAACRGKLRLALQGGLGRSGSRSRQEGPAAGSXLRTGKSWPSPPPGSAPLPLAQVLQALVEAGSRSRPRARASASLAPASAGDHLGYPSATAAAAPASRPWLWRPSLNAARLGDPACGWQASQWAAGSAXRAGSQWAAGEARG

SEQ ID NO: 44495 - protein, 111 aa, Homo sapiens
AVPLRNFRVDDLVLEYESVLCVKPDVSVYRIPPRASNRGYRASDWKLDQPDWTGRLRITSKGKTAYIKLEDKVSGELFAQAPVEQYPGIAVETVTDSSRYFVIRIQDGTGG

SEQ ID NO: 44496 - protein, 239 aa, Homo sapiens
  misc_feature (1)...(239): Xaa = X or * as defined in Table 2
TRAEVTQQKLSRFASPPPVLRLRSYVSPPAAPTADPRWRPSWSTSLRWVVKPNVSAYRIPPRASNRGYRASDWKLDYAXWTGRLRITSKGKTAYIKLEDKVSGELFAQAPVEQYPGIAVETVTDSSRYFVIRISDGTGRSAFIGIGFTDRGDAFDFNVSLQDHFKWVKQESEISKESQEMDARPKLDLGFKEGQTIKLCIGLCSKPGTTAIQLGPVLNGIGRTLRTDLRNKNDLEGTNL

SEQ ID NO: 44497 - protein, 149 aa, Homo sapiens
  misc_feature (1)...(149): Xaa = X or * as defined in Table 2
TDQGVGSPHCPRFQQGPPRSPRFQQRSPHSPDSSRGPPHSPRFQQGSPHTPDSSSGPPYSPDYSSGHPTPHTSQQGIPCXDGHGWLPCGPVFLWSEAPHLNPGLGVWGQPRAPALPGNSAESKLWPHDRPARPETPGAGTAWAHQALRV

SEQ ID NO: 44498 - protein, 43 aa, Homo sapiens
HQESIYGAGIFQSYFNIEWCTGYCFAASFDSKNTPPRKNRPTK

SEQ ID NO: 44499 - protein, 68 aa, Homo sapiens
  DOMAIN (53)..(68): WILM'S TUMOUR PROTEIN SIGNATURE domain identified by eMATRIX, accession number PR00049D, p-value=5.119e-09, raw score of 0.00
  misc_feature (1)...(68): Xaa = X or * as defined in Table 2
SFMDFRFVLLFFHLVPNPKXRPVSSPPGSKLLVPPWGPKTPVPPHPSPPPPAHGEPGLPPPPPPPLPH

SEQ ID NO: 44500 - protein, 42 aa, Homo sapiens
ILSQTPMRTEASPGRARVWDRAMAGQGHNQVCAMARSNTVPR

SEQ ID NO: 44501 - protein, 121 aa, Homo sapiens
MAGPGPQPGLCYGQVQHSAQCPNLSSSMGIAAPESAHNPPSLPWAVQPCTVLPTSSPNAGNDNLDSAPNPPHTVKGAALDTPCHTTLVMLQSLSLPPPTTVRQASGPQALAPSSQAWSSSR

SEQ ID NO: 44502 - protein, 60 aa, Homo sapiens
EQVGTGLERRRGSPMSKDWPPPHLTPPQGPCGIPVQSLSPPSFSLWTQEFKVSKEVHCSS

SEQ ID NO: 44503 - protein, 314 aa, Homo sapiens
KSSEPDLSHSFIFCSPNFPPSSSLKRPHFQSSILACVFCITADSSRAPCVLRVCDGFAGLTRSSAPSSKEKPCGFSLPEFTPLAVSFPQAALCSLGTVSCLRPRPQLTPSWECPVLLAGAVCPGLPCAAIGCPWAGEEGCPGATSQLDQVSWPSLQEAPEVLWPCLDSWGWFWAPSTVIPLMASPRFGFMGRSQQPVLINHLIKEPKAKFSNKNHSIRCCQGQRKWRRGNAAGMCCQPQIPGKGEVKTEFQPVSNRSVNYGCTMHFQETLWTPRLGLGDGDSNNNNNNNNNNRITANPGKEAEKPEHPHLLVKM

SEQ ID NO: 44504 - protein, 117 aa, Homo sapiens
  misc_feature (1)...(117): Xaa = X or * as defined in Table 2
THQGARGCTHARVSVREMRTRRGRWATGMRVPAPCSSVHTTAVQRQQVADQLQTTAELSMEILNKWDQDPEAFVRKVATSYETWISXYYPEDKAQSKQWLPRSGSGATLYSATNQYP

SEQ ID NO: 44505 - protein, 57 aa, Homo sapiens
FQAVQLSIAGWWFTRSYRLIFSAGRLSRPGVRSSSDQFHFLCSGRPSSFRSWSGTTC

SEQ ID NO: 44506 - protein, 408 aa, Homo sapiens
  DOMAIN (168)..(181): PROTEIN ZINC-FINGER METAL-BINDI domain identified by eMATRIX, accession number PD00066, p-value=9.308e-15, raw score of 13.92
  misc_feature (1)...(408): Xaa = X or * as defined in Table 2
LLVSCAILLSVSFLHSSSFVRSRSNRDSPACVDATYRGCSCQGEGVCGEACSCFPDLNQPQGVHAGEGVLPCSGWEDTFGKNTCLVSYQQIPNKRRPCTCEECGKAFGQRSHLVQHTSEKLYACQECGCTFSNNSSLVKHWHVHTGEKPYMCGHCGKCFRESSSLAKHQRVHTGEKPYVCGESTHLVQHWXFHTGEKPFACHRCSKAFADFSALLACHGTYTGERPYECRVCCKAFSPSLSLAEHIRCHTGEKLYACQECGKAFSHSSSLSKHQQVHTECGKAFSQGSYLTQHLKIHSGEKPYIRGEHPYACGKCGKTFSHSKFLTQHEQVRMGEKPFMCGDCGRAFMQTSSLALHQRTHNGEKPYKWNECGKSCIQMSHLTEYYQNLPEKGSKDPHTDATVHSPVMD

SEQ ID NO: 44507 - protein, 81 aa, Homo sapiens
  misc_feature (1)...(81): Xaa = X or * as defined in Table 2
PPFRKQQAQHRNKTVLVSRSQPVPVTVPEPSAXRSTPEGPRRAGCDPRPXPCPAGPELPAQMKVLAIEQLLSLHFKKALLF

SEQ ID NO: 44508 - protein, 156 aa, Homo sapiens
  DOMAIN (14)..(58): Synapsins proteins domain identified by eMATRIX, accession number BL00415N, p-value=4.641e-10, raw score of 4.29
  misc_feature (1)...(156): Xaa = X or * as defined in Table 2
LCSLSSLPPPPPPPPFPPPPPPPPPPFPPPSPVPLPPSPRSPPVSPPPPHSFQGRSPPSELGSSAEPWLRPGTWVXPPPLTFSQQEAASSAQKXNCPGESPQPVPVTVPERQPDAAPNHSLLLPGQQCFWCQGPHPPYWMGPVDASSSGFLSQSFY

SEQ ID NO: 44509 - protein, 333 aa, Homo sapiens
  DOMAIN (141)..(187): Hexokinases proteins domain identified by eMATRIX, accession number BL00378E, p-value=7.818e-19, raw score of 22.92
  misc_feature (1)...(333): Xaa = X or * as defined in Table 2
XAGITGLIGALVLSVGIYAEVERQKYKTLESAFLAPAIILILLGVVMFMVSFIGVLASLRDNLYLLQAFMYILGICLIMELIGGVVALTFRNQQLLLRQQVLSHTLGCADLSDGPGSGPVKMFMGVPVIPAQPPELLASLRLSRGYGLVLSWLEPRYEKMISGMYLGEIVRNILIDFTKKGFLFRGQISETLKTRGIFETKFLSQIESDRLALLQVRAILQQLGLNSTCDDSILVKTVCGVVSRRAAQLCGAGMAAVVDKIRENRGLDRLNVTVGVDGTLYKLHPHFSRIMHQTVKELSPKCNVSFLLSEDGSGKGAALITAVGVRLRTEASS

SEQ ID NO: 44510 - protein, 760 aa, Homo sapiens
  DOMAIN (550)..(599): Formate--tetrahydrofolate ligase proteins domain identified by eMATRIX, accession number BL00721E, p-value=5.193e-19, raw score of 13.46
  misc_feature (1)...(760): Xaa = X or * as defined in Table 2
WHFAKLSRNTQDHTRPTLGAAQAVPATGQPAAPGPAGAGPEWVPFLAVYKEQLVRNDSVLKVFFFPPIFYREGWVCCSVVESHLQEGFVWLFSLQLXPPKLRSLFSLSYCLSPSDIEISRGQTPKAVDVLAKEIGLLADEIEIYGKILVSSAGFAXVVWEILXNSLSPPELRITPTPLGEGKSTVTIGLVQAVSLGLCPSWQLYLVTPALQPGQQSETLFLKINKXKDILFLXFNLHLTGDIHVVISCELSKFMDNXLLCGLIFVLCFFRGIILVTLCFLFLLKLLTFFLLNHXKLGINKTDPIRTMPDTHQVAGPYLSTDDXSVLFQXSPAPCGNGHPTGTVADHYLCLGWYQAQFDIAVASEIMAVLALTDSLGREVPRGXPLPGXYFVRNLMFFSHLPQIDLGFHASVCLLGFXFAFSLLXGTPVFVHAGPFAADRDLCPYQFLLCQTHIYKIHVIMAEYFQRYKLMMYAKQTSPLCDLEQAISLSGCVPCRHSHLKNEKFSCTGCXQYLPKLSLPNSDPLTLPFSADYGFKFESNHANHSGDCQNLPLFLEDNSTYSTCFPTVTEAGFGADIGMEKFFNIKCRDVVLSFRSVVXAFLLLAVXLGRFGGRQYTGVWVLLFSFLQNIQLVADGVXMVSLSLKTXLNGYRCKTTNIFFTRTDTRAEIDLVCELAKRAGAFDAVPCYHWSVGGKGSVDLARAVREAASKRSRFQFLYDVQVPIVDKIRTIAQAVYGAKDIELSPEAQAKIDRYTQQGFGN

SEQ ID NO: 44511 - protein, 194 aa, Homo sapiens; identical to SEQ ID NO: 38086

SEQ ID NO: 44512 - protein, 418 aa, Homo sapiens; identical to SEQ ID NO: 33996

SEQ ID NO: 44513 - protein, 125 aa, Homo sapiens
  DOMAIN (69)..(85): AUXIN BINDING PROTEIN SIGNATURE domain identified by eMATRIX, accession number PR00655E, p-value=9.000e-09, raw score of 8.06
  misc_feature (1)...(125): Xaa = X or * as defined in Table 2
GNLWSVDLRPGTPLRQNFRGTIRQQHSRFTKNHCSQTPLLIPRQTGSGVDLSKLQQTCSXGSCLVCTIDLANAFFSIPVHKAHQKQFAFSWQYTFTVLPRLTWLQPCXVPNLPAAETNTEPSNGT

SEQ ID NO: 44514 - protein, 172 aa, Homo sapiens; identical to SEQ ID NO: 37935
  misc_feature (1)...(172): Xaa = X or * as defined in Table 2

SEQ ID NO: 44515 - protein, 287 aa, Homo sapiens
  DOMAIN (223)..(240): RNase H domain identified by eMATRIX, accession number PF00075A, p-value=9.714e-09, raw score of 14.44
VRVLSPVEKELKLWKNTHKLLSYPTVGAAVTQLQNLTAMGVIGSHGARGQVVALNRQRQGDLQPFTRVTVHWGKGNMQIFGGLLDTGSELTLIPGDPKHHCGPPVKVGAYGGQVINGVLAQVQITVGPQTHPVVISPVPECIIGIDILSSWQNPHIGSLTGIMVGKAKWKQLELPLPRKIVNQKPYCIPGGTVEISATIKDLKDAGVVIFTTSLFNSPIWPVQKTDGSWRMTVGYRRLNQVVTPIAAAVPDVVSLLEQINTSPGTWYAAIDMANAFFSIPVHKAHRK

SEQ ID NO: 44516 - protein, 507 aa, Homo sapiens
MDGSSCVFIDCLWLIQAAEPSKMEETAHGKLPSKSSVLVPYWEWSWRSPAAVAVSWPHQVSTVRMRALIGKEWDPATWNGDMWEDPDEAGDTELINSDEHFWPEVTASPSPVVATSSPPPMLLSAFPPLSEEINPALPEAVARQNNVDSPQKPPPTPLFASRPITRLKAWWAPRVSECIIGIDIFSSWQNPCIGSLTGRVRATVVGKAKWKPLELPSPRKIANQKEYHIPGGIVEITATIKDLKDAGVAIPTTSSFSSPIWPVQKTDGAWRMTVDYCKLNQVVTPITAAVPDVVSLLETHINNAEASRQQISAFKVQVEMSLNLKSYTWLKDQLTVRENKDIFGDLKTEKVFYTEESCWKRKSIRAGRMARRRAPGSGHSGVPGGRWRDPTGFHFSSGEWQTSGGTTLQKKMKRRLHRRNRVIEWLETPENVVTPVLAHDLILTAAIFRTYHVKFRDAHAEMHMLTPRDLGCHSQPRPVGEWTPGIIYQLDLLSLQLSTPHGRRSTQ

SEQ ID NO: 44517 - protein, 66 aa, Homo sapiens
DPKYQCDPPVKVGANGGQIINEVLAQVQLTVGPKTNGYWRMTVDYHKLNQDVTPIVAAVPDVVSLL

SEQ ID NO: 44518 - protein, 122 aa, Homo sapiens
WYAAIDLASAFVSIPVHKAHEKQFAFSWQGQQYTFTVLPQGYINSLALCHYLVGRDLDRFSLPQDIILVHYIDDIMQADLATATAECPICQQQRPILSPRYGSIPQGDQPATWRQVDYIEPL

SEQ ID NO: 44519 - protein, 184 aa, Homo sapiens; identical to SEQ ID NO: 37049

SEQ ID NO: 44520 - protein, 242 aa, Homo sapiens; identical to SEQ ID NO: 38082
  DOMAIN (24)..(35): RNase H domain identified by eMATRIX, accession number PF00075B, p-value=3.077e-09, raw score of 12.56

SEQ ID NO: 44521 - protein, 211 aa, Homo sapiens; identical to SEQ ID NO: 35439
  DOMAIN (33)..(45): RNase H domain identified by eMATRIX, accession number PF00075C, p-value=2.038e-09, raw score of 11.58

SEQ ID NO: 44522 - protein, 88 aa, Homo sapiens; identical to SEQ ID NO: 33995
  DOMAIN (25)..(41): AUXIN BINDING PROTEIN SIGNATURE domain identified by eMATRIX, accession number PR00655E, p-value=7.333e-09, raw score of 8.06

SEQ ID NO: 44523 - protein, 415 aa, Homo sapiens
  DOMAIN (77)..(89): RNase H domain identified by eMATRIX, accession number PF00075C, p-value=8.630e-10, raw score of 11.58
KTDGSWGMTVDYHKLNQVVTPIAAAVPEVILLLEQINTSPGTWYAAIDLANAFFSISLHKAHQKQFVFSWQGQQYTFTVLPQGYLNSPAFCHNLIQKYLDHFSPPQDITLVHYIDDIMLIGSSEQSCKHTGLIAIKWVMAQQQHCIIRWKCCICDRAQAGPEGTSKLREEVAQMPMVSTPVTLSSQPQPALMIASWRVPYDWLIEEEKTRAWFTDCSARYAGSTRKWTAAALQSLSRTSLKDSSEGKSSQWAELREVHRVVHFAWKKKWPDVRLYTDSWAVANDLAGWSGTWKKLDWKTGDKEIWRRGMWIDLSEWSKTMKIFVSRVSAQQWVTLAEEEFNNQVYRMTCSVDTTQPLSPATLVITQWVHEQSDHVGRDGGYSWAQQHGLPLTKADLATATAECPICQQQRPTQSL

SEQ ID NO: 44524 - protein, 279 aa, Homo sapiens; identical to SEQ ID NO: 38084

SEQ ID NO: 44525 - protein, 177 aa, Homo sapiens
  DOMAIN (68)..(79): RNase H domain identified by eMATRIX, accession number PF00075B, p-value=3.077e-09, raw score of 12.56
MYTLKSLQALRGEVESVTHEEVHTLKKNCFEFSNLYEQPIWRTGAVPDVVSLLEQINTSPATWYAAIDLGNAFFSIPVHNTHQKQFAFSWQGQQYIFTILLQVYINSPALCHNLIGRDFDCFLLLQAITLVHYIDDIMLNGSNTLDSWVRNLHARGWKINPTKIQGASTSVKFLGIQ

SEQ ID NO: 44526 - protein, 347 aa, Homo sapiens
  misc_feature (1)...(347): Xaa = X or * as defined in Table 2
MTVDYHKLNQVVTPIAAAVPDVVSFIEQINTSPGIWYAAIDLANVFFSIPVHKAHQKQSVFCWQGQEYTFTVLPQVHINCPALCHNPILRDFDHFSLPQDITLVHYIDDIMLIGPVXNMLLHLVPPTTKKETQHLEVLFGFWRQHIPHLATPSSPNGPMNKVTMMAANVGYAWDQKHGLPLTKANLVMAIGECSVSPAAETNTEPSIWHHSSGQDSQVQESKGGNGSGTTHHHPXXSTSKIFASCSHDITFCWPRGLSSRGRNAATRRHNNNFIKPEVKIAFWTLWDPPTFKSTGXERSXSVGWWDXHELPRXNQSTTPQGSVSIIPHGQPPHQLFGVAKARTFGIT

SEQ ID NO: 44527 - protein, 112 aa, Homo sapiens
KADGSWRMTVDYCKLNQVVTAIAAAIPDVVSLLEQINTSPDTWYAAIDLANALFSIPVHKGYINSLALCHNVIWRELDCFSLPRDTTLVHYIDDIMLIGSSVQEVENKLDLL

SEQ ID NO: 44528 - protein, 627 aa, Homo sapiens
  DOMAIN (79)..(95): AUXIN BINDING PROTEIN SIGNATURE domain identified by eMATRIX, accession number PR00655E, p-value=9.000e-09, raw score of 8.06
DFQPFTRVTVHWGKGNDQTFRGLLDTGSELTLIPGDPKHHYGPPVKVGGLWSSAAVADVVSLLEQINTSPGTWYAAIDLANAFFSIPVHKAHQKQFAFSRQGQQYAFTVLPQGYINSLALCHNLIWRDLDGFSLLQDITLVHYIDDILLIGFSEQEVANTLDLLSTYQVTQKTASFEWGPEQEKALQQVQAAVQAGLPLGPHKLADPMVLEVSVADRNADWSLCGLAGWSGTWKKHDWKIGDKEIWGRGMWMDLSEWSKTVKVLVSHVSACQWVTSAEEDFNNQVDRMTCSVDTTQPLSPVSLVIAQWTHEQSGRSGKDGGYTWSQQHGIPLTKADLGMATAECPICQQQRPTLSPRYGTIPWARIHGSRNQGVEVEVAPLTITSRDPQEKFLLPVPATLRSAVLGVLVAEGGTLPPGDTTTIPLNWKLRLPPGHFWLLLPLNQQAEKGVTMLAGVTDSDYQDEIHLLLHNGDTKLEPREAGQEWAFLEKRPPFLLDHGQVIKPSLLTGGKAFQPVQWWESPPALPAQSFPIEEECENDAQVREAYYKTASYLSFPGANMNEDPERGEGKEKLPKTDNGRKETTGNNSPPTVSPRFLNHTLRNSVYPAHTFVINSDENKLSLNYANV

SEQ ID NO: 44529 - protein, 475 aa, Homo sapiens
  DOMAIN (260)..(287): COMPLEMENT C1Q DOMAIN SIGNATURE domain identified by eMATRIX, accession number PR00007A, p-value=2.723e-13, raw score of 19.33
  misc_feature (1)...(475): Xaa = X or * as defined in Table 2
MKLMETLNQCINAGHEMTKAIAIAQFNDDSPEARKITRRWRIGEAADLVGVSSQAIRDAEKAGRLPHPDMEIRGRRRAEDVFPPVIGVAAHKGGVYKTSVSVHLAQDLALKGLRVLLVEEDRWILRMTVDYCKLNQVVIPIAAAVSDVVSLLEQINTSPGTWYAAIDLANAFFSIPVHKAQQKQFAFSWQGQQYTFTVLPQWYINSPALCHNLIRRDLDCFSLPLDITLVHYIDDIMLIGSXAPVPSLVSFSAGLTQKPFPSDGGVVLFNKVLVNDGDVYNPSTGECLNGTGTVSSSYPNAASRGLREDATLEQMPEWACTPLPDSVGFHVERVPARGLQAAWAIRDAEKAGRLPHPDMEIRGRVEQRVGYTIEQINHMRDVFGTRLRRAEDVFPPVIGVAAHKGGVYKTSVSVHIDQDLALQGLRVLLVEGETNCFFEKAPLSKLTPGPFSTTSDSFFEFSDESSISHASVRDX

SEQ ID NO: 44530 - protein, 453 aa, Homo sapiens
  DOMAIN (6)..(36): kw TRANSCRIPTASE REVERSE II ORF2 domain identified by eMATRIX, accession number DM01354R, p-value=8.948e-17, raw score of 8.50
  misc_feature (1)...(453): Xaa = X or * as defined in Table 2
MIISIDAEKAFDKIQQPFMLKTLSKLEETASPSPVVATYTPQPMLPSAFPPLSEEINPVLPETTVMASPEAVTRQDNVDSPQKPPPTPMFASRPITRLKPRRAPSEEGIQRLKKIGMVEWISHFRPTPLSMEGPEHILLTNTLLNRYVKAAPASLKSPLTALLFMSDLTVGTTFSQLQNLNTMGIFGSSCDRSQVAALNHQRQVPECKIVIDILNIWRIPHIGSLTGRVREIMVGKAKWKPLEQPPPRKIVIQKQYHIPGAITEISATIEDLKETGVVILTTSPFKSSIWPLQKTDGSWRMTVNYHKLNQVETPIAAAVPDVVSLLEQINTSPGTWYAAIDLVNVFFSIPVYKAHQKQFAFSWQGQQYTFTFLPQGYINSPDITLVHYIDDIMLIGSSEQEVANTLDLLPARVASWGVPYDQLTGGREDXGLLHRWSCRICRHHPQGSWIQES

SEQ ID NO: 44531 - protein, 599 aa, Homo sapiens
  misc_feature (1)...(599): Xaa = X or * as defined in Table 2
MRKCGKPQFKLGQTNKANSRIQEELIHSKSLIEQEGEKPVQFSAFHRMWQPADSQCDIIDSADIWADPLVRHREIITGSGGINRRRTRGGRGRGGEAAGGAENCGSREERERAGVGTAVTQLQNLNTIGIIGSRGGRGQVAAINHQRQGGHSYCKGQQKQNSNQNSVTHVELWHWLINHSVPRSEIDRKPTTFLLNLYKQKTSRDLWPFTRVTLHRGKRNDQTFQGLLDTGSELMLIPEDTKHHCGPPVKVEAYGGQVINGVLAQIQLTVGPVGSGTHPVVIYPVPECIIGIGILSSWQNPHIGSLTSRKTDGSWRMTVHYHKLNQMVTPIAAAIPDVVSLLEQVNTSPGSWYAAIDLANAFFFIPVHKAHQKQFAFSWQGQQYTFTVLPQGETLVNFSLPQDITLFHYIDDIMQIGSSDQEVANTLDLLPRKSTTPSGLYGFWRQHISHLGLLLTPIYXVTQKAASFEWGLEQEKALQQVQATVQASLPLGVYDPADPMVIEMSLSDPSSHKVGCAQQHSIIKWKRYVCDQAXASPEGTSXLYCTSFIMEKEEVCLSLEQTLTLDMGLPILHAMLLWIHLWIHGLPYPSSWYSTQQCL

SEQ ID NO: 44532 - protein, 395 aa, Homo sapiens
  DOMAIN (249)..(265): AUXIN BINDING PROTEIN SIGNATURE domain identified by eMATRIX, accession number PR00655E, p-value=7.222e-09, raw score of 8.06
  misc_feature (1)...(395): Xaa = X or * as defined in Table 2
NRFVRAAPASLKRSAGIGLLCMPDLTVGIVVTQLKNLNAMGITGSELTLIPGDPKXHFGPPVKVGAFGGEIVNKYLAQLGLTDDPVGPRTHPVAIFPVPECIIGIDILSSLQNPHIGSLTGRVRAIMKGKAIMKGYYEGKGKAKWKILELPLPRKIINQKQYRIPGGIVEMSATIEELKYAGVVIPIPTTFPLNSPIWPVRKTDGCWRMTVDYCELNQVVTPTAATVPDVVSLLEQINTSPGTWYADIDLANAVFSIPVHKAHQKQFAFSWQGQQYTFTVLPQGWTVNSPALGHNLIGRDLDRFSFPRDITLLVHYVDDIMLIGSSEQEVANALDLLVFSDHLAIKWVMHSSIASSSGSGICVIRLKKVLKAQPAPMASWGVLYDQLTEEEKIRA

SEQ ID NO: 44533 - protein, 116 aa, Homo sapiens
  misc_feature (1)...(116): Xaa = X or * as defined in Table 2
MAESHLLQWLLLLLPTLCGPGTDPAPRCARSPGRGVIRIQAPGAREGPTLRTQVAVAHRFRFDLVSVATRGRRAPRPRSAARPAPPLLFLRGRWHCGRSAGREAGSGRGGGGSSDX

SEQ ID NO: 44534 - protein, 77 aa, Homo sapiens
EPLLLLYLVSKIRTSGSNPLRSTFLSRSRSISKNGDPGAASAACSRTARGPLSSGSNSRRRTEAKRWLRQQQHCEAF

SEQ ID NO: 44535 - protein, 115 aa, Homo sapiens
MRRRNRKTRRYGVLDTNIENMELTPLEQDDEDDDNTLFDANHPRRNTTYKGCEGPLQGELQTTAQGNKRGYKQMEEHSMLKGRKNQYRENGHTAQDCCGIPEKEQLRDSNMDFTE

SEQ ID NO: 44536 - protein, 129 aa, Homo sapiens
  misc_feature (1)...(129): Xaa = X or * as defined in Table 2
TKRAPCSPAAGSRGRARSLALLTLYHGHYPALPPGPTPAQQPGRGLAEAAEPRGSEGGNGSNPCGRAXDGRSRREGRGRLGGWRPCCEPQPWRQAHDPAGPDRVDGGERRGAGVLRGQDGQDEKKKPKD

SEQ ID NO: 44537 - protein, 810 aa, Homo sapiens
  DOMAIN (183)..(194): PROTEASE POLYPROTEIN HYDROLASE ASP domain identified by eMATRIX, accession number PD00302A, p-value=9.413e-09, raw score of 6.33
  misc_feature (1)...(810): Xaa = X or * as defined in Table 2
MAVLQPSRHRLRPQLGLEPDNWHSQQDEVSSVATARAVVPSGRGAAWMGPSGNIGGSGLVSHECGEGTGAAGSTQLQEGMHFCRQSRWAFLTALCEVYTQSLQDTVQWLQLCQWSAQGQDDHTLIEWLMGATWTVWNDAREIPETGTGQDAWLCGSWGVDDQRPHVELAIHCSPTNVQRVLALVDTGADCSLVFGNPVRKPDGTWQMTVDDWELNKVTPPLHAAVPSIMDLTDHLTMELGQYHFVDYVHSPTICRGLVAMELAAWKCPKGVLLFHYIDDIMLTSDSLADLKVAVPLLWQHLAACGWAINKSKVQWPGLSAKFLGVIWLSKTKAIPEAIIEKIQAYPRPTTMKQLQTFVGLLEYWRPFVPHLAQMIKPLYGLSKKGATWDWDNEAGTDLLAAKWAIQQTQALQVIDQGCPFELDVHVTTDGFGWVLWQRMECFRTPVGFWSQLWKGAELQYSLIQKELAAAYAALQAYETVTDWATVIVQMSYPIVGWTGTAQTTTLAKRGAYLEQQSMLTTTPLAAELQEALGPIVLMEDKAMGPEAPLDPEPSLLKKGYPLVPDGAWYTDGSSQGAAAAWTAVAIQPITDTIXFDTGCGQSTQWAELRVVEMDILEACQKCPACAQAYLRQRQLPNVTQQVTVGQMPLTRWQIDYAEPLPKLQGYTYALMAADIATGLLLIYPCRLANQQHSIRALQHLSALYGLPLAIKSDRGTHFTGHQIRHCRLACSNNIMDWAHTYTELTNVSNCWICTALPAAAADSLPWLVHPASVQNRTLLKTWGPTDNGWDATWRLWIGGVTKPMASLPPG

SEQ ID NO: 44538 - protein, 79 aa, Homo sapiens
  DOMAIN (32)..(79): SERUM PARAOXONASE/ARYLESTERASE P domain identified by eMATRIX, accession number PD02637G, p-value=1.000e-40, raw score of 13.82
YIYVADILAHEIHVLEKHTNMNLTQLKVLRIQNILSEKPTVTTVYANNGSVLQGSSVASVYDGKLLIGTLYHRALYCEL

SEQ ID NO: 44539 - protein, 69 aa, Homo sapiens
  DOMAIN (15)..(46): SERUM PARAOXONASE/ARYLESTERASE P domain identified by eMATRIX, accession number PD02637E, p-value=6.700e-12, raw score of 11.92
  misc_feature (1)...(69): Xaa = X or * as defined in Table 2
VVYYSPNEVKVVAEGFDSANGINISPDDKYGPLXNIFIFLQLWCWPNSLLCFLCQCENSFLDIYGILYI

SEQ ID NO: 44540 - protein, 25 aa, Homo sapiens
MAPPTELLARPERGSAPGSRAMGRL

SEQ ID NO: 44541 - protein, 271 aa, Homo sapiens
  DOMAIN (177)..(207): Class II histocompatibility antigen beta domain proteins. domain identified by eMATRIX, accession number PF00969D, p-value= 7.698e-29, raw score of 14.02
  misc_feature (1)...(271): Xaa = X or * as defined in Table 2
VLVFLTAALFILPTFSNSMMILQVSGGPWTVILRRGVLLGVAPPPSLPALPENSVYQERQECYAFNGTQRVVDGLIYNREEYVHFDSAVGEFLAVMELGRPIGEYFNSQKDFMERKRADQLPDCRDPLMPDXGVWISPLGQQVPNLTAQKTLQHLPSKKEPQQHHDLLVYHVTDFYPDSIQVRCFLNGQEETAGVVSTNLIRNGDWTFQILEMLEMTPQQDRTXAGVQLLEVTLNLSLFFLEAQSDSVQSKMLTGARGLFINYLQLNLCTP

SEQ ID NO: 44542 - protein, 189 aa, Homo sapiens
  DOMAIN (29)..(65): Class II histocompatibility antigen beta domain proteins. domain identified by eMATRIX, accession number PF00969B, p-value= 1.000e-40, raw score of 9.97
QGRATPENYLFQGRQECYAFNGTQRFLERYIYNREEFARFDSDVGEFRAVTELGRPAAEYWNSQKDILEEKRAVPDRMCRHNYELGGPMTLQRRVQPRVNVSPSKKGPLQHHNLLVCHVTDFYPGSIQVRWFLNGQEETAGVVSTNLILNGDWTFQIVVMLEMTPQQGEDVYTCQVEHTSLDSPVTVEW

SEQ ID NO: 44543 - protein, 559 aa, Homo sapiens; identical to SEQ ID NO: 37914
  DOMAIN (526)..(553): MARCKS family proteins domain identified by eMATRIX, accession number BL00826C, p-value=3.813e-09, raw score of 7.63

SEQ ID NO: 44544 - protein, 143 aa, Homo sapiens
  DOMAIN (86)..(98): RNase H domain identified by eMATRIX, accession number PF00075C, p-value=2.038e-09, raw score of 11.58
RPPAFYQGNCHWGKGNDQTFQGLLDTGCEQTLIPGDPKHHCGPPVKVGAFGGQAGIDLANAFFSIPVHKAHQKQFVFSWKSQEYTFTVLPQRYINSPALSHNLIRRELDHFSLLDDITLVRYIGDIMLIGSSKQEVVNTLDLL

SEQ ID NO: 44545 - protein, 203 aa, Homo sapiens; identical to SEQ ID NO: 36487
  misc_feature (1)...(203): Xaa = X or * as defined in Table 2

SEQ ID NO: 44546 - protein, 134 aa, Homo sapiens
CSFQGTQNIIVVLQLNRGLTEGYIISPALCQNLVCRDLDHFSLLQDITWVRYIDYTMLIGSNPMVLEVSVADRDAIWSLWQAPIDELQQRSLGFWSRALPSSADNHPPFDMHLLACYRALIETECLTMGHQVTM

SEQ ID NO: 44547 - protein, 966 aa, Homo sapiens
  DOMAIN (191)..(242): Neuromodulin (GAP-43) proteins domain identified by eMATRIX, accession number BL00412D, p-value=4.306e-09, raw score of 16.54
MSVEARKDSFITQIIQSKKSAVSIGTASGLNRATSSGHLHGLAAPQLEEAAAQAGGGGSQEGWKWGGKKKGAGSRVALIREGNGSAGIWVTLIVGFAEAQRKGFPAGSPQLDYPISNPEGRETAERMEVKNRRNWDSRCLVPIPMHLLNRLTCLDEAAQFAFVTTMNDFGKGTHPLHNYKMRLWPSPSWEIGETPCQKKEEEGEGGGGGGRGEEEEEEEEEEEEEEIKSTVCSRDSHEKKHLKNPDAGDECLHSQFPLLNTLYFKYLEWDQLEQYQYILHRDADPDYQPAEPMTASVSLQTLYTRSGDHGQTRPSQLALRSIVGVLSESEFQASLQGQFVFWISDSKSSVQLIAFSVQDVLSKSHHLSANPDAGLFTYSNLSVFLGIFQIPYQRKPKCVDRFPFPPFPSRRFWLKLATVFNKPDVISHPGFWSLAQSTHFHQLSPVPGWSEFSTRDGSLTVWSTRNHEKEAQQSLLSMEPALGVVLLQLLFAIDDRSLLSGDMENTESPWHELFRDLCKINAFDTPDSSLMRGKEFSDSIHNTFDHMWRTKEHNEAGWLFLSSVDKVMTENDELRNSIFRLQKQILSLKSAKIALSESFISYRERTEIVEKQTEALIMVSVHWGKGNDQTFLGLLDTNSELSLIPGNPKHHCGPPVKVGAYGGEGYITSLALCHNLIRRGLDSFSLPQNITLVYYIDDIMLIGSSEQEVADTLDLLTASFEWGPDQEKALQQVQTAVQAALPRGPYDPADPMVLEVSVADRDAVWSLWQAPIGESQHGPLGFWRKALPSSADNYSPFERQLLACYWALVKTEHLTMDHQVIMRPELFIMNWVLSDPSSHKVGHAQQHSITKWRWYACDQAPAGPEGTSKLHEEMAQMPMVSTPATLPSLPQPALMSSTVVLYDQLTEEEKARAWFRDGSVRYAGNTRKWTAATLLPLSRTSLKGSGEGKSFQWAELLAVHLVVHFA

SEQ ID NO: 44548 - protein, 860 aa, Homo sapiens
MTKTPKAMTTEAKIDKWDLIKLKSFCTAKETIVKVNKQPTEWEKIFTIYPSDKGLISRIHKELKQIYKKKSNNPIKKWAKDMNRHFSQEDIYAAKRHMKRCSSSLAIREMQIKTTMRYHLTPVRMAIIKKSGNNRMQGEEHGFIPALSHRHCSHIHLVMRDTHLSCEAHRTHSRATDLFRTHLESWCVQSEHLQPADNLLWDLVSMVTVHWGKGNDQTFQGLLDTGSELTLIPGDPKRHCGPPVKVGAYGGQVINGVLAQVQLTVGPKTDGSWRMAVDYHKLHQVVTPTVAAVPDVVSLLEQINTSLGTWYAAIDLANAFFSILVYKAHQKQFAFSWQGQQYAFTILPQGYISYLALCHNLIGRDFDCFLLLQAITLVHYIDDIMLNGSNTLDSWVRNLHARGWKINPTKIQGASTSVKFLGIQWPYDPADPMVLEVLMADRDAVWILWQAPIGESQQRPLGFWSKALPSSADNYSPFERLLLACYWAFVETERLTMGHQVIVRRELPIMNWMLSDSSGHKVGHAQQHHEIEVIFVYHVSAHQWVTSADEEFNNQVDKMTRSEDTTQPLSSATPVITQWAHEQSGHGGRDGGYTWAQQHGLPLTKADLTMATVECPICQQQRPTLSPQYGTIPWGDQPSTWWQVSYIGPFPSWKGQRFVLTGIGTYSGYGSAYPARNASAKTTTCGLKECLIHHHGIPHSIASDRGTHFMAKEVWQWAHARGVHWSYRVSHHPEADGLIEWWNGLLKSQLQHQLGDNTLQDWGKVLQKATYALNQHLIYEHWTPSSSVLGHGLALLPSQLADNLLWDLVVMAYTLKLQNADEINIRRRCLTRQPGSTAPTERPKYGVNQHASNTSSERKH

SEQ ID NO: 44549 - protein, 781 aa, Homo sapiens
MTCGTDGAITFWESLTGHRYIHKPTNPDEPPVAEQPKPLYPYRTIGCVFNHQMFLGNCQPSDAVETCVFDLNDESKWKPMSEEAIKSVCAPGATTSLPPFPPLCASTIDASVTSNEIEMQLRLLVSEHRKYTKIHTCPSPTGGPVEPADTKSQPSVCMDFTSHEYRISDPFLVEKNLPKEKTANTAGHQKEQTGDTLPLRNITGTVRVHGFILEVSETKNPPNPGHKTTSISQRPKALVSLGPEVRRGTRGEDEKALEKEGGGRRWECGGANELCGRPPAFTRVTVHWGKGNDQTFQDLLDTGSELTLIPGDPKRHCGPPVKIGAYGGQIINGVLAQVQLTVDAVGPWTHPVVFPSARMHNWNRHTQQLAESHIGSLTVHLSSDPKGCHSEWGPEQEKALQEVQAAVQAALILEPYDPAGPVVLEVSLADRDAVWSLWQAPIGESQQRPLGFWSKALPSSAAIKRVMHSSIPSSNGSGIYMIGLEQVRKAQIVLHDMQPPCENGTASALQPLSRKSLKDSSEGKSSQWAELRAVHLAVHVAWKEKWPDVRLDTDSWAVANGLARWSGTWKEHDRKIGDKEVWGRGTRIELSEWSKTVTIFVSHCFYQDYHPSVGSQNALYTNMVFHTALPLTKALTLRLKNCNSGLMLTEFTGLTMFPIIQGWGKVLQKAVYALNQRPIYEWKEESCLHTGVADALRGNWAEGHREHKALWLGLWSTWSQHPLRSLKTTRHHPGLGVLSEDICEAGGATEELSRASGFATGYGKRKEDTKKHKQHSVSDIM

SEQ ID NO: 44550 - protein, 79 aa, Homo sapiens
NHLLRRQQWQTPFPPPSWSSPRSSSDCCGSSENFKPVDLSLLGSVGVGPTEPDHLDPWLQPPFQGSERFCLAGVPGATG

SEQ ID NO: 44551 - protein, 91 aa, Homo sapiens
  misc_feature (1)...(91): Xaa = X or * as defined in Table 2
EVWKESSGWHLAGAPLGQSFQRKEQAVIFAVLQPLLVIPKQTGSGVDLQQTPAHLQQRGLSGCLQSLCSLTSSXPQRHPQNSSLVSNCVVS

SEQ ID NO: 44552 - protein, 807 aa, Homo sapiens
MVDEDTSDVFQEQIGGVYLKENLRFSHVVSCQTQHIDSCGGYGEKGAEGLLLEKEVPNPWTTDQYPSVACYEPGCTAEAAASDSHRSANPTVNCTCEGSRLHTPYKTLMPDDLRWNSFILKPYPQPPSWEKLSSMKLVPGAKKVGDRCFTAHKVTSKPKFSSKSHIWHVYNENSNRQKLEHVKVNKGSKASLFINKEDVYEYYQKDPKNTKFGKSKHKQSTLDQIYSTGLRKGNLHNVKDPNTNVPKGIGRRKTQHKRTQVDDVDCNPRKILAVSPSRRINRLVTYQQHIPETHNDLPEELCEPSSLTLSSLRNGLDSSTEACSVSKEKHIQNLDLSDSQEVQCLELESVDQTEAVSFPELLLHKEIKLPVVTTDKQPHTLQEQHHVLYKSHENSNLVPKDERFNKWENSFLSFVKENSDNDDDDDCSTSEKAITSKKVLCSTGGKKHYNFKENLTNKKEMGFQQFLLSEDHLSQENELKAVSLTTLPEQEAVNFSYSDNAVISEHVANYEQCIFGPSFDHSNGNPEQNSLACMRTLLTHEASKLTNHVELFKKPQDYIPRAPTFLMNQTDTHIVEKMAKNCDTERNYIDRDQKIIYSNEPLSIVAHSQVIETTKVEKRRQNHLESETIHNIDSHSTDNMSKELANISKLSQREKKEISHKPDEELTNNISGDEITIRNCEEIKEKTESEIHMPTNSQEHKTVQNFRKRQSFLKTTCNLGVPPWSSLVRSVGSSTLMGSVSALVSVSVPSDPSAAGLLEFAGGPLQTLFVWVSPAEVAEQQRLLPAPSSGSFVPDGHLPDASRSSPV

SEQ ID NO: 44553 - protein, 298 aa, Homo sapiens
  DOMAIN (28)..(58): Matrixins cysteine switch domain identified by eMATRIX, accession number BL00546A, p-value=4.122e-17, raw score of 19.62
MKSLPILLLLCVAVCSAYPLDGAARGEDTSMNLVQVTGKLDSDTLEVMRKPRCGVPDVGHFRTFPGIPKWRKTHLTYRIVNYTPDLPKDAVDSAVEKALKVWEEVTPLTFSRLYEGEADIMISFAVRALKRAADLPAQCLSSAKEQTASSTSAESNSININKKDTHIKTPSKGHQRQRPKVDKSTKMRKKQHKKAENSKNQNASSPPKDHNSSPAREQNWTENEFHELTEVVFRWWVITDSTKLKEHVPTQCKEAKNLDKRLQKLLTRITSLEKNINDLIELKNTTQELREAYTSINS

SEQ ID NO: 44554 - protein, 148 aa, Homo sapiens
  misc_feature (1)...(148): Xaa = X or * as defined in Table 2
APSRSTWGSSSTAARRNLKTTRKLRTPRTPPHQKPRNPHHGPPRTPSGXTPRNPDHRPPPGPQVGQPGCWAPSQGPRGWGQLGCXREEVPGGGHAGRHSTPVGGDFFLQAGPWPPDASLPTNPFVLRGASTPPHPLSENNKDKFLLQK

SEQ ID NO: 44555 - protein, 47 aa, Homo sapiens
ESEGERGRPAPGGPALESGTRAAGPGGLDGGALKAPPGIGSAAEIND

SEQ ID NO: 44556 - protein, 229 aa, Homo sapiens
MSEYIRVTEDENDEPIEIPSEDDGTVLLSTVTAQFPGACGLRCRNPVSQCMRGVRLVEGILHAPDAGWRNPVYVVNYPKDNKRKMVLGLPWKTTEQDLKEYCSTFGDVLMVRQSQDEPLRSRKVFVGRRTEDMTEDELWEFFSQYGDVMDVFVPKPFRAFAFVPFADDQIARSLCGEDSMKGISVHISNAEPKRNSNRQLRSGRFGGNPGGFGNQGGFESYQRCERKAV

SEQ ID NO: 44557 - protein, 277 aa, Homo sapiens
  DOMAIN (93)..(112): Eukaryotic  RNA-binding region RNP-1 proteins domain identified by eMATRIX, accession number BL00030A, p-value=4.500e- 10, raw score of 14.39
EPIEIPSEDDGTVLLSTVTAQFPGACGLRYRNPVSQCMRGVRLVEGILHAPDAGWGNLVYVVNYPKDNKRKMDETDASSAVKVKRAVQKTSDLIVLGLPWKTTEQDLKEYFSTFGEVLMVQVKKDLKTGHSKGFGFVRFTEYETQVKVMSQRHMIDGRWCDCKLPNSKQSQDEPLRSRKVFVGRCTEDMTEDELREFFSQYGDVMDVFIPKPFRAFAFVTFADDQIAQSLCGEDLIIKGISVHISNAEPKHNSNRQLERSGRFGGNPGGFGNQGGFG

SEQ ID NO: 44558 - protein, 148 aa, Homo sapiens
  misc_feature (1)...(148): Xaa = X or * as defined in Table 2
RGTAGGQPGNGPALAQSPXWCRLGSGGTXGKSPGTSQGRALPWCSCSVSTWATAAPGSQQRASPCSWAQPGPLASLRLLMPPRLRXGHLGHLAWLQLFAAPCPVIHVAVMWSLLGIALRKVHGDWAPLAILSLVVCASNKLNLKKKKK

SEQ ID NO: 44559 - protein, 272 aa, Homo sapiens
  misc_feature (1)...(272): Xaa = X or * as defined in Table 2
RAARVPRAPLEAVAHRWASASEDDGTVLLSTVTAQFPGACGLRCRNPVSQCMRGVRLVEGILHAPDAGWRNPVYVVNFGDVLMVRQSQDEPLRSRKVFVGRRTEDMTEDELWEFFSQYGDVMDVFVPKPFRAFAFVPFADDQIARSLCGEDSMKGISVHISNAEPKRNSNRQLRSGRFGGNPGGRLQGTRYSPAPAPGSPGRAQGLGAGXSRPSGSWLSGHLQRPEQSVGRAPAAPRHAVRRSLRRLAALCRRTRARCRRAQLHVSPQRRRH

SEQ ID NO: 44560 - protein, 60 aa, Homo sapiens
EREAIQKSVTRSCLLEEEEESAGYTAQASGPLVEQNNLGSNSIFHSFPNWIAANQQTLPT

SEQ ID NO: 44561 - protein, 116 aa, Homo sapiens
  misc_feature (1)...(116): Xaa = X or * as defined in Table 2
KAAMVRFKHRYLLCELVSDDPRCRLSLDDRVLSSLVRDTIARVHGTFGAAACSIGFAGTIRTCQKFLIQYNRRQLLILLQNCTDEGEREAIQKSVTRSCLLXEEEESCEEAAKAME

SEQ ID NO: 44562 - protein, 152 aa, Homo sapiens
PTRAVEAAMVRFMHRYLLCEQVCDDLRCRLSLDDRVLSSLVRDTIARVHGTFCAIACSIALALARALNEEGNPEGWRDVAGASAGGRKKGHECPSPCTVFCTLRYPNAYTVIGLLRCKKELYQVVWSVLYLMTYLENKGHRYPCFFNTLHVG

SEQ ID NO: 44563 - protein, 78 aa, Homo sapiens; identical to SEQ ID NO: 31851

SEQ ID NO: 44564 - protein, 130 aa, Homo sapiens; identical to SEQ ID NO: 44463
  DOMAIN (45)..(92): Intermediate filaments proteins domain identified by eMATRIX, accession number BL00226D, p-value=9.710e-33, raw score of 19.10

SEQ ID NO: 44565 - protein, 347 aa, Homo sapiens
  DOMAIN (223)..(254): Intermediate filaments proteins domain identified by eMATRIX, accession number BL00226C, p-value=1.220e-14, raw score of 13.23
  misc_feature (1)...(347): Xaa = X or * as defined in Table 2
SSQMPSPQEGMCGKACTPALSQADSLCPLLRLASEVEGYWQMACAEPYVQSEMNDHLSVWSLQHGSTTLASMSFTTCSAFTNYWSPGSVQVPSYGTQPVSHAASVYAGLGGSGSRISVSHFTSFGGLAGMGGIQNEKETMQSLRDRLASYLDRVRGLETENWKLESKIQEHLEKNRLXLETEIEALKKELLFMKKNNEEEAKGLQAQIASSGLTVEVDAPKSQDLAKNMADSRAQYDKLARKNREELDKYWSQQIEESTRVVTTQSAKVGAAEMTLTELRHRVQSLEIDLDSTRNLKASLENSLREVEARYALQMEPSLLFSKIIFGRVWEISYLHVFEGKQVVVCW

SEQ ID NO: 44566 - protein, 181 aa, Homo sapiens
  misc_feature (1)...(181): Xaa = X or * as defined in Table 2
XLVENDIHGLRKVIDDTNITPTCKLGDRDPRLSRRSCSSLKKNPEEEVKGLQAQIASSGFDRGAGSERTEKRLDKYWSQQIEESTTVVTTQSAEVGAAETHAHRAETYSPGLWRFDLDFHEKSEGQAWRTALREVEARYALTDGAAPTGSCCTLSHSWDRHRAQRHSARPRKYEALHEHQX

SEQ ID NO: 44567 - protein, 701 aa, Homo sapiens
  DOMAIN (481)..(519): Lysyl oxidase  copper-binding region proteins domain identified by eMATRIX, accession number BL00926B, p-value=9.460e- 10, raw score of 13.84
  misc_feature (1)...(701): Xaa = X or * as defined in Table 2
LRGSELAGGVAAPDPSSRARAPGRGQGSEPPRRSXGRGRAPPRAHTPLDDFPPGRAALSPGRGLSSRRPDPGSAGRPLLLCLRPPLHSPPPPRGCQAPAFQSLPSFHLALRLRSSGEEKLWGPRRAPAAPXSQRRKPDPARPGLAAAVPLRPVXASDXGAAQVPPPSPLRDGGQPGGREGVGRRTPHRAAAWLLGEXAADAAAFHWDGGRPPAAPARLLPGAPHHREDRVHHQPRGHPLQHQSPGDPTPAGEQHASRHXLCRNPETQKLRHXTSERRDGHREEEHTGTAGVPRSRPATQRPHAVPAGGLQPHRMLPALSSGAASGGEAEHGQLSGRGREEDGPVWPQLPAGLQGHFRGESPRWPPCLGDGSENXPGPVQAEFSGGXDPAVSESEDNQPRSRQFLRLQREEKAKPDQRFTYLPANVPIIKTEPTDDYEPAPTCGRGEPGVKSSPKTILQPAARDATRPQLLPRGRLPALSAEKHPDASSPWREPQAPRPFSRCLHQGRCQPGPLSPRTPAAGRRGPRRPGVPRPVATHPGSPGQPPPALLPQQXMKXYEMTSPARAPTPSCHIGALSSAGVCXLQQTKTFEXINXTHTWYHSEPPTDXMPGAEHXYVQRLALQQEGKQGGRETTVSPGGEVISXQQKGGGRAEHGRPTVQGPSHGNGPHAVXPHAQPFWHPWGSILEVPYLTRPSGHHRIEH

SEQ ID NO: 44568 - protein, 897 aa, Homo sapiens
  DOMAIN (495)..(531): 2 RUBISCO ACTIVASE CHAIN domain identified by eMATRIX, accession number DM01443F, p-value=8.231e-09, raw score of 10.83
  misc_feature (1)...(897): Xaa = X or * as defined in Table 2
MKSAEEEHYGYASSNVSPALPLPTAHSTLPAPCHNLQTSTPGIIPPADHPSGYGAALDGGPAGYFLSSGHTRPDGAPALESPRIEITSCLGLYHNNNQFFHDVEVEDVLPSSKRSPSTATLSLPSLEAYRDPSCLSPASSLSSRSCNSEASSYESNYSYPYASPQTSPWQSPCVSPKTTDPEEGFPRGLGACTLLGSPRHSPSTSPRASVTEESWLGARSSRPASPCNKRKYSLNGRQPPYSPHHSPTPSPHGSPRVSVTDDSWLGNTTQYTSSAIVAAINALTTDSSLDLGDGVPVKSRKTTLEQPPSVALKVEPVGEDLGSPPPPADFAPEDYSSFQHIRKGGFCDQYLAVPQHPYQWAKPKPLSPTSYMSPTLPALDWQLPSHSGPYELRIEVQPKSHHRAHYETEGSRGAVKASAGGHPIVQLHGYLENEPLMLQLFIGTADDRLLRPHAFYQVHRITGKTVSTTSHEAILSNTKVLEIPLLPENSMRAVIDCAGILKLRNSDIELRKGETDIGRKNTRVRLVFRVHVPQPSGRTLSLQVASNPIECSQRSAQELPLVEKQSTDSYPVVGGKKMVLSGHNFLQDSKVIFVEKAPDGHHVWEMEAKTDRDLCKPNSLVVEIPPFRNQRITSPVHVSFYVCNGKRKRSQYQRFTYLPANVPIIKTEPTDDYEPAPTCGPVSQGLSPLPRPYYSQQLAMPPDPSSCLVAGFPPCPQRSTLMPAAPGVSPKLHDLSPAAYTKGVASPGHCHLGLPQPAGEAPAVQDVPRPVATHPGSPGQPPPALLPQQHLPSTVRRDESPTAGPRLLPEVHEDGSPNLAPIPVTVKREPEELDQLYLDDEGFPVSNNRHPFWNLRLGLQSLLLLASIAASDGRAFSRLTQFEEDPRKPGAVIDSSX

SEQ ID NO: 44569 - protein, 443 aa, Homo sapiens
  DOMAIN (31)..(42): PROTEIN SPORULATION REPEAT PRECU domain identified by eMATRIX, accession number PD02283B, p-value=7.000e-09, raw score of 8.67
MGQKCSWREGVGGWGGGPVFQPSASEPHGLRPTPGWARCPPVKGEAVAFLSGLRHRPCLRGEHGSTYGSRPRCGWVGGTASSAVRLLCCPLLSGVRVVHPALCQLLPWGSGKALEGAWAVSGPGHASLQRLRPCGTHLTRRWDGVGPHAPPARRSEVQAAAGSLGLDSSLEVGPPPLPRAQQPQTQAERAKEAVVAPDGNLGGRGTHRGTFRPPTGSPTEAQVLVGSKGKPHGHAASLSPSATRPPVPAGNKTALGGHAGGLSHEHDGDLRRRPHPVTVTITHPVPSRLPTSHHYYPSGLPTSAGVDLWVAWFVERQPQHLPSIAAGTWHLHFGRQRRAGTVLRTRAVTLATPALCRGSQALAHDTHGPGRDRGGNEGFPVSNNRHPFWNLRLGLQSLLLLASIAASDGRAFSRLTQFEEDPRKPGAVLHSSWMLQANTRPQR

SEQ ID NO: 44570 - protein, 26 aa, Homo sapiens
  misc_feature (1)...(26): Xaa = X or * as defined in Table 2
MPRGLLLVLPAPALGSRQLGPRCWQX

SEQ ID NO: 44571 - protein, 141 aa, Homo sapiens
  misc_feature (1)...(141): Xaa = X or * as defined in Table 2
VQQPGRGLDLSTDGPGGRSQVGLIWSCCCLHXAASGEPGGRCPGSGAPGPAGSALEFRARDGVPGVGGPSWESHSPAAATPPPAECRGPGPTPSPAPGEAAPEDREDGAAAPGRAEPASIVAPADGSQGQVLATQAGALGA

SEQ ID NO: 44572 - protein, 217 aa, Homo sapiens
  misc_feature (1)...(217): Xaa = X or * as defined in Table 2
PDSSQAPSRNSTRPAASTRKSSSPPAARSAGNELGSSRGDADPPPQNPTGPAPQSAEVPRCDSSSAWASNGSSISPSFFSLRPWPSSTSKVPGAGHHTPPEGAGGASARSSSLAPSAGAPVPSAXRSQLGTWLSVLRPRSLXQSRVRSPSSHVSSPGSMQAPNSPSSFQPGMNGAWIWWLXTHIPLARWPGPPGILVITCPTVTWIKWSFICSFHPT

SEQ ID NO: 44573 - protein, 359 aa, Homo sapiens
  DOMAIN (44)..(91): kw TRANSCRIPTASE REVERSE II ORF2 domain identified by eMATRIX, accession number DM01354V, p-value=1.000e-40, raw score of 12.97
  misc_feature (1)...(359): Xaa = X or * as defined in Table 2
GPPKRKLISNFSKVSGYKINVQKSXAFLYSKKQTESQIMSELPFTIASKRIKYLGIQLTRDMKDLFKENYKPLLNEIKEDTNIWKNIPCSWIGRINIVKIAILPKVIYRFNAIPIKLPMTSFTELEKTTLKFIWNQKRAHIAKSILSQKNKAGGITLPDLNLYYKATVTKTAWYWYQNRDIDQWNRTEPSEIIPHIYNHLIFDKPDKNKQWGNDSLFNKWCWENWLSICRRLKLDPFLTPYKKINSRWIKDLNVRPKTIKTLEENLGNTIEDIGMGKDFMTKTPKAMKTKAKIEKWDLIKLKSFCTAKETTIRSFGSEQKSHTLVRATRLVSDHSQSFEAWLQFLGDTRFGTQKLRDSD

SEQ ID NO: 44574 - protein, 426 aa, Homo sapiens
  misc_feature (1)...(426): Xaa = X or * as defined in Table 2
GYLAAGQVTSRIHTGRRHFSGPARCPCVSCCRRPGCXPQPAVRPSGXHCRKTAPSHGPSIWQTRXXPGSWPNLRPGXGWRWLRAQPRGRGIPVGCRSNLQLHPTKNPGSHXGSGSPWQCPGVLLXASGRQPGSPSGGCTXSSGKAGLEPQWHPAIPGHCRNKPAAPASWERAPRPRAHALACGWWRYSSCXSWRSXSSPETPGPAQVXCHRPCPAAWWRCHSXXTAQFLXDXFSXFLQTIGEPCICPKPISVPHXPMKQSHRGIGGCLQYSSHPGIESSLGMSRGFDRRDLXTLQIGSXRHPRAGPEGAALXCLAGESSLRTPSAPCPGSPHTPGSSASGNTSPVXXETGCGSRQGSARLVLESLLSRXXCLSGPSRPSCLLRGISWQCGTAGRLSSSGPPAASGAGADAAPGGFPRLPCLEFGTV

SEQ ID NO: 44575 - protein, 208 aa, Homo sapiens
  DOMAIN (99)..(151): Tubulin subunits alpha beta, and gamma proteins. domain identified by eMATRIX, accession number BL00227C, p-value=3.700e- 28, raw score of 25.48
RRSLASSLSSNPYVKWLNFWDSGLYGAGTEALAGALSKSSSICDVDLLENQLGVAGAQALCAALTVNQAMRKMQLSGNGLEEQAAQHLAELLLAHTDLKSLDLSYNQLNDQADLCMGLQGFLIFHSFGGGTGSGFVSLLMKRLSVDYGKKSKLEFAICPAPQVSMAMTEPYNSILTTYTTLEHSDCAFIVDSKATYDMSAQPGHRVSH

SEQ ID NO: 44576 - protein, 356 aa, Homo sapiens
  DOMAIN (248)..(262): LEUCINE-RICH REPEAT SIGNATURE domain identified by eMATRIX, accession number PR00019B, p-value=8.560e-09, raw score of 11.36
  misc_feature (1)...(356): Xaa = X or * as defined in Table 2
MRGSCERSGEDEEQKEEAMVACGRLSGVPEAEQGPEANWDSDLETEGTDGLGELVRDTLYLRSCRAHSVVPISCFLRQGSAQELNLRHRGLGPQGARALASSLSSNPYVKRLDLRDNGLCGAGAEALAGALQQKQQHPXCGPVGEPAGSGRSPGPRVPPSQCNQAMRKMQLSGNGLEEQAAQHLAELLLAHTDLKSLDLSYNQLNDQAGPAPSLRAFPQANIFLKVLDISYNGFGDPGASAVGEALKANNVLEELNMSNNRISAMGALSLGLGLRVNQTLRILVLCVRVSQVSRNPMRSEGCFGLLKSVQDNPASALELLDFSDIQVNAEFDGLASSVRGILPGLGIKDWRLQSGV

SEQ ID NO: 44577 - protein, 138 aa, Homo sapiens
  DOMAIN (91)..(122): Protein kinases ATP-binding region proteins domain identified by eMATRIX, accession number BL00107A, p-value=8.920e-13, raw score of 18.39
EYVTVRRINLEACSNEMVTFLQGELHVSKLFNHPNIVPYRATFIADNELWVVTSFMAYGSAKDLICTHFMDGMNELAIAYILQGVLKALDYIHHMGYVHRSVKASHILISVDGKVYLSGLRSNLSCPGAFSKGHQCLA

SEQ ID NO: 44578 - protein, 128 aa, Homo sapiens
  DOMAIN (35)..(57): Receptor tyrosine kinase class V proteins domain identified by eMATRIX, accession number BL00790M, p-value=7.831e-11, raw score of 8.74
ELWVVTSFMAYGSAKDLICTHFMDGMNELAIAYILQGVLKALDYIHHMGYVHRDLQGYDAKSDIYSVGITACELANGHVPFKDMPATQMLLEKLNGTVPCLLDTSTIPAEELTMSPSRSVANSGLMTA

SEQ ID NO: 44579 - protein, 111 aa, Homo sapiens
MSFLRWVSEKFIVEGLRDLELFGEQPPGDTQRKTNDASSESIASFSKQEVMSSFLPEGGCYELLTVIGKGFEDLMTVNLARYKPTGEYVTVRRINLEAVPMRWNILAGELM

SEQ ID NO: 44580 - protein, 490 aa, Homo sapiens
MGELTPAGDESSPGSQNPGRSSPPPGYVPERQQHIARQGSYTSINSEGEFIPETSEQCTNDASSESIASFSKQEVMSSFLPEGGCYELLTVIGKGFEDLMTVNLARYKPTGEYVTVRRINLEACSNEMVTFLQDQAARDMKRLEEKDKERKNVKGIRDDIEEEDDQEAYFRYMAENPTAGVVQEEEEDNLEYDSDGNPIAPTKKIIDPLPPIDHSEVCFFSQGAMKAFHTFCVVLLVFGSVSEAKFDDFEDEEDIVEYDDNDFAEFEDVMEDSVTESPQRVIITEDDEDETTVELEGQDENQEGDFEDADTQEGDTESEPYDDEEFEGYEDKPDTSSSKNKDPITIVDVPAHLQNSWESYYLEILMVTGLLAYIMNYIIGKNKNSRLAQAWFNTHRELLESNFTLVEQFLSPLWGVQTGADQGFPVRRGYKYYLPAPRAQKQAPLCQRGYPKRGYIPSGNEHSLLPALSFDTDLDRPNFQDWGRSLATSK

SEQ ID NO: 44581 - protein, 126 aa, Homo sapiens
MSSFLPEGGCYELLTVIGMCRGRPYSPAFCSRGCCSFLSSPRCVYSRGHPLVRRIHGHRLASVGSSLFFSAKYGEEIKLPGKKLFCHLSFVGCHVSGVLGHSESERLAEKELMREKSRNVSHEHNS

SEQ ID NO: 44582 - protein, 95 aa, Homo sapiens
MTSCLEKDAIDSELASLVFLRVSPGGCSPNSSKSLKPSTMNFSETHRLIRSGLLTRNDMSSYCVDLLQFQKLKPVPGVSKQPRPSWLPHASAHAS

SEQ ID NO: 44583 - protein, 336 aa, Homo sapiens
  DOMAIN (156)..(187): Protein kinases ATP-binding region proteins domain identified by eMATRIX, accession number BL00107A, p-value=8.920e-13, raw score of 18.39
  misc_feature (1)...(336): Xaa = X or * as defined in Table 2
SRSTQYELMSFLTNDASSESIASFSKQEVMSSFLPEGGWYELLTVIGKGFEDLMTVNLARYKPTGEYVTVRRINLEACSNEMVTFLQGELHVYKLFNHPNIVPYRATFIADNELWVVTSFMAYGSAKDLICTHFMDGMNELAIAYILQGVLKALDYIHHMGYVHRSVKASHILISVDGKVYLSGLRSNLSMISHGQRQRVVHDFPKYSVKVLPWLSPEVLQQNLQGYDAKSDIYSVGITACELANGHVPFKDMPATQPMVLVLSSPDAARETERHSALPVGYQHHPRXGADHEPFALSGQLWPEXQPDHQHPPALQRXLALPPLPPNLLPPLPPLC

SEQ ID NO: 44584 - protein, 36 aa, Homo sapiens
DQKRPAGDHGVHHLGATGQYVLAWEPEHTDGGVGRV

SEQ ID NO: 44585 - protein, 116 aa, Homo sapiens
  DOMAIN (15)..(42): Protamine P1 proteins domain identified by eMATRIX, accession number BL00048, p-value=1.675e-09, raw score of 6.39
AAVKPLGSAETAVPIARLGCRRFSRSRCCRRRGRGSLLSFSAAKVAFFNSAGANAQEEQRVCCQPLAHPVASSQKKPEVAAPAPESGGESVFGETHRALQGAMEKLQRLYGRRRWT

SEQ ID NO: 44586 - protein, 36 aa, Homo sapiens
  misc_feature (1)...(36): Xaa = X or * as defined in Table 2
HRPATAVLHVPTRSPPSPGSRPSXPPPAAALLWTPA

SEQ ID NO: 44587 - protein, 1664 aa, Homo sapiens
  misc_feature (1)...(1664): Xaa = X or * as defined in Table 2
LARYYKFMHQDRQGVARNLLCQKEKRRXYTTKCEDNTCHWTGRTSSXPRSVSNLNSQCGPRLWPPVTIIRQANIKTGEKAHXTSKLLPPVQLKFPARDDTLPWPGYIPXQLRRPSPRXSILSMLPRKVVPCLXQKPXTVCWKFXEPLSYIHHSLVLKMMIPMPMTLLGAXCLTQALKXSRMERKKGRAAQRSSTLGCQSPRGSPGGGPGPPGPPGAGKQQSNSVQTSRLLARTLIXSFSSSTVKDKELARNTAPHTRAHSCLRSVAXXTSSLQNTPGPAMRKSSGLTPSLLHLYCADPLHSKPHLQLLHPPLPPRQRSLGSCNCSPSESVRGAEKGDQELLANIKQAEKHEKNHPEVTVAMALTDIDLQLQFSMSQPEALLLLAAGPADHLLLQLYSGHLQVRLVLGQEELRLQTPAEILLSGSVPHTTVLTVSEDWPTLSVNGFLNASSVVLGAPLEVPYGLFVGSTGRLGLPYLRGTSHPLRGCLHAAALNGRRLLQPLTPNKHEGCAEEFSANDDVALGFSGSHSLAALPAWGTQDEGTLEFTLTTQSWQAPLAFQAAGWHGDFIHVDIFEGHLWSMVEKGQGTVLLLNSVPVTDAQPHKVSIHINIHQLEISMDQYPTRTEESSATWSHARFIHDGPEDTSDQLVLEVSVMAWLPMPSCLRRGQTDLLPIQVNPVNDPPHIIFPHGSLMVILEHTQKPLGPEVLQAYDLDSACEGLAFQLLGTPSGLPMEHRDQPGEPVTEFSCWELEAGSLVYVHCGGPTQDLTFRVSNGLQASPPAMLKVVAVQLAIQIHRSTGLHLAQGSAMPILPTNLLVETSAVGQDVTVLFRVTGGLPFRELQKQGAGGVEDAEWWVTQAFHQQDVEQGHVRYLSTDPQHYTEDTVENLDLQVQVSWEILSNLSFLVTIQRATVWMLQLEPLHTQNTQQEALTTAHLEATLEEAGPSPPTFHCEVVQAPRKGNFQLQGTMLSDGQGFTQDDVQAAEVTYGAMARASVAVEDTFCFHVTAPPYFSPLCTFSIHIGGDPDMPVLVVPEGGGCVLSADQLFIKSLNSARYLYEVMEQPRHGRLTWRGTQDKITMVTSFTNGDLMHGQLTISCVFHVAWGRWRLLTTDNMAFSNADSGFAEAQLVLTHQDLLSGSIMATDEPMQPICRFIQEGPQEEASPVSDGQHQAITVLEVQALEPYLCVANGSGLMVPQGGQGTINMAELHLGTNLNICSRDEAHYHVTDSPHWGQLLQATQPATAFSQQDLLVGAVFYGHNGSLSSRNTLAFSMDVGPVHTDATLQVTIALEGPVAPLKLAQHKEIYIFQGEAAEIRRDQLEVAQEAVPPADIVFSVKSPPSAGYLVMVLRGILADEPPSLDPVQSFSQEAVDTGRILYLHSRPEARSHAFSLDVASAWVLPLRTSRGAGGGRASDPVPARWEQDTDGFVLMANASEMDRQSHPVAFTVTILPVNGQPPTSYKLRPAEALRSMDGYSGPKDLVYTIKQPSNGWSPSSHSAARASEPAGTDPQLLLYHVVRGLQLGRLFHAQHDSTGEDLVNFTQGETPEFIISEPLANMYSCGNQNTLMEELAEQAQQHDEMLHMHHALKEALSIIGDINRTTVTMPMPPPVDDTWLQVQSIPDAHRYQRLPPTAPKSPTRDAQRSALGASGTPPHRGGSHLE

SEQ ID NO: 44588 - protein, 75 aa, Homo sapiens
  misc_feature (1)...(75): Xaa = X or * as defined in Table 2
PGWAGGLFGPSAGMRAWATKPSLTPPAPAGQRCPQGHRGXSGPGIYAVQPPSVPAWAAHATTQARLCHPRSPPLR

SEQ ID NO: 44589 - protein, 42 aa, Homo sapiens
  misc_feature (1)...(42): Xaa = X or * as defined in Table 2
SDRQTXRQEKRLTRRQSCCLPCNXSFQPETTLFHGPDTFHDN

SEQ ID NO: 44590 - protein, 102 aa, Homo sapiens
VHTGQRLRDDELRGLRVGKQGRRLGPGACAALAALLGPSGTVRWTWSPLEYGFSHGLLYRFDWKIHLPTAFSHSDGDTEVQRKRHLSNVTDLGGDLRPIMPR

SEQ ID NO: 44591 - protein, 100 aa, Homo sapiens
PQPLLPPPGERQPIVFLRGEGEELSRLGPRGSPGSRTVAFFNSAGASAQEEQRVCCQPLAHPVASSQKKPEVAAPAPESGGESVFGETHRALQGAMEKLQ

SEQ ID NO: 44592 - protein, 129 aa, Homo sapiens
GSPHTPTSPNDYSLYPSPQSSSNSFSLHAPQSQYQELAVALDSSSAIISQLTENINSLVRTSKEEKKHEIHLVQKLGRSLFKLKNQTAEPLAPEPPAGPSKVEQLQDETNHLRKELESVGRQLQAEVEN

SEQ ID NO: 44593 - protein, 419 aa, Homo sapiens
MSEKTQQGKLAAAKKKPIVFKEKLTMKTDSLMEEKLECSLWCCLSDPSTPGRCCVLERRIVPWMQQESYSSSSPIWFVDSDEPNLTSVLERLEDTKDNSSLLANIKQAEKHEKNHPEVTVAMALTDIDLQLQFSMSQPEALLLLAAGPADHLLLQLYSGHLQVRLVLGQEELRLQTPAEILLSDSVPHTTVLTVSEDWPTLSVNGFLNASSVVLGAPLEVPYGLFVGNTGRLGLPYLRGTSHPLRGCLHAAALNGRRLLQPLTPNKHEGCAEEFSANDDVALGFSRSHSLAALPAWGTQDEGTLEFTLTTQSWQAPLAFQAAGWHGDFIHVDIFEGHLWSMVEKGQGTVLLLNSVPVTDAQPHKVSIHINIHQLEISMDQYPTCTLNRGVLSYLEPRDSLLLGELVQRPLVTSRNTAQA

SEQ ID NO: 44594 - protein, 675 aa, Homo sapiens
  DOMAIN (610)..(632): kw SECRETION PATHWAY XCPX domain identified by eMATRIX, accession number DM01816A, p-value=1.217e-09, raw score of 9.89
  misc_feature (1)...(675): Xaa = X or * as defined in Table 2
VINIINAAQESSPMPVTEALDRVLEILRTTELYSPQFGAKDDDPHANDLVGGLMSDTGLEIIKDGEEEGESRTAQQYPGLSESTRQPWRRSRTPRTTWGWKATEQQCPDFPPPGPHPHLELLIFHCEGQGTGQKHSTSYPCTLMSEKRGLMNVFFAKYTGPAMRKSSGLTPSLLHLYCADPLHSKPLFNCPPPTTSKTEILGSCNCSPSESVRGAEKGDQELLANIKQAEKHEKNHPEVTVAMALTDIDLQLQFSMSQPEALLLLAAGPADHLLLQLYSGHLQSATGIYGEGRASSATLEDLESQYQELAVALDSSSTIISQLTENINSLVHTLKEEKHEIHQVQKLGRNLFKLKNQTAEPLAPEPPARPSKVEQLQDETNHLRKELESVGRQLQAEVENNQMLSLLNRRQEERLQEQEGWQEEQERLLDKNNENKSALQLEQQVKELKLENLEATSQXKQQLTAQLSLMALPGEGDGGGHLDSEQEAPRPMPNIPGDLESREAMVAFFNSAGANAQEEQRVCCQPLAHPVASSQKKPEVAAPAPETGGESVCGETHQALQGAMEKLQESTSARGQCQRRSTGRGGHRQAGPGPGGDEEMLCTCTQVSSAGRGMGMLTVVLVVSLMMLSASFSTWCMRSISSCHCAYSAHSSISVFWFPREYILASGSEMMNSVV

SEQ ID NO: 44595 - protein, 186 aa, Homo sapiens
  misc_feature (1)...(186): Xaa = X or * as defined in Table 2
SLRVSLLKAVVDRAGSRILSYIAGLGVDLGFGGGSRVAGGIADLGRSGGGKATRSRRGSRAGGGRLRSRHHEEALQLRETPGPGAPEPMDQEYAGPGYDIRDWELRKIHRAAIKGDAAGVWSAAMTRRFRDLDARDRKDRTVLHLTCAHGRVEVVTLLLSRRCQIDICDNXNRTPLMKAVHCQEEA

SEQ ID NO: 44596 - protein, 87 aa, Homo sapiens
  misc_feature (1)...(87): Xaa = X or * as defined in Table 2
GQAQGTGDREGAVLFTARAPDQCRPXSCSSSRPTASSCPLGHSCSPGPLCTHLPLQGPPQAPTVPGATATCWFSWNQCRCRAVSSYP

SEQ ID NO: 44597 - protein, 65 aa, Homo sapiens
  misc_feature (1)...(65): Xaa = X or * as defined in Table 2
EAEIPXTGLPGHSRPPGPLCTHLPLQGPLGAAAWVPEAGLGQVPTEAAGAARAGCSAHKPWKRRK

SEQ ID NO: 44598 - protein, 112 aa, Homo sapiens
LLGLRPSFSEDESRSLGRALRDWVRRFPGGRGNWISGDMMERKASSWSLSVSLSSRGSPGGPEASSSVVGGGPLPDSTTPKGCGGPGPGLSGHVAPGGRSGSALPVPPGGRS

SEQ ID NO: 44599 - protein, 130 aa, Homo sapiens
LERHDGLPRTKLGASVGHVAHPTPKGLPRVDVSEESRGLISTQDLVVSPFLLMDDRVLFVTRYDLAGHVLEGQVVFLHLIGPQGVPPLAQHLADGPVILVGMTLVRPARAWCRLLKIMSATHGPPDVVLV

SEQ ID NO: 44600 - protein, 83 aa, Homo sapiens
  misc_feature (1)...(83): Xaa = X or * as defined in Table 2
PWKTLDSSEAEILRGVSESSAVTLHCMEGQAVGPRQVKRIVHCXASSAXNPHAMLLLQNRXLALCTSVPQGAAVLCGGWDPGN

SEQ ID NO: 44601 - protein, 86 aa, Homo sapiens
VLFLAQGTEGLGLVDTREQQLPTWQVLCSGWRPLSDWQVAGPHAAAGRGQEGDRVPGEHSHRARFHIPPHKHADTTRGLAGRRHQG

SEQ ID NO: 44602 - protein, 380 aa, Homo sapiens
  DOMAIN (162)..(181): Eukaryotic  RNA-binding region RNP-1 proteins domain identified by eMATRIX, accession number BL00030A, p-value=9.471e- 11, raw score of 14.39
IKLPPPGCRRRGGRHRRHRYRGRAEPLAPRRRRLPPAPEQPRARPPASRFLKNTMSNGYEDHMAEDCRGDIGRTNLIVNYLPQNMTQDELRSLFSSIGEVESAKLIRDKVPGHSLGYGFVNYVTAKDAERAINTLNGLRLQSKTIKVSYARPSSEVIKDANLYISGLPRTMTQKDVEDMFSRFGRIINSRVLVDQTTGLSRGVAFIRFDKRSEAEEAITSFNGHKPPGSSEPITVKFAANPNQNKNVALLSQLYHSPARRFGGPVHHQAQRFRFSPMGVDHMSGLSGVNVPGNASSGWCIFIYNLGQDADEGILWQMFGPFGAVTNVKVIRDFNTNKCKGFGFVTMTNYEEAAMAIASLNGYRLGDKILQVSFKTNKSHK

SEQ ID NO: 44603 - protein, 780 aa, Homo sapiens
  DOMAIN (369)..(408): Bromovirus coat protein domain identified by eMATRIX, accession number PF01318A, p-value=7.474e-10, raw score of 14.29
  misc_feature (1)...(780): Xaa = X or * as defined in Table 2
MFVWRNVEGHSAAVFSWYSIPFLTPPCSHTRPSNLPVTQWPPTRENNLPSWQPLLMSVHQAQSLSALRKEQDSSSEKDGRSPNKSDKDHIRWPMSGAHDLQQAAPGPGGAHQGHPNQDNRTVSQMLSERWYTLGPNEMQKYNLAFQNVEARIRYVIVRGNEQGFFRMHHLRGVSSLQLGRRRPGPGTYRLEVVDMITIDARYRCSGLRSPPDPDHLKSVDLHRNEHFFLQKARWEIHLVLQATPSQIQLLHVAFVLAKQPLRCRKQTLFLISVVGTKEKNVASEGRNPVRPLRGHRWLPASPPAAEHFAGGADRKSRLSRAPRSAATATPANEQRAVADVGQWARARGGRVRAAGRSGSCALRRSRCRRRRRRHRRHRYRGRAEPLAPRRAASGQPGKLRARRGINCNASSIPMLQVVRIKSISKHCQMARVAGEGSLPLSHAQLTHCVFGNKQVQRTIAYLPPQQQGVQGFLKNTMSNGYEDHMAEDCRGDIGRTNLIVNYLPQNMTQDELRSLFSSIGEVESAKLIRDKVAVGLLSLCVPIRNVEIVASTSWWSLPLAPYVPRGIRRSQPSTLMDDLSCRSHQAAAPFTASVLLYISGRVKAHTAAQGFNHIPEEGVSQEAGSGWSQAWKDGWLTNVFMFSCTGHSLGYGFVNYVTAKDAERAINTLNGLRPPVKNHXGRPLQLGFLQQPLHPPALSARLHKIPTDTAPXSWLLSGQTLAQQQLSQTCPMPHGRGVQWAPXGQARHSCLLVSSAGPQRHLPRWGLAGPPGALCSSWAL

SEQ ID NO: 44604 - protein, 117 aa, Homo sapiens
LIVHFCLQVGCGVGNTVFPILQTNNTNSEYDPSRCFAFVHDLCDEEKSYPVPKSSLDIIILIFVLSAIVPDKMQKAINRLSRLLKPGGMMLLRDYGRYDMAQLRFKKGILKVLNPNH

SEQ ID NO: 44605 - protein, 273 aa, Homo sapiens
  misc_feature (1)...(273): Xaa = X or * as defined in Table 2
LIVHFCLQVGCGVGNTVFPILQTNNDPGLFVYCCDFSSTAIELVQTNSEYDPSRCFAFVHDLCDEEKSYPVPKGSLDIIILIFVLSAIVPDKMQKAINRLSRLLKPGGMVLLRDYGRYDMAQLRFKKGQCLSGNFYVRGDGTRVYLCHTRCNWTRFSPTAGLEKPQKPVDRRLQVNRGKTTDNVPGLDSVQILQAPSVQHQLRGYLLPTRCKPVVVSGLFLKKKIVALGVVRCLXSQPLRRLRRGGSIEHQQSNLGKIVRDPVSESNDKIKRI

SEQ ID NO: 44606 - protein, 192 aa, Homo sapiens
  misc_feature (1)...(192): Xaa = X or * as defined in Table 2
PGKFVLMSFLDPQPPTRILEVGCGVGNTVFPIFTNRTMTQDSLVYCCDFSSTAIELVQTNSEYDPSSVFAFVQGPVXXRESVTQCPRAVLDIIILIFVLSAIVPDKMQKAINRLSRLLKPGGMMLLRDYGRYDMAQLRFKKEELDTLFTTAGLEKVQNLVDRRLQVNRGKQLTMYRVWIQCKYCKPLLSSTS

SEQ ID NO: 44607 - protein, 75 aa, Homo sapiens; identical to SEQ ID NO: 34209
  DOMAIN (28)..(75): kw TRANSCRIPTASE REVERSE II ORF2 domain identified by eMATRIX, accession number DM01354V, p-value=9.873e-21, raw score of 12.97
  misc_feature (1)...(75): Xaa = X or * as defined in Table 2

SEQ ID NO: 44608 - protein, 1932 aa, Homo sapiens
  DOMAIN (333)..(372): PROTEIN ZINC FINGER ZINC-FINGER METAL-BINDING NU domain identified by eMATRIX, accession number PD01066, p-value=1.247e-17, raw score of 19.43
MTPESRDTTDLSPGGTQEMEGIVIVKVEEEDEEDHFQKERNKVESSPQVLSRSTTMNERALLSSYLVAYRVAKEKMAHTAAEKIILPACMDMVRTIFDDKSADKLRTIPLSDNTISRRICTIAKHLEAMLITRLQSGIDFAIQLDESTDIASCPTLLVYVRYIPLKLRLGGLLQPEKPIVLKVESRDGTIQYNSQQHINLSAAWLKTAVQGREAPGKQPSKQQHSAKRKTHRTQLKKESGDGPHPKFGGGNLASPGCQPGAPLSRYFTYRGSELTAFWLTTLKKMSVPGTVLLRYGTRTHGLFKRLGIPGPTPLPLLGNVLSYRQKLVKIEEVADVAVSFILEEWGHLDQSQKSLYRDDRKENYGSITSMGYESRDNMELIVKQISDDSESHWVAPEHTERSVPQDPDFAEVSDLKGMVQRWQVNPTVGKSRQNPSQKRDLDAITDISPKQSTHGERGHRCSDCGKFFLQASNFIQHRRIHTGEKPFKCGECGKSYNQRVHLTQHQRVHTGEKPYKCQVCGKAFRVSSHLVQHHSVHSGERPYGCNECGKNFGRHSHLIEHLKRHFREKSQRCSDKRSKNTKLSVKKKISEYSEADMELSGKTQRNVSQVQDFGEGCEFQGKLDRKQGIPMKEILGQPSSKRMNYSEVPYVHKKSSTGERPHKCNECGKSFIQSAHLIQHQRIHTGEKPFRCEECGKSYNQRVHLTQHQRVHTGEKPYTCPLCGKAFRVRSHLVQHQSVHSGERPFKCNECGKGFGRRSHLAGHLRLHSREKSHQCRECGEIFFQYVSLIEHQVLHMGQKNEKNGICEEAYSWNLTVIEDKKIELQEQPYQCDICGKAFGYSSDLIQHYRTHTAEKPYQCDICRENVGQCSHTKQHQKIYSSTKSHQCHECGRGFTLKSHLNQHQRIHTDRDCGRGRGTSNQWRSVKGRLGLFRHLPDRGGRAEDLEEKRPAPSTSLNSFLQLPVKDSRPDFIGRNCFQPQLEGLWKFDTECYKKYGKMWGTYEGQLPVLAITDPDVIRTVLVKECYSVFTNRRMFPIIAQYGDVLVRNLRREAEKGKPVTLKDIFGAYSMDVITGTSFGVNIDSLNNPQDPFVESTKKFLKFGFLDPLFLSIILFPFLTPVFEALNVSLFPKDTINFLSKSVNRMKKSRLNDKQKRPAEGCLQVRETGPGNPAVTEDYIEFENVGIFENAPPKKLLMSSGNVRRLIYTDTAEEKALSDLELAAQSIIFIFAGYETTSSVLSFTLYELATHPDVQQKLQKEIDAVLPNKERSSAPATESWMENDFDELREEGFRRSNYSELKEEVRTHGKEVKNLEKRLDKWLTRIINAEKSLKDLMELKTMARELRDECTSLSSQFNQLEERVSVMEDQMNEMKKEEKFRRKRIKRKEQSLQEIWDYVKRPNLRLIGVPESDGENRTKLENTLQDIIQENFPNLARQANIQIQEIQRTPQRYSSRRATPRHIIVRFTKVEMKEKMLRAAREKEIQTTIREYYKHLYANKLENLEEMDKFLDTYTLPRLNQEEVETLNRPITGSEIEAIINSLPTKKSPGPDGFTAEFYQRYKEDLVPFFLKLFQSIEKEGILPNSFYEASIILIPKPGRDTTKKENFRPISLMNSDTKILNKILANRIQQHIKKLIHHDQVGFIPGMQGWFNIRKSINIIQHINRTNDKTHMIISIDAEKAFNKIQQPFMLKTLNKLVLEVLARAIRQEKEIKGIQLGKEEVKLSLFADDMIVYLENPIVSAQNLLKLINNFSKVSGYKINVQKSQIFLYTNNRQTESQIMSELPFTIASKTIKYLGIQLTRDVKDLFKENYKPLLNEIKEDTNKWNNIPCSWVGRINIMKMAILPKVIYRFSAIAIKLPMTFFTELEKTTLKFIWNQKRARIAKSILSQKNKAGGIMLPDFKLYYKATVTKTAWYWYQNRDIDQWSRTEP

SEQ ID NO: 44609 - protein, 907 aa, Homo sapiens
  DOMAIN (613)..(638): 7 kw REVERSE TRANSCRIPTASE RNA POLYMERASE domain identified by eMATRIX, accession number DM00895E, p-value=7.828e-10, raw score of 15.72
MGGMVESSRHNWSGLDKQSDIQNLNEERILALQLCGWIKKGTDVDVGPFLNSLVQEGEWERAAAVALFNLDIRRAIQILNEGASSEKGDLNLNVVAMALSGYTDEKNSLWREMCSTLRLQLNNPYLCVMFAFLTSETGSYDGVLYENKVAVRDRVAFACKFLSDTQLNRYIEKLTNEMKEAGNLEGILLTGLTKDGVDLMESYVDRTGDVQTASYCMLQGSPLDVLKDERVQYWIENYRNLLDAWRFWHKRAEFDIHRSKLDPSSKPLAQVFVSCNFCGKSISYSCSAVPHQGRGFSQYGVSGSPTKSKVTSCPGCRKPLPRCALCLINMGTPVSSCPDRSTRQKVNKDIQELNSALHQADLIDIYRTLHPKSTAYTFFSAPHHTFSKIDHIVGSKALLSKCKRTEIITNCLSDHSAIKLELRIKTFTPNRSTTWKLNNVLLNDYWVHNEMKAEIKMFFETNENKDTTYQNLWDTFKAVFRGKFIALNAHEKIQTTIREYHKHLYANKLENLEEMDKFLDTYTLPRLNQEEVESLNRPITGSEIEAILNSLPTKKSPGPDGFTAELYQRYKEELVPFLLKLFQSIEKEGILPNSFYEASIILIPKTGRDTTKKENFRPISLMNIDAKILNKILANQIQQHIKKLIHHDQVGFIPGMQGWFNIRKSINVIQHINRTKDKNHMIISIDAEKAFDKIQQPFMLKTLNKLVLEVLARAIRQEKEIKGIHLGKEEVKLSLFADDMIVYLEIPIVSAQNLLKLISNFSKVSGYKINVQKSQAFLYTNNRQTESQIMSELPFTIASKRIKYLGIQLTRDVKDLFKENYKLLLKEIKEDTNKWKNIPCSWVGRINIMKMAILPKVIYRFSAIPIKLPMTFFTELKKTKVHMEPKKSPHCQVNPKPKEQSRRHHTT

SEQ ID NO: 44610 - protein, 1146 aa, Homo sapiens
  DOMAIN (692)..(731): Phosphatidylinositol 3- and 4-kinases proteins domain identified by eMATRIX, accession number BL00915C, p-value=4.441e- 32, raw score of 22.43
MELKTKARELHDECTSLSSRFDQLEERVSVMEDEMNEMNLPTKKSPGPDGFTAEFYQRYKEELVPFLLKLFQSIEKEGILPNSFYEPSIILIAKPGRDTTKKENFRPISLMNINAKILNKMLANQIQQHIKKLIHHDQVGFIPGMQGWFNIRKSINVIQHINRTKDKNHMIISIDAEKAFDKIQQHFMLKTLNKLVLEVLARAIRQEKEIKGIQLGKEEVKVSLFADDMIVYLENPTVSAQNLLKLIGNFSKVSGYKINVQKSQAFLYTNNRQTERQIMSELPFTIASKRIKYLGIQLTRDVKDLFKENNKPLLKEVKEDTNEWKNIPCSWVGRINIVKMAILPKVIYRFNAIPIKLPMTFFTELEKTTLKFIWNQKRACIAKSIFSQKNKAGGITLPDFKLYYKATVTKTAWYWYQNRDIAQWNRTEPSEIMLHIYNYLIFDKPEKNKQWGKDSLFNKWCWENWLAICRKVKLDPFLTPYTKMNSRWIKDLNVRPKTIKTLEENLGITIQDIGVGKDFMSKTPKAMATKAKIDKWDLIKLKSFCTAKETTIRVNRQPTTWEKIFATYSSDKGLISRIYNELKQIYKKKTNNPIKKWAKDVNRHFSKEDIYAAKKHMKKCSSSLAIREMQIKTTMRYHLTPVRMAIIKKSGNNRKIQVEYGVTGSFKDKPLAEWLRKYNPSEEEYEKASENFIYSCAGCCVATYVLGICDRHNDNIMLRSTGHMFHIDFGKFLGHAQMFGSFKRDRAPFVLTSDMAYVINGGEKPTIRFQLFVDLCCQAYNLIRKQTNLFLNLLSLMIPSGLPELTSIQDLKYVRDALQPQTTDAEATIFFTRLIESSLGSIATKFNFFIHNLAQLRFSGLPSNDEPILSFSPKTYSFRQDGRIKEVSVFTYHKKYNPDKHYIYVVRILREGQIEPSFVFRTFDEFQELHNKLSIIFPLWKLPGFPNRMVLGRTHIKDVAAKRKIELNSYLQSLMNASTDVAECDLVCTFFHPLLRDEKAEGIARSADAGSFSPTPGQIGGAVKLSISYRNGTLFIMVMHIKDLVTEDGADPNPYVKTYLLPDNHKTSKRKTKISRKTRNPTFNEMLVYSGYSKETLRQRELQLSVLSAESLRENFFLGGVTLPLKDFNLSKETVKWYQLTAATYL

SEQ ID NO: 44611 - protein, 1102 aa, Homo sapiens; identical to SEQ ID NO: 38223
  DOMAIN (543)..(589): kw TRANSCRIPTASE REVERSE II ORF2 domain identified by eMATRIX, accession number DM01354O, p-value=1.000e-40, raw score of 8.73

SEQ ID NO: 44612 - protein, 788 aa, Homo sapiens
  DOMAIN (154)..(195): kw TRANSCRIPTASE REVERSE II ORF2 domain identified by eMATRIX, accession number DM01354I, p-value=1.000e-40, raw score of 15.55
MVKGSIQQEELTNLNMYAPNTGAPRFIKQVLSDLQRDLDSHTLIMGDFNTQLSTLDRSMRQKVNKDTQELNSALHQADLIDIYRTLHPKSTEYTFFSAPHHTYSKIDHIVGSKALLSKCKRTEIITNYISDHSAIKLELRIKNLTQNCSTTWKLNNLLLNDYWVHNEMKAEIKMFFETNENKDTTYQNLWDTFKVVCRGKFIALNAHKRKQERSKTDTLTSQLKELEKQEQTHSKASRRQEITKIRAELKEIETQKTLQKINESRSWFFERINKIDRPLARLIKKKREKNQIDAIKNDKGDITTDPTEIQSTIREYYKHLYTNKLENLEEMDKFLDTYTLPRLNQEEVESLNRPITGAEIVAIIKTYQPKRVQDQMDSQLNSTREKEGILPNSFYEASIILIPKPDRDTTKKENFRPISLMNIDAKILNKILANRIQQHITKLIHHDQVGFIPGMQGWFNIRKSIRVIQHINRTKDKNYMIISIDAEKAFDKIKQCFMLKTLNKLGIDGTYFKIIRAIYDKPTANIILNGQKLEAFPLKTGTREGCPLSPLLFNIVLEVLARAIRQEKEIKGIQLGKEEVKLSLFADDMIVYLENPIVSAQNLLKLISNFSKVSGYKINVQKSQAFLYTNNRQTESQIMSELPFTIASKRIKYLGIQLTRDRKDLFKENYKPLLKEIKEDTNKWKNIPCSWVEKINIVKMAILPKVIYRFNAIPIKLPMTFFTELEKTTLKFIWNQKRARITKSILSQKNKAGGITLPDFKLYYKATVTETACRALRINAAYLQLSDL

SEQ ID NO: 44613 - protein, 697 aa, Homo sapiens; identical to SEQ ID NO: 37095
  DOMAIN (424)..(449): 7 kw REVERSE TRANSCRIPTASE RNA POLYMERASE domain identified by eMATRIX, accession number DM00895E, p-value=4.517e-10, raw score of 15.72

SEQ ID NO: 44614 - protein, 778 aa, Homo sapiens; identical to SEQ ID NO: 32655
  DOMAIN (218)..(264): kw TRANSCRIPTASE REVERSE II ORF2 domain identified by eMATRIX, accession number DM01354O, p-value=1.000e-40, raw score of 8.73

SEQ ID NO: 44615 - protein, 662 aa, Homo sapiens; identical to SEQ ID NO: 35999
  DOMAIN (37)..(83): kw TRANSCRIPTASE REVERSE II ORF2 domain identified by eMATRIX, accession number DM01354O, p-value=1.000e-40, raw score of 8.73

SEQ ID NO: 44616 - protein, 852 aa, Homo sapiens
  DOMAIN (194)..(235): kw TRANSCRIPTASE REVERSE II ORF2 domain identified by eMATRIX, accession number DM01354I, p-value=1.000e-40, raw score of 15.55
MEEDLPSKCKTKKAGVAILVSDKTDFKPTKIKRDKEGHYIMVKGSIQQEELTILNIYAPNTGAPRFIKQVLSDLQRDLDSYTIIMGDFNTPLSTLDRSMRQKVNKNTQELNSALHQADLIDIYRTLHPKSTECTFFSAPHHMYSKIDHIVGCKALLSKFKRTEIITNCLSDHSAIKLELRIKKLTQNCSTTWKLNNLLLNDYWVHNEMKAEIKMFFETNENKDTTYQNLWDTFKAVCRGKFIALNAHKRKQERSKIDTLTSQLKELEKQEQTHSKASRRQEITKVRAELKEIETQKTLQKINEFRSWFFERINTIDRPLARLIKKKREKNQIDAIKNDKGDITTDPTETQTTIREYYKHLYANKLENLEEMDKFLDTYTLPRLNQEEVESLNRPITGSGIVAIINSLPTKKSPGPDGFTAEFYQRYKEELVPFLLKLFQSIEEEGILPNSFYEASIILIPKLGRDIAKKENFRPISLMNIDAKILNKILAHRIQQHIKKLIHHDQVGFIPGMQGWFDIRKSINVIQHINRTKDKNHMIISIDAEKAFDKIQQPFMLKTLNKLVLEVLVRAIRQEKEIKCIQLGKEEVKLSLFADDMIVYVENPIVSAQNLLKLISNFSKVSGYKINVQKSQAFLYTNNRQTESQIMSELPFTIASKSIKYLGIQLTRHVKDLFKDNYKPALNEIKEDTNKWKNIPCSWIGRINIVKELEKTTLNFIWNQKRARIAKSILSQTNKAGGIMLPDFKLYYKATVTQTACVCKAHLSDYPVTSLNKILAKSCPSMTSPPSSATARKAERGEEVAEEKLEASRGWFLRFMERSHFHNIKAQGKAASVVVETAASYQEDLAKTTDEGH

SEQ ID NO: 44617 - protein, 557 aa, Homo sapiens
  DOMAIN (280)..(305): 7 kw REVERSE TRANSCRIPTASE RNA POLYMERASE domain identified by eMATRIX, accession number DM00895E, p-value=4.889e-11, raw score of 15.72
MAKCAENLGVSSYASGDIRGAGIKIIFMNRYRKAGAHSKESNYNIKETKNYKEKQMKKLRMPAWVLDKMVTAYFKVFHDAERKPGCFSLNVHCITDFFGRLNRALGHAKALTNTALSGFKKNPPAVFQEAQKEEIQTKGKEVENFEKNLDKCIARITNTEKCLKELMELKARLENYVKNAEASGADAINCKIGLNQEEVESLNRPITGSDIVAIINSLPTKKSPGPDGFTAEFYQRYKEELVPFLLKLFQSIEKEGILPNSFYEASIILIPKPGRDTTKKQNFRPISLMNIDAKILNKILANRIQQHIKKLIHHDQVGFIPGMQGWFNICKSINVIQHINRTKDKNHMILSIDIEKAFDKIQQCFMLKTLNKLVLEVLARAIRQEKEIKGIQLGKEEVKLSLFADDMIVYLENPIVPAQNLLQLISNFSKVSGYKINVQKSQAFLYTNNRQTESQIMSELPFTIASKRIKYLGIQLTRDVKDLFKEDYKPLLSKIKEDTNKWKNITCSWVGRINIVKMAILPKYACSSFTSPMIASFLKPSPEAGADFMFLEQPAEP

SEQ ID NO: 44618 - protein, 615 aa, Homo sapiens
  DOMAIN (37)..(83): kw TRANSCRIPTASE REVERSE II ORF2 domain identified by eMATRIX, accession number DM01354O, p-value=1.000e-40, raw score of 8.73
MDKFLDTYTHPRLNQEEVESLNRPITDSEIEAIINSLPTRKSPGPDGFTAEFYQRYKQELVPFLQKIFQSIEKEGILPNSFYEASIILIPKPGRDTTKKENFRPISLMNIDVKILNKILANRIQQQIKKLIHHDQVGFIPGMQGWFNIHKSINVIQHINRTKDKNHMIISIDAEKAFDKIQQPFMLKSLNKLVLEVLARAIRQEKEMKGIQLGKEEVKLSLFADDMIVYLENPIISAQDLLKLISNFSKVSGYEINVQKSQASLYTNNRQTESQIMSELPFTIASKRIKYLGIQLTRDVKDLFKENYKPLLNEIKEDTNKWKNIPCSWVGRINIVKMAILPKVIYRFNAILIKLPMTFFTELKTTTLKFIWNQKRACIVKTILSQKNKAGGITLPDFKLYYKATVIKTACNMNGLDAVIRSELMWEGKSKYHMFSLISGRLRQRLQQSAHFLSDQAPSLKSSAMALAMLRDWCRRMGVNAERSLLILDIPDDCEEHEFQEAVRAALSPLGRAYQELRPFSGREQPGCKEESFESWMEHAKDMLQLWYHASERERKRWLLESLGGPALDVVSGLLEEDPNLAALDCQVLLDCWAAVLGQAFGNRDPRMTSRLKFLT

SEQ ID NO: 44619 - protein, 684 aa, Homo sapiens
  DOMAIN (259)..(304): kw TRANSCRIPTASE REVERSE II ORF2 domain identified by eMATRIX, accession number DM01354N, p-value=1.000e-40, raw score of 13.17
MGDFNTPLSTLDRSMRQKVNKDTQELNSALHQADLIDIYRTLHPKSTEYTFFSAPHHTYSKIDHIVGSKALLSKCKRTEIITNYLSDHSAIKLELRIKNLTQNRSTTWKLNNLLLNDYWVHNEMKAEIKMFFETNENKDKTYQNLWDAFNAVCRGKFVALNAHKRKQEGSKIDTLTSQLKELEKQEQTHSKASRRQEITKVRAELKEIETQKTLQKINESRSCKTNKEKKREESNRAIKNDKRDITIDPTEIQTTIREYYKHLYANKLENLEEMDKFLDTYTLPRLNQEEVESLNRPITGSEIVAIINSLPTKKSPGPEGFTAEFYQRYKEELVPFLLKLFQSTEKEGILPNSFYEASIILIPKPGRDTTKKENFRPISLMNIDAKILNKILAKRIQQHIQKLIHHDQVGFIPGMQGWFNICKSINVIQHINRTKDKNHMIISIDAEKVFDKIQQRFMLKTLNKLVLEVLARAVRQEKKIKGIQLGKEELKLSLFADDMIVYLENPIVSAQNLLKLISNFSKVSEYKINVQKSQAFLYTNNRQTESQIMSELPFTIASKRIKYLGIQLTRDVKDLFKENYKPLLKEIKEDVNKWKNIPCSWVGRINIVKMAILPKVIYRFNAIPIKLPMTSFTELEKTTFKFIWNHKGARIAKSILSQKNKAGGITLPDFKLYYKATVTKTAWY

SEQ ID NO: 44620 - protein, 517 aa, Homo sapiens
  DOMAIN (37)..(83): kw TRANSCRIPTASE REVERSE II ORF2 domain identified by eMATRIX, accession number DM01354O, p-value=1.000e-40, raw score of 8.73
MEKFLDTYTLPRLNQEELESLNRPITGSEIEAIINSLPTKKSPGPDGFRAKFYQRYNEELVPFLLKIFQSIEKEGILPNSFYEASIILIPKPGRDTTKKDNFRPISLMNIAVKILNKILANQIQKHIKKFIHHDQVGFIPGMQGWFNIRKSINVIQHINRTKDKSHMIISIDEEKAFDKIHLPFMLKTLSKLGIDGMYLKIIRAIYDKPTANIILNGQKLEAFPLKTGTRQRCPLSPLLCNIVLEVLARAIRQEKEIKGIQLGKEEVKLSLFADDMIVYLENPTVSAQNLLKLISNFSKVSGYKINVQKSQAFLYTNNRQTESQIMSELPFTIASKRIKYLGIQLTRDVKELFKENYKPLLNKIKEDTNKWKNIPSSWMGRKYHENGHTAQGTWMKLEIIVLSKLPQEQKTKHRMFSLTGVFIEGRALQNKSETSQSRHPGATHSLPEYTIPGSSPSNFYWFTLGLKEEVTSGWKREKKKRKREGGKEGRKEGRKEGRKEGKKEGRKKGRKEVPLIP

SEQ ID NO: 44621 - protein, 853 aa, Homo sapiens; identical to SEQ ID NO: 32659
  DOMAIN (262)..(287): 7 kw REVERSE TRANSCRIPTASE RNA POLYMERASE domain identified by eMATRIX, accession number DM00895E, p-value=3.333e-11, raw score of 15.72

SEQ ID NO: 44622 - protein, 571 aa, Homo sapiens
  DOMAIN (149)..(194): kw TRANSCRIPTASE REVERSE II ORF2 domain identified by eMATRIX, accession number DM01354N, p-value=1.000e-40, raw score of 13.17
MKAEIKMFFETNENKDTTYQNLWDTFKAVCRGKFIALNAHKRKQERSKIDTLTSQLKELEKQEQTHSKASRRQEITKIRAELKEIETQKTFQKVNESSSWFFERINKIDRPLARLIKKKREKNQIDAIKNDKGYITTDPTEIHTTIREYYKHLYANKLENLEEMDKFVGTYTLPRLNQEEVESLNRPITGSEIVAIINSLPTKKSPGPDGFTAEFYQRYKEELAGRDTTKKENFRPISLMNIDAKILNKILANRIQQHIKKLIHHDQVGFIPGMQGWFNICKSINVIQHINRTKDKNHMIISIDAEKAFDKIQQPFMLKTLNKLVLEVLARAISQEKEIKGIQLGKEEVKLSLFADDMIVYLENPIVSAQNLLKLISNFSKVSGYKINVQKSQAFLYTNNRQTESQIMSELPFTIASKRIKYLGIQLTRDVKDLFKENYKLLSKEIKEDTNKWKNIPCSWVGRINIVKMAILPKVIYRFNAIPIKLPMTFFTELEKATLKFIWNQKRARIAKSILSQKNKAGGITLPDFELYYKTTVTKTAWYSYQNRDNRSMEQNRALRNNAAYLQLSDL

SEQ ID NO: 44623 - protein, 222 aa, Homo sapiens
  DOMAIN (108)..(155): kw TRANSCRIPTASE REVERSE II ORF2 domain identified by eMATRIX, accession number DM01354V, p-value=1.000e-40, raw score of 12.97
KLAQGQGCPLSPLLFNIGVWEVLAQAIRQEKEIKGIQLGKEEVKLSLFADDMIVYLENPMVSAQNLLKLISNFSKVSGYKINAQKSQAFLYTNNKQTESQIMSELPFTIASKRIKYLGIQLTRDMKDLFKENYKPLLNEIKEDTNKWKNIPCSWVGGRINLVKMAILPKVIYRFNAIPIKLPMTFFTELEKNYFKVHMEPKKSSHHQVNPKPKEQSWRHDTT

SEQ ID NO: 44624 - protein, 580 aa, Homo sapiens
  DOMAIN (12)..(37): 7 kw REVERSE TRANSCRIPTASE RNA POLYMERASE domain identified by eMATRIX, accession number DM00895E, p-value=4.889e-11, raw score of 15.72
YQSLAETQQQQKKNFRPISLMNIDAKILNKILANRIQQHIQKLIHHDQEGFIPGMQGWFNIHKSINVIQHINRTKDKNHMIISVDAEKAFDKVQQHFMLKTLNKLDIDGLEVLARAIRQEKEIKGIQSGKEEVKLSLFADDMIAYLENPIVSAQNLLKLISNFNKVSGYKINVQKSQAFLYTNNRQTESQIMSELPFTIASKRIKYLGIKLTRGVKDLFRENYKLPLIKEIREDTNKWKNIPCSWIGRMNIMKMAILPKVNYRFNAIPIKLPMTFFIGLGKILLLSSYGTKKRAHIAKTILRQKNKAGGITLPDFKLYYKATVAKTAWYWYQNRDIDQWNRTEPSEIMPHIYNYLIFDKPEKNKQWGKDSLFNKWCWENWLAICRKLKLDPFLTPYRKINSRWIKDLNVRPKTIKTLEENLGITIQDIGVGKDFMSKTPKAMATKAKIDKWDLIKLKSFCTAKETTIRVNRQPTKWENIFATYSSDKGLISRIYNELKQIYKKKTNNPIKKWVKDMNRHFSKEDIYAAKKYMKKCSSSLAIREMQIKTTMRYHLTPVRMAIIKKSGNNRCWRGCGEIGTL

SEQ ID NO: 44625 - protein, 256 aa, Homo sapiens
  DOMAIN (178)..(211): PROLINE-RICH PROTEIN 3 domain identified by eMATRIX, accession number DM00215, p-value=6.946e-10, raw score of 19.43
  misc_feature (1)...(256): Xaa = X or * as defined in Table 2
LNLEERAFRHKSSEHLPHLKVHFRHSSCGIKTKSLLHVSPPTTLIFPYPPLWGNPSNXARPPCSVHSGPYPQGLASIIAHGSPGNVRGVHVXINDSEGGISRPSTASHKETPRPPTPARHADLAATRPRSLTTSPSGAGPRAPSRAGPSVGGLGLRPSGRAPRAEVALPAGLSPAGLAGPPPSGRSTGALPPAAAPTTSGPPASTPPNAPAPGHTLSSRSPHRAARPPPHCGAEEWTGFTMRPSWRISQSFIVKDS

SEQ ID NO: 44626 - protein, 72 aa, Homo sapiens
KTTRMRGEILSTWERERPLLEPQDVGDRGPWHHREFQPGRRITFRVPEPSLTAEMELVEGVAGQSQKQHSDI

SEQ ID NO: 44627 - protein, 349 aa, Homo sapiens
  misc_feature (1)...(349): Xaa = X or * as defined in Table 2
SSMTQSSCPMTSYLKSKFGEPLMPSYTNPTETGVSKLVNKTQVFTYAHKGPVSIYFDACQAAHLSKLNNIWTSVKIXDKKESASRATKAITEESKKECPDCDNQWTTHEFNQHLYTGRAALFASQEEKIGYTTGTCYPLNLTILKPNMTFWTKGHKGLLTFDQAGALLGLGIPLVITKKTQRTQVQLSPIQQFRFYKSFNEHFNSEVSKIQIPPISTENLFVQLAKSIANNLGVTSCYVCGGANMRDQWPWEARELMLQDNFTLPEFVTKFNANPSVWLLRNPIIGKYCIACWGKSFQNQIGETTCLGQQYFEESENRTQWRSFIDDSSGHFNPFLQFPTLNQSWYQLE

SEQ ID NO: 44628 - protein, 356 aa, Homo sapiens
  misc_feature (1)...(356): Xaa = X or * as defined in Table 2
MWPNVTQIPWTASPAASFVSAVFGQCPHWWLSASCKQTFLRSICLISTCEKQMELIFCNDTKYNAVIMFRTVMPYNCSSQTGDSSDPQGHKPVCPRRTQRFRTNGHIFLGLNLNRWSFLMRHLNKVILDHPFATATPPPHKLPHKIPRPIWSLTSRGTSGCSLNQGSRPASADPGATQAATNPGPRPIPRDPVSRQDQCQRTKDLGLPPVNPGSKHXGWPSWTQDPGLPVQAQVPGWSPQTKDPTSTTTDSGFKHTPMPGQPLRTQAPTPTLLIQLLPLTRENRIAQAAIQGLPESGSSESSFNTRFLSQTESELLDPVRHLRGPKGESPGNKAPKMHRHSGIKRVMRENDRRLLE

SEQ ID NO: 44629 - protein, 64 aa, Homo sapiens
  misc_feature (1)...(64): Xaa = X or * as defined in Table 2
MLGTRIFLIIALHSFLGGDWXXXXXXXXXXXXXXXXXXXXXXXXXXXXXXXXXXXXXXGGFCPP

SEQ ID NO: 44630 - protein, 70 aa, Homo sapiens
  misc_feature (1)...(70): Xaa = X or * as defined in Table 2
NPKGQKDREAPLSRSVFVLKIKIKRAFALLLHGRFXPSTPAASASPASKSPRGSGKALASALFYIVQLTK

SEQ ID NO: 44631 - protein, 142 aa, Homo sapiens
  misc_feature (1)...(142): Xaa = X or * as defined in Table 2
QVYRPSQTPHLALSPERVAPGRRAAGRLAPEARAPRGSPLPPHRVSEKTIRVVVFHPGARRAGGTPPRAPRGDTGGAPGAPTYSTPLMSLHRARLESSPTGSSFPADSAKPVPLAVVSLDSRXGQWESRSSIHAVTNXMTRH

SEQ ID NO: 44632 - protein, 234 aa, Homo sapiens
  DOMAIN (220)..(233): LUTEOVIRUS ORF6 PROTEIN SIGNATURE domain identified by eMATRIX, accession number PR00910A, p-value=7.041e-11, raw score of 2.51
  misc_feature (1)...(234): Xaa = X or * as defined in Table 2
GSWPGLDDGSATRILACPWPGLGDGPAAPKANLPLVRWKPQCFRGEGLXGSSCFSATLLTGLDLWACCSSRSTASARLSTYPSAFTSGWCSSLGPTEEAPGSWINCPLAGILGAATSPKPSAIPQASPEVSLDAEDTGMKPXDSAGPPGPARGLCGRGCGLSPACMGLRPPSPPAQSPSTALTSLTPSPFHPPRKKWSPPSAPAPSAPSPAPASLTPSPAPPAPSPAPTPAPAP

SEQ ID NO: 44633 - protein, 268 aa, Homo sapiens
  DOMAIN (22)..(43): GLUTELIN SIGNATURE domain identified by eMATRIX, accession number PR00211B, p-value=7.916e-12, raw score of 0.86
  misc_feature (1)...(268): Xaa = X or * as defined in Table 2
WVRGQPSQSQLDLLACSTPTSXWPPGRAPPPPPLPPPPPLPPPTPASPPLLHPPRRAPPPPPVPSFTPASPPPDPVPRPTKALTGLPLCPLPCMGRPFVPYLGGLLPCLGPDFSSLXXSPGGWDRPVRPLGISQIPEPPLTMGLXMQXIPPXPRFQGHYAPLPPLQTLCISVKTPGRNPRGLPMHKILQPQNPSQPPCELPQAHCPTTPPPKQCPPAAFSILPVTFADKDPGAAPEGTVKAPMPTQXELXPLRPREHRVLSGPTAGQT

SEQ ID NO: 44634 - protein, 218 aa, Homo sapiens
  misc_feature (1)...(218): Xaa = X or * as defined in Table 2
RRAGTPASWGHNGARAKTPSRACACLGLYPIHQPTARRAPAARSHGPGPPALPRKGAAHGPRSVSHHPLRPCSRSSCLAWPCLHHPQPLHCHPHRHWPKWHPHPLAPHPLLGLHPRSRPQTPPWTSCGPSRRLPTPSGSWPAPFDRDWPNXARPSALCCPFCQEPQLTPCLHLCPHPHPHRHLPGLSCPHRPPRWRSPQSPCPWWLLWWTGQWWQPGE

SEQ ID NO: 44635 - protein, 176 aa, Homo sapiens
  misc_feature (1)...(176): Xaa = X or * as defined in Table 2
FVLQLPPAPKSGLGRWGSPPPGQFSSSQRTGTVRGRGRCAEPRGSLPHPTXGNNKXHGNWMGLGSQGLGRQPGEDKHCYQRIGVGGAHLLRPPHQRIRSLTSTGSGCSHPWSRELGCSWDGQRASAPLALRQAWGEGLAGRNHTIVPFHGDISIAPRLLPCRETLFSALCGGESCG

SEQ ID NO: 44636 - protein, 162 aa, Homo sapiens
  misc_feature (1)...(162): Xaa = X or * as defined in Table 2
MKGEVSCKQHQDALQQVLWAMLQDADKQVRRAPGPVENENHCDFVKLREMLICTNMEDLREQTHTRHYELYRRCKLEEMGFTDVGPENKPVRVLLFKSLSDSKRVKYDEEWIRLPVEMKYMLERKVTQKQPXVPLVFVSWRSRXESLRREEEENQQCHVLEL

SEQ ID NO: 44637 - protein, 792 aa, Homo sapiens
  DOMAIN (702)..(725): FORMIN SIGNATURE domain identified by eMATRIX, accession number PR00828B, p-value=8.218e-10, raw score of 5.23
MMWSVLLQPVVLAAVERQGEALEFLIGVPESDGENGTKLENTLQDIIQEDFPNLARQAHVQIQEIQRTPQRYSLRRATPRHIIVRFTKVEMKEKMLRAAREKGRVTLKGKPIRLTADLSAETLQARRDRGPIFNILKEKNFQPRISYPAKLSFTSEGEIKYFTDKQMLRDFVTTRPALKELLKEALNMERNNRNFFGVTFAFFVGGQSLGKALQETSIPFLREEDLEKTSILETGNGDWEATRGLPEECAGMRERDCQQNEKYQVPQFDQSTIKNIESAKGLDVWDSWPLQNADGTVAEYNGYHVVFALAGSPKDADDTSIYMFYQKVGDNSIDSWKNAGRVFKDSDKFDANDPILKDQTQEWSGSATFTSDGKIRLFYTDYSGKHYGKQSLTTAQVNVSKSDDTLKINGVEDHKTIFDGDGKTYQNVQQFIDEGNYTSGDNHTLRDPHYVEDKGHKYLGLIPTYDISSNIYLISKSCLWQANFRLNSALAQSPAITNFQFRGHSLKTLDLLTMKNLDSKVNIIPVIAKADTVSKTELHKFKIKFMSELVSNGVQIYQFPTDDDTIAKVNAAMNGQLPFAVVGSMDEIKVGNKMVKARQYPWGVVQVENENHCDFVKLREMFICTNMEDLREQTHTRHYELYRRLQLEEMGFTDVAPKNKPASVQETYEAKRHEFHGERQRKEEEMKQMFVQRVKEKEAILKEAERELQAKFEHLKRLHQEERMKLEEKRRLLEEEIIAFSKKKATSEIFHSQSFLATGSNLRKDKGRKNSQFFVKQKFQSTGRSSSTSQLY

SEQ ID NO: 44638 - protein, 74 aa, Homo sapiens
DLRTRPAHRSGSLQVSSRRASGFGFWLGISIRQINKLSPSAQAHFLLWLPSKGSNAHELLQSHISSRNSSDSIL

SEQ ID NO: 44639 - protein, 190 aa, Homo sapiens
IRPDSLPSASPAQDFYAASSNTFPADRWSALTKIYEDQTSHNIPLSQTLIQSKALTLFNSVKAEKDEEAAEEKFEVTRVVHIRGLIDGVVEADIVEALQEFGLISYVMVMSKKRQALVEFEDVLEACNAVNYTADNQIHIAGHPAFVNYSTSQKISRPGNSDDPEREQCASLYHPEPHLFDHHGCSLHYR

SEQ ID NO: 44640 - protein, 142 aa, Homo sapiens
  misc_feature (1)...(142): Xaa = X or * as defined in Table 2
LDWLRRVVGIPSLRWTCATLVGTRRAARHRCVNVWECGGLKEITYXSVEGLCRAEKPKPLALLEETCKLPERQVVNAKEKFLEEIKSATPVNTXMIRKRNCIITDMEKVXAVWIEDQTSHNLPLSQSLIESRALTLFNYVMA

SEQ ID NO: 44641 - protein, 65 aa, Homo sapiens
PRLLQECGMRPADEGPPTAQGACRSPPGGSSGFGFWLGISLRQINKLSPSAQGFISSFGLPSKGQ

SEQ ID NO: 44642 - protein, 50 aa, Homo sapiens
  misc_feature (1)...(50): Xaa = X or * as defined in Table 2
WLGQNXRHGKQPGPGVGHVGTTVWSXPHSPACWAPAPQGPAPTGEEGCHF

SEQ ID NO: 44643 - protein, 153 aa, Homo sapiens
RPVWRNSQPPTAAYRWASGSRMWSTSFSRWNKTPSGKACSSSDKGPPMAQVPIPQRNVPPPTKQPLVLCHGEAPDFSRPPQHRPSLQKHPSTGGPSHSPLPTSAPSSRAGLPPLAMTLDLTSGWRLWTPIQPFRLPPGSCREGTILLCSVMDG

SEQ ID NO: 44644 - protein, 489 aa, Homo sapiens
  DOMAIN (438)..(458): GASTRIN RECEPTOR SIGNATURE domain identified by eMATRIX, accession number PR00527I, p-value=2.412e-09, raw score of 5.36
  misc_feature (1)...(489): Xaa = X or * as defined in Table 2
GLKAQPSSSRGHSRGPGACAAAPASRVHLPVTFCPEPNSSPCPHCTGGWGGRGQPACAGNPTASSPCQIECPALRSCLHALMDLGSPQLRGAPRTGVPDPRLHLLPQPALSSPPVLLRGPLLRGTCPLAARQGQSPPAPGLLGHPGSHRGRLPPAQGGHRLPQPPGPGRRHRAPQPDPRRPGLRAAAASGPGLAAWGAVRAAERPGSGGLPGGAGPHHARAQPGPRAAPPAAAAPGVAPAGGGAVPGGHPHRPGGEAALPAHGLPAPAAERTAPRQPCPACGLIARSDVHHPPVLPPLSGPAPAPGRLVGQLGVRGAPSSPVPHPALHFPRAQPPPGKGITTTSQTQPAGSPPSPCMPPAATPGARHPPGSAGHRAGVXGHTGPCDPHGPGHHGHAQLLXDQAAVGVRGPGPWALSGMSQPPTLPTAGHPAPACGVRAFQDGTRPPRAKPALLSDKGPPMAQVPIPQRNVPPPTKHPCPGPQSSTWMRQ

SEQ ID NO: 44645 - protein, 401 aa, Homo sapiens
  misc_feature (1)...(401): Xaa = X or * as defined in Table 2
EPRPSRSSGGPQLGQGLPRPMKKIPGSSAKTAGPLATRPEVPRAPXSAGRQPWFQRPWGKRKGRKTXNHGSPGVKPTPGPLNKDKGEKEERPRQQDPQRKALLHMFSGKPPEKPLPNGKGSTESSDYLRASVTPGPWSFSPQVASGPMPVHTTKKPAXAPPQVLEPKERQTGAAADMPQPAVRHQGREPLLVVKPTHSRPEGGCREVPQAASQNPRPAPGLQTPGTRQTSSVTPQPCPPAATHSLGLGSNLSFGPGAKRPAQAPIQACLNFPKKPRLGPFQIPESAIQGGELGAPENLQPPPAATELGPSTSPQMGRRTPAQVPSVDRQPPHSRPCLPTAQACTMSHHSAAGHDGDPASQSALPETGKRTLELQPPGGPLISLSXEAGSLSRSEPSCVREV

SEQ ID NO: 44646 - protein, 230 aa, Homo sapiens
  misc_feature (1)...(230): Xaa = X or * as defined in Table 2
EAPEIPRQNRRMTMKERPVWLPHKXIHPNVAKWSRVPVQVQKNPQFQEPTPEFIPVPGTSPEAAGFWHXGAHDSPGTRDRSEVEPGRGHPHLGPRDSAAADPGEHSPCDCPXACPEVRRWPAAPVQIQYIIPSVDDFSLEFHAQDGDISDMRRENVPFSPAEEGKAAPLYQQPLMIPQANHMAGISPSSPTAAEFQHRDVHHRGPGTRDRTHTETGRVCPHPVPTDSPAL

SEQ ID NO: 44647 - protein, 622 aa, Homo sapiens
  misc_feature (1)...(622): Xaa = X or * as defined in Table 2
ITTVAPSRPASSDCESDGSXEQDAGPGSRMGPEKXAGPRPTRRVGRWSQTHSQTDDTSGAVVPEYPSDRXYAGGRGPGPGGPTVHPXKRRSXNPQETKMMARRDPKSWAKRLSPVXPRLAALLTSASPSCPLEPRVLPFRVPPSHGLCEGTSYPNSPGTXRPPCRSSAKTAGPLATRPEVPGAPXSAGRQPWFQRPWGKRKGGKPETMEAPGXSQPGALEQGXGREGRETKATRPAEEGSPPHVFRETSREAAAEWKRIHGVFXSSEGHPGXFPFSFPSAGGNRGTPLSCLLGVRDSTILPGCKRANAGPHNQXEAARGPCPRXSSAAEMSGRGSVLASLSPLRKASLSSSSSLGPKERQTGAAAAHPSACSQAPGPRASPRGEADTQPPRGXLPRSSPGCLQNPRPAPGRQTPGTRQTSCGDLSSPARQPPHTAWAXAPISASGQEPRDLPSSDSGLPELPQETETGSLPDPRKRHPGRXAGGPGKSPTSASRNRTWTKYVAPDGQEDTGPGAQRRPAASAQQTLPAYCPGLHHVPSLSGQPXWGPASQSGSSGDWKTDAGAPASWRPPHFTLLRSREPSSLRALMCQRSLRLPVFVSHRASSMRTFRFPPPQRTAILTWS

SEQ ID NO: 44648 - protein, 494 aa, Homo sapiens
MAEEHTISEDARSTLCSTDLTDWWWPNNPPLKKAVIKPPGDENDGPSGPHILGQETESCVATFGCVVDIGFTISSPVTRALRGNIVSLKCKKCGAFGHTARSTRCPMKCWKAALVPATLGKKEGKENLKPWKPRGEANPGPLNKDKGEKEERPRQQDPQRKALLHMFSGKPPEKPLPNGKGSTESSEHLRVASGPMPVHTTSKRPRLDPVLADRSATEMSGRGSVLASLSPLRKASLSSSSSLGPKERQTGAAADIPQPAFRHQGPEPLLVVKPTHSSPEGGCREVPQAASKTHGLLQAVRPQAQDKRPAVTSQPCPPAATHSLGLGSNLSFGPGAKRPAQAPIQACLNFPKKPRLGPFQIPESAIQGGELGAPENLQPPPAATELGPSTSPQMGRRTPAQLGYHANESTQTSPSGAGYQYRCKNTLNSRSSTLNSGQSLETPQPFWRILTAIFSREQQDSSNEELIIVLEQGTEVRLSLEEFIFILPQRQRCS

SEQ ID NO: 44649 - protein, 338 aa, Homo sapiens
  misc_feature (1)...(338): Xaa = X or * as defined in Table 2
TTKTGQDKDRLEEFSMQQLSGSKRKMSTQPRTELPPNRHTTTTSTTPATNTTCTATVPPQPQYSYHDINVYSLAGLAPHITLNPTAHPQLKQCVRQAIERAVQELVHPVVDRSIKIAMTTCEQIVRKDFALDSEESRMRIAAHHMMRNLTAGMAMITCREPLLMSISTNLKNSFASALRPDGSSAIQLXSNDXSCSWRPKLYDAFWDLSSLRVXXPSRPEGEGRVSSEGMGESLPFSSSWPRQYQSFLCICWTDAPARNTEDRXSHNKVLSSVYXNVCXNQLPCSGXAAAQSCCQSHHDPSQVLSQPGCLCSTHCTARETLRGGHQHCHKDXSAEQGL

SEQ ID NO: 44650 - protein, 373 aa, Homo sapiens
  DOMAIN (323)..(340): PANCREATIC HORMONE SIGNATURE domain identified by eMATRIX, accession number PR00278A, p-value=4.569e-10, raw score of 12.43
  misc_feature (1)...(373): Xaa = X or * as defined in Table 2
PEPEPGARGGEQLNEDFEGXVAVPTCLHCPALSRTQSRAIQALTVRRGEATIRPPPCDDTKGGHRFLNELIKVVSPKVGAPSPSSDLPCRMWGEERGWTVGLPEEVKIAEAYQMLKKQGEAHRGWGATRACLPLPHHERPKNVIFEDEEKSKVRLQGGTYGDSEPRWGSVGSIKEMVQEDSGRAQSTGRRRDGGIELGHNVKLLTEMVMSHSQGGAAAGSSEDLMKVHLPPCLPHSLPTPQPTRTLRMRPTLFRLASDTEDNDEALGEPRAGAEVRSPPLPPPPAPVRGEEVNGDATAGSIPGEEVAGELGGHPSGWRGTESYPAMPTRPGEQASPEQPSASVSLLDDELMSLGEEGARPGGGRAQQQMGHDP

SEQ ID NO: 44651 - protein, 91 aa, Homo sapiens
  DOMAIN (51)..(64): ROK family proteins domain identified by eMATRIX, accession number BL01125D, p-value=7.429e-09, raw score of 13.61
  misc_feature (1)...(91): Xaa = X or * as defined in Table 2
GTRQEVTAGVEPAREWQRRLMEVQWGLERAPYCIQHAPRXRRSPARPGTQSCGLGACWIQXGALSSPHCTSISRRCHSLAGSTPAVTSCLV

SEQ ID NO: 44652 - protein, 152 aa, Homo sapiens
TIVRVVEFEAQNHNRVPDVKALMESPEGQLSLEPKSDSHFQASHTGCQSPLCSAQRHTPQSPFTNHAAAAGRKTLRSCMGLEWFPELYPGYLGLGVLPGKPQCWNAMTQKPQLISPQGERLSQGWIRCNTTIRKSGFGGITMLFTGYFVLCW

SEQ ID NO: 44653 - protein, 47 aa, Homo sapiens
MTCPLENTNTRAAPAAVIPQVKKVPSKAWNTELWPWSMLDTAPSKLQ

SEQ ID NO: 44654 - protein, 53 aa, Homo sapiens
  misc_feature (1)...(53): Xaa = X or * as defined in Table 2
MVWLKLPSGPLALSGLLMLLLLLLLLPPLSLPEDAQNALFPLSLFSLLFLITX

SEQ ID NO: 44655 - protein, 73 aa, Homo sapiens
  misc_feature (1)...(73): Xaa = X or * as defined in Table 2
XFLGTQSLSGSDSGGEQQQQQQQHSISPDRASGPEGIFEQDHGPDSSPNTPQPVPEQFRVVAKALTFHIQPGP

SEQ ID NO: 44656 - protein, 190 aa, Homo sapiens
  misc_feature (1)...(190): Xaa = X or * as defined in Table 2
FLLERAPYGVGFSLLPGLWLGSRAGVGRHHDKRVGLGRAPTWSLEGAVSSMTPRPQLCVPWPCWGPSSPGGXQQLGQLSCSYSLVDRXVALLWFWMLVGSPLVKGHCPTPWSRFVDFSVPLATPPGIVYWGLFAVFLFSHLLPARPGEQMSACCRHLHAPSSPLLTLDSLIKVYSCNSQGKLVRVFPPGD

SEQ ID NO: 44657 - protein, 108 aa, Homo sapiens
  misc_feature (1)...(108): Xaa = X or * as defined in Table 2
KQNKSMGRKSQGFVASFGNHLYCTASCGMPASSTSTQTWPRVLPLHSQESSHGGCSWRGRRXGPRPRPHKTPVPMVMDSTARNRARRELVLAWCKSPLATALLVSWDK

SEQ ID NO: 44658 - protein, 72 aa, Homo sapiens
  misc_feature (1)...(72): Xaa = X or * as defined in Table 2
VFGEQEVFGYMNKFSSGDFXDFGAPTTLSSEHCTQCVVFYPSAPSFPFPPVPKVHCVIPHSLVPTYEWEHTM

SEQ ID NO: 44659 - protein, 184 aa, Homo sapiens
  misc_feature (1)...(184): Xaa = X or * as defined in Table 2
AGDAAPEDPAGRGQEDLYDEELPGWGLCIPHPACLQPCHAXVTKAGARVKVILPSXDTQRTKDILKAGGGPSSIHFINSAHGKPAVIVRPRGIWVLNTTPLSGQWGPYIGVYTAATVDMKSLGSGSLGLQLALPLAASWLGVLTEAARVFGEQVVFGYMNSFFSGDFWDFGAPITRAVYTVPNV

SEQ ID NO: 44660 - protein, 231 aa, Homo sapiens
  DOMAIN (161)..(207): kw TRANSCRIPTASE REVERSE II ORF2 domain identified by eMATRIX, accession number DM01354O, p-value=1.000e-40, raw score of 8.73
EVQRTPPRYSSRRATPRHIIVRFTKVEMKEKMLRAAREKGRGYHKGRAISLTADLSAETLQARREINKIDRPLARLIKKKREKNQIDAIKSDKGDITTDTTEIQTTIREYYKHLYANKLENLEEMDKFFDTYTLPKLNQEEVRSLNRPITGSENVAIFNSLPTKKSPGPDGFTAEFYQRYKEERVPFLLKLFQSIEKEGILPNSFYEASIILIPKSGQRHNHNRGFLEQYH

SEQ ID NO: 44661 - protein, 433 aa, Homo sapiens
  DOMAIN (290)..(331): kw TRANSCRIPTASE REVERSE II ORF2 domain identified by eMATRIX, accession number DM01354I, p-value=7.300e-39, raw score of 15.55
WDYVKRPNLRLIGVTESDGENGTKLENTLQDIILENFPNLARQANIQIQEIQRTPQRYSSRRATPRHIIVTFAKVEMNEKMLRAAREKGRVTHKGKPIRLTADLSAETLQARREWGPIFNILKEKNFQPRISYPAKLSFISEGEIKSFTDKQMLRDFVTTRPALKELLKEALNMERKNRQINETENQQGYPGIELGSAPSGPNPLFCRHLQMSVDGRHLQNSPPQINRIYIFLAPHHTYSKIDHILGSKTLLKKCKRTEIITNYLSDHSAIKLELRIKKLTQNCSTTWKLNHLLLNDYWVHNEMKAEMKMFFETNENKDTTYQNLWDTFKAVYRGKFLALNAHKRKQERSKMDTLTSQLKELEKQEQTHSKASRRQEITKIKEELKEIETQKTLQEINESKSWFFERINKIDRPLARLTKKKREKNQIDAIKN

SEQ ID NO: 44662 - protein, 127 aa, Homo sapiens
DGENGTKLKNTLQDIIQENSPNLARQANIQIQEIQRTPQRYSSRRATPRHIIVRFTKVEMKEKMLRAAREKENKIARNPTYKGCEGPLQGELQTTAQGNKRGHKQMEEHSMLVDRKNQYHENGHTAQ

SEQ ID NO: 44663 - protein, 512 aa, Homo sapiens; identical to SEQ ID NO: 42050
  DOMAIN (421)..(462): kw TRANSCRIPTASE REVERSE II ORF2 domain identified by eMATRIX, accession number DM01354I, p-value=1.000e-40, raw score of 15.55

SEQ ID NO: 44664 - protein, 371 aa, Homo sapiens
  misc_feature (1)...(371): Xaa = X or * as defined in Table 2
REHLAEGMAVGTASADLNISACWLRREQQISQHSARALLRDRLPPQENSSWHPAGAPLGRNFQRKEQAAIFAVLQPPLVIPRKTGSGVDLEQTPADLQKRGLTVTRKTNKQKAIASTSTERTPTQKPPFKSHQHQRPNVDKSAKMRKNQSKKAENSKNQNTSSPPKDHNSSPAREQNWTENEFDELTEVGFRRWVITNSSKLKEHVLTQCKETKKLDKRLEELLTIITSLEKNINDLMELKNTAGELRDAYTSINSXIDQAEERISEIGDQLNEIKCEDKMREKRMKRNEQSLQEIWDYVKRPNLRLIGVPESDGENGTKLENTLQDIIQENFPNLARQANIQIQEIQRTPQRYSSRRATPRHIIVRFTKV

SEQ ID NO: 44665 - protein, 382 aa, Homo sapiens
  DOMAIN (50)..(103): INHIBITOR HEAVY CHAIN CHANNEL IN domain identified by eMATRIX, accession number PD01101B, p-value=1.375e-19, raw score of 21.53
MLPILGSRHPSSLGQARKLDYRPSKSQCLEPGTPRACLVLYTLVAKLIYNDYFIHYFAPRGLPPMEKNVVFVIDISGFMFGTKMKQDHNFSLAREQNWTENEFDKLMEVDFRRWVITNSSELKEHVLTQCKEANNLEKRLDELLTRITSVEKNINDLMELKNTAGELREAYTSFNSCNDQAEEKISEIEDQLNEIKPNLRLIGVPESDGENGTKLENTLQDIIQENFSNLAKQANVQIQEIQRTPQRYSSRRATPRTHIIVRFTKVGNGREKMFKGQPGGKGRVTLKGKPITLTADLSAETLQARREWGPIFNILKEKNFQPRISYPAKLSFISEGEIKYFTDKQMLRDFVTTRPALQELLKEALNMERNNRYQPLQNHAKM

SEQ ID NO: 44666 - protein, 517 aa, Homo sapiens
  DOMAIN (425)..(432): PLANT PEC FAMILY METALLOTHIONEIN SIGNATURE domain identified by eMATRIX, accession number PR00877B, p-value=2.920e-09, raw score of 4.74
MQLCIAAAVRTLAWQAPTSLAEGSRGQGCSTGPRGNDHRSPQLLGVAPAVSWAISAVLGEHHVCLAGAVLWGNGNCEVLTDRARVLTTAASQRLDIAEWMPKKHCWVNVRVNDEDGGGCWCQGKAPGVWGGGTRQFRLHFQTPSHFLTPISPVAPISELTSSLSSGEILESPEVQLTLLRHKAFAVSTFLGHSILELVLVTGIWYWPWGLVLGCGDPALVPETWYWPWGPVPGCGYPVLVPEIWYWPWGPVPGCGYPVLVPETWYWPWRPVPGCGYPVLVPEIWYWPWGPIPGCRDSVLSMGSVPGFGEPVVPVGPIPGGGDLVLEDPDSKTTEATGLSVPGLRCSPWPRLPPTRPPSYRQQRFSLPLNGATVQPIISLQGWQMTPATGSVSSGPSTQGTKDTILPQDPPSHVAHGKRCRESSRAVPCPGGDRVQIPEEMLLFGPFSEKPPKETFQFLIKQTHTYSGLGMAATLGSPPGKASQGSAELREQVPTCPGTGLALNKQIKARRRKAELWD

SEQ ID NO: 44667 - protein, 303 aa, Homo sapiens
MAERANVELRLWLQWVEATSFGSFHIVLNLRVHRSQELGFGNLHVDFRTWKLLDAQDYQTNNNDQAVVEICITRITTAIRETESIEKHAKALVGLWDSCLEHNLRPFGKDEDTPHAKIASDIMSCILQAKARQFARVPRSSRLLRAYRAAHRCGEEGKPGQRMARQRDQTVTPAGDWTITWPRTGPPPLQAAFPLCSHPAAVKALPLTHGLHTHSCSTPNSHTLHGRKKEKDFADVIKDLGIGDFPALAVGPNAITSILRKKGRGPFHASAYKRRRQCEQEAETEVMWPQAKGCQQPPEAGRG

SEQ ID NO: 44668 - protein, 67 aa, Homo sapiens
DIMSCILQNYNRPPVMALAIPIAVKFLHRGNKELCRNMSNYLSLAAITKADLLADHTEVIVKSILQV

SEQ ID NO: 44669 - protein, 236 aa, Homo sapiens
  misc_feature (1)...(236): Xaa = X or * as defined in Table 2
PLITGTHDSGSVESQLIKLILTMHQLFRLVLGQKDLSRAGDLFSXNNSEIEDSLTEALEQIKIISSSSDYQTNNNDQAVVEICITRITTAIRETESIEKHAKALVGLWDSCLEHNLRPFGKDEDTPHAKIASDIMSCILPELQPTPQSMALAIPIAVKFLHRGNKELCRNMSNYLSLAAITKADLLADHTEVIVKSILQGMVRKLSLGTCFGRYLKVFSSSIYGLWEARPRVLEAN

SEQ ID NO: 44670 - protein, 77 aa, Homo sapiens
  misc_feature (1)...(77): Xaa = X or * as defined in Table 2
VSLELCLKTTGPDCGCQTSQTPPAAAYHHLPGAGLPCGPRLPALCCSCPMGARPLXHHKRDPSRFQEKTHLYLPSSH

SEQ ID NO: 44671 - protein, 275 aa, Homo sapiens
  misc_feature (1)...(275): Xaa = X or * as defined in Table 2
GTEGVMANRSQEGNGGGSWRAKQVVVTVPFXEQSLVIMLWRRGGNTXQRPSEGTSRSHICSFHMSRHCQXCKCLLKEPVSAEARDALDTKTHFPLAMIPSYLLLNGNIGELPEGPAGGCAQNPGLWASRGPARRXRSQASSSPEVRWPPGQCGLRGRPCKKEPRPHPWSRPCASPYRGAGGQRLRRACSAAGRKTPDRRPLPEPTRGPVSQRAVLGKLRAAAGHRIPIGDLGDGLSLGAPPAGRHLHTVLPLRREFSPCEDALGIGEQQGKKRVT

SEQ ID NO: 44672 - protein, 240 aa, Homo sapiens
  DOMAIN (86)..(123): RIO1/ZK6323/MJ0444 family proteins. domain identified by eMATRIX, accession number BL01245F, p-value=7.776e-13, raw score of 18.75
  misc_feature (1)...(240): Xaa = X or * as defined in Table 2
PVLRGGIQEFAYIKALYERKFLVPKPIDYNRHAVDMELINGYPLCXIHHVEDPASVYDEAMELIVELANHGLIHGDFNEFNLILDESDHITMIDFPQMDSTSHPNAEWYFDRDVKCIIDFFMKRFSYESELFPTFKDIRREDTLDVEVSASGYTKEMQADDELLHPLGPDDKNIETKEGSEFSFSDGEVAEKAEVYGSENESERNCLEESEGCYSDHLETLNKXRKTVYQKRVLMHGVLK

SEQ ID NO: 44673 - protein, 628 aa, Homo sapiens
  DOMAIN (507)..(530): FLAGELLAR BIOSYNTHETIC PROTEIN FLHB SIGNATURE domain identified by eMATRIX, accession number PR00950B, p-value=9.695e- 10, raw score of 14.12
  misc_feature (1)...(628): Xaa = X or * as defined in Table 2
MGSKVKEVEDDSQMSDLVRGMNAFSKTGSGGVEQGRTGQGGTNGHIKKAKARDRDRRFKKTPQRKVGNDNLQLPLRWTEQHAETHIMNFCSKNYNRNIPGKPRESIDTLNEAACRGRLSKTARKLWSEAQDQRSFQATEMQAFLFSAKRIAAEKKTIIRRRDLCSIWGKLLPRPGSQSVPAQIPENLQEQEERAKWLLNGRSKFFPQTTSTLGKVTSNKTGVKEPELESRQPNLLKVEMGMKNHEIVPGSLIASIASLKHGGCNKVLRELVKHKLIAWERTKTVQGYRLTNAGYDYLALKTLSSRQVVESVGNQMGVGKESYIYIVANEEGQQFALKLHRLGRTSFRNLKNKRDYHKHRHNVSWLYLSRLSAMKEFAYMKFRTLEIRDYFYWVKINVLTGPCSPKRGSSGEFVPCLLQLLLGFGDCWHSFGLWHITPVSVSMLTLLPSLLLVKQKKPTLDSRMGQFDFVVELQLYLCVLEREVIREYPPDGQIFGRYFDRDVKCIKDFFMKRFSYESELFPTFKDIRREDTLDVEVSASGYTKEMQADDELLHPLGPDDKNIETKEGSEFSFSDGEVPEKAEVYGSENESERNCLEESEGCYSDHLETLNKXRKTVYQKRVLMHGVLK

SEQ ID NO: 44674 - protein, 586 aa, Homo sapiens
  DOMAIN (352)..(374): SPUMAVIRUS ASPARTIC PROTEASE (A9) SIGNATURE domain identified by eMATRIX, accession number PR00920E, p-value=6.870e-09, raw score of 13.24
  misc_feature (1)...(586): Xaa = X or * as defined in Table 2
STPPGGPSVLMXSTEEPGAGRSQPLCDDLSTRPLSCLGAGCCLWPAKRISAKEEPWYSSRSKDKKEKNYSSPETTTSGGCHSPGDSQYQELAVALESSSVTINQLNENIESLKQQKKQVEHQLEEAKKTNNEIHKAQMEQLETINILTLEKADLKTTLYHTKRAARHFEEESKDLAGRLQYSLQRIQELERALCAVSTQQQEEDRGHCLSSPDQNFSLFTIQSSSCREAVLHRRLQQTIKERALLNAHVTQVTESLKQVQLERDEYAKHIKGERARWQERMWKMSVEARTLKEEKKRDIHRIQELERSLSELKNQMAEPPSLAPPAVTSVVEQLQDEAKHLRQEVEGLEGKLQSQVENNQALSLLSKEQKQRLQEQEEMLREQEAQRVREQERLCEQNERLREQQKMLQEQGERLRKQEQRLRKQEERLRKEEERLTKAGKEAVGPGGEAVEEGGEATKAGGEARALPEPQARQAAGRATVQLRGSEQREKERTAVGAASKGAAGEARRGEGDAVHGHLSAADLXEGGAAQAVTAADPVRGPAAAAGSLGQSGAPRSCQPPEPTARDPAKPRGSPWRRRWRTTSGQ

SEQ ID NO: 44675 - protein, 906 aa, Homo sapiens
  DOMAIN (586)..(604): CADHERIN SIGNATURE domain identified by eMATRIX, accession number PR00205B, p-value=8.615e-19, raw score of 11.39
MCRIAGALRTLLPLLAALLQASVEASGEIALCKTGFPEDVYSAVLSKDVHEGQPLLNVKFSNCNGKRKVQYESSEPADFKVDEDGMVYAVRSFPLSSEHAKFLIYAQDKETQEKWQVAVKLSLKPTLTEESVKESAEVEEIVFPRQFSKHSGHLQRQKRDWVIPPINLPENSRGPFPQELVRIRSDRDKNLSLRYSVTGPGADQPPTGIFIINPISGQLSVTKPLDREQIARFHLRAHAVDINGNQVENPIDIVINVIDMNDNRPEFLHQVWNGTVPEGSKPGTYVMTVTAIDADDPNALNGMLRYRIVSQAPSTPSPNMFTINNETGDIITVAAGLDREKVQQYTLIIQATDMEGNPTYGLSNTATAVITVTDVNDNPPEFTAMTFYGEVPENRVDIIVANLTVTDKDQPHTPAWNAVYRISGGDPTGRFAIQTDPNSNDGLVTVVKPIDFETNRMFVLTVAAENQVPLAKGIQHPPQSTATVSVTVIDVNENPYFAPNPKIIRQEEGLHAGTMLTTFTAQDPDRYMQQNIRYTKLSDPANWLKIDPVNGQITTIAVLDRESPNVKNNIYNATFLASDNGIPPMSGTGTLQIYLLDINDNAPQVLPQEAETCETPDPNSINITALDYDIDPNAGPFAFDLPLSPVTIKRNWTITRLNGDFAQLNLKIKFLEAGIYEVPIIITDSGNPPKSNISILRVKVCQCDSNGDCTDVDRIVGAGLGTGAIIAILLCIIILLILVLMFVVWMKRRDKERQAKQLLIDPEDDVRDNILKYDEEGGGEEDQDYDLSQLQQPDTVEPDAIKPVGIRRMDERPIHAEPQYPVRSAAPHPGDIGDFINEGLKAADNDPTAPPYDSLLVFDYEGSGSTLGSLSSLNSSSSGGEQDYDYLNDWGPRFKKLADMYGGGDD

SEQ ID NO: 44676 - protein, 468 aa, Homo sapiens
MHIIPHFGLPTSIQSNNRPAFISQINQGISTSLDDNGKVVLEIASNISSSPCTSPNLEGMGPNKPSRRAGEQSPTRRGTGKRSREAPLGPHAAEARSGGTAALCGCSTHDPERPPRGAVPGVFVAPSGPGAGTRRKQNHEPETSRGGALGERHPLHFHLHILHRPRSPPLHPSRLPLRSGPEPSRLRCHSSRLHTLADAHTLSLPVPPPPPQLLDLWVCFITPAGALRTLLPLLAALLQVRGGPRGPGHGRVSPPGEKFRYAAAPFSVRLPVPYMRPGGAFAWSLPYFSYPRERASEPFHLISTKRLLRGRKHLLQSGRRFPRHCTLRVPSPGAAQLSAASNPRMPPGSSRPASPGLEATSHSLGRDPLAGRVQCPGPKSVSACRGVPRRLRERGVPTLAAGQENPRRVPLPVALGARGEVLYCQLAAPKSADAARKCLLRGWRQVVWITPLRGLHGSGPGALRPAGG

SEQ ID NO: 44677 - protein, 121 aa, Homo sapiens
  DOMAIN (43)..(82): PROTEIN ZINC FINGER ZINC-FINGER METAL-BINDING NU domain identified by eMATRIX, accession number PD01066, p-value=5.200e-30, raw score of 19.43
  misc_feature (1)...(121): Xaa = X or * as defined in Table 2
RAYCWAYIRLSCLTVILIAWCSQESALSEEEEDTTRPLETVTFKDVAVDLTQEEWEQMKPAQRNLYRDVMLENYSNLVTVGCQVTKPDVISSWSKKRSPGXWRKKCLGGTVQNPEEERTAV

SEQ ID NO: 44678 - protein, 110 aa, Homo sapiens
  DOMAIN (71)..(110): PROTEIN ZINC FINGER ZINC-FINGER METAL-BINDING NU domain identified by eMATRIX, accession number PD01066, p-value=5.200e-30, raw score of 19.43
MCMSVKAVANKTLQSGQQHPVALSESFVANASGKTTQSATQDGFLANSRAQISSKFHSRNRTWLRQETVTFKDVAVDLTQEEWEQMKPAQRNLYRDVMLENYSNLVTVGC

SEQ ID NO: 44679 - protein, 176 aa, Homo sapiens
  DOMAIN (105)..(144): PROTEIN ZINC FINGER ZINC-FINGER METAL-BINDING NU domain identified by eMATRIX, accession number PD01066, p-value=5.200e-30, raw score of 19.43
  misc_feature (1)...(176): Xaa = X or * as defined in Table 2
MLLNIPQHTRQSPRAKNYLAQNVNSVKAWCSQESALSEEEEDTTRPLVRLKHLFVSCIILQCSYVLLPLTPEYQLNKFLYVVITMPNFDDFKLISIMFLQETVTFKDVAVDLTQEEWEQMKPAQRNLYRDVMLENYSNLVTVGCQVTKPDVISSWSKKRSPGXWRKKCLGGTVQVN

SEQ ID NO: 44680 - protein, 179 aa, Homo sapiens
  DOMAIN (110)..(149): PROTEIN ZINC FINGER ZINC-FINGER METAL-BINDING NU domain identified by eMATRIX, accession number PD01066, p-value=8.714e-09, raw score of 19.43
  misc_feature (1)...(179): Xaa = X or * as defined in Table 2
MPTTTTREMTQNSSETIKNKNGKKQRKQRKNSKKNRRKQKDEDKTRRQNKRHHKKNDINPEEERTAVRLKDGGAPAPQAVQEHDAGICSASGGAQETYILVEGKGEASTSPGQSKGSREGGVGANETCSKKLYRDVMLENYSNLVTVGCQVTKPDVYSSWSKKRSPGXWRKKFWEALSR

SEQ ID NO: 44681 - protein, 302 aa, Homo sapiens
  misc_feature (1)...(302): Xaa = X or * as defined in Table 2
FDLKMSKCRKTPLQQLASPASFSPDILADIFELFAKNFSYWKPLNNEWQLPDPSEIFTCDHTEFNAFPWIXRTPXNEVKKPTGVIRTWDEWHEHTCFHXXSGEISFPHGRKSVNAELWTQAWCKFHEILCSFPLIPQEAFQNGKLNSLHLCEAPGAFIASLNHYLKSHRFPCHWSWVANTLNPYHEANDDLMMIMDDRLIANTLHWWYFGPDNTGDIMTLKFLTGLQNFISSMGTVHLVTANGSFDCQXNPAGDQRMVKGHCYFPSWNWLHLSKHTQCGNEFIFMTKKKQSLTAKSLPDTFS

SEQ ID NO: 44682 - protein, 99 aa, Homo sapiens
  misc_feature (1)...(99): Xaa = X or * as defined in Table 2
KRKEITNSLDAAASRGTVPAALAGVQYLEPRAGAAGRLGGAGWGRVPRPGSSSSLSLVGRXGWCPVLRTQGRCCRPPGGCWVGARPKAWELLSLSLVGR

SEQ ID NO: 44683 - protein, 126 aa, Homo sapiens
IWNSAPTASRRPWSLAPGSPRSTWCVASTPPCAPGKAREPRDRSEVPPATAPAVLQSHWPCPRSSRSGSAGNCVGPPHSWAPGHSQHLTPGPGHGGPRGPCWHLLMQTAWPALTPPGAMPGEAEGQ

SEQ ID NO: 44684 - protein, 140 aa, Homo sapiens
  misc_feature (1)...(140): Xaa = X or * as defined in Table 2
RCSQPWHCPAALAGVQYLEPRAGAAGRLGGAGWGRVPRPRELLSLSLVGRXGWRPQEQDQLFPHLRRPVGTRSESTWGNRAGAATWRAATPSPWRTXNGTKSKQWTASGLWQKGDGWDXGSGKPPLPLSVPAGQRLVPVC

SEQ ID NO: 44685 - protein, 56 aa, Homo sapiens
  misc_feature (1)...(56): Xaa = X or * as defined in Table 2
PRRLPTACTPXRSCSRYWMVPKSPRMTMMMWTKLARMGAQWXPRKSNACLSRAASS

SEQ ID NO: 44686 - protein, 90 aa, Homo sapiens
LPSRGAGLGTCSPPCLSLPPTPWAPVRPEPPRRAPPPAPRRPVPSTTQEARRSAASLLSPARPRAHRDGTNNSRRATLRAVTLTARVRGF

SEQ ID NO: 44687 - protein, 119 aa, Homo sapiens
  misc_feature (1)...(119): Xaa = X or * as defined in Table 2
SSSLSYLPAGQGSGPAARHAXASHPLHGLLCGPSLPNEHRPLLQGAQSHXPPKGXGVRAHGVGLAGRSTCSPECGIHXVKPAGLLSFLGPRCFYELXQSPRRSAAASLLSPARSRAHRE

SEQ ID NO: 44688 - protein, 136 aa, Homo sapiens
  misc_feature (1)...(136): Xaa = X or * as defined in Table 2
XLKKDLPARQSDNDVRNTISGMQKFMGEDLNFHERKKFQEEQNREWSLQQQREWKNARAEQKCAEALYTETHHQKGSLCICERLQQEPEPIEPGSLLPLPSRATLLFERQQWRRQRDLRRALDSSNLSLAKEQHLH

SEQ ID NO: 44689 - protein, 180 aa, Homo sapiens
MRPSGGRAEGRCRRWPARSAAVARSRARRPRTSRAAADQPLPPPGREPAYKAALPDGRGFPGGLLSLLHLTYGTLFTTVHWTERKEKRKEKRKGRKEERKEGKKEGKEKGREGGQASPSLPDERRPLSTAPSPIDHPRAEECERTARDWQAAPPAVSVRDPLGEASWAPESGGDVESLYI

SEQ ID NO: 44690 - protein, 309 aa, Homo sapiens; identical to SEQ ID NO: 33125

SEQ ID NO: 44691 - protein, 491 aa, Homo sapiens
MVQPLGEGSISHTVAPHVLLAVHRPPWFPELQAWAEIHGAKRKKRLSQVGKGSKANTPPATIPLDRNRACAFTERRRQVGPCSTLGVEAAINLPVPGSALAHKRGKRLWNKWVKGCPWVSFVLAAAPLCISAFSADSSAEAIAQAKDLLSQEDLKAAMSAVSMGSREWYLEGEPLRRREENHHGLVVSLASGVKPQTFAVSVTVLKAARLELFIPPRGLVVSLASGVKLQTFAVSVTAHKSSVDPKNSGAQLASPSGSRTRAAGGAACQCHAVRSHSSALGWSMGLGAVEQGVVLVGEARAAQEPMEWVGGSGMAGCMSRALPHGKAAKAWREIEHSAGGPALLGDLVHPLQPLARVPSPSLPCASRAGRLLRVQARQTHAHPELQLAPKRARSPGSRSRLSLHTSLQAEGASCGLGQHRKGLPQCSGGLKGSSSAAKVGAQAEEALRASEGCEDCQHAVTSQLSLPHGVATLVSVKLFLYKNAMVFLCAV

SEQ ID NO: 44692 - protein, 73 aa, Homo sapiens
VGGRLRHGGLQVPSPAPHLYPVDFFGSLPHLLVWLHIFISSVADVACCLPKLYRPLLLQPWKLDFVCGIHVPL

SEQ ID NO: 44693 - protein, 266 aa, Homo sapiens
MKFQYKEDHPFEYRKKEGEKIRKKYPDRVPVIVEKAPKARVPDLDKRKYLVPSDLTAAFPRGRARDLQPAMPEPPTHSMGTCAARASPTSTTPCSTAPSPIDREGTNNPRAEECERTARDWQAAPPAAPVWDPLGEASWAPESSGNVESISSSGIVNIPISTLCLAQGFSRFVNAPIDTLYLAALVGPWRTFMSSSGIVNTPIGTLYLAQGMVHYHKSPFPTCLVQMSKIESLPKEKGAQGVAAGLPSSLAPTCPPPDPSMKLHNN

SEQ ID NO: 44694 - protein, 48 aa, Homo sapiens
LPSHGAGLGTCSPPCLSLPPTPWAPVRPEPPRRAPPPAPRRPVLCVFS

SEQ ID NO: 44695 - protein, 405 aa, Homo sapiens
MQYAKLSYRTHLCSPINWLLPLNTADFIRVILDFSFSFSYTPRALHQPILLALYSKSIQKLTISQHLSITNAICDISEWGEATSAALLSSSLPDRKASSACQWMWVDLNPDLVKEISAARPLRGSGSIHSSRADPNSRHKARMVKHPRLLAIAPGLGPSAPGPCQVIVLVTSPASKQKVPREATPTLKPSSGKKCGKKSCELSQPLRSSGHEETTVGGQGEESPWVVDGTGHRGAGGGARRGGSGRKEPMEGMGGSGMAGCRSRALPSGKAAKARHSVYGVLLLQTKLTSTILQALQTKCPGRSYHPSEFPVLICGSPSHTDLQTTGKKQPIATDQEASQILELTDKSYKITMINTVKNLEKHRDIMADKYSIFHDGWDHSLLIIVPPASSAEHATAVTQSVFVE

SEQ ID NO: 44696 - protein, 213 aa, Homo sapiens
MNGKGLKESLPAAQIDFARGITTGGTTGTCHCVRSWWVLGLTDLKNEAADPHDSGAQLASPSGSRTGAAGGAACQSCAVRSHSSALGWSMGLAALEQGVVLVREARAAQEPMEWRYEQNFIFSNLNQSSCIGMDGLRERSWYQICRQLGTEVFTCMGPVALAGHSECGATPTWNSRWPVIVSHASPSTSSCKQREPAPTSASPERGSHSAAAG

SEQ ID NO: 44697 - protein, 268 aa, Homo sapiens; identical to SEQ ID NO: 36795

SEQ ID NO: 44698 - protein, 56 aa, Homo sapiens
AQRQWAGTAGDPAHPPQPLAWVLSPSLPGASRAGWLLRTKQTSKQEQLKKTKRDII

SEQ ID NO: 44699 - protein, 92 aa, Homo sapiens
SRMQEQTSNPERTHRPSEGSRLLLQDPGDTSNILWEAESVGKFSSPSSPLPGNRLRAVLVGHRGRGGRCFLGKQQQQQHYFSGPSNGNHMPK

SEQ ID NO: 44700 - protein, 1136 aa, Homo sapiens
MSEAPRFFVGPEDTEINPGNYRHFFHHADEDDEEEDDSPPERQIVVGICSMAKKSKSKPMKEILERISLFKYITVVVFEEEVILNEPVENWPLCDCLISFHSKGFPLDKAVAYAKLRNPFVINDLNMQYLIQDRREVYSILQAEGILLPRYAILNRDPNNPKGVKLQTFAVSVTALKVARLELFVPPGGLLVLLGSGVKLQIFAGCRWSCLPVTRRVLALLSPWVVDGTGRRGAGGGARWGGSGRTGAHGVECNLIEGEDHVEVNGEVFQKPFVEKPVSAEDHNVYIYYPTSAGGGSQRLFRKIGSRSSVYSPESNVRKTGSYIYEEFMPTDGTDVKVYTVGPDYAHAEARKSPALDGKVERDSEGKEVRYPVILNAREKLIAWKVCLAFKQTVCGFDLLRANGQSYVCDVNGFSFVKNSMKYYDDCAKILGNIVMRELAPQFHIPWSIPLEAEDIPIVPTTSGTMMELRCVIAVIRHGDRTPKQKMKMEEVLDIARQLLMELGQNNDSEIEENKPKLEQLKTVLEMYGHFSGINRKVQLTYLPHGCPKTSSEEEDSRREEPSLLLVLKWGGELTPAGRVQAEELGRAFRCMYPGGQGDYAGFPGCGLLRLHSTYRHDLKIYASDEGRVQMTAAAFAKGLLALEGELTPILVQMVKSANMNGLLDSDSDSLSSCQQRVKARLHEILQKDRDFTAEDYEKLTPSGSISLIKSMHLIKNPVKTCDKVYSLIQSLTSQIRHRMEDPKSSDIQLYHSETLELMLRRWSKLEKDFKTKNGRYDISKIPDIYDCIKYDVQHNGSLKLENTMELYRLSKALADIVIPQEYGITKAEKLEIAKGYCTPLVRKIRSDLQRTQDDDTVNKLHPVYSRGVLSPERHVRTRLYFTSESHVHSLLSILRYGALCNESKDEQWKRAMDYLNVVNELNYMTQIVIMLYEDPNKDLSSEERFHVELHFSPGAKGCEEDKNLPSGYGYRPASRENEGRRPFKIDNDDEPHTSKRDEVDRAVILFKPMVSEPIHIHRKSPLPRSRKTATNDVVSENANYLRTPRTLVEQKQNPTVASTALRSSPIMRKKVSLNTYTPAKILPTPPATLKSTKASSKPATSGPSSAVVPNTSSRKKNITSKTETHEHKKNTGKKK

SEQ ID NO: 44701 - protein, 176 aa, Homo sapiens
  misc_feature (1)...(176): Xaa = X or * as defined in Table 2
VPSLDGQRGLELDTECRLVYLQSLSXTXRFSTSSPEQLDTECRLVHSQTLCXTQGADWCIYKPXVGLQVELPASPAPWLAFLSPWVVNGTGRHGAGGGARRGGSGCTGAHGVGGRLRHGRLQVPSPAPWEGSCSLPSPIGPPFKRAHSVLQKGSSTLMVGTCASSPKVVPFHLLSF

SEQ ID NO: 44702 - protein, 398 aa, Homo sapiens; identical to SEQ ID NO: 36568

SEQ ID NO: 44703 - protein, 535 aa, Homo sapiens; identical to SEQ ID NO: 36563

SEQ ID NO: 44704 - protein, 609 aa, Homo sapiens
  DOMAIN (495)..(540): kw TRANSCRIPTASE REVERSE II ORF2 domain identified by eMATRIX, accession number DM01354N, p-value=1.000e-40, raw score of 13.17
MKPQTLAVSVTALKVARLESVPSDVRMCSEFLPSGVKLQIFTVSVTALKAARLELFVPPGGLVVSLASGVKLQTFAVSVTALKVARLEFVPSDVQMCSEFLPSGVKLQTFAVSVTALKTASGVVHSSRWARGLAGFRSEAADLRDSGAQLASPSGSRMGAAGGAACQSRALRSHSSALGLSMGLGPMEQGVVLLREAPAAQEPLELVGGSGMVDCRSRALPRRKAAKARQEIEHSADRSVRQKVNKDIQELNSALHQVDLIDIYLHPKSTEYTFFSAPHHTYLKIDHIVGSKALLSKCKRTEIITNYLSDHSAIKLELRIKNLTQNRSTTWKLNNLLLNDYWVHNKMKAEIKMFFETNENKDTTHQNLWGTFKAVCRGKFTALNNHKRKQEGSKIDTLTSQLKELEKQEQTHSKASRRQQITKIRAELKEIETQKTLQKINETRSWFFEKTNKVDRPLATLIKKKREKNQIDAIKNDKGDITTDSTEIQTTIREYYKHPYANKLENLEEMDKFLDTYTLPRLNQEEAESLNRPITGSEIEAIINSLPTKKSPGPDGFTAEFHQRYKEELVLFLLKLFQSIEKEGILPNSFYEASIILIPKPGRDTTKKQ

SEQ ID NO: 44705 - protein, 89 aa, Homo sapiens
LPSRGAGLGTCSPPCLSLPPTPWAPVRSEPPRRAPPPGSTVPSPINHPRAEECERMARDWQAAPPAAPVRDPLGEASWAPEFFGSMLPL

SEQ ID NO: 44706 - protein, 106 aa, Homo sapiens
MSGNRGCVGRLRASWSSGWVWAWCALHSEEPASPALRSISRRALAAFPWGKARDLQPAMREPPTRSVGSCAARASSTSATPCSTAPSPIDHPRAEECGRTARDWQA

SEQ ID NO: 44707 - protein, 117 aa, Homo sapiens
  misc_feature (1)...(117): Xaa = X or * as defined in Table 2
XVKLQTFTVSVTALKAEHLESFLTPGGLVISLGSGVKLLQIFEVTVIAHKSNVDPKNSGAQLASPSGSRTRAAGGAACQSCAVRSRSSALGWSMGLGAVEQGVVLVGEARATQEPMD

SEQ ID NO: 44708 - protein, 254 aa, Homo sapiens
  misc_feature (1)...(254): Xaa = X or * as defined in Table 2
LPSRWAGLGTCSPPCLSLPPTPWAPVRPEPPRRAPPSAPRRPVPRPPKGXGVPAHGAGLAGSSTCSPDICRVCRSEGTPEKPLYHPCVCTGSIKFIHQECYSPDMPSRLPIQDIFAGLVTSIGTAIRYWFHYTLVAFAWLGVVPLTAWHQLLDLGSTLNPGCSHLVILKLTTSTKTLFPNKATFILVVLSQDKTLMEDPRMEDKWKEDRFSPFNSEALEITLGERHRPQTASVIPWFCSSRHVLNLGKINFEVD

SEQ ID NO: 44709 - protein, 91 aa, Homo sapiens
  misc_feature (1)...(91): Xaa = X or * as defined in Table 2
IQSVHWCIHKPXARHRVLIGVFTIPELDIKVLHVPTRLRNPAGFTHWILHRDCRCSCMPVLRHAPALLSPWVVNGTGRSRAGDSTHRGGSG

SEQ ID NO: 44710 - protein, 76 aa, Homo sapiens
  misc_feature (1)...(76): Xaa = X or * as defined in Table 2
TWPRKPLFPPRPLGLXWEGMLQRSLTCPGDIFPIILVISIWLLVTYANFGSWLXFLPRKWVFPFFIPVPNKFLIFI

SEQ ID NO: 44711 - protein, 219 aa, Homo sapiens
VLQLIKAVWTPRTQEPSWLPPVNPARELQVELPASPAPCARTPQLLGGRWDWAPWSRGWRSFGEARAAQKPMEGVGGSGMAGCRSRALPHGKAAKARRAIEHSTGGLALLGDPVHSPQPLARVLSPSLPRASRAGWLLRVRGPPSPRPPGTPAGRQAPHAAPVPARASPSTPPCRAERVGSSPGQPRKGLPQCRGEAEGLLKCHQSGSPGRGEELWHSR

SEQ ID NO: 44712 - protein, 526 aa, Homo sapiens
  DOMAIN (371)..(398): POTASSIUM CHANNEL SIGNATURE domain identified by eMATRIX, accession number PR00169E, p-value=8.000e-32, raw score of 9.10
  misc_feature (1)...(526): Xaa = X or * as defined in Table 2
ANRCPLPHPGTGAGRCLGASAGRAEEAGVXGPLHEGLGYRPAGLFLRADTGHRTPGWGGGGGGAGGRGGAAPGPGVGATRRFAGRRGCARHGAAVPAAVRCCERLVLNVAGLRFETRARTLGRFPDTLLGDPARRGRFYDDARREYFFDRHRPSFDAVLYYYQSGGRLRRPAHVPLDVFLEEVAFYGLGAAALARLREDEGCPVPPERPLPRRAFARQLWLLFEFPESSQAARVLAVVSVLVILVSIVVFCLETLPDFRDDRDGTGLAAAAAAGPFPAPLNGSSQMPGNPPRLPFNDPFFVVETLCICWFSFELLVRLLVCPSKAIFFKNVMNLIDFVAILPYFVALGTELARQRGVGQQAMSLAILRVIRLVRVFRIFKLSRHSKGLQILGQTLRASMRELGLLIFFLFIGVVLFSSAVYFAEVDRVDSHFTSIPESFWWAVVTMTTVGYGDMAPVTVGGKIVGSLCAIAGVLTISLPVPVIVSNFSYFYHRETEGEEAGMFSHVDMQPCGPLEGKANGGLVDGE

SEQ ID NO: 44713 - protein, 142 aa, Homo sapiens
HHLPFDDLRLLRDANADGTAGKACVSASVLLHLREKVFPVPPMTCNGRVKDPGPGAMPMAMAVFPRARLASNKDCPTGNLPFPDHLQHHAMPPAVPPADPPCLAKPAEAPRHRPAPVSGCGSGHRFAQSLLHHGSPGLWLWL

SEQ ID NO: 44714 - protein, 116 aa, Homo sapiens
TRGPQASSIGGAAPSLGALDLLGPATGCLLDDGLEGLFEDIDTSMYDNELLGTSLWRASNQALKDGPGQRRKLRSLDEAELDYLMDVLVGTQATGSDRRGPRPLSPRAGMVVWYLN

SEQ ID NO: 44715 - protein, 342 aa, Homo sapiens
  DOMAIN (216)..(269): Chaperonins cpn60 proteins domain identified by eMATRIX, accession number BL00296D, p-value=6.351e-39, raw score of 11.15
  misc_feature (1)...(342): Xaa = X or * as defined in Table 2
FNLVYMSHVSDEGALSESASATAASWPPHGFLQHFVPGRPQVPICLYLLGQKTGXHMAPLLRQVTGSPIPPKTPGRGIRNMKRNEKRRYKTLMADGWELHQELSLGRTSSLPPYKGPGPWSPGFQKVSKGANPVEIKRGVMLAVDAVIAELKKQSKPVTKPEEIAQVATISANGDKEIGNIISDAMKKCGRKGIITKISSVQSIVTALEIANAYCKPLVIIAGDIDGEALTTLILNRLKVGLQVVAVKAPGFGDNRKNQLKDTVIATGGEVGEVTVIKDYAMLLKGKGNKSQIEKCVQEIIDQSDVTTSEYEKEKLSEKLSDGVAVLKSHPWSFCTKIYPLT

SEQ ID NO: 44716 - protein, 252 aa, Homo sapiens
  DOMAIN (158)..(211): Chaperonins cpn60 proteins domain identified by eMATRIX, accession number BL00296D, p-value=1.000e-40, raw score of 11.15
TTATVLARSIAKEGFEKISKGANPVEIRRGVMLAVDAVIAELKKQSKPVTTPEEIAQVATISANGDKEIGNIISDAMKKVGRKGVITVKDGKTLNDELEIIEGMKFDRGYISHPFINTSKGQKCGISRDAYVLLSEKKISSIQSIVPALEIAHAHRKPLVIIAEDVDGEALSTLVLNRLKVGLQVVAVKAPGFGDNRKNQLKDMAIATGGAVFGEEGLTLNLEDVQPHDLGKVGEVIVTKDDAMLLKGKGDK

SEQ ID NO: 44717 - protein, 1096 aa, Homo sapiens
  DOMAIN (235)..(278): 1 kw MIND INHIBITOR DIVISION CONTROL domain identified by eMATRIX, accession number DM01756B, p-value=4.822e-15, raw score of 22.91
  misc_feature (1)...(1096): Xaa = X or * as defined in Table 2
MKLMETLNQCINAGHEMTKAIAIAQFNDDSPEARKITRRWRIGEAADLVGVSSQAIRDAEKAGRLPHPDMEIRGRVEQRVGYTIEQINHMRDVFGTRLRRAEDVFPPVIGVAAHKGGVYKTSVSVHLAQDLALKGLRVLLVEGNDPQGTASMYHGWVPDLHIHAEDTLLPFYLGEKDDVTYAIKPTCWPGLDIIPSCLALHRIETELMGKFDEGKLPTDPHLMLRLAIETVAHDYDVIVIDSAPNLGIGTINVVCAADVLIVPTPAELFDYTSALQFFDMLRDLLKNVDLKGFEPDVRILLTKYSNSNGSQSPWMEEQIRDAWGSMVLKNVVRETDEVGKGQIRMRTVFEQAIDQRSSTAAPMVDSLIARVGVMARGNAITLPVCGRDVKFTLEVLRGDSVEKTSRVWSGNERDQELLTEDALDDLIPSFLLTGQQTPAFGRRVSGVIEIADGSRRRKAAALTESDYRVLVGELDDEQMAALSRLGNDYRPTSAYERGQRYASRLQNEFAGNISALADAENISQRSNLGVRLYACCGLLLCPAYPQHFAHGYVDKIPGYPGRAGTLTGLHPMQVCRCRRARELGHESLDSWGTSEDADAPSKRHSTSDLSDATFSNIRREDWLYYKQILTKKGKKAGSGLRQWKRVYAALLARSLSLSKEQREPGPAAAGAVGAGAGEDKAAPVCIGSCLVDIYSETKRRHVFRLTTADFCEYLFQAEDRDDMLGGSERSGRTAGPRARFRCDKGARAGLMEDLASSGAGTSSHHPDPNDDRDYCDCDPGCANQALISKKLNDYRKVSHSSGPKADSSPKGSRGLGGLKSEFLKQSAARGLRTQDLPAGSKDDSAAAPKTPWGINIIKKNKKAVPRAFGVRLEDCQPATENQHVPLIVAACCHIVEARGLESTGFYRVPGNNAVVSSLQEQLNRGPGDINQQDERWQDLNVINSLLKSFFQKLPEPLFTDDKYNDFIEANCIEDAREWMRTLRKLIRDLPGHYYETLKFLVGHLKTIADHSEKNKMEPRNLALVFGRTLVRTSEDNMTDMVTHMPDLYKIVETLIQHAPVWQQGASGSAQHXVPPAQHWQDSAPWXPGVSGPVGDL

SEQ ID NO: 44718 - protein, 140 aa, Homo sapiens
  DOMAIN (87)..(113): PROTEIN GTPASE DOMAIN ACTIVATION domain identified by eMATRIX, accession number PD00930A, p-value=5.021e-12, raw score of 25.62
HSSGPKADSSPKGSRGLGGLKSEFLKQSAARGLRTQDLPAGSKDDSAAAPKTPWGINIIKKNKKAVPRAFGVRLEDCQPATENQRVPLIVAACCRIVEARGLESTGIYRVPGNNAVVSSLQEQLNRGPGDINLQDERWQD

SEQ ID NO: 44719 - protein, 651 aa, Homo sapiens
  DOMAIN (450)..(491): PROTEIN GTPASE DOMAIN ACTIVATION domain identified by eMATRIX, accession number PD00930B, p-value=2.800e-23, raw score of 33.72
  misc_feature (1)...(651): Xaa = X or * as defined in Table 2
WGINIIKKNKKAAPRAFGVRLEECQPATENQRWQDLNVISSLLKSFFRKLPEPLFTDEELPLAPSFCPEEENGGRGGGPSPRYRLEPMDTIFVKNVKEDGPAHRAGLRTGDRLVKVNGESVIGKTYSQVIALIQNSDDTLELSIMPKDEDILQLPAERESGGEASEPPRVVRPEPSTRALEPPAEDRGDEVVLRQKPPTGRKVQLTPARQMNLGFGDESPEPEASGRGERLGRKVAPLATTEDSLASIPFIDICVRPCAWLHALLDWMAQQRVLDMQGQSIGMGVSWDRELEEKGSEKGYDEPTSPSIDLQAKHVPASAVVSSAMNSAPVLGTSPSSPTFTFTLGRHYSQDCSTSAHLNIFAGIFDISNDHLQVSTLESNFTRIHLTHYTGGNFPAWLAWDAVPFSSDLLNLGVHVLETGAGTPFLGSACSSDGIASQMNTAGLPQIRDLPGHYYETLKFLVGHLKTIADHSEKNKMEPRNLALVFGPTLVRTSEDNMTDMVTPHAXPLTRSWETLIQALQTGSSVTKRYKGKENPCGLTRSLRQCPTLSTFLPNIWQDSAPWRPGVSGPVGDLKDSTTCSSAKSKGSWAPKKEPYAREMLAISFISAVKPQAQEAAGDAGAGQQHRRRLGAGGAQSLGRGPQRRGHQERS

SEQ ID NO: 44720 - protein, 491 aa, Homo sapiens; identical to SEQ ID NO: 44691

SEQ ID NO: 44721 - protein, 229 aa, Homo sapiens
  misc_feature (1)...(229): Xaa = X or * as defined in Table 2
VPDKWGWCLFMSRYLETAIRTAACAASPRYLNPGRCSAARGPSSQSPRPPWSGHKKRTASPGWGGQSAASPMPPSRSWPASVGGPEFRLSETPSRPFTLSGMKXGWQVHSWAPALFCSVMSFSPDTCCLCKXAHSQPCSPSPSTVILLRETSSNWDWQPEDLGAPKASASPPPSTTRITRLRSSELQLRRLNPSDSCHRGFCFSFRCLLTPEHVLPKTVLRIQPGCKVA

SEQ ID NO: 44722 - protein, 152 aa, Homo sapiens
  misc_feature (1)...(152): Xaa = X or * as defined in Table 2
MAWKVSLRGRKVAGRAPSQLRWASPPSSGQSVKSLLLPPARRLCPGPGVPARCHRRIXGLGPGRGWRGEWRRDTNPWEPPQPRSPSGPNCAWSDGCPRGAPRRPRALXAGAARRAAPARIXVPWRGSAGGCSNRRLQVPAHEXTPTPFIRYL

SEQ ID NO: 44723 - protein, 177 aa, Homo sapiens
  misc_feature (1)...(177): Xaa = X or * as defined in Table 2
RHEDHSEPTFLISPSLLCFLLPSAPPLPRLTPIPAALLVPAVQRMEPVLFLPAPGAAACRVWHPALPPPRQAAVSSSRPCYPCVARSAPAGRVRAAGVPPAPPSSSPRLGRVGGRSRSPNVVFRVRGAAPGPGLXISPWTPPLNEASXRQRGCPASFAVYGGQEWRPPQWPGPPRGP

SEQ ID NO: 44724 - protein, 210 aa, Homo sapiens
APGSRLVGLDVHKGHLWLAGRQAWTLSKRVGSSSLVLALSTACGAKAYVPKSQELRITLRDGGPGPSCCPNHGSELRIRLLPQCLPVGRLSPWLPGPGLQEGSVGRKCQPRPGQALAIGPSTHLLPLAFGTPAASATPILCSITCTRCSKDGAVLFLPAPGAAARDRDAELETVRALGPRSAFTTPISKPHLVGSGTQRCLPSAGSSIIE

SEQ ID NO: 44725 - protein, 1277 aa, Homo sapiens
  DOMAIN (29)..(44): RIBOSOMAL PROTEIN P2 SIGNATURE domain identified by eMATRIX, accession number PR00456E, p-value=5.557e-09, raw score of 3.06
  misc_feature (1)...(1277): Xaa = X or * as defined in Table 2
QLITCLSRPETGGKFEVDTQRPVCPPSRARAARASAAAVAAAATLTPPTMDSFDLALLQEWDLESLCVYEPDRNALRRKERERRNQETQQDDGTFNSSYSLFSEPYKTNKGDELSNRIQNTLGNYDEMKDFLTDRTNQSHLVGVPKPGVPQTPVNKIDEHFVADSRAQNQPSSICSTTTSTPAAVPVQQSKRGTMGWQKAGHPPSDGQQRATQQGSLRTLLGDGVGRQQHSGQTSVQCGGGPSDPGEATCHGGQAQQQRTLCSELSSIPSFKTQPGPAEDRPRMXGQWTAKIRPLMSLLSXSRLRKPGVHCTSYRGVPASKPEPARAKAKLSKFSIPKQGEESRSGETNSCGXRNNPGDDLASTTFCYSSTWQSGTNQISISKKDSQLVSSGHNNPKKGDAEPESPDNGTSNTSMLEDDLKLSSDEEENEQQAAQRTALRALSDSAVVQQPNCRTSVPSSKGSSSSSSSGTSSSSSDSESSSGSDSETESSSSESEGSKPPHFSSPEAEPASSNKWQLDKWLNKVNPHKPPILIQNESHGSESNRTTTRXKRTSRTVGKSPTFASPAXERRRSRALARRSKGQGQPTGPWEXRREAEVPARGRGRGGERSRPATRSALCARGERARACPEVRGQEAHQAHREDLSRGRRQLPPARGARGRGRAGDERGGPPGAHQNQARVATTERATARSCAPPXPARSAARGGXAGSSPNPRSSLRQSRHRSSSSSDSDLESEQEEYPLSKAQTVAASASSGNDQRLKEAAANGGSGRXGPCRLHQRQDHQXHRQGAGGAVLHTGPLWPERTSLPSKGQXXDQVSLGQNRPDPPVQDPRTPAPGARGIERPCHQGSESAPPSHTSDTPAEKALPKSKRKRKCDNEDDYREIKKSQGEKDSSSRLATSTSNTLSANHCNMNINSVAIPINKNEKMLRSPISPLSDASKHKYTSEDLTSSSRPNGNSLFTSASSSKKPKADSQLQPHGGDLTKAAHNNSENIPLHKSRPQTKPWSPGSNGHRDCKRQKLVFDDMPRSADYFMQEAKRMKHKADAMVEKFGKALNYAEAALSFIECGNAMEQGPMESKSPYYLMYSETVELIRYAMRLKTHSGPNATPEDKQLAALCYRCLALLYWRMFRLKRDHAVKYSKALIDYFKNSSKAAQAPSPWGASGKSTGTPSPISPNPFPGSSVGSQGSLSNASALSPSTIVSIPQRIHQMAANHVSITNSILHSYDYWEMADNLAKENREFFNDLDLLMGPVTLHSSMEHLVQYSQQGLHWLRNSAHLS

SEQ ID NO: 44726 - protein, 441 aa, Homo sapiens
MGPCSFSIASPGAKGQEKETVLLEQGGRVVDLLIIGGLAPSLSHWLNSTRSPASTMHFAEGSLLLGHTPNRAEEGREVIWVGSKQTATNAKSFQEELTLELKQKYGGKRAGGPSLGGGGSGGGDADTSHHGQLRLSPAPGMGPRVTVKKATPGKEKSPDTPRHITSVKSFAVYDLLWQQPCPCGRMGIDWAFHVTAEETEAPGCHNLLERVKPLAMAGMSAWGRWWQAGSSESSQAAQGQRGPHTNAQWPDTAQREQEVQGTEASEPLNSSAQGSHHGRNSLHLATLPSSTLILLLRPLRKKFRTNNGGQSLVRSFLLSEVYRPADPFELSETKTDRDKEHPIQPSHVAKEDVEARDKERLTPGPQKGLQLPRTVDRLGGGAQVLKFFARGYCQRAQGGDGPYAPCFHGNIGGVMTVSTATPSARDLVNDEKIQKERHLES

SEQ ID NO: 44727 - protein, 86 aa, Homo sapiens
  DOMAIN (13)..(41): !!!! PROTEIN ALU SUBFAMILY WARNING ENTRY NUCLEAR PHOSPHO domain identified by eMATRIX, accession number PD02454B, p-value= 3.793e-21, raw score of 11.61
  misc_feature (1)...(86): Xaa = X or * as defined in Table 2
SQHFGKPRQVDHLRPGVXDQPGQHGETPSLLKIQKLTGRGGACLWQSQLLRRLRQENRLNLGGGGCSEPGSCHCPPAWATERDSVS

SEQ ID NO: 44728 - protein, 87 aa, Homo sapiens
  misc_feature (1)...(87): Xaa = X or * as defined in Table 2
MNEIKTQFTTREGLYKLLPHSEYSRPNRVPFNSQGSNPVRVSFVNLNDQSGNGDRLCFNVGRELYFYIYKGVRKGSLSSPSQASSPX

SEQ ID NO: 44729 - protein, 61 aa, Homo sapiens
GHRSTGSQGRRIFLSIEQNEKSPTSTSFYTDTATIRFLNLFPTFPAFLFHKTAIVIMARSQ

SEQ ID NO: 44730 - protein, 50 aa, Homo sapiens
  misc_feature (1)...(50): Xaa = X or * as defined in Table 2
QWRFCGIERGERWGKDXEIGWLPCLCGKKXIWETFILFCTKKNSSALGSC

SEQ ID NO: 44731 - protein, 64 aa, Homo sapiens
  misc_feature (1)...(64): Xaa = X or * as defined in Table 2
AVILTAKICSFTPEPSKTTSPPGGTNNSRRATLRAVTLTVKVCSFTPXGSAASFLKSVRPRTHQ

SEQ ID NO: 44732 - protein, 206 aa, Homo sapiens
  misc_feature (1)...(206): Xaa = X or * as defined in Table 2
EPETRIDPLSWNSSQLPVAALHLPGMSSVGAGQAICNLCCLGDLVSPSSLPALERTGPPPWNRGPKGRGRLPSLTVSQPSLVIPPGTGKSEVNADRSRPPAYCSNLGRYSGPGPPSLVIPPGTGKSEVNADRSGPPAYCSNHFPSALPXXRSSMRSLSLQQTSAWTCRHFHTSLKSRWRFPNLNSCLLCTCRPNTTWKPCLGACTL

SEQ ID NO: 44733 - protein, 115 aa, Homo sapiens
  misc_feature (1)...(115): Xaa = X or * as defined in Table 2
EHGYFQGTLGQKGCKSGKPPGGTLKTLLVTLREPGRLQSPXTSLWVSERLPXYPXGDTGENCPKLSFHLRNLGPSXAGXRERPPQGGLYLPPQAYRLMQGSAFWPLFGYAPSPQR

SEQ ID NO: 44734 - protein, 208 aa, Homo sapiens
  misc_feature (1)...(208): Xaa = X or * as defined in Table 2
ACFSYIAFWRINTTSTANLSKESLTSTTSRSWVINVNIVIFCTDWLFYKWLLKNFPIYFYMIFPFNQITFHSMGSCAARASPTSTTPCSTAPSPIDHPRAEESSTRRVTGRQLHLQPAKICSFTPEPSKTTSPPGGTNNSSALPXELXHSPRRSAASLQFRTRXYPYRYQSQGPGSHFXLPLPLPSSIHDHFXLFHLQHTFQSHALLP

SEQ ID NO: 44735 - protein, 225 aa, Homo sapiens
  misc_feature (1)...(225): Xaa = X or * as defined in Table 2
VLQLIKAVWTQRPLGGRWDWAPWSRRWCSSGRLRPHRNQWSGWEAQAWGLQVPEPCPAGRQLRPGEKSSTAPVCTSCCRTRSTAGPTGCPSTRRDPTLSASPSXTSTTSLATATASASMWAGSCTSISTRGSASLVHQALTWPGSGPASPRKRTGSHPVAXAGVRWRAHRSLQPQTPGLKXSSHFSLPSGWNYRHSNHPISQSFPHLSPLSIPQNHHCHHGPFSM

SEQ ID NO: 44736 - protein, 137 aa, Homo sapiens
  misc_feature (1)...(137): Xaa = X or * as defined in Table 2
DFLLFSEILPASQSASAILPALPASHRCPCCLDVPLPPEVPGPARLPVAAASVWRPVQHLSLLGRWAGPTXDRTESRETNAEVEADLPPLYAHGRLEPTAGPSGASAVLSTSSEYCPGPHPKMGHRRVTSCLSTCQS

SEQ ID NO: 44737 - protein, 53 aa, Homo sapiens
PPNLPPGQGGWPGGVLIPPPPSRTGRLAGRGADPTTSLPDGAAGPAEGLLTSQ

SEQ ID NO: 44738 - protein, 236 aa, Homo sapiens
VNEWPLPLLWVLWDLSSGPQSGRSPEAPSPSTLSSSGQFSAWHTKDPPDTSRPRHTPSKDPIGAHHPGSITQNPSSGFSDLHLTFEYPSILQFPNEYSHPNTEPDALLVVPLSSNLISVLSYLANDMEEDDEDPKQNIFYFLYGKTRSRIPLVRNRRFQLCRCMNPRARKNRSQIALFQKLRFQFFCSMSGRAWVSREELEENTGPTGDVDFQQELNSNANGSQQERGEEPFVQII

SEQ ID NO: 44739 - protein, 41 aa, Homo sapiens
  misc_feature (1)...(41): Xaa = X or * as defined in Table 2
SSXVRWVSGRXHPQXSTLSAPLGETSGCHQGGLHDLKIVVL

SEQ ID NO: 44740 - protein, 445 aa, Homo sapiens; identical to SEQ ID NO: 30861

SEQ ID NO: 44741 - protein, 114 aa, Homo sapiens
GDQMQKHYTVAWFLYSAPGVDPSPPRRSFCWKRKMEWWDESEESLEEEPRKVLAPEPEEIWVAEMLCGLKMKLKRRRVSLVLPEHHEAFNRLLGRRTPQRAPPILFFPKTGNFQ

SEQ ID NO: 44742 - protein, 83 aa, Homo sapiens
  misc_feature (1)...(83): Xaa = X or * as defined in Table 2
APALCLQILLDCKSVRNRTSRFRPREVGIQQYKKGGGAAGKGGTGNAPGFLLFSKDSXKDPTPLPPPLLLXGQRDHXIQLHQE

SEQ ID NO: 44743 - protein, 434 aa, Homo sapiens
MRARLGETLQPGSSRDTAVLENAACLQRLFLTLAVSRMAPSETIRPGSHPAPIRRRSRERIAVQKKAMDRTETRFRKRGQIKGKITTSRQPHPQNEQSPQRTTSGYSLQEVVDDEVLGSSAPGVDPSPPCRSLGWKRKKEWSDESEEEPEKELAPEPEETWVVEMLCGLKMKLKQQRVSPILPEHHKDFNSQLAPGVDPSPPHRSFCWKRKREWWDESEESLEEEPRKVLAPEPEEIWVAEMLCGLKMKLKRRRVSLVLPEHHEAFNRLLEDPVIKRFLAWDKDLRVSDKYLLAMVIAYFSRAGLPSWQYQRIHFFLALYLANDMEEDDEDPKQNIFYFLYGKTRSRIPLVRNRRFQLCRCLNPRARKNRSQIALFQKLRFQFFCSMSGRAWVSREELEENTGPRGDVDFQQELYSNANGRQQERGEEPFVQII

SEQ ID NO: 44744 - protein, 391 aa, Homo sapiens
MDRTETRFRKRGQITGKITTSRQPHRQNEQSPQRSTSGYPLQEVVDDEVLGPSAPGVDPSPPCRSLGWKRKREWSDESEEEPEKELAPEPEETWVVETLCGLKMKLKQQRVSPILLEHHKDFNSQLAPGVDPSPPHRSFCWKRKMEWWDKSEESEEEPRKVLAPEPEEIWVAEMLCGLKMKLKRRRVSLVLPEHHEAFNRLLEDPVIKRFLAWDKDLRVSDKYLLAMVIAYFSRAGFPSWQYQRLHFFLALYLANDMEEDDEDSKQNIFHFLYGKNRSRIPLLRKRRFQLYRSMNPRARKNRSHIPLVRKRRFQLRRCMNPRARKNRSQIVLFQKRRFHFFCSMSCRAWVSPEELEENTGPRGDVDFQQELYSNANGRHQEGGEEPFVQII

SEQ ID NO: 44745 - protein, 385 aa, Homo sapiens
HTLLDPRSVQKKAMDRTETRFRKRGQITGKITTSRQPHPQNEQSPQRSTSGYPLQEVVDDEVLGPSDEGTGGRRGGIGLTKTKEGGRELAPEPEETWVVETLCGLKMKLKQQRVSPILPEHHKDFNSQLAPGVDPSPPHRSFCWKRKMEWWDKSEESLEEEPRKVLAPEPEEIWVAEMLCGLKMKLKRRRVSLVLPEHHEAFNRLLEDPVIKRFLAWDKGLRVSDKIPSEPTILGASPKTLPLASRICIRPSNTPPSRNFQMSTVTPTLSYLANDMEEDDEDPKQNIFYFLYGKTRSRIPLLRKRRFQLCRCMNPRARKNRSQIVLFQKLRFQFFCSMSCRAWVSPEELEENTGPRGDVDFQQELYSNANGRHQEEGEEPFVQII

SEQ ID NO: 44746 - protein, 72 aa, Homo sapiens
  misc_feature (1)...(72): Xaa = X or * as defined in Table 2
HCLSHFQNTGPRGDVDFQQELFPVLMADIRKEERSHLCRSSRRTWTILDKSXIQGSRLSSKEQGWGWGTSRK

SEQ ID NO: 44747 - protein, 448 aa, Homo sapiens
MAMVWMCAGPTLHQLEDLPGFLQITLKKGALFPLWTHNVRMKEQQSLGHADLPDGIQKFHRGVQTVLIIGDVTSRIPTSLMKAPSYVRVQVSRFVQKKAMDRTETRFRKRGQITGKITTSRQLHPQNEQSPQRSTSGYPLQEVVDDEVLGPSAPGVDPSPPYPSPPHRSFCWKRKMEWWDESEESLEEEPRKVLAPEPEEIWVAEMLCGLKMKLKRRRVSLVLPEHHEAFNRLLEDPVIKRFLAWDKDLRVSDKYLLAMVIAYFSRAGFPSWQYQRIHFFLALYLANDMEEDDEDSKQNIFHFLYRKNRSRIPLLRKRWFQLGHSMNPRARKNRSRIPLLRKRRFQLYRSTNPRARKNRSRIPLLCKRRFQLYRSMNSRARKNRSQIVLFQKRRFHFFCSMSCRAWVSPEELEENTGPRGDVDFQQELYSNANGRHQAGGEEPFVQII

SEQ ID NO: 44748 - protein, 23 aa, Homo sapiens
  misc_feature (1)...(23): Xaa = X or * as defined in Table 2
SLQPDIXCSGLRGSLLLVXPKSD

SEQ ID NO: 44749 - protein, 686 aa, Homo sapiens
MWVPNAYSQAVVGEISVYLMRRRAARRRSRTEYNDVVANAYRVAEVRQLSVYFMRRMASIITDYIGIGEVGSLSLFSPRGPVYPRMGPVAWARQALAVSASFQLHPYPTSHLCPLSTPTEEAWTTHSCKFLNSLIRGKDLVSYSNESVWQKTQLSKPAYLQQSRGACPGERMSQGSTEVQKSSSQASQRVLHVGKENLSQYRLRLCPGAAQCGFTRAFRGLEIFENEGQTVITDLAGTAGLNLDCPGALARGHPAAGVIRSLVRGYRRAAVLPGKMPAHVLNEQLQNCRRLKDKDAHQHTQSHPCRSPHSKDAHQVLRSQPQGSVTQVALSAGFSSTRQSAGLRTPAGVLHSYLQAVRRGRHQLGLSAQLRHSCYAQSNDAHPAPHTGLREECRNIQGIDAHPGPQQPRAGNCGKSATILRVLTPTPVHRSIPPRRYAARSQCAASASLQSAGVLTVTQVFYCCMQGRDTQLRLGSRLQPQHDPRSKDACPPRSSMYRCGSGADCSVNTPGRLCSHRIRSGLCIQAHALWKGRALEMRVAVRLRAVKPVFVTVISLTGDRALRMTPCPRLRVLTWGLFRAFPRRKPGVCQPWPHLSGYTSSKDPLRPEHQMSGWRLQQVFNAMAGSSSKLKLQSSCKHCLLGLALLLATVSLPSSYSSEMTLSNLKASGQHPGLVFLTFSAAVICS

SEQ ID NO: 44750 - protein, 364 aa, Homo sapiens
  misc_feature (1)...(364): Xaa = X or * as defined in Table 2
MLLNVDHNKAVLVGIFFSTLQRLDVYVNNLLVCPKTTIWNAQQKHCELNNHLYKDQFLPNLDSTVLGENYFDGTYQMLYLLVKGTIPVEIHTATVIFVSFQLSVATEDDFYTSHNLVKNLALFLKIPSDKIRISKIRGKSLRRKRSMGFIIEIEIGDPPIQFISNGTTGQMQLSELQEIAGSLGQAVILGNISSILGFNISSMSITNPLPSPSDSGWIKVTAQPVERSAFPVHHVAFVSSLLVITQPVAAQPEQPFPQQPSVKATDSDGNCVSVGITALTLRAILKDSNNKQVNGLSGNTTIPFSSCWANYTDLTPLRTGKNYKIEFILDNVVGVESRTFSLLAESVSSSGSSSSSNSKASTVX

SEQ ID NO: 44751 - protein, 124 aa, Homo sapiens
  misc_feature (1)...(124): Xaa = X or * as defined in Table 2
GGGFISLDTGSHHKSHPGGSXHALGWVRPHTLNSPPSQQPGNCGNPAWECXGPHGAPSRWSCSTPCRPSHPKVPAVRVAGPAGGCTPYRTPTRRTPRXRPGPCAACDRPLHPHCGPRGPGAYPR

SEQ ID NO: 44752 - protein, 349 aa, Homo sapiens
  DOMAIN (269)..(296): C1q domain proteins domain identified by eMATRIX, accession number BL01113A, p-value=9.481e-09, raw score of 17.99
  misc_feature (1)...(349): Xaa = X or * as defined in Table 2
VLRSVSSWLPTSMAMTVLAPMLRAMSAGRLLMXPPSMSRCPSLGSHSGGRXPDSGHAGAHVPPQGAIFVDSHGXGGDICGHVEVRQPQGPQSAYPGRPDGCCGXRQTQXTWRXLGTXGPTQVPAPKSCSWPTPGPAASCGWRCAPPRTTLRXKSQWTCRPPGPRGPPPPLMPLVLRCASSPWPRPRLAQGQWCSPXAPSPSGRSRCAGPRAWRKPSRRAHAAWQGCGAKRGGADSAGAGAPSTSCAYLATPRCAWGPHPPLGGAGLAAXGRAQPCSPASAPAGRGXAPGPPGPQXGCSRPVAGSARSRASARRPSGRVRYGVHPPAGPATLTAGTLGCYPVRRPPGVPG

SEQ ID NO: 44753 - protein, 313 aa, Homo sapiens
  misc_feature (1)...(313): Xaa = X or * as defined in Table 2
QSGTFSTKNEGRTTRDVYDGRGPRVGRCGTCVYVRYVHDRPHAPPHERARRNDGNTQRTGNARPGTAMPTATTDQPKGRSTRHKETKRGRTARNGKQQNNPRKRPRKDKRKQGSAGEGERGAGGKEKGQPRDTEAKGDRRTDFPPPNGPXGQSKRGANIGGWFPPPRLGTPNPPLPGPQSAQVSGPXTPQMWMPTGTGCCGGSQSGSPPPWCVSPXPVAEALFHSSTPAPRHPSPPSSSPKHSHQPSTPPPXISLGQGPCRPPKRRPAPDQPQVPRCPEPSCAYLATPRPTMRMQSACRGSARSRASARRPSG

SEQ ID NO: 44754 - protein, 1042 aa, Homo sapiens
ECVKEKLNLLHEFLQTEIKNQLCDLETKLRKEELSEEGYLAKVKSLLNKDLSLENGAHAYNREVNGRLENGNQARSEARRVGMADANSPPKPLSKPRTPRRSKSDGEAKPEPSPSPRITRKSTRQTTITSHFAKGPAKRKPQEESERAKSDESIKEEDKDQDEKRRRVTSRERTSSPNGLVQPPPSKEGTWGKIEIPHLTPKQKLKEEPDREARAGVQADEDEDGDEKDEKKHRSQPKDLAAKRRPEEKEPEKVNPQISDEKDEDEKTHPPKCIQCGQYLDDPDLKYGQHPPDAVDEPQMLTNEKLSIFDANESGFESYEALPQHKLTCFSVYCKHGHLCPIDTGLIEKNIELFFSGSAKPIYDDDPSLEGGVNGKNLGPINEWWITGFDGGEKALIGFSTSFAEYILMDPSPEYAPIFGLMQEKIYISKIVVEFLQSNSDSTYEDLINKIETTVPPSGLNLNRFTEDSLLRHAQFVVEQVESYDEAGDSDEQPIFLTPCMRDLIKLAGVTLGQRRAQARRQTIRHSTREKDRGPTKATTTKLVYQIFDTFFAEQIEKDDREDKENAFKRRRCGVCEVCQQPECGKCKACKDMVKFGGSGRSKQACQERRCPNMAMKEADDDEEVDDNIPEMPSPKKMHQGKKKKQNKNRISWVGEAVKTDGKKSYYKKVCIDAETLEVGDCVSVIPDDSSKPLYLARVTALWEDSSNGQMFHAHWFCAGTDTVLGATSDPLELFLVDECEDMQLSYIHSKVKVIYKAPSENWAMEGGMDPESLLEGDDGKTYFYQLWYDQDYARFESPPKTQPTEDNKFKFCVSCARLAEMRQKEIPRVLEQLEDLDSRVLYYSATKNGILYRVGDGVYLPPEAFTFNIKLSSPVKRPRKEPVDEDLYPEHYRKYSDYIKGSNLDAPEPYRIGRIKEIFCPKKSNGRPNETDIKIRVNKFYRPENTHKSTPASYHADINLLYWSDEEAVVDFKAVQGRCTVEYGEDLPECVQVYSMGGPNRFYFLEVVPLLARGKASGSKLARRSLMSGYTQGGLAAGFQL

SEQ ID NO: 44755 - protein, 1080 aa, Homo sapiens
  DOMAIN (1030)..(1045): CYTOSINE-SPECIFIC DNA METHYLTRANSFERASE SIGNATURE domain identified by eMATRIX, accession number PR00105B, p-value=2.800e- 12, raw score of 12.32
MPARTAPARVPTLAVPAISLPDDVRRRLKDLERDSLTEKGMCEGEDYKEKHQANPHHISFCKGPLPNGKPQEESERAKSDESIKEEDKDQDEKRRRVTSRERVARPLPAEEPERAKSGTRTEKEEERDEKEEKRLRSQTKEPTPKQKLKEEPDREARAGVQADEDEDGDEKDEKKHRSQPKDLAAKRRPEEKEPEKVNPQISDEKDEDEKEEKRRKTTPKEPTEKKMARAKTVMNSKTHPPKCIQCGQYLDDPDLKYGQHPPDAVDEPQMLTNEKLSIFDANESGFESYEALPQHKLTCFSVYCKHGHLCPIDTGLIEKNIELFFSGSAKPIYDDDPSLEGGVNGKNLGPINEWWITGFDGGEKALIGFSTSFAEYILMDPSPEYAPIFGLMQEKIYISKIVVEFLQSNSDSTYEDLINKIETTVPPSGLNLNRFTEDSLLRHAQFVVEQVESYDEAGDSDEQPIFLTPCMRDLIKLAGVTLGQRRAQARRQTIRHSTREKDRGPTKATTTKLVYQIFDTFFAEQIEKDDREDKENAFKRRRCGVCEVCQQPECGKCKACKDMVKFGGSGRSKQACQERRCPNMAMKEADDDEEVDDNIPEMPSPKKMHQGKKKKQNKNRISWVGEAVKTDGKKSYYKKVCIDAETLEVGDCVSVIPDDSSKPLYLARVTALWEDSSNGQMFHAHWFCAGTDTVLGATSDPLELFLVDECEDMQLSYIHSKVKVIYKAPSENWAMEGGMDPESLLEGDDGKTYFYQLCTKDGHLYRGGDGVYLPPEAFTFNIKLSSPVKRPRKEPSITGIIPITSKGSNLDAPEPYRIVRIKEIFCPKKSDGRPNETDIKIRVNKFYRPENTHKSTPASYHADINLLYWSDEEAVVDFKAVQGRCTVEYGEDLPECVQVYSMGGPNRFYFLEAYNAKSKSFEDPPNHARISDTLWAIEMWDPAAQAFRLNNPGSTVFTEDLQHPAEAGHGWGDHQLPAASGCPKRETGKMLCGGPPCQGFSGMNRFNSRTYSKFKNSLVVSFLSYCDYYRPRFFLLENVRNFVSFKRSMVLKLTLRCLVRMGYQCTFGVLQAGQYRRGPD

SEQ ID NO: 44756 - protein, 80 aa, Homo sapiens
  DOMAIN (49)..(77): kw TRANSCRIPTASE REVERSE II ORF2 domain identified by eMATRIX, accession number DM01354B, p-value=7.660e-22, raw score of 14.71
  misc_feature (1)...(80): Xaa = X or * as defined in Table 2
PASIIMTGSISHITILTLRVNRLNASIKRHRLTDWQIRIKSQDLSVCYIQETHFTCKDPHKLKIKGWRKIYQVNXKQKKK

SEQ ID NO: 44757 - protein, 205 aa, Homo sapiens
  misc_feature (1)...(205): Xaa = X or * as defined in Table 2
QLTLQGRRVAPRXPSRVALEQECGYNALLRYEGFENDSGLDFWCNICGSDIHPVGWCAASGKPLVPPRTIQHKYTNWKAFLVKRLTGAKTLPPDFSQKVSESMQYPFKPCMRVEVVDKRHLCRTRVAVVESVIGGRLRLVYEESEDRTDDFWCHMHSPLIHHIGWSRSIGHRFKRSDITKKQDGHFDTPPHLFAKVRSFYKNPHL

SEQ ID NO: 44758 - protein, 227 aa, Homo sapiens
  DOMAIN (63)..(77): PROTEIN GLYCOPROTEIN PRECURSOR RE domain identified by eMATRIX, accession number PD00306A, p-value=3.250e-10, raw score of 10.26
  misc_feature (1)...(227): Xaa = X or * as defined in Table 2
KRLFTNRTRITPFVAINSHHHHHHHITIINTIITTTSTINSHHHHHYYHHHHHHHHHHQHTTTTNTTTTNTTTTNNNTTTTITITTTTNTTTTSTINSHHHHHNQHCHHHHHHHHHHHHHHQYHHHHHXHYQHHHHHHYYHHHHHHHHHHQHHHHHQHHHNQHHHHQQQHHDHHHHYHHHQHHHHQHYQHHHHHHNQHCHHHHHHHHHQHHHDPPHHHQHXHSHQHH

SEQ ID NO: 44759 - protein, 130 aa, Homo sapiens
  misc_feature (1)...(130): Xaa = X or * as defined in Table 2
EGCCCIAIMVQKYQSPVRVYKYPFELIMALRKRYPRCCVTCSXTGGAQQVGFRFLDLPLSLCTPXCLWRTSSSNFXRKAAGCSGSRLQSHHFGLIPQPTAPKPWSSPLHITKPQTLGQRDPGPRTRKRSK

SEQ ID NO: 44760 - protein, 470 aa, Homo sapiens
  misc_feature (1)...(470): Xaa = X or * as defined in Table 2
MPKTTACNVHTVTWASCENADSDSTGLRHHDSCEDPASPGRSDLCLVPHPTRPAVRGGRPAGGRCPAVPAEGPWRHLQQAQEGLKRLAGGLERLLENPVRRALPQGAQGHRAEPTEARPHPAPEHRRAGAAAERAERLESQPVGASAAAASAASARIPYLVAVPAAGPPRHRCRRHRRGPGTSSGPRTALIRPATARARAGIVSEPRTAPGATRARPWRQGSHNPVAPSAPXLLRGPSIPWQIRPMPCPTSHQTCSERRPSGRWQMPGSACRRSLETSSAGAGRAQEAGGRLGETSGESGRAGLYLKELRAIVLNQQRLVRTQRQSIDELERRLNELSAXNRSLWEHPQLPQAQPPPGFLTSXPSPLPALLGTAAAATAGAQEHLQDHGQRSSARPLPAPELASFQNHEQLLAQPEPDPGGRAHTTQSPHQHPGTLGVKANKEKKGPPGCCAAPGTPLQQESPAPSARES

SEQ ID NO: 44761 - protein, 278 aa, Homo sapiens
MIRYFGDYWTQALLTLIPGDPKHPRGPPVKVGVYGGQGYINSLALCHNFIWRELNRFSLLQDVPLVRYIDNIMLIGSIKFLGVQWCGACRDIPSKDPADPMVLEVSVADRDAVWSIWQALIDESQQRPLGFWSKSLPSSADNYSPFERQLLAYYWALVETERSTMGHQVTMLPELPVMNWVLSDPSSHKANGLAGWSGTGKKHDWKIGDKEIWRRGMWMDLSEWSKDVKIFVSHVSAHQRVTSAEEEFNNQVDRMTRSMDTTQPLYPTTPVIAQWAHE

SEQ ID NO: 44762 - protein, 1141 aa, Homo sapiens; identical to SEQ ID NO: 38073
  DOMAIN (798)..(813): Kinesin motor domain proteins domain identified by eMATRIX, accession number BL00411A, p-value=4.977e-09, raw score of 11.31
  misc_feature (1)...(1141): Xaa = X or * as defined in Table 2

SEQ ID NO: 44763 - protein, 196 aa, Homo sapiens; identical to SEQ ID NO: 35437

SEQ ID NO: 44764 - protein, 425 aa, Homo sapiens
  misc_feature (1)...(425): Xaa = X or * as defined in Table 2
MEKNDIDQSRRRKVVEMNENVQLVRYGEQASDLKTATKFKSPSEVKHIRFIQQAFIGSKLLMRPWTTVTKQILSLKSAKIALSESLIPCRKRAEFVEKQTQAFIMQVSDLQQKVHAQPSQVSTVKVKALIGKEWDPATWNGDVWEGPDEAGDTEFVNSDEAFLPEATAFPSPEVGNDQTVWGLLDTGSELMLIPGDPKYYRGPPVKVGAYGGQVINRGLAQIQLSMDPVGHRTRPVVSSPLPECIIGTDILSSRQNPHIGSLTDITLVHYIDDIMLIGSSEQEVTITLDLLVQAVAQAALPVGPYDPADPMELKVSVADRDAVWSLWQAPIVTMRPERPIMNWVLSDPSSHKVGCAQQHSIIKWKWYIRDWARSGPEGTNHSRRVCSLPQVQAPSARXATARRGGQAASGCCLFWSCTCFSNFDV

SEQ ID NO: 44765 - protein, 76 aa, Homo sapiens; identical to SEQ ID NO: 38077
  misc_feature (1)...(76): Xaa = X or * as defined in Table 2

SEQ ID NO: 44766 - protein, 117 aa, Homo sapiens
GDSIFNSFIRAKSRVVRALPDLQRPVPELGLLFAPIKQVHRPVADASAILLSPHRGPTRPAAVRREPSLAGSRGRGGGKLQAGGTRRAQSPPKRARGSLCRENRRYESRRPFFLLIS

SEQ ID NO: 44767 - protein, 75 aa, Homo sapiens; identical to SEQ ID NO: 34862
  DOMAIN (25)..(41): AUXIN BINDING PROTEIN SIGNATURE domain identified by eMATRIX, accession number PR00655E, p-value=9.000e-09, raw score of 8.06

SEQ ID NO: 44768 - protein, 88 aa, Homo sapiens; identical to SEQ ID NO: 33995
  DOMAIN (25)..(41): AUXIN BINDING PROTEIN SIGNATURE domain identified by eMATRIX, accession number PR00655E, p-value=7.333e-09, raw score of 8.06

SEQ ID NO: 44769 - protein, 187 aa, Homo sapiens
DLWPFTRVTLHRGKRNDQTFQGLLDTGSELMLIPEDTKHHCGPPVKVEAYGGQVINGVLAQIQLTVGPVGSGTHPVVIYPVPECIIGIGILSSWQNPHIGSLTSRKTDGSWRMTVHYHKLNQMVTPIAAAIPDVVSLLEQVNTSPGSWYAAIDLANAFFFIPVHKAHQKQFAFSWQGQQYTFTVLPQ

SEQ ID NO: 44770 - protein, 167 aa, Homo sapiens
  misc_feature (1)...(167): Xaa = X or * as defined in Table 2
FFFFLPIGFWRQHIPRLSVLLQHIYXVTXNAASFEWGPEQEKALXQVQAVVQVALPLGPYDPADPMLLEVSVADKDAGCTRLQAPIGESQWRSLGFRSKALRSSAENYSSFERQLLACYWALVETECLTLGHQVTIXPELPIMNWVLSDPSSHKVGHEQQHSIIKWK

SEQ ID NO: 44771 - protein, 156 aa, Homo sapiens; identical to SEQ ID NO: 38085

SEQ ID NO: 44772 - protein, 211 aa, Homo sapiens; identical to SEQ ID NO: 37055
  DOMAIN (42)..(58): AUXIN BINDING PROTEIN SIGNATURE domain identified by eMATRIX, accession number PR00655E, p-value=6.556e-09, raw score of 8.06

SEQ ID NO: 44773 - protein, 172 aa, Homo sapiens; identical to SEQ ID NO: 37935
  misc_feature (1)...(172): Xaa = X or * as defined in Table 2

SEQ ID NO: 44774 - protein, 300 aa, Homo sapiens
  DOMAIN (228)..(244): AUXIN BINDING PROTEIN SIGNATURE domain identified by eMATRIX, accession number PR00655E, p-value=7.222e-09, raw score of 8.06
MVEWISHFRPTPLSMEGPEHILLTNTLLNRYVKAAPASLKSPLTALLFMSDLTVGTTFSQLQNLNTMGIFGSSCDRSQVAALNHQRQVPECKIVIDILNIWRIPHIGSLTGRVREIMVGKAKWKPLEQPPPRKIVIQKQYHIPGAITEISATIEDLKDAGEVIPIPTTFPLNSPIWPVRKTDGCWRMTVDYCELNQVVTPTAATVPDVVSLLEQINTSPGTWYADIDLANAVFSIPVHKAHQKQFAFSWQGQQYTFTVLPQGETLVNFSLPQDITLFHYIDDIMQIGSSDQEVANTLDLL

SEQ ID NO: 44775 - protein, 1482 aa, Homo sapiens
MKIDREFALWLKDCHEKYDKQIKFTLFKGVITRPDLPSKKQGPWATYAAIEWDGKIYKAGQLEPQALYDEVRTVPIAKLDRTVAEKAVKKYVEDEMARAQAPALAGVARQFSGPEGMLQGGAEQPLPCQRSSMGKVGSLGLHNLAGDSGTRFSTVLTWLDSLLPSAAGSKLKQPAKSQAVCPQIVNLSQAAKRFCAARCDLGSGMAAFYLYHPGLGVWVEHFPLSPMLSKSDPVLENIQKLGNYTLKLQVVLNESNADTYAGRPLPSKAIKFSVKEGKPEKFSFGLLDLPFRVGVPFNIPLEFQDEFGHTSQLVTDIQPVLEASGLSLHYEEITNGPNCVIRGVTAKGPVNSCQGKNYNLKVTLPGLKEDSQILKIRLLPGHPRRLKVKPDSEILVIENGTAFPFQVEVLDESDNITAQPKLIVHCKFSGAPNLPVYVVDCSSSGTSILTGSAIQVQNIKKDQTLKARIEIPSCKDVAPVEKTIKLLPSSHVARLQIFSVEGQKAIQIKHQDEVNWIAGDIMHNLIFQMYDEGEREINITSALAEKIKVNWTPEINKEHLLQGLLPDVQVPTSVKDMRYCQVSFQDDHVSLESAFTVSMLELLQLMVSLKTSNLLNNFRPLPDEPKHLKCEMKGGKTVQMGQELQGEVVIIITDQYGNQIQAFSPSSLSSLSIAGVGLDSSNLKTTFQENTQSISVRGIKFIPGPPGNKDLCFTWREFSDFIRVQLISGPPAKLLLIDWPELKESIPVINGRDLQNPIIVQLCDQWDNPAPVQHVKISLTKASNLKLMPSNQQHKTDEKGRANLGVFSVFAPRGEHTLQVKAIYNKSIIEGPIIKLMILPDPEKPVRLNVKYDKDASFLAGGLFTDFMISVISEDDSIIKNINPARISMKMWKLSTSGNRPPANAETFSCNKIKDNDKEDGCFYFRDKVIPNKVGTYCIQFGFMMDKTNILNSEQVIVEVLPNQPVKLVPKIKPPTPAVSNVRSVASRTLVRDLHLSITDDYDNHTGIDLVGTIIATIKGSNEEDTDTPLFIGKVRTLEFPFVNGSAEIMSLVLAESSPGRDSTEYFIVFEPRLPLLSRTLEPYILPFMFYNDVKKQQQMAALTKEKDQLSQSIVMYKSLFEASQQLLNEMKCQVEEARLKEAQLRNELKIHNIDIPTTQQVPHIEALLKRKLSEQEELKKKPRRSCTLPNYTKGSGDVLGKIAHLAQIEDDRAAMVISWHLASDMDCVVTLTTDAARRIYDETQGRQQVLPLDSIYKKTLPDWKRSLPHFRNGKLYFKPIGDPVFARDLLTFPDNVEHCETVFGMLLGDTIILDNLDAANHYRKEVVKITHCPTLLTRDGDRIRSNGKFGGLQNKAPPMDKLRGMVFGAPVPKQCLILGEQIDLLQQYRSAVCKLDSVNKDLNSQLEYLRTPDMRKKKQELDEHEKNLKLIEEKLGMTPIRKCNDSLRHSPKVETTDCPVPPKRMRREATRQNRIITKTDV

SEQ ID NO: 44776 - protein, 609 aa, Homo sapiens
  DOMAIN (329)..(381): ELEMENT TRANSPOSABLE INSERTION PROTEIN TRANSPOSITION DNA domain identified by eMATRIX, accession number PD02455C, p-value= 2.350e-09, raw score of 29.23
RGYVFCSWKKTDGSWRMTVDYCKLNQVVIPIAAAVSDVVSLLEQINTSPGTWYAAIDLANAFFSIPVHKAQQKQFAFSWQGQQYTFTVLPQWYINSPALCHNLIRRDLDCFSLPLDITLVHYIDDIMLIGPRQLLACYWALVETEHLTISHQVTMRPELPIMNWVLFDPSSHKVGCAQQHSIIKWKWYVHDWARAGPEGTTTPVISQWPHEQCGHGGRDGGYAWAQQCRLPLTKADLNTATAKRPICQQQRPTLSPQYGTIPQGDQPATWWWVDYMGSLPSWKGQRFVLTGIDTYSGYGFAYPACNASAKTAICGLTECLIHHHDIPHSIASDQGTHFMAKEVRQWAHDHGIHWSYHVSHHPEAAGLIEWWNGLLKSQLQCQLGDNTWQGWGKVLQKVVYALNQHPIYGTVSPIAKIHRSRNQGLEVAPLTITPRDPLAKFLLPFPATLQSAGLEVLVPEEGTLPPGDTMIPLNWKLRLPPRHFGLLLPLNQQAKKGVTVLAGVTDLDYKDEITLLLHNGGKEEYAWNTGDPLGLLLILPCPMIKVNGKLQQLKPEALVPKGVVFPPGDTTMLSLSWKLRLPSGHVGLLMPLSQQVQKGVTVLAGVIDP

SEQ ID NO: 44777 - protein, 1062 aa, Homo sapiens
  DOMAIN (516)..(528): RNase H domain identified by eMATRIX, accession number PF00075C, p-value=4.326e-10, raw score of 11.58
  misc_feature (1)...(1062): Xaa = X or * as defined in Table 2
MAEGKEEQVLSYTDGSRQRENEEDAKAETPDKTIRSHETYSLPREWYEGNRPHDSITSQWVPPTTRGNYGSTIQDEIWVGDHSGYVRPVPVPRSLNSDISYFGVGGKQAVFFVGQSARMISKPADSQDVHELVLSKEDFEKKEKNKEAIYSGYIRNRKDDYDNHTGIDLVGTIIATIKGSNEEDTDTPLFIGKVRTLEFPFVNGSAEIMLMPSNQQHKTDEKGRANLGVFSVFAPRGEHTLQVKAIYNKSIIEGPIIKLMILPDPEKPVRLNVKYDKDASFLAGGLFTAPPLPAQLMSSLSCAWIIESVLNSWRKGCNKLRNQRALHKKQDRGKLPEDRELQHTKKQTNWAGLLIPAMNNNVDMTARKLQRDLQPFTSVTVHCRKGNDQTFGGPLDAGSELTLIPGDPKHHCGPPVKVGAYGGQVINGVLAHPLIWLVQKTDGSWRMSVDYCRLNQVVTPIVAAVPDVVSLLEQINTSPGTWYAATDLANAFFSILVHKAHQKQFAFSWQGQQYAFTVLPQGYINSPALCHNLIWRDPDCFLLPQDITLSSLVHYIDDIMLIGSSEQEVANTLNLLVRHLCARGREINLIKIQGTSTSVKFLGFQWCGACQAIPSKMRDKLLHLVPPTTKKEAQCLQLLACYWALVETEHLTISHQVTMRPELPIMNWVLFDPSSHKVGCAQQHSIIKWKWYVHDWARAGPEGTTHPCHFPMAPXTMWPWWQGWRLCMGSAMXTSTHXGXPEYSHRXAPNLPTAETNTEPSIWHHSSGXSTSYLVVGXLYGISSIMERAEVCPHWNRYLLWIWVCLSCMQCFCQDCHLWTHGMPYPPSXYPTQHCLXPRHSLYGXRSAAVGSXSWNSLVLPCFPSSXSSWIDRMVEWPFEVTITVSTRXQYLAGLGQSSPEGRVCSESASNIWYCFSHSQDSQVQESRARSGTTHHHPXGSTSKIFASFSCNITVCWPRGLSSRGRNAATRRHNDSIKLEVKIATQTLWAPPTFKSTGXEGSYSVGWGDXPGLXRXNHSPTPXWRXGRVCMEYRRSIRASLNITMPYDXGQWETTTAQARSS

SEQ ID NO: 44778 - protein, 67 aa, Homo sapiens
  DOMAIN (22)..(61): PROTEIN ZINC FINGER ZINC-FINGER METAL-BINDING NU domain identified by eMATRIX, accession number PD01066, p-value=8.981e-26, raw score of 19.43
NTGKPGLAVTLVTNMSQDSVTFSDVAVNFTKEEWTLLDPAQRNLYRDVMLGNSKNLAFIDWATPCKP

SEQ ID NO: 44779 - protein, 364 aa, Homo sapiens
  DOMAIN (20)..(59): PROTEIN ZINC FINGER ZINC-FINGER METAL-BINDING NU domain identified by eMATRIX, accession number PD01066, p-value=1.400e-30, raw score of 19.43
  misc_feature (1)...(364): Xaa = X or * as defined in Table 2
XSRVVETTGTRPHSRDSVTFADVAVNFTKEEWTLLDPAQRNLYRDVMLENSRNLAFIVAPEKDESPVSICEDHEMRNHSKPTCRLVPSQGDSIRQCILTRDSSIFKYNPVLNDSQKTHENNEDDGVLGWNIQWVPCGRKTELKSSTWTGSQNTVHHIRDEIDTGANRHQRNPFGKAFREDGSLRAHNTHGREKMYDFTQCENTSRNNSIHAMQMQLYTAETNKKDCQTGATSANAPNSGSHKSHCTGEKTHKCPECGRAFFYQSFLMRHMKIHTGEKPYECGKCGKAFRYSLHLNKHLRKHVVQKKPYECEECGKVIRESSKYTHIRSHTGEKPYKCKTCGKDFAKSSGLKKHLKTHKDEKPCE

SEQ ID NO: 44780 - protein, 481 aa, Homo sapiens
  misc_feature (1)...(481): Xaa = X or * as defined in Table 2
MLRAAAGGQGLAAAGMGLCARPAGGSQLPRERMKGNRACLPLPPAVALTKGREKPDAGHQGRSTQMMRESERGPCTHWTEERPGRQLKILLQKQMRQNTLMAFQVSWDGRNKEIGRTFPHATAPHTQQLIFAMKIKRTGVTVEPWGLFETGQRIRPIQAAGLXLSSSSTTCVALAPLLTMHVKSLALLSAPQMGALSTITSITTTRRQTPAESHFPAARFHLLAPHSPTLPPCCPGEPSESAVTVLCFAKGKTAQDAAVPTTSLTAAGHLAPRSXSSWSRMPVKVRRAPDSLPETSAHALPLTHXSWLPSASWGPASRALPGSEWVLKPVWQAITGPVSQITSSPGIPKPGPLQAXGSAHPQALGFSVLQIPLSNSPTSPMTPPLPRPKISNSSLPSQPPQALFPNRWTNSSSPVHVITSAAQPRTPREWPAVSFYRTTATTASLIPHLWAPPQENXQTSPAQNGSTLPCMSQATFHFPSP

SEQ ID NO: 44781 - protein, 138 aa, Homo sapiens
  misc_feature (1)...(138): Xaa = X or * as defined in Table 2
HLRNRTRPSQITPHIYNHLIFDKPLFNIWWWENWLAICRKLKLDPFLTPYTKINSRWIKDXNIRPKSIKNLEENLGNTIQHLGTGKDFMTKTPKAMATKAKIDIWDLIKLKSFCTAKETIIRVNRLPTXWEKIFAIYP

SEQ ID NO: 44782 - protein, 115 aa, Homo sapiens; identical to SEQ ID NO: 34208
  DOMAIN (25)..(72): kw TRANSCRIPTASE REVERSE II ORF2 domain identified by eMATRIX, accession number DM01354V, p-value=1.000e-40, raw score of 12.97

SEQ ID NO: 44783 - protein, 174 aa, Homo sapiens; identical to SEQ ID NO: 38194

SEQ ID NO: 44784 - protein, 713 aa, Homo sapiens; identical to SEQ ID NO: 34589
  DOMAIN (57)..(100): kw TRANSCRIPTASE REVERSE II ORF2 domain identified by eMATRIX, accession number DM01354T, p-value=1.000e-40, raw score of 9.48

SEQ ID NO: 44785 - protein, 1203 aa, Homo sapiens; identical to SEQ ID NO: 34339
  DOMAIN (121)..(166): kw TRANSCRIPTASE REVERSE II ORF2 domain identified by eMATRIX, accession number DM01354N, p-value=1.000e-40, raw score of 13.17
  misc_feature (1)...(1203): Xaa = X or * as defined in Table 2

SEQ ID NO: 44786 - protein, 959 aa, Homo sapiens; identical to SEQ ID NO: 40583
  DOMAIN (212)..(257): kw TRANSCRIPTASE REVERSE II ORF2 domain identified by eMATRIX, accession number DM01354N, p-value=1.000e-40, raw score of 13.17

SEQ ID NO: 44787 - protein, 782 aa, Homo sapiens; identical to SEQ ID NO: 34341
  DOMAIN (40)..(86): kw TRANSCRIPTASE REVERSE II ORF2 domain identified by eMATRIX, accession number DM01354O, p-value=1.000e-40, raw score of 8.73
  misc_feature (1)...(782): Xaa = X or * as defined in Table 2

SEQ ID NO: 44788 - protein, 754 aa, Homo sapiens; identical to SEQ ID NO: 32653
  DOMAIN (208)..(254): kw TRANSCRIPTASE REVERSE II ORF2 domain identified by eMATRIX, accession number DM01354O, p-value=1.000e-40, raw score of 8.73

SEQ ID NO: 44789 - protein, 944 aa, Homo sapiens; identical to SEQ ID NO: 40571
  DOMAIN (700)..(745): kw TRANSCRIPTASE REVERSE II ORF2 domain identified by eMATRIX, accession number DM01354N, p-value=1.000e-40, raw score of 13.17

SEQ ID NO: 44790 - protein, 703 aa, Homo sapiens
  DOMAIN (323)..(370): kw TRANSCRIPTASE REVERSE II ORF2 domain identified by eMATRIX, accession number DM01354V, p-value=1.000e-40, raw score of 12.97
MGKKQNRKTGNSKMQSASPPPKECSSSPAMEQSWMENDFDELREEGFRLSNYSELQEDIQTKGKEVENFERNLEECISRITNTEKCLKELMELKTKARELREECRSLRSRCDQLEERVSAMEDEMNEMKLNQEEVESLNRPITGAEIVAIINSLPTKKSPGPDGFTAEFYQRYKEEQHINRAKDKNHMIISIDAEKAFDKIQQHFMLKTLNKLGIDGTYFRKSINVIQHINRAKDKNHMIISIDAEKAFDKIQQPFMLKTLNKLDNIIVYLENPIVSAPNLLKLISNFSKVSGYKINVQKSQAFLYTNNSQTESQIMSELPFTIASKRIKYLGIQLTRDVKDLFKENYKPLLKEIKEDTKKWKNIPCSWVGRINIVKMAILRKVIYRFNAIPIKLPMTFFTELEKTTLKFIWNQKRAPVAKAILSQKNKAGGITLPDFKLYYKATVTKTAWYWYQNRDIGQWNRTEPSEITPHVYNYLIFDKPEKTKQWGKDSLFNKWCWENWLAICRKLKLDPFLTPYTKINSRWIKDLNVRPKTIKTLEENLGITIQDIGMGKDFMSKTPKAMATKDKIDKWDLIKLKSFCTAKETTIRVNRQPTEWEKTFATYSSDKGLISRIYNELKLIYKKKTNNPIKKWAKDMNRHFSKEDIYAAKKHMKKCSSSLAIREMQIKTTVRYHLTPVRMAIIKKSGNNRDMDEVGNHHSQ

SEQ ID NO: 44791 - protein, 919 aa, Homo sapiens; identical to SEQ ID NO: 38227
  DOMAIN (110)..(151): kw TRANSCRIPTASE REVERSE II ORF2 domain identified by eMATRIX, accession number DM01354I, p-value=1.000e-40, raw score of 15.55

SEQ ID NO: 44792 - protein, 768 aa, Homo sapiens
  DOMAIN (149)..(204): kw TRANSCRIPTASE REVERSE II ORF2 domain identified by eMATRIX, accession number DM01354Q, p-value=1.000e-40, raw score of 9.23
MKEKMLRAAREKGRVTHKGKPIRLTADLSAETPQARREWGPIFNILKEKNFQPRISYPDKLSFISEGEIKYFTDKQMLRDFVTTRPVLKELLKEALNMERNNWYQPLQKHAKNMPNSIILIPKPGRDTTKKENFRPISLMNIDAKILNKILANRIQQHIKKLIHHDQVGFIPGMQGWFNIHKSINVIQHINRTIDKNHMIISIDAEKAFDKIQQLFMLKTLNKLGIDGTYLKIRIKYLGIQLTREVKDLFKENYKPLLNEIKEDTNKWKNIPCSWVGRINIMKMAILPKVIYRFNAISNKLPMTFFTELEKTTLNFIWNQKRARIAKSILSQKNKAGGITLPDFKQYYKATVTKTAWYWYQNRDIDQWNRTEPSEITPHIYTYLIFDKPEKNKQWGKDSLFNKWCWENWLAVCRKLKLDPFLTPYTKINSRWIKDLNVRPKTIKTLEEILGITIQDTGMGKDFMSKTPKAMATKAKIDKWDQIKLKSFCTAKETTIRVNRQPTKWEKIFATYSSDKGLIFRIYNELKQIYKKKTNNPIKKWAKDMNRPFSKEDIYAAKKYMKKCSPSLAIREMQIKTTMRYHLTPVRMAIIKKSGNNRQTESQIMSELPITIASKRIKYLGIQLTKDVKDLFKENYKPLLNEIKEDTNKWKNIPCSWIGRINIVKNGHTAQAHKCTCHQPGSPRHYSSGGSPNILGRAPTGERNKRDRYAIIKSLLTTGSAMKKIEDNNTLVDVKINKYQIKQVVKKLYDTDVVNTLIRPEGEKKADV

SEQ ID NO: 44793 - protein, 894 aa, Homo sapiens; identical to SEQ ID NO: 38230
  DOMAIN (272)..(317): kw TRANSCRIPTASE REVERSE II ORF2 domain identified by eMATRIX, accession number DM01354N, p-value=1.000e-40, raw score of 13.17
  misc_feature (1)...(894): Xaa = X or * as defined in Table 2

SEQ ID NO: 44794 - protein, 778 aa, Homo sapiens; identical to SEQ ID NO: 32655
  DOMAIN (218)..(264): kw TRANSCRIPTASE REVERSE II ORF2 domain identified by eMATRIX, accession number DM01354O, p-value=1.000e-40, raw score of 8.73

SEQ ID NO: 44795 - protein, 565 aa, Homo sapiens
  DOMAIN (197)..(244): kw TRANSCRIPTASE REVERSE II ORF2 domain identified by eMATRIX, accession number DM01354V, p-value=1.000e-40, raw score of 12.97
HINRAKDKNHMIISIDAEKAFDKIQQHFMLKTLNKLGIDGTYFRKSINVIQHINRAKDKNHMIISIDAEKAFDKIQQHFMLKTLNKLGIDGTYFRKSINDNPAYKQSQRQKPLIISIDAEKAFDKIQQPFMLKTLNKLDNIIVYLENPIVSAPNLLKLISNFSKVSGYKINVQKSQAFLYTNNSQTESQIMSELPFTIASKRIKYLGIQLTRDVKDLFKENYKPLLKEIKEDTKKWKNIPCSWVGRINIVKMAILRKVIYRFNAIPIKLPMTFFTELEKTTLKFIWNQKRAPVAKAILSQKNKAGGITLPDFKLYYKATVTKTAWYWYQNRDIGQWNRTEPSEITPHVYNYLIFDKPEKTKQWGKDSLFNKWCWENWLAICRKLKLDPFLTPYTKINSRWIKDLNVRPKTIKTLEENLGITIQDIGMGKDFMSKTPKAMATKDKIDKWDLIKLKSFCTAKETTIRVNRQPTEWEKTFATYSSDKGLISRIYNELKLIYKKKTNNPIKKWAKDMNRHFSKEDIYAAKKHMKKCSSSLAIREMQIKTTVRYHLTPVRMAIIKKSGNN

SEQ ID NO: 44796 - protein, 682 aa, Homo sapiens
  DOMAIN (9)..(54): kw TRANSCRIPTASE REVERSE II ORF2 domain identified by eMATRIX, accession number DM01354N, p-value=1.000e-40, raw score of 13.17
  misc_feature (1)...(682): Xaa = X or * as defined in Table 2
XIQTTIREYYKHLYANKLENLEEMDKFLDTYILPRLNQEEVEPLNRPITGSEIEEIINSLPTKKTPGPDGFTAEFYQRYKEELVPILLKLFQSIEKEGILPNSFYEASIILIPKPDRDTTKKENFRPISLMNIDVKILNKILANRIQQHIKKLIHHDQVGFIPGMQGWFNIRKSINVIQHINRTKDKNHMIISIDAEKAFDKIQQPFMLKTLNKLGIDGTYLKIIRAIYDKPTADIILNGQKLEAFSLKTGTRQGCPLSPLLFNIVLEVLARAVRQEKEIKGIRLGKEEVKLSLLADDMIVYLENPIVSAPNLLKLISNFSKRIKYLGIQLTRDVKDLFKKNYKPLLNEIKEDTNKWKNIPCSWVGRINIVKMAILPKVIYRFNAIPIKLPMTFFTELEKTTLKFIWNQKRACIAKSILNQKNKAGGIMLPDFKLYYKATGTKTAWYWYQNRDIDQWNRTQPSEIMPHIYNYLIFDKPDKNKKWGKDSLFNKWCWENWLAICRKLKLDPFLTPYTKINSRWIKDLNVSPKTIKTLEENLGNTIQDIGMGKDVMSKTPKAMATKAKIDKWDLIKLKSFCTAKETTIRVNRQPTEWEKIFATYSSDKGLIFRIYNELKQIYKKKTNNLIKKWAKNMNRHFSKEDIYAAKKHMKKCSSSLAIREMQIKTTMRYHLTPVGMAIIKN

SEQ ID NO: 44797 - protein, 1070 aa, Homo sapiens; identical to SEQ ID NO: 36416
  DOMAIN (154)..(195): kw TRANSCRIPTASE REVERSE II ORF2 domain identified by eMATRIX, accession number DM01354I, p-value=1.000e-40, raw score of 15.55

SEQ ID NO: 44798 - protein, 939 aa, Homo sapiens; identical to SEQ ID NO: 42867
  DOMAIN (137)..(182): kw TRANSCRIPTASE REVERSE II ORF2 domain identified by eMATRIX, accession number DM01354N, p-value=1.000e-40, raw score of 13.17

SEQ ID NO: 44799 - protein, 530 aa, Homo sapiens
  DOMAIN (119)..(166): kw TRANSCRIPTASE REVERSE II ORF2 domain identified by eMATRIX, accession number DM01354V, p-value=1.000e-40, raw score of 12.97
  misc_feature (1)...(530): Xaa = X or * as defined in Table 2
LRDCKRINQHPVKTDQSAFCKMAPIMQDVVLEVLARAIRQEKEIKGIQLGKEEVKLSLFADDMIVYLENPIVSAQNLLKLISNFSKVSGYKINAQKSQAFLYTNNRQTESQIMSELPFTIASKRIKYLGIQLTRDVKDLFKENYKPLLKEITEDTNKWKNIPCSWVGRINIVKMAILPKVIYRFNAIPIKLPMTFFTELEKTTLKFIWNQKRARMAKSILSQKNKAGGITLPDFKLYYKATVTKTAWYWYQNRDVDQWNRTEPSEITPHIYNYLIFDKPDKNKQWGKDSLFNKWGWENWLAICRKLKLDPFLTPYTRINSRWIKDLNVRPKTIKTLEENLDITIQDIGMGKDFMSKTPKAMATKAKIDKWDLIKLKSFCIAKETTIRVNRQPTKWEKIFATYSPDKGLISRIYNELKQIYKKKTNNPIKKWAKDMNRHFSKEDIYAAKKHMKRCSSSLAIREIQIKTTMRYHLTPVRMAIIKKSGNNRCFXWQKPGPSGXALRSWKEDIAGTSYVGMNQCQMRKNTKTLI

SEQ ID NO: 44800 - protein, 1063 aa, Homo sapiens; identical to SEQ ID NO: 34337
  DOMAIN (272)..(317): kw TRANSCRIPTASE REVERSE II ORF2 domain identified by eMATRIX, accession number DM01354N, p-value=1.000e-40, raw score of 13.17

SEQ ID NO: 44801 - protein, 938 aa, Homo sapiens; identical to SEQ ID NO: 43405
  DOMAIN (397)..(444): kw TRANSCRIPTASE REVERSE II ORF2 domain identified by eMATRIX, accession number DM01354V, p-value=1.000e-40, raw score of 12.97

SEQ ID NO: 44802 - protein, 1048 aa, Homo sapiens; identical to SEQ ID NO: 40597
  DOMAIN (110)..(151): kw TRANSCRIPTASE REVERSE II ORF2 domain identified by eMATRIX, accession number DM01354I, p-value=1.000e-40, raw score of 15.55

SEQ ID NO: 44803 - protein, 871 aa, Homo sapiens
  DOMAIN (133)..(178): kw TRANSCRIPTASE REVERSE II ORF2 domain identified by eMATRIX, accession number DM01354N, p-value=1.000e-40, raw score of 13.17
  misc_feature (1)...(871): Xaa = X or * as defined in Table 2
TTYQNLWDAFKAVCRGKFIALNVHKRKQERSKIDTLTSQLKELEKQEQTHSKASRRQEITKIRAELKEIETQKTLQKINESRSWFFERINKIDRPLARLIKKKREKNQIDAIKNDKGDITTNPTEIQTTIREYYKHLYANKLENLEEMHKFLDTYTLPRLNQEEVESLNRPITGAEIVAIINSLPTKKSPGPDGFTGEFYQRYKEELVPFLLKLFQSIEKEGIMNIDAKILNKILANRIQQHIKKLIHHDQVGFIPGRQGWFNICKSINVIQHINRAKDKNHMIISIDAEKAFDKIQQLFMLKTLNKLGIDGTYFKIIRAIYDKPTANIILNGKKLEAFPLKTGTRQGCPLSPLLFNIVLEVLARAIRQEKEIKGIQLGKEEVKLSLFADDMIVYLENPIVSAQNLLKLISNFSKVSGYKINVQKSQAFLYTNNRQTESQIMSELPFTIASKRIKYLGIQLTRDVKDLFKENYKPLLKEIKEDANKWKNIPCSWVGRINIVKMAILPKVIYRFNAIPIKLPMTFFTELEKTTLKFIWNQKRAHITKAILSQKNKARGITLPDFKLYYKATVTKTAWYWYQNRDIDQWNRTQPSEITPHIYNYLIFDKPDKNKQWGKGSLFNKWCWENWLAICRKLKLDPFLTPYTKINSRWIKDLNVRPKTTKTLEENLGITIQDIGMGMDFMSKTPKAMATKDKIDKWDLIKLKSFCTAKETTIRVNRQPTKWEKIFTTYSSDKGLISRIYNELKQIYKKKTNNPIKKWAKDMNRHFSKEDIYAAKKHMKKCSPSLAIREMQIKTTMRYHLTPVRMAIIKKSGNNRCWRGCGEIGTLLHCWWINWMKKTWHIYTMEYYASIKKNEFMSFAGAXMKLETII

SEQ ID NO: 44804 - protein, 748 aa, Homo sapiens
  DOMAIN (118)..(163): kw TRANSCRIPTASE REVERSE II ORF2 domain identified by eMATRIX, accession number DM01354N, p-value=1.000e-40, raw score of 13.17
SKTVPTGNSLEPTQNCWLQQWLPQDIEIEKQEQTHSKASRRQEITKIGAELEEIETQKTLQKINESRSWFFEKINKSDRPLARLIKKKREKNQIDAIKNDKGDITTDPTEIQTTIREYCKHLYANKLENLEEMNKFLDTYTLPRLNQEEVESLNRPITGSEIEAIINSLPTKKSPGPDGFTAEFYQRYKEELHINRTKDKNHMIISIDAEKAFDKIQQRFMLKTLNKLVLEVLARAIRQEKEIKGVQLGKEEVKLSLFADDMIVYLENPIVSAQNLLNLISNFSKVSGYKINVQKSQAFLYTNNRQTESQIMSELPFTIASKRIKYLGIQLTRDVKDLFKENYKPLLNERKEDTNKWKNIPCSWVERINIVKMAILPKVIYRFNAIPIKLPMTFFTELEKTTLKFIWNQKRARIAKSILSQKNKAGGITLPDFKLYYKATVTKTAWYSYQNRDIDQWNRTEPSEILPRIYNYLIFDKPEKNKQWGKDSLFNKWCWENWLAICRKLKLDPFLKPYTKIKSGWIKDLNVRPKTIKTLEENLGITIQDIGMGKDFMSKTPKAMATKAKIDKWDLIKLKSFCTAKETTIRVNRQPTEREKIFATYSSDKGLISRIYKELKQIYKKRTNNLIKKWVKDMNRHFSKEDVYAAKKHMKKCSSSLAIREMQIKTTMRYHLTPVRMAIIKKSGNNRITIVLLPGSLIVRSFHVTLNAILLHPGLTLFSPSAGRRDIPRVAFSYLAFSAQPSHNTPVN

SEQ ID NO: 44805 - protein, 567 aa, Homo sapiens
  DOMAIN (161)..(208): kw TRANSCRIPTASE REVERSE II ORF2 domain identified by eMATRIX, accession number DM01354V, p-value=1.000e-40, raw score of 12.97
MDTFLDTYTLPRLNQEEVESLNRPITGAEIVAIINSLPTKKSPGPDGFTAEFYQRYKEELGCPLLPLLFNIVLEVLARAIRQEKEIKGIQLGKEEVKLSLFADDMIVYLENPIVSAQNLLKLISNFSKVSGYKINVQKSQAFLYTNNRQTESQIMSELPFTIASKRIKYLGIQLTRDVKDLFEENYKPLLNEIKEDTNKWKNIPCSWVGRINIVKMAILPKVIYRFNAIPIKLPMTFFTELEKTTLKFIWNQKRARITKSILSQKNKAGGITLPDFKLYYKATVTKTAWYWYQNRDIDQWNRTEPSEIMPHTYNYLIFDKPEKNKQWGKDSLFNKWCWENWLAICRKLKLDPFLTPYRKINSRWIKDLNVRPKTIKTLEENLGITIQDIGVGKDFMSKTPKAMATKAKIDKWDLIKLKSFCTAKESTIRVNRQPTTWEKIFTTYSSDKGLISRIYKELKQIYKKKTNNPIKKWVKDMNRHFSKEDIYAAKKHMKKCSSSLAIREMQIKTTMRYHLTPTQKEEGSTPQGQQEEGESSRTCTLNWRLGRRQKEIDMWVEVFTGVRRVTQ

SEQ ID NO: 44806 - protein, 1478 aa, Homo sapiens
  DOMAIN (101)..(146): kw TRANSCRIPTASE REVERSE II ORF2 domain identified by eMATRIX, accession number DM01354N, p-value=1.000e-40, raw score of 13.17
MDTLTSQLKELEKQEQTHSKASRRQEITKITAELKEIETQKTLQKSNESRSWFFEKINKIDRPVARLIKKKREKNQKDVIKNDKGDITTDPTEIQTTIREYYKQLYTNKLENLEEMDKFLDTYTLPRLNQEEVESLNRPITGSEIEAIINSLPTKKSPGPDGFTAEFYQRYKEELVPFLLKLFQSIEKEGILPNSFYEASIILIPKPGRDTTKKENFRPISLMNIDAKILNKILANRIQQHIKKLIHHDQVGFIPGMQGWFNILLEVLARAIRQEKEIKGIQLGKEKVKLSLFADDMIVYLENPIVSAPNLLKLISKFSKVSGYKINVQKSQAFLYTNNRQTESQIMSELPFTTASKRIKYLGIQLTRDVKDLFKENYKPLLNEIKEDTKKWKNIPCSWVGRINIVKMAILPKVIYRFNAIPIKLPMTFFTELEKTTLKFIWNQKRARLAKSILSQKNKAGGITLPDFKLYYKATVTKTAWYRYQNRDIDQWNRTEPSELMPHIYNYLIFDKPEKNKQWGKDSLFKNWCWENWLAICRKLKLDPFLTPYTKINSRWIKDLNVRPKTIKTLEENLGITIQDIGIGKDFMSKTPKAMAAKAKIDKWDLIKLKSFCTAKETTIRVNRQPTKWEKSFAIYSSDKGLISRIYNEHKQIYKKKTNNPIKKWAKVMNRHFSKEDIYAAKKHMKKCSSSLAIREMQIKTTMRYHLTAVRMAIIKTSGNNRAPGGRGGCGCSFGRLKRSCVPALKRVADLPAQRSSSAKGETASSSGSLNPVPPDWEKPPSRGRQTPHTGELRLASDGCLSGMKLPEEGIGSSLCCSAASAGDTQANGVRSGLPANSSRPAAEVLTVRRKTNKQKGHPHQNPICMSPSSKTKEIQTTIREYYKHLYENKLQNLEEMDKLLDTYTLPRLNQEEVESLNRPITGSEIEAIMNSLPNKKSPGPDGFTAEFYQRYKEELVPFLLKLFQSIEKEGILPNSFYEASIILIPKPGIKTTKKESFRPISLMNIDAKILNKILANRIQQPIKKLIHHDQVGLIPGLQGWFNIHISIDIIHHINRTNDKNHIIISIDAEKGFDKIQQPFMLKTLNKLAQNLLKLISNFSKVSGYKINVQKSQAFLYTNNRQTESQIMSELPFTIASKRIKYLGIQLTRDVKDLFKENYKPLLIGIKEDTNKWKNIPCSWIGRINIVKMVILPKVIYRFNAIPIKLPMTFFTELEKITLKFIWNQKRAHIAKTILSQKNKAGGITLPDFKLYYKATVTKTARYWYQNRDIDQWNRTEPSEIIPYIYNHLIFDKPDKNKKWGKDSPFNKWCWENWLALCRKLKLDPFLIPYTKINSRWIKDLNVRPKTIKTLEENLGNTIQDIGMGKDFRTKTPKAMATKAKIDKWDLIKLTSFCTAKETIIRVNTQPTEWEKIFAIYASDKGLISRIYKELKQIYKKKSNNPIKKWAKDMNRHFSKEDVYAAKRHMKKCSSSLAIRKM

SEQ ID NO: 44807 - protein, 970 aa, Homo sapiens
  DOMAIN (92)..(114): SODIUM/POTASSIUM-TRANSPORTING ATPASE SIGNATURE domain identified by eMATRIX, accession number PR00121D, p-value=3.769e- 18, raw score of 16.72
  misc_feature (1)...(970): Xaa = X or * as defined in Table 2
MGGPAALCIAVVPGDLVVALCLEEGLGSGIATWACSPWRISQGTHLTFRSSLAVAAIPEGLPIVVMVTLVLGVLRMAKKRVIVKKLPIVETLGCCSVLCSDKTGTLTANEMTVTQLVTSDGLRAEVSGVGYDGQGTVCLLPSKEVIKEFSNVSVGKLVEAGCVANNAVIRKNAVMGQPTEGALMALALKDQEDIYFMKGALEEVIRYCTMYNNGGIPLPLTPQQRGAGPGDTALPSAASAFARMSAAERNDAFQGLAPGLAGERNENGSVAEEQLGTCCLSPLQTEEDLGHVLALASGPELGRLTFLGLVGIIDPPRVGVKEAVQVLSESGVSVKMITGDALETALAIGRNIGLCNGKLQAMSGEEVDSVEKGELADRVGKVSVFFRTSPKHKLKIIKVRWARQAQALQESGAIVAMTGDGVNDAVALKSADIGIAMGQTGTDVSKEAANMILVDDDFSAIMAIRQEKEIKGIQLGKEEVKLSLFADDMIVYLENPMVSAQNLLKLISNFSKVSGYKINVQKSQAFLYTNNRQTESQIMSELPFTIASKRIKYLGIQLTRDVKDLFKENYKPLLKEIKEDTNKWKNIPCSWVGRINIVKMAILPKVIYRFNAIPIKLPMTFFTELEKTTLKFIWKQKRARIAKSILSQKNKAGGITLPDFKLYYKATVTKTAWYWYQNRDIDQWNRTGPSEIMPHIYNYLIFDKPEKNKQWGKDSLFNKWCXENWLAICTKLKLDPFLTPYTKINSRWIKDLNVRPKTIKTLEENLGITIQDIGVGKDFMSKTPKAMATKAKIDKWDLIKLKSFCTAKETTIRVNRQPTTWEKIFATYSSDEGLISRIYNELKQIYKKKTNNPIKKWAKDMNRHFSKEDIYAAKKHMKKCSSSLAIREMQIKTTMRYHLTPVRMAIIKKSGNNRWNISEDPGLALSCIKEASITVPSLRCAVSIIQGILSNWVQKITGSGSMRASVFREA

SEQ ID NO: 44808 - protein, 1002 aa, Homo sapiens
  DOMAIN (272)..(317): kw TRANSCRIPTASE REVERSE II ORF2 domain identified by eMATRIX, accession number DM01354N, p-value=1.000e-40, raw score of 13.17
MGDFNTPLSTLDRSMRQKVKKDTQELNSALHQADLIDIYRTLHPKSTEYTFFSAPHHTYSKIDHILGSKALLSKCKRTEIITNYLSDGSAIKLELRIKNLTQNRSTTWKLNNLLLNDYWVPNEMKAEIKMFFETNENKDTTYQNLWDAFKAVCRGKFIALNAHKRKQERSKIDTLTSQLKELEKQEQTHSKASRRQEITKIRAELKEIETQKTLQKINESRSWFFERINKIDRPLARLIKKKREKNQIDTIKNDKGDITTNPTEIQTTIREYYKHLYANKLENLEEMDKFLDTYTLPRLNQEEVESLNRPITGSEIVAIINSLPTKKSPGPDGFTAKFYQRYKEELHINRAKDKNHMIISIDAEKAFDKIQQRFMLKTLNKLVLEVLARAIRQEKEIKGIQLGKEEVKFSLFADDMIVYLENPIVSAQNLLKLISNFSKVSGYKINVQKSQAFLYTNNRQTESQIMSELPFIIASKRIKYLGIQLTRDVKDLFKENYKPLLKEIKEDTNKCKNIPCSWVGRINIVKMAILPKVIYRFNAIPIKLPMPFFTELEKTTLKFIWNQKRARIAKSILSQKNKAGGITLPDFKLYYKATVTKTAWYWYQNRDIDQWNRTEPSEITPHIYNYLIFDKPEKNKQWGKDSLFNKWCWENWLAICRKLKLDPFLTPYTKINSRWIKDLNVRPKTIKTLEENLGNTIQNIGMGKDFMSKTPKAMATKDKIDKWDLIKLKSFCTAKETTIRVNRQPTKWEKIFATYSSDKGLISRIYNELKQIYKKKTNNPIKKWTKDMNRYFSKEDIYAAKKHMKKCSSSLAIREMQIKTTMRYHLTPVRMAIIKKSGNNRSQLQNIVQRTCSESNIKRRAGIEKGIQWAKDANCSQESPVRPSQQVGAPLGRSFQRKDQAAIFAVLQPLLVIPRQTRSGVDLQHIPAGLQQRGLTVRRKTNKQKGIASTSTKATSTQKPHPKVTNIKDQSIGSSGQGIQAGEGNKGYSSRKRGSQIVPVCR

SEQ ID NO: 44809 - protein, 1599 aa, Homo sapiens
  DOMAIN (272)..(317): kw TRANSCRIPTASE REVERSE II ORF2 domain identified by eMATRIX, accession number DM01354N, p-value=1.000e-40, raw score of 13.17
  misc_feature (1)...(1599): Xaa = X or * as defined in Table 2
MGDFNTPLSTLDRSTRQKVNKDTQELNSALHQADLIDIYRTLHPKSTEYTFFSAPHHTYSKIDHILGSKALLSKCKRAEIITNYLSDHSAIKLELRIKNLTQSRSTTWKLNNLLLNDYWVNNEMKAEIKMFFETKENKDTTYQNLWDAFKAVCRGKFIALNAHKRKQERSKIDTLTSQLKELEKQEQTHSKASRRQEITKIRAELKEIETQKTLQKINESRSWFFERINKIDRPLARLIKKKREKNQIDTIKNDKGDITTDPTEIQTTIREYYKHLYANKLENLEQMDAFLDTYTLPRLNQEEVESLNRPITGAEIVAIINSLPTKKSPGPDGFTAEFSQRYKEELVPFLLKLFQSIEKEGILPNSFYEASIILIPKPGRDTTKKENFRPISLMNIDAKILNKILANRIQQHIKKLIHHDQVGVIPGMQGWFSIRKSINVIQHINRAKDKNHMIISIDAEKAFDKIQQPFMLKTLNKLAQNLLKLISNFSKVSGYKINVQKSQAFLYTNNRQTESQIMSELPFTIASKRIKYLGIQLTRDVKDLFKENYKPLLKEIKEDTNKWKNIPCSWVGRINIVKMAILPQVIYRFNAIPPSRLPMTFFTELEKTTFXRSLWNQKRARIAKAILSQKNKAGGITLPDFKLYYKATVTKTAWYWYQNRDIDQWNRTEPSEITPHIYNYLIFDKPEXNKQWGKDSLFNKWCWENWLAICRKLKVDPFLTPYTKINSRWIKHLNVRPKTIKALEENLGITIQDIGMGKDFMSKTPKAMATKAKIDKWDLIKLKSFCTAKETTIRVNRQPTKWEKIFGTYSSDKGLISRIYNELKQIYKKKTNNPIKKWAKDMNRHFSKEDIYAAKKHMKKCSSSLAIREMQIKTTMRYHLTPVRMAIMKKSGNNRCWRGCGEIGTLLHCWWDCKLVQPLWKSVWRFLRDLELEIPFDPAIPLLGIYPKDYKSCCYKDTCTPLKKHISFHLYQYDTDMIGNAGLVIQQPSILQSEDKSYNGGGIGSSNRIMDFLEEPIPGVGTYDDFNTIDWVREKSRDRDRHREGAFAYIVNYFMYVLWALLFAFLAVSLVKVFAPYACGSGIPEIKTILSGFIIRGYLGKWTLVIKTITLVLAVSSGLSLGKEGPLVHVACCCGNILCHCFNKYRKNEAKRREVLSAAAAAGVSVAFGAPIGGVLFSLEEVSYYFPLKTLWRSFFAALVAAFTLRSINPFGNSRLVLFYVEFHTPWHLFELVPFILLGIFGGLWGALFIRTNIAWCRKRKTTQLGKYPVIEVLVVTAITAILAFPNEYTRMSTSELISELFNDCGLLDSSKLCDYENRFNTSKGGELPDRPAGVGVYSAMWQLALTLILKIVITIFTFGMKIPSGLFIPSMAVGAIAGRLLGVGMEQLAYYHQEWTVFNSWCSQGADCITPGLYAMVGAAACLAKEEFAHKTLAMDVMKPRRNDPLLTVLTQDSMTVEDVETIISETTYSGFPVVVSRESQRLVGFVLRRDLIISIENARKKQDGVVSTSIIYFTEHSPPLPPYTPPTLKLRNILDLSPFTVTDLTPMEIVVDIFRKLGLRQCLVTHNGRLLGIITKKDVLKHIAQMANQDPDSILFN

SEQ ID NO: 44810 - protein, 914 aa, Homo sapiens
  DOMAIN (543)..(589): kw TRANSCRIPTASE REVERSE II ORF2 domain identified by eMATRIX, accession number DM01354O, p-value=1.000e-40, raw score of 8.73
MNAGKGMEKGEPFYTADSEKTLRNVCGESGDAVTQGLRFPESAQRVSHPLLQLRFGGNVSPAAQADHLVLCPQDVSRLLLAELPRFAGAEGLSDNSLLSSLSHCSDSISSDEEELRTLGSSGSESSTPENVGPPFLMDENSWFNKCKRVKQKYQLTLEQKGYLEELLRLRENQLSESVSQNKILLQRIEDSDLAHKLEKEQLEYIIVELQDQLNRPNQLDLFQAFCAEIAGLSQVFQAMGLPQAEGLNTSCAGEAKLLPGHWQNTQAGQCRLCSVHPLTGMARQNSEDKSTHHLNIHRTVLKNNDLRSRQELTAHLTNQWPSPGALDVNAVALDTLLYRKHNKQWYEKSYQSLDQLSAEVSLSQTSLDPGQSQEGDGKQDTLNVMSEAPHHTYSKIDHIVGSKALLSKCKRTETTTNCLSDHSAIKLELRTKKLTQNRSTTWKLNNLLLSDYWVHNEMKAEIKMFFETNENKDPTYQNLWDTFKAVCRGKFIALNAHKRKQERSKIDTLTSQLKELEKQEQTHSKASRRPITGSEIVTIINSLPTKKSPGPDGFTAEFYQRYKEELVPFLLKLFQSIEKERILPNSFYEASIILIPKPGRDTTKKENSRPISLMNIDAKILNKILANRIQQHIKKLIHHDQVGFIPGMQGWFNIRKSINVIQHINRTKDKNHMIISIDAEKAFDKIQQPFMLKTLNKLVLEVLARAIRQEKEIKGIQLGKEEVKLSLFADDMIVYLENPIVSAQNLLKLISNFSKVSGYKINVQNSQAFLYTNNRQTESEIMSELPFTIASKRIKYLGIQLTRDVKDLFKQNYKPLLNEIKEDTNKWKNTPCSWVGRVNIVKMAILPKVIYRFNATPIKLPMTFFTELEKTTLKFMWNQKRAPTLPQVQSLSPKEQSWEASRLPDFKLYLQGLQ

SEQ ID NO: 44811 - protein, 956 aa, Homo sapiens
  DOMAIN (110)..(155): kw TRANSCRIPTASE REVERSE II ORF2 domain identified by eMATRIX, accession number DM01354N, p-value=1.000e-40, raw score of 13.17
  misc_feature (1)...(956): Xaa = X or * as defined in Table 2
RKHXTWKRTSSTSHHKNMPNXLEKQEQTHSKASRRQEITKIRAELKEIETQKTVQKINESRSWFFERSNKIYRPLSRLIKKKREKNQIDTIKNDKGDTTTDPTEIQTTIREYYKHLYANKLENLEEMDKFLDTYTLPRLNQEEIESLNRPITGTEIVTIINSLPTKKSPGPDGFTAEFYQRYKEELVPFLLKLFQSIEKEGILPNSFYEASIILIAKPGRDTTKKENFRPISLMNIDAKILNKILAKRIQQHIKKLIHHDQVGFIPGMQGWFNIRKSINVIQHINRAKDKNHMIISIDAEKAFDKIQQRFRLKTLNKLGIDGTYFKIIRAIYDKPTANIILNGQKLKAFPLKTGTRQGCPLSPLLFNIVLEALARAIRQEKEIKGIQLGKEEVKLSLFADDMIVYLENPIVSAQNLLKLISNFSKLNLQTQEYKINVQKSQAFLYTNNRQTESQIMSELPFTIASKRIKYLGIQLTRYVKDLFKENYKPLLKEIKEDTNKWKNIPCSWVGRINIVKMAILPKVIYRFNAIPIKLPMPFVTELEKTTLKFIWNQKRAHIAKSILSKKNKAGGITLPDFKLYYKATVTKTALYLYQNRDVDQWNRTEPSEIMLHIYNYLIFDKPDKNKQWGKDSLFNKWCXENWLTICKRLKLDPFLTPYTKISNSRWIKDLKCXTXKPXKTLEENLGNTIQDIGMGKDFMSKTPKAMATKAKTDKGDLVKLKTFCTCKRETTIRVNRQPTEWEKIFAIYSFDKGLISRIYKELKQIYKKKKTNNPIKKWAKDMNRHFSKEDTYAAKKHMKKCSASLAIREMQIITAMRYHLTPVRMAIIKKSGNNRCWRGCGEIGTLLHCWWDCKLVQPLWKSVWRFLRDLELEIPFDPAIPLLGIYPKDYKSCCYKDTCTLTWMELEAIILSEVLRNGKTKNRMFSLISGNQDTGMQRHTEFYDGLWRLRRGRVEG

SEQ ID NO: 44812 - protein, 1522 aa, Homo sapiens
  DOMAIN (833)..(858): 7 kw REVERSE TRANSCRIPTASE RNA POLYMERASE domain identified by eMATRIX, accession number DM00895E, p-value=3.333e-11, raw score of 15.72
TGTSQKKTFMQPKKHMKKCSTITGHQSNANQNHNEIPSHTKLEWRSLKRSGNNRDVGNVVEAMYGDLPPPIMLIGHSMGGAIAVHTASSNLVPSLLGLCMIDVVEGTAMDALNSMQNFLRGRPKTFKSLENAIEWRNIKDLSWADSIKNVAAASLACISGALPASAVTTSPDNKRMARNVLKYERLLAESPNHVVAEAVIQRPNIPHLQTRDTYEGLCQTLGSQPTLYQIPSLYCSYETNSNAYLLLQPIRKEVIHLEPYIALYHDFVSDSEAQKIRELAEPWEQSSSPATEQSWMENDFDELREEGFRRSNYSELQEEIRTNGKEVKSFEKKLDEWITRITNAEKSLKDLMELKTKARELRDECRSLSSRCNQLEERVSVMEDEMNEMKQEGKIKRDKEGHYIMVKGSIQQEELTILNIYAPNTGAPRFIKQVLSDLQRDLDSHTLIMGDFNTSLLTLDRSMRQKVNKDTQELNSSLHQADLIDIYRTLHPKSIEYTFFSAPHHTYSKIDHIVGSKALLSKCKRTEIITNYLSDHSAIKLELRIKNLTQSRSTTWKLNNLLLNDYWVHNEMKAEIKMFFETNENKDTTYQNLWDAFKAVCRGKFIALNAHKRKQERSKIDTLTSQLKELEKQEQTHSKASRRQEITKIRAELKEIETQKTLQKINESRSWFFERINKIDRPLARLIKKKREENQIDTIKNDKGDITTDPTEIQTTIREYYKHLYANKPENLEEMDKFLDTYTLPRLKQEEVESLNRPITGAEIVAIINSLPTKKSPGPDGFTAEFYQRYKEELVPFLLKLFQSIEKEGILPNSFYEASIILIPKPGRDTTKKENFRPISLMNIDAKILNKILANRIQQHIKKLIHHDQVGFIPGMQGANIILNGQKLEAFPLKTGTRQGCPLSPLLFNTVLEVLARAIRQEKEIKGIQLGKEEVKLSLFADDMIVYLENPIVSAQNLLKLISNFSKVSGYKINVQKSQAFLYTNNRQTESQIMSELPFTIASKRIKYLGIQFTRDVKDLFKENYKPLLKEIKEDTNKWKNIPCSWVGRINIVKMAILPKVIYRFNAIPIKLPMTFFTELEKTTLNFIWNQKRARIAKSILSQKNKAGGITLPDFKLYYKATVTKTAWYWYQNRDIDQWNRTEPSEITPHTYNYLIFDKPEKNKQRGKDSLFNKWCWENWLAICRKLKLDPFLTPYTKINSRWIKDLNVRPKTIKILEENLGITIQDIGVGKDFMSKTPKAMATKAKIDKWDLIKLKSFCTAKETTIRVNRQPTTWEKIFATYSSDKGLISRIYNELKQIYKKKTNNPIKKWAKDMNRHFSKEDIYAAKKYMKKCSSSLAIREMQIKTTMRYHLTPVRMAIIKKSGNNRCWRGCGEIGTLLHCWWDCKLVQPLWKSVWRFLRDLELEIPFDPAIPLLGIYPNDYKSCCYKDTCTRKIRTNGRNCASKKGNINKEARSLFNHWPLQRPRRVYSLHVLCGDTAFRHGLRPAHHHPSLDCLSSTHHGEQAFLREGHLQDKMGKEE

SEQ ID NO: 44813 - protein, 101 aa, Homo sapiens
  DOMAIN (32)..(83): INHIBITOR CALPAIN CALPASTATIN REPEAT THIOL PROT domain identified by eMATRIX, accession number PD01443B, p-value=2.330e- 18, raw score of 15.02
  misc_feature (1)...(101): Xaa = X or * as defined in Table 2
AVKTEPEMKSQATKLSVVHEKKSQEGKPKEHTEPKSLPKQASDTGSNDAHNIKAVSRXSHRQPSCLWFMRKNPKKESRKNTQSQKAYPSRHQIQEVTMLTI

SEQ ID NO: 44814 - protein, 220 aa, Homo sapiens
  misc_feature (1)...(220): Xaa = X or * as defined in Table 2
TSPDCWEEGRSVDWPRPGPALSLHNCKLDLGIEGGTLQPPTPSFXPTGTRAVPTRRRSRQETQLNSERTVSPGSRXXEKRTSRAWRSPLQGPGPGHAGQVAGGTGPRTGSTRGDTLQKCGKIQSVPLNCELIPIXPSILKPKVLPCSCPGIGASSSCPSDXVFFCTSXPWPYLLSYPLSMNFYRYHDHILKLLVQYTLYLLLQFLQVLLKYLLSHPKQHS

SEQ ID NO: 44815 - protein, 363 aa, Homo sapiens
  misc_feature (1)...(363): Xaa = X or * as defined in Table 2
MVDNDVPWPLVVAQEKGQPDLCLSSKGYRPLALVQLDFHQVSVTSKIFILSGALRSLTGAATADWTCRVLVIYPHDIMADSECNSLLVPSTTRKIMKHMLASEKIKTQNFNYNVDECVSLLYHHKANKLEAAEARQECELLRVASVSRHCWRDPAHPHSCWPRCXAPHCLGPARAPNARPAKPATTWNLRSSRAPCAAPVPTQSWAGAPSGTAGAEPSXECRPPENQARTAGSGVHAEACAPATCPACPGPGPCSGLPSSGRALFLLCATLAIPCVXVXLCFLATPPPCRXHVTAPSAGKCIWXPDAXVTKPRDLCGPVQVARDNGPRQVAQKKESSSYVSWFGTFISRVGDRSPPPRRAATL

SEQ ID NO: 44816 - protein, 161 aa, Homo sapiens
  DOMAIN (99)..(118): PHOSPHOLIPASE C SIGNATURE domain identified by eMATRIX, accession number PR00390A, p-value=4.600e-19, raw score of 15.09
PDIDNIFSEFGAKSKPYLTVDQMMDFINLKQRDPRLNEILYPPLKQEQVQVLIEKYEPNNSLARKGQISVDGFMRYLSGEENGVVSPEKLDLNEDMSHPLSHYFINSSHNTYLTGMNFLVLCYFSQSHQISPTSTFCCSEAEVWFSSISCEVPLRTLGFHH

SEQ ID NO: 44817 - protein, 302 aa, Homo sapiens
  DOMAIN (73)..(94): PHOSPHOLIPASE C SIGNATURE domain identified by eMATRIX, accession number PR00390B, p-value=5.714e-25, raw score of 12.57
  misc_feature (1)...(302): Xaa = X or * as defined in Table 2
KNAFTSFLTSFPPGQISVDGFMRYLSGEENGVVSPEKLDLNEDMSQPLCFMGIWGLFCWCFIAGQLAGNSSVEMYRQVLLSGCRCVELDCWKGRTAEEEPVKILAYXIYMCSHFXEVIEAIAECAFKTLSLPTFLLLFLFSLSPKQQAKMAEYCRLIGSSIFKEYAFHFYXLESGVPLPSPMDLMYKILVKNKKKSHKSSEGSGKKKLSEQASNTYCXNGDMMICYXNLTGEADTESDDADSGNVCLFYSYFQGTAGSEAMATEEMSNLVNFLTFPFFVLLLLNSERNKSFEMSSFVETKGL

SEQ ID NO: 44818 - protein, 83 aa, Homo sapiens
  DOMAIN (46)..(75): CALCIUM-BINDING PRECURSOR SIGNAL R domain identified by eMATRIX, accession number PD00919F, p-value=4.583e-09, raw score of 11.63
  misc_feature (1)...(83): Xaa = X or * as defined in Table 2
CXPGNMHISGQHLVAGEKEAESEDEEEEDMKLLGTPEGGSKFTQKKVKLAADEDDDDDDADDDDDDDDDDDFDDEETEEKAPV

SEQ ID NO: 44819 - protein, 208 aa, Homo sapiens
  DOMAIN (81)..(115): Amyloidogenic glycoprotein extracellular domain proteins domain identified by eMATRIX, accession number BL00319C, p-value= 4.375e-10, raw score of 17.12
PGATHASAPPGVLRLKCGSGPVHIIGQHLVAVEEDAQSQDEEEEDVKLLSISGKRSAPGGGSKVPQKKVKLAADEDDDDDDEEDDDEDDDDDDFDDEEAEQQAPVKKSIRDTPAKNAQKSNQNGKDSKPSSTPRSKGQESFKKQEKTPKTPKGPSSVEDIKAKMQASIEKKGGSLPKVEAKFINYVKNCSRMTDQEAIQDLWRWRRSL

SEQ ID NO: 44820 - protein, 657 aa, Homo sapiens
MMTSNAMAPAGCGRSAGGGGIVTLRAVPSQRGRSGRQPAAPDLEPLQCRASRDVKPESQAPFLTAPRWNWPSSSLNVCHFPIQLCAVSSTLMTPQIRVSNLDPAQNPQTPIIQLPRGQFQLEVLRTPHNPLMKSAFMFSFRTPLLPPSLFQLGKTGQLSKAKRRALSAVIPHTYLHPKIMVYVQRWKRHILQKKGEGKCALQIAGQQRWIEEVGGGWRKLYTVPTTCPLLNRAPIWLYQAERNLEHREREPTQGLPIYTSQNHILRQSLSLASSHIPSRGRGSTGLTLESGKGAESLAGWSRGRDLMGAQEGELRNEMKPLDYRTEGFCGKVMKRVRTEQIQMAVSCYLKRRQYVDSDGPLKQGLRLSQTAEEMAANLTVQSESGCANIVSAAPCQAEPQQYEVQFGRLRNFLTDSDSQHSHEVMPLLYPLFVYLHLNLVQNSPKSTVESFYSRFHGMFLQNASQKDVIEQLQTTQTIQDILSNFKLRAFLDNKYVVRLQEDSYNYLIRYLQSDNNTALCKVLTLHIHLDVQPAKRTDYQLYASGSSSRSENNGLEPPDMPSPILQNEAALEVLQESIKRVKDGPPSLTTICFYAFYNTEQLLNTAEISPDSKLLAAGFDNSCIKLWSLRSKKLKSEPHQVDVSRIHLACDILEEEV

SEQ ID NO: 44821 - protein, 353 aa, Homo sapiens
  misc_feature (1)...(353): Xaa = X or * as defined in Table 2
RVGGQSHGTQRISLCRHSVCSPLARQSPSNMKXVRTEEIQMAVSCYLKRWQYVDSDGPLKQGLRLPQTAEELAANLTVHRESHCADIVSAVPCQAEPQQYEVQFGRLRNFLIDSDSPHSHEVMPLLYPLFVCLHLSLVQNSPKSTVESFYSRFHGMFLQKASQKGVIEQLQTTQTIQDILSNFKLRAFLDNNYVVHLQEDSYNYLIHYLQSDSYTALCKMFILLIHLDVQPAKTTDXQLYASGSSSRSENNYLEAPDMPSPILQNDAALEVLQERIKQVKDGCPSLTTVCFYNTXQLLNTAEISPDSKLLAAGFDNSCIKLWSLQSRKLKSESCQVDMSRIHLACDILEEHVC

SEQ ID NO: 44822 - protein, 99 aa, Homo sapiens
  DOMAIN (13)..(47): Tubulin subunits alpha beta, and gamma proteins. domain identified by eMATRIX, accession number BL00227A, p-value=5.500e- 12, raw score of 24.55
KGASSRSRWRITMTQSVVVQVGQCGNQIGCCFWDLALREHAAVNQVPARRREPPRLSARSSSPYAGNNRLELSSDPFKMHGIFPVKNVLVFKHVASDTH

SEQ ID NO: 44823 - protein, 361 aa, Homo sapiens
  misc_feature (1)...(361): Xaa = X or * as defined in Table 2
APLLGECRSGRGLASSRSRRRTTMTQSVVVQGKLRRAGRDLVAAESSGHVSCLMSYSLSFLSSGRSRLALREHAAVNQVPARRREPPRLSARSSSPYSFHLQSEXLXKKIHXLYFIFLSQAVLIDMEEGVVNEILLXIRTNQIKKXMQGIFKIHILIFRAVGHKVFGSLYQDQILEKFQILHNYILNHLCXFLKTLXSSGTGSGLGTFLLKVLEDEFPEVYRFVTSIYPSGEDDVITSPFLVEYHLHPLFLIASLPMFFPQKSLFDIISKIDLMVNSGKVGGTTVKPKSLVTSSSGALKIELHLKCIILKLKIFSFXCXLFSSARFEGSLNMDLNEISMNLVPFPPSSXEIVSLKYVLYFN

SEQ ID NO: 44824 - protein, 110 aa, Homo sapiens
TCISGWHLFRASVTCPGIQTSPHNWHISDNSSLPNNIFIVCWNLLGMTRNYIIFIEQPLKMNLWKIATSKIRGKAFSDGISGNPQCNTRFHVVEKRTGQLLPGRYYSKPF

SEQ ID NO: 44825 - protein, 174 aa, Homo sapiens
MVIAVSCVKMLSAHNSTQHTSRKPKGGSPGTELEILIMVIAVSCGKMVSGPNSPKHRTRNHKGFSYKVIRVPPEKVDLGETIHGVQVICSIASTEKGKPSYYHSFDQHLEEAITRSRTAETKEVTVLEESRSGHLQWALENPGSRARNSNHGHSCVLVEIGIRFTFPPHTNPEA

SEQ ID NO: 44826 - protein, 464 aa, Homo sapiens
  misc_feature (1)...(464): Xaa = X or * as defined in Table 2
MEDLLTEARSPYWGRARAKIQDSCWSVTSDPNAGSVDILAPLLLPSPSSYLPNFTCTVSVVTSHLHEAFLDLGFRGTGGSNCKTSRQVQLNNQKRKKKKSKSLPFHMSLQIQNYKTQEEPHAKPSSQQHQHSEHESIQTKLVFRSSMTYMHTLKLIREKGSIMLSSTQGECPNSTCRWPAEEHPLGSTHREDQEHVIRVPPEKVDLGETIHGVQVICSIASTEKGKPSYYHSFGMTRNYIIFIEQPLKMNLWKIATSKIRGKAFSDGISWEPQCNTRFHVVEKRTGQTTXINPDKISIQKQHDIHAYIEADKRKRKHNAVIHTGXMYQIGTCRWPAEEHPLGSTHREDQEHVIRVPPEKVDLGETIHGVQVICSIASTEKGKPSYYHSFGMTRNYIIFIEQPLKMNLWKIATSKIRGKAFSDGISWEPQCNTRFHVVEKRTGQILNVKTMRMKTFMMIYYHLMN

SEQ ID NO: 44827 - protein, 551 aa, Homo sapiens
  DOMAIN (140)..(154): C2H2-TYPE ZINC FINGER SIGNATURE domain identified by eMATRIX, accession number PR00048A, p-value=3.250e-14, raw score of 10.52
  misc_feature (1)...(551): Xaa = X or * as defined in Table 2
MAEILTQVPDDMLKKKTPRVKSVWRSQRGSCTPLIGTTELTLDTSHMSIRNMDRSHINVHTVRKPSADLPYFRTHEWAHTGGKPYDCEECGKSFISRSSIRRHRIMHSGDGPYKCNFCGKALMCLSLYLIHKRTHTGEKPYECKQCGKAFSHSGSLRIHERTHTGEKPYECSECGKAFHSSTCLHAHKITHTGEKPYECKQCGKAFVSFNSVRYHERTHTGEKPYECKQCGKAFRSASHLRTHGRTHTGEKPYECKQCGKAFXPRFQMTCXRRKLPEXNQCGEVSVGHHSLNRHHRADTGHKPYEYQEYGQKPYKCTYCKKAFSYLPYFRTHEWAHTGGKPYDCEECGKSFISRSSIRRHRIMHSGDGPYKCNFCGKALMCLSLYLIHKRTHTGEKPYECKQCGKAFSHSGSLRIHERTHTGEKPYECSECGKAFHSSTCLHAHKITHTGEKPYECKQCGKAFVSFNSVRYHERTHTGEKPYECKQCGKAFRSASHLRTHGRTHTGEKPYECKQCGKAFGCASSVKIHERTHTGEKPCSSNTSKGQGEKIA

SEQ ID NO: 44828 - protein, 130 aa, Homo sapiens; identical to SEQ ID NO: 44463
  DOMAIN (45)..(92): Intermediate filaments proteins domain identified by eMATRIX, accession number BL00226D, p-value=9.710e-33, raw score of 19.10

SEQ ID NO: 44829 - protein, 347 aa, Homo sapiens; identical to SEQ ID NO: 44464
  DOMAIN (226)..(257): Intermediate filaments proteins domain identified by eMATRIX, accession number BL00226C, p-value=1.220e-14, raw score of 13.23
  misc_feature (1)...(347): Xaa = X or * as defined in Table 2

SEQ ID NO: 44830 - protein, 399 aa, Homo sapiens
  DOMAIN (182)..(213): Intermediate filaments proteins domain identified by eMATRIX, accession number BL00226C, p-value=5.800e-19, raw score of 13.23
  misc_feature (1)...(399): Xaa = X or * as defined in Table 2
GPGTGIAGGLAGMGGIQNEKETMQSLNDRLASYLDRVRSLETENRRLESKIREHLEKKGPQVRDWSHYFKIIEDLRAQIFANTVDNARIVLQIDNARLAADDFRVKYETELAMRQSVENDIHGLRKVIDDTNITRLQLETEIEALKXELLFMKKTPEEEVKGLQAQIASSGLTVEVDAPKSQDLAKIMADIRAQYDELARKNREELDKYWSQQIEESTTVVTTQSAEVGAAETTLTELRRTVQVFGDSTWTSMRNLKANLENSLGEVEARYALQMEQLNGILLHLESQLGQTPRTEAQRQAQEYEALLNIKVKLEAEICHLTRPPSWKIGEDFNLGDSLDERNSMQTIQKTTTRRISWIGQSGVLRPIDTKVLEALSQQEASGTLLGKQEANKKFQSFK

SEQ ID NO: 44831 - protein, 794 aa, Homo sapiens; identical to SEQ ID NO: 31228

SEQ ID NO: 44832 - protein, 57 aa, Homo sapiens
CLSLPPSPWAPVRPEPLRRAPPPAPRRSVRSTTQGLRSAGARAGLAGSSTCSPGKRK

SEQ ID NO: 44833 - protein, 243 aa, Homo sapiens
MIIKFANIEVIDDMTKVQLVEKKRKYKTTDRGKERIFLILYNGNHPYSTQLSIRTSRMFVQAGVDARTSTTFKGGVEGEARAGTGAVCSTWGPAGVTGGRGLGGPHTRSSWPALLAPGNEGLSTRASGCRGCTGSPSSASPPALRSISHRALAAFLQGRARDLQPTMPEPPTHSMGSCAARASPTTTTRCSTAPSPIDHPRAEECECTAQDWQAALPAVPVQDPLGEASWAPESGGDVESLYV

SEQ ID NO: 44834 - protein, 75 aa, Homo sapiens
  misc_feature (1)...(75): Xaa = X or * as defined in Table 2
AWKRAVALGKSRPMGAVAFKRRMQPVAGPRAMQEKPFPSSSSSLSIPPAFXYRLALSLAEPSRRWRARTGALMQL

SEQ ID NO: 44835 - protein, 70 aa, Homo sapiens; identical to SEQ ID NO: 38928

SEQ ID NO: 44836 - protein, 54 aa, Homo sapiens
WIPQRGCRWSCLPVLHRSLAYLSPWVVDGTGRRGAGGGARRGGSGSTGAHGVGD

SEQ ID NO: 44837 - protein, 342 aa, Homo sapiens
  DOMAIN (313)..(324): RNase H domain identified by eMATRIX, accession number PF00075F, p-value=5.500e-10, raw score of 12.87
MTLGPLTNQRKEHLTNFKSVSTPSSESFECFFSTDSSDLSPSPQAARRQAEPGACFKCWKSGHWAEECLQPRIPPKLHPICVGPHWKSDCPAHLAATPRAAGTLAQGSLTPSQIFLAEWLKTDTARSPQKPPGPSQTLWVTLTVEVAATALILLEALKITSYAPLTLYSSHNFQNLFSSSHLTHILSAPKTLQLYSLFVESSTITIVAGPDFNPASHIIPDTTPDPHDCISLIHLTFIPFPHISFFPVPHPDHTWFIDGSSTRPNRHTPAKAGYAIVSSTFIIEATALPPSTTSQQAKLIALTQALTLAKGLLVNIYTDSKYAFHIQYHHAVIWAERNFLTT

SEQ ID NO: 44838 - protein, 125 aa, Homo sapiens
GQTQEPSWLHLVDPTLGLQVELPASPVPCACTPQPLGGRWDWASWSRGWCSSGRLGPHRSPLSGWEAQAWRAAGPEPCSSSVPSGLFWQPPPSSRVAPYLYIFCGRRSLLPPQTLSSSSPSTMET

SEQ ID NO: 44839 - protein, 144 aa, Homo sapiens
  misc_feature (1)...(144): Xaa = X or * as defined in Table 2
AFVRAGSRFGGTPGARPDPAPATRAPNPVGQSRHLRAASSRGRLFLRRTRDRKFPRRPRLSRRLLGAIGCRWNQPRAAEKSFSAGAVLDFSPGLSCLPAVQGSGPAARHAXASHPLHGLLCCPSIPDEHHPLLHGAQSHRPPKG

SEQ ID NO: 44840 - protein, 176 aa, Homo sapiens
ARHRVLIGVFTIPELDILSTSPPDSGAQLASPSDPAPGLQVELPASPARCARIPQPLGGRWDWAQTQEPSWLHLVEPAPGLQVELPASPTPCACIPQPLGDRWDWAPWSRGWCSLGRLGPHRSPWSGWEAEAWRAAGPEPCPTGRQLRLGEKSSAAPVGWHCWGTQYTLRSHWPGC

SEQ ID NO: 44841 - protein, 87 aa, Homo sapiens
TREPSWLHPVDPTPGLQVELPASPAPCARIPQPLGCLFLPGRWDWAPWSRGWCSSGRLGPHRCPWSGWEAQAWRAAGPEPCPAGRQQ

SEQ ID NO: 44842 - protein, 140 aa, Homo sapiens; identical to SEQ ID NO: 44478

SEQ ID NO: 44843 - protein, 108 aa, Homo sapiens
  misc_feature (1)...(108): Xaa = X or * as defined in Table 2
SCHHYCRIHRRCARFLAGPXLPSRGARLGTCSPPCVSLPPAPWAPVRPEPPRRAPPPAPQRPVPSTTQGLRSAGARRGTGRQLHLQLRGSAASFLKSVRPRTHQFRTH

SEQ ID NO: 44844 - protein, 80 aa, Homo sapiens
GSASGVVRSSRWALGLAGLRCEAADLRGLQVELPASHAPCARTPQPLGGRWDWAPWSRGWCSLGRLGPHRSPWSGWEAQA

SEQ ID NO: 44845 - protein, 560 aa, Homo sapiens; identical to SEQ ID NO: 37156

SEQ ID NO: 44846 - protein, 130 aa, Homo sapiens
  misc_feature (1)...(130): Xaa = X or * as defined in Table 2
LHDLQLSKPLSDDTALTDGGQPLPARWWAQPGRLQRCARFLAGPXLPSRWGRARDLQPAMPEPPTPSVGSCAAQASPTSAAPCSMAPSPIDHPRAWPVLCSFCMLLSLFVASISSCSQHQPMQVGTMVCL

SEQ ID NO: 44847 - protein, 126 aa, Homo sapiens
  misc_feature (1)...(126): Xaa = X or * as defined in Table 2
SLHSKLCWWLQQLWVTDTCPRCSVQDCRQRWASAGNQSXRLLVDPAPGLQVELPANPVPCARIPQPLGGRWDXAPWSRGWCSSGRLGLHRSPWSGWEAQAWRAAGPEPRPAGRQLGAMSCKVETGT

SEQ ID NO: 44848 - protein, 102 aa, Homo sapiens
SACLAGRPIRGEGRPRDLQPAMPEPPTPSMGSCAARASPTSATPCSTAPSPIHHSRAEECGHTALGHGRQLHLQPRNLPQTINWRTTYSSFPATLNRLDGGG

SEQ ID NO: 44849 - protein, 280 aa, Homo sapiens
MLALPGALWLACFDEEHCHTEEAHFKELRVGNNSGAQLASPSGSRTGAAGGAACQSRAVRLHSSALGWSMGLGAVEQGVVLVREAGAAQEPMEWVGGSGMAGCRSRALPRGKAAKVRREIDHSAGGATQAFAKENNQKAYKETYGVSHITRHDMLQIPKQQQNEKYQVPQFDQSTIKNIESAKGLDVWDSWPLQNADGTVAEYNGYHVVFALAGSPKDADDTSIYMFYQKVGDNSIDSWKNAGRVFKDSDNSKFFYPEPLVCVPEFLSKSQLFRRCFCQG

SEQ ID NO: 44850 - protein, 130 aa, Homo sapiens
GRLIAEIQSLVTWTRVEAAEEDPGGSPNVSGIGGFLVSLTSRMKPRTLTTQEPSWLHPVDSALGLQVELPASPAPCARTPQPLGGRWDWAPWSRGWCSSGRLRPHRSPWSGWEAQAWWAAGPEPHPREGS

SEQ ID NO: 44851 - protein, 65 aa, Homo sapiens
ASHPLCGLLCGRASPTSTTPCSMVPSPIDHPRAEECEHTAQDWQAAPHDMALPCISEVLSCHTPL

SEQ ID NO: 44852 - protein, 227 aa, Homo sapiens
MPEPPTHSMGSCAARASPTSTTPCSMAPSPIDHPRAEECEHRVQDWQAAPPAAPLKVCKYTNQHPVFSTRFVNAPIDTLYLAALVRTWRTFMSSSRIVNTPIGTLYLAQGLSAHQEMGLMSSPLNLGWACDWLDQDEAEELLFWDFGAQALECDSFSFPHLRAFGQMPKPTRLGVVLREYWKRLPSCKVAIPLHFRCSVIAAGTTIDEERGDQDKRKQSLIQGKILV

SEQ ID NO: 44853 - protein, 112 aa, Homo sapiens; identical to SEQ ID NO: 36567

SEQ ID NO: 44854 - protein, 162 aa, Homo sapiens
QLAGRCGGRGASGNRGCVRRLRASWSSGWAWAWRPHTRSSRPARALAAFPPGRARDLQPAMPEPPTRFTGSCAARASPMSAAPCSTAPSPIDHPRAISAVKTDHSALPISRMWVGPDKRIKAGCGASSGNPLGSPSTVWKLCSFILCNKSCCCSLFGSTLLL

SEQ ID NO: 44855 - protein, 129 aa, Homo sapiens
  DOMAIN (22)..(34): RNase H domain identified by eMATRIX, accession number PF00075C, p-value=1.000e-08, raw score of 11.58
  misc_feature (1)...(129): Xaa = X or * as defined in Table 2
RLTLPDRLGSPPDTHQAQQITWALLPQGFADSPHYFSQAQISSSSITYLGIILHENTRALPADHVXLISQTPISSTKQQLLSFLGMVRYFCLWIPSFTILTKPLYXFTKANLADPTDPKSFPHSSFRSL

SEQ ID NO: 44856 - protein, 398 aa, Homo sapiens; identical to SEQ ID NO: 36568

SEQ ID NO: 44857 - protein, 137 aa, Homo sapiens
  misc_feature (1)...(137): Xaa = X or * as defined in Table 2
QTQEPSWLHLVDPALGLQVELPASPVPCARIPQPLGGXWDWAPWSRGWCSSGRLGPHRSPWSGWEAQAWRAAGPEPCPAGRQLRPGQHPLRHMNKSQALSLLIAQPLGINLLSWWPPKYNRPVPLIGLSGLLIPATF

SEQ ID NO: 44858 - protein, 89 aa, Homo sapiens
LIKATWTQKTQEPSWLHLVDPAPGLQVERPASPTPCARTPQPLGGQWDWAPCSRGRCSLGRLGPHRSPWSGWEAQAWRAAGPEPCPAGR

SEQ ID NO: 44859 - protein, 139 aa, Homo sapiens
  misc_feature (1)...(139): Xaa = X or * as defined in Table 2
RAPPPAPWRPVPSTTQGLRSAGEQRGTGRQLHLSAAPVRDPRGEAIWAPESGRSAASILKPARPPAHREERTTPDAPPXELXHSPRRSAASLREDPWLHSXSQXDQEPTNSGHTVSQDQSYYSXLEVSETKNPPIPDTL

SEQ ID NO: 44860 - protein, 430 aa, Homo sapiens
FLAGPYLPSHGAGLGTCSLPCLSLPPTPWAPVRPEPPPMSTTPCSTAPSPIDHPRAEECERTAQDWQAAPPAAPVWDPLGEASWAPESGTNISITPGNATFVTRVQGQAWFASCITGHDMSSLKTSSVVVLRRQSEALLPANLTCNWQDSSALATLESALSQVRHKRFTFTLMVFTGSAIDIMATVSIAVVSITESVQTTAFVDNLAKNICDELLLQDMDEAGNQHSQQNNTRTENQTPHVLTHKWELNNENIRIQGGEHYILGPVGGRDEKTLLLRTYCLKSQEGADTKCRNKHNKETQKQSKSLVYSSTLNPEKLLVCKRLSLELTRPENTLRCTNIGKLKAVAGGMSAASGIYLETDTQPYPLKQELKEIKECVGKNSVVVVFLVRKKLSVSQYAFARCLDAKHSTSENVEIAGKLRIQSFEVGKQL

SEQ ID NO: 44861 - protein, 743 aa, Homo sapiens
  DOMAIN (401)..(412): RNase H domain identified by eMATRIX, accession number PF00075B, p-value=1.346e-09, raw score of 12.56
  misc_feature (1)...(743): Xaa = X or * as defined in Table 2
NWLPSVSRCQETHKIAANQSLTQRQMPLTSLYCDVVILPVSVGLESLQSPYYRTSPCDPVSQFCLIKISASSLPVLSLWKTLKNAQSYQRDYRHDNKAHYFQKLVTMQENLYVLLCDEELDAVSLEAVHQQKMKNRQAHSSSGCCQKVANAPRNEESSGQFRVIGNEKFEKGPCGVRQQIFEKVLLPNRTCEFVTPRFNRNFEDLIKDLKAAETLIDFLVYEPKNQRRLVNRFRLPCKLLHNLGHPLKTDAAQSPRKPPGPSWMPSFGSKPPSHPPLVSPHLNPQVWDTSSPSLATEHASLTISLKPNHPYPAQSQYSIPQHALKGSKPVITRLLEHGLLKPINSPYNSPILPVQKLDKSYRLVQHLCLIYQIVLPIHPMVPNPYTLLSSIPFTTHYSVLDLKHAFFTIPLYPSSQPLFAFTWTDPDTHQAQQITLAVLPQCFIDSPHYFSQAQISSSSVTYLGIILMKTHIGLGAVEQGVVLVGEARAAQEPMEWVGGSGMCGLQVPSPAPWEGSXGPARNRAQPVTIVPVLDFNPAFHIIPDTTPDHHDCISLIHLTFTPFPHISFFPVPHLEHTWFIDGSSTRPNCHSPAKAGYAIVSSTSIIEATALPRSTTSQQAKLIAYTDSKCAFHILHHHAVIWEERNFLTMQGASIINAFLIKTLLKDILLPKEAGVIHCKGHQKASDPITQDNAYADKVAKKQLAFQLLSLTAVFLLLIRPLSPTSPLKLPLINLFPHKANDS

SEQ ID NO: 44862 - protein, 213 aa, Homo sapiens
  DOMAIN (59)..(80): ANDROGEN RECEPTOR SIGNATURE domain identified by eMATRIX, accession number PR00521E, p-value=6.383e-09, raw score of 8.53
  misc_feature (1)...(213): Xaa = X or * as defined in Table 2
SGTVPPTFVRTVIQAQGARTVIQQSLIGSLYIFRHCVRCQGIESVFVIIIWSRVGYDEKGFCLFTSVLGVWGHVRTKPCLLITWRTLKSRSGLEXPAGFSSSPGTSPQIIRKQKRGVPQHPVCDLPGRFRPRAGTPLAAQIQVPGLPPCGHQEXNRRWAGSSALCPPYLCARAGTGAVCRACEPAGVAGWAWAWWAPHSEHAASPAGPRQWGT

SEQ ID NO: 44863 - protein, 53 aa, Homo sapiens
  misc_feature (1)...(53): Xaa = X or * as defined in Table 2
MAGCRSRALPHGKAAKARREIERSAGGLALLGDPVYPLQLLARVLSPSLPGAX

SEQ ID NO: 44864 - protein, 197 aa, Homo sapiens
MKPGTLAVSVTALNVAHLEFVPSDVRMCSEFLPSGVKLQTFTVSVTALKAALLELLVPPGGLVVSLASGVKLQTFAVSVTAHKSSVDPKNSGAQLASPSESRTRAAGGAACQSRAVRPHSSALGWSMGLGAVEQGVVLIGEARASGSRTRAAGGAACQSHAVRSHSSALGWSMGLGAMEQGVVLVGEARATQEPLEW

SEQ ID NO: 44865 - protein, 200 aa, Homo sapiens
  DOMAIN (121)..(132): RNase H domain identified by eMATRIX, accession number PF00075B, p-value=1.346e-09, raw score of 12.56
MPDNFSLKGGHDVLGERGCGKYTLSDIVVMCEEKEVFYNFHALKGLKPVITRLLQHGLLKPINSPYNSPILPVLEPDKPYRLVQDLRLINQIVLPIHPVVPNPYTLLSSIPPSTTHYSVLDLKHAFFTIPLHPSSQPVFAFTWTDPDTHQAQQITWAVLPQVFTDSPHYFSQAQISSSSVTYLSVILIKTHVLSLLIVSD

SEQ ID NO: 44866 - protein, 454 aa, Homo sapiens
  DOMAIN (188)..(203): WW/rsp5/WWP domain proteins domain identified by eMATRIX, accession number BL01159, p-value=3.382e-13, raw score of 13.85
MDPGQQPPPQPAPQGQGQPPSQPPQGQGPPSGPGQPAPAATQAAPQAPPAGHQIVHVRGDSETDLEALFNAVMNPKTANVPQTVPMRLRKLPDSFFKPPEPKSHSRQASTDAGTAGALTPQHVRAHSSPASLQLGAVSPGTLTPTGVVSGPAATPTAQHLRQSSFEIPDDVPLPAGWEMAKTSSGQRYFLNHIDQTTTWQDPRKAMLSQMNVTAPTSPPVQQNMMNSASAMNQRISQSAPVKQPPPLAPQSPQGGVMGGSNSNQQQQMRLQQLQMEKERLRLKQQELLRQVRPQELALRSQLPTLEQDGGTQNPVSSPGMSQELRTMTTNSSDPFLNSGTYHSRDESTDSGLSMSSYSVPRTPDDFLNSVDEMDTGDTINQSTLPSQQNRFPDYLEAIPGTNVDLGTLEGDGMNIEGEELMPSLQEALSSDILNDMESVLAATKLDKESFLTWL

SEQ ID NO: 44867 - protein, 194 aa, Homo sapiens
  DOMAIN (111)..(126): WW DOMAIN SIGNATURE domain identified by eMATRIX, accession number PR00403B, p-value=6.327e-11, raw score of 12.19
  misc_feature (1)...(194): Xaa = X or * as defined in Table 2
MANVHQTMPMRLRKLPDSFKPPEPKSNSQRVSTEAGTAGALTPQHVRAHSSPASLQLGAVSPGTLTPTGVVSGPAATPTAQHFQQSSFEIPDDVPLPAAREMAKTSSGQRYFLNHIDQKTTQQDPRKTMLSQMNVIANPPVQQNMMNSPQSPQGGVMGGSNSNQQRQMRPQQLQMEERLQLKQQXLLQQELALR

SEQ ID NO: 44868 - protein, 236 aa, Homo sapiens
  DOMAIN (2)..(22): DNAJ PROTEIN FAMILY SIGNATURE domain identified by eMATRIX, accession number PR00625C, p-value=8.554e-09, raw score of 16.54
  misc_feature (1)...(236): Xaa = X or * as defined in Table 2
RWRLQNLSFCSSCSGSGSEGATCFARGRQQSNLQSKIKFPSNTDSRSTGYNSFDRQPNICFYKRQETPHTGPHPVPEGRPYPMPGXCGAXSPGPFASRNXSEKNXSYKCSLHTAFNVIFSSVIXXRYCTRQWHIVKCLDSFCDPFLISDELRRASTDAGTAGALTPQHVRAHSSPASLQLGAVSPGTLTPTGVVSGPAATPTAQHLRQSSFEIPDDVPLPTSWGEAKTSSGSKIPF

SEQ ID NO: 44869 - protein, 192 aa, Homo sapiens
  DOMAIN (42)..(57): WW DOMAIN SIGNATURE domain identified by eMATRIX, accession number PR00403B, p-value=2.703e-14, raw score of 12.19
MLSQMNVTAPTSPPVQQNMMNSASGPLPDGWEQAMTQDGEIYYINHKNKTTSWLDPRLDPRFAMNQRISQSAPVKQPPPLAPQSPQGGGGGGSNSNQQQQMRLQQLQMEKERLRLVWADFFGQAMRNINPSTANSPKCQHELTSFLQLALCFEKLTKMPRVCLISTSHLVYSALEKLAVVGIRPAVPDELPG

SEQ ID NO: 44870 - protein, 713 aa, Homo sapiens; identical to SEQ ID NO: 34589
  DOMAIN (57)..(100): kw TRANSCRIPTASE REVERSE II ORF2 domain identified by eMATRIX, accession number DM01354T, p-value=1.000e-40, raw score of 9.48

SEQ ID NO: 44871 - protein, 549 aa, Homo sapiens
  DOMAIN (143)..(188): kw TRANSCRIPTASE REVERSE II ORF2 domain identified by eMATRIX, accession number DM01354N, p-value=1.000e-40, raw score of 13.17
MGDFNTPLSTLDRSTRQKVNKDTQELNSALHQADLIDIYRTLHPKSTEYTFFSAPHHTYSKIDHTVGSKALLSKCERTEIITNYLSDHSAIKLELRIKKLTQNCSTTWKLNNLLLNDYWVHNEMKAEIKMFFETKIQTTIREYYKHLYANKLENLEEMDKFLDTYTLPRLNQEEVESLNRLITGSEIVAIINSLPTKKSPGPDGFTAEFYQRYKEELVPFLLKLFQSIEKEGILPNSSYEASIILIPKPGRDTTKKENFRPMSLMNIDAKILNKILANQIQQHIEKLVHHDQVGFIPGMQGWFNIRKSINIIQHINRTKDNNHMIISIDAEKAFDKIQQRCMLKTLNKLGIDGTYLKIIRAIYDKPTANIILNGQKLEALPLKTGTRQGCPLSPLLFNIVLEVLARAIRQEKEIKGIQLGKEEVKLSLFADDMIVYLENPIVSAQNLLKLISNFSKVSGYKINVQKSQAFLYTNNRQTESHIMSELPFTIASKRIKYLGIQLTRDVKDLFKENYKPLLKEIKEDTNKWKNIPCSWVGRINIVTMAILPK

SEQ ID NO: 44872 - protein, 674 aa, Homo sapiens; identical to SEQ ID NO: 35784
  DOMAIN (109)..(154): kw TRANSCRIPTASE REVERSE II ORF2 domain identified by eMATRIX, accession number DM01354N, p-value=1.000e-40, raw score of 13.17

SEQ ID NO: 44873 - protein, 705 aa, Homo sapiens
  DOMAIN (127)..(170): kw TRANSCRIPTASE REVERSE II ORF2 domain identified by eMATRIX, accession number DM01354T, p-value=1.000e-40, raw score of 9.48
MPPLVIPWQTGSGVDLLQTPPDLQKRVLTVRRKTNNQKAIASTSTKRTPTQKPHPKVTNIKDQRTNDKNQMIISIDAEKPFNKIQLPFMLKTLNKLGIDGTYFKIIRAIYDKPTANIILNGQKLEAFPLKTGTRQGCPLSPLLFNIVLEVLARAIRQEKEIKGIQLGKEEVKLSLFADDMTVYLENPIVSAQNLLKLISNFSKVSGYKINVKKSQAFLYTSNRQTESQIMSELPFTIASKRIKYLGIQLTRDVKDLFKENYKPLLKEIKEDTNKWKNIPCSWVGRINIVKMAILPKVIYRFNAIPIKLPMTFFTELEKTTLKFIWNQKRACIAKSTLSQKNKAGGITLPDFKLYYKATVTKTAWYWYQNRDIDQWNRTEPSEITPHTYNYLIFDKPEKNKQWGKDSLFNKWCWENWLAICRKLKLDPFLTPYTKINSRWIKDLNVRPKTIKTLEENLGITIQDIGMGKDFMSKTPKAMATKDKIDKWDLIKLKSFCTAKETTIRANRQPTTWEKIFATYSSDKGLISRIYNELKQIYKKKTNNPIKKWAKDMNRHFSKEDIYAAKKHMKKCSSSLAIREMQIKTTMRYHLTPVRMAIIKKSGNNRASLLSGESSVVHHCIWTSASSKWEQNSVGPKPFLYLCDCTTLVTSSGQQSEILSQKKEEEEKKKKKKKKKKKKEEEEEEEEEEEEEEERRGGGKERGYVN

SEQ ID NO: 44874 - protein, 625 aa, Homo sapiens; identical to SEQ ID NO: 38996
  DOMAIN (192)..(238): kw TRANSCRIPTASE REVERSE II ORF2 domain identified by eMATRIX, accession number DM01354O, p-value=1.000e-40, raw score of 8.73

SEQ ID NO: 44875 - protein, 710 aa, Homo sapiens
  DOMAIN (286)..(332): kw TRANSCRIPTASE REVERSE II ORF2 domain identified by eMATRIX, accession number DM01354O, p-value=1.000e-40, raw score of 8.73
MAKKLKTVKKNQDEWITRTTNAEKSLKDLMELKTKARELRDECRSLSSRCDQLEERVSVMEDEMNERKREEKFREKRTKRNEQSLQEIWDYVKRPNLCLIGVPENDGENGTKLENTVQDIIQENFPNLARQADIQIQEIQRTPQRYSSRRATPKHIIVRFTKVEMKEKMLRAAREKGRVTHKGKPIRLTADLSAETLQARREWGQIFNILKEKNFQPRISYPAKLSFISEGEIKPFTDKQMLRDFVTTRPALKELLKEVLNMERNNRKKLNRPITGSEIVAIINSLPTKKSPGPDGFTAEFYQRYKEELVPFLLKLFQSKEKEGIHPNSFDEASIILIPKAGRDTTTKDNFRPISLMNIDAKILNKILANQIQQHIKKLIHHDQVGFIPGMQGWFNICQSINVIQHINRTKDKNHVIISIDAEKAFDKIQQRFMLKTLNKLGIDRMYLKIIRAIYDKPTANIILNGQKLEAFPLKMGTRQGCPLSPLLFNIVLEVLARAIRQEKEIKHIQLGKKEVILSLFADDMIVYLENSIVSAQNLLKLISNFSKVSGYKINVQKSHAFLHTNNRQTESQIMSELPFTIASKRIKYLGIQLTKDVKDLFKENYKPLLNEIKEDTKKWKHIPCSWVGRINIVKMAILPKVIYRFNAIPIKLPMTFFTELEKTTLKFIWNQKRAHTAKSILSQKNKAGGITLPDFQLYCKATVTKTAWY

SEQ ID NO: 44876 - protein, 1006 aa, Homo sapiens; identical to SEQ ID NO: 36631
  DOMAIN (173)..(219): kw TRANSCRIPTASE REVERSE II ORF2 domain identified by eMATRIX, accession number DM01354O, p-value=1.000e-40, raw score of 8.73

SEQ ID NO: 44877 - protein, 1056 aa, Homo sapiens; identical to SEQ ID NO: 38235
  DOMAIN (554)..(599): kw TRANSCRIPTASE REVERSE II ORF2 domain identified by eMATRIX, accession number DM01354N, p-value=1.000e-40, raw score of 13.17

SEQ ID NO: 44878 - protein, 900 aa, Homo sapiens
  DOMAIN (415)..(440): 7 kw REVERSE TRANSCRIPTASE RNA POLYMERASE domain identified by eMATRIX, accession number DM00895E, p-value=3.333e-11, raw score of 15.72
MEKKQSRKTGNSKNQSASPPPKECSSLQATEHSWMENDFDELREQGFRRSNYSELKEEVRTHGKEVKNLEKRLDEWLTRITNAEKSLKDLMELKTMARELLDECINLSSQFDQLEERVSVMENQMNEMKPNLRLIGVPESDGENGTKLENTLQDIIQENFPNLARQANIQIQEIQRMSQRYSSRRAIPRHIIVRFTKVEMKEKMLRAAREKGRVTLKGKPIRLKADLSVETLQARREWGPIFNILKEKNFQPRTSYPGKLSFISEGEMKSFTDKQKLRYFVTTRPALKELLKEALNMERNNRYQPLEKQIQTTIREYYKHLYANELENLEEMDKFFDTYTLPRLNQEEVESLNRPITGFEIEAIINSLPTKKSPEPGGFTAEFYQRIEKEGILPNSFYEASIILMLKPGRDTTKKENFRPISLMNIDAKILNKILANRIQQHIKKLIHQDQVGFIPGMQGWFNIRKSINIIQHINRTNDKNHKIISIDAEKAFYKIQQPFMLKTLNKLGIDGSYLKIIRAIYDKPTANIILNGQKLEAFPLKTGTRQGCPLSPLLFNLVLEVLARAIRQEKEIKGIQLGKEEVKLSLFADDMIVYLENPIASAQNLLKLKGNFSKVSGYKINVQKSQAFLYTKNRQTESQIMSELPFTIASKRIKYLGIQLTRDMKDLFKENYKPLLNEIKEDTNKWKNIPCSWEGRISILQMAILPEVIYRFNAIPIKLPMTFFTELEKTTLKFIWNQKRARITKSILSQKNKAGGITLPDFKQYYKATVTKTAWYWYQNRHIDQGNGTEPSEIVPHIYNHLIFDKPEKNKKWGKDSLFNKWCWENWLAICRKLKLDPLLKPYTKINSRWIKDLNVRPKTIKTLEENLGNTIQDIGIGKDFMSKTPKAMATKAKIDKWI

SEQ ID NO: 44879 - protein, 770 aa, Homo sapiens; identical to SEQ ID NO: 38218
  DOMAIN (10)..(65): kw TRANSCRIPTASE REVERSE II ORF2 domain identified by eMATRIX, accession number DM01354Q, p-value=1.000e-40, raw score of 9.23

SEQ ID NO: 44880 - protein, 435 aa, Homo sapiens
  DOMAIN (10)..(65): kw TRANSCRIPTASE REVERSE II ORF2 domain identified by eMATRIX, accession number DM01354Q, p-value=1.000e-40, raw score of 9.23
MNIDAKILNKILANRIQQHIKKLIHHDQVGFIPGMQGWFNIRKSINVIQHINRAKDKNHMIISIDAEKAFDKIQQPFMLKTLNKLGIDGTYFKIIRAIYDKPTANIILNGQKLEAFPLKTGTRQGCPLSPLLFNIVLEVLARAIRQEKEIKGIQLGKEEVKLSLFADDMIVYLENPIVSAQNLLKLISNFSKVSGYKINVQKSQAFLYTNNRQTESQIMSELPFFNAIPIKLPMTFFTELEKTTLKFIWNQKRARIAKSILSQKNKAGGITLPDFKLYYKATVTKTAWYWYLNRDIDQWNRREPSEIIPHIYTHVIFDKPDKNKKWGKDSLFNKWCWENWLAICRKLKLDCFLAPYTKINSRLIKDLHVRPKTIKTLEENLGNTIQDIGMGKDFISKTPKAMATKAKIDKWGLIKLKNFCTAKETTIRVNRQPTE

SEQ ID NO: 44881 - protein, 816 aa, Homo sapiens
  DOMAIN (37)..(83): kw TRANSCRIPTASE REVERSE II ORF2 domain identified by eMATRIX, accession number DM01354O, p-value=1.000e-40, raw score of 8.73
MDTFLDTYTLPRLNQEEVESLNRPITGSEIVAIINSLPTKKSPGPDGFTAEFYQRYKEELVPFLLKLFQSIEKEGILPNSFYEASIILIPKPGRDTTKKENFRPISLMNIDAKILNKILANRIQQHIKKLIHHDQVGFIPGMQGWFNIRKSINVIQHINRAKDKNHMIISIDAEKAFDKIQQPFMLKTLNKLGIDGTYFKIIRAIYDKPTANIILNGQKLEAFPLKTGTRQGCPLSPLLFNIVLEVLARAIRQEKEIKGIQLGKEEVKLSLFADDMIVYLENPIVSAQNLLKLISNFSKVSGYKINVQKSQAFLYTNNRQTESQIMGELPFTIASKRIKYLGIQLTRDVKDLFKENYKPLLKEIKEETNKWKNIPCSWVGRINIVKMAILPKLIGNCSKISGYKINVQKSQAFLYTNNRQTESQIMSELAFTIASKKIKYLGIQLTRDVKDLFKENYKPLLKEIKEETNKWKNIPCSWVGRINIVKMAILPKLIGNCSKISGYKINVQKSQAFLYTNNRQTESQIMSELAFTIASKKIKYLGIQLTRDVKDLFKENYKPLLNEIKEDTNKWKNIPCSWVGRINIVKMAILPKSRVCDLRYLHWIYGSVSYGKGNAWITRKRSTTQKWTGAALQPLSRTSLKDTGEGESSQWAELRAVYLLVHFAWKEKWPHVWLYTDSWAVSSGSAGWSGTWKKHDWKIGDKEIWRRASYLVADYIGPLPSWKGQRFVLTGIDTYSGYGFAYPACNASAKTTIRGFMECLIHHHGIPHSIASDQGTHFMAKEVQQWAHSHGIHRSYHVLHHPEAAGLIERWNGLLK

SEQ ID NO: 44882 - protein, 258 aa, Homo sapiens
  DOMAIN (122)..(162): kw TRANSCRIPTASE REVERSE II ORF2 domain identified by eMATRIX, accession number DM01354Y, p-value=4.706e-32, raw score of 10.69
MGKDFYNEIAKSNCDKSQKPPRPGGSSLRTGHDDNGGFVESKEGKGGEKIEKSDGCRVCVERMVTQASCFDVDRGYTGHEYHEKNWKKTALNFIWNQKRAHIAKTILSKKNKAGGIMLPDVKLYYKVTATKTAWYWYQNRYLDQWNRTETTEKMLHIYNQLIFDKPDKNKQWGKDSLFNKWCWENWLAICSKLTLDPFLTPHTKINSRWIKDLNVRPKTIKTLEENLGNTIQDIGMGKDFMTKTPKAMATKAKIDNGI

SEQ ID NO: 44883 - protein, 989 aa, Homo sapiens
  DOMAIN (132)..(173): kw TRANSCRIPTASE REVERSE II ORF2 domain identified by eMATRIX, accession number DM01354I, p-value=1.000e-40, raw score of 15.55
APRFIKQVLSDLQRDLDSHTIIMGDFNTPLSTLDRSTRQKVHKDTQELNSALHQADLIDIYRTLHPKSTEYTCFSAPHHTYSKIDHIVGSKALLSKCKRSEIITNCLSDHSAIKLELRIKKLTQNRSTTWKLNNLLLNDYWVHNEMKAEIRMFFETNENKDTTYQNLWDTFKAVCRGKFIALNAHKRKQERSKIDTLTSQLKELEKQEQTHSKASRRQEITKIRAELKEIETQKTLQKINESRSWFFERINKIDRPLARLIKKKREKNQIDTIKNDKGDITTDPTEIQTTIREYYKHLYANKLENLEEMDKFLDTYTLPRLNQEEVESLNRPITGAEIVAIINSLPTKKNPGPDGLTAEFYQRYKEELVPFLLKLFQSIEKEGILPNSFYEASIILIPKPGRDTTKKENFRPISLTNIDAKILNKILANRIQQHIKKLIHHDQVGFIPGMESWFNIRKSINVIQHINRAKDKNHMIISIDAEKAFDKIQQPFMLKTLNKLGIDGTYFKIIRAIYDKPTANIILNGQKLEAFPLKTGTRQGCPLSLLLFNIVLEVLARAIRQEKEIKGIQLGEEVTLSLFADDMIVYLENPIVSAQNLLKLISTFSKVSGYKINVQKSQAFLYTNNRQTESQIMSELPFTIASKRIKYLGILLTRDVKDLFKENYKPLLKEIKEDTNKWKNIPCSWVGRINIVKMAILPKVIYRFNAISIKLPMTLFTELEKTTLKFIWKQKRARIAKSILSQKKCAGGITLPDFKLYCKATVTKTAWYWYQNRDIDQWNRTDPSEITPHTYNYLIFDKPEKNKQWGKDSLFNKWCWENWLAICRKLKLDPFLTPYTKINSRWIKDLNIRPKTIKTLEENLGITIQDIGMGKDFMSKTPKAMATKAKIDKWDLIKLKSFCTAKETTIRVNRQPTTWEKIFATYSSDKGLISRIYNELKQIYKKKTNNPIKKWAKDMNRHFSKEDIYAAKKHMKKMVMYRWVFGVDVLSVC

SEQ ID NO: 44884 - protein, 1270 aa, Homo sapiens
  DOMAIN (154)..(195): kw TRANSCRIPTASE REVERSE II ORF2 domain identified by eMATRIX, accession number DM01354I, p-value=1.000e-40, raw score of 15.55
MVKGSIQQEELTILNIYAPNTGAPRFIKQVLSDLQRDLDSHTLIMGDFNTPLSTLDRSTRQKVNKDTQELNSALHQADLIDIYRTLHPKSTEYTFFSAPHHTYSKIDHIVGSKALLSKCKRTEIITNYLSDHSAIKLELRIKNLTQSRSTTWKLNNLLLNDYWVHNEMKAEIKMFFETNENKDTTYQNLWDAFKAVCRGKFIALNAHKRKQERSKIDTLTSQLKELEKQEQTHSKASRRQEITKIRAELKEIETQKTLQKINESRSWFFERINKIDRPLARLIKKNREKNQIDTIKNDKGDITTDPTEIQTTIREYYKHLYANKLENLEEMDTFLDTYTLPRLNQEEVESLNRPITGSEIVAIINSLPTKKSPGPDGFTAEFYQRYKEELVPFLLKLFQSIEKEGILPNSFYEASIILIPKPGRDTTKKENFRPLSLMNIDAKILNKILANRIQQHIKKLIHHDQVGFIPGMQGWFNIRKSINVIQHINRAKDKNHMIISIDAEKAFDKIQQPFMLKTLNKLGIDGTYFKIIRAIYDKPTANIILNGQKLEAFPLKTGTRQGCPLSPLLFNIVLEVLARAIRQEKEIKGIQLGKEEVKLSLFADDMIVYLENPIVSAQNLLKLISNFSKVSGYKINVQKSQAFLYTNNRQTESQIMSELPFTIASKRIKYLGIQLTRDVKDLFKENYKPLLKEIKEETNKWKNIPCSWVGRINIVKMAILPKVIYRFNAIPIKLPMTFFTELEKTTLKFIWNQKRARITKSILSQKNKAGGITLPDFKLYYKATVTKTAWYWYQNRDIDQWNRTEPSEIMPHIYNYLIFDKPEKNKQWGKDSLFNKWCWENWLAICRKLKLDPFLTPYTKINSRWIKDLNVKPKTIKTLEENLGITIQDIGVGKDFMSKTPKAMATKDKIDKWDLIKLKSFCTAKETTIRVNRQPTTWEKIFATYSSDKGLISRIYNELKQIYKKKTNNPIKNWAKDMNRHFSKEDIYAAKKHMKKCSSSLAIREMQIKTTMRYHLTPEIQYATSPQHQGIVGLTRCFLDEWRSCTRANSSLVSDIVIRYADNRGDTSQPFKADKQLQQSLRIQNQCTQITSILIHQQQTESQIMSELPFTIASKRIKYLGIQLTRDVKDLFKENYKPLLKEIKEDTNKWKNIPCSWVGRINMVKMATLPKVIYRFNAIPIKLPMTFFTELEKTTLKFIWNQKRALIAKSILSQKNKAGGITLPDFKLYYKATVTKTAWYWYQNRDIDQCNRTEPSENFLTRNSKGSSSG

SEQ ID NO: 44885 - protein, 591 aa, Homo sapiens
  DOMAIN (10)..(65): kw TRANSCRIPTASE REVERSE II ORF2 domain identified by eMATRIX, accession number DM01354Q, p-value=1.000e-40, raw score of 9.23
MNIGAKIINKILANQIQQHIRKLIHHDQVGFIPGMQGWFNICKSINVIQHINRTKDKNHMIISIDAEKACDKIQQRFMLKTLNKLGIDGKYLKIIRAIYDKPTANIILNGQKLEAFPLKTGTRQGCPLSPLLFNIVLEVLARAIRQEKEIKDIQLGKEEVKLSLCADKMIVYLENPIVSAQNLLKLISNFSKVSGYKINVQKSQAFLYTNNRQTESQIMSELPFTIASKRIKYLQIHQTRDVKDLFKENYKPLLKEIKEDTNKNIPCSCVGRINIVKMAILPKELEKTTLKFIWNQKRARITKSILSQKNKAGSIMLPDFNLYYKATVSKTAWYWYQNRDIDQWNRTEPSEITPHIYNYLIFDKPEKNKQWGKDSLFNKWCWENWLAICRKLKLDPLLTLYTKINSRWIKDLNVSPKTIKTLEENLDITIQDIGMGKDFMSKTAKAMAAKAMSTKAKFGKWDLIKLKSFCTAKETTIRVNRISSYASSSTSLQAFSRKILNCSKRFFKIAQMCKLVELRPQDMHTSRGSGNCSEARTLLCDFSAGRTSVNHGRIWRQIREAGAADPEIGLEVCNKNPTSFTLFYFLSYTTG

SEQ ID NO: 44886 - protein, 689 aa, Homo sapiens; identical to SEQ ID NO: 35789
  DOMAIN (156)..(201): kw TRANSCRIPTASE REVERSE II ORF2 domain identified by eMATRIX, accession number DM01354N, p-value=1.000e-40, raw score of 13.17

SEQ ID NO: 44887 - protein, 1064 aa, Homo sapiens
  DOMAIN (110)..(151): kw TRANSCRIPTASE REVERSE II ORF2 domain identified by eMATRIX, accession number DM01354I, p-value=1.000e-40, raw score of 15.55
  misc_feature (1)...(1064): Xaa = X or * as defined in Table 2
MGDFNTPLSTLDRSTRQKVNKDTQELNSALHQADLIDIYRTLHPKSTEYTFFSAPHHTYSKIDHIVGSKALLSKCKRTEIITNYLSDHSAIKLELRIKNLTQSRSTTWKLNNLLLNDYWVHNEMKAEIKMFFETNENKDTTYQNLWDAFKAVCRGKFIALNAYKRKQERSKIDTLTSQLKELEKQEQTHSKASRRQEITKIRAELKEIETQKTLQKINESRSWFFERINKIDRPLARLIKKKREKNQIDTIKNDKGDITTDPTEIQTTIREYYKHLYANKLENLEEMDTFLDTYTLPRLNQEEVESLNRPITGSEIGAIINSLPTKKSPGPDGFTAEFYQRYKEELVPFLLKLFQSIEKEGILPNSFYEASIILIPKPGRDTTKKENFRPISLMNIDAKILNKILANQIQQHIKKLIHHDQVGFIPGMQGWFNIRKSINVIQHINRAKDKNHMIISIDAEKAFDKIQQPFMLKTLNKLGIDGTYFKIIRAIYDKPTANIILNGQKLEAFPLKTGTRQGCPLSPLLFNIVLEVLARAIRQEKEIKGIQLGKEEVKLSLFADDMIVYLENPIVSAQNLLKLISNFSKVSGYKINVQKSQAFLYTNNRQTESQIMGELPFTIASKRIKYLGIQLTRDVKDLFKENYKPLLKEIKEDTNKWKNIPCSWVGRINIVKMAILPKVIYRFNAIPIKLPMTFFTELEKTTLKFIWNQKRARIAKSILSQKNKAGGITLPDFKLYYKATVTKTAWYWYQNRDIDQWNRTEPSEIMPHIYNYLIFDKPEKNKQWGKDSLFNKWCWENWLAICRKLKLDPFLTPYTKINSKWIKDLNVRPKTIKTLEENLGITIQDIGVGKDFMSKTPKAMATKAKIDKWDLIKLKSFCTAKETTIRVNRQPTTWEKIFATYSSDKGLISRIYNELKQIYKKKTNNPIKKWAKDMNRHFSKEDIYAAKKHMKKCSSSLAIREMQIKTTMRYHLTPTACLETAEEQQLNNMECAGTEAINSLISIALLPKGGMSRILIETQGDRTLKWHKERAVCGAHMQARAGQTTHSAGGFLLPPGIHLQSLPX

SEQ ID NO: 44888 - protein, 1123 aa, Homo sapiens; identical to SEQ ID NO: 42873
  DOMAIN (366)..(411): kw TRANSCRIPTASE REVERSE II ORF2 domain identified by eMATRIX, accession number DM01354N, p-value=1.000e-40, raw score of 13.17

SEQ ID NO: 44889 - protein, 821 aa, Homo sapiens; identical to SEQ ID NO: 38234
  DOMAIN (110)..(155): kw TRANSCRIPTASE REVERSE II ORF2 domain identified by eMATRIX, accession number DM01354N, p-value=1.000e-40, raw score of 13.17
  misc_feature (1)...(821): Xaa = X or * as defined in Table 2

SEQ ID NO: 44890 - protein, 914 aa, Homo sapiens
  DOMAIN (147)..(193): kw TRANSCRIPTASE REVERSE II ORF2 domain identified by eMATRIX, accession number DM01354O, p-value=1.000e-40, raw score of 8.73
MGDFNTPLSTLDTSTRQKVNKDTQELNSALHQADIIDIYRTLHPKSTECTFFSAPHHTYSKIDHILGSKALLNKCKRTEIITNYLSDHSAIKLELRIKNLTQNRSTTWKLNNLLLNDYWVHNKTKAEIKMFFETNENKDTTYQNLWDASKASPGPDGFTAEFYQRYKEELVPFLLKLFQSIEKEGILPNSFYEASIILIPKPDRDTTKKENFRPISLMNIDTKILNKILANRIQQHIKKLIHHDQVGFIPGMQGWFNIRKSIKVIQHINRTKDKKHMIISIDAEKAFDKIQQPFILKTLNKLGIDGTYFKIIRAIYDKPTANIILNGQKLEAFPLKTGTRQGCPLSPLLFNTVLEVLARAIGQEKEIKGIQLGKEEVKLSLFADDMIVYLENPIVSAQNLLKLISNFSKVSGYKINVQKSQAFLYTNNRQTESQIMSELPFTIASKRIKYLGIQLTRDVKDLFKENYKPLLKEIKEDTNKWKNIPCSWVGRINIVKMAILPKVIYRFNAIPIKLPMTFFTELEKTTLKFIWNQKRACIAKSILSQKNKAGGITLPDFILYYKATVTKTAWYWYQNRDIDQWNRTEASEITPHIYNYLIFDKPEENKQWGKDSLFNKWCWENWLAICRKLKLDPFLTPYTKISSGWIKDLNVRPKTIKTLEENLGITIQDIGMGKDFMSKTPKAMATKAKIDKWDLIKLKSFCTAKETTIRVNRQPKKWEKIFTTYSSDKGLISRIYNELKQIYKKKTNNPIKKWAKDMNRHFSKEDIYAAKKHMKNCSPSLAIRDMQIKTTMRYHLTPVRMAIIKKSGNNRRIGTNPMDTIPKDKEGILPKSFYEAMITLIPKPGKDISKKQNYGPTSLMNTDAKILNEILANRIQQHIKKIIHHDQVVPVSYPEDSGDGQHPMNEMDLSSTYH

SEQ ID NO: 44891 - protein, 1276 aa, Homo sapiens; identical to SEQ ID NO: 40479
  DOMAIN (272)..(317): kw TRANSCRIPTASE REVERSE II ORF2 domain identified by eMATRIX, accession number DM01354N, p-value=1.000e-40, raw score of 13.17

SEQ ID NO: 44892 - protein, 889 aa, Homo sapiens; identical to SEQ ID NO: 39497
  DOMAIN (173)..(219): kw TRANSCRIPTASE REVERSE II ORF2 domain identified by eMATRIX, accession number DM01354O, p-value=1.000e-40, raw score of 8.73

SEQ ID NO: 44893 - protein, 775 aa, Homo sapiens
  DOMAIN (73)..(118): kw TRANSCRIPTASE REVERSE II ORF2 domain identified by eMATRIX, accession number DM01354N, p-value=1.000e-40, raw score of 13.17
MLNPGLVGLNILDSFAGGLPMLTTDCGLHSPEIAYLGFLANRVQPAQNPWLTLNLQLGTPLITTEIQTIIREYYKHLYANKLENLEEMDKFLDTYTLPRLNQEEVESLNRSITGSEIEAIINSLPTKQNPGPDGFTAEFYQRYKEELHINRTSDKNHMITSIDAEKAFDKIQQPFMLKTLNKLGTDRTYLKIIRAIYDKPTANIILRGQKLEAFPLKTGTRQGCPLSPLLFNIVLEVLARAIRQEKEIKGIQLGKEEVKLSLFADDMIVYQENPIISAQNLLKLIGNFSKVSGYKINVQKSQAFLYTNNRQTESQTMSEPPFTIASKRIKYLGIQLTRDVKDLFKKNYKPLLNEIKEDTNKRKNIPCSWVGRINIVNMAILPKVIYRFNAIPIKLPMPFFTELEKTTLKFIWNQKRARIAKSILSQKNKAGGIMLPDFKLYYKAIVYQNRDIDQWNRTEASEIMPHIYNHLIFDKPDKNKKWIKDSLFNKWCWENWLAICRKLKLDPFLTPYTKINSRWIKDLNVRPKTIKTLEENLGNTIQDIGMGKDFMSQTPKAMATKAKIDKWDLIKLKSFCIAKETTIGVNRQPTEWEKIFAIYSSDKGLISRIYNEVKHIYKKKTTPSTNRATRRVPWSGGDASVWEDARCQADRGLAVAKSVKEQHPLLSRPGKGGSLSPGEFREDSVPPPLVEGLTSVRLPGYRARLYHDMICLLIILTKTTGFKDESVCHEEYGDSRNEKEYLRMQKPVRQHSSEPGSAPAGALVHMLIVSKENLI

SEQ ID NO: 44894 - protein, 1019 aa, Homo sapiens; identical to SEQ ID NO: 38238
  DOMAIN (336)..(377): kw TRANSCRIPTASE REVERSE II ORF2 domain identified by eMATRIX, accession number DM01354I, p-value=1.000e-40, raw score of 15.55

SEQ ID NO: 44895 - protein, 790 aa, Homo sapiens
  DOMAIN (136)..(182): kw TRANSCRIPTASE REVERSE II ORF2 domain identified by eMATRIX, accession number DM01354O, p-value=1.000e-40, raw score of 8.73
DNTARGTIRQQHLLFTNIRCSAASAADTQANRVWSGPPANSNRPAARVLTVRRKTNKQKGHPHQNPICTSPSSKTKETQTTIREYYKHLYANRLENLEEMDKFLDTYTLPRLNQEEVESLNRRITESDIEAIINSLPTKKSPGPDGFTAEFYQRYKEELVPFLLKLFQSIEKEGILPNSFYEASIILIPKLGRDTTKKENFRPISLMNIDAKILNKILANRIQQHIKKHIHGQVGFIPGMQGWFNIRKSINVIQHINRTNDKNHMIVSIDAEKAFDKIQQPFMLKTLNKLGIDGPYLKIIRAIYDKLTANIILNGQKLEAFPLKTGTRQGCLLSPLLFNIVLEVLARAIRQEKEIKGIQLGKEEVKLCLFADDMIVYLENPIVSAQNLLKLISNFSKVSGYKINVQKSQAFLYTNNRQTESQIMSELPFTIASKRIKYLGIQLTGDVKDFFKENYKPLLNEIKEDTDKWKNIPCSRVGRINIMKMAILPKVIYRFNAIPIKLPMTFFTELEKTTLKFIWNQKRARIAKSILSQKNKAGGITLPDFKLYYKATVTKTACHRVGRAQQHSISKWKWYIHDWSQVGPEGTNDSARYPDTTQKWTAAALQPLSRTSLKDSHEGKSSQWAELRAVHLVLRFAWKEKWPDVQLYTDSWAVASGLAGWSGTWKKHDWKIGDKEIWGRATPVIAQWAHEQRGHGGRDGDYAWAQQHGLPLTRDDLATATAECPICQQQRPTLSPQYGTIPQARIHGSRNQRVEVEAAPLTITPSDPLANFLLPPPTTLHSAGLDSLLA

SEQ ID NO: 44896 - protein, 1034 aa, Homo sapiens
  DOMAIN (223)..(266): kw TRANSCRIPTASE REVERSE II ORF2 domain identified by eMATRIX, accession number DM01354T, p-value=1.000e-40, raw score of 9.48
MYSHVITVCRHVKNGDILLLNRQPTLHRPSIQAHRARILPEEKVLRLHYANCKAYNADFDGDEMNAHFPQSELGRAEAYVLACTDQQYLVPKDGQPLAGLIQDHMVSGASMTTRGCFFTREHYMELVYRGLTDKVGRVKLLSPSILKPFPLWTGKQHINRTKDKNHMIISIDAEKAFDKIQQPFMLKTLNKLGIDGTYLKIIRAIYDKPTASIILNGQKLEAFPLKTGTRQGCPLSPLLFNIVLEVLARAIRQEKEIKSIQLGKEEVKLSLFADDMIVYLENPTVSAQNLLKLMSNFSKVSGYKINVQKSQAFLYTNNRQTESQIMSGLPFTITSKRITYLGIQLTRDVKDLFKENYKPLLKEIKEDTNKWKNIPCSWVGRINIVKMAILPKVIYRFNTIPIKLPMTFLTELEKTTLKFIWNQKRAHIAKSILSQKNKAGGIMLPDFKLYYKATVTKTAWYWYQNRDIDQWNRTEPSEIMPHIYNYLIFDKPDKNKQWGKDSLFNKWCWENWLAICRKLKLDPFLTPYTKINSRWIKDLHVRPKTIKTLEENLGNTIQDIGMGKDFMSKTPKAMATKAKIDKWDLIKLKSFCTAKETTIRVNRQPTEWEKIFATYSSDKGLISRIYNELKQIYKKKTNNPIKKWAKDMNRHFSEEDIYAAKKHMKKCSSSLAIREMQIKTTMRYHLTPVRMVIIKKSGNNRCWRGCGEIGTLLHCWWDCKLVQPLWKSVWQFLRDLELEIPFDPAIPLLGIYPEDYKPCCYKDTCTRMFIAALFTIAKTWNQPKCPTMIDGIKKMWHIYTMEYYAAIKKDEFMSFVGTWMKLETIILSKLSQGQKTKHRMFSLIVRTLSCRSVGVYSKSTPDPVCLSISSSGCRTADISVSQMLLPDCSSGSFVSEEYPKVMSGHKEDEEGSGHRLAWMMPSVKESHWGLLFSKERTSHFDQHDLGDVTLHQSEPEDDARETYLRRGVLGPGEAFGALTSTCHTTCRAAFNKVQSSGSVQAKGVDTERRLRTQTLETPAWLQIPVPRLDDYVFG

SEQ ID NO: 44897 - protein, 1218 aa, Homo sapiens; identical to SEQ ID NO: 36413
  DOMAIN (56)..(111): kw TRANSCRIPTASE REVERSE II ORF2 domain identified by eMATRIX, accession number DM01354Q, p-value=1.000e-40, raw score of 9.23

SEQ ID NO: 44898 - protein, 701 aa, Homo sapiens
  DOMAIN (128)..(173): kw TRANSCRIPTASE REVERSE II ORF2 domain identified by eMATRIX, accession number DM01354N, p-value=1.000e-40, raw score of 13.17
  misc_feature (1)...(701): Xaa = X or * as defined in Table 2
RSFPRSRPSPFLLLSRYLRIHMVFSVLPFGLQNPKYLLSGSLQEKFRTPGINSHKTLDPNRVIIKVRRRLEKEKALRAYVGKSEVRNMHLRERCKLXKKREKNQIDTIKNDKGDITTDATEIQTTIREYYKHLYANKLENLEEMDKFLDTYILPRLNQEEVESLNRPITGSEIEAIINSLPTKRSPGPDGFTAEFYQTYKEELVPFPLKLFQSTEKEGILPNSFYEASIILIPKPGRDTTKKENFRPISLMNIDAKILNKILANRIQQHIKKLIHYDQVGFIPGMQGWFNKRKSINVIQHINRTNDKNHMIISIDAEKAFDKIQQPFMLKTLNKLGIDGTYLKVIRAIYDKPTANIILNGQKLEAFPLKTDTRQGCPLSPLLFNIVLEVLARAVRQEKEIEGIQLGKEEVKLSLFADDMIVYLENPIVSAQNLLKLISNFSKVSGYKINIQKSQAFLYTNNRQTESQIMSELPFTTASKKIKYLGIQLTRDVKDLFKENYKPLLNEIKEDTNKWKNIPCSWVGRINIMKMAILPKVICRFNAIPIKLPMPFFTELETTTLKFIWNQKRARIAKSILSQKNKAGGITLPDFKLYYKATVTKTAWYWYQNRDIDQWNRTEPSEITPHIYNYLIFDKPEKMSIIDTGGWYEAPVSSFFKEGLCRTGTENQVNRQPPAASPFKVYVSCTGSLHPRPHYFLEHPYP

SEQ ID NO: 44899 - protein, 750 aa, Homo sapiens; identical to SEQ ID NO: 39494
  DOMAIN (80)..(135): kw TRANSCRIPTASE REVERSE II ORF2 domain identified by eMATRIX, accession number DM01354Q, p-value=1.000e-40, raw score of 9.23

SEQ ID NO: 44900 - protein, 956 aa, Homo sapiens
  DOMAIN (149)..(194): kw TRANSCRIPTASE REVERSE II ORF2 domain identified by eMATRIX, accession number DM01354N, p-value=1.000e-40, raw score of 13.17
MKAEIKVFFETNENKDTTYQNLWDTFKAVCRGKFIALNAHKRKQERSKIDTLTSQLKELEKQEQTHSKASRRQEITKIRAELKEIQTQKTLQKINESRSWFFERINKIDRSLARLIKKKREKNQIDTIKNDKGDITTDPTEIQTTIREYYKHLYANKLENLEEMDKFLDTYTLPRLNQEEVESLNRPITGAEIVAIINSLPTKKSPGPDGFTAEFYQSWAETQPKKENFRPISLMNIDAKILNKILAKRIQQHIKKLIHHDQVGFIPGMQGWFNIRKSINVTQHINRAKDKNHMIISIDAEKAFDKIQQPFMLKTLNKLGIDGTYFKIIRAIYDNPTANIILNGQKLEAFPLKTGTRQGCPLSPLLFNIVLEVLARAIRQEKEIKGIQLGKEEVKLSLFADNMIVYLENPIVSAQNLLKLISNFSKVSGYKINVQKSQAFLYTNNRQTESQIMSQLPFTIASKRIKYLGIQLTRDVKDLFKENYKPLLKEIKEDTNKWKNIPCSGEGRINIVKMAILPKNWKKTTLKFIWNQKRARITKSILSQKNKAGGIMLPDFKLYYKATVTKTAWYWYQNRHIDQWNRTDPSEIMPHIYNYLIFDKPKKNKQWGKDSLFNKWCWENWLAICRSLKLDPFLTPYTKINSRWINDLNVRPKTIKTREENLGITIQDIGMGKDFMSKTPKSMVTKTKIDKWDLIKLKSFCTAKETTVRVIRQPTKWEKIFTTYSSDKGLISRMYNELKQIYKKKTNNPIKKWVKDMNRHFSKEDICVVKKHMKKYSPSLAIREMQIKTTMRYHLTPVRMAIIKKSGNNRCWRGCGETGTLLHCWWDCKLAQPLWKSVWRFLRDLELEIPFDPAIPLLGIYPNDYKSCCYKDTCTRMFIAALFTIAKTWNQPKCPTIIDWIKKMWHIYTMEYYAAIKNDEFVSFVGTWMKLEIIILSKLSQEQKTTHRIFSLIGGN

SEQ ID NO: 44901 - protein, 791 aa, Homo sapiens
  DOMAIN (60)..(106): kw TRANSCRIPTASE REVERSE II ORF2 domain identified by eMATRIX, accession number DM01354O, p-value=1.000e-40, raw score of 8.73
RQWAGVVGRCSHLASWVSSNTSETGAIRSSTEVDAPDDSMLLSTCDIDLTAARRAWLGCLPTKKSPGPDGFTAEFYQRCKEELVPFLLKLFQSIEKEGILPNLFDEASIILIPKRGRDTTKKENFRPISLMNIDAKILNKILANRNQQHIKKLIHHDQVGFIPGMQGWFNICKSINVIQHINRTKDKNHMIISIDAEKAFDKIQQPFMLKTLNKLGIDGTYLKIIRAIYDKPTANIILNGQKLEAFPLKTGTRQGCPLSPLLFNIVLEVLARAIRQEKEIKGIQLGKEEVKLSLFADDMIVYLENPIVSAQNLLKLISNFSKVSAYKINVQKSQAFLYTNNRQTESQIMSVFPFTIASKRIKYLGIQLARNAKDLFKENYKPLLNEIKEDTKKWKNIPCSWVGRINIVKMAILPKVIYRFNAIPIKLPMTFFTELEKTTLKFIWNQKRARIAKSILSQKNKAGGITLPDFKLHYKITVTKTAWYWYQNRDIDQWNRTEPSEITPHIYNYLIFDKPEKNKQWGKDSLFNKWCWENWLAICRKLKLDPFLTPYTKIHPRWIKDLNVRPKTIKTLEENLGNTIQDIGMGKDFMSKTPKAMAAKAKIDKWDLIQLKSFCTAKETTIRVNRQPTKWEKIFATYSSDKGLISRIYKELKQIYKKKTNNPIKKWAKDMNRHFSKEDIYAANKHMKKCSPSLAIREMQIKTTMRYHLTPVRMAIIQKSGNNRCWRGCGEIGTLLHCWWDCKLVPHILTHRWELNNEITWTQEGEYHTLGTVVGWGEGGGIALGDIPNAR

SEQ ID NO: 44902 - protein, 1084 aa, Homo sapiens
  DOMAIN (110)..(151): kw TRANSCRIPTASE REVERSE II ORF2 domain identified by eMATRIX, accession number DM01354I, p-value=1.000e-40, raw score of 15.55
MGDFNTPLSTLDRSTRQKVNKDTQELNSALHQGDLIDIYRTLHPKSTEYTFFSAPHHTYSKIDHIVGSKALLSKWKRTEIITNYLSDHSAIKLELRIKNLTQSRSTTWKLNNLLLNDYWVHNEMKAEIKMFFETNENKDTTYQNLWDAFKAVCRGKFIALNAHKRKQERSKIDTLTSQLKELEKQEQTHSKASRRQEITKIRAELKEIETQKTLQKINESRSWFFERINKIDRPLARLIKKKREKNQIDTIKNDKGDITTDPTEIQTTIREYYKHLYSNKLENLEEMDKFLDTYTLPRLNQEEVESLNRPITGAEIVAIINSLPTKKIPGPDGFTAEFYQRYKEELVPFLLKLFQSIEKEGILPNSFYEASIILIPKPGRDTTKKENFRPISLMNIDAKILNKILAKRIQQHIKKLIHHDEVGFIPGMQGWFNIHKSINVIQHINRAKDKNHMIISIDAEKAFDKIQQPFMLKTLNKLGIDGMYFKIIRAIYDKPTANIMLNGQKLEVFPLKSSTRQGCPLSPLLFNMVLNVLARAIRQEKAIKGIQIGREEVKLSLFADDVIVYLENPIVSAQNLLKLISNFSKVSGYKINVQKSQAFLYTNNRQTESQIMSELPFTIASKRIKYLGIQLTRDVKDLFKENYKPLLKEIKEDTNKWKNIPCSWVGRINIVKMAILPKVIYRFNAIPINLPMTFFTELEKTTLKFIWNQKRARIAKSILSQKNKAGGITLPDFKLYYKATVTKTAWYWYQNRDIDQWNRTEPSEIMLHTYNYLIFDKPEKNKQWGKDSLFNKWCWENWLAICRKLKLDPFLTPYTKINSRWIKDLNVRPKTIKTLEENLGITIQDIGVGKDFMSKTPKAMATKAKIDKWDLIKLKSFCTAGETTIRVNRQPTTWEKIFATYSSDKGLISRIYNELKQIYKKKTNNPIKKWARDMNRHFSKEDIYAAKKHMKKCSSSLAIREMQIKTTMRYHLTPVRMAIIEKSGNNRCWRGCGEIGTLLHCWWDCKLVQPLWKSVWRFLRDLELEIPFDPAIPLLGIYPKDYKSCCYKDTCTHSQTILQKVWNQRCPSLPFYLLNVWQTSLVSY

SEQ ID NO: 44903 - protein, 920 aa, Homo sapiens
  DOMAIN (233)..(279): kw TRANSCRIPTASE REVERSE II ORF2 domain identified by eMATRIX, accession number DM01354O, p-value=1.000e-40, raw score of 8.73
  misc_feature (1)...(920): Xaa = X or * as defined in Table 2
MADMLTWESCLEESLQEESPLVTHCGPSCCISGQSPPSSARPSSVSSAISVLMLPQNRKLPPAWTSPGIFPTDLVVYSMSLPHALARYNCDVCKSMLPPRLYAPEEKARTSPLCGTWYSPSLPLCGAWCKKNEKKRERERERKRQREDILSGASSYKDTIHIQLRPPPYDVLQQIQTTIREYFKHLYANKLENLEEMDKLLDTYTLPRLNQEEVESLNRLITGSEIVAIINSLPTKKSPRPDGFTAEFYQRYKEELVPFLLKLFQSIEKGGLLPNSFYEASIILMPKLGRDTTKKENFRPISLMNIDAKILNKILANQIQQHIKKLIQHDQVGFIPGMQGWFNICKSINVIQHINRTKDKNHMTISIDAGKAFDKIQQLFMLKTLNKLGIDGTYLKIIRAIYDKPTANIILNGEKLEAFPLKTGTRQGCPLSPLLFNIVLEVLARAIRQEKEIKGIRLRKEEVKLSLFADDMIVYLENPIISAQNLLKLISNFSKISGYKINVQKSQAFLYTNNRQTESQIMSELLFTIASKRIKYLRIQLTKDVKDLFKKNYKPLLNEIKEDTKKWKNIPCSWVGRINIVKMAIRPKVIYRFNAIPIKLPMTFFTELEKTTFKFIWNQKRARIAKSILSQKNKAGGITLPDFKLYYKATVTKTAWYWYQNKDIDQWNRTEPSEIMPHIYNYLIFDKPDKNKQWGKDSLFNKWGWENWLAICRKLKLDPFLTPYTKINSRWIKDLNVRPKTIKTLEKNLGITIQDIGMGKDFMSKTPKAMATKAKIDKWDLIKLKSFCTAKETTIRVNRQPTKWEKIFATYSSDKGLISRIYNELKQIYKKKTNNPIKKWVKDMNRHFSKEDICAAKKHMKKCSSSLAIREMQIKTTMRYHLTPVRMAIIKKSGNNSTIHSSKDMDSTQMCINDTLYEEX

SEQ ID NO: 44904 - protein, 1726 aa, Homo sapiens
  DOMAIN (795)..(836): kw TRANSCRIPTASE REVERSE II ORF2 domain identified by eMATRIX, accession number DM01354I, p-value=1.000e-40, raw score of 15.55
MAQFHVSHPPAEWPRHVLLLMADSKNELQNMNTGQTCGTRQTLKSKLQGWNKPGIQSDPGSQGHPRCLKTFPLVAQSSTQERNHVMEKAVLKSQNWAIIEEFITKIGWFPDYSGKVKYLSSPKSSCTTVLQVTHFSLFFHPNPDELVSKIKVWSKHRLYQNNSEAFLEVQIPEPKCEVYSMRTMGRRQPGTAMDLNAGGSICNVPRTLLHLTGESTFRDRQRVGAYLDIRGWYILVLVVDKEKLGIPGQKQNSSKILFGSEKLKQWVYVKNHAKESITQEAMGIWVGQQRKRQPLGYEERKLTNRKDIHIKNPSVCHHHQRPKVDKTTKMGKKQSRKTGNSKNQSTSPTLKESSSSPATEQSWTENDFDELREEGFRRSDYSELQEEVQNNGKEVKNFGKKLDEWITRITNAKKSLKDLMELKTKARELCDERTSLSSQCNQLEERVSVMEDEMNEIKQEEKFREKRIKRNEQSLQEIWDYMKRPNLRLIGVPESDGENGTKLENTLQDIIQENFPNLARQANIQIQEIQRTPQRYSLRRATPRHIIVRFTKVEMKEKMLRVAREKGRVTHKGKPVRLTADLLAETLQARRQDTHRLKIKGWRKIYQANGKQKKAGVAILVSDKTEFKPTKIKRDKEGHYIMVKGSIQQEELTILNIYAPNTGAPRFTKQVLRDLQRDLDSNTIITGDFNTPLSTLDRSMRQKVNKDIQELNSALHQADLIDIYRTLHPKSTENTFFSAPHHTYSKIDHIVGSKALLSKCKRKEIITNCLSDHSAIKLELRIKKLPQNCSTIWKLNNLLLNDYWVHNEMKAEIKMLFETNENKDTTYQNLWDTLKAVCRGKFIALNAHGRKQERSKIDTLTSQLKELAKQEQTHSKASRRQEITKIRAELKEIETQKTLQKINESRSWFFERINKIDRPLARLIKKKREKNQIDTIKNDKGDITTDPTEIQTTIREYYKHLYANKLENLEEMDTFLDTYTLPRLNQEEVESLNRPITGSEIVAIINSLPTKKSPGPDGFTAEFYQRYKEELVPFLLKLFQSIEKEGILPNSFYETSIILIPKPGRDTTKKENFRPISLMNIDAKILNKILANRIQQHIKKLIHHDQVGFIPGMQGWFNIRKSINVIQHINRAKDKNHMIISIDAEKAFDKIQQPFMLKTLNKLGIDGTYFKIIRAIYDKPTANIILNGQKLEAFPLKTGTRQGCPLSPLLFNIVLEVLARAIRQEKEIKGIQLGKEEVKLSLFADDMIVYLENPIVSAQNLLKLISNFSKVSGYKINVQKSQAFLYTNNRQTESQIMSELPFTIASKRIKYLGIQLTRDVKDLFKENYKPLLKEIKEETNKWKNIPCSWVGRINIVKMAILPKVIYRFNAIPIKLPMTFFTELEKTTLKFIWNQKRARIAKSILSQKNKAGGITLPDFKLYYKATVTKTAWYWYQNRDIDQWNRTEPSEIMPHIYNYLIFDKPEKNKQWGKDSLFNKWCWENWLAICRKLKLDPFLTPYTKINSRWIKDLNVKPKTIKTLEENLGITIQDIGVGKDFMSKTPKAMATKDKIDKWDLIKLKSFCTAKETTIRVNRQPTTWEKIFATYSSDKGLISRIYNELKQIYKKKTNNPIKKWAKDMNRHFSKEDIYAAKKHMKKCSSSLAIREMQIKTTMRYHLTPVRMAIIKKSGNNRPEKTKSFLPPLPTQSSIHSGFLEHCVEQDSEALSGEAGKSLMFAMGVGSERAKH

SEQ ID NO: 44905 - protein, 1127 aa, Homo sapiens
  DOMAIN (272)..(317): kw TRANSCRIPTASE REVERSE II ORF2 domain identified by eMATRIX, accession number DM01354N, p-value=1.000e-40, raw score of 13.17
MGDFNTPLSTLDRSTRQKVNKDTQEFNSALYQADLIDIYRTLHPKSTEYTFFSAPHHTYSKIDHIVGSKALLSKCERTEIITNYLSDHSAMKLELRIKNLTQNCSTTWKLNNLLLNDYWVHNEMKAEIKMFFETNENKDTTNQNLWDAFKAVCRGKFIALNAHKRKQERSKIDTLTSQLKELEKQEQTHSKASRRQEITKIRAELKEIETQKTLQKINESRSWFFERINKIDRPLARLIKKKREKNQIDTIKNDKGDITTDPTEIQTTIREYYKHLYANKLENLEEINKLLDTYTLPRLNQEEVESLNRPITGAEIGAIINSLPTKKSPGPDGFTAEFYQRYKEELVPFLLKLFQSIEKEEILPNSFYEASIILIPKPGRDTTKKENFRPISLMNIDAKILNKILANRIQQHIKKLIHHDQVGFFPGMQGWFNIRKSINVIQHINRAKDKNHMIISIDAEKAFDKIQQPFMLKTLNKLGIDGTYFKIIRAIYDKPTANIILNGQKLEAFPLKTGTRQGCPLSPLLFNIVLEVLARAIRQEKEIKGIQLGKEEVKLSLFADDMIVYLENPIVSAQNLLKLISNFSKVSGYKINVQKSQAFLYTSNRQTESQIMSELPFTIASKRIKYLGIQLTRDVKDLFKENYKPLLKEIKEDTNKWKNIPCSWVGRINIVKMAILPKVIYRFNAIPIKLPMTFFTELEKTTLKFIWNQKRARIAKSILSQKNKAGGITLPDFKLYYKATVTKTAWYWYQNRAIDQWNRTEPSEITPHTYNYLIFDKPEKNKQWGKDSLFNKWCWENWLAICRKLKLDPFLTPYTKINSRWIKDLNVRPKTIKTLEENLGITIQDIGMGKDFMSRTPKAMATKAKIDKWDLIKLKSFCTAKETTIRVNRQPTTWEKIFATYSSDKGLISRIYNELKQIYKKKTNNPIKKWEKDMNRHFSKEDIYAAKKHMKKCSSSLAIREMQIKTTMRYHLTPVRMAIIKKSGNNRLLRKCPRISTVQIKLSWPWVSHCSPTCHGLQEEQSSVWRRPDSAQKPLSRCSIDSPAGAGSHLGGTVSTRRAAKQGYGISEPLRSRVSHFRASAVKGMAFPSLCGQGYGVSEPLQSRAQRWVVGAAVGASQMWVPTCVMT

SEQ ID NO: 44906 - protein, 1042 aa, Homo sapiens
  DOMAIN (115)..(156): kw TRANSCRIPTASE REVERSE II ORF2 domain identified by eMATRIX, accession number DM01354I, p-value=1.000e-40, raw score of 15.55
TWKGTTSTSRCKIMPKYRSTRQKVNKDTQELNSALHQADLIDIYRTLHTKSTEYTFFSAPHHTYSKIDHIVGSKALLSKCKRTEIITNYLSDHSAIKLELRIKNLNQSRSTTWKLNNLLLNDYWVHNEMKAEIKMFFETNENKDTTYQNLWDAFKAVCRGKFIALNAHKRKQERSKIDTLTSQLKELEKQEQTHSKASRRQEITKIRAELKEIETQKTLQKINESRSWFFERINKIDRPLARLIKKKREENQIDTIKNDKGDITTDPTEIQTTIREYYKHLYANKLENLEEMDKFLDTYTLPRLNQEEVESLNRPITGAEIVAIINSLPTKKSPGPDGFTAEFYQRYKEELVPFLLKLFQSIEKEGILPNSFYEASIILIPKPGRDTTKKENFRPISLMNIDAKILNKILANRIQQHIKKLIHHDQVGFIPGMQGWFNIRKSINVIQHINRAKDKNHMIISIDAEKAFDKIQQPFMLKTLNKLGIDGTYFKIIRAIYDKPTANIILNGKKLEAFPLKTGTRQGCPLSLLLFNIVLEVLARAIRQEKEIKGIQLGKEEVKLSLFADDMIVYLENPIVSAQNLLKLISNFSKVSGYKINVQKSQAFLYTNNRQTESQIMSELPFTIASKRIKYLGIQLTRDVKDLFKENYKPLLKEIKEDTNKWKNIPCSWVGRINIVKMAILPKVIYRFNAIPIKLPMTFFTELEKTTLKFIWNQKRARIAKSILSQKNKAGGITLPDFKLYYKATVTKTAWYWYQNRDIDQWNRIEPSEITPHTYNYLIFDKPEKNKQWGKDSLFNKWCWENWLAICRKLKLDPFLTPYTKINSRWIKDLNVRPKTIKTLEENLGITIQDIGVGKDFMSKTPKAMATKAKIGKWYLIKLKSFCTAKETTIRVNRQPTTWEKIFATYSSDKGLISRIYNELKQIYKKKTNNPIKKWAKDMNRHFSKEDIYAAKKYVKKCSSSLAIREMQIKTTMRYHLTPVRMAIIKKSGNNSDLYLMSAGTSCLMGRHWDSGQETCVQNVVLDTCSPSEQLLRAIADLVPQP

SEQ ID NO: 44907 - protein, 1075 aa, Homo sapiens
  DOMAIN (279)..(324): kw TRANSCRIPTASE REVERSE II ORF2 domain identified by eMATRIX, accession number DM01354N, p-value=1.000e-40, raw score of 13.17
FPSFKIAIPKNDHGHEQHFWGYRVPNNAMEDTAYQLVHQYPTRMQARRCRIALSQWSSSHPLPAKRDAPVTSGAHPRRRLSSRRYPPRQSRQARLPTWWPAVSEAAVPQPLLSCYSAPSAMFPVSPGARWGTTTGWKFFETNENKDTTYQNLWDAFKAVCRGKFIPLNAHKRKQERSKIDTLTSQLKELEKQEQTHSKASRRQEITKIRAELKEIETQKTLQKINESRSWFFERINKIDRPLARLIKKKREKNQIDTIKNDKGDITTNPTEIQTTIREYYKHLYAKKLENLEEMDTFLDTYTLPRLNQEEVESLNRPITGAEIVAIFNSLPTKKSPGPDGFTAEFYQRYKEELVPFLLKIFQSIEKEGILPNSFYEASIILIPKPGRDTTKKENFRPISLMNIDAKILNKILANRIQQHIKKLIHHDQVGFIPGMQGWFNIRKSINVIQHINRAKDKNHMIISIDAEKAFDKIQQPFMLKTLNKLGIDGTYFKIIRAIYDKPTANIILNGQKLEAFPLKTGTRQGCPLSPLLFNIVLEVLARAIRQEKEIKGIQLGKEEVKLSLFADDMIVYLENPIISAQNLLKLISNFSKVSGYKINVQKSQAFLYTNNRQTESQIMSELPFTIASKRIKYLGIQLTRDVKDLFKENYKPLLKEIKEDTNKWKNIPCSWVGRINIVKMAILPKVIYRFNAIPIKLPMTFFTELEKTTLKFIWNQKRARIAKSILSQKNKAGGITLPDFKLYYKATVTKTAWYWYQNRDIDQWNRTEPSEITPHTYNYLIFDKPEKNKQWGKDSLFNKWCWENWLAICRKLKLDPFLTPYTKINSRWIKDLNVRPKTIKTLEENLGSTIQDIGVGKDFMSKTPKAMATKAKIDKWDLIKLKSFCTAKETTIRVNRQPTTWEKIFATYSSDKRLISRIYNELKQIYKKKTNNPIKKWAKDMNRHFSKEDIYAAKKHMKKCSSSLAIREMQIKTTMRYHLTPVRMAIIKKSGNNSQRGFYDSIKSPTKESYAAIKRNEIMSFAGYGWSWTLLSLATNTGTENQTLHIFTYKWELNNESTWIHEGMGDSYPGPFDVQ

SEQ ID NO: 44908 - protein, 911 aa, Homo sapiens
  DOMAIN (105)..(160): kw TRANSCRIPTASE REVERSE II ORF2 domain identified by eMATRIX, accession number DM01354Q, p-value=1.000e-40, raw score of 9.23
MDKFFDTYTLPRLNQEEVESLNRPITGSEIEAIINSVTTKKSPGPDGFTAEFYQRYEEELKKRESSLTHFMRSIILIPKPGRDITKKENFRPISLMNIDAKILNKILANQIQQYIKKLIHHDQVGFIPGMQGWFNIRKSIKVTQHINRTKDKNHMIISIDAVKAFDKIQQRFMLKTLNKLGIDGTYLKIIRAIYDKPTANIILNGQKLEAFPLKTGTRQGCPLSPLLFNIALEVLSRAIRQEKEIKDIQLGKEEVKFSLFADDMIVYLENPIVSAQNLLKLIGNFSKVSGYKINAQKSQAFLYTNNRQTESQIMSELPFTIASKRIKYLGIQLTMDVKDFFKENYKPMLNEIKEDTNKWKNIPCSWVGRINIVKMAILPKIHSRVTVLLRSDTVLHIVKLAVKIPTIVLLLEGSPRALRKHRQKPGSGSSRPRVRPSAVLASGLSQCSHSGGGNRGAYVTPPQALAEKAFDKIQQPFMLKTLNKLGIDGTYLKIIRAIYDKPTANIILNGQKLEAFPLKTGTRQGCPLSPLLFNIALEVLARAIRQEKEIKGIQFGKEEVKLSLFADDMIVYLENPIVSAQILLKLISNFSKVSGYKINVQKPQAFLHTNNRQTENQIMSELPFTIASKRIKYLGIQLTRDVKDLFKENYKPLLKEIKEDTNKWKNIPCSWVGRINIVKMAILPKVIYRFNAIPSKLPMTFFTELEKNTLKFIWNQKRARIAKSILSQKNKAGGITLPDFKLYYKATVTKTAWYWYQNRDIDQWNRTEPSEITPHIYNYLIFDNKPEKNKQWGKDSMFNKWCWENWLAICRKLKLDPFLTPYTKINSRWIKDLNFRPKTIKTLEENLGITIQDIGMGKGFMSKTPKAMATKDKIDKWDLIKLKSFCTAKETTIRVNRQPTKWEKIFRNLLI

SEQ ID NO: 44909 - protein, 1052 aa, Homo sapiens
  DOMAIN (383)..(408): 7 kw REVERSE TRANSCRIPTASE RNA POLYMERASE domain identified by eMATRIX, accession number DM00895E, p-value=3.333e-11, raw score of 15.72
MVKGSIQQEELTILNIYAPNTGAPRFIKQLLSDLQRDLDSHTLIMGDFNTPLSTLDRSTRQKVNKDTQELNSALHQADLIDIYRTLHPKSTEYTLFSAPHHTYSKIDHILGSKALLSKCKRTEIITNYLSDHSAIKLELRIKNLTQSRSTTWKLNNLLLNDYWRKQERSKTDTLTSQLKELEKQEQTHSKASRRQEITKIRAELKEIETQKTLQKINESRSWFFERINKIDRPLARLIKKKEKNQIDTIKNDKGDITTDPTEIQTTIREYYKHLYANKLENLEEMDTFLDTYTLPRLNQEEVESLNRPITGSEIVAVINSLPTKKSPGPDGFTAEFYQRYKEELVPFLLKLFQSIEKEGILPNSFYEASIILIPKSGRDTTKKENFRPISLMNIDAKILNKILANRIQQHIKKLIHHDQVGFIPGMQGWFNIRKSINVIQHINRAKDKNHMIISIDAEKAFDKIQQPFMLKTLNKLGIDGTYFKIIRAIYDKPTANIILNGQKLEAFPLKTGTRQGCPLSPLLFNIVLEVLARAIRQEKEIKGIQLGKEEVKLSLFADDMIVYLENPIVSAQNLLKLISNFSKVSGYKINVQKSQAFLYTNNRQTESQIMSELPFTIASKRIKYLGIQLTRDVKDLFKENYKPLLKEIKEDTNKWKNIPCSWVGRINIVKMAILPKVIYRFNAIPIKLPMTFFTELEKTTLKFIWNQKRARIAKSILSQKNKAGGITLPDFKLYYKATVTKTAWYWYQNRDIDQWNRTEPSEIMPHIYNYLIFDKPEKNKQWGKDSLFNKWCWENWLAICRKLKLDPFLTPYTKINSRWIKDLNVRPKTIKTLEENLGITIQDIGVGKDFMSKTPKAMATKAKIDKWDLIKLKSFCTAKETTIRVNRQPTTWEKIFATYSSDKGLISRIYNELKQIYKKKTNNPIKKWAKDMNRHFSKEDIYAAKKHMKKCSPSMAIREMQIKTTMSYHLTPAKIQNGSRNIVKSNMNCLISQNSPQVPCTTVAKYHPNSRVTPEPRSGTPKEDRRWILMTSGKLYFLIQKSTEHMLSGRKD

SEQ ID NO: 44910 - protein, 2490 aa, Homo sapiens
  DOMAIN (1992)..(2017): 7 kw REVERSE TRANSCRIPTASE RNA POLYMERASE domain identified by eMATRIX, accession number DM00895E, p-value=3.333e-11, raw score of 15.72
MDTFLDTYTLPRLNQEEVESLNRPITGAEIVAIINSLPTKKSPGPDGFTAEFYQRYKEELVPFLLQLFQSIEKEGILPNSFYEASIILIPKPGRETTKKENFRPISLMNIDAKIVNKILAKRIQQHIKKLIHHDQVGFIPGMQGWLNTCKSINVIQHINRAKDKNHMIISIDAEKAFDKIQQPFMLKTLKKLGTDGTYFKIVRAIYDKPTANIILNGQKLEAFPLKTGTRQGCPLSPFLFNIVLEVLARAIRQKEIKGIQLGKEEVILSLFADDMIVYLENPIVSAQNLLKLISNFSKVSGYKTNVQKSQAFLYTNNIQTGSQIMSDLPFTIASKRIKYLGIQLTRDMKDLFKNYKPLLTEMKQRNGRTFHAHGIGKNYFKVHRNRKRARIAKSILSQKNKAGGITLPDFKLYYKATVTKTAWYWDQNRDIDQWNRTEPSEITPHIYNYLIFDKPEKNKQWGKESLFNKWCWENWLAICRKLKLDPFLTPYTKINSRWIKDLNLRPKTIKTLEENLGITIQDIGMGKDFMSKTPKAMATQAKIDKWELIKLKSFCTAKETIIRVNRQPTKWEKIFTTYSSDKGLISRIYNELKQIYKKKKQPHQKDFAYHFTVFVFYFGAFLLEAAATSLHDLHCNTTITGQPLLSDNQYNINVAASLSPTFAGLGELSGGVTHTLILEGSETKTTVTFSVISRWSSDYDIQQENYASPSTNLSTSDVANMMIQAFPKNLLKLISNFSKVSGYKINVQKSQAFLYTNNRQTESQIMSELPFTIASKRIKYLGIQLTRDVKDLFKENYKPLLNEIKEDTNKWKNISCSWVGRINIVKMAILPKERSSSPATEQSWMENDFDELREEGFRRSNFSELKEKVRTHHKQDKNLEKRSWFFEKINKIDRPLARLIKKKREKSQINAIKNDKGDITADPTEIQTTITEYYKHLYANKLENLEAMDKFLDTYTLPRINQEEVESLNRPITGSETEAIINSLPTKKSPGPDGLTAEFYQRYKEELVPFLLKLFQSIEKERILPNSFYEGIILLIPKPGRDNTKKDNFKPISLMNMDAKILNKILANRIQQHIKKLIHHDQVGFIPGMQGWFNICKSINVIQHINRTKDKNHMIISTDAGKAFDKIQQPFMLKTLNKLGIDGMNLKIIRAIYDKPTANIILNRQKLEAFPLKTGTRQGCPLSPLLFNIVLEVLARAIRQEKEIKGIQLGKEEVKLSLFADDMIVYLENPIVSAQNLLKLISNFSKVSGYKISVQKSQAFLYTNNRQTESQIMSEIPFPIASKRIKYLGIQLTRDVKDLFKENCKPLLKEIKENTNKWKNIPCSWIERINIVKMAILPKRTPLLSLPSTLYEELWRLRSYFPLCPQLYNMEQNTTDWVIYKEQCIWLTALETGESKSTAPAFGKGYPMAEYIIWGRLTPHMAGYSSETKLPEERSGSNICCSPISAVLQPLLLIPRQTGSGVDLQQTPTDLQLRVLTVRRKTNKQKGHPHQNPICTSPSSKTKGSNSHITILTLNVNGLNAPIKRHRLANWIKSQDPSVCCIQETHLTCRDTHRIKIKGWREIYQANGKQKKAGVAILVSDKTDFKPTKIKRDKEGHYMMVKGSIQQEELTTLNIYAPNTGAPRFIKQVLRDLQRDLDSHTLIMGDFNTPLSTLDRSTRQKVNKDIQDLNSALHQVDLIDIYRTLHPKSTEYTFFSALHHIYSKIDHIVGSKALLSKYKTTEIITNCLSDHSAIKLELRIKKLTQNRSTTWKLNNLLLNDYWVHNKMKAEINTLFETNENKDTTYQNLWDTFKAVCRGKFIALNAHKRKQERSKIDTLTSQLKELEKQEQTHSKASRRQEITKIRAKLKEIETQKILQKINESRSWFFEKINKIDRPLARPIKKKREKNQIDAIKNDKGDITTDPTEIQTTIREYYKHLYANKLENLEEMDKFLNTYTLPRLNQEEVESLNKPITGSEIEAIINSLPTKKESRIRRLHSRILPEPGRDTTKKENFRPISLMNIDAKILNKILANRIQQHIKKLIHHDQVGFIPGMQGWFNIRKSINVIQHINRAKDKNHMIISIDAEKAFDKIQQRFMLKTLNKLGIDGTYFKIIRAIYDKPTANIILNGQKLEAFPLKTGTRQGCPLSPLLFNIVLEVLARAIRQEKEIKGIELGKEEVKLSLFADYMIVYLENPIVSAQNLLKLISNFSKVSGYKINVQKSQAFLYTNNRQTESQIMSELPFTIASKRIKYLGIQLTRDVKDLFKENYKPLLNEIKEDTNKWKNIPCSWVGRINIVKMAILPKVIYRFNAIPIKLPMPFFTELEKTTLKFIWNQKRARIAKIILSQKNKAGGITLPEFKLYYKATGTKTAWYGTGTKTEIMGKDFMSTTPKAMATKAKIDKWDLIKLKSFCTAKETTITVNRQPTEWEKIFTIYPSDKGLISRIYKELKQIYKKRTNNPINKWVKDMNRHFSKEDIYTAKKHVEKTLIITGHQRNANQIHNEIPSHTS

SEQ ID NO: 44911 - protein, 1325 aa, Homo sapiens
  DOMAIN (302)..(343): kw TRANSCRIPTASE REVERSE II ORF2 domain identified by eMATRIX, accession number DM01354I, p-value=1.000e-40, raw score of 15.55
MENDFDELREEGFRRSNYSELWEDIQTKGKEVENFEKNLEECITRITNTEKCLKELMELKTKARELHEECRSLRSRCDQLEERVSAMEDEMNEMKGEGKFREKRIKRNEQSLQEIWDYVKRPNLHLIGVPESDGENGTKLENTLQDIIQENFPNLARQANVQIQEIQRMPQRYSSRRATPRHIIVRFTKVEMKEKILKAAREKDRSTRQKVNKDTQELNSALHQADLIDIYRTLHPKSTEYTFFSAPHHTYSKIDHILGSKALLSKCERTEIITNYLSDHSAIKLELRIKNLTQNRSTTWKLNNLLLNDYWVHNEMKAEIKMFFETNENKDTTYQNLWDAFKAVCRGKFIALNAHKRKQERSKIDTLTSQLKELEKQEQTHSKASRRQEITKIRAELKEIETQKTFQKINESRSWFFERINKIDRPLARLIKKKREKNQIDTIKNDKGDITTNPTEIQTTIREYYKHLYANKLENLEEMDKFLDTNTLPRLNQEEVESLNRPITGSEIVAIINSLLTKKSPGPDGFTAEFYQSIILIPKPGRDTTKKENFRPISLMNIDAKILNKILANRIQQHIKKLIHHDQVGFIPGMQGWFNIRKSINVIQHTNRTKDRNHMFISIDAEKAFDKIQQPFLLKTLNKLGIDGTYLKIIRAIYDKPIANIILNGQKLEAFPLKTGTRQGCPLSPLLFNIVLEVLARAIRQEKEIKGIQLQKEEVKLSLFADDMIVYLENPTVSAQNLLKLISNFSKVSGYKISVQKSQAFFYTNNRQTESQIMSELPFTIASKRIKYLGIQLTRDVKDLFKENYKPLLKEIKEDTNKWKNIPCSWVGRINIVKMAILPKVIYRFNAIPIKLPMTFFTELEKTTLKFIWNQKRARIAKSILSQKNKAGGGIMLPDFKLYYKATVTKTAWYWYQNRDIDQWNRTEPSEITPHIYNYLIFDKPEKNKQWRKDSLFNKWCWENWLAICRKLKLDPFLTPYTKINSRWIKDLNVRPKTMKTLEENLGITIQDIGMGKDFMSNKTPKAMATKAKIDKWDLIKLKSFCTAKETTIRVNRQPTTWEKIFTTYSSDKGLIPRIYNELKQIYKKKTNNPIKKWAEDMNRQFSKEDIYAAKKHMKKCSSSLAIREMQIKTTMRYHLTPVRMAIIKKTGNNRCWRGCGEIGTLLHCWWDCKLVQPLWKSVWRFLRDLELEIPFDPAIPLLGIYPNDYKSCCYKDTCTPGHPRKQPTLGSIPQKSQDHCAEVLKDILFLAGTGGAQALLASFSLSQDVEFPAPSAVILENYKQKTEMSTTYWQSLTGPAGKQENCSQSQPQDPKYTVWMWGFRSKKQ

SEQ ID NO: 44912 - protein, 1118 aa, Homo sapiens
  DOMAIN (332)..(373): kw TRANSCRIPTASE REVERSE II ORF2 domain identified by eMATRIX, accession number DM01354I, p-value=1.000e-40, raw score of 15.55
MGKKQNRKTGKSKTQSAFPPPKERSSSPAMEQSWMENDFDELREEGFRRSNYSELREDIQTKGKEVENFEKNLEECITRITNTEKCLKELMELKTKARELREECRSLRNWIKSQDPSLCCIQETHLMCRDTHRLKIKGRRKIYQANGKQKKAGVAILVSDKTDFKPTKIKRDKEGHYIMVKGSIQQEELTILKIYAPNTGSPRFMKQVLSDLQRDLDSHTLIMGDFNTPLSTLDRSTRQKVNKDTQELNSALHQADLIDIYRTLHPKSTEYTFFSAPHHTYSKIDHILGSKALLSKCKRTEIITNYLSDHSAIKLELRIKNLTQNGSTTWKLNNLLLNDYWVHNEMKAEIKMFFETNENKDTTYQNLWDAFKAVCRGKFIALNAHKRKQERSKIDTLTSQLKELEKQEQTHSKASRRQEITKIRAELKEIETRKTLQKINESRSWFFERINKIDRPLARLIKKKREKTQIDTIKNDKGDITTDPTEIQTTIREYYKHLYANKLENLEEMDTFLDIYTLPRLNQEEVESLNRPITGAEIVAIINSLPTVGFIPGMQGWFNIRKSTNVIQHINRAKDKNHMIISIDAEKAFDKIQQPFMLKTLNKLGIDGTYFKIIRAIYDKPTANIILNGQKLEAFPLKTGTRQGCPLSPLLFNIVLEVLARAIRQEKEIKGIQLGKEEVKLSLFADDMIVYLENPIISAQNLLKLISNFSKVSGYKINVQKSQAFLYTNNRQTESQIMSELPFTIASKRIKYLGIQLTRDVKDLFKENYKPLLKEIKEDTNKWKNIPCSWVGRINIVKMAILPKIIYRFNAIPIKLPMPFFTELEKTTLKFIWNQKRARITKSILSQKNKAGGITLPDFKLYYKATVTKTAWYWYQNRDIDQWNRTEPSEIMQRIYNYLIFDKPEKNKQWGKGFPIMNRHFSKEDIYAAKKHMKKCSSSLAIREMQIKTTMRYHLTPVRMAIIKKSGNNRVTFLNQKATGKERLVTDFLLPWTICYGKFSGNRSVSVEGITGQTSLLGFPEKSSSPLLKTLLADGPSLGTNPFLTTNGCMTYPEKIMGILDARSTLTLSKEVEGPQFQTLCKHREMVVGAGGEEDLKIHVVMQETPDTQSNIEKEEQR

SEQ ID NO: 44913 - protein, 1372 aa, Homo sapiens
  DOMAIN (743)..(788): kw TRANSCRIPTASE REVERSE II ORF2 domain identified by eMATRIX, accession number DM01354N, p-value=1.000e-40, raw score of 13.17
  misc_feature (1)...(1372): Xaa = X or * as defined in Table 2
MSELPFTIASKRIKYLGIHLTRDVKYLLKENYKSPLNEIKEDTNKWKNIPCSWVGRINIVKMAILPKATVTKTAWYWYQNRDIDQWNRTEPSEITPYIYNYVIFDKPEKNKQWGKDSLFNKWSWENWLAICRKLKLNPFLTPYTKINSRWIKDLNVRPKTIKTLEENLGITIQDIGMGKDFMSTTPKAMATKDKIDKWDLMKLKSFCTAKETTIRVNRQPTKWEKIFAIYSSDKGLISRIYNELKQIHKKKTNNPIKKWAKDMNRHFSKEDIYAPKKHMKNAHHHWPSEKCKSKPQMKEKMLRAAREKAFKQASRREDDIAKVTSGMRVLFKPGTTEVQELALCYGGMANRTISALKTTQRQLSKLWKEELLQDVCAGLAEELHLPPDAPGGMVDFRCTLTLSFFFKFYLTVLQKLGQENLEDKCGKLDPTFASATLLFQKDPPADVQLFQEVPKGQSEEDMVGRPLPHLAADMQPLVRPCTVTTFLATRMSCLSGWSPAPGPTPRSSIEMKFKNMLFPMIVCPAWIPELNSVEHGPDGISFGAACPLSIVEKTLVDAVAKLPAQKTEVFRGVLEQLRWFAGKQVKSVASVGGNIITASPISDLNPVFMASGAKLTLVSRGELPEAEVQEEGLGGEKSHQIGHFLEKQSSKFSDPAFPVIWIQGSMENVPGLVDGKAGYFLCREFTAGTATCMPYLVGHQENCPDGPHLLPWLQKDPAEPGGDTALHRDPLQQGEIQTTIREYYKHLSANKLENLEEMDKFLDTYTLPRLNQKEVESLNRPITGAEIVPIINSLPTKKSSGLDGFTAEFYQRYKEELHINRTKDKNHMIISIDAEKAFDKIQQPFMLKTLNKLGIDGTYLKIIRAIYDKPTANIILNGQKLEAFPLKTGTRQGCPLSPLLFNIVLEVLARAIRQEKEIKGIQLGKEEVKLSLFADDMIVYLENPIVSAQNPLKLISNFSKVSGYKINVQKSQAFLYTNNRQTESQIMSELPFTIASKRIKYLGIQLTRDVKDLFKENYKPLLNEIKEDTNKWKNIPCSWVGRINIMKMAILPKVMYRFNAIPIKLPMPFFTELEKTTLKFIWNQKRARIIKSILSPKNKAGGITLPDFKLYCKATVTKTAWYWYQNRNIDQCNRTEPSEIMPHIYNYLIFDKPDKNKQWGKDPLFNKWCWENWLAICRKLKLDPFLTPYTKINSRWIKDLNIRPKTIKTLEESLGITIQDIGMGKDFMSKTPKAMATKDKIDKWDLIKLKSFCTAKETTIRVDRQPTEWEKIFTTYSSDKGLISRIYNELKQIYKKKSNNPIKKWAKHMNRCFSKEDIYAAKRHRLKDTPRKQLRFEGERVTWIQASTLKELLDLKAQHPDAKLVVGNTEIX

SEQ ID NO: 44914 - protein, 148 aa, Homo sapiens
  DOMAIN (69)..(110): EGG-LAYING HORMONE domain identified by eMATRIX, accession number DM01813B, p-value=1.956e-09, raw score of 17.93
EFEGTMEAPAQFLFLLLLWLPDTTGEIVLTQSPATLSLSPGERATLSCRASHSVSSFLAWYQLKPGQAPRLLIYDATNRATGASSSSSSSSSSSSSSSSSSSSSSSSSSSSSSQQRSSWPPEYSFGLGTKLEIKRTAAAPSVFIFPPS

SEQ ID NO: 44915 - protein, 120 aa, Homo sapiens
  DOMAIN (89)..(107): Immunoglobulins and major histocompatibility complex proteins domain identified by eMATRIX, accession number BL00290B, p-value= 4.000e-12, raw score of 13.17
GQGEPKQLGRHPGVLRPHVVSAKTGDACIWTQVRNLFPERPKVQWKEGCALQSGNSQESVTEQGSKVSAYSLSSPLTLSKADYEKHKLYACEVTHQGLSSPVTKSFNRGEIIEGEVPPCI

SEQ ID NO: 44916 - protein, 156 aa, Homo sapiens
  misc_feature (1)...(156): Xaa = X or * as defined in Table 2
LPGECHRAGQQGQRLQPQLLGLLMLWVPGSGGEIVMTQTPLSSSVTLGQPASISCRSSQSLVHSDGNTYLTWLQQRPGQPPRPLIYHVFKRFSGVPDRFSGSGAGTDFTLEISGRVEAXDVGVYYCMQGTQFPCSFGQGTKLETKRTVAAPSVFIF

SEQ ID NO: 44917 - protein, 215 aa, Homo sapiens
  DOMAIN (85)..(115): Flocculin repeat proteins domain identified by eMATRIX, accession number PF00624I, p-value=8.826e-11, raw score of 9.10
AWWNSETPAQLLFLLLLWLPYTSGEIVLTQAPGTLSLSPGERATLSCRASQTIGSTYLAWYQQRPGQAPRFLIYGASSRATGIPDSSSSSSSSSSSSSSSSSSSSSSSSSSSSQQYNNWPPGGTFGPGTKVEIKRTVGCTHLFFIFPAHLMSQLKIWELPSACVPVCNNFYPREVQSYSGKVDNVPSNRVTPRESVTEQDSKDSTLQPSAATLDA

SEQ ID NO: 44918 - protein, 145 aa, Homo sapiens
PNRFAWCVLLVAIHLFSPGTSFAGHLAGILVGLMYTQGPLKKIMEACAGGFSFSVGYPGRQYYFNSSGSSGYQDYYPHGRPDHYEEAPRNYDTYTAGLSEEEQLERALQASLWDRGNTRNSPPPYGFHLSPEEMRRQRLHRFDSQ

SEQ ID NO: 44919 - protein, 271 aa, Homo sapiens
  misc_feature (1)...(271): Xaa = X or * as defined in Table 2
SRRVSFPPSAXQAVSDPSRQQLPSLRLRWGPEGRSFPAENLGRGVRWVGGRDPLAALPXSSGPLNAGRLFARPQESGAPRIGNVRDVPRAREDVGTQAGRREREFPRLFGPAAVVGCERHLSPFPRAAGAGGRAGAAGRRSAPPGGLGSCRSCRISAGPHGNDVPTLGGRGWPLXNSGAEKLXEQXGXTGTGSWSLAAILGGVPREPGFRGAGRETLGPRGWLVMLSRAVLLHSVLLCTCHSSWVLLHSDLACHADNNPDIQSCLFPMSKY

SEQ ID NO: 44920 - protein, 125 aa, Homo sapiens
MEEAGLCGLREKADMLCNSESHDILQHQDSNCSATSNKHLLEDEEGRDFITKNRSWVSPVHCTQESRRELPEQEVAPPSGQQALQLQQEQRKSLRKRSFIIDASPKHSFRLQRRSWQLSVRNMLI

SEQ ID NO: 44921 - protein, 107 aa, Homo sapiens
  DOMAIN (12)..(56): XPA protein domain identified by eMATRIX, accession number BL00752B, p-value=3.769e-10, raw score of 19.17
EIKDAALQLPLWRAQDRERAMKERREKRREREKERDREKKRKEKMFCKRSCHTIMEPTPELSCVLPCLAPIVLAPPPLPLLGVTSPLRHEVTSAAKPAEYPHGSSWT

SEQ ID NO: 44922 - protein, 28 aa, Homo sapiens
MIFFNIKTQIAVPQVINIYWKMKKAVTL

SEQ ID NO: 44923 - protein, 190 aa, Homo sapiens
  DOMAIN (12)..(56): XPA protein domain identified by eMATRIX, accession number BL00752B, p-value=3.769e-10, raw score of 19.17
  misc_feature (1)...(190): Xaa = X or * as defined in Table 2
EIKDAALQLPLWRAQDRERAMKERREKRREREKERDREKKRKEKMFCKRSCHTIMEPTPELSCVLPCLAPIVLAPPPLPLPVLPLPYATRXLPQQNRQSTLTEAHGLTRGPITLATNRCMPSTTRDRRRLTPPSTLPNTTNLSWGVREGPNQDPEPSLSPCVPHDPFDYNAESLFSYWLVSVTPMTAHTP

SEQ ID NO: 44924 - protein, 230 aa, Homo sapiens
  misc_feature (1)...(230): Xaa = X or * as defined in Table 2
HPNRQGLRAPATAPGHPGREQALCEAPQGPGQKCGPPRAQEAQGTEPRRASRAAGACRHHWPQVARPGAGAPAGAARLGGVXEPGRAAAPRLPLPSQCCHRXGTSPAHLSASRSSSATCPWRRTAGRSGPSPCMTLKQRQGHPRDGWIRAPSCDVTNRGLSSLLNLGGSAQQLLLASRPLGSGSGALEALEHGKSRAPWEPWLHGTHNPVHGKDPAGSTSHWPRPPAPRT

SEQ ID NO: 44925 - protein, 174 aa, Homo sapiens
  misc_feature (1)...(174): Xaa = X or * as defined in Table 2
PRGSFSSTGRTRNAAGSTSNCSLRSLSARIEERKVSRVCGVPNHRHLRLGALTTTRPSWNGAIPTLAKLPAKRCXRRSGRRSKTWSFPGSTXLGNFAEEMICAASARPAGVPGPALPTPLRAPLPGVPWTSSRGRMCARLSCCHAGRPVPARPGAARARRAAAGERHRPPALRV

SEQ ID NO: 44926 - protein, 112 aa, Homo sapiens
AVFHYILNIWIPLMSFKMSLRVRSGPAGRGSVCLCPAQAPDPYSTLGHSSWKAAAMAGEMAAPAKCHRNHAWSPLHKQNHRFTWLKSFAGPKKRVDFGYFCASEGSGKALRF

SEQ ID NO: 44927 - protein, 363 aa, Homo sapiens
  misc_feature (1)...(363): Xaa = X or * as defined in Table 2
MSNDGRSRNRDRRYDEVPSDLPYQDTTIRTHPTLHDSERAVSADPLPPPPLPLQPPFGPDFYSSDTEEPAIAPDLKPVRRFVPDSWKNFFRGKKKDPEWDKPVSDIRYISDGVECSPPASPARPNHRSPLNSCKDPYGGSEGTFSSRKEADAVFPRDPYGSLDRHTQTVRTYSEKVEEYNLRYSYMKSWAGLLRILGVVELLLGAGVFACVTAYIHKDSEWYNLFGYSQPYGMGGVGGLGSMYGGYYYTGPKTPFVLVVAGLAWITTIIILVLGMSMYYRTILLDSNWWPLTEFGINVALFILYMAAAISLMXMIPTRGGLCYYPLFNTPVNAGSAGXKEDRXLQXSSCLSPXXFISLVLWFA

SEQ ID NO: 44928 - protein, 236 aa, Homo sapiens
  misc_feature (1)...(236): Xaa = X or * as defined in Table 2
SPGLVCGLLIFCKVTVPICAGPYRCPFGGLRHXSARXQPPSGLRENGARPPGGEWLCPCXFPPXPLNSRWKLPPRLVTXGEPWAAGEKFPRLGAGTGPAAGEGLPRARDWEPGRAGPERWAPGRGPAGTPAKTAAVKRSAPLPGSGDYANGERKPPPSPFCQVKSGNLXVLCGXRLSLPAAXKPKKAXRRGRRQSPGKTGYQVQQTRPKNDPKSSGPSPKNRQSLCLQPLWSFLIQ

SEQ ID NO: 44929 - protein, 179 aa, Homo sapiens
  misc_feature (1)...(179): Xaa = X or * as defined in Table 2
MGVRDPLEEAVCALAELQHCAGRFAALFRASRQERLSLLKLCPQLPLPPRALSQGYKPLIGLLAFFQRCTAQRGGIXRGSLATVTLSCGGLCPVXTSQRRCLPVRGKLPTQASVMANAPPRTRLQHLRSTSDCCAGSENFKPVDLSLLGSVGVGSTELDHLAPWLQPAFQGSEWFYLTF

SEQ ID NO: 44930 - protein, 106 aa, Homo sapiens
  misc_feature (1)...(106): Xaa = X or * as defined in Table 2
EVCYYPPSETYFCQFVKLILCPVLFPCWQGVVIQPKLSCMRCLSTLLRGVSQXGYMGVRDPLEEAVCPLAELEHCAGRSAALFRAGRQERLSLLKLRPQLPLSPSA

SEQ ID NO: 44931 - protein, 70 aa, Homo sapiens
SDCCAGSENFKPVVLSLLGSVGVGPTEHDHLAPWLQPPFQGSERFCLTGVPGATGCHTGLVFLRPLSARA

SEQ ID NO: 44932 - protein, 560 aa, Homo sapiens
  DOMAIN (149)..(194): kw TRANSCRIPTASE REVERSE II ORF2 domain identified by eMATRIX, accession number DM01354N, p-value=1.000e-40, raw score of 13.17
MKAEIKMFFETNENKDTTYQNLWDTFKAVCTGKFIALNAHKRKQERSKIDTLTSQLKELEKQEQTHSKASRRQEITKIRAELKEIETQKTLPKINESRSWFFERINKIDRPLARLIKKKREKNQIDTIKNDKGDITTDPTEIQTTIREYYKHLYANKLENLEEMDKFLETYTLQRLSQGEVESLNRPITGSEIVAIINSLPTKKSPGPDGFTAEFYQRIAILPDGSLRILNASKSDEGKYVCRGENVFGSAEIIASLSVKEPTRIELTPKRTELTVGESIVLNCKAIHDASLDVTFYWTLKGQPIDFEEEGGHFESIRAPYEVMLFGENMLPDLDLRPPGPPGIVIVEEITESTATLSWSPAADNHSPISSYNLQARSPFSLGWQTVKTALKRAADLPAQRSSPAKGQTASSSGSLTPMPPDWDTTPSRELSPTPHKGELWLASGHQHRRPKIDKSTKMRKKQHKKAENSKNQNTSSPPKDHNSSPAREQNWTENEYDELTEAGIRSAIKLELRIEKLTRNHTTTWKLKNLLLNDYWVNNEIKAEINKFFEINENKETTY

SEQ ID NO: 44933 - protein, 176 aa, Homo sapiens
  misc_feature (1)...(176): Xaa = X or * as defined in Table 2
MDSEVQADDEVSDENGELIGNWGKGGMGVSDPLEEAVCPLAELERSAGRSAALFRASRQECLSLLKLTLTAAPSPRGTAFRSPFKSPAQRRSIICXQLYSCKTFRSTVAPMPRLCLPQASGKVQXENXSWAIPAXQGTSPMCSLCSGAPHQPGAPLVLPLPPPVNRLRRELQCWLG

SEQ ID NO: 44934 - protein, 45 aa, Homo sapiens
  DOMAIN (6)..(21): Zinc-containing alcohol dehydrogenases proteins domain identified by eMATRIX, accession number BL00059C, p-value=7.429e- 09, raw score of 11.82
MLCISSRHCFCCISQIYIYCVVIVSQLKWVTPSVVPSCTFSGTGH

SEQ ID NO: 44935 - protein, 62 aa, Homo sapiens
PLLEGLSHSGGTGVRDPLEEAVCPLAELEHCAGRSAALFRASRQERLSVLKLCPQLPLPPGA

SEQ ID NO: 44936 - protein, 98 aa, Homo sapiens
  misc_feature (1)...(98): Xaa = X or * as defined in Table 2
MVLSHWHSRCHWGMKKNYLQLARCLPKWLPSFVFETQGPCDVSTQGTLLVYGLQRPWEKHSIXARXHHPSQHGPSQLPLARGGSSPTPCASRMRQHPT

SEQ ID NO: 44937 - protein, 112 aa, Homo sapiens
  misc_feature (1)...(112): Xaa = X or * as defined in Table 2
EDRSAFRPRQPHTLHPLHARSLAPRSPTPPSPPSPDTQLGLSGPTSGPESAPTAPGNPSWRSSRWGSSSPCAASSTXKSPYPXCSPTCAFPSPRLPFCRSAYQPAAGAGRGK

SEQ ID NO: 44938 - protein, 44 aa, Homo sapiens
  misc_feature (1)...(44): Xaa = X or * as defined in Table 2
XHVSLDVNRLPVGSRDCCQPPPLSAAILCPHSESARWPYPPAAX

SEQ ID NO: 44939 - protein, 133 aa, Homo sapiens
  misc_feature (1)...(133): Xaa = X or * as defined in Table 2
GSPAPAAMDEERALYIVRAGEAGAIERVLRDYSDKVKSPGPGRAVSHPRAALRACTSHPSPPPSFRGCALPPPKTFPAWACVFVPPAFSIHASSHPTTPTVAPTPLIPGPAAXPPVLLSSVQVTPPESVDVHL

SEQ ID NO: 44940 - protein, 172 aa, Homo sapiens
  misc_feature (1)...(172): Xaa = X or * as defined in Table 2
ARKGSALLRLYLSNAWCVCVKVLRIFSTASAYITRRDSSLGPVWTFLNFSFGSPGEIPTPFFFFPVFPLPLVAWFCPASFCLPQCPLVPSEPSPPPHSGDAHCSPPKTFPAWACVFVPPAFSIHASSHPTTPTVAPTPLIPGPAAXPPVLLSSVQVTPPESVDVHLCPVPHS

SEQ ID NO: 44941 - protein, 106 aa, Homo sapiens
MEWGTGHRCTSTDSGGVTCTLERRTGGQAAGPGIRGVGATVGDPLDSPCFAGPDDVEGALLIHGRRCGGAAAALRAQAAASSNRRLTAAPDKAQDSVEAWLADRGG

SEQ ID NO: 44942 - protein, 43 aa, Homo sapiens
VNARVRYLGSSRAAAAPPHLRPWMRIAPSTSSGPAKQGLSSGS

SEQ ID NO: 44943 - protein, 137 aa, Homo sapiens
  misc_feature (1)...(137): Xaa = X or * as defined in Table 2
CPEIRPPSXTHGTKSHFPPTASGTHSVLEALPDTQRQPSPRVHQDPSPAIPALLPSPHEHGPQHLLQLPSHRCHPDTAPFNCDAVKACPGHATAALEHPYLSGRQSPPSPTHLPKLPAGRGYTVCALPKGPGERSAV

SEQ ID NO: 44944 - protein, 86 aa, Homo sapiens; identical to SEQ ID NO: 38987
  misc_feature (1)...(86): Xaa = X or * as defined in Table 2

SEQ ID NO: 44945 - protein, 174 aa, Homo sapiens; identical to SEQ ID NO: 38194

SEQ ID NO: 44946 - protein, 528 aa, Homo sapiens; identical to SEQ ID NO: 39318
  DOMAIN (157)..(204): kw TRANSCRIPTASE REVERSE II ORF2 domain identified by eMATRIX, accession number DM01354V, p-value=1.000e-40, raw score of 12.97

SEQ ID NO: 44947 - protein, 1576 aa, Homo sapiens; identical to SEQ ID NO: 38229
  DOMAIN (1385)..(1401): CHYMOTRYPSIN SERINE PROTEASE FAMILY (S1) SIGNATURE domain identified by eMATRIX, accession number PR00722A, p-value=6.087e- 16, raw score of 12.27

SEQ ID NO: 44948 - protein, 522 aa, Homo sapiens; identical to SEQ ID NO: 40431
  DOMAIN (95)..(142): kw TRANSCRIPTASE REVERSE II ORF2 domain identified by eMATRIX, accession number DM01354V, p-value=1.000e-40, raw score of 12.97

SEQ ID NO: 44949 - protein, 474 aa, Homo sapiens
  DOMAIN (46)..(93): kw TRANSCRIPTASE REVERSE II ORF2 domain identified by eMATRIX, accession number DM01354V, p-value=1.000e-40, raw score of 12.97
AQNLLKLISNFSKVSGYKINVQKSQAFLYTNNRQTESQIMSELPFTIASKRIRYLGIQLTRDVKDLFKENYKPLLKEIKEDTNKWKNIPRSWVGRLNIVKMVILPKVIYRFNAIPIKLPMTFFTELEKTTLKFIWNQKRAPIAKSILSQKNKAGGITLPDFKLYYKATVTKTAWHWYQNRDIDQWNRTEPSEIIPHIYNHLIFDTPDKNKKWGKDSLFNKLCWENWLAICRKLKLDPFFTPYTKINSRWIKDLHVRPKTIKTLEENLGNTIQDIGIGKDFMTKTQKAMATNAEIHKWDLIKLKHFCTAKETTIRVNRQPTKWENIFAIYSSDKRLISRIYKELKHIYKRKTNNPINKWAKDMNRHFSKEDIYAANRHMKKCSSSLAIREMQIKTTMRYHLTPVRMAIIKKSGNNRCWRGCGEIGTLQTITRTKIQTLHVLNHRWELNNENTWTQEGEHHTLGPVVGWGRGEGQH

SEQ ID NO: 44950 - protein, 192 aa, Homo sapiens
MGKDFMSKTPKAMATKAKIDKWDLIKLKSFCRAKETTIRVNRPPTEWEKIFAIYPSDKGLISRIYKELKLIYKKKTNNPIKKWAKDMNRHFSKEYIYAAKRDMKKCSSSLAIREMQIKTTMRYHLTPVRMAIIKKSGNNRAHEQSGHGARDGGYTWAEQHGLPLTKADLSTATAECLEQRPTLSPHMALFLR

SEQ ID NO: 44951 - protein, 1108 aa, Homo sapiens; identical to SEQ ID NO: 40447
  DOMAIN (272)..(317): kw TRANSCRIPTASE REVERSE II ORF2 domain identified by eMATRIX, accession number DM01354N, p-value=1.000e-40, raw score of 13.17

SEQ ID NO: 44952 - protein, 731 aa, Homo sapiens
  DOMAIN (13)..(68): kw TRANSCRIPTASE REVERSE II ORF2 domain identified by eMATRIX, accession number DM01354Q, p-value=1.000e-40, raw score of 9.23
MQNKGIDAKILNKILAKQIQQHIKKLMHHDQVGFIPGMQGWFNIRKSINVIQHINRAKDKNHMIISTDAEKAFDKIQQPFMLKTLNKLGIDGMYFKIIRAVYDKPTANIILNGQKLEAFPLKTGTRQGCPLSPLLFNIVLEVLARAIRQEKEIKGIQLGKEEVKLSLFADDMIVCLENPIVSAQNLLKLISNFSKVSGYKINVQKSQAFLYTNNRQTESQIMSELPFTIASKRIKYLGIQLTRDVNDLFKENYKPLLKEIKEDTNKWKNIPCSWVGRINIMKMAIMPKVIYRFNAIPIKLPMTFFTELEKTTLKFIWNQKRARITKSILSQKNKAGGITLPDFKLYYKATVTKTAWYWYQNRDIDQWNRTEPSEITPHIYNYLIFDKPEKNKQWGKDSLFNKWCWENWLAIWRKLKLDPFLTPYAKINSRWIKDLNVRPKTIKTLEENLGNTIQDIGMGKDFMSKTPKAMATKDKIDKWDLIKLKSFCTAKETTIRVNRQPTKWEKIFATYSSDKGLISRIYNELKQIYKKKTNNPIKKWAKDMNRHFSKEDIYAAKKHMKKCSSSLAIREMQIKTTMRYHLTPVRMAIIKKTGNNRCWRGCGEIGTLLHCWWDCKLVQPLWKSVWRFLRDLELEIPFDPAIPLLGIYPNDYKSCCYKDTCTPGHPRKQPTLGSIPQKSQDHCAEVLKDILFLAGTGGAQALLASFSLSQDVEFPAPSAVILENYKQKTEM

SEQ ID NO: 44953 - protein, 1054 aa, Homo sapiens
  DOMAIN (969)..(1018): kw TRANSCRIPTASE REVERSE II ORF2 domain identified by eMATRIX, accession number DM01354Z, p-value=1.000e-40, raw score of 9.06
MNKVILKSIWKCHGPRRAKINLKKNKNKSFLKCGLWRLALESLEELKDIETGIGPEILTLFLTLEMRSVNPWWFHDLHNHTTCFSVTDCLLSAQQFYGPGPGCSVPVPANQSFWTREEYSNLKLPRASHKAVVNGNIMWVVGGYMFNHSDYNMVLATMYVFGGFNSLLLSDILVFTSEQCDAHRSEAACLAAGPGIRCLLTMTDVTSTQIVTAAQPTPMTATGAMTIVSPGTTAAQKARYENCPKDNPMYYCNKKTSCRSCALDQNCQWEPRNQECIALPENICGIGWHLVGNSCLKITTAKENYDNAKLFCRNHNALLASLTTQKKVEFVLKQLRIMQSSQSMARVTVCSQSSHESLVDTGSLCFGDRIWLCAMWRAELVSSWNTSTLGLKAAACINPLNGSVCGRPANHSAKQCRTPCALRTACGDCTSGSSECMWCSNMKQCVDSNAYVASFPFGQCMEWYTMSTCPPENCSGYCTCSHCLEQPGCGWCTDPSNTGKGKCIEGSYKGPVKMPSQAPTGNFYPQPLLNSSMCLEDSRYNWSFIHCPENKIPRNPTYKGREGPLQGELQTTAQRNKRGHKQMEEHSMLMDRRINMVKKVIYRFNTIPIKLPMTFFTELEKTTLKFIWNQKRAHIAKSILSQKNKAGGITLPDFRLYYKATVTKTAWYWYQNRDLDQRNRTEPSEIIPHIYNYLIFDKPDKNKKWGKDFLFNKWCWENWLAICRKLKLDPFLTLYTKINSRWIKDLNVRPKTIKTLEENLGNTIQDTGMGKDFMTKTPKAMVTKAKIDKWDLIKLKSFCTAKETTIRVNRKPTEWEKIFATYSSDKGLISRIYKELKQIYKKKTNNPIKKWAKDMNRHFSKEDIYAANRHVKKCSSSLAIREMQIKTTMRYHLTPVRMAIIKKSGNNGCWRGCGEIGTLLYCWWDCKLAQPLWKSVWRFLRDLELEIPFDPAIPLLGIYPKEYKSCCYKDTCTRMFIEALLTIAKTWNQPKCPTMIDWIKKMWHIYTVEYYAAIKNDEFMSFVGTWMKLETIILSKLSQGQKTKHSMFSLIGGN

SEQ ID NO: 44954 - protein, 578 aa, Homo sapiens
  DOMAIN (10)..(65): kw TRANSCRIPTASE REVERSE II ORF2 domain identified by eMATRIX, accession number DM01354Q, p-value=1.000e-40, raw score of 9.23
  misc_feature (1)...(578): Xaa = X or * as defined in Table 2
MNIDAKILNKILANRIQQHIKKLIHHDQVGFIPGMQGWFNICKSINVIQHINRTKDKNHMIISIDAEKAFDKIQQPFMLKTLNKLAQNLLKLISNFSKVSGYKINVQKSQAFLYTNNRQTESQIMSELPFTTALKRIKYLGIQLTRDVKDLFKENYKPLLKEIKEDTNKWKNIPCSWVGRINILKMATLPKVIYRFNAIPIKLLMTFFTELEKTTLKFIWNQKRARIAKSILNQKNKAGGITLPDFKLYYKATVTKTAWYWHQNRDRDQWNRTEPSETMLHIYNYLIFDKPDKNKQWGTDSLFNKWCWENWLAIWRKLKLDPFLTPYTKINSRWIKDLHIRAKTIKTLEENLGNTIQYIGMGKDFMSETPKAMATKAKIDEWDLIKLKSFCTAKETTIRVNRQPTKWEKIFATYSSDKGLISRIYNELKQIYKKKTNNPIKKWAKDMNRHFSKEDIYAAKKHMKKCSSSLAIREMQIKTTMRYHLTPVRMAIIKKSGNNRCWRGCGEIGTLLHCWWDCKLVQPLWKSVWRFLRDLELEIPFDPAIPLLGIYPKDYKSCCYKDTCTRLKCGIRMVNMKX

SEQ ID NO: 44955 - protein, 357 aa, Homo sapiens
  DOMAIN (62)..(102): kw TRANSCRIPTASE REVERSE II ORF2 domain identified by eMATRIX, accession number DM01354Y, p-value=3.864e-37, raw score of 10.69
MAILPKVVYRFNAIPIKLPMTSFTELEKPTLKFMWKHKRARIAKTILSQKNKAGGITLPDFKQYYKATATKTAWYWYQNRDIDQWNRTEPSKIIPHIYNHLIFDKPDKNKKWGKDSLFNKWCWENWLAICRKLKLDPLLTPYTKINSRWIKDLHVRPKTIKNLEENLGNTIQATGMGKDFMTKTPKAIAAKAKIDKWDLIKLKGFCTAKETTIRVNRQPTKWEKIFAIYSSDKGLISRIYKELKQIYKKKSNNPIKKWVKDNRHFSKEDIYAANRHMKKCSSSLAIREMQIKTTMRYHLTPVRMAIIKKSGNNRGTCSLVVVKKLVKGHRLSSSVKRLPLPEGVDGLELLKATDSGG

SEQ ID NO: 44956 - protein, 1111 aa, Homo sapiens; identical to SEQ ID NO: 36440
  DOMAIN (154)..(195): kw TRANSCRIPTASE REVERSE II ORF2 domain identified by eMATRIX, accession number DM01354I, p-value=1.000e-40, raw score of 15.55

SEQ ID NO: 44957 - protein, 612 aa, Homo sapiens; identical to SEQ ID NO: 40592
  DOMAIN (57)..(100): kw TRANSCRIPTASE REVERSE II ORF2 domain identified by eMATRIX, accession number DM01354T, p-value=1.000e-40, raw score of 9.48

SEQ ID NO: 44958 - protein, 784 aa, Homo sapiens
  DOMAIN (283)..(328): kw TRANSCRIPTASE REVERSE II ORF2 domain identified by eMATRIX, accession number DM01354N, p-value=1.000e-40, raw score of 13.17
  misc_feature (1)...(784): Xaa = X or * as defined in Table 2
MGDFNTLLSALDRSTRQKVNKDIQELNSALHQADLIDIYRTLHPKSTEYTFFSAPHRTYSKIDHLVGSKALLRKCKRTEIITNCLSDHSAIKLELRIKKLTQNHSTTWQLNNLLLNDYWVHNEMKAEIKMFFETNENKDTTYQNLWYVKDTRISGMLWYVKAVCRGKFIALNAHKRKQERSKIDTLTSQLKELEKQEQTHSKTSRRQEITKIRAELKEIETQKTLQKINECRSWFFEKINKIDRPLARLIKKKREKNQIDAIKNDKGDIITDPTEIQTTIREYYKHLYGNKLENLEEMDKFLDTYTLPRLNQEEVESLNRPITGSEIEAIINSLPTKKSPGPDGFTAEFYQRYKEELRIKYLGIQLTRDVKDLFKENYKPLLNEIKEDTNKWKNIPCSWVGRINIMKMAILPKVIYRFNAIPIKLPMTFFTELEKTTLKFIWNQKRARIAKSILSQKNKAGGITLPDFKLYYKATVTKTAWYWYQNRDTDQWNRTEPSEIMLHIYNHLIFDKPDKNKQWGKDSLFNKWCWENWLAICRKLKLDPFLIPYTKINSRWIKDLNVRPKTIKSLEEDLGNTIQDIGMGKDFMSKTPKAMATKAKIDKWDLIKLKSFCTAKETTIRVNRQPTEWEKFFAIYSSDKGLISRRYNELKQIYKKKTNSPIKKWTKDMNRHFSKEDIYAAKRHMKKCSSSLAIREMQIKTTMRYHLTPVRMAIIKKSGNNRCWRGCGEIGTLLHCWVDCSIIVKVPSSLQAHLQLSGKEVDVNSEVPCSGNGXSSXRXCCNSD

SEQ ID NO: 44959 - protein, 1048 aa, Homo sapiens
  DOMAIN (110)..(151): kw TRANSCRIPTASE REVERSE II ORF2 domain identified by eMATRIX, accession number DM01354I, p-value=1.000e-40, raw score of 15.55
MGDFNTPLSTLDRSSRQKVNKDTQELNSTLHHADLIDIYRTLHPKSTEYTFFSAPHHTYSKIDHVVGSKALLSKCKRTEIITNCLSDHSAIKPELRIKKLTQNRSTTWKLNNLLLNDYWVHNKMKAEIKMFFETNENKDTTYQNLWDTFKAVSRGKFIALNAHKRKQKRCKIDTLASQLKEVEKQEQTHSKASRRQEITKIRAELKEIETQKTLQKINESRSWFLERINKIDRPLARLIKKKREKNQIDVIKNDKGDITTDPTEIQTTIREYYKHLYANKLENLEELDKFLDTHTLQRLNQEEVESLNRPITGSEIVAIINSLPTKKSPGPDGSTAEFYQRYKEELLPFLLKLFQSIEKEGILPNSFYEASIILIPKPGRDTAKKENFRPISLMNIDAKILNKILANQIQQHIKKLIYTMIKWASSLGCKAVLEVLARAIRQEKEIKGIQLGKEEVKLSLFADDMIVYLENPIVSAQNLLKLISNFSKVSGYKINVQKSQAFLYTNNRQTESQIMSEIPFTIVSKRIKYLGIQLTRDMKDLFKENYKPLLNEIKEDTNKWKNIPCSWLGRINMVKMAILPKVIYRFNAILIKLAMTFFTESEKTTLKFIWNQKRACIAKSILSQKNKVIGITLPDFKLYYKAIVNKTAWYWYQNRDIDQWNRTEPSEITPHIYNYLIFDKPEKNKQWGKDSLFNKWCWENWLAICRKLKLDPFLTPYTKINSRWIKDFHVRPKTIKTLEENLGITIQDIGMDKDFMSKTPKAMATKAKIDKWDLIKLKSFCRAKETTIRVNRPPTEWEKIFVTYSSDKGLISRIYNELKQIYKKKTNNPIKKWAKDMNRHFSKEYIYAAKRDMKKCSSSLAIREMQIKTTMRYHLTPVRMVIIKKSGNNRCWRGCGEIGTLLHCWWDCKLVHPLWKSVWRFLRDLELEIPFDPAILLLGIYPKDYKSCCYKDTCTHEKAEIQKSKGIRDYGEIGTRTEDMDSQFRPLSVVRAQIIPFEFPWEGIPLGGPFPRHSCSYPVGLALLYHSSSAAGPVRGHLSLQWNSRMTS

SEQ ID NO: 44960 - protein, 915 aa, Homo sapiens; identical to SEQ ID NO: 32665
  DOMAIN (272)..(317): kw TRANSCRIPTASE REVERSE II ORF2 domain identified by eMATRIX, accession number DM01354N, p-value=1.000e-40, raw score of 13.17

SEQ ID NO: 44961 - protein, 914 aa, Homo sapiens
  DOMAIN (402)..(449): kw TRANSCRIPTASE REVERSE II ORF2 domain identified by eMATRIX, accession number DM01354V, p-value=1.000e-40, raw score of 12.97
MKKQHALTLHTKQEHQGVFVCTHMHVSEHMSVYWRLEPAVPGSQEPVMHIFFQLHVQQLHVGSLKLTVMRVFMGLTFFFRKYLEGKAESKMLECREKRSEQPTHWQARLQEESPQDLGEVDPHLQAQEQDRCYPCLMGFSDGILKNGLLLCSNVLQKKKKNKQSCWYFRLDEEGKWALYAGLPEVFKDNRKGENSWMLISRWYYAYNRCSVDAVGGRCNNKSRTSSLAFPRIVMNGTAGAVSAKINWKQQLDVGISGTVTLHDASLATSGTVTLHDASLATSGTVTLHDASLAISGTITLHDTAHPVMVELLQSIKKATNFSASIEFAGNVNESWEVKLSLFADDMIVYLENPIVSAQNLLKLISNFSKVSGYKINVQKSQAFLYTNSRQTESQIMSELPFTIASKRIKYLGIHLTRDVKDLFKENYKPLLNEIKEDTNKWKNIPCSWVGRINIVKMAILPKVIYRFNAIPIKLPMTFFTELEKTTLKFIWNQKRTRIAKSILSQKNKAGGITLPDFKLYYKATVTKTAWYWYQNRDIDQWNRTEPSEIMPHIYNYLIFDKPEKNKQWGKDSLFNKWCWENSLAICRKLKLDPFLTPYTKINSRWIKDLNVRPKTIKTLEENLSITIQDIGTGKDFMSKTPIAMATKAKIDKWDLIKLNSFCTAKETTIRVNRQPTKWENIFATYSSDKGLISRIYNELKQIYKKKTNNPIKEWAKDMNRHFSKEDIYAAKKHMKKCSPSLAIREMQIKTTMRYHLTPVRMAIIKKSGNNRCLRGCGEIGTLLHCWWDCKLVRPLWKSVWRFLRDLELEIPFDPAIPLLDIHPKDYKSCCYKDTCTLGTPCPPLALTWEVVLRRICRAMQWPLASVLGALKMWVVRRESNRESLGEMNEYDPSSFRHHPAHQPSHLPNCPYEVF

SEQ ID NO: 44962 - protein, 1088 aa, Homo sapiens
  DOMAIN (199)..(224): 7 kw REVERSE TRANSCRIPTASE RNA POLYMERASE domain identified by eMATRIX, accession number DM00895E, p-value=9.333e-11, raw score of 15.72
MGKKQSGKTGNSKKQSASPPPKEHSSSPAMEQSWMENDFDEINKIDRLLARLIKKKGEKNQIDTTKNDIGDITTNPTEIQTTIREYYKHLYTNKLENLEEMDKFLDTYTLPTINQEEIESLNRTITGSEILAIINSLPTKKSPGPDGFTAEFYQRYKEELVPFLLKLFQSIEKEGILLNSFYEASIILIPKPGRDTTKKENFRPISLMNIDAKIFNKILANRIQQHIKKLIHHDQVGFIPGMQGWFNIRKSINVIQHVNRTKDKNRMIISIDAEKAFDKIQQPFMLKTLNKLGIDGTYLKIIRAIYDKHTANIILNGQKLEAFPLKTGTRQGCPLSPLLFNIVLEVLARAIRQEKEIKGIQLGKEEVKLSLFADDMIIYLENPIVSAQNLLKLISNFSKVSRYKISVQIPQAFLYTNNRQTESQIMSELPFTIASKRIKYLGIQLTRDVKDLFKENYKPLLNEIKEDTKKWKNIPCSWAGRINIVKMAILPKNWKKTTLKFIWNQKRARIAKSILSQKNKAGGITLPDFKLYYKATATKTAWYWYQNRDLDQWNRTEPSEITPHIYNYLIFDKPDKNKQWGKDSLFNKWCCENWLAICRKLKLDPFLTPYTKINSRWIKDLNIRPKTIKTLEENLGITIQDIGMGKDFMSKTPKAMATKAKIDKWDLIKQESFCTAKETTIRVNRQPTKWEKIFATYSSDKGLISRIYSELKQIYKKKTNNPIKKWAKDMNRHFSKEDIYAAKKHMKKCPSSLAIREMQIKTTMRYHLTPVRMAIIKKSGNNRCWRGCGEIGTLLHCWWDCKLVQPLWKSVWRFLRDLELEIPFDPAIPLLGIHPKDYKSCCYNDTCTPVISGLKVLKKVAEPLSPGHGLMVSLAVLSPFLLPGATESKTAIGMLEFLVLEVGPSAMKICMKQGGICAGVVPQIQGILDLKVLEISLQLASASLFYHNALLNYCFSNSVSGMELRDTGSHVVSAKSNTTKTHTQGEGPRESWVWQGQSSSFWDIVLQFGFQEALSAEVGNSTFILIFPPIPPIPLTSGSQCDHWSHTITIPCELDRNVNSLALSQTHGNRNSELLPSKSGIQLSTLHN

SEQ ID NO: 44963 - protein, 994 aa, Homo sapiens; identical to SEQ ID NO: 37827
  DOMAIN (87)..(133): kw TRANSCRIPTASE REVERSE II ORF2 domain identified by eMATRIX, accession number DM01354O, p-value=1.000e-40, raw score of 8.73

SEQ ID NO: 44964 - protein, 1034 aa, Homo sapiens; identical to SEQ ID NO: 44896
  DOMAIN (223)..(266): kw TRANSCRIPTASE REVERSE II ORF2 domain identified by eMATRIX, accession number DM01354T, p-value=1.000e-40, raw score of 9.48

SEQ ID NO: 44965 - protein, 481 aa, Homo sapiens
  DOMAIN (127)..(167): kw TRANSCRIPTASE REVERSE II ORF2 domain identified by eMATRIX, accession number DM01354Y, p-value=6.860e-38, raw score of 10.69
MASKQEFEKFVLLLLPKPFIFMESSEFSTSKDGWRSKRKAMGAIAERKSKNEQNGDGKKTLEPFPAESNGEEETRVLNYFPSHLYRVRTELEKTTIKFIWNQKRAHIAKSILSQKNKAGGITLPDFKLYYKATVTKTAWYLYQNRDIDQWNRTEPSEIMLHMYNYLIFDKPDKNKQWGKDSLFNKWCRENWLAIYRKLKLDPFLTPYTKINLMWIKDLHVRPKTIETLEENLGNTIQDIGMGKDFMSKTPKAMATKAKIDKWDLIKLKSFCTAEETTIRVNRQPTEWEKIFAIYSSDKGLISRIYNELQQIYKKKTNNPIKKWAKDMNRHFSKEDIYAAKRHMKKCSSSLAIREMQIKTTMRYHLTPVRMAIIKKSGNNRCWRGCGEIGTLLYGWWDCKLVQPLWKTVWRFLKDLELEIAFDPAIPLLGIYPKDYKSCCYQDTCTPEEPQPTAITNTGPWGVLPGFHQCSFKAQVLFSQLM

SEQ ID NO: 44966 - protein, 1241 aa, Homo sapiens
  DOMAIN (361)..(404): kw TRANSCRIPTASE REVERSE II ORF2 domain identified by eMATRIX, accession number DM01354T, p-value=1.000e-40, raw score of 9.48
MAPASAPGEASGSLQLWRKVKEEQSCLLSKVAGPFRMGERRGNQSRHSDIHQPVLPSGGIAVLKAVVPHSHGAHALDPTPHLSSLRNIAIRGSTVGKHLGEISGCDPLLKASPLAIAKQKRLWLPSKADFPENSPGRPRGRNARPPGGRGGCGCIFSRLKRSCLLTLKRAVDFPTQHFSSAKGQAASSNGSLTPMPPDWVNRHLIQESSSWHLEGVPLGRSFQRKEQAAIFAVLQPPLVIPWQTGSGVDLLQTPPDLQKRVLTVRRKTNNQKAIASTSTKRTPTQKPHPKVTNIKDQRTNDKNQMIISIDAEKPFNKIQLPFMLKTLNKLGIDGTYFKIIRAIYDKPTANIILNGQKLEAFPLKTGTRQGCPLSPLLFNIVLEVLARAIRQEKEIKGIQLGKEEVKLSLFADDMTVYLENPIVSAQNLLKLISNFSKVSGYKINVKKSQAFLYTSNRQTESQIMSELPFTIASKRIKYLGIQLTRDVKDLFKENYKPLLKEIKEDTNKWKNIPCSWVGRINIVKMAILPKVIYRFNAIPIKLPMTFFTELEKTTLKFIWNQKRACIAKSTLSQKNKAGGITLPDFKLYYKATVTKTAWYWYQNRDIDQWNRTEPSEITPHTYNYLIFDKPEKNKQWGKDSLFNKWCWENWLAICRKLKLDPFLTPYTKINSRWIKDLNVRPKTIKTLEENLGITIQDIGMGKDFMSKTPKAMATKDKIDKWDLIKLKSFCTAKETTIRANRQPTTWEKIFATYSSDKGLISRIYNELKQIYKKKTNNPIKKWAKDMNRHFSKEDIYAAKKHMKKCSSSLAIREMQIKTTMRYHLTPVRMAIIKKSGNNRCWRGCGEIGTLLHCWWDCKLVQPLWKSVWRFLRDLELEIPFDPAIPLLGIYPNDYKSCCYKDTCTRKIRTNGRNCASKKGNINKEARSLFNHWPLQRPRRVYSLHVLCGDTAFRHGLRPAHHHPSLDCLSSTHHGEQAFLREGHLQDKMGKEEEHHSCLVSPAWFIIASGLQPAASGNRCPTEGRRVKILCIIRGIQEKHLPGGKALATPEEAAAGKEAAREQFLSGQQSEILSQKKEEEEKKKKKKKKKKKKEEEEEEEEEEEEEEERRGGGKERVRKEGRKERMNEGRQAGREGGERKREERRRRKEEEEGRGGGGRGEEEEKEEDMLRELRKELPLGPLQLGKDGGMGCALGELCSGLLHLGEDGRVGCALGGHSIEHHADGAPPHDPQHQSCALMACR

SEQ ID NO: 44967 - protein, 613 aa, Homo sapiens
  DOMAIN (122)..(169): kw TRANSCRIPTASE REVERSE II ORF2 domain identified by eMATRIX, accession number DM01354V, p-value=1.000e-40, raw score of 12.97
TNDKNHMITSVDGEKAFDKIQQPFMLKTLNKLVLEVLARAIRQEKGIKGIQLGKEEVKLSLFADDMIVYLENPIVSAQNLLKLISNFNKVSGYKINVQKSQAFVYTNNRQTESQIMSELPFTIASKRIKYLGIQLTRDVKDFFKENYKPLLNEIKEDTNKWKKIPCSWVGRINIVKMAILPKVIYRFNAIPIKLPMTFFTKLEKTTLKFIWNQKRAHIAKTILSQKNKAGSIALPDFKLYWKATVTKTAWYWYQNRDIDQWNRIEPSEIIPHIYNHLIFDKPDKNKKWGKDSLFNKWCWENWLAICRKLKLDPFLTPYTKINSRWIKDLNVRPKTIKTLEENLGNTIQAMGMGKDFMTETPKAMATKAKIDKWDLIKLKSFCTAKETTIRVNRQPTEWEKIFTIYPSDKGLISRIYNELKQINKKKSNNPINKWAKDMNRRFSKEDIYAANRHMKKCSSSLAIREMQIKTTMRYHLTPVRMAIIKKSGNNRCWRACGEIGTVGYKNDRQETQRTRKLHNILEDKPYGEINQIFLQVGQRKNGYARPQKSCLPCNIFQYVFQKKMKEKTKKEKKWNLGNTRIKPEKGKENMGGTVLPPSSPIIWVEYEPPVSSP

SEQ ID NO: 44968 - protein, 57 aa, Homo sapiens
  misc_feature (1)...(57): Xaa = X or * as defined in Table 2
DLLTTIRMPTDVKKCSSSLAIREMQIKTTMXYHLTPVRMPIIKKSGNNRCWRGCGEI

SEQ ID NO: 44969 - protein, 1196 aa, Homo sapiens
  DOMAIN (194)..(235): kw TRANSCRIPTASE REVERSE II ORF2 domain identified by eMATRIX, accession number DM01354I, p-value=1.000e-40, raw score of 15.55
MEEDLPSKWKTKKGRGCNPSLDKTDFKPTKIKRDKEGHYIMVKGSIQQEELTILNIYAPNTGAPRFIKQVLSDLQRDLDSHTLIMGDFNTPLSTLDRLMRQKVNKDTQELNSALHQVDLIDIYRTLHPKSTEYTFFSAPHHTYSKIDHILGSKALLSKCKRTEIITNYLSDHSAIKLELRIKNLTQSRSTTWKLNNLLLNDYWVHNEMKAEIKMFFETNENKDTTYQNLWDAFKAVCRGKFIALNAYKRKQERSKIDTLTSQLKELEKQEQTRSKASRRQEITKIRAELKEIETQKTLQKINESRSWFFERINKIDRPLARLIKKKREKNQIDTIKNDKGDITTDPTEIQTTIREYYKHLYANKLENLEEMDTFLDTYTLPRLNQEEVESLNRPITGSEIVAIINSLPTKKSPGPDGFTAEFYQRYKEELHINRAKDKNHMIISIDAEKAFDKIQQPFMLKTLNKLGIDGTYFKIIRAIYDKPTANIILNGQKLEAFPLKTGTRQGCPLSPLLFNIVLEVLARAIRQEKEIKGIQLGKEEVKLSLFADDMIVYLENPIVSAQNLLKLISNFSKVSGYKINVQKSQAFLYNNNRQTESQIMSELPFTIASKRIKYLGIQLTRDVKDLFKENYKPLLKEIKEDTNKWKNIPCSWVGRINIVKMAILPKVIYRFNAIPIKLPMTFFTELEKTTLKFIWNQKRARIAKSILSQKNKAGGITLPDFKLYYKATVTKTAWYWYQNRDIDQWNRTEPSEIMPHIYNYLIFDKPEKNKQWGKDSLFNKWCWENWLAICRKLKLDPFLTPYTKINSRWIKDLNIRPKTIKTLEENLGITIQDIGVGKDFMSKTPKAMATKAKIDKWDLIKLKSFCTAKETTIRVNRQPTTWEKIFATYSSDKGLISRIYNELKQIYKKKTNNPIKKWAKDMSRHFSKEDIYAAKKHMKKCSSSLAIREMQIKTTMRYHLTPVRTAIIKKSGNNRCWRGCGEIGTLLHCWWDRKLVQPLWKSVWRFLRDLELEIPFDPAIPLLGIYPKDYKSCCYKDTCTHLSGSSDAPGIWELLVGGASDCTHLLDVKHDVCILGSLCDFTLAAILQAEQNSKALILRGWLRWTSGSVQRWPKLLRAMVLSGVCTLLLWAEDAPRSQHSTVHAVKLRLERQWKVSAEAESKRPRIVKMSRGIQHSSRRIMQQENPMDPNQFSNFF

SEQ ID NO: 44970 - protein, 1856 aa, Homo sapiens
  DOMAIN (149)..(194): kw TRANSCRIPTASE REVERSE II ORF2 domain identified by eMATRIX, accession number DM01354N, p-value=1.000e-40, raw score of 13.17
MKAEIKMFFETNENKDTAYQNLWDAFKAVCRGKCIALNAHKRKQERSKIDTLTSQLKVLEKQEQTHSKASRRQEITKIRAELKEIETQKTLQKINESRSCFFESINKIDRPLARLIKKKREKNQIDTIKNDKGDITTDPTDIQTTIREYYKHLYANKLENLEEMDKFLDTYTLPRLNQEEVESLNRPITGAEIVAIINSLPTKKSPGPDGFTAEFYQRYKEELVPFLLKLFQSIEKEGILPNSFYEASIILIPKPGRDTTKKENFRPISLMNIDAKILNKILANRIQQHIKKLIHHDQVGFISGMQGWFNIRKSINVIQHINRAKDKNHMIISIDAEKAFDKIQQPFMLKTLNKLVLEVLARAIRQEKEIKGIQLGKEEVKLSLFADDMIVYLEKPIVSAQNLLKLISNFSIVSGYKINVQKSQAFLYTNNRQTESQIMSELPFTIASKRIKYLGIQLTRDVKDLFKENYKPLLKEIKEDTNKWKNIPCSWVGRINVMKMAILPKVIYRFNAIPIKLPMTFFTELEKTTLKFIWNQKRARIAKSILSQKNKAGGITLPDFKLYYKSTVTKTAWYWYQNRDIDQWNRTEPSEITPHTYNYLIFDKPEKNKQWGKDSLFNKWCWENWLAICRKLKLDPFLTPYRKINSRWIKDLNVRPKTIKTLEENLGITIQDIGVGKDFMSKTPKAMATKAKIDKWDLIKLKSFCTAKETTIRVNRQPTKWENIFATYSSDKGLISRIYNELKQIYKKKTNNPIKKWVKDMNRHFSKEDIYAAKKYMKKCSSSLAIREMQIKTTMRYHLTPVRMAIIKKSGNNRCWRGCGEIGTLLHCWWDCKLVQPLWKSVWRFLRDLELEIPFDPAIPLLGIYLKDYKSCCYKDTCTRSHPGYHIAFSHQVFLGFANIFLILDDLESSEYWSGLCMLCDEFVATVQCLGEKTYAQCGLAADGAHQNALNSNPSPHEAIISKAFPTDGVGPAHGGVGPVAWMIWFVGEPERWQESQTGSPTLRDGLADRPSLKGSSQQPQAEGEKKEAAQTPVEIALIWPDLNSGANLWQSCECQAQGLRSCLWPHSQGRHASDGRTQPQPTPAVEPTLEVKGSLRAGTYCMVDPEQPVLQGRRECSTWLLESKSFTCWLFDRDFLSAYSRETEPIEGVCVDRKREREREREIVLKELADAVIAAGKSNICRVPLLGPPAGPSHSIVNIPSGSYLGKENLVGKCALNVSVNVNVQFIADVVDGTEAKGPGGEWKRTSDKNHDFSIDAKKAFGKIQQRFMLKALNKLGIDGTYLKIIRAIYDKPTANIIPNGQKLEAFPLKTGTTQGCPFSPLLFNIVLEVLARVIRQEKEIKGTQLGKEEVTLSLFADDMIVYLQNPIVSAQNLLKLIGNFSKVSGYKINVQKSQAFLYTNNRQTESQIMSELPFTIASKRIKYLGIQLTRDVKDLFKENYKPLLKEIKEDTNKWKNIPCSWVGRINIVKMAILPKVIYRFNAIPIKLPMTFFTELEKTTLKFKWNQKRACIAKSILSQKNKAGGIMLPDFKLYYKATVIKTAWYWYQNRDIDQWNRTEPSEIMPHIYNYLIFDKPDQNKQWGKDSLFNKWYWENCLAICRKLKLDPFLTPYTKINSRWIKDLNVRLKTIKALEENLGNTIQDIGMGKDFMSKTPKAMATKDKIDKWDLIKPKSFCTAKETTIRVNRQPTKWEKIFATYSSDKGLISRNYNELKQIYKKKTIGPIKKWAEDMNRHFSKEDTYAAKKHMKKCSSSLAIREMQIKTTMRYHLTPVRMVIIKKSGNNRCWRGCGETGTLSHCWWDCKLINHCGIFERLRTEDWWGLINDTSKVLATTEEKGVPKRIILKFDVCAVINS

SEQ ID NO: 44971 - protein, 1330 aa, Homo sapiens
  DOMAIN (173)..(219): kw TRANSCRIPTASE REVERSE II ORF2 domain identified by eMATRIX, accession number DM01354O, p-value=1.000e-40, raw score of 8.73
MNEMKREEKFREKRIKRNEQSLQEIWDYVKRPNLCLIGVPESDGENGTKLENTLQDIIQENFPNLARQADIQIQEIQRTPQRYSSRRATPRHIIVRVTKVEMKEEMLRAAREKEIQTTIREYYKHLYANKLESLEEMDKFLNTYTFPRLNHVEVESLNRPITGSEIEAIINSLPTKKSPGPDGFTAEFYQRYKEEQVPFILKLFQSIEKEGILPNSFYEASIILIPKPGRDTTKKENFRPISLMNIDAKILNKILANRIQEHIKKLIHHDQVGFIPGMQSWFNIQKSINVIQHINRTKDKNRMIISIDAEKAFDKIQQPFMLKTLNKLGIDGTYLKIVRAIYDKPTANIILNGQKLEAFPLKTGTRQGCPLSPLLFNIVLEVLARAIRQEKEIKGIQLGKEEVKLSLFADDMTLYLENPIVSAQNLLKLISNFSNISGYKINVQKSQAFLYTNNRQTERQIMSEFPFTIASKGIKYLGIQLTRYVKDLFKKNYKPLLNEIKEDTNKWSNIPCSWVGRINIVKMAILPKVIYRFNAIPIKLPMTFFTELEKTTLKFIWNQKRARITKSILSQKNKAGGITLPDFKLYYKATVTKTAWYWYQNRDIDQWNRTETSEIMPRIYNYLIFDKPEKNKPWGKDSLFNKWCWENWLAICRKLKLDPFLTRYTKINSRWIKHLHVRPKTIKTLEENLGITIQGIGMGKDFMSKTPKAMETKAKIDKWDLIKLKSFCTAKETTIRVNRQPTKWEKIFASYSSDKGLISRIYNELRQIYKKKSNNPIKKWVKDMNRHFSKEDIYAAKKHMKKCSSSLAIREMQIKTTMRYHLTPVRMAIIKKSGNDRCWRGCGEIGTLLHCWWDCKLVQPLWKSVWRFLRDLELEIPFDPAIPLLGIYPNDYKSCCYKDTCTLSLPEIRNCPTKSVPVPFSVDETQYHVEDTSPVSWQVKVLGKHIHQGSSYEDVWLPQRMQGKLTNRKDIHTKNPSVHHHHQRPKVDKTTKMGKKQNRKTGNSKKQSASPPPKERSSSPAMQQSWTENDFDELREEGFRRSNYSELREDIQTKGKEVENFEKNLEECITRITNTEKCLKELMELKTKARELREECRSLRSQCDQLEERVSAMEDEMNEMKQEGKFREKRIKRNEQSLQEIWDYVKRPNLRLIGVPESDAENGTKLENTLQDIIQETFPNLARQANVQIQEIQRTPQRYSSRRATPRHIIVRFTKVEMKEKMLRAAREKGRVTLKGKPIRLTADLSAETLQARREWGPILNILKEKNFQPRISYPAKLSFISEGEIKYFTDKQMLTDFVTSRPALKELLKEALNMERNNRYQPLQNHAKM

SEQ ID NO: 44972 - protein, 554 aa, Homo sapiens
  misc_feature (1)...(554): Xaa = X or * as defined in Table 2
QELRVSGWSPASAPANTXCPPAQPCPTRRSGGQRAPARTRSRPGSRPRTASALPRPAAQKAASRSARASRTNPYTAPKPLPSVESALQEAAIGEAHAQQRVSCTCAAPAAPPSPAWPWSAARSAAPPPRTXASAPAXSPLPVRLKKSPGSSNCEARGEGWKTPALPVQLGAHGPPQPAAVPCASPGSGAGPRWSRSARRTPRGPLQRGRTWVSPDPGREATPSGTQWPQKTRGSLPGSXCAPETPCSAAXSSGTSPPRGAGGCCPGTVPPALEGHNXPQRWGSHSAGRVETRAEGPQCQQGAPAGCSLGVGGQRGPPGLPPIPVPGLCXTCRSSXMEAATGSVEKCKRMASLMQASRWSFLRVAPVSGQVKYTPGTARWAEPSSLGSDTTLVPGASRAPADGGFGLKFLSHLVSDGVLRCGGPRPGTASAPAGLRAAAAPSVPSLVGPWRGGLGAGWLGFSLWAFSPTDSLSFXPGPALLNLMSALNSXKNFFMVAARSCGGGTRGRGGTGPSRGRGRRRPATGRKXKKKKKKKKFTSPPEVPPSPGLPRDNRL

SEQ ID NO: 44973 - protein, 273 aa, Homo sapiens
MAETELHRDFLSAALWKNPPDLASLSLPLLGYIAALVKAAAFTAAVSLMNKKWPGPCTECLRTYLDSTWPLLALSGDSRKEYWGVDMGRFYVKFNKSELSKEPIGPSQACQASSQLQSTGPPYKAPTTWIPQQACPCPGSSQPPSYCSGTLQSPLLLSYRSVSIATTNHSKAVYPALNSAPNQRPHPLSMGSPAPPPESALNNPLPTASSVAPYSDPNPSPTTSIAAPNSAPNPLPTVGSAAMDSVPNQLPDAGNDALDITPAPVPHRQSSTG

SEQ ID NO: 44974 - protein, 1024 aa, Homo sapiens
  misc_feature (1)...(1024): Xaa = X or * as defined in Table 2
MAAVRKQLPRGVLGYGGSGALLSTAAADTSLLLGSLQERKSASAGPGYLRSSVAAWSGLWLTGASEAHSVVLACFSRKDVEASLSVGLPVHPDASCARRLDAADGVAGGSPRLPQSTDGWRLTAHSLPQSTDGWRLTAHSLPPPTDGWRLTAHSLPQSTDGWRLTAHSLPPPTDGWRLTTHSLPQSTDGWRLTAHSLPQSTDGWRLTAHSLPQSTDGWRLTIHSLPQSTDAWRLTAHSLPQPMDGWSCRSAQWCVAKRLWCSNTPTSSSLALVPTLLTAPSLQTPLXSTEQLTVTSPWETQETQPHPVPHDAETSPNDCNYGSVXQTTDWMLQWSCQPHXINPAGGPFSSVAPVPGKQPWPSAAPRRAQHAPGAESRTARSGVEKPSTGASTDASFDAKPICGNGKQSESCHSPFSQSLLEASVQQVRNPCYYSSWIHTLIPAPRVTASGLTPSSSTPRVTASGFTASSRPRVSPRVDSHAHPDPTCHREWVHTLIPTPRVTASGLTRSSRPCVSPRVDSTLIPTPRVTASGFTHSSRPCVSPRVDSHAHPDPACHREWTHTLIPTPRVTASGFTHSSRPRVSPXVDSTLIPTPRVTASGFTRSSRPRVSPRGDSHPHPDPTCHREWTHTLIPTPRVTASGFTASSRPCVSPSSGFTRSSRAPRVIAQWAHTLIPTPHVTASGFTPSSRPRVSPSSGFTPSSSTPRVTASGFTASSRPRVSPRVDSHAHPDPACHHEWVHSLIPTPRVTASGSHPHPDPACHREWTHTLIPTPRVTASGFTASSRPHVSPRVDSHAHPDPACHREWIHSLIPTPRVTASGLTRSSRPRVSPRVGSQPHPDPASSPRVDSHAHPDPACHREWVHSLIPTPHVTASGFTRSSRPRVSPRVDSHVIPTPRVTASGFTASSRPRVSPRVDSHAHPDPACHREWVHSLIPTPRVTASGFTRSSRSRVSPRVGSQPHPDPTCHREWVHTLIPTPRVTASGFTRSSRPRVSPRVGSQPHPDPACHREWIHTLIPTPHVHVF

SEQ ID NO: 44975 - protein, 88 aa, Homo sapiens
ARAVNMIAVGTSNSRFYQEIGPRPTRRLPPPYQQRQSRSRRRASWWLQQLPDVGPSTPASRPHLLGLFILAVEGSTNTSTCLRTKRRP

SEQ ID NO: 44976 - protein, 46 aa, Homo sapiens
VIEASDVVLEVLDARDPLGCRCPQVEEAIVQSGQKKLVLILNKSGE

SEQ ID NO: 44977 - protein, 252 aa, Homo sapiens
  misc_feature (1)...(252): Xaa = X or * as defined in Table 2
GSRAWRDPRLEVAAATTTLFYGYGFVSAELKKASKRMTCHKRYKIQKKAPEHHRKIRGEAKKRGHNKPRKDPGVPNSAPFKEALLREAELRKQRLEELKQQQKLDRQKELEKKRKLETXSWIFKPSNVDPMEKEFGLCKTENKARSGKQNSKKLYCQELKKVIEASDVVLEVLDARDPLGCRCPQVEEAIVQSGQKKLVLIYLNKSDLVPKEDLESWLKLFXRKDLPNSGCFRASTKTQRVKGKITKVSFIS

SEQ ID NO: 44978 - protein, 148 aa, Homo sapiens
  misc_feature (1)...(148): Xaa = X or * as defined in Table 2
EVTACWQSSQPSLTLGASSAWAPTLAALEEPFSPPLHCGSPFLGWPRLEPAPSAPPWAPVRPEPPQQGPPSAPGRPIPSTTQGLRSADAGRRTGTQLHRQPAKVCSFISXSQRDHEPTRRNEQLQTRRLKSCNTHREDLQLHSRRKKL

SEQ ID NO: 44979 - protein, 208 aa, Homo sapiens
VASGKLWLPFSGAKISSSEGMLCNSSVLSPHNKGPFCIVFVLRSPRHGPESPWPRGSLPLPSASPVSVPRILEERPWSSPAATRCWRHHRAAAGSCTSLGRPQAEPDSSSALYTQLCGFSQSPASLSTAAGSAQPPGQTGLASCDHNHEGVDLDFHWWFSFRLQFPFLPVHILQPPRHSAERGKHFCIPSFQPSRKQQCGSGPEDPHL

SEQ ID NO: 44980 - protein, 209 aa, Homo sapiens
  misc_feature (1)...(209): Xaa = X or * as defined in Table 2
RYKGSPRPHQTQEPSWLHLVDPAPGLQVELPASPAPCARIRQPLGGRWDWAPWSRGWCSSGRLGQHRSPWSGWEAQAWRAAGPKPCPAGRQLRPGEKSSTAPVGRHCWGIQYTLRSHWPGCXVPHSSGPAGLAGCSGTPAGPQAPHAAPVPARACSLHTSLQAEGVGSSLGQPRKGLPQCRWGLKGSSNAAKVGAQAGEVQARALRTAS

SEQ ID NO: 44981 - protein, 65 aa, Homo sapiens
  misc_feature (1)...(65): Xaa = X or * as defined in Table 2
ASHPLRGLRSGRSLPDERHRLLHSAQSHRPPKGXGVRAQGAGLTWQLHLXPQCGIHWVKPAGLLS

SEQ ID NO: 44982 - protein, 365 aa, Homo sapiens
MEDSGAQLASPSGSRTGAAGGAACQSRAVRSHCSALGWSMGLGAVEQGVVLVREALAAQELMEWVGGSGMAGCRSRALPRGKAAKARPTPFGHMNKSQALSLLIAQPLGINLLSWWPPKYNRPVPLIGLSGLLIPATFCLGETRDSRHAIRTTSTRGEISSPATWCRSLTAQQNLRGYRMIQGTVCYRTSVAHQWLENNALEGTLNVLAYAQGQFPEADPHWDPNKEAQLQQLQRYQEALLQVLRKGEKKAFNMGNISEVLQRADESCSQFYERLYEAFQLCSPFDPEATENQCMVNAVFVGQTQGDIRRKLQKLECFTGMNVTQVLEVATKVYTNCEEETQGKGQFAGGSTYGKGGECPKTKWM

SEQ ID NO: 44983 - protein, 259 aa, Homo sapiens
MSETFMAALPIIGLEAYEGKMVLWVRPGTQGTDRAIASESAGHKPWWLSHDVDPVGSQKSRTEALAAFPRGRAQDLQPAMSEPPTHSMDSRAARASPTSTTPYSTAPSPIDHPRAEECKRTTRDWQAAPPAALVRDPLGEASWAPESAARAGLWGPSNSVQRAAESASRPHGFGQPPKAPARPGWLTGKFPASVPSASRRAPPAAVTSARHYYLRQPPPRPSSCPECNKIRLWPAFQLTPLCQGPAASERDRRKPQKRR

SEQ ID NO: 44984 - protein, 311 aa, Homo sapiens
MSTRVVQRENVGLEPQIPHWGIPSGAMRRGPPSSRPQSGSSTNSLHCAFGKATDSGAQLASPSGSCTWAAGGAACKSGALRPNSSALGWSMGFGAVEQGVALLGEARAHRSPWRGWEAQAWRAAGPEPCPAGRQLRPGDTCLLASSLPASAILLTHAAGTIGLVPWTGPEKGGVIHPPPASRPPERLSVPPTTHGNYGNTIQDEIWVGTQNQTISGTQNAFTENQYTPARLQTMIKTTVQEQWQAFSPIGSGNVRLTGSGVQQTPCWIRRGRSQLRVCDGSKQQWWTASESSARALTNTDQKSVQFQDLIE

SEQ ID NO: 44985 - protein, 331 aa, Homo sapiens
MAEGKGEAGTFFTGWQTGPPERQIVVGICSMAKKSKSKPMKEILERISLFKYITVVVFEEEGRARDLQPAMPEPPTHSMGSCAARASPTSTTPCSTAPSPIDHPRAEECEHTARDWQAAPPAALVRDPLGEASWAPESGGDVENLYVQLRDCKYTNQHPVSSSGFVNAPMDTLYLATLVGPWRTFMSSSGIVNTPIGTLYLAQGLQPLDSSNSRKRQPLIPDLEFTKGQCLQEFSSDLMIDALPIMSPRKSPMPRAEGLIGKREGRKQKEEAPQYRDRGWGAPKPRKEVASVVDTSQWSYIYPFYQISFDIARQLFQVDQLADRRAESKMQ

SEQ ID NO: 44986 - protein, 76 aa, Homo sapiens
  misc_feature (1)...(76): Xaa = X or * as defined in Table 2
ASLPLRGLLCCPSLPEERRPLLHGAQSHRPPKGXGVRAHGAGLAWQLHLRPRCGIHWVKPAGLLSLGPHQQSSKSA

SEQ ID NO: 44987 - protein, 148 aa, Homo sapiens
LPSRGAGLGTCSPPCLSLPPTPWAPVRPEPPQGAPPPAPRRPVPSTTQGLRSASARHGTGRQLHLQPWCGIHWVKLAGLLSLVGSQHLRGQGSRAAAALTHMHSHTHAHMHTHAPSPFGFLLLLVLFLHLFLHLPCASAAFEAFFLVH

SEQ ID NO: 44988 - protein, 367 aa, Homo sapiens
  misc_feature (1)...(367): Xaa = X or * as defined in Table 2
MKPWALKVSVTALKVARLEFVPPDVRMCSEFLPCGVKLQTFAVSVTALKAARLELFVSPGGLVVSLASGVKLQTFPVSVTAHKSSVDPRSEQQQDLLQRAKEQTFHTVEGDRSGSPPDSGAQLASPSGSRTRAAGGAACQSRALRPHSSALGWSMGLGAVEQGAVLIREARAAHEPMERVGGSGMAGCRSRALPREKAAKARRETEGSAAVSGWLSGIAQWPKIDHEGFRAVKMPQAAWLLKAVTFIDLTTLSGDDTSSNIQRLCYKAKYPIREDLLKALNMHDKVAAGFPAGQTHLKTRLEEIRLAVEDGATEIDVVINRSLVLTGQWEGLYSPVVYSALPCNIXHSRLFLPSGNALLLWLWCLHS

SEQ ID NO: 44989 - protein, 766 aa, Homo sapiens
  DOMAIN (468)..(515): kw TRANSCRIPTASE REVERSE II ORF2 domain identified by eMATRIX, accession number DM01354V, p-value=1.000e-40, raw score of 12.97
LRSQSRGGRSGFPLVVFFSAAISFSALCSVSRWALAAFPWSKVRDLQPAMPEPPTHSMGSCAAGASLTSTAPCSTAPSPIDHLRAKECERTAQDWQAAPPAALVRDPLGEASWAPESGTNISITPGNATFVTRVQGQAWFASCITGHDMSSLKTSSVVVLRRQSEALLPANLTCNWQDSSALATLESALSQVRHKRFTFTLMVFTGSAIVIMATVSIAVVSITESVQTTAFVDNLAKNICDELLLQDMDEAGNQHSQQNNTRTENQTPHVLTHKWELNNENIRIQGGEHYILGPVGGRLPTSKLAVDCQLLLLAAAQHALCWCQNTLPPNPANFWNCPRGFPTLASELAYVSPNLALVIQLSQRKKFELFWGGLQRTIFFPFSVLRILTVDEQANDVSVAAARTLQIFRDDMIVYLENPIVSAQNLLKLISNFSKISGYKINVQKSQAFLYTNNRQTESQIMSELPFTTASKRIKYLGIQLTRDVKDLFKENYKSLLKEIKEDTNKWKNIPCSWVGKINIVKMAILPKVIYRFSAIPIKLPMTFFTELEKTTLKFIWNQKRAHTAKSILSQKNKAGGITLPDFKLYYKATVTKTAWYWYQNRDIDQWNRTEPSEITLLIYNYLIFDKPEKNKQWGKDSLFNKWCWENWLAICRKLKLDPFLIPYTKINSRWIKDLNVRPKTIKTLEENLGITIQDIGMGKDFLSKTPKAMATKDKIDKWDLIKLKSFCTAKETTIRVNRQPTKWEKIFATYSCEKGLISRIYNELK

SEQ ID NO: 44990 - protein, 347 aa, Homo sapiens
  misc_feature (1)...(347): Xaa = X or * as defined in Table 2
ARSNIRMVTAFRSLPAGSSGAARAMSAHNRGTELDLSWISKIQVNHPAVLRRAEQIQARRTVKKDWQAAWLLKAVTFIDLTTLSGDDTSFNIXRLCYKAGYPIREDLLKALNMHDKGITTAAVCVYPARVCDAVKGTSRPAGCVNIPVGISRAAGFPAGQTHLKTRLEEIRLAVEDGSLQKIDVVINRSLGAXQAQWEALYDEIRQFRKACGEAHLKTILATGELGTLTNVYKASMIAMMAGSDFIKTSTGKETVNATFPVAIVMLRAIRDFFWKTGNKIGFIPAGGIRSAKDSLAWLSLVKEELGDEWLKPELFRIGASTLLSDIERQIYHHVTGRYAAYHDLPMS

SEQ ID NO: 44991 - protein, 140 aa, Homo sapiens
  misc_feature (1)...(140): Xaa = X or * as defined in Table 2
VLQFLKAACPEFVPSGVPMCSEYLPSGGFVVSLASGVKLQTFPVSVTALNALRLELFVPPGGLMVSLASGGSCRSSRXVLQLIKAVWTQRPLGGRWDWAPWSRGRRSFGEARAAQKPMEGVGGSGMAGCRSRSPAPREGS

SEQ ID NO: 44992 - protein, 195 aa, Homo sapiens
  DOMAIN (65)..(85): ALPHA-2A ADRENERGIC RECEPTOR SIGNATURE domain identified by eMATRIX, accession number PR00558D, p-value=9.644e-09, raw score of 7.99
  misc_feature (1)...(195): Xaa = X or * as defined in Table 2
RHHPRHAVQARPFPAGPLAGAQRGSGAEXRGPQGSPGPAGLSGGESLPGETDRGADKEERGRQRWQRALGRLSAGADPLPAELRGRRQRRGRXAGQRAAQEAACEAPIQGSGARNGRRGXGRRLXGCYQXVXFPGLTRGWGRGSRPSAVHCGWEPPXAGKPSGQTPRHSGXPAGVDGLPPKVTGPPPGTPQPRPH

SEQ ID NO: 44993 - protein, 1475 aa, Homo sapiens
  misc_feature (1)...(1475): Xaa = X or * as defined in Table 2
MRLTRCQAALAAAITLNLLVLFYVSWLQHQPRNSRARGPRRASAAGPRVSLPPHPLTCVWRCSRPAMDRPPAASRPETTVATEFVALVLDGARAEAHALLERMVEALRAVSARLVAAPVATANPARCLALNVSLREWTARYGAAPAAPRCDALDGDAVVLLRARDLFNLSAPLARPVGTSLFLQTALRGWAVQLLDLTFAAARQPPLATAHARWKAEREGRARRSALLRALGIRIVSWEGGRLEWFACNKKNQRCMGTGIAVYFPSPYHSLSSFGFSSDVFIMDTIGGGEVSLGDLADLTVTNDNDLSCDLPSKALVPEMEDEDEEDDSEDAINEFDFLGSGEDGEGAPDPRRCTVDGSPHELGSLYRTDMFPERRVAKESRRPRSWPPAPHPFPGKSPWRRRQSWLFLKWGRQPSRAGVQLWLASRREQDEDPVGERQSGSGTSDYVTPLLESDTTLVAVPVIGRKGRNLQKAFMGKLFDHLLGTQSYTTCAGDRPAKSSVSVGTRRQRHLVLEGVANECGGECPXGQPELDARPGGLAAPLQEEPGLPASPWGFSREGVRGRRPXPGPPALLGYPPLRKHIRPVERPQLMGAPIHSDRRGSGAPSPSSPEPRKSNSLIASSESSSSSSSSISGTRALDGRSQLRSLSLGRXDLPSPPGSPPRPRXCPXXRRLRRSQRNLNYDTGKENIQQSRFPCSVGSSCCRRTTPAARLPSSLCGCPARGAAPTAERVPRAQPSSARGPWPAGAGAPRRRSSPAAAPPSREGRSAERGWCPPAGPGAPRGXRGRGRAGAPQHPPSRASQRGAAGAAPXRAVHSRKLTFRARHLAGLAGQPGRPPDVRLLRGAPPPCAPARHGASARAPSSTKATNSVATVVSGQRGCGWPVHGRPGAAPDARXGMRGQGYTGAGSRGTTGPPGPGIPRPGAAATRHRRGPEGXGXWRPPGQPGSGXAALAAAITLNLLVLFYVSWLQHQPRNSRARGPRRASAAGPRVSLPPHPLTCVWRCSRPAMDRPPAASRPETTVATEFVALVLDGARAEAHALLERMVEALRAVSARLVAAPVATANPARCLALNVSLREWTARYGAAPAAPRCDALDGDAVVLLRARDLFNLSAPLARPVGTSLFLQTALRGWAVQLLDLTFAAARQPPLATAHARWKAEREGRARRSALLRALGIRIVSWEGGRLEWFACNKKNQRCMGTGIAVYFPSPYHSLSSFGFSSDVFIMDTIGGGEVSLGDLADLTVTNDNDLSCDLPSKALVPEMEDEDEEDDSEDAINEFDFLGSGEDGEGAPDPRRCTVDGSPHELGSLYRTDMFPERRVAKESRRPRSWPPAPHPFPGKSPWRRRQSWLFLKWGRQPSRAGVQLWLASRREQDEDPVGERQSGSGTSDYVTPLLESDTTLVAVPVIGRKGRNLQKAFMGKLFDHLLGTQSYTTCAGDRPAKSSVSVGTRRQRHLVLEGVANECGGECPKVGSLF

SEQ ID NO: 44994 - protein, 253 aa, Homo sapiens
  misc_feature (1)...(253): Xaa = X or * as defined in Table 2
VPSRTWAEYRTRFVPHSLGQPRSSHIPQSPQTDQTAQGQQALAPPAGRSGQXGRPGRRARLGPGERHSXAPPPLSQLLLQTFPHLQALPSAHARPSGQPHADRGHSRSPSGDLSTSSVLKVVRPQAGGPKQARCPQAGRVCHCPRGGRRGPEQQGGXRPEAPQASPEKGSTGLRPSAKDSKNQGTGIFLRCQVAPRPEALCCPPPRGADTPVSPCLWVAGAGIPLQPPEGAEGAVLGSLCTLCPGSPDSPPTS

SEQ ID NO: 44995 - protein, 162 aa, Homo sapiens
MPSQGPSPGWKLQRNTHSEPEAALLSSEYSVIGSIKPKLNGQLSGKDAARAGDTANSEGTPGCAAVPGRGFPSPPVASPPGHGLDPGTAGPRAAQELGAPPGVKRARPALALPAANPNPLAPGVEAALPLKVVPMSKCSEKAHDLFQVTQELSESTALVHAY

SEQ ID NO: 44996 - protein, 107 aa, Homo sapiens
  DOMAIN (51)..(73): OLFACTORY RECEPTOR SIGNATURE domain identified by eMATRIX, accession number PR00245A, p-value=7.300e-19, raw score of 18.03
ISRGGVVEVSGDPELQPVLAGLFLSMCLVTVLGNLLIILAISPDSHLHTPMYFFLSNLSLPDIGFTSTTVPKMIVDIQSHSRVISYAGCLTQMSLFAIFGGMEERHA

SEQ ID NO: 44997 - protein, 68 aa, Homo sapiens
  DOMAIN (43)..(58): OLFACTORY RECEPTOR SIGNATURE domain identified by eMATRIX, accession number PR00245B, p-value=3.045e-10, raw score of 10.38
PSADLSFLLGHLYPQSSSVLDAQLHNLIALQMTCFQDAEIPNFFCDPSQLPHLACCDTFTNNIIMYFK

SEQ ID NO: 44998 - protein, 84 aa, Homo sapiens
  DOMAIN (57)..(72): OLFACTORY RECEPTOR SIGNATURE domain identified by eMATRIX, accession number PR00245B, p-value=3.045e-10, raw score of 10.38
ASADLSFLLGHLYPQSSRRVLSSDTCRRVNPNVLDAQLHNLIALQMTCFQDAEIPNFFCDPSQLPHLACCDTFTNNIIMYFPAK

SEQ ID NO: 44999 - protein, 84 aa, Homo sapiens
  DOMAIN (12)..(27): OLFACTORY RECEPTOR SIGNATURE domain identified by eMATRIX, accession number PR00245B, p-value=3.045e-10, raw score of 10.38
MTCFQDAEIPNFFCDPSQLPHLACCDTFTNNIIMYFPAVIFGFLPISGTLFSYYKIVSSILSVSSSRGQYKAFSTCGSHLSVVC

SEQ ID NO: 45000 - protein, 80 aa, Homo sapiens
  DOMAIN (55)..(70): OLFACTORY RECEPTOR SIGNATURE domain identified by eMATRIX, accession number PR00245B, p-value=3.045e-10, raw score of 10.38
HLSDSKSQVRYQPSADLSFLLGHLYPQSSSVLDAQLHNLIALQMTCFQDAEIPNFFCDPSQLPHLACCDTFTNNIIMYFK

SEQ ID NO: 45001 - protein, 198 aa, Homo sapiens
  DOMAIN (147)..(164): G-protein coupled receptors proteins domain identified by eMATRIX, accession number BL00237D, p-value=5.821e-10, raw score of 11.23
  misc_feature (1)...(198): Xaa = X or * as defined in Table 2
PPCTSLRPLHAFSGKMTHLNRGTLSLLDSQLHNLIALQMTCFKDVEIPNFFWEPSVTPSHRNINMYFPAAVFGFLPISGTLFSYCKIVSSILRVSSSGGKYKAFTTCGSHLSVVCXFYGTGFGGYLSSDVSSSPRKAAVASVMYTVITSMLNPFIYSLRNRDIKGVLRQPHGSTVQFQYLLICSIPFVVWVKKGSKVK

SEQ ID NO: 45002 - protein, 337 aa, Homo sapiens
  DOMAIN (242)..(267): RHODOPSIN-LIKE GPCR SUPERFAMILY SIGNATURE domain identified by eMATRIX, accession number PR00237A, p-value=7.375e-11, raw score of 11.48
  misc_feature (1)...(337): Xaa = X or * as defined in Table 2
XQRCPNYTDPQNLTTDVSIFLVLELSEDPELQPVLAGLFLSIVTGHGDGEPAHHLWPSALTPTSTPTCTSSSSNLSLPDIGFTSSMVPKMIVDMRSHSGVISYADCLTQMSLFAIFGGMEERHAPECDGPMTACIGVYLTSAVAPPLRNGVVASVTYAVVTPMLNPFIYSLRNRDIQSALWRLRSRTVKSHDLFHPFSCVVSTEYCERNKQKVSNLYRPTESNRCLYIPPPRTSEDPEWQLVLAGLFLSMCLVTVLGNLLIILAVSPDSHLHTPMYFFLSNLSLPDIGFTSTTVAKMIVDIQSHSRVISYAGCLTQMSPFAIFGGMEERHAPECDGL

SEQ ID NO: 45003 - protein, 363 aa, Homo sapiens
  DOMAIN (105)..(127): OLFACTORY RECEPTOR SIGNATURE domain identified by eMATRIX, accession number PR00245A, p-value=9.750e-20, raw score of 18.03
  misc_feature (1)...(363): Xaa = X or * as defined in Table 2
VWIALKSENITCELLLFKMQTQCQVLVYLFPIFQPSFLGKRCPISTDPQNLTDVSIFLLLEVSGDPELQPSPCWAVPCPCAWVTVLGNLLIILAISPDSHLHTPMYFFLSNLSLADIGFTSTTVPKMIVDIQSHSRVISYAGCLTQMSLFAIFGGMEEDMLLSVMAYDWFVAICHPLYHSAIMNLCSVGFLVLLSFFFFLSLSDSQLHNLIALQMTCFKDVEIPNFFWEPSQLSHLACCDTFTNNIIMYFPTAIFGFLPISGTLFSYYKIVSSILRVSSSGGKYKAFSTCGSHLSVVCXFYGRGVGGYLSSDDVSSSPRKGAVASVMYTVVTPMLNPFIYSLRNRDIKSVLRRPTEHCLISKK

SEQ ID NO: 45004 - protein, 657 aa, Homo sapiens
  DOMAIN (163)..(183): MYOSIN HEAVY CHAIN SIGNATURE domain identified by eMATRIX, accession number PR00193A, p-value=6.000e-14, raw score of 15.41
MTRKVTLLLRTWRGGCGRLAMGMEATPQGSLHPLFQEHWIRAEDFGVLSPMHPNSVQGVDDMIRLGDLNEAGMVHNLLIRYQQHKIYVSLPSPVSTGEPLTGANLLDREKKMMHRGHCPIALTEGVSGPDNPEGRARAKAKAKARAELPLPGAEGTDHLLPSQTYTGSILVAVNPFQVLPLYTLEQVQLYYSRHMGELPPHVFAIANNCYFSMKRNKRDQCCIISPQNRVGAQTDTVLKVFQHLLISLICKTTLQACCIPSHPYLSSAPGPPPLTTQCRSYSDSLLGPQLFGDVCYNCSHVIEGDGEALCSLPHPTCSPGAWVLQLVSPLNKAWCVSCFSCSTCNSKLTLKNKFVEFDMKPVCKRCYEKFPLELKKRLKKLSELTSRKAQPKATDLNSAEGPLAQLGAVGAVTGITHEPHIPQVENGSQQLDDVPALGVENWRIFMAERMEAQGGQRLLLSTMHEEYEFVSPSSVAIAELVALFLEGLKERSIFAMALQDRKATEGGPVGLTKKQGLLASENWTLGQNDRTGKTGLVPWHCLYTIHTVTKHSDSCCTAVPTLLEASSGCIFMSYKKHITLTPKSADSNKRPSTLGSQFKQSLDQLMKILTNCQPYFIRCIKPNEYKKPLGFSDSFMLIKLIRIDKVQYDSFSYIFWN

SEQ ID NO: 45005 - protein, 398 aa, Homo sapiens
  DOMAIN (368)..(397): MYOSIN HEAVY CHAIN SIGNATURE domain identified by eMATRIX, accession number PR00193D, p-value=5.839e-09, raw score of 14.36
MNMNIKKIVKQATVLTFTTALLAGGATQAFAKENNQKAYKETYGVSHITRHDMLQIPKQQQNEKYQVPQFDQSTIKNIESAKGLDVWDSWPLQNADGTVAEYNGYHVVFALAGSRKTLMTHQSTCPKHRASRVGPSNSLQNKQTVKKGDQTSVRRKRNDLKVEERHKNHHLARELTSSAAAASPTGHAAATAQAPQRHVEVGRAAAPAGDLGEGIVGEQVLGAERLVGPDASRARALCVLGDRREAGHTAEMTAAPPAQVPGPGGPTALRRPSSYLGLGVDEQNPMSVDGDEDDVRVQHQELRDCLIKHTILIRGEFVTRSLNIAQAADRRDAFVKGIYGALFLWIVKKINAAIFTPPAQDPKNVRRAIGLLDIFGFENFENNRIIRTLCWRYREARC

SEQ ID NO: 45006 - protein, 343 aa, Homo sapiens
MTPLHILVTPPERQDNTQPTRNYFCLKDAGISSTPQNSITTVNALEAIDSDHPNNRRDEIYCQICKQLSENFKTSSLARGWILLSLCLGCFPPSERFMKYLLNFIGQGPATYGPFCAERLRRTYANGVRAEPPTWLELQAVKSKKHIPIQVILATGESLTVPVDSASTSREMCMHIAHKQGLSDHLGFSLQVAVYDKFWSLGSGRDHMMDAIARYGPGEGRDERQSPWRIYFRKEFFTPWHDSREDPVSTELIYRQVLRGVWSGEYSFEKEEELVELLARHCYVQLGASAESKAVQELLPSCIPHKLYRTKPPDRWASLVTAACAKDGVKLCGKDTAAGFMAV

SEQ ID NO: 45007 - protein, 1651 aa, Homo sapiens
  DOMAIN (1454)..(1483): MYOSIN HEAVY CHAIN SIGNATURE domain identified by eMATRIX, accession number PR00193D, p-value=1.188e-25, raw score of 14.36
  misc_feature (1)...(1651): Xaa = X or * as defined in Table 2
MSTTSIFQQLNLLLSHSHKQKQQIQLPNGRSRYSCLMAAFRMQYFLSLPMKSLILVGFERLQAIARSQPLARQYQAMRQRTVQLQALCRGYLVRQQVQAKRRAVVVIQAHGQGMAARRNFQQRKANAPLVIPAEGQKSQGALPAKKRRSIYDTVTDTEMVEKVFGFLPAMIGGQEGQASPHFEDLESKTQKLLEVDLDTVPMAEEPEEDVDGLAEYTFPKFAVTYFQKSASHTHIRRPLRYPLLYHEDDTDCLAALVIWNVILRFMGDLPEPVLYARSSQQGSSVMRQIHDTLGREHGAQVPQHSRSAQASGGQQRAEEGDTYQRSGCKDKGTKDISSMKLKRSSRITGQVASQLNIGEEALEPDGLGADRPMSNLEKVHFIVGYAILRPSLSCGNDIFSGSLENQKNKELAMPETESLDRRYQGSKPSSKEKPKSPLIKCQPKPAQFVARDEIYCQICKQLSENFKTSSLARGWILLSLCLGCFPPSERFMKYLLNFIGQGPATYGPFCAERLRRTYANGVRAEPPTWLELQAVKSKKHIPIQVILATGESLTVPVDSASTSREMCMHIAHKQGLSDHLGFSLQVAVYDKFWSLGSGRDHMMDAIARCEQMAQERGESQRQSPWRIYFRKEFFTPWHDSREDPVSTELIYRQVLRGVWSGEYSFEKEEELVELLARHCYVQLGASAESKAVQELLPSCIPHKLYRTKPPDRWASLVTAACAKAPYTQKQVTPLAVREQVVDAARLQWPLLFSRLFEVITLSGPRLPKTQLILAVNWKGLCFLDQQEKMLLELSFPEVMGLATNREAQGGQRLLLSTMHEEYEFVSPSSVAIAELVALFLEGLKERSIFAMALQDRKATDDTTLLAFKKGDLLVLTKKQGLLASENWTLGQNDRTGKTGLVPMACLYTIPTVTKPSAQLLVTGTLPCPQPGYPRLVELLTQDVGVQADKAKHFTKEYATGCINAKCPSGNATNCKQSLEKHLLGPYYSQLQLQACSVFRDLPPNTELCWFLLDYFSSDGGDHVWLEPPSTHKTGVAIGGIIKEAKPGKVLVEDDEGKEHWIRAEDFGVLSPMHPNSVQGVDDMIRLGDLNEAGMVHNLLIRYQQHKIYTYTGSILVAVNPFQVLPLYTLEQVQLYYSRHMGELPPHVFAIANNCYFSMKRNKRDQCCIISGRLASVTVWCSRAILQFEAWPPPLRSPLTXSHSNYIFSSLLPSWHRPLTSAFGNAKTIRNDNSSRFGKYIDIYFNPRGVIEGARIEQFLLEKSRVCRQAPEERNYHIFYCMLMGVSAEDKQLLSLGTPSEYHYLTMGNCTSCEGLNDAKDYAHIRSAMKILQFSDSESWDVIKLLAAILHLGNVGFMASVFENLDASDVMETPAFPTVMKLLEVQHQELRDCLIKHTILIRGEFVTRSLNIAQAADRRDAFVKGIYGHLFLWIVKKINAAIFTPPAQDPKNVRRAIGLLDIFGFENFENNSFEQLCINFANEHLQQFFVQHVFTMEQEEYRSENISWDYIHYTDNRPTLDLLALKPMSIISLLDEESRFPQGTDLTMLQKLNSVHANNKAFLQPKNIHDARFGIAHFAGEVYYQAEGFLEKNRDVLSTDILTLVYSSKNKFLREIFNLDXQRPSWAMGPSARQRQETISSRKVMMTTCWKT

SEQ ID NO: 45008 - protein, 94 aa, Homo sapiens
  misc_feature (1)...(94): Xaa = X or * as defined in Table 2
RTWMTHVWRRRRVQAAPTAYSSFRPGTSPCPAQPRAGARAXTRSGTSIMPTGFSSHTSCLTVPPFTASSAGQHRQRHRKTTAAGHPTTTGAASF

SEQ ID NO: 45009 - protein, 151 aa, Homo sapiens
  DOMAIN (41)..(61): SOMATOSTATIN RECEPTOR TYPE 1 SIGNATURE domain identified by eMATRIX, accession number PR00587A, p-value=9.600e-09, raw score of 8.06
  misc_feature (1)...(151): Xaa = X or * as defined in Table 2
MQSVLPAHGVSSTRASSRSVTLSSPSTSTNCRGRKSSRVTSPVGSGPGGGGGGPGSGRFGIDPPRKFAAAGSFSTGAPSSVMVVRVSGMPSLSWXQYPXSCSTLGCRSRSSSTISLSSLWAVQPIAAPPYPELATQLPISCRXSPSPCAPS

SEQ ID NO: 45010 - protein, 482 aa, Homo sapiens
  misc_feature (1)...(482): Xaa = X or * as defined in Table 2
NQLSKXKAHSIRTXTALQQSSGRSQICIVQSSADALPSSRCTNPSSTFTPTPLPPRPHPRTCSTLGCRSRSSSTISLSSLWAASRXQPLRTPNSRTQLPRSWPLKSTALSPPPPGQATRLCWWMVSSKXRTWMTHVWRRRRVQAAPTAYSSFRPGTSPCPAQPRAGARAXTRSGTSIMPTGFSSHTSCLTVPRLHCVLCWTASSTPQESSPGGWTRPWPSWRRCCTCTGAGRYLQNSTASTPVPSTSVSQTAPSPKEDYRCWPSYHHGSLPPFSVQPGXGCGMSVRAMPSVGPLWSPTRPPGQIKRQNYLLNYWSCWKMTLLAGIIPSSTGSRPADLDYFLGSSQCPRDERTLKGHVSCDPTSSISITGEKLKQKLESSSTLADTKSAFLQDSWTSSLPTLGASAIRTTSASXTDQCPPAPGPLHVSFSLNSTYPSRLCSSTCSTVDSFQIIPMPNXMPFSTCGAFCWCLWFSAITALYFVM

SEQ ID NO: 45011 - protein, 297 aa, Homo sapiens
  misc_feature (1)...(297): Xaa = X or * as defined in Table 2
WCTGSQFSKGTWEILLRKKPSLGNVGALPCVATACLTTVEKRAPRGHPLAPVLGDICPKVGSMSSSTSELCTWGNFEFWGRNKYNHWFXWGWALLHQFKMGKGAQGLQEASFYRKDTYXATMPXNPIGISEFGTLALPGPCKNVFERFMSRFELPGKAAAMTDNTNVNYVRYKGDYYLCTETNFMNKVDIETLEKTEKMWKPRFRGICPQLQGCSVTEQGFEFSDDAKSWALQHPKRPAQQDWAMSRGNQGWANLGLKIIRGEAVTTRAKEVSVVLKVLEVTDGKVWAREKKLRDSR

SEQ ID NO: 45012 - protein, 106 aa, Homo sapiens
  misc_feature (1)...(106): Xaa = X or * as defined in Table 2
AAGADTSQGPGGGPPPSQSQRPKSPSAGRKGSQLSPQPQKKGLPSPQGTRKSAPSSKATPQASEPVTTQLLGQPPTQEEGSKAQGMRXPPQRLGASTQQQTNQEAA

SEQ ID NO: 45013 - protein, 128 aa, Homo sapiens
  misc_feature (1)...(128): Xaa = X or * as defined in Table 2
DGVSLCHPGWSAVARSQLTATSASWAVCWQGCGETGILLPCWWECEKVQPLWKQYGRLSCEDHLNSXVQVILTTQPPILFPKWLHLFTFPPTGQKDSSFSTTLPTHCPGGRGCSELRSRHCTPAWVTE

SEQ ID NO: 45014 - protein, 136 aa, Homo sapiens
  misc_feature (1)...(136): Xaa = X or * as defined in Table 2
FFFFFYTTFFLFFYFYFFEMESHSVTQAGVQWYNLSSLQPPPPRFRRFSCLSLPSSXDYRCPPPHPANFLCFXXRQGFTLLAKMVSISXPHDPPTSASQSAGHVLTSKWELNIEYTWVIKMGTADTGEHKNGEGWE

SEQ ID NO: 45015 - protein, 91 aa, Homo sapiens
MISAHCNLCLPGSRDSPASASRVAGITGTYHQCLANFLFLVETGFHHVGQASLEPLTSGDLPSLASQSARITAEPLPLADAASLKCLSSLL

SEQ ID NO: 45016 - protein, 189 aa, Homo sapiens
  misc_feature (1)...(189): Xaa = X or * as defined in Table 2
TDCLHNRCHRSPRSPPPGPPGXRSRADWWRRGRCWGSWCASSRRVCXRCPAPSASFSCCRSPRGRQGRTFPPSPCPAPDXTQPVSPGDSTRPCPPPSSPPAHRATGCCGRRRLPGNASYLASPGKEAGEFPASQGDSXPGQYGYIGDSSSRPTRGTWMAKASTPRHPIAPQICGAXGFGEHQEVPVREK

SEQ ID NO: 45017 - protein, 387 aa, Homo sapiens
MWPGTEQDPWSPGRKLLNSANACVSCKQMPPPLSLQMTTQPWLTPGFQPVCQGGSRVRTSRPDITSTVTIPAAGTGEDIPAAGTGEDIPATGTDSHRRPEVGLQAQGCVSGSFRSRAAVGATPRHALPGPRLSRRGAPQMGDQQPVELQASGLGGHAEAAPALPEAHAFNKAQNRRCSGSREQEARRQRQVLPLPEAPCQVGPIAADSLGPPKTHTTRDQDREARTALLGHKHSTVSRLDRFNQVVLNGREFVIPSPNSLTVPGCNQLRLRCQSLDKPGPTAPGIPLEASLCDPRPLVWVVTITSQKPTSPRRLHRRRPRGQPASENAAEPSQVAISKGKSPGKWDRPRLSWEPCTSLSDPPKIKRTRLPPTDQRQLHPGHGASGRI

SEQ ID NO: 45018 - protein, 169 aa, Homo sapiens
VRPPSHVTADSGRSPLSLTYLPLQEPGDMAAAVPRAAFLSPLLPLLLGFLLLSAPHGGSGLHTKGALPLDTVTFYKDYGDKLNMELSEKYKLDKESYPVFYLFRDGDFENPVPYTGAVKVGAIQRWLKGQGVYLGMPGCLPVYDALPGEFIRASGVEARQALLKQGQDN

SEQ ID NO: 45019 - protein, 295 aa, Homo sapiens
  misc_feature (1)...(295): Xaa = X or * as defined in Table 2
VRPPSHVTADSGRSPLSLTYLPLQEPGDMAAAVPRAAFLSPLLPLLLGFLLLSAPHGGSGLHTKGALPLDTVTFYKVIPKSKFVLVKFDTQYPYGEKQDEFKRLAENSASSDDLLVAEVGISDYGDKLNMELSEKYKLDKESYPVFYLFREGDFEEPSSHYTGGSXRLGAIQRWLKGGKGVYLGDGLELVCTVXLTPWSGEFIRASGVKARQALLKQGQDNLSSVKETQKKWAEQYLKIMGKILDQGEDFPASEMTRIARLIEKNKMSDGKKEELQKSLNILTAFQKKGAEKEEL

SEQ ID NO: 45020 - protein, 75 aa, Homo sapiens; identical to SEQ ID NO: 34862
  DOMAIN (25)..(41): AUXIN BINDING PROTEIN SIGNATURE domain identified by eMATRIX, accession number PR00655E, p-value=9.000e-09, raw score of 8.06

SEQ ID NO: 45021 - protein, 141 aa, Homo sapiens
MVVRAKWKPLELLLPRKIVNQKQYHIPGGIVEIIATIKDLKDAGVVIPTTPLFNSPSWPVQKTDKSWRMTVDYCKLNQVLTPNAAAVPDVVPLLEQINTSPGYINSSALCHNLVQRDLDHFSTPQDITLVHYIDDIALIGS

SEQ ID NO: 45022 - protein, 69 aa, Homo sapiens
TDGSWRMTVGYHKLNQVVTPIAAAVPDVVSLLEQINTTPAIKWVVHSSIPSSNGSGVYVIRLEQVLKAQ

SEQ ID NO: 45023 - protein, 117 aa, Homo sapiens
  DOMAIN (95)..(111): AUXIN BINDING PROTEIN SIGNATURE domain identified by eMATRIX, accession number PR00655E, p-value=9.000e-09, raw score of 8.06
ATVHWGKGYDRTFWGLLDTGSELTLTPGDPKHHCGPPVKVGVYENQKTDRSWRMTVDYHKLNKVVTPLAATVPDVVSLLEQINTSPRTWCAAIDLANAFFSIPVHKAHQKQFAFSWQ

SEQ ID NO: 45024 - protein, 147 aa, Homo sapiens
  DOMAIN (49)..(65): AUXIN BINDING PROTEIN SIGNATURE domain identified by eMATRIX, accession number PR00655E, p-value=9.000e-09, raw score of 8.06
KTDRSWRMTVDYHKLNKVVTPLAATVPDVVSLLEQINTSPRTWCAAIDLANAFFSIPVHKAHQKQFAFSWQEKALQQVQAAVQAALPLGPYDPADPMVLEVSLADRDAVWSLWQASIAIKWVMHSSIPSSNGSGIYVIGLEQILKAQ

SEQ ID NO: 45025 - protein, 153 aa, Homo sapiens
  DOMAIN (42)..(58): AUXIN BINDING PROTEIN SIGNATURE domain identified by eMATRIX, accession number PR00655E, p-value=6.556e-09, raw score of 8.06
MTVDYRKFNQVVTPMAAAVPDAVSLLEQINTFPGTWYAAIDLANAFFSIPVHEAHQKQFAFLPQGYINFPALCHNLIRRELDFFLLLQDITLVHYIDDILLIGSSEQEVVNTLDLLIHKRSKEAEHTAASRIRVSCLPEQKSHEQTLPWEQVP

SEQ ID NO: 45026 - protein, 309 aa, Homo sapiens
  DOMAIN (261)..(278): BETA-AMYLASE (GLYCOSYL HYDROLASE FAMILY 14) SIGNATURE domain identified by eMATRIX, accession number PR00750F, p-value=7.718e- 09, raw score of 13.15
LLMTDRFTAEQKGLGRDGGGTSGTDLQGLTLWGNICPEELEPSCDDTELKCDIREGIESAWRFSDFEESQSVRFWRKVTAGEGYINNPALCHNLIQRNLDHFPLLQDITLVHYLNDIVLIGSAIKWVMHSSIPSSNGSGMYMIGLKQIPKAQADLAMATSECPICQQQRPTLSSQYDTFPWSGQPATWWQVDYIGPLPSWEGQRFVLTGIDTYFRYGFAYPACNASVKTTIHGLTECLVHHHGVPHSIASDQGTHFMAKEVWQGAHAHGIHWSYHVPHHPEAAGLTEWWNGLLKSQLQHQLGGNTLQGW

SEQ ID NO: 45027 - protein, 264 aa, Homo sapiens
  DOMAIN (108)..(119): RNase H domain identified by eMATRIX, accession number PF00075B, p-value=8.615e-09, raw score of 12.56
TKARELREEYRSLRSRCDQLEERKSPGGIAEISATIKDLKDAGVVIPTTSLFNSPIWPVQKTDRSWRKTVDYCKLNQVVAPIVAAVPDVVSLLEQINTSPGTWYAAIDLTNAFFSIPVHKAHQKQFAFSWQGQQYTFTVLPQRKKSAAGAEPSWRTSTRAMQRGNVGLEPPYRVPTGASSSKAVRRGPPSFRPQNGRSTDRLHHSPGKAASTQSQSVKITSRAELFRATVAELLKAVGARPWHQHDLDVRHGVNKDFAALRFND

SEQ ID NO: 45028 - protein, 507 aa, Homo sapiens
  DOMAIN (274)..(290): AUXIN BINDING PROTEIN SIGNATURE domain identified by eMATRIX, accession number PR00655E, p-value=7.333e-09, raw score of 8.06
  misc_feature (1)...(507): Xaa = X or * as defined in Table 2
VRVLSPVEKELKLWKNTHKLLSYPTVGAAVTQLQNLTAMGVIGSHGARGQVVALNRQRQGDLQPFTRVTVHWGKGYDRTFWGLLDTGSELTLTPGDPKHHCGPPVKVGAYGGQVINGVLAQVQITVGPQTHPVVISPVPECIIGIDILSSWQNPHIGSLTGIMVGKAKWKQLELPLPRKIVNQKPYCIPGGTVEISATIKDLKDAGVVIFTTSLFNSPIWPVQKTDGSWRMTVGYRRLNQVVTTPTAAAAPDVVVSLLEQINTSPGTWYAAIDLANAFFSIPVHKPHQKQFAFSWQGQQYAFTVLPQGYINNPALCHNLIQRNLDHFPLLQDITLVHYLNDIVLIGSAIKWVMHSSDSIIKWKWHVHDRAQADPEGTSXPGYGHFWCPICQQQRPTLSSQYDTIPWAISQLPGDRLIIGPLPLWKGQKFVFTGIDTYSGYGFAYPACNASAKTTIMESQNTLSTLMVFHTALPLTKALTSWLKKCSSGLMLMEFTGLTMFSILKQLD

SEQ ID NO: 45029 - protein, 863 aa, Homo sapiens
  misc_feature (1)...(863): Xaa = X or * as defined in Table 2
MGPPYKPPTTWPPQTLSYHSTTPVKLQSLSLPPTAARGATEPCHLQAPASSVQQMTPPAPGLKHLGGKSQMCLEQDGRSGSVRGSPCHAGHWVAGAGFGKGTTRTWGHVNLIVPPNCPTASSSAARDSAPNQPLLGVVTAQIVPPTCPPAMTVQELIAPLTLPPAAGCRRGVRPFQTRVWLLAQLLRARLGGPGEGVVTCHSWRLERVAPRLASLWWALAAETAARLDWAAKRPSAWGSIKAAEFSSKATPRLEGASSRTLWVSYIQAKETTTGKNGPVEPSHLWEAYCRATAPHPAVHSPSAEVTYTCGIVNLLLQGLVPKSHLETHTGCHVVVELIICSVVLPLISRLSDPDWIHLVLMVIFSKARDPTPCPASGPEQPSVPTSLPLIAEVQQLPEGRAPSPVAAPGFLSKQIQDALCALEGSQALEPKGGEGSEGVEAEGPGTETETVLPVSTLNFCPEIQIDIADKEIEQGEVTTSVTALLEGLEKTCSSRPSCLEKDLTNDVTYLDPTIFSFEPLSSPDGPVVIQNLHITGTITAQELSGTGLQPCTRYTVKCETSLDGENSSLQQLAYHTVNHRYWEFLNLQSHQEKKPDLXKFIKNIEKMVVSAIVDNLKTAFPCSESQGPTEELSEAETESKSQTEGKKARKSRLRFSSSKISPALSVTEAQDTILYCLQEGNVESKTLSMSGMESFIEKQTKLLEVQPTEAPEKDPEQLPKGHVDSCLSDAAVPAQDPSNSDSGTETELADTALNLLLLLLTEQWKWLCIENMQKFLRLIFGTLVQRWLEVQVANLTSPQCWVQYLWLLQESIWPGGVLPKFPRPVRTQEQKLAAEKQALQSLMGVFPDLIVEILGVNKCQLNV

SEQ ID NO: 45030 - protein, 1009 aa, Homo sapiens
  DOMAIN (597)..(615): NEUTROPHIL CYTOSOL FACTOR P40 SIGNATURE domain identified by eMATRIX, accession number PR00497A, p-value=6.082e-10, raw score of 6.92
SKILRAVIWGSHLVRSAMKTETVPPFQETPAGSSCHLNNLLSSRKLMAVGVLLGWLLVIHLLVNVWLLCLLSALLVVLGGWLGSSLAGVASGRLHLERFIPLATCPPCPEAERQLEREINRTIQMIIRDFVLSWYRSVSQEPAFEEEMEAAMKGLVQELRRRMSVMDSHAVAQSVLTLCGCHLQSYIQAKEATAGKNGPVEPSHLWEAYCRATAPHPAVHSPSAEVTYTRGVVNLLLQGLVPKPHLETRTGRHVVVELITCNVILPLISRLSDPDWIHLVLVGIFSKARDPAPCPASAPEQPSVPTSLPLIAEVEQLPEGRASPVAAPVFLSYSEPEGSAGPSPEVEEGHEAVEGDLGGMCEERKVGNNSSHFLQPNLRGPLFLCEDSELESPLSELGKETIMLMTPGSFLSDRIQDALCALESSQALEPKDGEASEGAEAEEGPGTETETGLPVSTLNSCPEIHIDTADKEIEQGDVTASVTALLEGPEKTCPSRPSCLEKDLTNDVSSLDPTLPPVLLSSSPPGPLSSATFSFEPLSSPDGPVIIQNLRITGTITAREHSGTGFHPYTLYTVKYETALDGENSSGLQQLAYHTVNRRYREFLNLQTRLEEKPDLRKFIKNVKGPKKLFPDLPFGNMDSDRVEARKSLLESFLKQLCAIPEIANSEEVQEFLALNTDARIAFVKKPFMVSRIDKMVVSAIVDTLKTAFPRSEPQSPTEELSEAETESKPQTEGKKASKSRLRFSSSKISPALSVTEAQDKILYCLQEGSVESETLSMSAMESFIEKQTKLLEMQPTKAPEKDPEQPPKGRVDSCVSDAAVPAQDPSNSDPGTETELADTALDLLLLLLTEQWKWLCTENMQKFLRLIFGTLVQRWLEVQVANLTSPQRWVQYLRLLQESIWPGGVLPKFPRPVRTQEQKLAAEKQALQSLMGVLPDLVVEILGVNKCRLSWGLVLESLQQPLINRHLIYCLGDIILEFLDLSASVEESAATTSASDTPGNSKRMGVSS

SEQ ID NO: 45031 - protein, 139 aa, Homo sapiens
LRQRSPWGSQDAVEGKGQKERQEQRQRHEIEKLKQQLNETKEKAQEEKDKLEQKYTRQINELEGQFHQKAKEIGMIHTELKAVRQFQKRKIQVERELDDLKENLRNTERIHQETLRRLESRFFEEKVQIIRVNLKCFVY

SEQ ID NO: 45032 - protein, 105 aa, Homo sapiens
  misc_feature (1)...(105): Xaa = X or * as defined in Table 2
RERGQEGGVAGRVEMDVSVVERGAYADQIWGRPKGGESRGEKRKGRWVQRVRALRARVTPAGLGECKWGRGRGDXVRRVKPRALRERWGDGSTVSDSTPMKPGLE

SEQ ID NO: 45033 - protein, 534 aa, Homo sapiens
  misc_feature (1)...(534): Xaa = X or * as defined in Table 2
MASKRCIRDFRSRGGKLKSFQLYATFRKEGCGPVLANGNPGGGRGQEVSATQDLRRGWGIASSASRFPWRQSWPGRPRLGNYDSGAPGEAKMPSKGKDKKKGKSKGKDTKKLIKTDESVVDRAKANASLWEARLEVTELSRIKYRDTSRILAKSNEDLKKKQCKMEKDIMSVLSYLKKQDQEKDNMIEKLKQQLNETKEKAQEEKDKLEQKYTRQINELEGQFHQKAKEIGMIHTELKAVRQFQKRKIQVERELDDEINDLLVKEKIMQLVQQRSQIQTLQKKVVNLETALSYMTKEFESEVLKLQQHAMIENQAGQVEIDKLQHLLQMKDREMNRVKKLAKNILDERTEVERFFLDALHQVKQQILISRKHYKQIAQAAFNLKMREHVQEEQNIPKSEHLMAESTAPIVXIRIFWRPKNGHILKEMWILEIXPGSRRKKYCDCSLQKXMAVLLGNTTQSSRPSSSRTMLFLDSGETKEFGDESKLQDKIFITQQIAISDVFWXSGATHYSKRTSGVXHSGKSESLQPRGQRLI

SEQ ID NO: 45034 - protein, 126 aa, Homo sapiens
  DOMAIN (25)..(64): PROTEIN ZINC FINGER ZINC-FINGER METAL-BINDING NU domain identified by eMATRIX, accession number PD01066, p-value=8.333e-39, raw score of 19.43
PAGIRRVTARTPGPPGSLEMGPLQFRDVAIEFSLEEWHCLDAAQRNLYRDVMLENYRNLIFLGIVVSKPNLITCLEQGKKPLTMKRHEMIAKPPVMSSHFAQDLWPENIQNSFQIGMLRRYEECRH

SEQ ID NO: 45035 - protein, 93 aa, Homo sapiens
  DOMAIN (20)..(59): PROTEIN ZINC FINGER ZINC-FINGER METAL-BINDING NU domain identified by eMATRIX, accession number PD01066, p-value=7.316e-24, raw score of 19.43
RPVNCKYRLTIGRIGPDVACSSRLEEFSLEEWHCLDTAQRNLYRNVMLENYSNLVFLGITVSKPDLITCLEQGRKPLTMKRNEMIAKPSGSFL

SEQ ID NO: 45036 - protein, 666 aa, Homo sapiens
  DOMAIN (52)..(91): PROTEIN ZINC FINGER ZINC-FINGER METAL-BINDING NU domain identified by eMATRIX, accession number PD01066, p-value=9.719e-37, raw score of 19.43
  misc_feature (1)...(666): Xaa = X or * as defined in Table 2
MAFEQAKQVVKLALDLWPIGDGPVELQVTVLDQHANWSLRQEQHGKRGPLQFTDVAIEFSLEEWHCLDTAQRNLYRNVMLENYRHLVFLGIVLSKPELITCLEQGKKPLTVKRHEMIAKPPGQKNWEKQALPLTGCLTKYPSWAKNIDIIVTCSHFARDLWPEQSIKDSFQKVTLRRYENYGHDNLQFKKGCESVDECKVHKRGYNGLNQYLTTTQSKIFQCDKYVKVIHKFSNSNRHKIRHTGKKPFKCIECGKAFNQSSTLTTHKKIHTGEKPFKCEECGKAFNWSSHLTTHKRIHTGEKRYKCEDCGKAFSRFSYLTAHKIIHSGEKPYKCEECGKAFKRSSNLTTHKIIHTGEKPYKCEECGKAFKRSSILTAHKIIHSGEKPYKCEECGKAFKHPSVLTTHKRIHTGEKPYKCEECGRAFKYFSSLTTHKIIHSGEKPYKCEECGKAFNWSSHLTTHKRIHTGEKPYKCEECGKGFKYSSSLTTHKIIHTGQQPFKCEECGKAFKCFSILTTHKRIHTGEKPYKCEECGKAFNSSSHLTAHKRIHTGEKPYKCERCGKAFKRSFILTRHKRIHTGEKPYKCEECGKGFKCPSTLTTHKTLEIHAGKKPNKXEECSKAFKDTSALTRHKIIRTGEKPCEFDECRKAFNQLSTFTKYENLYGT

SEQ ID NO: 45037 - protein, 287 aa, Homo sapiens
  misc_feature (1)...(287): Xaa = X or * as defined in Table 2
XALQFGTADHTLFLDAVSSLGFQVFMGNLGSEILRHLTILPSGSCFQAIAKAPVVQFPIESPCCSECLRGIHQTSGQAGEGEPETYPGTEPEGAFMNVLSNSSFGCRNSREKKVLVFGQKGKKQQKSAMTVILDLSVAQRVNGTVVRWTDRLVLQVVWVSASICLSVQVLCGRFTQDDGFFLVAEIDGLTDSVILVAFLVQEEGEQWLPASLTLLSPTGGELGTLKPLVTNSGAAEQSVTTASESSVDGNGDPGETVGLEFLTLLILFASSWRLWVLGFSPYRSFAL

SEQ ID NO: 45038 - protein, 49 aa, Homo sapiens
  misc_feature (1)...(49): Xaa = X or * as defined in Table 2
ALFRAGRQECLSLLKLCPQPPLSPTCFVPGRXGFYLHFFQRCAAQRGGI

SEQ ID NO: 45039 - protein, 58 aa, Homo sapiens
HSSLLKLCPQPPLPPGVFSQGDGSFIYKPLTGAAAFLSEMPCTERRNLERQSMYRGFA

SEQ ID NO: 45040 - protein, 381 aa, Homo sapiens
  DOMAIN (319)..(344): 7 kw REVERSE TRANSCRIPTASE RNA POLYMERASE domain identified by eMATRIX, accession number DM00895E, p-value=3.333e-11, raw score of 15.72
  misc_feature (1)...(381): Xaa = X or * as defined in Table 2
PLLVIHRQTGSGEDLQQTPADLQQRDLLERKLTNRNEXHQHQQKRHPLKNPTQMSPCIKDQRYINPRSTIKLELGIKKLTENCTTTWKLNNLLLNDCWEKQERSKTDTLTSQLKELEKPEKTNSKASRRQEITKIRAELKEIGTRKTLQKINKCGSWFFEKINKIDRSLARLIKKKREKNQIDTIKNDEADITTDPMEIQTTNREYYKHLYANKLENLEEMDKFLDTYTLPRLNQEEVESLNRPITSSEIEAVINSLPTKKRSPGSDRFTAEFYQRYKEELVPFLLKLFQTIEKEGLLPNSFYEDSIILIPKPGRDTTKKENFRPISLMNIDAKILNKILANRIQQHIKKLIHHNQIDFIPGMQGWFNIHKSINVIRHLNR

SEQ ID NO: 45041 - protein, 377 aa, Homo sapiens
  DOMAIN (326)..(353): RHODOPSIN-LIKE GPCR SUPERFAMILY SIGNATURE domain identified by eMATRIX, accession number PR00237G, p-value=5.345e-13, raw score of 19.63
  misc_feature (1)...(377): Xaa = X or * as defined in Table 2
APVARMTAPLFYTALLVFSALGNILALCLTCQKRRKINCTGIYLVHLAVSDLLFTVALPGRVVCYVLGSSWPFGKGLCRLTAFVLYTDTYGGVYLMACVSVDHYPTVVCAHWGPCLRTAGRARLVCVAIWTLVLLQTMPLLLMPMTKPLVGKLACMEYSSMESVLGLPLMVLVAFAIGFCGPVGIILSCYMKITWKLCSTAGRTQXPAGKDTTGGASPGGPSDQPEKTPPAGAAQEDPVTPRERTPPAGQPERTQXPAGKDATGGTAREDPVTSRKGRHWRGCLLTLLMLVAVVVCFSPYHLNIKQFMARGMLHLPSCAERRAFLLSLQATVALMNMNCGIDPIIYFFASTHYRKWLLGILKLKGSSSSSSSSSTLY

SEQ ID NO: 45042 - protein, 133 aa, Homo sapiens
  misc_feature (1)...(133): Xaa = X or * as defined in Table 2
MVLVQWLTAITSAFWETQNKGSLQFEDKWDFMRPIVLKLLRQESVTKQQWFDLFSLGATLQDSSGPLLTGKLKKKRKVSGTKYIEASSATSLKATTDTHHLLLYNPFWIPLTLIXHLCWLQRFAXSCDTDPHP

SEQ ID NO: 45043 - protein, 845 aa, Homo sapiens
  DOMAIN (810)..(845): Cullin family proteins domain identified by eMATRIX, accession number BL01256E, p-value=4.600e-30, raw score of 24.38
GTRVRKLLVLGTRSALSARCSSAHHTLVRADGPWALVGAPASGQGLTGSATNSRVVSRESKLKNMATSNLLKNKGSLQFEDKWDFMRPIGLKLLRQESVTKQQWFDLFSDVHAVCLWDDKGPAKIHQALKEDFILEFIKQAQARVLSHQDDTALLKAYIVEWRKFFTQCDILPKPFCQLEITLMGKQGSNKKSNVEDSIVRKLMLDTWNESIFSNIKNRLQDSAMKLVHAERLGEAFDSQLVIGVRESYVNLCSNPEDKLQIYRDNFEKAYLDSTERFYRTQAPSYLQQNGVQNYMKYADAKLKEEEKRALRYLETRRECNSVEALMECCVNALVTSFKETILAECQGMIKRNETEKLHLMFSLMDKVPNGIEPMLKDLEEHIISAGLADMVAAAETITTDSEKYVEQLLTLFNRFSKLVKEAFQDDPRFLTARDKAYKAVVNDATIFKLELPLKQKGVGLKTQPESKCPELLANYCDMLLRKTPLSKKLTSEEIEAKLKEVLLVLKYVQNKDVFMRYHKAHLTRRLILDISADSEIEENMVEWLREVGMPADYVNKLARMFQDIKVSEDLNQAFKEMHKNNKLALPADSVNIKILNAGAWSRSSEKVFVSLPTELEDLIPEVEEFYKKNHSGRKLHWHHLMSNGIITFKNEVGQYDLEVTTFQLAVLFAWNQRPREKISFENLKLATELPDAELRRTLWSLVAFPKLKRQVLLYEPQVNSPKDFTEGTLFSVNQEFSLIKNAKVQKRGKINLIGRLQLTTERMREEENEGIVQLRILRTQEAIIQIMKMRKKISNAQLQTELVEILKNMFLPQKKMIKEQIEWLIEHKYIRRDESDINTFIYMA

SEQ ID NO: 45044 - protein, 72 aa, Homo sapiens
EGGFSGRMKHTLIAEEQECKAKKLRHFEEFEDTWLPYLTPKDEFHQPWQLKYPKLILQEASSVSGELHKEAQ

SEQ ID NO: 45045 - protein, 150 aa, Homo sapiens
  misc_feature (1)...(150): Xaa = X or * as defined in Table 2
LQIEIIXALEELAAKEKANEDAVPVCLAADFPSAGMGSSCDGQEDELDIKSRAAYNVTLLNFMDPPKIPHLKEKPYFGMRKMAVRWHHAENLVDRPQEESEDDSHLEGRDLDTWHVGVKISWDVKTPGLATPQGDCYFMLGNLWRTKIIL

SEQ ID NO: 45046 - protein, 566 aa, Homo sapiens
  misc_feature (1)...(566): Xaa = X or * as defined in Table 2
MPFKCKKQHTFNKTSPKEGAIIFTHGCLCTSPFNSELSEHLGNLKLSSWEHLHHRSQQTLSVRLHVPTPQPVEHEFIQLIYIHTGAKLQASKVIIATKDGKRRKSPLWQLKYPKLILREASSVSEELHKEVQEAFLTLHKHGCLFRDLVRIQGKDLLTPVSRILIGNPGCTYKYLNTQLFTGPFPVKGSNIKHTEAXIAAVCETFLKLNDYLQIETIQALEELAAKEKANEDAVPLCMSADFPRVGMGSSYNGQDEVDIKSRAAYNVTLLNFMDPQKMPYLKEEPYFGMGKMAVSWHHDENLVDRIQLQLWDPVDGTTASSAVPKQGRDKRREVPNTLSQPNSQEGLISAFHSRCVHAVFYKLTSAPKTTSLPDVPSDLLAEGLAASRAGQALWRCDKKSLLTLVRKINLQGKRDGGRSATNQQSQPHLDNTGLERQLEQKVGRCRSPWRGLGHLEGNAQKGHLLHGVNKNGQHLLRRHGVSIRAGRAPHLAAADTAPGRISCLGHSEALKPRIQAGGLGAESIWQVLWEGGSNSSVFCRHDEEPAAELPLPGKQASGGHMKRMRS

SEQ ID NO: 45047 - protein, 445 aa, Homo sapiens
MTTTIKVVTQSLPKLPSKMTATINIVTWSLPKNERGVFKKPKPHLRPPNPNQMQQSFGPARTPEPRISDWERIPTWGFRLSPGWMQCRMLETVIHFTESPSVNADFISKHLTDTSRNKCGQERPRPLLHHSFRNNWQSCFILLNFNSFAIFVEGVHSFQWVLAPNDFKNEITDLLRVKPQTLTVSITALKGGTYTVVFCSWWIRGLADFNNDPAPPHGVFHRASGFHNESRSHRTQLDPGKGPGTNAGKCEDAQAQLCKERTSFRVTMEEWASLVKPSPLSASVSPQSGKAKETVSKGPVQEPQSWSIHSCQLLRDDNLLTVLACSGRLLGLLATLEEPFSPQLRFGGPSLGLAEARVGSLCWRGEAHEGFCQTPKSTQDPHVWGGVYMEQAALLQDVDRILFQFQGNVERRIRSFSGEDAELKPREWPYAVMMELDFGLRRKSH

SEQ ID NO: 45048 - protein, 158 aa, Homo sapiens
  misc_feature (1)...(158): Xaa = X or * as defined in Table 2
MEQGSIITQAWREDALVLTKQGLVSKSSPKRPHVCHILKAPFCCSCTQHVGQSSSPRXANPHIRRESTPIAMSDQLQRLQYQFYQIPGTCLLPEVTEKNQGRICMVTDLDETLVHSSFKPISNADCLVPVELEGTMHQIHVLMRPYMDEFLTXMEEMF

SEQ ID NO: 45049 - protein, 101 aa, Homo sapiens
  misc_feature (1)...(101): Xaa = X or * as defined in Table 2
LSGLEMFQAGAGAPSSPGYXGSCWAISWSGPPDKHSNRGASCGLETWAGAAATDTAGPHPAAGRCXAXAGSGGDQGTGSTAPLPATPXPLQSLVXAAALPA

SEQ ID NO: 45050 - protein, 528 aa, Homo sapiens
  DOMAIN (198)..(216): PROTEIN NUCLEAR BROMODOMAIN TRANS domain identified by eMATRIX, accession number PD01234B, p-value=9.036e-09, raw score of 15.53
  misc_feature (1)...(528): Xaa = X or * as defined in Table 2
SLKPCMACLXHSXEKTLSDSSGRSWICAVSFGSPGPAAAPLPELSFPLRPGYTKLLPHATEEVSPFGSGAGRKLGPMLPSTAELCPGTRARWSEGYRDLGRQAQDLQAGRKSVVTWALEGHPREEERAAAKVQQCQRMWEGCSDPQELIPRPGRNPDPVPDSAVALLPWGPSRVPDLGPDSEHRPAHSRVQYWLHKAPAPPSPSPQLAEPATPPTRPSSPGSRSPSSWHRLRSWSLNADPWRPRPADLPPGNPAPPSRGGAHGTWGKDVRPLGRGSRLFSVVCGRREVQRAARRVGTTGPGWRAPGREREAASRXQPPGTGPASPMGRASSSGSRVSPGPIRRTAPWEGCSCRSRHHWGKGLGPPDGEPGPGSSXVAQPTVGGRRSLGPGGAAPARDAAAATPPGDAAAREGSGRHLRAPASRPQHQPRSPRSHPPASATTASLQKFRSASSEPPSEDRPFDFSPTAPPQCPRVAPSAGARXRAGGRLPEPRRPGPWGGGSRTNLTIPTSLHGPTPAAARTSPHRKSR

SEQ ID NO: 45051 - protein, 108 aa, Homo sapiens
  DOMAIN (14)..(42): !!!! PROTEIN ALU SUBFAMILY WARNING ENTRY NUCLEAR PHOSPHO domain identified by eMATRIX, accession number PD02454B, p-value= 5.345e-21, raw score of 11.61
  misc_feature (1)...(108): Xaa = X or * as defined in Table 2
SQHFGRPRWVDRLRSGVRDQPGQHDKTPSLLEMQKIAGRAGGCLXSQLLRRLRQENPLNPGGGGCSELRSGLCTSVWATGRDSIXKKKKKKKKRKPWSLLSLIVLVQF

SEQ ID NO: 45052 - protein, 124 aa, Homo sapiens
  misc_feature (1)...(124): Xaa = X or * as defined in Table 2
MSAAMRERFDRFLHEKNCMTDLLAKLEAKTGVNRSFIALGVIGLVALYLVIWLPSLHLCGFLLWCMAPSPSNGAELLYKRIIRPFFLKHESQMDSVVKDLKDKAKETADAITKEAKKATVNLLX

SEQ ID NO: 45053 - protein, 223 aa, Homo sapiens
  misc_feature (1)...(223): Xaa = X or * as defined in Table 2
HRTGIPGSTISSPGGETVPEMTAAMRERFDRFLHEKNCMSDLLAKLEAKTGVNRSFIALGVIGLVALVLVVGYGASLPLQPLLGFCYPAYISIKAIGESPNKEDDTQWVXTYWVVYGVFSIAEFFSDIFLSWFPFXLHGXKCGFLVGWCNGPEAPSKWGLKLLXQAASSGPFLSLEATKSQIGQVLVKDLKDQGPKETADAIHXKKPKKSLPXILLGXKKKKK

SEQ ID NO: 45054 - protein, 147 aa, Homo sapiens
  DOMAIN (35)..(52): Nt-dnaJ domain proteins domain identified by eMATRIX, accession number BL00636A, p-value=5.304e-15, raw score of 8.07
PQFPCRRFRALSEEELDNEDYYSLLNVRREASSEELKAAYRRLCMLYHPDKHRVPELKSQAERLFNLVHQAYEVVERRRTPAEIREEFERLQREREERRLQQRTNPKGTISVGVDATDLFDRYDEEYEDVSGSSFPQIEINKMHISQ

SEQ ID NO: 45055 - protein, 50 aa, Homo sapiens
VVERRRTPAEIREEFERLQREREERRLQQRTNPKVSQGPRFMRTLHEKAS

SEQ ID NO: 45056 - protein, 360 aa, Homo sapiens
  DOMAIN (33)..(50): Nt-dnaJ domain proteins domain identified by eMATRIX, accession number BL00636A, p-value=5.304e-15, raw score of 8.07
KVAKMATALSEEELDNEDYYSLLNVRREASSEELKAAYRRLCMLYHPDKHRDPELKSQAERLFNLVHQAYEVLSDPQTRAIYDIYGKRGLEMEGWEVVERRRTPAEIREEFERLLREREERRLQQRTNPKGTISVGVDATDLFDRYDEEYEDVSGSSFPQIEINKMHISQSIEAPLTATDTAILSGSLSTQNGNGGGSINFALRRVTSAKGWGELEFGAGDLQGPLFGLKLFRNLTPRCFVTTNCALQFSSRGIRPGLTTVLARNLDKNTVGYLQWHCSSPLLQVQRPHRNTRACAPEPSFRPFLHVPTWDAECSGARTPSTAWTSAAVKLREACLSGPGSGSHQLLLLTPRSKRRTGGG

SEQ ID NO: 45057 - protein, 253 aa, Homo sapiens; identical to SEQ ID NO: 33559

SEQ ID NO: 45058 - protein, 213 aa, Homo sapiens
GRRRHRRRHRDCSRGDCYLPTGTNTQQPLPPPREPLPELPARTPDLSMQNSEGGADSPASVALRPSAAAPPVPASPQRVLVQAASSNPKGAQMQPISLPRVQQVPQQVQPVQHVYPAQVQYVEGGDAVYTNGAIRTAYTYNPEPQMYAPSSTASYFEAPGGAQVTVAASSPPAVPFHSMVGITMDVGGSPIVFSAGAYLIHGGMDRPELLANL

SEQ ID NO: 45059 - protein, 702 aa, Homo sapiens
  misc_feature (1)...(702): Xaa = X or * as defined in Table 2
MKPDDNSTQNEGGQSFEERHETLQRVKFRGGPKTAPGRKLIAFLGQMNSGTSGGQRVPGEEELMAGGATCLPNTEAHQPIRMKNLHTPAFRLCPLTLQDNEADAFWHQAFVDWGMPTGKKPQTLGLTYKTTHDLSMQNSEGGADSPASVALRPSAAAPPVPASPQMLPLELVILGVVPLDKCIPAQWSKEGQTNSYTYNPEPQMYAPSSTASYFEAPGGAQMVGITMDVGGSPIVSSAGAYLIHGGMDSTRHSLAHTSRSSPARSFRSNSKAPSSRKFCCXLPTLSSKTLSLFSKNLLRKLPLGKHSPDSVQWPWIYGLLVAGSESLASLLFPKASSSGETLGFATGQLAGESRLPSLLAFILVPIDVAWGKEQLVTQTTVYRVQGSGQHLNKAWQEPALVNICGMGEKVDVQVGLCQHRAHLDGWNSSRAASVWPGETLTHHQDQCQANLPPGIETSILGTKGARYPSPQEQGGGRVWLERLDPRGAVSGTDLXCLPQSDVPPGRAXSGGTGDKSISTHDKSGRGNSKYHYYGIRLKPDSPLNRLQEDTQYMAMRQQPMHQKPRWCRAELGGAGSPLGMEDVSHVFPEFPAPDLGSFLLQDGVTLHDVKALQLVYRRHCEDVVMNLQFHYIEKLWLSFWNSKASSSDGPTSLPASDEDPEGAVLPKDKLISLCQCDPILRWMRSCDHILYQALVEILIPAC

SEQ ID NO: 45060 - protein, 971 aa, Homo sapiens
  DOMAIN (218)..(255): 3 kw RESISTANCE BENOMYL YLL028W CYCLOHEXIMIDE domain identified by eMATRIX, accession number DM00973A, p-value=9.149e- 10, raw score of 21.17
  misc_feature (1)...(971): Xaa = X or * as defined in Table 2
RTRSLTRKAMAEHAPRRCCLGWDFSTQQVKVVAVDAELNVFYEESVHFDRDLPEFGHVLDVHGVHVHKDGLTVTSPVLMWVQALDIILEKMKASGFEFSQVLALSGAGQQHGSIYWKAGAQQALTSLSPDLRLHQQLQDCFSISDCPVWMDSSTTAQCRQLEAAVGGAQALSCLTGSRAYEFNLVCDRKHLKDTTQSVFMAGLLVGTLMFGPLCDRIGRKATILAQLLLFTLIGLATAFVPSFELYMALRFAGLLPSLDLASAMSPYXQNGWGPHGGRRPWSWPSATSPSGRWCLRDSPTVSATGGSFRSPALRLAYCSSLLLGSARICTLAPDPWEDGRGDTTDPENGLGQXAETLPGAHEPAGPREDRPLRECPGSVQTPPAPEGDPDYLLCLVCGQSGVLRPEPPSGGLRPGRLSDAAHLWSCXGACPLFQHLHDAEVWPQVEPRWGPWSWVAXCVSSSSSSQQICPWWSPCWLWWGKWPQLLPLPSPMCTLPSFSPPSSGRQAWGWWASSHGSGASSHHLXSCWESTTLPSPCSSTAASPSWPASLCTLLPETHGQGLKDTLQDLELGPHPRSPKSVPSEKETEAKGRTSSPGVAFVSLGTSDTLFLWLQEPMPALEGHIFCNPVDSQHYMALLCFKNGSLMREKIRNESVSRSWSDFSKALQSTEMGNGGNLGFYFDVMEITPEIIGRHRFNTENHKYFKGKGAPGHPMPSLKANFDLLACLRGVGSSTLLLWPAVLGAQTRQAGVNEGRSQVADFLRIPVTGCPEQRRNPPSPPAPLGTGGPAEERLQFPGVAGSRRGRGRILRAGGIGRASPGEGTGAPRPRAGQGRGGPGKPESGGGGPVALRPGDCTCCVLKSQPRQQRRGACSAMAFRVRLRVRQSVRPPRGVIVAALQRPETQGPAPSSARPDCGPESRGGLALWRRLRGYASRDRVLCNRRCPHAARFPSKRTPSGSPHLHLMSSWAVP

SEQ ID NO: 45061 - protein, 236 aa, Homo sapiens
  misc_feature (1)...(236): Xaa = X or * as defined in Table 2
MGPAAGAPTSRASRGPRAPALRAAVGRRCPRPEMPCQCHPLARCGLDPAWTQLPQETAGAPRQDPRCTNQLICEHLPLEGLGFGYLGNKDSLRHVKVVAVDAELNVFYEESVHFDRDLPEFGGLASSAVTQSSSDDLQQVPXSLQSLHAAXSLQTNASPFTFEHSFLGKRHPKGAGQKRAESPTRPPLRLQEAAPGELQRPLPYGTQVPAGLCPSVSGLRLRARALLPYRTHSLSV

SEQ ID NO: 45062 - protein, 84 aa, Homo sapiens
MPEPPTPSVDSCAAGASPTSATPCSTVPTPIDHPRAEQCERTAQDWQAAPPAAPLRDCKYTNQHPVFSSRFVSAPIDTLYLAAL

SEQ ID NO: 45063 - protein, 42 aa, Homo sapiens
ARHKGSPRPHQTQEPSWLHPVDPAPGLQVELPASPEPCARTI

SEQ ID NO: 45064 - protein, 107 aa, Homo sapiens
AGRAEMQQERESHEEAKDPSPLSPREGSQKQQQNVNTSTPSHCPRPPLRMPPPAPRRPVPCDHPRAEECERKAQHWQAAPPAAPVRDPLGEASWAPESGGDVESLYI

SEQ ID NO: 45065 - protein, 175 aa, Homo sapiens
  misc_feature (1)...(175): Xaa = X or * as defined in Table 2
MTKTEREQNEQLDGGGYGERLGEYSLFLLCVPSELNQGKCERVSSYFGMNLSGVLKKLPFPPTRESWPPPHFTGTPHNHHGGVSNGALGCAQRCSLHHATNAGGWERGGVSNSRLFFFLLSASFSDAKIKPAPSPIDHLRAEECXPPPLSQPPALVAWCREHLWAHPKAPLLTPP

SEQ ID NO: 45066 - protein, 156 aa, Homo sapiens
MASAAEVRDGCRDRGKKLGKEAKPDHACALGIPDKHSLLADAAAENSYCPEPLNFLGTFPSSTVVHISFPSSSSAVNLFMRPLLSVQEAVEDPETWKGIFQVSFKAPSPIEHPRTEECGHTAQDWQAAPPAAVVHDPLGEASWAPESGGDLENLYV

SEQ ID NO: 45067 - protein, 380 aa, Homo sapiens
MKNFPEFPERSLREPDGALHFGSRRWGNKESTAHDTQTERPDGRIDRRTERVEVCARLTRFGSARLGRIALDRHASVLVWDECGCGRIGTGSGSRSASGSETVLDMGSAWRWESGSAWGGGSGTSTVIPNRIRVGIRNWLGNSHADRASESRHAPGTGTREGLSDSGCWGLTNTTAWNRPVSSRSSVPFSSPRLLPHKNKRALASLALTSSRTLETRTTTPTRTPLAKNNPLPYTTTPSKDISTRWRSTSVGPERTLCIPGLQPLDSSNSRKRQPLIPDLEFTKGQCLQEFSSDLMIDALPIMSPRKSPMPLSPEPSDNPLIALCPVPSQQQQTSPEAILETGRPAFHHTPAHAELPLPHSVLPLTTIPASKTASESPLA

SEQ ID NO: 45068 - protein, 71 aa, Homo sapiens
  misc_feature (1)...(71): Xaa = X or * as defined in Table 2
WRSMSGLRKRQLASQISYCPCWSCPXEESHCRRVSPAPLAXLLSPCPAPQQRSHTDPPPFPFKHFPLPFSG

SEQ ID NO: 45069 - protein, 194 aa, Homo sapiens
MDEGRMWRKGGDQGEGGDPAALREPLCGPAKTGAGSLSLQGGVEGEERGGTGAARGAFGPAGVPGGRGLGGPCTRSSQPALLAPDNEEGLSTQASGFGGCTGSPSSASPPALCSISHHALAVFLRGRSRDQQPAMPEPPTPSMSSCAARASPMSAAPCSRAPSPIDHPRAEECGHTAPGLAGSSTCSPGAGSTG

SEQ ID NO: 45070 - protein, 80 aa, Homo sapiens
  misc_feature (1)...(80): Xaa = X or * as defined in Table 2
TNPFNLLQHXKKPXCYTYISITDPTDACHKNKAFSSPAVSQLTCIFSSTAGSFFVLSGHSCGHLAVFSLWPRSPQLPGTR

SEQ ID NO: 45071 - protein, 47 aa, Homo sapiens
HRELCLLSPSEDPRVAGVHPAPPRGPRSDSHLSGHSCGHLAVFSPSC

SEQ ID NO: 45072 - protein, 234 aa, Homo sapiens
  misc_feature (1)...(234): Xaa = X or * as defined in Table 2
MTKWKSNPQIHMELQRTLSNPNNLEKSNVKTYYKAKIFDDNLIQLTFQQHRQDRDTEQEKKKEEEREKRKQQQEPLRKKAKMQTVRPGFDLTQGPNCLTPHGKTWSRLPPKNHRRPYTSRPEGPRVKAXNHGPEGRRGTRLPPEAAKRAQAEEAAQXWPTRSTLRLEVTPRAMPPSPSEDPRVAGVHPAPPRGPRSDSAPLRPQLRPPRSLFSLASEPAAAGNARGRHSVLALY

SEQ ID NO: 45073 - protein, 70 aa, Homo sapiens
  misc_feature (1)...(70): Xaa = X or * as defined in Table 2
SPHLMSINLITFANFLFPCEXRNSQFLKSSIFVMWMIHNGMKCRQLDTCHCRHGTCKDSICPGLEESPLP

SEQ ID NO: 45074 - protein, 178 aa, Homo sapiens
  DOMAIN (70)..(125): kw TRANSCRIPTASE REVERSE II ORF2 domain identified by eMATRIX, accession number DM01354Q, p-value=5.554e-21, raw score of 9.23
  misc_feature (1)...(178): Xaa = X or * as defined in Table 2
GRGMQSPAQVDPAAKRGNIAGHTAHLWPKGGTLPLCFYHLLIMQIREQPXSSLEYPTFRILSLVSGTKLNKILANRIRQHIKKLIHHNQVGFIPGMQGGLPTPGSEQGHLRVSPSSPSSTVTLKLFNFMEPFENLNLSKGKASVHTITQENTDSLKVQGSQFSQGHEKRTLDLKVSTQ

SEQ ID NO: 45075 - protein, 518 aa, Homo sapiens
MEMLKVFMQRFGRARNADKLVIGVAEEAKPEFVKFKGILTTVQKLQHISPPKTLTDERVVCELCSAEYHTWPSQSLLVIGASSTCHLKKTVLWNNKAVTHTQDHPVAGHTGSASRCLDLLNGPPRGKDLRSLRPSTRGGRRSSPCLCGTDQRTEEKRCGSGALMFENAVLSDLSPRTHCRWGQSRGQAAGRLGGLASGGNGPFRARRVPGTKRSGRGSVPGEPGQRGRDPEGRLGACPEARVPPAPARRRPTRGSSHTALPERKHQGKHLSLFSGWENCEGRRQSNRQCRELNIEHAALAAGTRALRLLPRSARRRFRRAAGLAMEDGRNEAHRCWKKVSQTWWLKATEIYSLQVLETRSRKGVLGAKIKKIPGDSYIQQSTKTIGREQWFTKKMAPVPATSASPEKLLENADSQAPQTYGIRNSGMDPSSSFRTGLGTRRTQRDWRVRTFSYVCSGKLSSMAAAQSPRVSGYTAAIIGSFVGFRVVLYAESSECRGHYLSHPCGQSVVVWHHPHSCL

SEQ ID NO: 45076 - protein, 508 aa, Homo sapiens
  misc_feature (1)...(508): Xaa = X or * as defined in Table 2
ESDARQGPFPLENTRPHPSCMQNHGICRSLHPGLCGCPPTARDAAPATAGGVPAYGPLTGAPPGXLPGAGIGSKQSSTMGPSGAGSCLGLXAPSQPADPGSIQGVLVIADTEXPLVGGDGGLEAEHQWQXEAGPGGLIPKHMNPQSRQQSLFGRRGYRDSSLRSVLGRTGQQTXHAELGAGVMGPGGNGRXGHGPRGLPCLVQGRRGPGVAAVAAGVSVAVPSGMLSENGPGCSKPHSGDAGQRRGLRENLXGVRALIWGAASSFLLTEQDLQELADCLHSGRKTCFFYFQGRGDVAPGPVAPAHHRLAGISTVVPEGPGLCVGEDRQLPGGNQRAEPPPXLVRSVSSLTGLPALGPRQMPNAGAGNGSGKXRGVRGSGPDWDCTGTHGGAGTGKLLWAGLSLFPLSGKSEAHQQRAAGHGYGRGLGSPGRPPRSRKGRVLGSESAPAXGSPQPLRSARQKPESSCPRQGQPVGRGPGAPLEAGHCSFPRPLGPARSLHPDFPQGLQA

SEQ ID NO: 45077 - protein, 123 aa, Homo sapiens
  misc_feature (1)...(123): Xaa = X or * as defined in Table 2
RRPPSWGXRGCSQLPECAADGSLEDHGPLPPMVSCFSRHPAGRFLRVFPPSPLLAVDCCWHNNSYVVAVDCCSATSCSLLLYPSQEFPPHKFLVYLVLSWHQLLGGLELICTQQPVNPVVSDG

SEQ ID NO: 45078 - protein, 273 aa, Homo sapiens
  misc_feature (1)...(273): Xaa = X or * as defined in Table 2
MSLVRTDGKVSFPHSRAASSPPPRFAGSLPWTPKGHGFTSFPRLEGYCPSREGPSDWGRNSFRVSSWAWRPSQGVSHHTPGQGPPSPGNRDKXVATRKSPGQPGSSPEPGWSLQSTSSPGATRTKGNLNTLKGXKQVVDXWVGVGTGWEGSGAPQSPQPSREWRLSPRGVGVVKETWPSPWSGRXAPPCPGQPQGQQTHMERGGRXGXQVGACGLGPXGQWSSVTNGKDTRAPWSPPPRQRNGRWPAPPPFTFHYYYYYYYYYYYYYFFFFGE

SEQ ID NO: 45079 - protein, 135 aa, Homo sapiens
TEESTSVLSVPNQTGAGAARIGIVSLRLCGLYVTSPPRAARMHIRPHGPWPGGSHHENGEAGPESEGAPASASGRGAPEGQAWPPRDAVLSSLMLALFRTKSARHLVLGTRQTAASPFPFFSQPSWYCSLGVDGG

SEQ ID NO: 45080 - protein, 200 aa, Homo sapiens
  misc_feature (1)...(200): Xaa = X or * as defined in Table 2
PTRITRSAGSSSWGSCRPRAPAPFSWSRPCLQGPRGXCRGLHSRFYAAPXVQGHPVHILPYSKFRRGRAALRPRGQWGLDSVLGTAVCGCGPRSESDICSGRXGPEWYISPPVPPHVHRGFQQLNCARQVGKGGGGPGCPMLGNHSSQVGLGLGGQDQDSLESPGRVSSPSGPSAASDPGGXGFQGNPDPVHPAPAPPDW

SEQ ID NO: 45081 - protein, 532 aa, Homo sapiens
  misc_feature (1)...(532): Xaa = X or * as defined in Table 2
KREWRPRHHPLGPPPRCAGRSAPLSGPASPFSXWLPPGHGPCGRMCSRAARGGDVTYRTHNTRAPSCPSLHWVGERGXDAHTRTPSCPSLHWVGERGXDAHTRTPSCPSLHWVGERGXGCPHSGLQLSFPPRSAGCCKALFEAEKSKGDTGLGKRGWAGGGAGGAARPCICNPTVPCPQSTQSPPVPPGTRXQLGSSASHSRAASSPPPRFAGSLPWTPKGHGFTSFPRRGGVLPFPEGPSDWGRNSFRGPAGPSMWXPAPPSDAQVGHGPGRAGLQRCRGRGGHTPFVLAAAAIDSAYFSXXDPXVFGSNFPHLSCFPGGCGEGNQXARRRPLAGAAALPGPNLESWVCELSVAGPAVWDPVPSPGDPTTGPESPRNSAGACGAQGSMRXTXGTPATWSLGPPPELPGSRHQRQCECGPAHVQRERMPGWACMLKSVAQRGFQRRXQLSKAQAAAWRVPGGRGAGKDXGWRRWGVSRGGGGLCCARGGGGSSVRRGEVEGSGCARGGGGCAGWRALSPSSLPISGAQELGS

SEQ ID NO: 45082 - protein, 89 aa, Homo sapiens
CSAGGPWRAPQPRRFHRRRRPAQLPPPLPLPPLPASPRIHNRTFPRPSQRTPPPAALGCPEPGSRSQGRGHARPPGSGEGDPTVSSPGY

SEQ ID NO: 45083 - protein, 71 aa, Homo sapiens
FDWWWQIQRAEPEFFPPFLAQLGSGKAPLSGLKIAARPDGSDAACLRPRLSAPGPQCSADGPWRAPQPRRF

SEQ ID NO: 45084 - protein, 63 aa, Homo sapiens
LLWQELLARQPSSSIPAIPFPPFPFFKTALQLWGLQPASGFLTLLVPSFRRGKAVEQLLHSWQ

SEQ ID NO: 45085 - protein, 161 aa, Homo sapiens
  DOMAIN (26)..(62): Synapsins proteins domain identified by eMATRIX, accession number BL00415Q, p-value=9.027e-09, raw score of 2.23
  misc_feature (1)...(161): Xaa = X or * as defined in Table 2
EVEKHLCQGXELLRAQHNXAAACRRPRPPAPGPQCSAGGPMARAPAPQVPPPPPPCSAPPPLPLPPLPASHAHPQPHFRHGRRSALLPRPPWAVRSRGALAGPRTRAAAGLRGGAGAAPAPADARFPASSPAEXPKFPQNSARALTGFPRCTDPTVSSPGY

SEQ ID NO: 45086 - protein, 193 aa, Homo sapiens
  misc_feature (1)...(193): Xaa = X or * as defined in Table 2
TSGCSHSLHKPAGVSTRPPTVASICAPRPRTSPLRRGSLTLWPFPGGHLTLLETPGFDSCPEEVEGPRFSTFKTSXARGGRRQRCAPRGRREVGPPSAAESGRARGEPPRCRLLCRGGKDPQPRAGEGEAAAGTPEGSRAGASGSEGALPSAASPGNSSGRSRPEAGANPKGAPRRCVWGEPGGRRTRLFPDE

SEQ ID NO: 45087 - protein, 291 aa, Homo sapiens
  misc_feature (1)...(291): Xaa = X or * as defined in Table 2
ALHEFAMSRSLHASLHXSXXSTCPXQQPAPAPAGEPRARFPGKSSSASSGPGWPRNHGKQLHLPAQPQQQGRISSPRVAGGSGCTGRALLLAAGLQNSTRSLNPRDPPTILSHRPLQGMPDAPRGCSHSLHKPSRSTPLSGQLXPPSAPHAPAQAPSVAGPLPCGLSPGDTXRYWRLLRFDSCPEEVEGPRFSTFKTSXARGGWRQSRVWASARGASTLQASVQGRXNPQPRAGEGEAAAGTPEGSRAGASGSEGALPSAASPGNSSGRSRPEAGANPKGAPRRFLGGCLL

SEQ ID NO: 45088 - protein, 1169 aa, Homo sapiens
  misc_feature (1)...(1169): Xaa = X or * as defined in Table 2
SQDTPGDLQCHGDLLXDGAVLSEAPGGERVPRDDXGGVCPEGVPHVSLLRDSVAEALQPRGEAGGDQVPEAHARPPSAQRXPAGAGLRLHPPAAGGVPGQSGGHLPKIQDDLTSKSXTNSITKTLFPNKVTLSDSGRAXILEGHRSTQGSLGLEADPGTVSHHQHPCPPNAATHHFHRTARPGVQQGPGPASVQQPESDGDGALLRSPCSLLPQGADEVLLQPDGDKQGGRPRGDSESDXGYSERRXAQDEYQGHLPGYPGSQEHHLXYPVQGEDGYSPHHWAVGSLWLPGENQRLGPEVPVCAADLIHLQTDKSPGEVLSEGLGGEDGPQSHHGPLXRSLPLLSVGXPPSFGXGCCATSWRQTTWKLXLLSVSASQPGRTPAPWPGCGCQRGWQEQASSSLXKXGQRAPRQGARCSGATSLEPWCPPGADVITLQGGGSWDSHAQPLEDPEPEHRTLHGRHVGAGDCATGPVPGRTYXGSLGIRKPGKTSXFSFCETPSRRPGGLAGPALEXRAEQPDCELXQPLSGEGLSVPGLGLHLGHRPGGQQGGGPAVGAAVQDGLQQXLXQRGCDYVLWPVCPGPGKNGAECASXLRGEDPGVRAVLADQCLAEGPSLEAGDSEKCPHGDVXLRGLLLPPPVAPQPRGQPHHRXDHSPLCQQLPGHLSQNGLHEECCAGYQGHQQHQGPGGLSLCPEDDSYQHYSGGHQGRTDXQPGFSSASLGDGGPLAPEQAEAFLLHRGKQXADGYQHTFCNFSPTPRRGQXVHXDPVCKCPELPGAADGEPPAEAAGPQGAAGDGADPPKAGAVWHNGRTHCPVHLXCPSKNPHGLNECPVQPARSSRKPDLLLVGPFQAEGAXEMXGGPPEHRCGEDLLCILQNRQGGLHGVXLRXGGLAHPGSSARTLGPXTCSMTRPLSPGXPSSSDAGQGAGGQGGRDPECHPGAPAGGGPPRGAAPSHXRHPAAGAPPPGDHPHIAPEAATAHGEPPGRGVAGSVGERALRPDHAPQPDGPAAVTAQPQNQCHLQGXHLAPGCGGPPDDPVHHPPSHSEAGXEXQAPGLPPXPHLHPPAAAWKQPPTRGRPAGLEDVEAGPHHSSAGGDEPAKFMSGLSSVPGEAAEAGSFAAGEGCRPGGRRGPAGAVPARPRQHGPGRPQEGEAVPEGLAGEVPGPPEGAR

SEQ ID NO: 45089 - protein, 883 aa, Homo sapiens
  DOMAIN (369)..(404): PROTEIN BOLA TRANSCRIPTION REGULATION AC domain identified by eMATRIX, accession number PD02462A, p-value=8.291e-10, raw score of 22.48
MEQVPLIFKVCQFIVPICQKHKQHLTQLKGDNLFFIVVKGVIVLSFLNELREVVPSLGPVSVCLSLCILSMAIREYLLVKTHPPRWAAPLSFIKIPARLAAHCLLDFLDEFLLLFFLPPAASINTVPSLKILAHYAMWTVREGMQVATVMSFLTNPMHKIPAGDLFSSAVAAATATPSSRPQGWGCVVLGAAASTVTVYPTYPFLVKLTDPMVKMICRPIYFYINCFFLLKAPNCLSSSMQLPHGGGRHQVRPLISEIEVERVAQTYLGVCYMKKEPESQGWYAVMDSWFPLCVWLGVGVGVPVHGEYRTHRTFVQHYECDDCGMAFGHVSQLTGHQKIHKVGETHEYGENTRGFRHRSSFTMLQRICTLYKHFECNQCGETFNRPSKVIQHQSMHSGLKPYKCDVCQKAFRFLSSLSIHQRFHVGNRVNLTRHQKTHTQRKPFSCNFCGKTFHRFSEKTQHLLIHTRKKYYTCNYCKKEFNPYSKFILHQRTHTGEKPHKCDVCEKSFKSISNLNKHQKTHTGEKPFSCNECKKTFAQRTDLARHQQIHTGKKSFICSSCKKTFVRLSDLTQHKGTHTGERPYQCTTCEKAFKYRSNFTKHQKTHSIGRPFACNECGKTYRLNWELNQHKKIHTGEKPYECGECGKRFNNNSNLNKHKKIHTGEKHFVCNQCGKAFSLNSKLSRHQRTHNKKENSSKSVSNLNKHQKTHAGEKPFPCNECKKAFAQRMDLARHQQIHTGRKPFICSSCKKTFVRLSDLTQHKGTHTGERPYQCTTCEKAFKYQSNFTKHQKTHSIGRPFTCNECGKTFRLNWKLNQHKKIHTGEKPYECGECGKCFNNNSNLSKHKKIHTGEKHFVCNQCGKAFSLNSKLSRHQITHNKKKP

SEQ ID NO: 45090 - protein, 271 aa, Homo sapiens
  misc_feature (1)...(271): Xaa = X or * as defined in Table 2
MEEELLRELLYSENWWSIPYNDTIQELCCWAVLKRTFINGNTSRKPGMKMVTGLKKQERRSKQWGCEKEAKFVPDMWIVLEVGRPEERGIDGKRWGKSCSVEQSVWAFQNPIWSKAQTLLNSMKAYEKGKEGVEEKFEARRSWFMRKKAISHLHNMEMQGEAASADVEAAVSYPEDLAKIIDESDYTKQWISNVDKTVFYWKKMPSRTFIATEEKSMPGFKASKDSLTPLLGTNAAGGFXLKPLLTYHSQTSRALKNYAKLTLLMLYKWNK

SEQ ID NO: 45091 - protein, 131 aa, Homo sapiens
PKQSAKTIWTSTARPEDVVTCSFKEEFLPGNTHHDFSIKNRSDPELEVSRPLARPENFPANRSHSLLELRPCRGRWAAHWTGCSSLLDASSAPRTDQPSLWRNLPTASLGGPWSHNQPGIVFQNTYLMKWP

SEQ ID NO: 45092 - protein, 287 aa, Homo sapiens
  misc_feature (1)...(287): Xaa = X or * as defined in Table 2
VDVDLACVRGLLCSCDEFLSWLALNRTVLATPALPSCLSQMASSLPGLCARTRRGERADSQRGTCAFFSPARTASQAPLVASSVRKQRVWAPNPLNCHTLPPSRGSQRGGYIGEEGVFGSRVVGIWVPGPNGSPWPLGVQRPECVLLGVGSGSSSHELFSEADFISRLLAPSPSPAPASMGNAIEEEAPELGPLGRVFVDDFHYDYNFIHLHEDLCYGPLEGPDLDLAGTGDRTPPLHSRPRASLSPSALRCPXALGFWSTLAWGSPNSSSRVPEAQPPAPSLAETG

SEQ ID NO: 45093 - protein, 1040 aa, Homo sapiens
  DOMAIN (938)..(982): Synapsins proteins domain identified by eMATRIX, accession number BL00415N, p-value=8.292e-09, raw score of 4.29
  misc_feature (1)...(1040): Xaa = X or * as defined in Table 2
GGRKAAVGVETRPQGSAQPTWLPVHGDTCTTLLLPCRAWWRLGGLPWAASVVGAKCVWTPPERGLLMLHKPMPGWSSGYRVVLPAVAFFRLRAQVTKLGEEVSLRFLKREAKLCGFLQKSFLALEKRMKASESSRLKLEGSLRGELESRWEKLRGLMEERLRALQGQHEESHLLEQCQGLDAAVAQLTKFVQQNQASLNRVLLAEEKAWDAKGRLEESRAGELAAYVQENLEAAQLAGELARQEMHGELVLLREKSRALEASVAQLAGQLKELSGHLPALSSRLDLQEQMLGLRLSEAKTEWEGAERKSLEDLARWRKEVTEHLRGVREKVDGLPQQIESVSDKCLLHKSDSDLRISAEGKAREFKVGALRQELATLLSSVQLLKEDNPGRKIAEMQGKLATNQIMKLENCVQANKTIQNLRFNTEARLRTQEMATLWESVLRLWSEEGPRTPLGSWKALPSLVRPRVFIKDMAPGKVVPMNCWGVYQAVRWLRWKASLIKLRALRRPGGXTVRVXAAAPAPGCGASPGPLLASAGPXALXGTPSSAATSQPGTRPSSSWAPPCQAPCPXXRPAASPGMGAPSSCPAASAGPPHSTAGAHSPTGWPSPACAAGPQCXTXGSGWSCWPGRSFPASLFGSWPACPASPRSSAQGCLPLAAARMIVAWPAPAAGPQPXTPWPCLRRKSXGLSRSYEAGTCRRHSLSAGGGHPPSPAPLAGVRSPPSATWPGPPGTSSLHLPIRSLPRTAXGPASAPADRAGCSEPGDGHSAPLTARPAAPRMPPEPGSSLGAAPALHASPAGPARQPAVRPPGSPAHRRPAPQPGFPPSAPWRPRLSPRPVGHGSATPGSAAQTWSAGPRQHPGPGTAPGGGSPHAAPAGPAGAPPSAPEASPTGSPARPAGCPPASAVSSPRPSFSSPGPGSSSAGSRTAWPPSSGSAGSPLRRAWSPGPSAGRKPRRAGPPLYPDDQPGMGLXSMRRPPLRWGPDTLGTHHRGCPGKAPQPPPGPAGKQECRAGVPMHGEPGGLGRALGPCLHTNSCFPAA

SEQ ID NO: 45094 - protein, 492 aa, Homo sapiens
  DOMAIN (251)..(278): Protamine P1 proteins domain identified by eMATRIX, accession number BL00048, p-value=4.263e-09, raw score of 6.39
  misc_feature (1)...(492): Xaa = X or * as defined in Table 2
CLGKAFSCRELNAYLRLPTFFIVFSLRQPSLRMHSRAWVKTCGAMPCSCCRIRHCSSVTDMAVRSLALLQLVNRTPLRRRQISAACQRMSTFLFFRACTFXPRNRSSSGRHDLTARPRQAILRQNFLKRAQSRNLTAPNSPRXXLLVKTYRQTSRPVSAAHXCPRXRGRAALAAACHSGSPGARRQTAGPAEGPARXTRRDFLXXRAACLRRRWKWPEXLXRSRSSSPXSQGSCPPALPAPPRRCSAGSRTGPAARWCRAGAGSRRHAGSSSAXXXSRRXGRSASGRRPRHGGTAGSGRWLWWARCPAXAGIPWPSWPCHSSWPPQSVRVVSSGXRASLHSPGLDSSGGGLQSFLLVQLPAQGKTSSQPRHAAAPSAAACPHAEXCTLGSCPRSATLSPTPPRASPPAGRSAVSPCPPGHEGVLVISKHHLLLLSRSGRGLGGNVVRPCSVQPMDGVGQELAVADRDQLPCLVCQDGECPLKASGRPVLGCP

SEQ ID NO: 45095 - protein, 175 aa, Homo sapiens
  misc_feature (1)...(175): Xaa = X or * as defined in Table 2
ACCISHGNLWHHLDQKHGLQSXGEKSRLFSRPNLQVPVHTGLDHRARYLTGPRKQGHLWPTGPSSVFDNENFCKLSVGMXTGRASARQQIQSPFAESGKAFSDICSVSLRLCVLPHPWNSRLRSPALRNSLKYSVTSSAAARRKLLPLASGPLRLGPRSLPTRLQVLRWEKVASA

SEQ ID NO: 45096 - protein, 225 aa, Homo sapiens
MASDLVNRCEACDLPQGPISVHQFPRLSNEVTTTVGRNSESPNQRSVSGPWTPREVRRGVAAAAHGFSGQNAKWAAHIPATAMSFALPYSVLHSPHALTTHPLNPGDAVTMPSWTSTVSAANASKGRSFSQCFQSTEEGQERRRPRTSQAKVQQGSTAGKVNELITLAGHIKSQAPHGKRKPPPRTFLERGFYGFSYSAVLLVVQRSVFGEGGPPLAVLHGPLPQ

SEQ ID NO: 45097 - protein, 781 aa, Homo sapiens
  DOMAIN (563)..(583): ALPHA-2A ADRENERGIC RECEPTOR SIGNATURE domain identified by eMATRIX, accession number PR00558C, p-value=1.733e-10, raw score of 6.54
  misc_feature (1)...(781): Xaa = X or * as defined in Table 2
MASDLVNRCEACDLPQGPISVHQFPRLSNEVTTTVGRNSESPNQRSVSGPWTPREVRRGVAAAAHGFSGQNAKWAAHIPATAMSFALPYSVLHSPHALTTHPLNPGDAVTMPSWTSTVSAANASKGRSFSQCFQSTEEGQERRRPRTSQAKVQQGSTAGKVNELITLAGHIKSQAPHGKRKPPPRDSHVICSMLRKRKPDETPSPSSDAQFSGMLAVAVSSLLCPRSSPSQQWHCHSPSTTILGSSDVSDTSFQPSTKLGPVHGFPPQSRDCILDFELIRKVTGAWSSLTAGSWETKIQEFSEEDILAPHRITPGPHSSKSPVHFLASLWGRKTKLYHHTIQDKEPRSVPEAGSSGRRDGGGAAHSMLCMAPEPDHPGSNPNCRSPATLHADADGNLQREAAKCQGDGTQVSTHVDHTSAPRQAETGPATGENEKMESHGRSKRGLVGADQCPAETLDSYTLLVGHKKRDKDRQTPGPAPQVNSFVPENYLLRGPLAPLGSAISMKTAGAVHIRPSGDLGRAPAPAVRPRPRPPRRPRRLLPGPAHLPGAPRPPAPAPLSRRAARQSPAAAAAPPPGCERRGPAGPASGAGPPAPAHGARPGGKPAANPPRAPQPXPRRRRSRRRAQPRPGPAPLSRMRAEGPARALRPPPHYQPELGPPSETVGPVTELLAPIPTARFPTRSHPYPVTASPARSSXTSGLDXAMASSPCHPLRHLRPXRIPKGKFPGRSRDPGMRPQPFALRTRALPEVQTYFIAQGDCLGNXTFPTRQAKNXNLNSLKI

SEQ ID NO: 45098 - protein, 138 aa, Homo sapiens; identical to SEQ ID NO: 35463
  misc_feature (1)...(138): Xaa = X or * as defined in Table 2

SEQ ID NO: 45099 - protein, 92 aa, Homo sapiens
  misc_feature (1)...(92): Xaa = X or * as defined in Table 2
IQDIGMGKDFMTKTPKAMATKAEIDKWDLIQLKSFCTLKEITIRVNRQTTENYPSDKGLISRMLPNFXRLFPASXKKPPLFDIGKTEKTNYS

SEQ ID NO: 45100 - protein, 674 aa, Homo sapiens; identical to SEQ ID NO: 35784
  DOMAIN (109)..(154): kw TRANSCRIPTASE REVERSE II ORF2 domain identified by eMATRIX, accession number DM01354N, p-value=1.000e-40, raw score of 13.17

SEQ ID NO: 45101 - protein, 1189 aa, Homo sapiens; identical to SEQ ID NO: 32525
  DOMAIN (562)..(607): kw TRANSCRIPTASE REVERSE II ORF2 domain identified by eMATRIX, accession number DM01354N, p-value=1.000e-40, raw score of 13.17

SEQ ID NO: 45102 - protein, 459 aa, Homo sapiens
  DOMAIN (144)..(191): kw TRANSCRIPTASE REVERSE II ORF2 domain identified by eMATRIX, accession number DM01354V, p-value=1.000e-40, raw score of 12.97
MDKFLDTYTLPRINQEELESLNRPITASEIVAIINSLSSKKSPGPDGFTAEFYWSVGSAGQAIRQEKEIKGIQLGKEEVKLSLFADDMIVYLENPIVSAPNLLKLISNFSKVSGYKINVQKSQAFLYTNNRQTESQIMSELPFTIASKRIKYLGIQLIRDVKDLFKENYKPLLKEIKEDTNKWKNIPCSWVGRINIVKMAILPKVIYRFNAIPIKLPMTFFTILEKNTLKFIWNQKRARIAKSILNQKNKAGGITLPDFKLYYKATVTKTTWYWHQNRDIDQWNRTEPSEITPHIYNYLIFDKPEKNKQWGKDSLFNKWCWENWLAICRKLKLDLFLTPYTKINSRWIKDLKVRPKTIKTLEENLGITIQHIGMGKDFMSKTPKAMATKAKIDKWDLIKLKSFCTAKETTIRVNREPTEWEKIFATYSSDKGLISRIYNELKQIYKKKQTTPSKSGRRT

SEQ ID NO: 45103 - protein, 451 aa, Homo sapiens; identical to SEQ ID NO: 35985
  DOMAIN (43)..(98): kw TRANSCRIPTASE REVERSE II ORF2 domain identified by eMATRIX, accession number DM01354Q, p-value=1.000e-40, raw score of 9.23
  misc_feature (1)...(451): Xaa = X or * as defined in Table 2

SEQ ID NO: 45104 - protein, 565 aa, Homo sapiens; identical to SEQ ID NO: 40594
  DOMAIN (126)..(171): kw TRANSCRIPTASE REVERSE II ORF2 domain identified by eMATRIX, accession number DM01354N, p-value=1.000e-40, raw score of 13.17

SEQ ID NO: 45105 - protein, 501 aa, Homo sapiens [sequence omitted]

SEQ ID NO: 45106 - protein, 919 aa, Homo sapiens; identical to SEQ ID NO: 38227
  DOMAIN (110)..(151): kw TRANSCRIPTASE REVERSE II ORF2 domain identified by eMATRIX, accession number DM01354I, p-value=1.000e-40, raw score of 15.55

SEQ ID NO: 45107 - protein, 891 aa, Homo sapiens
  DOMAIN (199)..(224): 7 kw REVERSE TRANSCRIPTASE RNA POLYMERASE domain identified by eMATRIX, accession number DM00895E, p-value=9.333e-11, raw score of 15.72
MGKKQSGKTGNSKKQSASPPPKEHSSSPAMEQSWMENDFDEINKIDRLLARLIKKKGEKNQIDTTKNDIGDITTNPTEIQTTIREYYKHLYTNKLENLEEMDKFLDTYTLPTINQEEIESLNRTITGSEILAIINSLPTKKSPGPDGFTAEFYQRYKEELVPFLLKLFQSIEKEGILLNSFYEASIILIPKPGRDTTKKENFRPISLMNIDAKIFNKILANRIQQHIKKLIHHDQVGFIPGMQGWFNIRKSINVIQHVNRTKDKNRMIISIDAEKAFDKIQQPFMLKTLNKLGIDGTYLKIIRAIYDKHTANIILNGQKLEAFPLKTGTRQGCPLSPLLFNIVLEVLARAIRQEKEIKGIQLGKEEVKLSLFADDMIIYLENPIVSAQNLLKLISNFSKVSRYKISVQIPQAFLYTNNRQTESQIMSELPFTIASKRIKYLGIQLTRDVKDLFKENYKPLLNEIKEDTKKWKNIPCSWAGRINIVKMAILPKNWKKTTLKFIWNQKRARIAKSILSQKNKAGGITLPDFKLYYKATATKTAWYWYQNRDLDQWNRTEPSEITPHIYNYLIFDKPDKNKQWGKDSLFNKWCWENWLAICRKLKLDPFLTPYTKINSRWIKDLNIRPKTIKTLEENLGITIQDIGMGKDFMSKTPKAMATKAKIDKWDLIKQESFCTAKETTIRVNRQPTKWEKIFATYSSDKGLISRIYSELKQIYKKKTNNPIKKWAKDMNRHFSKEDIYAAKKHMKKCPSSLAIREMQIKTTMRYHLTPVRMAIIKKSGNNRCWRGCGEIGTLLHCWWDCKLVQPLWKSVWRFLRDLELEIPFDPAIPLLGIHPKDYKSCCYNDTCTPVISGLKVLKKVAEPLSPAMVSWSVLQSCPHFCFLGQRKVRPP

SEQ ID NO: 45108 - protein, 396 aa, Homo sapiens
  DOMAIN (71)..(111): kw TRANSCRIPTASE REVERSE II ORF2 domain identified by eMATRIX, accession number DM01354Y, p-value=1.000e-40, raw score of 10.69
  misc_feature (1)...(396): Xaa = X or * as defined in Table 2
MQKQEGALVRKKGRKKERITARGRVRAKGENWKILNMYRVKFIWNQKRARIAKSILSQKNKAAGITLPDFKLYYKATVTKIAWYWYQNRDMDQWNRIEPSEIMPHIYNYLIFDNPDKSKKWGKDSLFNKWCWENWLAIWRKLKLDPFLTPYTKINSRWIKDLNVRPKTIKTLEENLGNTIQNIGMGQDYMSKTPKAMATKAKIDKWDLIKLKSFCTAKETTIRVNRQPTEWEKIFAIYSSDKGLISRIYNEPQQIYKKKTSNPINKWAKDMNRHFSKEDMYAAKRHVKKCSSSLAIREMQIKTTMRYHLTPVRMAIIKKSGNNRDCGDQCHYQGLERCRGGDSHHIPVQLFRLACEEDGPWRMTVDYHKLNQVVTPITAAVPDVVLLLEQINTSPX

SEQ ID NO: 45109 - protein, 768 aa, Homo sapiens
  DOMAIN (45)..(90): kw TRANSCRIPTASE REVERSE II ORF2 domain identified by eMATRIX, accession number DM01354N, p-value=1.000e-40, raw score of 13.17
INKIDRPLARLIKKKREKNQIDAIKNDKGDITTNPTEIQTTIREYYKHLYANKLENLEEMDKFLDTYILPRLNQEEVEPLNRPITGSEIEEIINSLPTKKTPGPDGFTAEFYQRYKEELVPILLKLFQSIEKEGILPNSFYEASIILIPKPDRDTTKKENFRPISLMNIDVKILNKILANRIQQHIKKLIHHDQVGFIPGMQGWFNIRKSINVIQHINRTKDKNHMIISIDAEKAFDKIQQPFMLKTLNKLGIDGTYLKIIRAIYDKPTADIILNGQKLEAFSLKTGTRQGCPLSPLLFNIVLEVLARAVRQEKEIKGIRLGKEEVKLSLLADDMIVYLENPIVSAPNLLKLISNFSKRIKYLGIQLTRDVKDLFKKNYKPLLNEIKEDTNKWKNIPCSWVGRINIVKMAILPKVIYRFNAIPIKLPMTFFTELEKTTLKFIWNQKRACIAKSILNQKNKAGGIMLPDFKLYYKATGTKTAWYWYQNRDIDQWNRTQPSEIMPHIYNYLIFDKPDKNKKWGKDSLFNKWCWENWLAICRKLKLDPFLTPYTKINSRWIKDLNVSPKTIKTLEENLGNTIQDIGMGKDVMSKTPKAMATKAKIDKWDLIKLKSFCTAKETTIRVNRQPTEWEKIFATYSSDKGLIFRIYNELKQIYKKKTNNLIKKWAKNMNRHFSKEDIYAAKKHMKKCSSSLAIREMQIKTTMRYHLTPVGMAIIKKSGNNSLSNQMYRIQKMQVQAQIQAYNVITNNNYNNNGIQLRDLTLKIPTE

SEQ ID NO: 45110 - protein, 999 aa, Homo sapiens
  DOMAIN (272)..(317): kw TRANSCRIPTASE REVERSE II ORF2 domain identified by eMATRIX, accession number DM01354N, p-value=1.000e-40, raw score of 13.17
  misc_feature (1)...(999): Xaa = X or * as defined in Table 2
MGELITPLSTLDRSTRQKVNKDTQELNSALHQGDLIDIYRTLHPKSTEYTFFSAPHHTYSKIDHILGSKALLSKCKRTEIITNYLSDHSAIKLELRIKNLTQNRSTTWKLNNLLLNDYWIHNEMKAEIKMFFETNENKDTTYQNLWDAFKAVCRGKFIALNAHKRKQERSKIDTLTSQLKELEKQEQTHSKASRRQEITKIRAELKEIETQKTLQKINESRSWFFERINKIDRPLARLIKKKREKNQIDTIKNDKGDIATNPTEIQTTIREYYKHLYANKLENLEEMDKFLDTYTLPRLNQEEVESLNRPITGAEIVAIINSLPTKKSPGPDGFTAESYQRYKEELVPFLLKLFQSIEKEGILPNSFYEASIILIPKPGRDTTKKENFRLISLMNIDAKILNKILANRIQQHIKKLIHHDQVGFIPGMQGWFNIRKSINVIQHINRAKDKNHMIISIDAEKAFDKIQQPFMLKTLNKLGIDGTYFKIIRAIYDKPTANIILNGQKLEAFPLKTGTRQGCPLSPLLFNIVLEVLARAIRQEKEIKGIQSGKEEVKLSLFADDMIVYLENPIVSDQNLLKLISNFSKVSGYKINVQKSQAFLYTNNRQTESQIMSELPFTIASKRIKYLGIQLTRDVKDLFKENYKPLLKEIKEDTNKWKNIPCSWVGRISIVKMAILPKVIYRFSAIPIKLPMTFFTELEKTTLKFIWNQKRARIAKAILSQKNKAGGITLPDFKLYYKATVTKTARYWYQNRDIDQWNRTEPSEITPHIYNYLIFDKPEKNKQWGKDSLFNKWCWENWLAICRKLKLDPFLTPYTKINSRWIKDLNIRPKTIKTLEENLGSTIQDIGMGKDFMSKTPKAMATKDKIDIWDLIKLKSFCTAKETTIRVNGQPTKWEKIFATYSSDKGLISRICNELKQIYKKKTNNPIKKWAKDMNRHFSKEDIYAAKKHMKKCSSSLAIRQMQIKTTMRYHLTPESSAPHPINHPKEKPGDPGHSPMQX

SEQ ID NO: 45111 - protein, 1031 aa, Homo sapiens
  DOMAIN (110)..(151): kw TRANSCRIPTASE REVERSE II ORF2 domain identified by eMATRIX, accession number DM01354I, p-value=1.000e-40, raw score of 15.55
MGDFNTPLSTLDRSTRQKVKKDNQELNSALHQVDLIDIYRTLHPKSTEYTFFSAPHHTYSKIDHIVGSKALLSNCKRTEIITSYLSDHSAIKLELRIKNLTQNRSTTWKLNNLLLNDYWVHNEMKAEIKMFFETNENKDTTYQNLWDAFKAVCRGKFIALNAHKRKQERSKIDTLTSQLKELEKQEQTHSKASRRQEITKIRAELKEIETQKTLQKINESRSWFFERINKIDRPLARLIKKKREKNQIDAIKNDKGDTTNDPTETQTTIREYYKHLYANKLENLEEMDKFLDTYTLPRLNQEEVEYLNRPITGSEIVAIINSLPTKKSPGPDGFTAEFYQRYKEELVPFLLKLFQSIEKEGILPNSFYEASIILIPKPGRDTTKKENFRPISLMNMDAKILNKILANRIQQHIKKLIHHDQVGFIPGMQGWFNIRKSRNVIQHINRAKDKNHMIFSIDAEKPFDKIQQPFMLKTLNKLGIDGTYFKIIRAIYDKPTANIILNGQKLEAFPLKTGTRQGCPLSPLLFNIVLEVLARAIRQEKEIKGIQLGKEEVKLSLFADDMIVYLENPIVSAQIFFKLISNFSKVSGNKINVQKSQAFLYTNNRQTESQIMSQLPYTIASKRIKYLGIQLTRDVKDLFKENYKPLLKEIKEDTNKWKNIPCSWVGRINIVKMAILPKVIYRFNAIPIKLPMTFFTELEKTTLKFIWNQKRAHIAKSILSQKNKAGGITLPDFKLYYKATVAKTAWYWYQNRDIDQWNRTEPSEITPHIYNYLIFDKPEKNKQWGKDSLFNKWCWENWLTICRKLKLDPFLTPYTKINSRWIKDLNVRPKTIKTLEENLGITIQDIGMGKDFMSKTPKAMATKDKIDKRDLIKLKSFCTAKETTIRVNRQPTKWEKIFATYSSDKGLISRIYNELKQIYKKKTNNPIKKWAKDMNRHFSKEDIYAAKKHMKKCSSSLAIREMQIKTTMRYHLTPVRMAIIKKSGNNSYSASGFSIMTVKVPFTLASKVCPSKSFLLQVFPDSQCNEGDKDE

SEQ ID NO: 45112 - protein, 1218 aa, Homo sapiens; identical to SEQ ID NO: 36413
  DOMAIN (56)..(111): kw TRANSCRIPTASE REVERSE II ORF2 domain identified by eMATRIX, accession number DM01354Q, p-value=1.000e-40, raw score of 9.23

SEQ ID NO: 45113 - protein, 1063 aa, Homo sapiens; identical to SEQ ID NO: 34337
  DOMAIN (272)..(317): kw TRANSCRIPTASE REVERSE II ORF2 domain identified by eMATRIX, accession number DM01354N, p-value=1.000e-40, raw score of 13.17

SEQ ID NO: 45114 - protein, 688 aa, Homo sapiens
  DOMAIN (73)..(118): kw TRANSCRIPTASE REVERSE II ORF2 domain identified by eMATRIX, accession number DM01354N, p-value=1.000e-40, raw score of 13.17
MIRAELKEIETQKTLQKINEPRSWFLEKINKIDRPLARLIKKKREKNQLNAIKNDKGDITTDPTEIQTTIREYYKHLYANKLENLEEMDKFLDTYTFPRLNQEEVESLNRPITGSEIEAIINSLPTKKKSRTRWIHSRILPEVQGGADAEKAFDKIQQPFMLKTLNKLGIEGKYLKIIRAIYDKPTANIILNGQKLKAFPLKTGIRQGCPLSPLLFNIVLEVLTREIREEKEMKGIQLGKEEVKLSLFADDMIVSLENPIVSAQNLLMQISNFSKVSGYKINVQKSQAFLYTNNRQTESQIMSELPFTIATKKIKYPGIQLTRDVKVLFKENYKPLLNEIKEDTNEWKNIPCSWIGRINIVKMAILPKVIYRFNAITIKLPMTLFKEFEKTTFKFIWNHKRASIPKSILSQKNKAGGIKPPDFKKYYKATVTKTAWDWYQNRVIEQWNRMEPSEIMPHIYNYLIFDQPDKNKQGGKDSLFNKRCWENWLTICRKLKLDPFLTPYTKINSRWIKDLNVRPKTIKTLEENLGNTIQDIGMGKDFMSKSPKAMATKAKIDKWDLIKLKSFCTAKETTIGVNRQPTEWEKIFAIYSSDKGLISRIYNEVKQIYKKKTNNPIKKWAKDMNRHFSKEDIYAAKRHMKKCSSSLAIREMQLKTRMRYHLTPVRMVIIKKSGNNRDMDEIENHHSQ

SEQ ID NO: 45115 - protein, 1011 aa, Homo sapiens
  DOMAIN (126)..(171): kw TRANSCRIPTASE REVERSE II ORF2 domain identified by eMATRIX, accession number DM01354N, p-value=1.000e-40, raw score of 13.17
  misc_feature (1)...(1011): Xaa = X or * as defined in Table 2
MEDEMNEMKREGKFREKGIKRNEQSLQEIWDYVKRPNLHLIGVPESDGENGTKLENTLQDIIQENFPNLARQANVQIQEIQRTPQRYSSRRATPRHVIVRFTKVEMKEKMLRTAREKETETTIREYYKHLYANKLENLEEMDKFLDTYTLPRLNQEEAESLNRPITGSEIVAIINSLPTKKSPGPDGFTAEFYQRYKEELVPFLLKLFQSIEKEGIFPNSFYEASIILIPKLGRDTTKKENFRPISLMNIDAKILNKILANQIQQHIKKLIHHDQVGFIPGMQGWFNIHKSINVIQHINRIKDKNHMIISIDAEKAFDKIQQCFMLKTLNKLGIDGMYFKIIRAIYDKPTANIILNGQKLEAFPLKTGTRQGCPLSPLLFNIVLEGLARAISQEKEIKGIQLGKEEVKLFLFADDMIVYLENPIVSAQNLLKLISNFSKVSGYKINVQKSQAFLYTNNRQTQSQIMSELPFTIASKRIKYLGIQLIRDVKDLFKENYKPLLKEIKEDTNKWKNIPCSWVGRINIVKMAILPKVIYRFNAIPIKLPMTFFTELEKTTLKFIWDQKRARIVKSILSQKNKAGGITLPDFKLYYKATVTKTAWYWCQNRDIDQWNRTEPSEIRPHIYKYLIFDKPEKNKQWGKDSLFNKWCWENWLAICRKLKLDPFLTPYTKINSRWIKDLNVRPKTIKTLEENLGITIQDIGMGKDFMSKTPKAMATKAKIGKWDLIKLKSFCTAKETTIRVNRQPTKWEKIFATYSSDKGLISRIYNELKQIYKKKTNNPIKKWAKDMNRHFSKEDIYAAKKHMKKCSPSLAIREMQIKTTMRYHLTPVRMAIIKKSGNNSLMWWRDLTRLRLWLKREAIPGEGRKAAKVNAGVGEKGIYTASSRGGPPSARSKAVTVVAEGAASRSWLSMDAPELGPGLVERLEQLATCPLCGGSFEDPVLLACEHSFCRACLARRWGTPPATGTEASPTACPCCGLPCPRRSLRSNVRLAVEVRISRELREKLAEPGAX

SEQ ID NO: 45116 - protein, 1064 aa, Homo sapiens
  DOMAIN (344)..(390): kw TRANSCRIPTASE REVERSE II ORF2 domain identified by eMATRIX, accession number DM01354O, p-value=1.000e-40, raw score of 8.73
MELKTKAQELREECRSLRSQCDQLEERVSAMEDEMNEMKREGKFREKRIKRNEQSLQEIRDYVKRPNLRLIGVPESDRENGTKLENTLQNIIQENFPNLARQANVQIQEIQRTPQRYSLRRATPRHTIVRFTKVEMKEKMLRAAREKGRVTLKGKPIRLKRISRQKLYKPEEMCRGKFTALNAHERKQERSKIDTLTSQLKELEKQEQTHSKASRRQEITKIRAELKEIETQKTLQKINESGSWFFERINKIDRPLARLIKKKREKNKIDAIKNDKGDITTDPTEIQTTIREYYKHLYANKLENREEMDKFLNTYTLPRLNQEKVESLNRPITGAEIVAIINSLPTKKSPGPDGFTAEFYQRYKEELVPFLLKLFQSTEKEGILPNSFDEASIILIPKPSRDTTKKENFRPVSLMNIDAKSLNKTLANRIQQHIKKLIHHDQVGFIPGMQGWFNIHKSINVIQHINRTKDKNHIIISIDAEKAFDKIQQHFMLKTLNKLGIDGTYLKIIRAIYDKPTANIILNGQKLEAFPLKTGTRQGCPVSPLLFNIVLELLATAIRQKEIKRIQLGKEEVKLSLFADDMTVYLENPTVSAQNLLNLISNFSKVSGYKINVQKSQAFLYTNNRQTESQIMSELPFTIASKRIKYLGIHLTRDVKDLFKENYKPLLNEIKEDTKKWKNIPCSWVGRINIVKMAILPKVIYRFNAIPIKLPMTFFTELEKTTLKFIWNQKRARIAKSILSQKNKAGGIMLPDFKLYYKATVTKTAWYWYQNRDIDQWNRTEPSETTPYIYNYLIFDKPEKNKQWGKDSLFNKWCWENWLAICRKLKLDPFLTPYTKINSRWIKDLNVRPKTIKTLEENLGFTIQDIGMGKDFMCKTPKAMATKAKIDKWDLMKLKSFCTAKETTIRVNRQPTKWEKIFTTYSSDKGLISRIYNELKQIYKKKTNNPIKKWAKDMNRHFSKEDIYAAKKHMKKCSSSLAIREMQIKTTMRYHLTPVRMAIMKKSGNNRCLHSMPPALHAGSHRGFMDTYLFIQGQPFNPLGLYCPVPSHEVVNYGPPKKSAQFSS

SEQ ID NO: 45117 - protein, 1070 aa, Homo sapiens; identical to SEQ ID NO: 36416
  DOMAIN (154)..(195): kw TRANSCRIPTASE REVERSE II ORF2 domain identified by eMATRIX, accession number DM01354I, p-value=1.000e-40, raw score of 15.55

SEQ ID NO: 45118 - protein, 1048 aa, Homo sapiens; identical to SEQ ID NO: 44959
  DOMAIN (110)..(151): kw TRANSCRIPTASE REVERSE II ORF2 domain identified by eMATRIX, accession number DM01354I, p-value=1.000e-40, raw score of 15.55

SEQ ID NO: 45119 - protein, 408 aa, Homo sapiens
  DOMAIN (67)..(107): kw TRANSCRIPTASE REVERSE II ORF2 domain identified by eMATRIX, accession number DM01354Y, p-value=1.000e-40, raw score of 10.69
PTLAGTGNQETSHLGFNAIPIKLRMTFFTELEKTTLKFIWNQKRARITKSILSQKNKAGGITLPDFKLYYKAIVTKTVWYWYQNRDIDQWNRTEPSEIMPHIYNYLIFDKPDKNKKWGKDSLFNKWCWENWLAIYRKLKLDPFLTSYTKINSRWIKDLNVRPKTIKTLEENLGNTIQDIGMGKDFMSKTPKAMATKDKIDKWDLIELKSFCTAKETTIRVNRQPTEWEKIFATYSSDKGLISRIYNELKQIYKKKTNNPIKKWVKDMNRHFSKEDIYAAKRHMKKRSSSLAIREMQIKATMRYHLTPVRMAIIKKSGNSSRSNIVHSVTQANALESSWIPLFLIPHIQYISKPQASSFKMYHVTDPILPPSSQHLDQAAIINLCLQWPLLWFECMCPSKIHMLKLTPQ

SEQ ID NO: 45120 - protein, 1043 aa, Homo sapiens
  DOMAIN (272)..(317): kw TRANSCRIPTASE REVERSE II ORF2 domain identified by eMATRIX, accession number DM01354N, p-value=1.000e-40, raw score of 13.17
  misc_feature (1)...(1043): Xaa = X or * as defined in Table 2
MGDFNTPLSTLDRSMRQKVNKDTQELNSALHQADLIDIYRTLHPKSTEYTFFSAPHHTYSKTDHIVGSKALLSKCKRTEIITNCLSDHSAIKLELRIKNLTQNRSTTWKLNNQLLNDYWAHNEMKAEIKMFFETNENKDTTYQNLWDTFKAVCRGKFIALNAHKRKQERSKIDTLTSQLKELEKQEQTHSKASRRQEITKIRAELKEIETQKILQKINESRSWFFERINKIDRPLARLIKKKREKNQIDAIKNDKGDITTDPTEIQNTIREYYKHLYTNKLENLEEMDKFLDTYTLPRLNQEEVESLNRPITGPEIVAIINSLPTKKSPGPDGFTAKFYQRYKEELVPFLLKLFQSIEKEGILPNSFYEASIILIPKPGRDTTKKENFRPISLMNIDAKILNKILAKRIQQHIKKLIHHDQVGFIPGMQGWFNIHKSINVIQHINRPKDKNHMIISIDAEKAFDKIQQPFMLKTLNKLGIDGTYFKIISAIYDKPTANIILNGQKVEAFPLKTGTRQGCPLSPLLFNIVLEVLARAIRQEKEIKGIQLGKEEVKLSLFADDMIVYLENPIVSAQNLLKLISNFSKVSGYKINVQKSQAFLYTNNRQTESQIMSELPFTIASKRIKYLGIQLTRDVKDLFKENYKPLLKEIKEDTNKWKNIPCSWVGRINIVKMAILPKVIYRFNAIPIKLPMTFFTELEKTTLKFIWNALITKSILSQKNKAGGITLPDFKLYYKATVTKTAWYWYQNRDIDQWNRTEPSEITPHIYNYLIFDKPEKNKQWGKDSLLNKWCWENWLAICRKLKLDPFLTPYTKINSRWIKDLNVRPKTIKTLEENLGITIQDIGMGKDFMSKTPKAMATKAKIDKWDLIKLKSFCTAKQTTIRVNRQPTKWEKIFATYSSDKGLISRIYNELKQIYKKKTNNPIKKWAKDMNRHFSKEDIYAAKKHMKKCSSSLAIREMQIKTTMRYHLTPVRMAIIKKSGNNRTWEYNILCSLVPLLCSLLWLHLTDHHLKEDRTKHLTASDNLEKTELSRWKERALLYEHX

SEQ ID NO: 45121 - protein, 914 aa, Homo sapiens; identical to SEQ ID NO: 44890
  DOMAIN (147)..(193): kw TRANSCRIPTASE REVERSE II ORF2 domain identified by eMATRIX, accession number DM01354O, p-value=1.000e-40, raw score of 8.73

SEQ ID NO: 45122 - protein, 666 aa, Homo sapiens
  DOMAIN (139)..(184): kw TRANSCRIPTASE REVERSE II ORF2 domain identified by eMATRIX, accession number DM01354N, p-value=1.000e-40, raw score of 13.17
MSSAFRKTTIQLKNHDYALDKLDDYTLCNLAPNSRLTMTISGTQQGTESLTRVVQNREKLNRGGIVQEESEAEQVLCSANKLLPRQMKGSDTHQTRLTRKRQWESDVLERSPNIRAQTERAFWLPLHKGSEIQTTIREYYKHLYANQLENLEEMDKFLDTHTLPRLNQEEVESLNRPITGSEIEAIINSLPTKKSPGPDGFTAEFYQRYKEELRIKYLGIQLTRDVKDLFKENYKPVLNEIKEDTNKWKNIPCSLVGRVNIVKMAILPKVIYRFNAIPIKLPMTFFTELEKTTLKFVWNQKRARTAKSILRKKNKAGGIMLPDFKLYYKATVTKTAWYSYQNRDIDQWNRTETSEIMPHIYNYLIFDKPDKKKKWGKDSLFNKWCWENWLAICRKLKLDPFLTPYTKSNSRWIKDLHVRPKTIKTLEENLGITIQDIGMGKDFMSKTPKAMATKAKIDKWDLIKLKSFCTAKETTIRVNRQPTEWEKMFATYSSDKGLISRIYNELKQIYKKKTNNPIKKWVKDMNRPFSKEDIYAAKKHMKKCSSSLAIREMQIKTTMRHHLTPVRMAIIKKSGNNSKDNQDDVEAKPIIKLALSPYQVKASTKLSEIPLKNMTVDRSLDVELRSCSPFKAQVSSPCEAFYAHSSPRADLFFLRALCLLVPPIRT

SEQ ID NO: 45123 - protein, 1010 aa, Homo sapiens
  DOMAIN (297)..(343): kw TRANSCRIPTASE REVERSE II ORF2 domain identified by eMATRIX, accession number DM01354O, p-value=1.000e-40, raw score of 8.73
MGKKQSRKTGNSKKQSASPPPKECSSSPATEQSWTENDFDELREEDFRRSNYSELQEEIQTKGKEVENFEKNSDECITGITNTEKCLKELTELKAKARELHEERRSLKSRCDQLEERVSVMEDKMNEMKREGKFREKRIKRNKQSLQEIWDYVKRPNLRLISVPESDRENGTKLENTLQDIIQENFPNLARQANIQIQEIQRTPQRYSSRRATPRHIIVRFSKVEMKEKMLRAAREKEIQTNIREYYKHRYANKLENLEEMDKFLNIYTLRRLNQEEVESLNRPIRGSEIVAIINSLPTKKSPGPDGFTAEYYQRYKEELVPFLLKLFQSIEKEGILPNSFYEASIILIPKPGRDTTKKENFRTISLMNIDAKILNKILANRIQQHIKKLIHHDQVGFIPGMQGWFNIRKSINVIQHINRTKDKNHVIISIDAEKAFDKIQQLFLLKTLNKLGIDGTYLKIKRAIYDKPTANIILNGQKLEAFPLKTGTRQGCPLSPLLFNIVLEVLARAIRQEKEIKGIQLGKEEVKLSLFADDMIVYLENPIVSAQNLLKLISNFSKVSGYKINVQKSQAFLYTNNRQTETQIMSELPFTIASKRIKYLGIQLTRDVKDLFKENYKPLLNEIKEDTKKWKNIPCSWVGRINIMKMAILHKVIYRFNAIPIKLPMTFFTELEKTTLKFTWNQKRARIAKSILSQKNKAGGIMLPDFKLYYKATVTKTAWYWYQNRDIDQWNRTEPSEITPHIYNYLIFDKPEKNKQWGKDSLFNKWCWENWLAIWRKLKLDPFFTPYTKINSRWIKDLNVRPKTIKTLEENLGITIQDIGMGKDFMSKTPKAIATKAKIDKLDLIKLKSFCTAKETTIRVNRQPTEWEKIFATYSSDKGLISRIYNELKQIYKKKTNNPIKKWAKDMNRHFSKEDIYAAKKHMKKCSPSLAIREMQIKNTMRYHLTPLRMAIIKKSGNNRASRSARGESLGPSQSFPEHVHCPGPLHTALHRPMTFQIPRDMLEVSSAH

SEQ ID NO: 45124 - protein, 853 aa, Homo sapiens
  DOMAIN (138)..(183): kw TRANSCRIPTASE REVERSE II ORF2 domain identified by eMATRIX, accession number DM01354N, p-value=1.000e-40, raw score of 13.17
MRTKTQHTRISWDAFKAVCRGKFIALNAHKRKQERSKIDTLTSQLKELEKQEQTHSKASRRQEITKIRAELKEIETQKSLQKINESRSWFFERINNIDRPLARLIKKKREKNQIDTIKNDKGDITTDPTEIQTTIREYYKHLYANKLKNLEEMDKFLDTYTLPRLNQEEVESLNRPITGSEIVTIINSLPTKKSPGPDGFTAEFYQRYKEELVPFLLKLFQSIEKEGILPNSFYEASIILIPKPGRDTTKKENFRPISLMNIDAKILNKILANRIQQHIKKLIHHDQVGFIPGMQGWFNIRKSINVIQHVNRAKDKNHMIISIDAEKDFDKIQQPFMLKTLNKLGIDGTYLKIIRAIYDKPTANIILNGQKLEAFPLKTGTRQGCPLSPLLFNIVVEVLASAIRQEKEIKAQNLLKLISNFSKVSGYKINVQKSQAFLYTNNRQTESQIMSELPFIIASKRIKYLGIQLTRDVKDLFKENYKPLIKEIKEDTNKRKNIPCSRVGRINIVKMAILPKVIYRFNAIPIKLPMTFFTELEKTTLKFIWNQKRAHIAKSILSQKNKAGGITLPDFKLYYKATVTKTAWYSYQNRDIDQWNRTEPSEITPHIYNYLIFDKPEKNKQWGKDSLFNKWGWENWLAIWRKLKLDPFLTPYTKINSRWIKDLNVRPKTIKTLEENLGITIQDIGMGKDFMSKTPKAMATKDKIDKWDLMKLKSFCTAKETTIRVNRQPTEWEKIFATYSSDKGLISRIHNELKQIYKKKTNNPNKTWAKDMNRHFSKEDIYAAKKHMKKCSSSLAIREMQIKTTMRYHLTPVRMAVIKKSGNNRDMDETGNHHSQQTVTRTKNQTPHILTHT

SEQ ID NO: 45125 - protein, 1276 aa, Homo sapiens; identical to SEQ ID NO: 40479
  DOMAIN (272)..(317): kw TRANSCRIPTASE REVERSE II ORF2 domain identified by eMATRIX, accession number DM01354N, p-value=1.000e-40, raw score of 13.17

SEQ ID NO: 45126 - protein, 2563 aa, Homo sapiens
  DOMAIN (672)..(717): kw TRANSCRIPTASE REVERSE II ORF2 domain identified by eMATRIX, accession number DM01354N, p-value=1.000e-40, raw score of 13.17
  misc_feature (1)...(2563): Xaa = X or * as defined in Table 2
MRKKQSRKTGNSKKQSTSPPPKERSSSPAMEQSWTENDFDELREEGFRRSNYSKLQEEIETKGQEVENLEKNLDKCITRITNIEKCLKELMELKAKARELHEECRSLRSRCDQLEERVSVMEDEMNEMKQEGKFREKRIKRNEQSLQEIWDYVKRPNLPPIDVPESDRENGTKLENTLQDVIQENFPNLARQANIQIQEIQRMPQRYSSRRATPRHIIVRFTKVEMKEKMLRAAREKAFKQASRREDDIAKVTSGMRVLFKPGTTEVQELALCYGGMANRTISALKTTQRQLSKLWKEELLQDVCAGLAEELHLPPDAPGGMVDFRCTLTLSFFFKFYLTVLQKLGQENLEDKCGKLDPTFASATLLFQKDPPADVQLFQEVPKGQSEEDMVGRPLPHLAADMQPLVRPCTVTTFLATRMSCLSGWSPAPGPTPRSSIEMKFKNMLFPMIVCPAWIPELNSVEHGPDGISFGAACPLSIVEKTLVDAVAKLPAQKTEVFRGVLEQLRWFAGKQVKSVASVGGNIITASPISDLNPVFMASGAKLTLVSRGELPEAEVQEEGLGGEKSHQIGHFLEKQSSKFSDPAFPVIWIQGSMENVPGLVDGKAGYFLCREFTAGTATCMPYLVGHQENCPDGPHLLPWLQKDPAEPGGDTALHRDPLQQGEIQTTIREYYKHLSANKLENLEEMDKFLDTYTLPRLNQKEVESLNRPITGAEIVPIINSLPTKKSSGLDGFTAEFYQRYKEELHINRTKDKNHMIISIDAEKAFDKIQQPFMLKTLNKLGIDGTYLKIIRAIYDKPTANIILNGQKLEAFPLKTGTRQGCPLSPLLFNIVLEVLARAIRQEKEIKGIQLGKEEVKLSLFADDMIVYLENPIVSAQNPLKLISNFSKVSGYKINVQKSQAFLYTNNRQTESQIMSELPFTIASKRIKYLGIQLTRDVKDLFKENYKPLLNEIKEDTNKWKNIPCSWVGRINIMKMAILPKVMYRFNAIPIKLPMPFFTELEKTTLKFIWNQKRARIIKSILSPKNKAGGITLPDFKLYCKATVTKTAWYWYQNRNIDQCNRTEPSEIMPHIYNYLIFDKPDKNKQWGKDPLFNKWCWENWLAICRKLKLDPFLTPYTKINSRWIKDLNIRPKTIKTLEESLGITIQDIGMGKDFMSKTPKAMATKDKIDKWDLIKLKSFCTAKETTIRVDRQPTEWEKIFTTYSSDKGLISRIYNELKQIYKKKSNNPIKKWAKHMNRCFSKEDIYAAKRHRLKDTPRKQLRFEGERVTMDTGLNPQGAAGPQGSAPXRQAGRGEHGDWXGPGRLPWGCQGVWGCFXVLLPILTSPXLYLPLHPIPLPHXLPPIDVPESDRENGTKLENTLQDVIQENFPNLARQANIQIQEIQRMPQRYSSRRATPRHIIVRFTKVEMKEKMLRAAREKAFKQASRREDDIAKVTSGMRVLFKPGTTEVQELALCYGGMANRTISALKTTQRQLSKLWKEELLQDVCAGLAEELHLPPDAPGGMVDFRCTLTLSFFFKFYLTVLQKLGQENLEDKCGKLDPTFASATLLFQKDPPADVQLFQEVPKGQSEEDMVGRPLPHLAADMQPLVRPCTVTTFLATRMSCLSGWSPAPGPTPRSSIEMKFKNMLFPMIVCPAWIPELNSVEHGPDGISFGAACPLSIVEKTLVDAVAKLPAQKTEVFRGVLEQLRWFAGKQVKSVASVGGNIITASPISDLNPVFMASGAKLTLVSRGELPEAEVQEEGLGGEKSHQIGHFLEKQSSKFSDPAFPVIWIQGSMENVPGLVDGKAGYFLCREFTAGTATCMPYLVGHQENCPDGPHLLPWLQKDPAEPGGDTALHRDPLQQGEIQTTIREYYKHLSANKLENLEEMDKFLDTYTLPRLNQKEVESLNRPITGAEIVPIINSLPTKKSSGLDGFTAEFYQRYKEELHINRTKDKNHMIISIDAEKAFDKIQQPFMLKTLNKLGIDGTYLKIIRAIYDKPTANIILNGQKLEAFPLKTGTRQGCPLSPLLFNIVLEVLARAIRQEKEIKGIQLGKEEVKLSLFADDMIVYLENPIVSAQNPLKLISNFSKVSGYKINVQKSQAFLYTNNRQTESQIMSELPFTIASKRIKYLGIQLTRDVKDLFKENYKPLLNEIKEDTNKWKNIPCSWVGRINIMKMAILPKVMYRFNAIPIKLPMPFFTELEKTTLKFIWNQKRARIIKSILSPKNKAGGITLPDFKLYCKATVTKTAWYWYQNRNIDQCNRTEPSEIMPHIYNYLIFDKPDKNKQWGKDPLFNKWCWENWLAICRKLKLDPFLTPYTKINSRWIKDLNIRPKTIKTLEESLGITIQDIGMGKDFMSKTPKAMATKDKIDKWDLIKLKSFCTAKETTIRVDRQPTEWEKIFTTYSSDKGLISRIYNELKQIYKKKSNNPIKKWAKHMNRCFSKEDIYAAKRHRLKDTPRKQLRFEGERVTWIQASTLKELLDLKAQHPDAKLVVGNTEIGKGQGGCPGAARGSGGVSRSSCPSSPPPDFTCLCTLSLCPTDYLEPTGNPWTLQFLQRPLAVESHRPAQPLAGCVTSE

SEQ ID NO: 45127 - protein, 1111 aa, Homo sapiens
  DOMAIN (272)..(317): kw TRANSCRIPTASE REVERSE II ORF2 domain identified by eMATRIX, accession number DM01354N, p-value=1.000e-40, raw score of 13.17
MGDFNTPLSTLDRSRRQKVNKDTQELNSALHQVDLIDIYRTLHHKSTEYTFFSAPHHTYSKIDHIVGSKALLSKCKRTEIITNYLSDHSAIKLELRIKNLTQNRSTTWKLNNLLLNDYWIHNKMKAEIKMFFETNKNKDTTYQNLWDAFKAVCRGKFIALNAHKRKQERSKIDTLTSQLKELEKQEQTHSKASRRQEVTKIRAELKEIETQKTLQKINESRSWFFERINKIDRMLARLIKKKREKNQIDTIKNDKGDITTDPTEIQTTIREYYKHLYANKLENLEEMDKFLDTYTLPRLNQEEVESLNRPITGAEIVAIINSLPTKKSPGPDGFTAEFYQRYKEELVPFLLKLFQSIEKEGILPNSFYEASIILIPKPGRDTTKKENFRPISLMNIDAKILNKILAKRIQQHIKKLIHHDQVGFIPGMQGWFNIRKSINVIQHINRNKDKNHMIISIDAEKAFDKIQQPFMLKTLNRLGIDGTYFKIIRAIYDKPTANIVLKGQKLEAFPLKTGTRQGCPLSPLVFNIVLEVLARAIRQEKEIKGIQLGKEEVKLSLFADDMIVYLENPIVSAQNLLKLISTSAKSQDTKSMYKNHKHSYTPTTDKQSQIMSELPFTTASKIIKYLGIQLTRDVKDLFKENYKPLLKEIKEDTNKWKNIPCSWVGRINIVKMAILPKVIYRFNAIPIKLPMTFFTQLEKTTLKFIWNQKRARIAKAILSQKNKAGGITLPDFKLYYKATVTKTAWYWYQKQRYRSMEQNKALRNNAAYLQLSDPMGKDFMSKTPKAMATKAKIDKWDLIQLKSYCTAKENTIRVNRQPTKWEKIFATYSSDKGLITRIYNELQQIYKKKTNNPIKKWAKDMNRHFSKEDIYAAKKHMKKCSSSLAIREMQIKTTMRYHLTPVRMAIIKKSGNNRNPTYKGCEGPLQGELQTTAQGNKRGYKQMEEHSMLMGRKNQYRENGHTAQELEKTTLKFIWNQKRARIAKAILSQKNKAGGITLPDFKLYYKATVTKTVWRSDIKRQRLHQNLEKKVNPDSHSTNFIFEKFISPVGFIEAITQEIKERGFYIDLRVIFVVLRWKLDSKAKAVIKHLGGPGLNCDRPDKAGSGLLKLG

SEQ ID NO: 45128 - protein, 1115 aa, Homo sapiens; identical to SEQ ID NO: 36443
  DOMAIN (323)..(369): kw TRANSCRIPTASE REVERSE II ORF2 domain identified by eMATRIX, accession number DM01354O, p-value=1.000e-40, raw score of 8.73

SEQ ID NO: 45129 - protein, 1150 aa, Homo sapiens; identical to SEQ ID NO: 44308
  DOMAIN (353)..(394): kw TRANSCRIPTASE REVERSE II ORF2 domain identified by eMATRIX, accession number DM01354I, p-value=1.000e-40, raw score of 15.55

SEQ ID NO: 45130 - protein, 868 aa, Homo sapiens
  DOMAIN (222)..(277): kw TRANSCRIPTASE REVERSE II ORF2 domain identified by eMATRIX, accession number DM01354Q, p-value=1.000e-40, raw score of 9.23
MVASRSSRVGVFYGGQNSVDGVSRRSDGSLNELCLYRPPTGAYLAYDTLDVLPSGQFTVNTPPIDVNGKSLLALLWEHTSLLTSMGGGRWAMQPLGQLGQLEHLGDRRDQVLDRSGRSRRLDAAQHLRHRPDRRPQGMVGVLTNQKEPRTRWIHSRILPEVQGGTGTVPSETIPIDRKEGILPNLFDEASIILIPKRGRDTTKKENFRPISLMNIDAKILNKILANRNQQHIKKLIHHDQVGFIPGMQGWFNICKSINVIQHINRTKDKNHMIISIDAEKAFDKIQQPFMLKTLNKLGIDGTYLKIIRAIYDKPTANIILNGQKLEAFPLKTGTRQGCPLSPLLFNIVLEVLARAIRQEKEIKGIQLGKEEVKLSLFADDMIVYLENPIVSAQNLLKLISNFSKVSAYKINVQKSQAFLYTNNRQTESQIMSVFPFTIASKRIKYLGIQLARNAKDLFKENYKPLLNEIKEDTKKWKNIPCSWVGRINIVKMAILPKVIYRFNAIPIKLPMTFFTELEKTTLKFIWNQKRARIAKSILSQKNKAGGITLPDFKLHYKITVTKTAWYWYQNRDIDQWNRTEPSEITPHIYNYLIFDKPEKNKQWGKDSLFNKWCWENWLAICRKLKLDPFLTPYTKIHPRWIKDLNVRPKTIKTLEENLGNTIQDIGMGKDFMSKTPKAMAAKAKIDKWDLIQLKSFCTAKETTIRVNRQPTKWEKIFATYSSDKGLISRIYKELKQIYKKKTNNPIKKWAKDMNRHFSKEDIYAANKHMKKCSPSLAIREMQIKTTMRYHLTPVRMAIIKKSGNNSQTVKPQNKAHFAKMDRQCVHGLSPRLEHSPRGRSSPRCAECCLYSCLHAQTSNGAVKINLMT

SEQ ID NO: 45131 - protein, 954 aa, Homo sapiens
  DOMAIN (283)..(328): kw TRANSCRIPTASE REVERSE II ORF2 domain identified by eMATRIX, accession number DM01354N, p-value=1.000e-40, raw score of 13.17
MGTSEVQNGEERAGTSGQGSVEQLSGSSVQLPPGLKLCFEPYFSSCASDCILHASPLSLMAASGSQNPNLWASWLCCKWVQCPERQLGCHLTSSVIYGLRYYPQAKRSELELRDCEGLCNQTSPLSSLDGMGWKAAAEESNSGIRNIWIPIPAFATHKQYNVRQVISPSPPYWSHRGNGNNSLCVTRLSGGLKQPVAGTGRGLEGGSGTRDLMPFLSAAPKEQPPILAPARRSWFFEKINKIDRLLARLIKKKREKNQIDAIKNGKGDITTDPTEIQTTIREYYKHLYANKLENLEEMDKFLDTYTLPRLNQEEAESLNRPITGSEIEAIINSLSTKKSPGPDGFTAEFYQRYKEELVPFLLKLFQSTEKEGILPNSFYEASIILIPKPGRDTTKKENFRPISLMNIDAKILNKILANRIQQHIKKLIHHDQVGFIPGMQGWFNIRKSINVIQHINRTKHKNHMIISIDAEKASDKIQQPFMLKTLRKLGIDETQTESQIMSELPFTIASKRIKYLGIQLTRDVKDLFKENYKPLLNEIKEDTNKWKNFPCSWVGRINIVKMAIVPKVIYRFNASPIKLPMTFFTELEKTTLKFIWNQKRACIAKSILSQKNKAGGIMLPDFKLYYKATVTKTAWYWYQNRDIDQWNRTEPSEITPHIYNYLFFDKPDKNKQWGKDSLFNKWCWENWLAICRKLKLDPVLTPYTKINSRWIKDLHVRPKTIKTLEENLGITIQDIGMGKDFMSKTPKAMATKAKIDKWDLIKLKSFCTAKETTIRVNRQPTEWEKIFATYSSDKGLISRIYNELKQIYKKKTNNPIKKWAKDMNRHFSKEDIYADKKHMKKCSSSLIIREMQVKTTMRYHLTPVRMAIIKKSGNNRDSVLAALNITYKSCQQNPVSRDHYFEGTLPIAALLRRRIFYVPQMPTVKLNQSSERSQTLPSLGKETYSQIQVWPEGQ

SEQ ID NO: 45132 - protein, 1241 aa, Homo sapiens
  DOMAIN (569)..(594): 7 kw REVERSE TRANSCRIPTASE RNA POLYMERASE domain identified by eMATRIX, accession number DM00895E, p-value=3.333e-11, raw score of 15.72
  misc_feature (1)...(1241): Xaa = X or * as defined in Table 2
MGKKQNRKTGNSKTQSASPPPKERSSSPATEQSWMENDFDELREEGFRRSNYSELWEDIQTKGKEVENFEKNLEECITRITNTEKCLKELMELKTKARELHEECRSLRSRCDQLEERVSAMEDEMNEMKREGKFREKRIKRNEQSLQEIWDYVKRPNLRLIGVPESDVENGTKLENTLQDIIQENFPNLARQANVQIQEIQRMPQRYSSRRATPRHIIVRFTKVEMKEKMLRAARQKAPHHTYSKIDHIVGSKALLSKCKRTEIITNYLSDHSAIKLELRIKNLTQSRSTTWKLNNLLLNDYWVHNEMKAEIKMFFETNENKDTTYQNLWDTFKAVCRGKFIALNAYKRKQETSKIDTITSQLKELEKQEQTHSKASRRQEITKIRAELKEIETQKTLQKINESRSWFFERINKIDRPLARLIKKKREKNQIDTIKNDKGDITTDPTEIQTTIREYYKHLYANKLENLEEMDTFLDTYTLPRLNQEEVESLNRPITGSEIVAIINSLPTKKSPGPDGFTAEFYQRYKEELVPFLLQLFQSIEKEGILPNSFYEASIILIPKPGRDTTKKENFRPISLMNIDAKILNKILANRIQQHIKKLIHHDQVGFIPGTQGWFNIRKSINVIQHINRAKDKNHMIISIDAEKAFDKIQQPFMLKTLNKLGIDGTYFKIIRAIYDKPTANIILNGQKLEAFPLKTGTRQGCPLSPLLFNIVLEVLARAIRQEKEIKGIQLGKEEVKLSLFADDMIVYLENPIVSAQNLLKLISNFSKVSGYKINVQKSQAFLYTNNRQTESQIMSELPFTIASKRIKYLGIQLTRDVKDLFKENYKPLLKEIKEDTNKWKNIPCSWVGRINIVKMAILPKVIYRFNAIPIKLPMTFFTELEKTTLKFIWNQKRACISKSILSQKNKAGGITLPDFKLYYKATVTKTAWYWYQNRDIDQWNRTEPSEIMPHIYNYLIFDKPEKNKQWGKDSLFNKWCWENWLAICRKLKLDPFLTPYTKINSRWIKDLNVRPKTIKTLEENLGITIQDIGVGKDFMSKTPKAMATKAKIDKWDLIKLKSFCTAKETTIRVNRQPTTWEKIFTTYSSDKGLISRIYNELKQIYKKKTNNPIKKWAKDMNRHFSKEDIYAAKKHMKKCSSSLAIREMQIKTTMRYHLAPVRMAIIKKSGNNRLFTVAKTWIQPKCASMIHWMKKVXNIYTMKYNPAIKKEFTSFAAIWMELKATFLSKLMQEQKAKYCMFSL

SEQ ID NO: 45133 - protein, 791 aa, Homo sapiens
  DOMAIN (71)..(117): kw TRANSCRIPTASE REVERSE II ORF2 domain identified by eMATRIX, accession number DM01354O, p-value=1.000e-40, raw score of 8.73
QAMTLEGRWQQSQRSSTKQRDGTSFPMVEPTKTEEPFMSSLPPHPNQAAEWQSGRPRPKTGAEIVAITNSLPTKKSPGPDGFTAEFYQRYKEELVPFLLKLFQSVEKEGILPNSFYEASIILLPKPGRDKTKKENFRPISLMNIDAKILNKILANRIQQHIKKLIHHDQVGFVPGMQGWFNIRKSINAIQHINRTKDKNHMIISIDAEKAFDKIQQPFMLKTLNKLGIDGKYLKIIRAFYDKPTANIILNGQKLEAFPLKTGTRQGCPLSPLLFNIVLEVLDRAIRQEKEIKGIQLGKEEVKLSLFADDMIVYLENPIVSAQNLLKLISNFSKVSGYKINVQKSQAFLHTNNRQTESQIMSELPFTIASKRIKYLGIQITRDVKDLFKENYKPLLKEIKEDTNKWKNIPCSWVGRINIVKIAILPKIIYRLNAIPIKLLMTFFTELEKTTLKFIWNQKRARIAKSILSQKNKAGGITLPDFKLYYKPTVTKTAWYWHQNRAIEQWNRTEPSEITTHIYNYLTFDKPEKNKQWGKDSLFNKWCWENWLAICRKLKLDPFLTPYTKISSKWIKDLNVRPKTIKTQEENLGITIQDIGMGKDFMSKTQKAMATKAKIDKGDLIKLKSFCTAKETSSSVNRQPTKWEKIFATYSSDKGLISRIYNELKQIHKKKTNNPIKKWAKDMNRHFSKEDIYAAKKHMKNCSPSLAIREMQIKTTMRYHLTPLRMAIIKKSGNNRRTATLSLLPAIRHEREAFHQREEEKEGGRILLLQNRVILCSCSLCPHLSPASKPKH

SEQ ID NO: 45134 - protein, 792 aa, Homo sapiens
  DOMAIN (110)..(151): kw TRANSCRIPTASE REVERSE II ORF2 domain identified by eMATRIX, accession number DM01354I, p-value=1.000e-40, raw score of 15.55
  misc_feature (1)...(792): Xaa = X or * as defined in Table 2
MGDFNTPLSTLDRSTRQKVNKDTQELNSALHQADLIDIYRTLHPKSTEYTFFSAPHHTYSKIDHILGSKALLSKCKGREIITNCLSDHSAIKLELRIKNLTQNRSTTWKLSNLLLNDYWVHNEMKAEIKMFFETNENKDTTYQNLWDTFKAVCRGKFIALNAHKRKQERSKIDTLTSQLKELEKQEQTHSKASRRQEITKIRAELKEIETQKTLQKINESRSWFFERINKIDRPLTRLIKKKRETNQIDAIKNDKGDITADPTDRQTTIREYYKHLYANKLENLEEMDIFLDTYTLPRLNQEEFESLNRPITRSEIVAIINSLPTKKSPGPDGFTAEFYQRYKEELRIKYLGIQLTRDVKDLFKENYKPLLKEIKEDTNKWKNIPCSWVGRINIVKMAILPKVIYRFNAIPIKLPMTFFTELEKTTLKFIWNQKRARIAKSILSQKNKAGGITLPDFKLYYKATVTKTAWYWYQNRDIDQWYRTEPLEITPHIYNYLIFDKPEKNKQWGKDSLFNLWCWENWLAICRKLKLDPFLTPYTKINSRWIKDLNVRPKTIKTLEENLGITIQDIGMGKDFMSKTPKAMATKDKIDKWDLIKLKSFCTAKETTIRVNRQPTKWEKIFTTYSSDKGLISRIYNELKQIYKKKTNNPIKKWAKDMNRHFSKEDIYAAKKHMKKCSSSLAIREMQIKTTMRYHLTPVRMAIIKKSGNNRLWQGTEDKSGCRGARPGASSRDCKNNSLPTDCPSRVPVLWSWPXLACCPSDAQSDGTGRNRIQSQSTLSLYNHPNEQHGKL

SEQ ID NO: 45135 - protein, 525 aa, Homo sapiens; identical to SEQ ID NO: 35768
  DOMAIN (95)..(142): kw TRANSCRIPTASE REVERSE II ORF2 domain identified by eMATRIX, accession number DM01354V, p-value=1.000e-40, raw score of 12.97
  misc_feature (1)...(525): Xaa = X or * as defined in Table 2

SEQ ID NO: 45136 - protein, 379 aa, Homo sapiens
MRFSSAQLEREINTAAFHVSSLTDIPTGSMGEEGIVERSVRLSVVPKVCWYPKCVVKTGGDPRTFKQKNQGKEAGIIRAQDSTGLKYGGIMEAKRDTPMEQTSPSDYAAFYTSDLDNLTTQAQGKDPYLILVLENWLAICRKLKLDPFLTPYTKIHSRWIKDLHVRPKTIKTLEENLGSTIQDIGMGKDFMSKTPKAMATKAKIDKWDLIKLKSFCTAKETTIRVNRQPTEWEKIFATYSSDKGLISRIYNELKQIYRKKTNNPMKCGQRVLEDNLSHSDWASEPELLSDVSCPPFLESGAESQSDIHTRKPFPVSKASQSAPGNHCPDLCPFEKHMPQVYYTNPGVTAALDLSQRAHKQALRSKTSTNNLTHCQNKIH

SEQ ID NO: 45137 - protein, 1136 aa, Homo sapiens
  DOMAIN (279)..(324): kw TRANSCRIPTASE REVERSE II ORF2 domain identified by eMATRIX, accession number DM01354N, p-value=1.000e-40, raw score of 13.17
FPSFKIAIPKNDHGHEQHFWGYRVPNNAMEDTAYQLVHQYPTRMQARRCRIALSQWSSSHPLPAKRDAPVTSGAHPRRRLSSRRYPPRQSRQARLPTWWPAVSEAAVPQPLLSCYSAPSAMFPVSPGARWGTTTGWKFFETNENKDTTYQNLWDAFKAVCRGKFIPLNAHKRKQERSKIDTLTSQLKELEKQEQTHSKASRRQEITKIRAELKEIETQKTLQKINESRSWFFERINKIDRPLARLIKKKREKNQIDTIKNDKGDITTNPTEIQTTIREYYKHLYAKKLENLEEMDTFLDTYTLPRLNQEEVESLNRPITGAEIVAIFNSLPTKKSPGPDGFTAEFYQRYKEELVPFLLKIFQSIEKEGILPNSFYEASIILIPKPGRDTTKKENFRPISLMNIDAKILNKILANRIQQHIKKLIHHDQVGFIPGMQGWFNIRKSINVIQHINRAKDKNHMIISIDAEKAFDKIQQPFMLKTLNKLGIDGTYFKIIRAIYDKPTANIILNGQKLEAFPLKTGTRQGCPLSPLLFNIVLEVLARAIRQEKEIKGIQLGKEEVKLSLFADDMIVYLENPIISAQNLLKLISNFSKVSGYKINVQKSQAFLYTNNRQTESQIMSELPFTIASKRIKYLGIQLTRDVKDLFKENYKPLLKEIKEDTNKWKNIPCSWVGRINIVKMAILPKVIYRFNAIPIKLPMTFFTELEKTTLKFIWNQKRARIAKSILSQKNKAGGITLPDFKLYYKATVTKTAWYWYQNRDIDQWNRTEPSEITPHTYNYLIFDKPEKNKQWGKDSLFNKWCWENWLAICRKLKLDPFLTPYTKINSRWIKDLNVRPKTIKTLEENLGSTIQDIGVGKDFMSKTPKAMATKAKIDKWDLIKLKSFCTAKETTIRVNRQPTTWEKIFATYSSDKRLISRIYNELKQIYKKKTNNPIKKWAKDMNRHFSKEDIYAAKKHMKKCSSSLAIREMQIKTTMRYHLTPVRMAIIKKSGNNSEGYPDLLNTEYEQISFGNQRGTKVVPGDPRETKTHADAEARSRIWLVLASVVQDRWTNIYEEISHLAPWNKQVTEQQPKSAAAQSLRPGPSDPVGLSFPGYCESGAPAAFLHARAETLKLSSATMSATEIKGEGQSQTGRTQ

SEQ ID NO: 45138 - protein, 969 aa, Homo sapiens
  DOMAIN (56)..(103): kw TRANSCRIPTASE REVERSE II ORF2 domain identified by eMATRIX, accession number DM01354V, p-value=1.000e-40, raw score of 12.97
MDKFLNTNTLPRLNQEEVDSLNRPITGSEIVAIVNSLPTKKSPGPDGFTAEFYQRYKEELRIKYLGIQLTKDVKDLFKENYKPLLKEIKEDKNKWKNIPCSWVGRINIMKMAILPKVIYRFNAIPIKLPMTFFIELEKTTLKFIWNQKRALIAKSILSQMNRAGGIMLPDFKLYYMATVTKTAWYWYQNRDIDQWNRTEPSEITPHIYNYLIFDKPEKNKKWGKDSLFNKWCWENWLAICRKLKLDPFLTPYTKINSRWIKDLNVRPKTIKTLEENLGITIQDTGMGKDFMSKTPKAMATKAKIDKWDLIKLKSFCTAKETTIRVNRQPTKWEKIFATYSSDKGLISRIYNELKQIYKKKTNNPIKKWAKDMNRHFSKEDIYAAKKHMKKCSPSLAIREMQIKTTMRYHLTPVRMAIIKKSGNNRAGRCQEQSGAQPPTELMGWEPRAPKCSCSRLALAHDPSIPALSDFGTDKEGDQVLEVLARAIRQEKEIKGIQLGKEEVKLALFADDMIVYLENPIISAQKLLKLIDNFSKVSGYKINVQKSQAFLYTNNRQTESQIMSELPFIIASKRIKYLGIHLTRDVKDLFKKNYKPLLNEIKVDTNKWKNIPCSCVGRINIMKMAILPKELEKTTLKFIWNQKRTHIAKSILSQKNKAGGTLPEFKLYYKATVTKTAWYWYQNRDIDQWNRTEPSEIMPHIYNYLIFDKPDRNKKWGKDSLFNKWFWENCLAICRKLKLDPFLTPYTKINSRWIKDLNFRPKTIKTLEDNLGNTIQDIGMGKDFMSKTPKAMATKAKIDKWDLIELKSFCTAKETTIRVNRQPTEWEKIFAIYSSDKGLISRIYNELKQIYKKKTNNPIKKWAKDMNRHFSKEDIYAAKRHMKKCSSSLAIREMQIKTTMRYHLTPVRTAIIKKSGDNRDMDEGGNHHSQQTIARTKNQTLHVLTHRWELNNENTWTQEGEHHTPGTVVG

SEQ ID NO: 45139 - protein, 534 aa, Homo sapiens
  DOMAIN (121)..(168): kw TRANSCRIPTASE REVERSE II ORF2 domain identified by eMATRIX, accession number DM01354V, p-value=1.000e-40, raw score of 12.97
  misc_feature (1)...(534): Xaa = X or * as defined in Table 2
TEPKTKTTXLSAXMQKGPLTKFNNPSCXKLLINIVLEVLARAIRQEKEIKGIQVGKEEVKLSLFADDMIVYLENPIVSAQNLLKLISNFSKVSGYKINVQKSQAFLYTNNRQTESQIMSELPFTIASKRIKYLGIQLTRDVKDLFKENYKPLLNEIKEDTNKWKNILCSWVGRINIVKMAILPKVIYRFNAIPIKLPMPFFTELEETTLKFIWNQKRARIAKAILSQKKKAGGITLPDFKLYYKATVTKTAWYWYQNTDIEQWNRTEPSEIMLHIYNYLIFDQPEKNKQWGKDSLFNKWCWENWLAICRKLKLDPFLTPYTKINSRWIKDLNVRPKTIKTLEENLGITIQDISMGKDFMSKTPKAKATKAKIDKWDLIKLKSFCTAKETTIRVNRQPTKWEKIFATYSSDKGLISRIYNELKQIYKIKTNNPIEKWVKDMNRHFSKEDIYAAKKHMKKCSSSLAIREMQIKTTMRYHLTAVRMAIIKKSGNNSLIVGASMDTSLLSGPIPYDIQHFDRFGSVTVRRGCAIEFYN

SEQ ID NO: 45140 - protein, 681 aa, Homo sapiens
  DOMAIN (113)..(153): kw TRANSCRIPTASE REVERSE II ORF2 domain identified by eMATRIX, accession number DM01354Y, p-value=1.000e-40, raw score of 10.69
GIKYLGIQLTRDVKDLFKERSYEPLLNEIKEDTNKWKNIPCSWVGRINIVKMAILPKVIYRFNAIPIKLPMTFFTELEKTTLKFIWNQKRALIAKSILSQKNKAGGITLPDFKLYYKATVTKTAWYWYQNRDIDQWNRTEPSEITLHIYNYLIFDKPEKNKQWGKDSLFNKWCWENWLAICRKLKLDPFLTPYTKINSRWIKDLNVRPKTIKTLEENLGITIQDIGMGKDYMSKTPKAMATKAKIDKWDLIKLKSFCTAKETTIRVNRQPTKWEKIFATYSSDKGLISRIYNELKQIYKKKTNNPIKKWVKDMNRHFSKEDIYAAKKHMKKCSPSLAIREMQIKTTMRYHLTPVRMAIIKKSGNNSPTCVSQDWKLTQAVGLWSAEAEAPKSAQRRPLAEGHRAAVQRDGSGLQLLCTVKLQVLPCIIAQGNGGRKATSSLEAELTSWRPLCLEDGTGFRGEDTLETVNAEGRENRRKAGHRAAGSSASRRCRNTGRSVQRLRPQKTQAFPTHCHFCLILVVKATQLNPKSRVRKVPFAPMKHGKALAGPWANICAGKSSNEIRTCDRHGCGQYSAQRSQRPHQGVDILCSAGSTVYAPFTGMIVGQEKPYQNKNAINNGVRISGRGFCVKMFYIKPIKYKGPIKKGEKLGTLLPLQKVYPGIQSHVHIENCDSSDPTAYL

SEQ ID NO: 45141 - protein, 859 aa, Homo sapiens
  DOMAIN (272)..(317): kw TRANSCRIPTASE REVERSE II ORF2 domain identified by eMATRIX, accession number DM01354N, p-value=1.000e-40, raw score of 13.17
MGDFNTPLSTLDRSMRQKVNKDTQELNSALHQANLIDIYRTLHPKSTEYTFFSAPHHTYSKIDHILGSKALLSKCKRTEIITNYLSDHTAIKLELRIKNLTQNRSTTWKLNNLLLNDYWIHNAMKAEIKMFFETNENKDTTYQNLWDTFKAVCRGKFIALNAHKRKQERSKIDTLTSQLKELEKQEQTHSKDRRRQEITKIRAELKEIETQKTLQKINESRSWFFERINKIDRPLARLIKKKREKNQIDTIKNDKGDITTDPTEIQTTIREYYKHLYANKLENLEEMDKFLDTYTLPRLNQEEVESLNRPITGSEIVAIINSLPTKKSPGPDGFTAEFYQRYKEELVPFLLKLFQSIEKEGILPNSFYEASIILIPKPGRDTTKKENFRPISLMNIDAKILNKILAKRIQQHIKKLIHHDQVGFIPGMQGWFNIRKSINIIQHINRAKDKNHMIISIDAEKAFDKIQQPFMLKTLNKLELEKTTLKFIWNQKRARIAKAILSQKNKAGGITLPDFKLYYKATVTKTAWYWYQNRDIDQWNRTEPSEITPHIYNYLIFDKPEKNKQWGKDSLFNKWCWENWLAICRKLKLDPFLTPYTKINSRWIKDLNVRPKTIKTLEENLGITIQDIGMGKDFMSKTPKAMATKDKIDKWDLIKLKSFCTAKETTIRVNRQPRKWEKIFATYSSDKGLISRIYNELKQIYKKKTNNPIKKWAKDMNRHFSKEDIYAAKRHMKKCSSSLAIREMQIKTTMTYHLTPVRMAIIKKSGNNRCQQKDGTLQILQEKGEDSSLPWRHLHCCHRGRRYSTHSFLPTPGQVAPQCSYSHFPGPPDLLLLPPLRPMPIQPLLLSPSMHRHSLQGPY

SEQ ID NO: 45142 - protein, 850 aa, Homo sapiens
  DOMAIN (38)..(83): kw TRANSCRIPTASE REVERSE II ORF2 domain identified by eMATRIX, accession number DM01354N, p-value=1.000e-40, raw score of 13.17
RETRGEVKNSKNQSTSAPPKDCSSLADPKKIQTTIREYYKHLYPNKLENQEEMDKFLDTYTLPRLNQEEVESLNRPITGSEIVAIINSLPTKKSPGPDGFTAEFYQRYKEELVPFLLKLFQSIEKEGILPNSFYEASIILIPKLGRDTTKKENFRPISVMNIDVKILNKILANRIQQHIKKLIHHDQVGFIPGMQGWFNIHKSINVIQHINRTKDKNHMIISIHAEKAFDKIQQHFMLKTLNKLGIDGTYLKIIRAIYDKPTANIILNGQKLEAFPLKIGTRQGCPLSPLLFNIVLEVLARAIRQEKEIKGIQLGKEVVKLSLFADDMIVYLENPIVSAQNLLKLISNFGKVSGYKINVQKSQAFLYTNNRQTESQIMSELPFTIASKRIKYLGIQLTRDVKDLFKENYKPLLNEIKEDTNKWKNIPCSWVGRINIVKMAVLPKLPMTFFTELEKTTLKFIWNQKRARIAKSILSQKNKAGGITLPDFKLYYKATATKTAWYWYQNRDLDQWNRTEPSEITPHIYNYLIFDKPDKNKQWGKDSLFNKWCWENWLAICRKLKLDPFLTPYTKINSRWIKDLNIRPKTIKTLEENLGITIQDIGMGKDFMSKTPKAMATKAKIDKWDLIKQESFCTAKETTIRVNRQPTKWEKIFATYSSDKGLISRIYSELKQIYKKKTNNPIKKWAKDMNRHFSKEDIYAAKKHMKKCPSSLAIREMQIKTTMRYHLTPVRMAIIKKSGNNRCWRGCGEIGTLLHCWWDCKLVQPLWKSVWRFLRDLELEIPFDPAIPLLGIHPKDYKSCCYNDTCTPVISGLKVLKKVAEPLSPAMVSWSVLQSCPHFCFLGQRKVRPP

SEQ ID NO: 45143 - protein, 1415 aa, Homo sapiens
  DOMAIN (739)..(764): 7 kw REVERSE TRANSCRIPTASE RNA POLYMERASE domain identified by eMATRIX, accession number DM00895E, p-value=3.333e-11, raw score of 15.72
NSAVNPSGPGLFLVVLEVLARAIRQEKEIKGIQLGKEEVKLSVSADDMIVYLENPIVSAQNLLKLISNFSKVSGYKINVQKSQAFLYTNNRQRAKSIKYLGIQLTRDVKDLFKENYKPLLKEIKEDTNKWKNIPCSWVGRINIVKMAILPKVIYRFNAIPIKLPMPFFTELEKTTLKFIWNQKRARIAKSILSQKNKAGGITLPDFKLYYKATITKTAWYWYQNRDIDQWNRTEPSEITPHIYNYLIFDKPEKNKQWGKDSLFNKWCWENWLAVCRKLKLDPFLTPYTKINSRWIKDLNVRPKTIKTLEENLGITIQDIGMGKDFMSKTPKAMATKAKIDKWDLIKLKSFCTAKETTIRVNRQPTKWEKIFATYSSDKALISRIYNELKQIYKKKTNNPIKKRAKDMNRHFSKEDIYAARKHMKKCSPSLAIREMQIKTTMRYHLTPVRMAIIKKSGNNSHTPAATGCMAWRENLCIWERNSTVIVRRSIGHSAALSQQKATPGLTQLNTAHRGTIWTSPTQRGTTNPCDWKESSGWHQVNAALGRSFQRKELAAIFAVLQPLLVIPRKTGSRVDIQQTPADLQQRGLTVRRKTNEQRGIASTSTKRISTQKPHPKVTNIKEQSEYYKYLYANKLENLEEIVKFLDTYTPPRLNQEEVKSLTRPITSSEVEAVINSIPTKKSPEPDRFTAEFYQKYKQELVPFVLKLFQTTEKEGILLNLLYEASIILIPKPERDTTKKENFRPISLMNIDAKILNKILANRIQQYIKKLIHHDQVGFIPGMQGWFNIRKSINVIQHINRTKDKNHMIISIDVEKAFDKIQQPFMLKTLNKLENKITRNPTYKGCEAPLQGELQTTAQGNKRGYKQMEEHSMLMGRKNQYRENGHTAQELEKTTLKFIWNQKRACITKSILSQMNKAGGITLPDFKLSYKATVTKTAWYWYQNRDIDQWNRTEPSEITPHIYNYLIFDKPEKNKQWGKDSLFNKWCWENWLAICRKLKLDPFLTPYTKINSRWIKDLNILPKTIKTLEENLGITIQDIDMGKDFMSKTPKAMATKAKIDKWDLIKLKSFCTAKETTIRVNRQPTKWEKIFTTYSSDKGLISRIYNELKQIYKKKTNNPIKKWAKDINRHFSKEDIYAAKKHMKKCSSSLAIREMQIKTTMRYHLTPVRMAIIKKSGNNRIKVVKLQIVLQMKPQMQSMTKIHRGPLDRPASPCSDASDIEGTPPEEISTARPLLCASSAGNNFSTGHGACPPTGREVPVVALDASPPTTVAATRGRYAVYFLLPKICKLCFLLLRCPEKPMHISNHSPSGPCEGGSEASCILCPKGPPLQTEALKTVEPNETIILGGSVGLNIGHYISNQYKQNSSLKDLPHTISPEAGSSTSLMVRTDWCSHPFSHLANMATLPPSTSHDKGAG

SEQ ID NO: 45144 - protein, 956 aa, Homo sapiens
  DOMAIN (149)..(194): kw TRANSCRIPTASE REVERSE II ORF2 domain identified by eMATRIX, accession number DM01354N, p-value=1.000e-40, raw score of 13.17
  misc_feature (1)...(956): Xaa = X or * as defined in Table 2
MKAEIKVFFETNENKDTTYQNLWDTFKAVCRGKFIALNAHKRKQERSKIDTLTSQLKELEKQEQTHSKASRRQEITKIRAELKEIQTQKTLQKINESRSWFFERINKIDRSLARLIKKKREKNQIDTIKNDKGDITTDPTEIQTTIREYYKHLYANKLENLEEMDKFLDTYTLPRLNQEEVESLNRPITGAEIVAIINSLPTKKSPGPDGFTAEFYQSWAETQPKKENFRPISLMNIDAKILNKILAKRIQQHIKKLIHHDQVGFIPGMQGWFNIRKSINVTQHINRAKDKNHMIISIDAEKAFDKIQQPFMLKTLNKLGIDGTYFKIIRAIYDNPTANIILNGQKLEAFPLKTGTRQGCPLSPLLFNIVLEVLARAIRQEKEIKGIQLGKEEVKLSLFADNMIVYLENPIVSAQNLLKLISNFSKVSGYKINVQKSQAFLYTNNRQTESQIMSQLPFTIASKRIKYLGIQLTRDVKDLFKENYKPLLKEIKEDTNKWKNIPCSGEGRINIVKMAILPKNWKKTTLKFIWNQKRACIAKSILSQKNKAGGITLPDFKLYYKATVTKTAWYWYQNRDIDQWNRTEPSEIMPLIYNYLIFDKPEKNKQRGKDSLFNKWCWENWLAICRKLKLDPFLTPYTKINSRWLKDLNVRTKTIKTLEEKLGITIQDIGLGKDFMSKIPKAMATKAKIDKWDLIQLKSFCTAKETTIRVNRQPTKXEKIFATYSSDKGLISRIYNELKQIYKKKTNNPIKKWAKDMNRHSSKEDIYAAKKHMKKCSSSLAIREMQIKTTMRYHLTPVRMVIIKMSGNNRCWRGCGETGTLLHCWWDCKLAQPLWKSVWRFLRDLELEIPFDPAIPLLGIYPNDYKSCCYKDTCTRMFIAALFTIAKTWNQPKCPTIIDWIKKMWHIYTMEYYAAIKNDEFVSFVGTWMKLEIIILSKLSQEQKTTHRIFSLIGGN

SEQ ID NO: 45145 - protein, 539 aa, Homo sapiens
  DOMAIN (112)..(159): kw TRANSCRIPTASE REVERSE II ORF2 domain identified by eMATRIX, accession number DM01354V, p-value=1.000e-40, raw score of 12.97
  misc_feature (1)...(539): Xaa = X or * as defined in Table 2
HQHQQKPHPHRNPIQKSPTSKTKVLEVLARAIRQEKQSGIQIGSQEVKLSLLEDDMIVHLENPIISAKNLLQLISNFTKVSGYKINVQKSQAFPYTNKTQIENQIMSELPFTIATKRIKYLGIKLTRDVKDLFKNNYKPLFKEIREDTNKWKNIPCSWVGRINIVKMAILPKVIYRFNAIPIKLPMTFFTELEETTLKFIWNQKRARIAKSILSQKNKAGGITLPDFKLYYKATVTKTAWYWYQNRDRDQWNRTEPSEIMPHIYNYLIFDKPEKNKQWGKDSLFNKWCXENWLTICKRLKLDPFLTPYTKINSRWIKDLNVRPKTIKTLEENLGITIQDIGIGKDFMCKTPKAMATKAKIDKWDLIKLKSFCTAKETTIRVNRQPTKWEKIFATYSSDKGLISRIYNELKQIYKKKTNNPIKKWAKDMNRHFSKEDIYAAKKHMKKCSSSLAIREMQIKTTMRYHLTPVRMAIIKKSGNNRCWRRCGEIGTLLHCWWDCKPVQPLWKSVWRFLRDLELEIPFDPAIPLLGIYPKGYKSC

SEQ ID NO: 45146 - protein, 4318 aa, Homo sapiens
  DOMAIN (572)..(597): 7 kw REVERSE TRANSCRIPTASE RNA POLYMERASE domain identified by eMATRIX, accession number DM00895E, p-value=3.333e-11, raw score of 15.72
MGKKQNRKTGNSKMQSASPPPKERSSSPATDQSWMENDFDELREEGFRRSNYSELREDIQTKGKEVENFEKNLEECITRITNTEKCLKELMELKTKARELREECRSLRSRCDQLEERVSAMEDEMNEMKQEGKIKRDKEGHYIMVKGSIQQEELTILNIYAPNTGAPRFIKQVLSDLQRDLDSHTLIMGDFNTSLLTLDRSMRQKVNKDTQELNSSLHQADLIDIYRTLHPKSIEYTFFSAPHHTYSKIDHIVGSKALLSKCKRTEIITNYLSDHSAIKLELRIKNLTQSRSTTWKLNNLLLNDYWVHNEMKAEIKMFFETNENKDTTYQNLWDAFKAVCRGKFIALNAHKRKQERSKIDTLTSQLKELEKQEQTHSKASRRQEITKIRAELKEIETQKTLQKINESRSWFFERINKIDRPLARLIKKKREENQIDTIKNDKGDITTDPTEIQTTIREYYKHLYANKPENLEEMDKFLDTYTLPRLKQEEVESLNRPITGAEIVAIINSLPTKKSPGPDGFTAEFYQRYKEELVPFLLKLFQSIEKEGILPNSFYEASIILIPKPGRDTTKKENFRPISLMNIDAKILNKILANRIQQHIKKLIHHDQVGFIPGMQGCQYHTEWAKTGSIPLKTGTRQGCPLSPLLFNTVLEVLARAIRQEKEIKGIQLGKEEVKLSLFADDMIVYLENPIVSAQNLLKLISNFSKVSGYKINVQKSQAFLYTNNRQTESQIMSELPFTIASKRIKYLGIQFTRDVKDLFKENYKPLLKEIKEDTNKWKNIPCSWVGRINIVKMAILPKVIYRFNAIPIKLPMTFFTELEKTTLNFIWNQKRARIAKSILSQKNKAGGITLPDFKLYYKATVTKTAWYWYQNRDIDQWNRTEPSEITPHTYNYLIFDKPEKNKQRGKDSLFNKWCWENWLAICRKLKLDPFLTPYTKINSRWIKDLNVRPKTIKILEENLGITIQDIGVGKDFMSKTPKAMATKAKIDKWDLIKLKSFCTAKETTIRVNRQPTTWEKIFATYSSDKGLISRIYNELKQIYKKKTNNPIKKWAKDMNRHFSKEDIYAAKKYMKKCSSSLAIREMQIKTTMRYHLTPVRMAIIKKSGNNRDVGNVVEAMYGDLPPPIMLIGHSMGGAIAVHTASSNLVPSLLGLCMIDVVEGTAMDALNSMQNFLRGRPKTFKSLENAIEWRNIKDLSWADSIKNVAAASLACISGALPASAVTTSPDNKRMARNVLKYERLLAESPNHVVAEAVIQRPNIPHLQTRDTYEGLCQTLGSQPTLYQIPSLYCSYETNSNAYLLLQPIRKEVIHLEPYIALYHDFVSDSEAQKIRELAEPWEQSSSPATEQSWMENDFDELREEGFRRSNYSELQEEIRTNGKEVKSFEKKLDEWITRITNAEKSLKDLMELKTKARELRDECRSLSSRCNQLEERVSVMEDEMNETKRGEKFREKRIKRNEQSLQEIWDYMKRPNLRLIGVPESDGENGTKLENTLQDIIQENFPNLARQANIQIQEIQRTPQRYSLRRATPRHIIVRFTKVEMKEKMLRVAREKGRVTHKGKPVRLTADLLAETLQARRQDTHRLKIKGWRKIYQANGKQKKAGVAILVSDKTEFKPTKIKRDKEGHYIMVKGSIQQEELTILNIYAPNTGAPRFTKQVLRDLQRDLDSNTIITGDFNTPLSTLDRSMRQKVNKDIQELNSALHQADLIDIYRTLHPKSTENTFFSAPHHTYSKIDHIVGSKALLSKCKRKEIITNCLSDHSAIKLELRIKKLPQNCSTIWKLNNLLLNDYWVHNEMKAEIKMLFETNENKDTTYQNLWDTLKAVCRGKFIALNAHGRKQERSKIDTLTSQLKELAKQEQTHSKASRRQEITKIRAELKEIETQKTLQKINESRSWFLPLARLIKKKTEKNQIDAIKNDKGDITTNPTDIQTAIREYYKHLYANKLENLEEMDKLLNTYTIPRLNQEEVEPRNRPITGSEIEAIINRLPTKKCPGPDGFTAEFYQRYKQVPFLLKLFQSTEKGGILPKSFYEASIILIPKPGKDTTKKENFRPISLMNIDVKILNKILAKQIQQHIKKLIHHDQVGFIPGMQRWFNIRKSINVIQHINRTKDKNRMIISIDAEKAFDKIQQRFMLKTLNKLGIDGTYLKTIRAIYDKPTANIILNGQKLEAFPLKTGTRQGCPLSPLLFNTVLEVLARAIRQEKEIKGIQLGKEEVKLSLFADDMIVYLENPIVSAQNLLKLISNFSKVSGYKINVQKSQAFLYTNNRQTESQIMSELPFTIASKRIKYLGIQFTRDVKDLFKENYKPLLKEIKEDTNKWKNIPCSWVGRINIVKMAILPKVIYRFNAIPIKLPMTFFTELEKTTLNFIWNQKRARIAKSILSQKNKAGGITLPDFKLYYKATVTKTAWYWYQNRDIDQWNRTEPSEITPHTYNYLIFDKPEKNKQRGKDSLFNKWCWENWLAICRKLKLDPFLTPYTKINSRWIKDLNVRPKTIKILEENLGITIQDIGVGKDFMSKTPKAMATKAKIDKWDLIKLKSFCTAKETTIRVNRQPTTWEKIFATYSSDKGLISRIYNELKQIYKKKTNNPIKKWAKDMNRHFSKEDIYAAKKYMKKCSSSLAIREMQIKTTMRYHLTPVRMAIIKKSGNNRDVGNVVEAMYGDLPPPIMLIGHSMGGAIAVHTASSNLVPSLLGLCMIDVVEGTAMDALNSMQNFLRGRPKTFKSLENAIEWRNIKDLSWADSIKNVAAASLACISGALPASAVTTSPDNKRMARNVLKYERLLAESPNHVVAEAVIQRPNIPHLQTRDTYEGLCQTLGSQPTLYQIPSLYCSYETNSNAYLLLQPIRKEVIHLEPYIALYHDFVSDSEAQKIRELAEPWEQSSSPATEQSWMENDFDELREEGFRRSNYSELQEEIRTNGKEVKSFEKKLDEWITRITNAEKSLKDLMELKTKARELRDECRSLSSRCNQLEERVSVMEDEMNETKRGEKFREKRIKRNEQSLQEIWDYMKRPNLRLIGVPESDGENGTKLENTLQDIIQENFPNLARQANIQIQEIQRTPQRYSLRRATPRHIIVRFTKVEMKEKMLRVAREKGRVTHKGKPVRLTADLLAETLQARRQDTHRLKIKGWRKIYQANGKQKKAGVAILVSDKTEFKPTKIKRDKEGHYIMVKGSIQQEELTILNIYAPNTGAPRFTKQVLRDLQRDLDSNTIITGDFNTPLSTLDRSMRQKVNKDIQELNSALHQADLIDIYRTLHPKSTENTFFSAPHHTYSKIDHIVGSKALLSKCKRKEIITNCLSDHSAIKLELRIKKLPQNCSTIWKLNNLLLNDYWVHNEMKAEIKMLFETNENKDTTYQNLWDTLKAVCRGKFIALNAHGRKQERSKIDTLTSQLKELAKQEQTHSKASRRQEITKIRAELKEIETQKTLQKINESRSWFLPLARLIKKKTEKNQIDAIKNDKGDITTNPTDIQTAIREYYKHLYANKLENLEEMDKLLNTYTIPRLNQEEVEPRNRPITGSEIEAIINRLPTKKCPGPDGFTAEFYQRYKQVPFLLKLFQSTEKGGILPKSFYEASIILIPKPGKDTTKKENFRPISLMNIDVKILNKILAKQIQQHIKKLIHHDQVGFIPGMQRWFNIRKSINVIQHINRTKDKNRMIISIDAEKAFDKIQQRFMLKTLNKLGIDGTYLKTIRAIYDKPTANIILNGQKLEAFPLKTGTRQGCPLSPLLFNMVLEVLARAISQEKEIKDIQLGKEEVKLSLFADDMIVYLENPIVSAQNRLKLISNFRKVSGYKINVQKSQAFLYTNNSQTESQIMSELPFTTASKRIKYLGIQLTRDVKDLFKENYKPLLSEIKEDTNKCKNVPCSWVGRINIMKMAILPKVIYRFNAIPIKLPMTFFTELEKTTLKFIWNQKRACIAKSILSQKNKAGGITLPDFKLYYKATVTKTTWYWYQHRAVDQWNRTGPSEIMPHIYNYLIFDKPDKNKQWGKDSLFNKWCWENWLAICRKLKLNPFLTPYTKINSRWIKDLHVRPKTIKTLEENLGNTIQVIGMGKDFMSKTPKAMATKAKIDKWDLIKLKSFFCTAKETTIRVNRQPTEWEKIFATYSSDKGLISRIYNELKQIYKKKTNNPIKKWTNDMNRHFSKEDIYAAKKHMKKCSSLPAIREMQIKTTMRYHLTPVRIAIIKKSGNNSKVDDIHAICSLLKDFLRNFKEPLLTFRLNKAFMEAAEITDEDNSISAMYQAVGELPQANRDTLVFLMIHLQRVAQSPYTKMNVANLAEVFGSTIVAHAVPNPEPVTMLQDIKCQPKVVERLPSLPLEYW

SEQ ID NO: 45147 - protein, 1054 aa, Homo sapiens
  DOMAIN (398)..(423): 7 kw REVERSE TRANSCRIPTASE RNA POLYMERASE domain identified by eMATRIX, accession number DM00895E, p-value=3.333e-11, raw score of 15.72
  misc_feature (1)...(1054): Xaa = X or * as defined in Table 2
MVKGSIQQEELTILNIYAPNTGAPRFIKQVLSDLQRDLDSHTLIMGDFNTPLSTLDRSMRQKVNKDTQELNSALHQADLIDISRTLHPKSTEYTFFSAPHHTYSKIDHIVGSKALLSKCKRTEIITNYLSDHSAIKLELRIKNLTQSRSTTWKLNNLLLNDYWVHNEMKAEIKMFFETNENKDTTYQNLWDAFKAVCREKFIALNAYKRKQERSKIDTLTSQLKELEKQEQTHSKASRRQEITKIRAELKEIETQKTLQKINESRSWFFERINKIDRPLARLIKKKREKNQIDTIKNDKGDITTDPTEIQTTIRQYYKHLYANKLENLEEMDTFLDTYTLPRLNQEEVESLNRPITGSEIVAIINSLPTKKSPGPDGFTAEFYQRYKEELPGRDTTKKENFRPISLMNIDAKILNKILANRIQQHIKKLIHHDQVGFIPGMQGWFNIHKSINVIQHINRAKDKNHMIISIDAEKAFDKIQQPFMLKTLNKLGIDGTYFKIIRAIYDKPTANIILNGQKLETFPLKTGTRQGCPLSQLLFNIVLEVLARAIRQEKEIKGIQLGKEEVKLSLFADDMIVYLENPIVSAQNLLKLISNFSKVSGYKINVQKSQAFLYTNNRQTESQIMSELPFTIASKRIKYLGIQLTRDVKDLFKENYKPLLKEIKEDTNKWKNIPCSWVGRINIVKMAILPKVIYRFNAIPIKLPMTFFTELEKTTLKFIWNQKRAHIAKSILSQKNKAGGITLPDFKLYYKATVTKTAWYWYQNRDIDQWNRTGPSEIMPHIYNYLIFDKPEKNKQWGKDSLFNKWCXENWLAICTKLKLDPFLTPYTKINSRWIKDLNVRPKTIKTLEENLGITIQDIGVGKDFMSKTPKAMATKAKIDKWDLIKLKSFCTAKETTIRVNRQPTTWEKIFATYSSDKGLISRIYNELKQIYKKKTNNPIKKWAKDMNRHFSKEDIYAAKKHMKKCSSSLAIREMQIKTTMRYHLTPVRMAIIKKSGNNRCWRGCGEIGTLLHCWWINWMKKTWHIYTMEYYASIKKNEFMSFAGAXMKLETII

SEQ ID NO: 45148 - protein, 1304 aa, Homo sapiens
  DOMAIN (432)..(477): kw TRANSCRIPTASE REVERSE II ORF2 domain identified by eMATRIX, accession number DM01354N, p-value=1.000e-40, raw score of 13.17
MGKKQNRKTGNSKKQRASPPPKEHSSSPATEQSWMENDFDELREEGFRRSNYSELREDIQTKGKEVENFEKNLEECITRITDIEKCLKELMELKTKARELHEECRSLRSRCDQLEERVSAMEDEMNEMKNTHRLKIKGAPRFIKQVLSDLQRDLDSHTLIMGDFNTPLSTLDRSTRQKINKDTQELNSALHQADLIDIYRTLHSKSTEYTFFSAPHHTYSKIDHILGSKALLSKCKRTEIITNYLSDHSAIKLELRIKNLTQNRSTTWKLNNLLLNDYWVHNEMKAEIKMFFETNENKDTTYQNIWDAFKAVCRGKFIALNAHKRKQERSKIDTLTSQLKELEKQEQTHSKASRRQEITKIRAELKEIETQKTLQKINESRSWFFEGINKIDRPLARIIKKKREKNQIDAIKNDKGDITTDPTEIQTTIREYYKHLYANKLENLEEMDKFLDTYTLPRLNQEEVESLNTPITGSEIVAIINSLPTKRVQDQMDSQPNSTREKEGILSNSFYEASIILIPKPGRDTTKKENFRPISLMNIDAKILSKILAKRIQQHIKKLIHHDQVGFIPGMQGWVNIHKSINVIQHINRAKDKNHMIISTDAEKAFDIIQQPFMLKTLNKLGIDGMYFKIIRAIYDKPTANIILNGQKLEAFPLKTGTRQGCPLSPLLFNIVLEVLARAIRQEKEIKGIQLGKEEVKLSLFADDMTVYLENPIVSAQNLLKLISNFSKVSGYKINVQKSQGFLYTNNRQTESQIMSELPFTIASKRIKYLGIQLTRDVKDLFKENYKPLLKEIKEDTKKWKNIPCSWVGRINIVKMAILPKVIYSFNAIPIKLPMPFFTELEKTTLKFIWNQKRARITKSILSQKNKAGGITLPDFKLYYKATVTKTAWYWYQNRDIDQWNRTEPSEITPHIYNYLIFDKPEKNKQWGKDSLFNKWCWENWLAICRKLKLDPFLTPYTKINSRWIKDLNVRPKTIKTLEENLGNTIQDIGMGKDFMSKTPKAMATKAKIDKWDLIKLKSFCTAKETTIRVNRQPTKWEKIFATYSSDKGLISRIYNELKQIYKKKTNNPIKKWVKDMNRHFSKEDIYAAKKHMKKCSSSLAIREMQIKTTMRYHLTPVRVAIIKKSGNNRCWRGCGEIGTLLHCWWDCKLVQPLWKSVWRFLRDLELEIPFDPAIPLLGIYPNDYKSCCYKDTCTPGHPRKQPTLGSIPQKSQDHCAEVLKDILFLAGTGGAQALLASFSLSQDVEFPAPSAVILENYKQKTEMSTTYWQSLTGPAGKQENCSQSQPQDPKYTVWMWGFRSKKQ

SEQ ID NO: 45149 - protein, 943 aa, Homo sapiens
  DOMAIN (110)..(151): kw TRANSCRIPTASE REVERSE II ORF2 domain identified by eMATRIX, accession number DM01354I, p-value=1.000e-40, raw score of 15.55
MGDFNTPLSTLDRSTRQKVNKDTQELNSALHQADLIHIYRTLHPKSTEYTFFSAPHHTYSKIDHIVGSKALLSKCKRTEIITNYLSDHSAIKLELRIKNLTQSRSTTWKLNNLLLNDYWVHNEMKAEIKMFFETNENKDTTYQNLWDAFKAVCRGKFIALNAHKRKQERSKIDTLTSQLKELEKQEQTHSKASRRQEIMKIRAELKEIETQKTLQKINESRSWFFERIIKIDRPLARLIKKKREENQIDTIKNDKGDITTDPTEIQTTIREYYKHLYANKLENLEEMDKFLDTYTLPRLNQEEVESLNRPITGAEIVAIINSLPTKKSPGPDGFTAEFYQRYKEELHINRAKDKNHMIISIDAEKAFDKIQQPFMLKTLNKLGIDGTYFKIIRAIYDKPTANIILNGQKLEAFPLKTGTRQGCPLSPLLFNIVLEVLARAIRQEKEIKGIQLGKEEVKLSLFADDMIVYLENPIVSAQNLLKLISNFSKVSGYKINLQKSQAFLYANNRQTESQIMSELPFTIASKRIKYLGIQLTRDVKDLFKENYKPLLKEIKEDTNKWKNIPCSWVGRINIVKMAILPKVIYRFNAIPIKLPMPFFTELEKTTLKFIWNQKRARIAKSILSQKDKAGSITLPDFKLYYKATVTQTAWYWYQNRDIDQWNRTEPSEITLHTYNYLIFDKPEKNKQWGKDSLFNKWCWENWLAICRKLKLDPFLTPYTKINSRWIKDLNVRPKTIKTLEENLGITIQDIGVGKDFMSKTPKAMATEAKIDKWDLIKLKSFCTAKETTIRVNRQPTTWEKIFATYSSDKGLISRIYNELKQIYKKKTNNPIKKWAKDMNRHFSKEDIYAAKKYMKKCSSSLAIREMQIKTTMRYHLTPVRMAIIKKSGNSRVYSFHLNIKVNCKTASGGVPKGIVNIGDDSSMHVIAPEDLLVGQAVEMEDRY

SEQ ID NO: 45150 - protein, 530 aa, Homo sapiens; identical to SEQ ID NO: 44799
  DOMAIN (119)..(166): kw TRANSCRIPTASE REVERSE II ORF2 domain identified by eMATRIX, accession number DM01354V, p-value=1.000e-40, raw score of 12.97
  misc_feature (1)...(530): Xaa = X or * as defined in Table 2

SEQ ID NO: 45151 - protein, 901 aa, Homo sapiens
  DOMAIN (21)..(66): kw TRANSCRIPTASE REVERSE II ORF2 domain identified by eMATRIX, accession number DM01354N, p-value=1.000e-40, raw score of 13.17
  misc_feature (1)...(901): Xaa = X or * as defined in Table 2
KMIKGISTTDLTEIQTTIREYYKHLYANKLENLEEMDKFLDTYTLPRLNQEEVESLNRPITGAEIVAIINSLPTKRSAGPDGFTAEFYQRYKEELVPFLLKLFQSIEKEGILPNSFCEASIILIPKPGRDTTKKENFRPISLMNIDAKILNKILAKRIQQHIKKLIHHDQVGFIPGMQGWFNIRKSINVIQHINRAKDKNHMIISIDAEKAFDKIQQHFMLKTLNRLGIDGTYFKIIRAIYDKPTANIILNGQKLEAFPLKTGTRQGCPLSPLLFNICKSKKLLEARAIRQEKEIKGIQLGKEEVKLSLFADDMIVYLENPIVSAQNVLKLISNFSKVSGYKINVQKSQAFLYTNNTDKQESQIMSELPFTTASKRIKYLGIQLTRDVKDLFKENYKPLLNEIKEDTNKWKNIFIPCLWVGRISIMKMAILPKVIYRFNAIPIKLPMTFFTELEKTTLKFIWNQKRARITKAILSQKHKAGGITLPDCKLYYKATVTKTAWYWVPKTEDIDQLEQDQSPQEIRPTYIYNYLIFDKPWEKPSNGGKDSLFNKWCWENWLAICRKLKLGSPSLTPYTKVNSRWIKDLNVRPKNHKKPXKENLGNTHIQDIGMGKDFMAKTPKAMATKDKIDKWDLILKLKSFLHSKRETTIRVNRQPTKMGEKIFAIYSSDKGLISRIYKELKQIIYQKKTNNPIEKWAKDMNRHFSKEDIYAAKRQNEKNAQPSLAIRVMQIKTTMRYHLTPVRMAIIKKSGNNRCWRGCGEIGTLLHCWWECKLVQPLWKSVWRFLRDLELEIPFDPAIPLLGIYPNDYKSCCYKDTCTRMFIAALFTIAKTWNQPKCPTMIDWIKKMWHIYTMEYYASHIKNDEFMSSVGTWMKLETIILSKLSQGQKTKQCMFSLIGGN

SEQ ID NO: 45152 - protein, 54 aa, Homo sapiens
  DOMAIN (8)..(48): Ribosomal protein L10e proteins domain identified by eMATRIX, accession number BL01257D, p-value=9.710e-20, raw score of 18.80
  misc_feature (1)...(54): Xaa = X or * as defined in Table 2
CTSTVIMSICTKLQNKEHVIEALRRAKFKFPGHPKIHISKKXDFTKFNADEFED

SEQ ID NO: 45153 - protein, 486 aa, Homo sapiens
  DOMAIN (371)..(418): Intermediate filaments proteins domain identified by eMATRIX, accession number BL00226D, p-value=5.821e-35, raw score of 19.10
MTCGSYCGGRAFSCISACGPRPGRCCITAAPYRGISCYRGLTGGFGSHSVCGGFRAGSCGRSFGYRSGGVCGPSPPCITTVSVNESLLTPLNLEIDPNAQCVKQEEKEQIKSLNSRFAAFIDKVRFLEQQNKLLETKLQFYQNRECCQSNLEPLFEGYIETLRREAECVEADSGRLASELNHVQEVLEGYKKKYEEEVSLRATAENEFVALKKDVDCAYLRKSDLEANVEALIQEIDFLRRLYEEEIRVLQSHISDTSVVVKLDNSRDLNMDCIIAEIKAQYDDIVTRSRAEAESWYRSKCEEMKATVIRHGETLRRTKEEINELNRMIQRLTAEVENAKCQNSKLEAAVAQSEQQGEAALSDARCKLAELEGALQKAKQDMACLIREYQEVMNSKLGLDIEIATYRRLLEGEEQRLCEGVGSVNVCVSSSRGGVVCGDLCASTTAPVVSTRVSSVPSNSNVVVGTTNACAPSARVGVCGGSCKRC

SEQ ID NO: 45154 - protein, 411 aa, Homo sapiens
  DOMAIN (209)..(257): Intermediate filaments proteins domain identified by eMATRIX, accession number BL00226B, p-value=1.000e-33, raw score of 23.86
MTCGFNSIGCGFRPGNFSCVSACGPRPSRCCITAAPYRGISCYRGLTGGFGSHSVCGGFRAGSCGRDFGYRSGGVCGPSPPCITTVSVNESLLTPLNLEIDPNAQCVKQEEKEQIKSLNSRFAAFIDKVRFLEQQNKLLETKLQFYQNCECCQSNLEPLFAGYIETLRREAECVEADSGRLASELNHVQEVLEGYKKKYEEEVALRATAENEFVALKKDVDCAYLRKSDLEANVEALIQEIDFLRRLYEEEIRILQSHISDTSVVVKLDNSRDLNMDCMVAEIKAQYDDIATRSRAEAESWYRSKCEEMKATVIRHGETLRRTKEEINELNRMIQRLTADGGECQLGLDIEIATYRRLLEGEEQRLCEGVEAVNVCVSSSRGGVVCGDLCVSGSRPVTGSVCSAPCNGNLV

SEQ ID NO: 45155 - protein, 139 aa, Homo sapiens
  DOMAIN (3)..(53): Ribosomal protein L24e proteins domain identified by eMATRIX, accession number BL01073, p-value=5.375e-18, raw score of 24.30
STPKFPGHGMTFVHNNCKVFRFCKSKCHKNFKKKHNPPKLCGCVLEALAVCAVRSAALVVFEIGAVGGQRGHVILSLFKDNHSLLFPISPGIVHRWGHENWCEIFSFHHRDSRHRDDGRALGEADAVLFPLGILQVILI

SEQ ID NO: 45156 - protein, 302 aa, Homo sapiens
  DOMAIN (175)..(209): Amyloidogenic glycoprotein extracellular domain proteins domain identified by eMATRIX, accession number BL00319C, p-value= 1.947e-09, raw score of 17.12
  misc_feature (1)...(302): Xaa = X or * as defined in Table 2
VRARAGERARVVRENGKAELPVALVLPSRALSHTFTCTDLKVQFHQRLRLQEKGSKFIGSNMSQESDNNKRLVALVPMPSDPPFNTRRAYTSEDEAWKSYLENPLTAATKAMMSINGDEDSAAAHRPALXLLQENQSEPIPREGVGWGXGEERERMTEEEQEGEGGGGGRGGGEGEEEEEEEEDVEEEEEEEEEEEKEEEEKGGEKEEENEEKEKQREGRRGKETSNGQMVRPRLLPPHQEHSRNYLVFIMDSNMIEICFREASISPKAQAYVLIPDFKNCIYGWEEDSIEILWGLPGSHVL

SEQ ID NO: 45157 - protein, 114 aa, Homo sapiens
  misc_feature (1)...(114): Xaa = X or * as defined in Table 2
QRSKSCKVPGLGKPLTLPPKPEKPQGQKDRRPTGFKPXNXRRRRSEKSLRFFPPGSPQAVPIPVGFSFDTNLXHFLXKPLIFIMGGTVSLPHPRSPSAPPGTPQRPMTFCHLKQ

SEQ ID NO: 45158 - protein, 266 aa, Homo sapiens
  DOMAIN (86)..(135): Eukaryotic RNA polymerase II heptapeptide repeat proteins domain identified by eMATRIX, accession number BL00115Z, p-value= 7.485e-09, raw score of 3.12
GLLLSPFQGLQGVAPRKTRSNLHPGSLAHLSHQPPAPWPPRGLWPPGQETSCHCASGRALGTGSPRPPHAPWLHLEPQRAPHSGAPSPGSSPSAPLHIPVAPENLQSLGHRSPPNPSGPDCYPSPSGPPPSSLDSPGLQTAPGAMFLSPRSGVQSACPTPRSLDLRNSPASTPDQSVCPTPLSLAWLWPPPSPTSAKSLLFTLTSEVQSFSPTPIPPGSSDPPLSKQPSGSCLSSSGHLTSPSVPRHSPWPRSSPQNPHSWTLPSS

SEQ ID NO: 45159 - protein, 256 aa, Homo sapiens
  misc_feature (1)...(256): Xaa = X or * as defined in Table 2
AIPGGAAWPFRAEGAQGPGKRLTFKPLGAQRQSVSGGSEVPPLPLHLKMAPEMPVALXSPGTGVHPSLLPPTGPKVPPGRIDRGPVPTLAPQVGTAPIQWHCRGSRCPSGSRPPGGWRRPCQAPAPPLGQHLPRLLPPPTGPQGPRPLTPSEPPPWSCWLPASPPAGPGSRRVGGGPGTCQGLLRSXGLLLSPFQGLQGVAPRKTRSNLHPGSLAHLSHQPPAPWPPRGLWPPGQETSCHCASGRAVGTGSRRPRA

SEQ ID NO: 45160 - protein, 321 aa, Homo sapiens
  misc_feature (1)...(321): Xaa = X or * as defined in Table 2
MARKDCCSPPGDSSPGRLPLVLPAQCLVLLRLQITAFSSIHVAANDMMSFFLMAKQDSIAYKYRIFFIHSSVDGHARPLSPSLVVENGCGKQVFLLCSDNASPEVSTVALASCPGTFPRHCGAAESTHICATGLGELTPQGHGHIPNKLCACCATGLEELVPRDHGKLGISWFGFIAGAYLNLARVVGECQGSYGYLSLHHYCYCHYYHYCHYHYHAATYXNHYYHYYHHHNNSYHHHSYYHYSYHFYHYYYNCYHHHYHCRHYYHPHDYYHYHARHYSLYYCHYLCHYYYRCYHDHSSHQHNHHECLPXVRHSAEHLQYL

SEQ ID NO: 45161 - protein, 447 aa, Homo sapiens
  misc_feature (1)...(447): Xaa = X or * as defined in Table 2
CHQPPASPFSRREPGGSEKPPERGCPAWEPAAQGPVQPLGEDGPRLCQPPPPSPDHALGPYGHQRSGRPTLPGPRKPAKKRGRXPSSSTGQXSHRPTTGTPGGQAGGSGXVTAGGQXPPQNLXAKISCPEMPGPSPGMQQGVKHPSLFSHQTVAKGFTTRWNCRQVCPHRGERKWISSVRPCGGALAPSCADGLRGRRTLSGSQPLWPPAAVSAVGQLQPPCHTLTPHPLQNSTQHAEPQRGSVYSLXEGTSPLAAVPFAPHIEKRPFSTFPAGDAXPSEAHAPGPACCHSPGGLEGPVSRAGPGTSAGRPGNGRERAWPPHSGPSTPPDTSCGSPGPQLARAGSRRANGSTLPPTRQGFLPGRKDSAGACGQPXAEGAAAGPSRSPAAERAVLPLPRGRRKCRGGGPGVETGVSGARRGGDRSGCSPAALDAEAPASLAGVSIREG

SEQ ID NO: 45162 - protein, 807 aa, Homo sapiens
  DOMAIN (633)..(680): kw TRANSCRIPTASE REVERSE II ORF2 domain identified by eMATRIX, accession number DM01354V, p-value=1.000e-40, raw score of 12.97
PCSRTCGKGMQSRQVACTQQLSNGTLIRARERDCIGPKPASAQRCEGQDCMTVWEAGVWSECSVKCGKGIRHRTVRCTNPRKKCVLSTRPREAEDCEDYSKCYVWRMGDWSKCSITCGKGMQSRVIQCMHKITGRHGNECFSSEKPAAYRPCHLQPCNEKINVNTITSPRLGSQPTSGSESDFSVGQQDQQLGRKNGSGVQESKVKGDMDLSVLPNNNHPDKFLQLDVKSLTRSSALLQASLVRFPGGNYPAAQHWQNLVYSQGLISTINHLYSFGSSSLICQDTRILTQLKYRPQNRQAVVWHPGTHLPSGVKQNFFLLYKVITILNIKLLLKVEEEIKKHGSNNMGLSENLTDCAAAGNGDDGLIPQRAENLKISNFLGRRMKSIIGDEHQKPKVDKTTKRWRNQCRKAENSQNQNASSPKDHNSLPSREQNWSENEFDGLIEVGFRRWVITNSCELKECVLTQPQVDITVLPICDVTPRGLAVKFLSLYSFSLFLNRPTLMENRTYVEILGVGSPSTYPPRSSQLHPWDARLVQHMHINKALEVLARAIRKEKEIKGIQIGREEVNLSLFADDMIVYLEYLIVSAQILLEVISNFSNVSGYKINMQKSQAFLYTNNTQIETQIMNEFPFTIATKRIKYLVIQLTKDVKDLFKENYKPLLKEIREDTNKWENIPCFWIGRINIVKMAILPKVIYRLNVIPIKLPLTFFTELEKTTLNFIWNQKRAHIAKTILSKKNKAGGIMLPDFKLYYKATVTKTAWYWYQNRYADQWNRTEPSEITSHIYNHLIFDKPDTNKQWGKDSLFNK

SEQ ID NO: 45163 - protein, 493 aa, Homo sapiens
  DOMAIN (115)..(162): kw TRANSCRIPTASE REVERSE II ORF2 domain identified by eMATRIX, accession number DM01354V, p-value=1.000e-40, raw score of 12.97
  misc_feature (1)...(493): Xaa = X or * as defined in Table 2
VHCRFWILALCQMSRLQKSPLLFNIVLEVLAKAIKQEKEIKGIQLGKEEVKLSLFADDMIVYLENPIVSAQNLLNLISNFSRVSGYKINVQKSQAFLYTNNRQTESQIMSELPFTIASKRIKYLGIQLTRDVKDLFKENYKPLLNEIKEDTKKWKNIPCSWVGGRINIMKMAILPKVIYRFNAIPIKLPLTFFTDLERTTLNFICNQKRAPTLPQVQSLSQKNKAGGITLPDFKLYLQGLQXPKTAWYWYQNRDIDQWNRTEPSEIMPHIYNYLIFDKPWEKHKQWGKDSLFNKWCWENWLAICRKLKLDPFLTPYTKINSRWINDLNVRPKTIKTLEENLGITIQDIGMGKDFMSNKTPKAMATKAKIDKWDLIKLKSFCTAKETTIRVNRQPTKWKKIFTTYSSDKGLISRIYNELKQIYKKKTNNPIKKWAKDMNRHFSKEDIYAAKKHMKKCSTSLAIREMQIKTTMRYHLTPVRMAIIKKSENSRCWR

SEQ ID NO: 45164 - protein, 95 aa, Homo sapiens; identical to SEQ ID NO: 34281
  misc_feature (1)...(95): Xaa = X or * as defined in Table 2

SEQ ID NO: 45165 - protein, 398 aa, Homo sapiens
MGLSVLPLHPNASSGRFLSPSSCRITAHLSLFVGSMRRCTMAGSLPGAVLAPSVHGLQVAIIVRVTPIISPLLYIRLVRQYLITVLQLAGVDSNPSSTNSEASRYISPTLKGGGRTVGSTGSCLPDQVIPNTPSSHLVWHRKETKASLGGRGLLFESIEVFPETSASSSATASTENPVVVDGLDELKVPPGALIRTSAGTGRRRSRCPSSWEFAEEEDVTQGSLAGHTRPRALRDLQLLAQQPTTIFALFASGQISVSLQLKQQPQVSGSETNFLSDSSVRILCDHVTRAPVICRKWSWEVTVPPRSSGLNLLCPQSQPVPEAPASLANVLLDEGAMLLYKTMNAQNTSCRCCRWKTVVLRSQLQGPCCCLGCQQEVTHLCLAKNPIGDTGVNFCVRA

SEQ ID NO: 45166 - protein, 178 aa, Homo sapiens
  misc_feature (1)...(178): Xaa = X or * as defined in Table 2
GAGTDGGRTPAPRAFPDPLGEARTSAPTGPARPGGSASAARPAAVRPAEPAAEETQEQPRAGKRAIHEYRYVYVQQRRKTDPQPAVAVFGIPADGDXVSRTAYHAHQPLAWSGREXMCLSMAMWNTXSTMKKXISIRVISRCSGPVHRTNXQIPEPVRAWRFLICRCICFSPGRWIKT

SEQ ID NO: 45167 - protein, 519 aa, Homo sapiens
  DOMAIN (210)..(231): CALICIVIRUS NON-STRUCTURAL POLYPROTEIN FAMILY SIGNATURE domain identified by eMATRIX, accession number PR00918A, p-value= 7.808e-11, raw score of 13.76
  misc_feature (1)...(519): Xaa = X or * as defined in Table 2
KMAPTWDKMVSSAQMGFNLQALLEQLSQDELSKFKYLITTFSLAHELQKIPHKEVDKADGKQLVEILTTHCDSYWVEMASLQVFEKMHRMDLSERAKDEVREAALKSFNKRKPLSLGITRKERPPLDVDEMLERFKTEAQAFTETKGNVICLGKEVFKGKKPDKDNRCRYILKTKFREMWKSWPGDSKEVRGYGXEIQDADPIQQPQGASRALPYTVVLYGPAGLGKTTLAQKLMLDWAEDNLIHKFKYAFYLSCRELSRLGPCSFAELVFRDWPELQDDIPHILAQARKILFVIDGFDELGAAPGALIEDICGDWEKKKPVPVLLGSLLNRVPLCIENKLGVGGEDWGDQLRVYWWNPSKREGGSGWSHGSEDANQSLKHLRLSANVLLDEGAMLLYKTMTRPKHFLQMLSPWETTLAQIIMLDWAEETSSDKLKYAFYCSCRELSRLCPCNFEELVFRDWPELQDDIPHILAQARKILFVIDGFDPLGGRTLWTLTRGHLRELGNRRKRCPSSWGVC

SEQ ID NO: 45168 - protein, 138 aa, Homo sapiens
  misc_feature (1)...(138): Xaa = X or * as defined in Table 2
EPGIDTSCLCAGRCSRPGKGRACGGSSPCSWPGQPPAPPAAAAVPACPSGGRGAGPIQSGTCCSRSADSRCTSWTAWWPPGLGAATVQTVMSXTVWPMPHVPQAGWLALGQGAAAAKHPLTSATTRSWCLGVGPGPWM

SEQ ID NO: 45169 - protein, 206 aa, Homo sapiens
  misc_feature (1)...(206): Xaa = X or * as defined in Table 2
MCNAQVLEYMGKSSSLLTSDLQLVRDALRSLRNSFSGHDPQHHTIDSLEQGISSLMERLHVMETQKKQERKPPLVIPRQTWVWSGPPANSNRPAAEGPDCXKENXRDALRSLRNSFSGHDPQHHTIDSLEQGISSLMERLHVMETQKKQERKPPLVIPRQTGSGVDLQQTPTDLQLRDLTVRRKTNEQKGIASASTKRTSTPKPHL

SEQ ID NO: 45170 - protein, 250 aa, Homo sapiens
MGELNQGSWRQGHLPLDAANGIAIRVPRRRKDESRKNPTRKPHSWKPTKNFEDDVEVMKRSMSIRIEDTHSGPSAAGVLEFAGGPLQTLFAWVSPAEAAEQQRLLPVPCLWKLCPRGAPARCRQNSPSKLPSGFVYTVRGKLPTQASVVVDAPPATKLECPRSTSDCCAGSKNFKPVDLSLLASVGPRVNLQQESSHYGKISVTVAGHCPTHATGRILGKQALRWSPMCSMFIGRALGLVPVEGGLLQIA

SEQ ID NO: 45171 - protein, 27 aa, Homo sapiens
  misc_feature (1)...(27): Xaa = X or * as defined in Table 2
VGKQGLEWTPANSSRPAAEGPDCXKEN

SEQ ID NO: 45172 - protein, 224 aa, Homo sapiens
  DOMAIN (57)..(77): kw TRANSCRIPTASE REVERSE II ORF2 domain identified by eMATRIX, accession number DM01354U, p-value=7.000e-13, raw score of 12.24
  misc_feature (1)...(224): Xaa = X or * as defined in Table 2
MVVYACSPSYLEAEVGGSLSLEVEATNPKNSSKKFLDLISEFCKVSGYKISVHKSVALLYTKNDQAATQIKNLIPFTTAAKQFKYFGIYLTKEEERLKPSRKKITKKHTKKRTASLILHAMICSQIPKQQQNEKYQVPQFDQSTIKNIESAKGLDVWDSWPLQNADGTPPLVIPRQTWVWSGPPANSNRPAAEGPDCQKENXQTERNSINIKKKDIHTKTPLCI

SEQ ID NO: 45173 - protein, 104 aa, Homo sapiens
  misc_feature (1)...(104): Xaa = X or * as defined in Table 2
YLLMDFPLLHSWLVSLGDKVPHEFWRGCPSCSFGPRFWVAGVLVLXAPKLXLRQVRSAGKRCGQKWXIKXSDRLCVDXNKWSDSDLKPATSCSLIVTCHSLLGF

SEQ ID NO: 45174 - protein, 220 aa, Homo sapiens
  misc_feature (1)...(220): Xaa = X or * as defined in Table 2
MESMLNKLKSTVTKVTADVTSAVMGNPVTREFDVGRHIASGGNGLAWKIFNGTKKSTKQEVAVFVFDKKLIDKYQKFEKDQIIDSLKRGVQQLTRLRHPRLLTVQHPLEESRDCLAFCTEPVFASLANVLGNWENLPSPISPDIKDYKLYDVETKYGLLQSGPSAACLLEFAGGPLQTLFAWVSPADAAEQQRLLPNPSSGSFVLERHLPDASQSSPCTX

SEQ ID NO: 45175 - protein, 79 aa, Homo sapiens
  misc_feature (1)...(79): Xaa = X or * as defined in Table 2
LCSIKKPEKSLLCWXYPGNRVWSGPPAKSNRPAAEGPDCXKENXQTERNSININKKDIHTKTPSEGHQHQRPKTKPGRI

SEQ ID NO: 45176 - protein, 118 aa, Homo sapiens
  misc_feature (1)...(118): Xaa = X or * as defined in Table 2
QSGPSAAGLLDFAGGPLQTLFARVSPAEAAEQQRLLPFPSSGKLRPRGAPARCQPELSCMRCRXSLLGGVSQSGYMGVRDPFEEAACPLSELECSAGRSAALLRMVRQGHLGLLKLRP

SEQ ID NO: 45177 - protein, 630 aa, Homo sapiens
  DOMAIN (144)..(170): G-protein coupled receptors family 2 proteins domain identified by eMATRIX, accession number BL00649C, p-value=6.226e- 11, raw score of 17.82
MPVWVTVVKSWNTQIGRPGHVSALGFELTKNPWPLTYESGDGRSLGKPGAVSRRGGRHGPHPQQAECDLPAGRIAGPCERGLERQEKLPPAPQGGAWHLRLSRERFKSEDAPKIHVALGGSLFLLNLAFLVNVGSGSKGSDAACWARGAVFHYFLLCAFTWMGLEAFHLYLLAVRVFNTYFGHYFLKLSLVGWGLPALMVIGTGSANSYGLYTIRDRENRTSLELCWFREGTTMYALYITVHGYFLITFLFGMVVLALVVWKIFTLSRATAVKERGKNRKKVLTLLGLSSLVGVTWGLAIFTPLGLSTVYIFALFNSLQAHKQLKDRKVGPHFMQGAVFLEGKFWGVDIASFEPQEQFWWTNLGKEDEDKSFDMPHSWVEQIEISPEEEAMGSAQMVRGVSGPERGSKKRPQLTVSTAFETRCPNGKKVIQYKRAKLEKWAPYLNSNGLVSRLTTYEDLQCTNILEIKEWYQNREDMLELKHINKTTDLKTDYFKPGHPQALRVHSYKSMQPEMDRVIEFYETARVDGLMKREETPRTMTEYYQGRPDFLSYRHASFGRPSQEAHSEQCRVKPPAHCAKPAEDDVRKSACFWSRRSASSCATTAVRTTSRPPSASSCGAPRWTAKATRSS

SEQ ID NO: 45178 - protein, 141 aa, Homo sapiens
  DOMAIN (100)..(118): ALPHA-LYTIC ENDOPEPTIDASE SERINE PROTEASE (S2A) SIGNATURE domain identified by eMATRIX, accession number PR00861C, p-value= 9.196e-10, raw score of 13.18
HVQQTEISRTVSTGSPIILSCSVPVTLPNGPVLWFKGNAGPNRKLIYNFKQGNFPRVKEIGDTTKPGNTDFSTRIREISLADAGTYYCVKFIKGRAIKEYQSGRGTQVFVTVSYSSRSQKSEICISGLKSRHQQNCSFWRF

SEQ ID NO: 45179 - protein, 130 aa, Homo sapiens
RQGNFPRAKQIGDTTKPGNTDFSTRIREISLADVGTYYCVKFIKGRAIKEYQSGRGTQVFVTEQNPRPPKNRPAGRAGSRAHHDAHTCLSALPERNSTNYFVQPCCCLRLLGLTGFAVKIIQTGKERTSK

SEQ ID NO: 45180 - protein, 250 aa, Homo sapiens
MGSSLSPVLYVALPVRQPLLRSVVEERSTKMRVGSPGFQAKFRFYSQGLSWSARGEEGLVPAFWLQPYPRPLNFKAEMTEQKENQTYVDGGFRPYIHRRKNLTEGHKAEKEMEPWDGFSDESCRTHCQVHDYAKGHGEVQRERVDEQKEHLGGRRQDCQQQHLNRRLHCTVSGEAPSEASGSVRGHGRAHGLAGSERHGHDHAAPEHQLLQSVDADHVVPVAWYQFWDDEGRGILSPGDHKPDRRGAALY

SEQ ID NO: 45181 - protein, 240 aa, Homo sapiens
  misc_feature (1)...(240): Xaa = X or * as defined in Table 2
VEGISRTGIQAEQAPGFTTMPIPVSVNPGDVLTLACNMSALSPEGPVLWFKSIGPGQQLIFSCNGSHFPRVTPVENTMVDQTDYSIILSCSVPNTLPNGPVLWFKGTGPNRKLIYNFKQGNFPRVKEIGDTTKPGNTDFSTRIREISLADAGTYYCVKFIKGRAIKEYQSGRGTQVFVTGEYVSYTPYPLVYNSPLWDEASRGRSRQQSLLFCSLHWXYPRKQDLEWTSSKLQQTCRRVA

SEQ ID NO: 45182 - protein, 73 aa, Homo sapiens
  misc_feature (1)...(73): Xaa = X or * as defined in Table 2
KKLLLLLLCGIEWHGFSSDSGSGGWVPEGXKXGCEHELLPEDVPSCFGWAECWLVRRTLPLFHYVELCYSFHG

SEQ ID NO: 45183 - protein, 131 aa, Homo sapiens
  misc_feature (1)...(131): Xaa = X or * as defined in Table 2
XGHKHLSQLLLCGRDDLFQASSGHGPFLLLFPELPSPRDALQLLREASKFPTDKRQGRSWSVAITNTAATSLEWVPFHAFAIPRSTLVSQQSPTANSPYDPSPPPPSSTATSENSYYLNFTVTKISLGPVG

SEQ ID NO: 45184 - protein, 711 aa, Homo sapiens
  DOMAIN (105)..(123): Immunoglobulins and major histocompatibility complex proteins domain identified by eMATRIX, accession number BL00290B, p-value= 6.250e-09, raw score of 13.17
MATTPGRALGSLLPTLLLGLTAGQPFISLTGPSHRTSPGDSVPFNCTAVPFNSQDFSRDFNVTWLKDSDEHPASAQRLVPDNGGNDFITSKAWVTLTRQDVSSEITCEVTHRALAEPLKTTMNLSQATRNPDGTYSLEHTWQAEATLEEREFACWVVHDEQPPLKANVTLQAQVRRQGKARLGRVRDSGRHWMMVKEGRIPAAGDTTLTHSPPDSTSHAFLHTLPKKKGDVDKAGSHHPQQTNAGRETQTLRVLTHKWELNNENTWTHGGEQHTPRPVAAGQSVQPYKLQGPLQRSEPGTRIRLTYASSGFSTHQVTVTWLKNKHELPNPQTSVQYSGHTYNVTSSVLVPLMDDDVFSHVVCHVEHKLTWFFQKTTGLDQYLQGRRFEELGKLNSRANGVFRRVGPMLGRSVNSMRTHDSCVEGTLPCPLLHGHHPSYQGFNTRSLPFSGFALFLRFYPQNVHLAWLEDCHTLKGTEQPTLKKNNDRSYTLEKLLLVNASVQGPERVLTCMMEHEGQPPKRANLVLSTAAHTAYKPIGSTGKFTSSSVSTWGHFCILSGFQKRGLNVERRHGFGIRIRCNLQALELLDYMTSERAFKLTEPPRDGSFYPLALRPRDACPCLCGFPPGPQGAAGDEFHSDLHLQEVEPVTGEHRIGFSLRYWVTGWQEAYRASPTKSLGPSRVIQPQGKSFGAESGTSFLHEDSRDVLTLMY

SEQ ID NO: 45185 - protein, 438 aa, Homo sapiens
  DOMAIN (105)..(123): Immunoglobulins and major histocompatibility complex proteins domain identified by eMATRIX, accession number BL00290B, p-value= 6.250e-09, raw score of 13.17
  misc_feature (1)...(438): Xaa = X or * as defined in Table 2
MATTPGRALGSLLPTLLLGLTAGQPFISLTGPSHRTSPGDSVPFNCTAVPFNSQDFSRDFNVTWLKDSDEHPASAQRLVPDNGGNDFITSKAWVTLTRQDVSSEITCEVTHRALAEPLKTTMNLSQATRNPDGTYSLEHTWQAEATLEEREFACWVVHDEQPPLKANVTLQAQVRRQGKGQSVQPYKLQGPLQRSEPGTRIRLTYASSGFSTHQVTVTWLKNKHELPNPQTSVQYSGHTYNVTSSVLVPLMDDDVFSHVVCHVEHKLTWFFQKTTGLDQYLQGDPXQLCGGHLTLPSSPRAPPQLPGLQHPVVFHSQVLLFSCLVAVTCLVQRFYPQNVHLAWLEDCHTLKGTEQPTLKKNNDRSYTLEKLLLVNASVQGPERVLTCMMEHEGQPPKRANLVLSTAAHTAYKPIGSTESIMVTMIITISQMGKLRTRG

SEQ ID NO: 45186 - protein, 112 aa, Homo sapiens
  misc_feature (1)...(112): Xaa = X or * as defined in Table 2
RRATRPGNXGGRHNAGRSSARLETGRPAMAPQGRPRPLGCRTPQHPGHWPSAPGLLPPAPGPVAGMTQAQRWCPEPDAHFLQYTLYFVRHIPQLPKQTPHHYIATRLPCATQ

SEQ ID NO: 45187 - protein, 29 aa, Homo sapiens
  misc_feature (1)...(29): Xaa = X or * as defined in Table 2
GVCCPLLGGVSSXATWGSGTTXGGNTHLI

SEQ ID NO: 45188 - protein, 805 aa, Homo sapiens
  misc_feature (1)...(805): Xaa = X or * as defined in Table 2
MCPTLPAGCVLRLPEAGLASPEERNSININKKDIYAKTPSLGHQHQRPKADKTTKMGRNQSRKAENSKNQSTSSPPKDRSSSPAREQSWTENDSDELTEKVLTSTPTGQDTAPLGFFRRQLPNDPTSHTVEATEQVPSDNEDPAMCLRASDNEDPAMCLRASDSEDPAMCLRASDSEDPAMCLRASDNEDPAMGGLLCQAILLTFQEPGLSPGPASCQGQGRPLCHAPESLVPSLRYVLGVTGFLGPPLRPAAGPAMPTRFSSTWYTEVPRLLLGTLEPRRHVTAGSLSSAAHRIPIVRAPRPSPQGTSLASQVSSPSTPEAPDIPACPSPGQKIKKSTPAAGQPPHLTSAQDQDTISELASCLQRARELGARVRALKASAQDAGESCTPEAEGRPEEPCGEKAPAYQRFHALAQPGLPGLVLPYKYQVLAEMFRSMDTIVGMLHNRSETPTFAKVQRGVQDMMRRRFEERNVGQIKTVYPASYRFRQERSVPTFKDGARRSDYQLTIEPLLEQEADGAAPQLTASRLLQRRQIFSQKLVEHVKEHHKAFLASLSPAMVVPEDQLTRWHPRFNVDEVPDIEPAALPQPPATEKLTTAQEVLARARNLISPRMEKALSQLALRSAAPSSPGSPRPALPATPPATPPAASPSALKGVSQDLLERIRAKEAQKQLAQMTRSSGCSASERLPELARVLRSVFVSERKPALSMEVACARMVGSCCTIMSPGEMEKHLLLLSELLPDWLSLHRIRTDTYVKLDKAADLAHITARLAHQTPPLRAKGKCGLQAAQPKGLWLRAVGPFMGLPX

SEQ ID NO: 45189 - protein, 147 aa, Homo sapiens
  misc_feature (1)...(147): Xaa = X or * as defined in Table 2
ARAACLPRGSARGTAGAGEEPPDPAPLHLRGEGPAPHRPRSPRGMGWPAAPSTRSPPSTXRRCPLPPRPRWSPXSHPGPRASARRLPXLSXRASRSSEAPSPGSLGSVAGQDCSRTGTGFSPPAFPSDGQQTPPPAPSSVPTLNSLG

SEQ ID NO: 45190 - protein, 713 aa, Homo sapiens
  DOMAIN (213)..(230): RNase H domain identified by eMATRIX, accession number PF00075A, p-value=4.400e-13, raw score of 14.44
  misc_feature (1)...(713): Xaa = X or * as defined in Table 2
GQEPQVREQKACHHLGSSPPPSWELXEQRPAGPXNXXPSTLTTGTGSTTTXQIRMKVNXMGNDSPQGKNTPKMYSGEFSPVRVHVPFSLSDLKQIKIDLGKFSDDPDGYIDVLQGEDILAKAGAIRHLNIGEGTHVCCPLLEEGINPEVWATEGKYGRAKNAHPIQVKLKDSASFPYQRQYPLRPEAQQGLQKIVKDLKAQGLVKPCSSPCNTPILGVQKPNGQWRLVQDLRIINEAIVPLYPAVPNPYTPLSQILEEAEWFTVLDLRDAFFCIPVHPDSQFLFAFEDPLNPMSQLTWTVLPQGFRDSPYLFGQALAQDLSQFSYLDTHVLWYMDDLLLAARSETLCHQATQALLNFLATCGYKVSKPKAQLCLQQVKHLRLKLSKGTRALSEERIQPISAYPHPKTLKQLRMFLGITGFCQIWINRYGKIARPLYTLIKETQKANTHLVRRTSLQPVAYLSKETGTSLQPVAYLSKEIDVVAKRWPHCLRVVAAIAVLVSKAVKMIQGRALTVWTSHDVNSILTAKGDLWLSDNHNEEKIEHNWQQVIAQTYAAQGDLLEVPLTDPDLNLYTDGSSFVEKGLRKAAYAVFSDNGILESNPLTPGTSTQLAELIAVTQALELEGKREPENPADNASYSCEPLEDLRLLFRRQPIEAVKLQMVLQMEPQMQSMTKIYRGPLDWPASPCSNVDDIEGTPPKEISTARPLLCPNSA

SEQ ID NO: 45191 - protein, 131 aa, Homo sapiens
  misc_feature (1)...(131): Xaa = X or * as defined in Table 2
RRYQVQRPSEGTLVYLFWPVXPVVGVDPWLPTGPDYSLLVPIPPPRARTPRWAXAXMKGCRRSATAXWCMCXSCRVPCPSCTPMFHSPCSAMTAVTPSLARPXTHGSPPKAQGAPQGVKGPSSGLEAPPWA

SEQ ID NO: 45192 - protein, 95 aa, Homo sapiens; identical to SEQ ID NO: 42349

SEQ ID NO: 45193 - protein, 82 aa, Homo sapiens; identical to SEQ ID NO: 39864
  misc_feature (1)...(82): Xaa = X or * as defined in Table 2

SEQ ID NO: 45194 - protein, 105 aa, Homo sapiens
  misc_feature (1)...(105): Xaa = X or * as defined in Table 2
EPENPADNASYSCEPLEDLRLLFRRQPIEAVKLQMVLQMEPQMQSMTKIYRGPLDWPASPCSXDFLGRGAFNVINIGAWASRPVQGSAVDLSHGLHLGLHLKNHL

SEQ ID NO: 45195 - protein, 95 aa, Homo sapiens
AATEPKFPAVRLALQNFDMTYSVQFGDLWPSIRVSLLSEQKYGALVNNFAAWDHVLVDVPCTTDRHSLHEEENNIFKRSRKKERQILPVLQVQLL

SEQ ID NO: 45196 - protein, 96 aa, Homo sapiens
LLPTALGQSPGILLLAMCSLISCPEPLRPVSPNSFSPEAPTPSSSALLPPPPLPESEDQVFPPESLTSDPGLKFPASSGSLLLFLFPPVLLSSTSC

SEQ ID NO: 45197 - protein, 74 aa, Homo sapiens
FIKHSADMEAITNGMMNPDRQRHQHLVALRIYLPPLINIGAWASRPVQGSTVDLIHGLHLGLHLKNIFSFTASI

SEQ ID NO: 45198 - protein, 445 aa, Homo sapiens
  DOMAIN (217)..(234): RNase H domain identified by eMATRIX, accession number PF00075A, p-value=4.400e-13, raw score of 14.44
LEAESVVSLGTWAVTQGVLSLVSLLIQVCSSRHGQLCGTRSPLPLPGPQVQFPTGQQAVPSVDPHWDTESEHGNWCRRHLLTCVLGLRKTRKKPMNYAMMSTITQGKEENPTAFLVRLREALRKHTSLSPDSIEGQLIRQADFGVSGKGKSWANRMPNMACFQCGLQGHFKKDCPSRSKLPPRPCPLCQGNHWKAHCPRGLVKPCNSPCNTPVLGVQKPNGQWRLVQDLRIINEAVLPLYPAIPNPCTLLSQKPQKAEWFTVLDLKDAFFCIPVHPDSQFLFAFEDPLNPMSQLTWTVLPQGFKHSAHLFGQALAQDLSQFSYLDTLVLQYGDDLILATRSETWCHQATQALLNFLATCGYKVSKQNAQLCSQQVKNLGLKLSKGTRALSEERIQPILAYPHPKTLKQLRGFLGITSFCRIWIPRYSEIVRPLYTLRKLRKPIPI

SEQ ID NO: 45199 - protein, 252 aa, Homo sapiens; identical to SEQ ID NO: 42690

SEQ ID NO: 45200 - protein, 131 aa, Homo sapiens; identical to SEQ ID NO: 45191
  misc_feature (1)...(131): Xaa = X or * as defined in Table 2

SEQ ID NO: 45201 - protein, 328 aa, Homo sapiens; identical to SEQ ID NO: 42365
  DOMAIN (124)..(159): Matrix protein (MA) p15. domain identified by eMATRIX, accession number PF01140D, p-value=9.325e-10, raw score of 15.54
  misc_feature (1)...(328): Xaa = X or * as defined in Table 2

SEQ ID NO: 45202 - protein, 180 aa, Homo sapiens; identical to SEQ ID NO: 43186

SEQ ID NO: 45203 - protein, 311 aa, Homo sapiens
MQLSTWAVMWDPFPTTLARALELITQYFNNWNWVYNIIYQDENELSKLKGGTYSYSGKWGQQVNDPPLCFQNPPTETERRETERDREVGVVDGKCSPQGKKAPKIYSGEFGPVRVHVTLSLSDLKQIKIDLGKFSDNPDGYIDVLQGLGQSFDLTWRDIMLLLNQTLTPNERSAAVTAAREFGDLWYLSQVNDRMTTEKRERFPTGQQAVSSVDPRWDTESEHGDGCHRHLLTCMLEGLRKTKKKPMNYSMMSTITQGKEKNPNAFLERLRQALRKHTSLSPDSIEGQLILKDKCITLSAADIRKNFRSPP

SEQ ID NO: 45204 - protein, 27 aa, Homo sapiens
  misc_feature (1)...(27): Xaa = X or * as defined in Table 2
LQAKVFFLLRWPAILRGXNYGPRGVPH

SEQ ID NO: 45205 - protein, 109 aa, Homo sapiens
EEMARSPSPLGKYHSDLACTPGSPPPCRKGFSPFLNLELPLATGQGYSDHPVHTAGPNPGQKAATEPKFPAVRLALQNFDMAYSVQFGDLWPSIRVSLLSEQKYGGTGQ

SEQ ID NO: 45206 - protein, 528 aa, Homo sapiens
  DOMAIN (90)..(105): NOL1/NOP2/sun family proteins domain identified by eMATRIX, accession number BL01153A, p-value=1.865e-13, raw score of 13.77
  misc_feature (1)...(528): Xaa = X or * as defined in Table 2
MAALTLRGVRELLKRVDLATVPRRHRYKKKWAATEPKFPAVRLALQNFDMTYSVQFGDLWPSIRVSLLSEQKYGALVNNFAAWDHPGDIVLDLCAAPGGKTLALLQTGCCLTWSRKRCAALSMFSRPARCLCRARTTAPRAVRRPDQRRATAAATKQQARATPEAPGSAAHSSYCTMIPSACCCLPRQLKPPHAQPARSAAKPGLDQPGSHARLRGRGGEARQSLEAIRGGPSGIAPSDIPLPAKPSRRVIAQTYAARGNLLEVPLTDPDLNLYIDGSSFVEKRLRKAGIKAVKLQIVLQMEPQMQPMTKIYCGPLDQPASPRSNVDDIEGTNASDFPFLSQVLEQVVSPKGSKEAQCCVLRPLGCESNLKQIKIDLGKFSDTPDGYIDVLQGLGQPYYLTWRDIMLLLDQTLTPNERSAAITAVREFGDLWYLSQVNDRKITEEREQFPTGQQAVPSVDPHWDTESEHGDWCHRYLLTDVLEGLRKTRKKPINXSMISTITQGKEENPTAFLERLREALRKHTSLSP

SEQ ID NO: 45207 - protein, 312 aa, Homo sapiens
MFSRPARCLCRARTTAPRAVRRPDQRRATAAATKQQARATPEAPGSAAHSSYCTMIPSACCCLPRQLKPPHAQPARSAAKPGLDQPGSHARLRGRGGEARQSLEAIRGGPSGIAPSDIPLPAKPSRRVIAQTYAARGNLLEVPLTDPDLNLYIDGSSFVEKRLRKAAYAVFSDNGILESNPLTPGTSTQLAELIAVTQALELEGKREPENPADNASYSCEPLEDLRLLFRRQPIEAVKLQMVLQMEPQMQSMTKIYRGPLDWPASPCSNVDDIEGTPPKEISTARPLLCPNSAGSSWSSRRPTSPTALGFSC

SEQ ID NO: 45208 - protein, 1439 aa, Homo sapiens
  DOMAIN (1072)..(1121): PRECURSOR GLYCOPROTEIN SIGNAL CELL domain identified by eMATRIX, accession number PD02576A, p-value=5.826e-23, raw score of 27.60
  misc_feature (1)...(1439): Xaa = X or * as defined in Table 2
MQSMTKMYCGPLDQPASPCSNVDDIEVKLEIMLLTERDDGKEVLDVGEERRYEIEEYDSKWTRKYNCLAVLRVHSGSQITTMKLILWYLVVALWCFFKDGKIAASRSGGFSYGSSSSGDLDRKKPLFSLEFGSPGETEDKSRQRQDAGSPKSEDTPAGGFFNSSSSSGDSDRTKPFFSLGLGAPGKAEDKSGDSQDAGGSKSEDTPPGGFFYGSSSSGDSDKKKPLFSFEFGATGEDEDKSRERWDAGNSRSEDSPADSTNTRYGAGFSSSGASLDVGFGWGISDEKGLEVSKADGRETRGSGSAGGETIVFGPDAVGTGSSGLKLGAGKGDAAFGFEVSDSNSFGDTGISSKTVEGNQTSSSGGSVSIDLGDTSFRSENQFVGGGSLNSISNLWDSGQEGFGINEIGGNGMSGSVSAEAGFKGFGSDSSSSVGMLESLEFGLGGKKVGAGFDFKYSGSRKFGGNELSENGIKVTRESSSSDLGDSSARNGFENSSGISEDSGVILGSSDQHEVELSRTGGNRKRSSDPDEAGNLSPGSDVSDSGGNTWSSDSGSGGGGKSADELGVGASGLNEFGETGLSGSGQDINEHIANSKIPGDCPNAVGKSYEVCEDGIQHCNKIIGTYFEKCGKVAALSNDYKMICIDEYCQTRDKTSTCDTYSELSRLCASDGPGTFESWRSDSDVVCGTQRCPEQHIYKECGPSNPATCSNVAPFQDSECVSGCTCPEGYLLDDIGEKGKCVLKAECPCESSGTVYQPGEVREGPCGSQCTCQDAKWSCTEALCPGRCKVEGSSLTTFDGVKYNFPGNCHFLAVHSVPVDKYVFNSDGTVTNDKIRNQGYYYSDKIQIFNASSSYLQVETYFHVKLQIQIVPVMQLYVSMPPNQFTDTVGLCGSYNNKAEDDFMSSQNILEKTSQAFANSWEMMSCPKGNPSSCISIEKEKFAERHCGILLDSSGPLASCHPIVNPKPYHEECKKYTCTCENSQDCLCTILGNYVKACAEKETYIVGWRTGLCEHSCPSGLVFKYNVKACNSSCRSLSERDRSCDVEDVPVDGCTCPDAMYQNNEGNCVLKSQCDCYINDEVMQPGKLIHIDDNKCTCIKGSWSCTQNECQTICHIYGEGHVRTFDGKSYSFDGLCQYSFLEGKVCGLCGNNNGDLKDDFTTRYSSVASGALEFGNSWKTSQECSDTVAQTFPCDSNPYCKAWAVRKCEILRDSTFRDCHNKVDPSAYHDVCIEEACACDMEGKYLGFCTAVAMYAEACSAVGVCVSWRKPNLCPVYCDYYNAPGECRWHYEPCGTVTAKTCKDQLVGQKFSSLLEVSTTTATTILSTGAAITLVTGGPSTGTTLGPLTEPFTTGITETSVPIISTSGNAGMTGVVSPTVTGASGMADVKHSSTXPPPCSPSSKHNGVXSVVSGPAASASSGNSLSHYGYPLRRRQISDL

SEQ ID NO: 45209 - protein, 54 aa, Homo sapiens
  misc_feature (1)...(54): Xaa = X or * as defined in Table 2
XFPACSSSGVLGQGIIIYPLCENNVYMLSPNASVCLYSPLAEQFSHQFPSHDLP

SEQ ID NO: 45210 - protein, 186 aa, Homo sapiens
EVFPACSQLVYWGKPITIYPLCENNVYMLSPNASVCLYSPLAEQFSHQFPSHDLPSVLAKFSLPVSLSEFRNPLAPAVQETQLIQMVVWMLQRRLLIQLHTYVCLMASPSEEEPRPREDDVPFTARVGGRSLSTPNALSFGSPTSSDDMTLTSPSMDNSSAELLPSGDSPLNQRMTENLLASLSEH

SEQ ID NO: 45211 - protein, 210 aa, Homo sapiens
  misc_feature (1)...(210): Xaa = X or * as defined in Table 2
GLSNQNQQPGRCIPDAHPVQDLVQDLVHTWCRVPCTSYVPCVXVPGAYLVHTRCIPGAGPGAYPVHTWCRTWCIPGAGFPALRPYHALLLLSDEKSLLGELPIDCSPALVRVIKTTSAVKNLQQLAQDADLALLQAMGSAVALVMWAWPRATGPLKYCLRVGAGGACGWRPRLVAVSRALLLVWRCGSPWGPALAWQKSPEYSTKVLEKQ

SEQ ID NO: 45212 - protein, 53 aa, Homo sapiens
MSCSTSNTPLHIISTTPWVGSGPHQLQLPTFFPRDHSTLLIPSSVEQLLYPFL

SEQ ID NO: 45213 - protein, 543 aa, Homo sapiens
  misc_feature (1)...(543): Xaa = X or * as defined in Table 2
MEIPAVILTVAPILHLTSCGFPVTGDGLKQAEGKCAPEEWNPTKFIKLTDNQACFACGLWPLSEIQRRTSRTVTIISRISALREKGNGRKPTSISGSVNEMRQVLVKDQVSMPRVLPTIIFVPDEAGFSAGAVWPCAAPLWGSSWTPLKVENCSFYIRLSFAISVGGDELKIAKLVSAFPERAYDLVGHQHQRPKVDKTTKMGRNQSRKAENSKNQNMSSPPKEHNSSPAREQNWMENEFDELREVGFRRSVITNFSELKEHVLTHHKEAKNLEKRLDEWLTRINSVEKSLNDLMELKTTLRELREAYISFNSQFDQAEERVSVIEDQISEIKQEVKFREKRVKRNEQSLQEIWDYVKRPNLRLIGIPESDEENGTKLENTLQDIIQENFPNIARQANIQIQGKLQRTPTKVASSRTATPRHIISVGSPKLNMKEKILRAAQRERSGLPTKGKPFRLTAADLSAETSTSQKTEWGPIFNILKEKNFQPRISYPAKLSFISEGEIKYFTDQAKCLRDFVTTRAFSCLPXKSTRPALKELLKGST

SEQ ID NO: 45214 - protein, 476 aa, Homo sapiens
  DOMAIN (99)..(146): kw TRANSCRIPTASE REVERSE II ORF2 domain identified by eMATRIX, accession number DM01354V, p-value=1.000e-40, raw score of 12.97
  misc_feature (1)...(476): Xaa = X or * as defined in Table 2
MVLAAGDPVEKGITWARENAGIYISCTMMKLSMIPIGDQSYRNLIPLKFVACILIEGNAKCWPLPEFDPSQIRLIVYQDCERRGRNVLFDSSVKRRNEDISVSRIKYLGIQLTRDVKDLFKENYKPLLNEIKEDTNKWKNIPCSWIERINIVKIAILPKKLGSDAQVKVFGKCCQLKPGGDSSSSLDSSVTSSSDIKDQCLKYQRTVDLSAQLSSSGKGQTTSSSGSLTPMTPHWEIPPSGGQQTSHTGELRLASGRGSSGMKLPEEGTDRNLCCSAASSGDTQANRDWSGPPANTSRPAAEGPDCDRENGTKLENTLKDIIHENFPNIARQANIKIQEIQRTQQRYCSRRATPRHIIVRFTKVEMKEKMLRAAGEKHWVIHKGKSIRLTVDLSAETLQARREWGPIFNVLKEKNFQLRISYPAKLSFISEGEMKSFPEKQMLRDFVTIRLALQELLKEALNMARENRXQPLQKHM

SEQ ID NO: 45215 - protein, 164 aa, Homo sapiens
  DOMAIN (105)..(145): kw TRANSCRIPTASE REVERSE II ORF2 domain identified by eMATRIX, accession number DM01354Y, p-value=3.382e-21, raw score of 10.69
  misc_feature (1)...(164): Xaa = X or * as defined in Table 2
ESKLTRGVKDLFRENYKPLLNEIKRGHKQMEEHSMLMGRKNQYREKWPYLPKVNLXIQCHPHQATNDCFHRIGKKLLXSSYGTKKEPALPSQSXDKRTKLEASHYLTSNYTTRLQXPKQHRYWYQNRDIDQWNRTEASEIMPHIYTILILWTNLRKTSMGERHP

SEQ ID NO: 45216 - protein, 290 aa, Homo sapiens
ILYEERNVLGSDAPSWPNGSTWGALWTAGVRCLALRHDYLSSRERRFPKSAVVGDPTAPQACGLRGQQLASSGEGGDREVGKGDPAKRSAKCAGAPALPLHPHLPGAGYGGAVPPVQLLTGWCVTAKAPPDISAISALTAVKHGNCSSLTPLLNPPGSDVIVCAEMDEQWGYVGAKSRQRWLFYAYDSLRKTVVAHVFGERTMATLGRLMSLLSPFDVVIWMTDGWPLYESRLKGKLHVISKRYTQRIERHNLNLRQHLARLGRKSLSFSKSVELHDKVIGHYLNIKHYQ

SEQ ID NO: 45217 - protein, 20 aa, Homo sapiens
FLGIIREEAHGGICQEWSRE

SEQ ID NO: 45218 - protein, 222 aa, Homo sapiens
MAARAGAYGEWTEKWSDIRSRACTQGQPVLGTRETTGENRDPAVHDLSQLLTGWCVTAKAPPDISAISALTAVKHGNCSSLTPLLNPPGSDVIVCAEMDEQWGYVGAKSRQRWLFYAYDSLRKTVVAHVFGERTMATLGRLMSLLSPFDVVIWMTDGWPLYESRLKGKLHVISKRYTQRIERHNLNLRQHLARLGRKSLSFSKSVELHDKVIGHYLNIKHYQ

SEQ ID NO: 45219 - protein, 269 aa, Homo sapiens
MKVDNHFIQKDDAILINIERRPRAHKGSFKGQGFQCPGSKRFGSPRLVKPNDGVPTAGSSFMQLAAQMSVSLERKLEAQGVNNQRRIGGWRWLNTTDHNHGRFQPVVAGRPNAEIPKEKNVVNRIYKEKVWRKRPGSDVIVCAEMDEQWGYVGAKSRQRWLFYAYDSLRKTVVAHVFGERTMATLGRLMSLLSPFDVVIWMTDGWPLYESRLKGKLHVISKRYTQRIERHNLNLRQHLARLGRKSLSFSKSVELHDKVIGHYLNIKHYQ

SEQ ID NO: 45220 - protein, 60 aa, Homo sapiens
  misc_feature (1)...(60): Xaa = X or * as defined in Table 2
MAAIYLVDVDQTAVYTQYFDISYIPSTVFFFNGQHMKVDYGGEDPALRSIKAVRRTSPAX

SEQ ID NO: 45221 - protein, 201 aa, Homo sapiens
  misc_feature (1)...(201): Xaa = X or * as defined in Table 2
QQAHKTPQRRHSAFTEYVRNNRLPETVIRVKQPALAIFSPDIAPLFVHFRADDDVTARVIHAIIMIFWCDRVEKRVSDAVACFTLESEIAEVGVLCRTHIRQXRQVTPARMXALSRILHACRSEDVRHNRPPYPVIRVKQPARRDLAPTXPHCSSISAQTITSLPGCMREVTELRPEFFKXRKTVLRPTPIMRARAERRCK

SEQ ID NO: 45222 - protein, 584 aa, Homo sapiens
MGVNDAVLEMHGLGNDFMVVDAGFDQLLVVEPPYDLELDFHYRMFNADGSEVAQCGNGARCFARFVRLKGLTNKRDIRVSTANGRMVLTVTDDDLVRVNMGEPNFEPSAVPFRANKAEKTYIMRAAEQTILCGVVSMGNPHCVIQVDDVDTAAVETLGPVLESHERFPERANIGFMQVVKREHIRLRVYERGAGETQACGSGACAAVAVGIQQGLLAEEVRVELPGGRLDIAWKGEELQETLTELDDRAVVDYLIKNPEFFIRNARAVEAIRVPHPVRGTVSLVEWHMARARNHIHVLEENMALLMEQAIANEGLFYRLLYLQRSLTAASSLDDMLMRFHRWARDLGLAVAMPVTINKGNQIIENQLDTETITISYEFILCQHLIANTEFSYLALPENYNRLCLPNSKNQTNNRFKTLNSKAIGRLLAAGGVYNGNIEGFRDTAEKLAVPPVQLLTGWCVTAKALPDISAISALTAVKHGNCSSLTPLLNPPGSDVIVCAEMDEQWGYVGAKSRQRWLFYAYDSLRKTVVAHVFGERTMATLGRLMSLLSPFDVVIWMTDGWPLYESRLKGKLARNQQAIYAAN

SEQ ID NO: 45223 - protein, 249 aa, Homo sapiens
MIIIDPRYTDTGAGREDEWIPIRPGTDAALVNGLAYVMITENLVDQAFLDKYCVGYDEKTLPASAPKNGHYKAYILATDGWCVPPKAPPDISAISALTAVKHGNCSSLTPLLNPPGSDVIVCAEMDEQWGYVGAKSRQRWLFYAYDSLRKTVVAHVFGERTMATLGRLMSLLSPFDVVIWMTDGWPLYESRLKGKLHVISKRYTQRIERHNLNLRQHLARLGRKSLSFSKSVELHDKVIGHYLNIKHYQ

SEQ ID NO: 45224 - protein, 821 aa, Homo sapiens
  DOMAIN (554)..(564): Orn/DAP/Arg decarboxylases family 2 pyridoxal-P attachment si domain identified by eMATRIX, accession number BL00878E, p-value= 8.759e-10, raw score of 12.59
MISVTLSQLTDILNGELQGADITLDAVTTDTRKLTPGCLFVALKGERFDAHDFADQAKAGGAGALLVSRPLDIDLPQLIVKDTRLAFGELAAWVRQQVPARVVALTGSSGKTSVKEMTAAILSQCGNTLYTAGNLNNDIGVPMTLLRLTPEYDYAVIELGANHQGEIAWTVTHPPRFVTKQWLCFLPDGLLLFAEARFVIWQMQPAVMAVDVAAFAHLFNQQQYQRFTGRPPDSSKLPWKITCNGECVTFHWWLLGVAVRISRLLPVRVMTALEGNYNGTEGISALPFNGIILAHSNESEWVTFRNNKNNEAFLDRVYIVKVPYCLRISEEIKIYEKLLNHIFECWQHFLNNPESLQCYIWAANADFREARQVIFKTFFTVGVEEELGIRQTRTNDFLVTGDNLLRIFRFDVGNEDKVRQQFAVVRIHREVFLVTFHGVNQRFSRHREEFLFEFCVSVTANLTRCFFGIGFNLRLTFFVIGDDFPTLTQNFRILIGVIDGEFRLAHKAVAANHAIGLNAQNGCRNDFVAHAAGSRALAADGRSLEHAPTVETVVAGPLCESGDVFTQQEGGNVETRALPEVKAAVPPVQLLTGWCVTAKALPDISAISALTAVKHGNCSSLTPLLNPPGSDVIVCAEMDEQWGYVGAKSRQRWLFYAYDRLRKTVVAHRLRIHSRLPIVIPARITEALVECFARSTLQILLVNHINHAHEVDETFRQAMAKLRRVGVTLLNQSVLLRDVNDNAQTLANLSNALFDAGVMPYYLHVLDKVQGAAHFMVSDDEARQIMRELLTLVSGYLVPKLAREIGGEPSKTPLDLQLRQQ

SEQ ID NO: 45225 - protein, 111 aa, Homo sapiens
  misc_feature (1)...(111): Xaa = X or * as defined in Table 2
LNLVLFQQRAELMISXPQXFSRALLVIFPLLQTELQQLFFLLHVNPAAVEAPPSVPIGLYSENVRNNRLPETVIRVKQPALARFSPDIAPLFVHFRADDDVTARRVEKRCK

SEQ ID NO: 45226 - protein, 597 aa, Homo sapiens
  DOMAIN (63)..(103): AMINOTRANSFERASE PROTEIN AMIDOTRA domain identified by eMATRIX, accession number PD00718D, p-value=4.857e-21, raw score of 29.33
MRRNACQYRTPAVVASRQKRWHGDLGMIGSRDVMLFISDSVGAKELDLIIPRLEDKSIALLAMTGKPTSPLGLAAKAVLDISVEREACPMHLAPTSSTVNTLMMGDALAMAVMQARGFNEEDFARSHPAGALGARLLNKVHHLMRRDDAIPQVALTASVMDAMLELSRTGLGLVAVCDAQQQVQGVFTDGDLRRWLVGGGALTTPVNEAMTVGGTTLQSQSRAIDAKEILMKRKITAAPVVDENGKLTGAIKLQDFYQGRGLFNPSIPRVSTADAGLANRARRNWVGSSWKQVGQIILQGGPQNAEKSGQRYTVSHDRHRDAERQRVKSGLPRYAECSTYPSCPVALDLAFASHGIHMHAPGEALRMLVTAMDKAADARTKLARLLATKGITHEIQIPDISTKEKAQQPIGLNMEQIKPEKQDFIKPVIPQAGKHNGVNMSVLRSLLTAGVLASGLLWSLNGITATPAAQASDDRYEVTQQRNPDAACLDCHKPDTEAVPPVQLLTGWCVTAKAPPDISAISALTAVKHGNCSSLTPLLNPPGSDVIVCAELDEQWGYVGAKSRQRWLFYAYAQSPRTTRCCARIRLHALWRRWGVL

SEQ ID NO: 45227 - protein, 327 aa, Homo sapiens
  misc_feature (1)...(327): Xaa = X or * as defined in Table 2
LNRRDSYVEYLADKVADREEDAEEYLEAIMEARVTVAGMGLVMEVQDYFDGEADRLAKAWLAEYTPQIKSLKDERKEAYRQIVEMSTEPQDVDLVRPANKFEMTRVREGEKEADLPVWKHHLSVXRKRELSGSVEPLGNQVFEIETKRENSXELXXKSLKDERKEAYRQIVEMSTEPQDVDLVRPANKFEMTRVREGEKEADLPVWKHHLLCDESGNYPALLNHWETRFLRSKPNVKIHRSSDKSPTYFVFFISQYDLPAFYPINGHFLVERVVKVRIVFIEEFADHHHLAIFQFNNRLQRHAFVVTLANVTNQPFSVVVVVNLFNT

SEQ ID NO: 45228 - protein, 1032 aa, Homo sapiens
  DOMAIN (801)..(848): Intermediate filaments proteins domain identified by eMATRIX, accession number BL00226D, p-value=2.900e-09, raw score of 19.10
MKQGFQNVEYKQLVEVLETVYNKAQKILKVKGELRAAKEMKDEAGERDREVSSLNSKLLSLQLDIKNLHDVCKRQRKTLQDNQLCMEEAMNSSHDKKQAQALAFEESEVEFGSSKQCHLRQLQQLKKKLLVLQQELEFHTEELQTSYYSLRQYQSILEKQTSDLVLLHHHCKLKEDEVILYEEEMGNHNENTGEKLHLAQEQLALAGDKIASLERSLNLYRDKYQSSLSNIELLECQVKMLQGELGGIMGQEPENKGDHSKVRIYTSPCMIQEHQETQKRLSEVWQKVSQQDDLIQELRNKLACSNALVLEREKALIKLQADFASCTATHRYPPSSSEECEDIKKILKHLQEQKDSQCLHVEEYQNLVKDLRVELEAVSEQKRNIMKDMMKLELDLHGLREETSAHIERKDKDITILQCRLQELQLEFTETQKLTLKKDKFLQEKDEMLQELEKKLTQVQNSLLKKEKELEKQQCMATELEMTVKEAKQDKSKEAECKALQAEVQKLKNSLEEAKQQERLAAQQAAQCKEEAALAGCHLEDTQRKLQKGLLLDKQKADTIQELQRELQMLQKESSMAEKEQTSNRKRVEELSLELSEALRKLENSDKEKRQLQKTVAEQDMKMNDMLDRIKHQHREQGSIKCKLEEDLQEATKLLEDKREQLKKSKEHEKLMEGELEALRQEFKKKDKTIALQKESLMSLQAQLDKALQKEKHYLQTTITKEAYDALSRKSAACQDDLTQALEKRTGRDWNPPPFRTQQRGSKSLTAIRPLCLFRKLNHVTSETKSLQQSLTQTQEKKAQLEEEIIAYEERMKKLNTELRKLRGFHQESELEVHAFDKKLEEMSCQVLQWQKQHQNDLKMLAAKEEQLREFQEEMAALKENLLEDDKEPCCLPQWSVPKDTCRLYRGNDQIMTNLEQWAKQQKVANEKLGNQLREQVKYIAKLSGEKDHLHSVMVHLQQENKKLKKEIEEKKMKAENTRLCTKALGPSRTESTQREKVCGTLGWKGLPQDMGQRMDLTKYIGMPHCPGSSYC

SEQ ID NO: 45229 - protein, 124 aa, Homo sapiens
DKLLLSMQQITQLIEVMLVGRGGDQAVGQATLGIDTNVGLHAKVPLIAFLGLMHLRIALLLFVLGRAGCLNDGGIDQGALSHHDACFGQPAIDGLEQLAGQLMLLQQVAEIHDGGAVRQGAIQG

SEQ ID NO: 45230 - protein, 315 aa, Homo sapiens
MDEAENHNSQQTNTRTENQTPHVLTHKWELNYENPWTQGGEHLTMGLVVGWRGLQEGDPARTNLSYYQANVGSGQHRENKGPINLGNVGKSNGERGGKSLYRCKIFLESSVTMKDRELPPVYDGVFEVLQWLLFLSAVPPVQLLTGWCVTAKAPPDISAISALTAVKHGNCSSLTPLLNPPGSDVIVCAEMDEQWGYVGAKSRQRWLFYAYDSLRKTVVAHVFGERTMATLGRLMSLLSPFDVVIWMTDGWPLYESRLKGKLHVISKRYTQRIERHNLNLRQHLARLGRKSLSFSKSVELHDKVIGHYLNIKHYQ

SEQ ID NO: 45231 - protein, 171 aa, Homo sapiens
KGVRRRGPVRSDSEDSHLGYFKMSFLLPKLTSKKEVDQAIKSTAEKVLVLTFGRDEDPVCLQLDDILSKTSSDLSKMAAIYLVDVDQTAVYTQYFDISYIPSTVFFFNGQHMKVDYGSPDHTKFVGSFKTKQDFIDLIEVIYRGAMRGKLIVQSPIDPKNIPKYDLLYQDI

SEQ ID NO: 45232 - protein, 546 aa, Homo sapiens
MLANIGFYNSNVIHRSKGAIGEGPPDPRGIVEQNLGGDISIPCYNGPRPRRSAQKTTLGPLNQPRIPSAQCAGAFPRVAAAGAGGGGGGGSGGSGFCLGWRLRRRRQRRRRWRRGEGEGDGDAGHMRPRPAGRAEARRRRRLRGNPPPGARLPNREGNGSGVSWAAEVSGDGRGARTEAARTRRRPGGADNYPGAVPPVQLLTGWCVTAKAPPDISAISALTAVKHGNCSSLTPLLNPPGSDVIVCAEMDEQWGYVGAKSRQRWLFYAYDSLRKTVVAHVFGERTMATLGRLMSLLSPFDVVIWMTDGWPLYESRLKGKLHVISKRYTQRIERHNLNLRQHLARLGRKSLSFSKSVELHDKEELAALFSELKQEQKKVDELIAKLVKNRTRIVNESDVFSWVIRREFQELRHPVDEEKARCLEGIGGHTRGLVASLDMQLEQAQGTRERLAQAELCWNSSEMRTTMSSSGSSTPWPPVSRRRPWTERRLGSVRGDRLRERSRPAVNRTPRMSRVPSGAPRGTPSRRWWMMKCWDHQMRGLVEEEVG

SEQ ID NO: 45233 - protein, 504 aa, Homo sapiens
  DOMAIN (388)..(432): XPA protein domain identified by eMATRIX, accession number BL00752B, p-value=6.938e-09, raw score of 19.17
  misc_feature (1)...(504): Xaa = X or * as defined in Table 2
MIIALQKESLMSLQAQLDKALQKEKHYLQTTITKEAYDALSRKSAACQDDLTQALEKRTGRDWNPPPFRTQQRGSKSLTAIRPLCLFRKLNHVTSETKSLQQSLTQTQEKKAQLEEEIIAYEERMKKLNTELRKLRGFHQESELEVILYEEEMGNHNENTGEKLHLAQEQLALAGDKITSLERSLNLYRDKYQSSLSNIELLECQVKMLQGELGGIMGQLSKTSSDLSKMRCYTTWXMWTKLQFIHSILTSVIFHLLSFSSMGSIXKWIMALSGSSFLLDAHYISQFGPRQLPSVCAEPEKEKATDGVVRNGKSTAGHQRYLCSHCRKTWQLQFTYTASQPAGQXRHRLRGMDEQWGYVGAKSRQRWLFYAYDSLRKTVVAHHREQGSIKCKLEEDLQEATKLLEDKREQLKKSKEHEKLMEGELEALRQEFKKKDKTLKENSRKLEEENENLRAELQCCSTQLESSLNKYNTSQQVIQDLNKSPMEIRFQLYIFTPDQYDKCI

SEQ ID NO: 45234 - protein, 79 aa, Homo sapiens
  misc_feature (1)...(79): Xaa = X or * as defined in Table 2
INVSVWSQPFPGGXQPEKGLKEHPADARPGSCPPAGRPVQGRAEVASAAPPRGSSPAAAPGQSHPPSCLRAPLYWSFSR

SEQ ID NO: 45235 - protein, 92 aa, Homo sapiens
  misc_feature (1)...(92): Xaa = X or * as defined in Table 2
TCSTRRRKNDLSVKYVSVWSQPFPGGXQPEKGLKEHPADARPGSCPPAGRPVQGRAEVASAAPPRGSSPAAAPGQSHPPSCLRAPLYWSFSS

SEQ ID NO: 45236 - protein, 61 aa, Homo sapiens
LRGMVTFSPFSSILNGQFEPNSGCPLCPVCWVCLREPGDPEKLGEFLQKDNISVHYFCLVS

SEQ ID NO: 45237 - protein, 79 aa, Homo sapiens
NTCRCGHNRSPEVNSRRGGLRSIPRMPDAGSCSPPAGRPSAGPGRRSPPPLLPRGSSPAAAPGQSHPPSSSQGAAVLEL

SEQ ID NO: 45238 - protein, 454 aa, Homo sapiens
  DOMAIN (66)..(81): PHD-finger domain identified by eMATRIX, accession number PF00628, p-value=6.806e-09, raw score of 15.84
  misc_feature (1)...(454): Xaa = X or * as defined in Table 2
GNFFRKTISACIISVLSYLVSCLRGASPTEASMDFCLKTSKREAARASRKICFVCKKKGAAINCQKDQCLRNFHLPCGQERGLPFTIFWRVQIILXQTSPEHRTSNMGHVGEESCILCCEDLSPTECLRTFQSPCCSQAIYHRKCIQTNMPTHQSKHFFKCPQCNNRKEFPQEMRENGNSYSRQRCCLGTRARGFLRLISALSALXCPHLVCMNKAETALRMKGGGASFCVLHADPTEPTGTAPLLDLTVRNGSVRSVHLPAATDYIPENSGDIPCCSSTFHPEEHFCRDNTLEENPGLSWTDWPEPSLLEKPESSRGRRSVLLEVQGCQNHXQLQKIQVTPSEXLLVPHNRVXTCAPPSGLGREHSGTVRQGSRASSETMSLSKEKSQWSMRREQSRCQQGNAFMATRVPLLSPPLLPPRILPPXSCFHMPLLTSPMFVVMQIKVFSPKKKKK

SEQ ID NO: 45239 - protein, 113 aa, Homo sapiens
VAVRWGGAGQGWVGEGGGGARGAAATQPAQEPHRSLGPQQHPGCSKGFAATASGLPSPTWKTPSPRPLHLGRPTRPGRQGQRVRRAARGGLFRGVLSPSSRCGGGSSSSRSGR

SEQ ID NO: 45240 - protein, 41 aa, Homo sapiens
SSQQLHEESITIVHMGKLRHREIKLPAEDHAAPEGRTKIQT

SEQ ID NO: 45241 - protein, 56 aa, Homo sapiens
  misc_feature (1)...(56): Xaa = X or * as defined in Table 2
TARELPGRVLKEMYIQQKXEGAALGRPTRPGRQGQRVRRAECRRLFRGVLRPCNRC

SEQ ID NO: 45242 - protein, 316 aa, Homo sapiens
MDFVPRPSGLDLGSAFRSCMIFSRPCLPNQMLDAAAPPLSLKGQLISTGSATYSDMTRAGENNIAQGYASLSWHPPLTPNNTYLFTEVSTLQHNHEKWSHRLAEQVASWTTDGRTKKGSEKLANGTQSKESHSGFLNKKTQLVQNRMKVRTKSDQFLRGSLRGAYRALTVRRPECYRRSPAARTPASGTSRSHSHWFQGAGSACVQRKCSPGAVRQASALRTSIIPPHTVTHNAAVLRKGSSSTVGGSINATREGGGSWQCGKERIPAVAQTTCQKDHGQPDWYFSGQSEDLAFYKGGAEDVVMAFSRSETEDRRQ

SEQ ID NO: 45243 - protein, 92 aa, Homo sapiens
  misc_feature (1)...(92): Xaa = X or * as defined in Table 2
QSCGQRLPTVLRPLRTPWILPMYPQPLPAGGPTPCLRSRPYINITILKGDKGDPGPMGLPGYMGREGPQGEPGPXGSKGDKGEMGRPRRPVP

SEQ ID NO: 45244 - protein, 102 aa, Homo sapiens
  misc_feature (1)...(102): Xaa = X or * as defined in Table 2
DRKQTSPGDAYHTIPGSLSSSSDHVLSEPDXGEGSHLXXSVQHDDVPPTAXXRLQYRAVVLFPTATLPAILIMXGMRCPLVPRNCSRTWTAQIRAYIEVQQT

SEQ ID NO: 45245 - protein, 357 aa, Homo sapiens
  DOMAIN (306)..(326): NEUTROPHIL CYTOSOL FACTOR 1 SIGNATURE domain identified by eMATRIX, accession number PR00498E, p-value=9.446e-14, raw score of 13.75
  misc_feature (1)...(357): Xaa = X or * as defined in Table 2
MPHVCAQRRLPVAAVLPPDGAQNCILLAGLSAGTFCHHGGVHILLSNPVATSLLVAIDRVGQIPIPPPPPPALPYDCCCPPPSRHTEDREHVPIPLHWKLMVNRWFLPVPTEWIATLSNSSRSSRTCSMQGLSFLDSQVHLKAMIEDLRGNVSKESSPCLADNADVGQFPMEGGQKDPKQRIIPFCQGVTNLSGPHGPGAVCGGSHYQKQESSEISLSVGQVWTSSRRMSQVGGSSHCRGARLGPCNVPRRPDGVQDEFSLQPEEDAGXQTSVDPMVLEQYVVVANYQKQESSEISLSVGQVVDIIEKNESGWWFVSTAEEQGWVPATCLEGQMGCRMSFLCSLKKMLDWIQRRVSL

SEQ ID NO: 45246 - protein, 115 aa, Homo sapiens; identical to SEQ ID NO: 34208
  DOMAIN (25)..(72): kw TRANSCRIPTASE REVERSE II ORF2 domain identified by eMATRIX, accession number DM01354V, p-value=1.000e-40, raw score of 12.97

SEQ ID NO: 45247 - protein, 86 aa, Homo sapiens; identical to SEQ ID NO: 38987
  misc_feature (1)...(86): Xaa = X or * as defined in Table 2

SEQ ID NO: 45248 - protein, 1284 aa, Homo sapiens; identical to SEQ ID NO: 36412
  DOMAIN (422)..(467): kw TRANSCRIPTASE REVERSE II ORF2 domain identified by eMATRIX, accession number DM01354N, p-value=1.000e-40, raw score of 13.17
  misc_feature (1)...(1284): Xaa = X or * as defined in Table 2

SEQ ID NO: 45249 - protein, 745 aa, Homo sapiens; identical to SEQ ID NO: 34211
  DOMAIN (220)..(265): kw TRANSCRIPTASE REVERSE II ORF2 domain identified by eMATRIX, accession number DM01354N, p-value=1.000e-40, raw score of 13.17

SEQ ID NO: 45250 - protein, 816 aa, Homo sapiens; identical to SEQ ID NO: 44881
  DOMAIN (37)..(83): kw TRANSCRIPTASE REVERSE II ORF2 domain identified by eMATRIX, accession number DM01354O, p-value=1.000e-40, raw score of 8.73

SEQ ID NO: 45251 - protein, 607 aa, Homo sapiens; identical to SEQ ID NO: 39469
  DOMAIN (143)..(188): kw TRANSCRIPTASE REVERSE II ORF2 domain identified by eMATRIX, accession number DM01354N, p-value=1.000e-40, raw score of 13.17

SEQ ID NO: 45252 - protein, 416 aa, Homo sapiens; identical to SEQ ID NO: 35763
  DOMAIN (141)..(188): kw TRANSCRIPTASE REVERSE II ORF2 domain identified by eMATRIX, accession number DM01354V, p-value=1.000e-40, raw score of 12.97

SEQ ID NO: 45253 - protein, 705 aa, Homo sapiens; identical to SEQ ID NO: 44873
  DOMAIN (127)..(170): kw TRANSCRIPTASE REVERSE II ORF2 domain identified by eMATRIX, accession number DM01354T, p-value=1.000e-40, raw score of 9.48

SEQ ID NO: 45254 - protein, 379 aa, Homo sapiens
  DOMAIN (57)..(100): kw TRANSCRIPTASE REVERSE II ORF2 domain identified by eMATRIX, accession number DM01354T, p-value=1.000e-40, raw score of 9.48
MIISIDAEKAFDKIQQPFMPKTLNKLGIDGMYLKIIRAIYDKPTANIILNGQKLEAFPLKTGTRQGCPLSPLLFNIMLEVLARAIRQEKEIKGIQLGKEEVKLSMFADDMIVYLENPIVSAQNLLKLISNFSKVSGYKNSVQKSQAFLYTNNRQTESQIMSELPSTIASKRIKYPGIQLTRDMKDLFKENYKPLLNEIKEDTNKGKNIPCSWVGRINIVKMAILPKVHGYMSWFVTQVNYMSLGFGVQIVSPLRTNNKNHMIMSIDAEKAFDKIQQPFMLKPLKPENKIPRNPTYKGCEGPFKENYEPLLNDIKEDTNKWKNIPCSWVGRINIMKMAILPKLHSTAVYVDASRLIRPPSYTCAFGLLPIVCTYSQRCEK

SEQ ID NO: 45255 - protein, 412 aa, Homo sapiens
  DOMAIN (10)..(65): kw TRANSCRIPTASE REVERSE II ORF2 domain identified by eMATRIX, accession number DM01354Q, p-value=1.000e-40, raw score of 9.23
MNIDAKILNKILANRIQQHIKKLIHHDQVGFIPGMQGWFNICKSINVIQHINRAKDKNHMIISIDAEKAFDKIQQPFMLKTLNKLGIDGMYFKIIRAIYDKPTANIILNGQKLEAFPLKTGTRQGCPLSPLLFSIVLEVLARAIRQEKEIKGIQLGKKEVKLSLFADDMIVYLENPIVSAQNLLKLISNFSKVSGYKINVQKSQAFLYTNNRQTESQIMSELPFTIASKRLKYLGIQLTRDVKDLFKENYKPLLKEIKEDTNKWKNIPCSWVGRINIMKMAILPKVIYRFNAIPIKLPMPFFTELEKTTLKFIWNEKRARIAKSIPSQKNKAGGITLPDFKLYYKATVTKTAWYWYQNRDIDQWNRTEPSEITPHIYNYLIFDKPEKNKQIQKAFILHKEPWVMWNMGTNVR

SEQ ID NO: 45256 - protein, 747 aa, Homo sapiens; identical to SEQ ID NO: 35787
  DOMAIN (322)..(368): kw TRANSCRIPTASE REVERSE II ORF2 domain identified by eMATRIX, accession number DM01354O, p-value=1.000e-40, raw score of 8.73

SEQ ID NO: 45257 - protein, 934 aa, Homo sapiens
  DOMAIN (585)..(640): kw TRANSCRIPTASE REVERSE II ORF2 domain identified by eMATRIX, accession number DM01354Q, p-value=1.000e-40, raw score of 9.23
MYGTGYRDVAGKWAIDPDSKREFLDVTQEGIQGCDFSGTCRQTLSILTQPLRQWGLEGIKKPNSWIISEESVSNGGPPLLIPRQTASGVDLQQTPTDLQLRVLTVRRKTNKQKGIASTSTKRTSTPKPHLYVTIIKDQSYIKPQRWGKNIAEKLKILKIRVALSLQRNAAPHQQWNKAGRRMSLMSSQKKASEVIESQMNEIKGEEKFREKRVKRNEQSLQEIWDYVKRPDLRLIGVPDSDGENGTRLENTLQDIIRENFPNLARQASIQIQEIQRTPQRYSSRRATPRHIIVRFTKVEMKEKMLRAAREKELKIKKLTQNCLTTWKLNNLLLNDYWVHNEMKGEIKMFFETNENIDTTYQNLWHTFKAVCRGKFIALNAHKRKQERSKIDTLASQLKEIEKQEQTHSKASRRQEITKIRVELKEIETQKSLQKINESRSWFFEKINKIDRPLPRLIKKKREKNQIDTIKNDKGDITTNPTEIQTISREYYKHLYANKLENLEEMDKFLDTYTLSGLNKEEVESLNTSITGSEVEAIINSIPTKKSPGPDGFTAEFYQSYSRDTTKKENFRPISLMNIDVKILNKMLANGIQQHIKKLIHHDQVGFIPGMQGWFNIHKSINVIQHINRTKDKNHMIISIDAEKAFDKIQQPFMLKTLNKLDIDGTYLKIIRAIYDKPTANIILNGQKLEAFPLKSSTRQGCPLSPHLFNIVLEVLARAIRQEKEIKGIQLGKEEVKLSLFADDMIVYLENPIISAQNLLKLISNFSKVSGYKINVQKSQAFLYTSNRQTESQIMSELPFTIASKRIKYLEIQLTRDVKDLFKENYKPLLNEIKEDTNKWKNIPCSWIGRINIVKMAILPKDDKKCVSDDHDADNDSDNDGDNFLQVSAAKSYISHYFPVIRLLTAYWRRLSNSLEKAKGHDVEGPCGKELVVGL

SEQ ID NO: 45258 - protein, 913 aa, Homo sapiens; identical to SEQ ID NO: 32545
  DOMAIN (188)..(234): kw TRANSCRIPTASE REVERSE II ORF2 domain identified by eMATRIX, accession number DM01354O, p-value=1.000e-40, raw score of 8.73

SEQ ID NO: 45259 - protein, 826 aa, Homo sapiens; identical to SEQ ID NO: 34822
  DOMAIN (465)..(511): kw TRANSCRIPTASE REVERSE II ORF2 domain identified by eMATRIX, accession number DM01354O, p-value=1.000e-40, raw score of 8.73

SEQ ID NO: 45260 - protein, 45 aa, Homo sapiens
CPSVNAMRLTTTRPTHALGKKKWRRTRFQGRINSLSGRIGNTVGL

SEQ ID NO: 45261 - protein, 1085 aa, Homo sapiens
  DOMAIN (154)..(195): kw TRANSCRIPTASE REVERSE II ORF2 domain identified by eMATRIX, accession number DM01354I, p-value=1.000e-40, raw score of 15.55
MVKGSIQQEELTILNIYAPNTGAPRFIKQVLSDLQRDLDSHTLIMGDFNTPLSTLDRSTRQKVNKDTQELNSALHQADLIDIYRTLHPKSTEYTFFSAPHHTYSKIDHIVGSKALLSKCKRTEIITNYLSDHSAIKLELRIKNLTQSRSTTWKLNNLLLNDYWVHNEMKAEIKMFFETNENKDTTYQNLWDAFKAVCRGKFIALNAYQRKQERSKIDTLTSQLKELEKQEQTHSKASRRQEITKIRAELKEIETQKTLQKINESRSWFFERINKIDRPLARLIKKKREKNQIDTIKNDKGDITTDPTEIQTTIREYYKHLYANKLENLEEMDTFLDTYTLPRLNQEEVESLNRPITGSEIVAIINSLPTKKSPGPDGFTAEFYQRYKEELVPFLLKLFQSIEKEGILPNSFYETSIILIPKPGRDTTKKENFRPISLMNIDAKILNKILANRIQQHIKKLIHHDQVGFIPGMQGWFNIRKSINVIQHINRAKDKNHMIISIDAEKAFDKIQQPFMLKTLNKLGIDGTYFKIIRAIYDKPTANIILNGQKLEAFPLKTGTRQGCPLSPLLFNIVLEVLARAIRQEKEIKGIQLGKEEVKLSLFADDMIVYLENPIVSAQNLLKLISNFSKVSGYKINVQKSQAFLYTNNRQTESQIMSELPFTIASKRIKYLGIQLTRDVKDLFKENYKPLLKEIKEETNKWKNIPCSWVGRINIVKMAILPKVIYRFNAIPIKLPMTFFTELEKTTLKFIWNQKRARIAKSILSQKNKAGGITLPDFKLYYKATVTKTAWYWYQNRDIDQWNRTEPSEIMPHIYNYLIFDKPEKNKQWGKDSLFNKWCWENWLAICRKLKLDPFLTPYTKINSRWIKDLNVKPKTIKTLEENLGITIQDIGVGKDFMSKTPKAMATKDKIDKWDLIKLKSFCTAKETTIRVNRQPTTWEKIFATYSSDKGLISRIYNELKQIYKKKTNNPIKKWAKDMNRHFSKEDIYAAKKHMKKCSSSLAIREMQIKTTMRYHLTPVRMAIIKKSGNNRPEKTKSFLPPLPTQSSIHSGFLEHCVEQDSEALSGEAGKSLMFAMGVGSERAKH

SEQ ID NO: 45262 - protein, 1270 aa, Homo sapiens; identical to SEQ ID NO: 44884
  DOMAIN (154)..(195): kw TRANSCRIPTASE REVERSE II ORF2 domain identified by eMATRIX, accession number DM01354I, p-value=1.000e-40, raw score of 15.55

SEQ ID NO: 45263 - protein, 1043 aa, Homo sapiens; identical to SEQ ID NO: 45120
  DOMAIN (272)..(317): kw TRANSCRIPTASE REVERSE II ORF2 domain identified by eMATRIX, accession number DM01354N, p-value=1.000e-40, raw score of 13.17
  misc_feature (1)...(1043): Xaa = X or * as defined in Table 2

SEQ ID NO: 45264 - protein, 1108 aa, Homo sapiens; identical to SEQ ID NO: 40447
  DOMAIN (272)..(317): kw TRANSCRIPTASE REVERSE II ORF2 domain identified by eMATRIX, accession number DM01354N, p-value=1.000e-40, raw score of 13.17

SEQ ID NO: 45265 - protein, 578 aa, Homo sapiens
  DOMAIN (149)..(194): kw TRANSCRIPTASE REVERSE II ORF2 domain identified by eMATRIX, accession number DM01354N, p-value=1.000e-40, raw score of 13.17
MKAEIKMFFETNENKDTTYQNLWDTFKAVCRGKFIALNAHKRKQERSKIDTLTSPLKELEKQEQTHSKASRRQEITKIRAELKEIETQKTLQKINESRSWIFESINKIDRPLARLIKKKREKNQIDAIKNDKGDIITDPTEIQTTIREYYKHLYANKLENLEEMDKFLDTYTLPRLNKEEVESLNRPITGAEIVAIINSLPTKKSPGPDGFTAEFYQRYKEELVPFLLKLFQSIEKDGILPNSFYEASIILIPKPGRDTTKKENFRPISLMNIDAKILNKILANRIQQHIKKLIHHDQVGFIPGMQGWFNIRKSINVIQHINRAKDKNHMIISIDAEKAFDKIQQPFMLKTLNKLGIDGTYFKIIRAIYDKPTASVILNGQKLEAFPLKTGTRQGCPLSPLLFNRVLEVLARAIRQEKEIKGIQLGKEEVKLSLFADDMIVYLENPIISAQNLLKLISNFSKVSGYKINVQKSQAFLYTNNRQTESQIMSELPFTIASKRIKYLGIQLTRDVKDLFKENYKPLLKEIKEDANKWKNIPCSWVGRINIVKMTILPKSEKVSVCPSLGAHVIFKPYKDWP

SEQ ID NO: 45266 - protein, 689 aa, Homo sapiens
  DOMAIN (156)..(201): kw TRANSCRIPTASE REVERSE II ORF2 domain identified by eMATRIX, accession number DM01354N, p-value=1.000e-40, raw score of 13.17
MELKTKARELREECRSLRSRCDQLEERVSAMEDEMNEMKREGKFREKRIKRNEQSLQEIWDYVKRPNLHLIGVPETDGENGTKLENTLQDIIQENFPNLARQANVQIQEIQRTPQRYSSRRATPRHIIVRFTKVEMKEKMLRAAREKEIQTTIREYYKHLHANKLENLEEMDKFLDTYTLPRLNQEKVESLNRPITGAEIVAIINSLPTKKSPGPDGFTAEFYQRGILPNSFYEASIILIPKLGRDTAKKENFRPISLMNIDAKILNKILAKRIQQHIKKLIHHDQVGFIPGMQGWFNIRKSINVIQHVNRTKDKNHMIISIDEEKAFDKIQQPFMLKTLNKLGIDGMYFIIIRAIYDKPTAHIILNGKKLEAFPLKTGMRQGCPLSPLLFNIVFKVLARAIRQEKEIKGIQLGKEEFKLSLFADDMIVYLENPIVSAQNLLKLISNFSKVSGYKINVQKSQTFLYTNNRQTESQIMSELPFTIASKRIKYLGIQLTRDVKDLFKENYKPLLKEIKEDTNKWKNIPCSWVGRINIVKMAILPKVIYRFNAIPIKVPMTFFTELEKTTLKFIWNQKRACIAKSILSQKNKAGGITLPDFKLYYKATVTKTAWYWYQNRDIDQWNRTEPSEITPHIYNYLIFDKPEKNKQWGKDSLFNKWCWENWLAICRKLKLDPFLTPYTKINSRWIKD

SEQ ID NO: 45267 - protein, 431 aa, Homo sapiens; identical to SEQ ID NO: 35797
  DOMAIN (198)..(245): kw TRANSCRIPTASE REVERSE II ORF2 domain identified by eMATRIX, accession number DM01354V, p-value=1.000e-40, raw score of 12.97

SEQ ID NO: 45268 - protein, 1076 aa, Homo sapiens
  DOMAIN (110)..(151): kw TRANSCRIPTASE REVERSE II ORF2 domain identified by eMATRIX, accession number DM01354I, p-value=1.000e-40, raw score of 15.55
MGDFNTPLSTLDRSTRQKVNKDTQELNSALHQADLIDIYRTLHPKSTEYTFFSAPHHTYSKIDHIVGSKALLSKCKRTEIITNYLSDHSAIKLELRIKNLTQSRSTTWKLNNLLLNDYWVHNEMKAEIKMFFETNENKDTTYQNLWDAFKAVCRGKFIALNAYKRKQERSKIDTLTSQLKELEKQEQTHSKASRRQEITKIRAELKEIETQKTLQKINESRSWFFERINKIDRPLARLIKKKREKNQIDTIKNDKGDITTDPTEIQTTIREYYKHLYANKLENLEEMDTFLDTYTLPRLNQEEVESLNRPITGSEIGAIINSLPTKKSPGPDGFTAEFYQRYKEELVPFLLKLFQSIEKEGILPNSFYEASIILIPKPGRDTTKKENFRPISLMNIDAKILNKILANQIQQHIKKLIHHDQVGFIPGMQGWFNIRKSINVIQHINRAKDKNHMIISIDAEKAFDKIQQPFMLKTLNKLGIDGTYFKIIRAIYDKPTANIILNGQKLEAFPLKTGTRQGCPLSPLLFNIVLEVLARAIRQEKEIKGIQLGKEEVKLSLFADDMIVYLENPIVSAQNLLKLISNFSKVSGYKINVQKSQAFLYTNNRQTESQIMGELPFTIASKRIKYLGIQLTRDVKDLFKENYKPLLKEIKEDTNKWKNIPCSWVGRINIVKMAILPKVIYRFNAIPIKLPMTFFTELEKTTLKFIWNQKRARIAKSILSQKNKAGGITLPDFKLYYKATVTKTAWYWYQNRDIDQWNRTEPSEIMPHIYNYLIFDKPEKNKQWGKDSLFNKWCWENWLAICRKLKLDPFLTPYTKINSKWIKDLNVRPKTIKTLEENLGITIQDIGVGKDFMSKTPKAMATKAKIDKWDLIKLKSFCTAKETTIRVNRQPTTWEKIFATYSSDKGLISRIYNELKQIYKKKTNNPIKKWAKDMNRHFSKEDIYAAKKHMKKCSSSLAIREMQIKTTMRYHLTPTACLETAEEQQLNNMECAGTEAINSLISIALLPKGGMSRILIETQGDRTLKWHKERAVCGAHMQARAGQTTHSAGGFLLPPGIHLQSLPCGCEELPRKQRME

SEQ ID NO: 45269 - protein, 1117 aa, Homo sapiens
  DOMAIN (154)..(195): kw TRANSCRIPTASE REVERSE II ORF2 domain identified by eMATRIX, accession number DM01354I, p-value=1.000e-40, raw score of 15.55
MVKGSIQREELTILNIYAPNTGAPRFIKQVLSDLKRDLDSHTLIMGDFNTPLSTLDRSTRQKVNKDTQELNSALHQADLIDIYRTLHPKSTEYTFFSAPHHTYSKIDHIVGSKALLSKCKRTEIITNYLSDHSAIKLELRIKNLTQSRSTTWKLNNLLLNDYWVHNEMKAEIKMFFETNENKDTTYQNLWDAFKAVCRGKFIALNAYKRKQERSKIDTLTSQLKELEKQEQTHSKASRRQEITKIRAELKEIVTQKTLQKINESRSWFFERINKIDRPLARLIKKKREKNQIDTIKNDKGDITTDPTEIQTTIREYYKHLYANKLENLEEMDTFLDTYTLPRLNQEEVESLNRPITGSEIVAIINSLPTKKSPGPDRFTAEFYQRYKEELVPFLLKLFQSIEKEGILPNSFYEASIILIPKPGRDTTKKENFRPISLMNIDAKILNKILANRIQQHIKKLIHHDQVGFIPGMQGWFNIRKSINVIQHINRAKDKNHMIISIDAEKAFDKIQQPFMLKTLNKLGIDGTYFKIIRAIYDKPTANIILNGQKLEAFPLKTGTRQGCPLSPLLFNIVLEVLARAIRQEKEIKGIQLGKEEVKLSLFADDMIVYLENPIVSAQNLLKLISNFSKVSGYKINVQKSQAFLYTNNRQTESQIMGELPFTIASKRIKYLGIQLTRDVKDLFKENYKPLLKEIKEDTNKWKNIPCSWVGRINIVKMAILPKVIYRFNAIPIKLPMTFFTELEKTTLKFIWNQKRARIAKSILSQKNKAGGITLPDFKLYYKATVTKTAWYWYQNRDIDQWNRTEPSEIMPHIYNYLIFDKPEKNKQWGKDSLFNKWCWENWLAICRKLKLDPFLTPYTKINSRWIKDLNIRPKTIKTLEENLGITIQDIGVGKDFMTAKETTIRVNRQPTTWEKIFATYSSDKGLISRIYNELKQIYKKKTNNPIKKWAKDMNRHFSKEDIYAAKKHMKKCSSSLAIREMQIKTTMRYHLTPVRMAIIKKSGNNSFLTFLGNPRLPSFQAAGPQVQVNFLPCQRPGFHGVQSCPIRTLHSLGHYDWLRDDHVTRSNLTLRILLERPRRKAPFYPLDFPRSYDAGLELLVPSCHHKGQPAWKWSQRR

SEQ ID NO: 45270 - protein, 473 aa, Homo sapiens; identical to SEQ ID NO: 40761
  DOMAIN (151)..(198): kw TRANSCRIPTASE REVERSE II ORF2 domain identified by eMATRIX, accession number DM01354V, p-value=1.000e-40, raw score of 12.97

SEQ ID NO: 45271 - protein, 571 aa, Homo sapiens
  DOMAIN (149)..(194): kw TRANSCRIPTASE REVERSE II ORF2 domain identified by eMATRIX, accession number DM01354N, p-value=1.000e-40, raw score of 13.17
MKAEIKMFFETNENKDTTYQNLWDTFKAVCRGKFIALNAHNRKQERSKIDTLTSQLKELEKQEQTYSKASRRQEITKIRAELKEIETQKTLQKINESRSWFFERINKIDRPLARLIKKKRQKNQMDTIKNDKGDITTDPTEIQTTVREYYKHLYTNKLENLEEMDKFLDTYTLPRLNQEEVESLNRPITGAEIVAIINSLPTKKSPGPDGFTAEFYQRYKEELPGRDTTKEENFRPISLMNIDAKILNKILANQIQQHIKKIIHHDQVGFIPGMQGWFNIRKSINVIQHINRAKDKNHMIMSIDAEKAFDKIQQPFMLKTLNKLVLEVLARAIRREKEIKGIQLGKEEVKLSLFADHMIVYLENPIVSAQNLLKLISNFSKVSGYKINVQKSQAFLYTNNRQTESQIMSELPFTIASKRIKYLGIQLTRDVKDLFRENYKPLLKEIKEDTNKWKNIPCSWVGRINIVKVAILPKVIYSFNAIPIKIPMPFFTELEKTTLKFIWNQKRARIAKSILSQKNKAGAITLPDFKLYYKPTVTKTAWYSYQNRDIDQWNRTEPSEITPHIYNYLIF

SEQ ID NO: 45272 - protein, 234 aa, Homo sapiens
  DOMAIN (121)..(168): kw TRANSCRIPTASE REVERSE II ORF2 domain identified by eMATRIX, accession number DM01354V, p-value=1.000e-40, raw score of 12.97
MTHPLGGHSNVLSRQQLLGDGKFADSAEFYGALELLARAIRQEKETKGIRLGKEEVKLLLFADDMIVYLENPIVSAQNLLKLISNFSKVSGYKINVQKSQAFLYTNNRQTESQIMSELPFTIASKRIIYLGIQLTRDVKDLFKENYKPLLKEIKEDTKKWKNIPCSWVGRINIMKMAILPKLFADHLFGGVEVFLFVGMAYDHYVAISKPLHYLIIVNRLVCILLLVVAVTGGF

SEQ ID NO: 45273 - protein, 638 aa, Homo sapiens
  DOMAIN (270)..(317): kw TRANSCRIPTASE REVERSE II ORF2 domain identified by eMATRIX, accession number DM01354V, p-value=1.000e-40, raw score of 12.97
  misc_feature (1)...(638): Xaa = X or * as defined in Table 2
HSFLSFIVLMYLTMDLTRSQKHGWASSPSHGTSPWPVRLRTSLAKPCKWQVSLCWWLSASPGSSFSLVRSSLLIIVPHAESVSRRPSLLSRVGLFPARYXHRVWQRSPSPQTRDHLIKRNPSQDVXRRQQPRGTRVSNKCSLHTSALGIGRQPSCDATLXGQQGLPVKXKRQQPAPMSQQQTGAALEVLARAIRQEKEIKGIQLGKEEVKLSLFADDMIVYLENPTVSAQNLLKLISNFSKVSGYKINVQKSQAFLYTNNRQTESQIMSELPFTIASKRITYLGIQLTRDAKDLFKENYKPLLKEIKEDTNKWKNIPCSWVGRINIVKMAILPKEPGWARSLVFGARGLQGQGRCGQSRGGGGSCLGGGGSTENWQHREPSARKTGSTENRRHREPAAPRTGSTENQHREPAAPRTGTENRHREPSARKTGSTENRRHREPAAPRTGSTENQHREPAAPRTGTENRHQEPAAPRTGGTENRQHREPAAPRTGTENRQHREPAPRTGSTENRQHREPAPRTGSTENRQHRESAAPRTGSTENRHQEPAAPRTGTENRHREPSAPRTVGTENRRHRELVAPRTGGTENRPREPPAGTRPRHTPMRGGSEGALFHQRRFLEPTPDREQLEGIRYPPVASVS

SEQ ID NO: 45274 - protein, 530 aa, Homo sapiens; identical to SEQ ID NO: 44799
  DOMAIN (119)..(166): kw TRANSCRIPTASE REVERSE II ORF2 domain identified by eMATRIX, accession number DM01354V, p-value=1.000e-40, raw score of 12.97
  misc_feature (1)...(530): Xaa = X or * as defined in Table 2

SEQ ID NO: 45275 - protein, 1063 aa, Homo sapiens; identical to SEQ ID NO: 34337
  DOMAIN (272)..(317): kw TRANSCRIPTASE REVERSE II ORF2 domain identified by eMATRIX, accession number DM01354N, p-value=1.000e-40, raw score of 13.17

SEQ ID NO: 45276 - protein, 1117 aa, Homo sapiens
  DOMAIN (572)..(597): 7 kw REVERSE TRANSCRIPTASE RNA POLYMERASE domain identified by eMATRIX, accession number DM00895E, p-value=3.333e-11, raw score of 15.72
MGKKQNRKTGNSKMQSASPPPKERSSSPATDQSWMENDFDELREEGFRRSNYSELREDIQTKGKEVENFEKNLEECITRITNTEKCLKELMELKTKARELREECRSLRSRCDQLEERVSAMEDEMNEMKQEGKIKRDKEGHYIMVKGSIQQEELTILNIYAPNTGAPRFIKQVLSDLQRDLDSHTLIMGDFNTSLLTLDRSMRQKVNKDTQELNSSLHQADLIDIYRTLHPKSIEYTFFSAPHHTYSKIDHIVGSKALLSKCKRTEIITNYLSDHSAIKLELRIKNLTQSRSTTWKLNNLLLNDYWVHNEMKAEIKMFFETNENKDTTYQNLWDAFKAVCRGKFIALNAHKRKQERSKIDTLTSQLKELEKQEQTHSKASRRQEITKIRAELKEIETQKTLQKINESRSWFFERINKIDRPLARLIKKKREENQIDTIKNDKGDITTDPTEIQTTIREYYKHLYANKPENLEEMDKFLDTYTLPRLKQEEVESLNRPITGAEIVAIINSLPTKKSPGPDGFTAEFYQRYKEELVPFLLKLFQSIEKEGILPNSFYEASIILIPKPGRDTTKKENFRPISLMNIDAKILNKILANRIQQHIKKLIHHDQVGFIPGMQGANIILNGQKLEAFPLKTGTRQGCPLSPLLFNTVLEVLARAIRQEKEIKGIQLGKEEVKLSLFADDMIVYLENPIVSAQNLLKLISNFSKVSGYKINVQKSQAFLYTNNRQTESQIMSELPFTIASKRIKYLGIQFTRDVKDLFKENYKPLLKEIKEDTNKWKNIPCSWVGRINIVKMAILPKVIYRFNAIPIKLPMTFFTELEKTTLNFIWNQKRARIAKSILSQKNKAGGITLPDFKLYYKATVTKTAWYWYQNRDIDQWNRTEPSEITPHTYNYLIFDKPEKNKQRGKDSLFNKWCWENWLAICRKLKLDPFLTPYTKINSRWIKDLNVRPKTIKILEENLGITIQDIGVGKDFMSKTPKAMATKAKIDKWDLIKLKSFCTAKETTIRVNRQPTTWEKIFATYSSDKGLISRIYNELKQIYKKKTNNPIKKWAKDMNRHFSKEDIYAAKKYMKKCSSSLAIREMQIKTTMRYHLTPAPVCDVRLPVSKCSHCSVPTYE

SEQ ID NO: 45277 - protein, 1064 aa, Homo sapiens
  DOMAIN (110)..(151): kw TRANSCRIPTASE REVERSE II ORF2 domain identified by eMATRIX, accession number DM01354I, p-value=1.000e-40, raw score of 15.55
MGDFNTPLSTLDRSTRQKVNKDTQELNSALHQADLIDIYRTLHPKSTEYTFFSAPHHTYSKIDHILGSKALLSKCKRTEIIANYLSDHSAIKLELRIKNLTQNRSTTWKLNNLLLNDYWVHNEMKAEIKMFFETNENKDTTYQNLWDAFKAVCRGKFIALSAHKRKQERSKIDTLTSQLKELEKQEQTHSKASRRQEITKIRAELKEIETQKTLQKINESRSWFFERINKIDRPLARLIKKKREKNQIDAIKNDKGDITIDPTEIQTTIREYYKHLYANKLENLEEMDKFLDTYTLPRLNQEEVKSLNRPITGAEIVAIINSLAIKKSPGPDGFTAEFYQRYKEELVPFLLKLFQSIEKEGILPNSFYEASIILIPKPGRDTTKKENFRPISLMNIDAKILNKILANRIQQHIKKLIHHDQVGFIPGMQGWFNIHKSINVIQHINRARDKNHMIISIDAEKAFDKIQQPFMLKTLNKLGIDGTYLKIIRAIYDKPTANIILNGQKLEAFPLKTGTRQGCPLSPLLFNIVLEVLARAIRQEKEIKGIQLGKEEVKLSLFADDMIVYLENPIVSAQNLLKLISNFSKVSGYKINVQKSQAFLYTNNRQTESQIMSELPFTIASKRIKYLGIQLTRDVKDLFKENYKPLLKEIKEDTNKWKNMPCSWVGRINIVKMAILPKVIYRFNAIPIKLPMAFFTELEKTTLKFIWNQKRARIAKSILSQKNKAGGITLPNFELYYKATVTKTAWYWYQNRYIDQWNRTEPSEITPHIYNYLIFDKPGKNKQWGKDSLFNKWCWENWLAICRKLQLDPFLTPYTKINSRWIKDLNVRPKTIKTLEEDLGITIQDIGMGKDFMSKTPKAMATKDKIDKWDLIKLKSFCTAKETTIRVNRQPTKWEKIFATYSFDKGLISRIYNELQQIYKKKTNNPIKKWAKDMNRHFSKEDIYAAKKHMKKYSSSLAIREMQIKTTMRYHLTPVRMATIKNSGNNRSLCFYKENLSLCLAILLSVPVQEGGARSFLAPAGGVAGRATSHYGGHMATAERLSVELSGQALKEFQKGPLSPKQFK

SEQ ID NO: 45278 - protein, 914 aa, Homo sapiens; identical to SEQ ID NO: 44890
  DOMAIN (147)..(193): kw TRANSCRIPTASE REVERSE II ORF2 domain identified by eMATRIX, accession number DM01354O, p-value=1.000e-40, raw score of 8.73

SEQ ID NO: 45279 - protein, 770 aa, Homo sapiens; identical to SEQ ID NO: 40450
  DOMAIN (8)..(47): PROTEIN ZINC FINGER ZINC-FINGER METAL-BINDING NU domain identified by eMATRIX, accession number PD01066, p-value=8.326e-31, raw score of 19.43

SEQ ID NO: 45280 - protein, 514 aa, Homo sapiens; identical to SEQ ID NO: 40460
  DOMAIN (207)..(254): kw TRANSCRIPTASE REVERSE II ORF2 domain identified by eMATRIX, accession number DM01354V, p-value=1.000e-40, raw score of 12.97

SEQ ID NO: 45281 - protein, 1100 aa, Homo sapiens; identical to SEQ ID NO: 40461
  DOMAIN (491)..(538): kw TRANSCRIPTASE REVERSE II ORF2 domain identified by eMATRIX, accession number DM01354V, p-value=1.000e-40, raw score of 12.97

SEQ ID NO: 45282 - protein, 608 aa, Homo sapiens; identical to SEQ ID NO: 35804
  DOMAIN (152)..(199): kw TRANSCRIPTASE REVERSE II ORF2 domain identified by eMATRIX, accession number DM01354V, p-value=1.000e-40, raw score of 12.97

SEQ ID NO: 45283 - protein, 994 aa, Homo sapiens; identical to SEQ ID NO: 37827
  DOMAIN (87)..(133): kw TRANSCRIPTASE REVERSE II ORF2 domain identified by eMATRIX, accession number DM01354O, p-value=1.000e-40, raw score of 8.73

SEQ ID NO: 45284 - protein, 791 aa, Homo sapiens
  DOMAIN (426)..(469): kw TRANSCRIPTASE REVERSE II ORF2 domain identified by eMATRIX, accession number DM01354T, p-value=1.000e-40, raw score of 9.48
  misc_feature (1)...(791): Xaa = X or * as defined in Table 2
MSGFLISPKHKHGTNSGIVSWADVQSQLRHIEAAFDQEAAAVLMARLGVFRAESEEGPDVLRWLDRQLIRLHSLLTTLDIVPAGKGEVVKGPMSISQQAKGCQKFGQYNKEDPTSFRLSDSFSLYPQFMFHLRRSPFLQVFNNSPDESSYYRHHFARQDLTQSLIMIQPILYSYSFHGPPEPVLLDSSSILADRILLMDTFFQIVIYLGETIAQWRKAGYQDMPEYENFKHLLQAPLDDAQEILQARFPMPRYINTEHGGSQKKREKNQIDAIKNDKGDITTEPTEIQTTIREYYKHLYANKLESLEEMNKFLDTYTLPRLNQEEVESLNRQITGSEIEAIINSLPTKKSPGPDRFTAKFYQRTNDQKHMIISIDAEKAFDKIQQPFMLKTLNKLGIDGTYFKIIRAIYDKPTANIILNGQKLEAFPLKTGTRQGCPLSLLLFNIMLEVLARAIRQEKEIKGIQFGKEEVKLSLFADDMIVYLENPIVLAQNLLKLISNFSKVSGYKINVQKSQAFLYTSNRQTESQIMSELPFTIASKRIKYLGIQLTRDVKDLFKENYKPLLNEIKEDTNKWKNIPCSWVGRINIVKMAILPKVIYRFNAIPIKLSMTFFTELEKTTLEFIWNQKRARITKSILSQKNKAEGITLPDFKLQYKATVTKTAWYSYQNRDIDQWNRTEPSEIVPCIYNYLIFDKPDKNKKWGKDSLFNKWCWENWLAICRKLKLDPFLTPYTKINSRRIKDLNVRPKTIKTLEENLGNTIQDASKKKVYMSLXPAARPVCDWWSLVQXPGF

SEQ ID NO: 45285 - protein, 476 aa, Homo sapiens; identical to SEQ ID NO: 40750
  DOMAIN (234)..(281): kw TRANSCRIPTASE REVERSE II ORF2 domain identified by eMATRIX, accession number DM01354V, p-value=1.000e-40, raw score of 12.97

SEQ ID NO: 45286 - protein, 758 aa, Homo sapiens
  DOMAIN (203)..(249): kw TRANSCRIPTASE REVERSE II ORF2 domain identified by eMATRIX, accession number DM01354O, p-value=1.000e-40, raw score of 8.73
AIKLELRIKNLTQNRSTTWKLNNLLLNDYWVHSEMKAEIKMFFETNENKDTTYQNLWDTFEAKSKSKQHSKASRRQEITKIRAELKEIEIQKTLQKINESRSWFFERINKIDRPLARLIKKKREKNLIDAIKTDKGDITTNPTEIQTTIREYYKHLYANKLENREEMDKFLDTYTLPRLNEEEVESLNTPITGSEIVAIINSLPTKKSPGPDGFTAELYQRYKEELVPFLLKLFQSIEKEGILPNSFYEASIILIPKPGRDTTKKENFRPISLMNIDAKILNKILAKGIQQHIKKLIHHDQVGFIPGMQGRFNIRKSINVIQHINRTKDKNHMIISIDAEKAFDKIQQPFMLKTLNKLGIDGTYFKIIRAIYDKPTASIILNGQKLEAFRLKTGTRQGCPLSPLLFNIVFEILARAIRQEKEIKGIQLGKEEVKLSLFAGDMIVYLENPIVSAQNLLKLISNFSKVSGYKINVQKSQAFLYTNNRQTESQIMSELPFTIASKRIKYLGIQLTRDVKDLFKENYKPLLKEIKEDTNKWKNIPCSWVGRINIVKMAILPKLIGNCSKISGYKINVQKSQAFLYTNNRQTESQIMSELAFTIASKKIKYLGIQLTRDVKDLFKENYKPLLKEIKEDTNKWKNIPCSWVGRINIVKMAILPKLIGNCSKISGYKINVQKSQAFLYTNNRQTESQIMSELAFTIASKKIKYLGIQLTRDVKDLFKENYKPLLNEIKEDTNKWKNIPCSWVGRINIVKMAILPK

SEQ ID NO: 45287 - protein, 659 aa, Homo sapiens
  DOMAIN (149)..(194): kw TRANSCRIPTASE REVERSE II ORF2 domain identified by eMATRIX, accession number DM01354N, p-value=1.000e-40, raw score of 13.17
MKPEIKMFFETNENKDTTYQNLWDTFKAVCRGKFIALNAHKRKQERSKINTLTSQFKELEKQEQTNSKASRRQEITKIRAELKEIETQKPLQKINESRSWFFEKINKIDRPLARLIKKKREKNQIDAIKNDKGDITTDPTEIQTTIREYYKHLYANKLENLEEMDKFLDMYTLPRLNQEEVESLNRPITGSEIEAIINSLPTKKSPGPDGFTAEFYQRYKEELVSFLLKLFQSIKKEGILLNLFYEDSIILKPKPGRDTTKKENFRPISLMNIDAKILIKILANRIQQHIKKLIHHDQVGFIPGMQGWFNIRKSINVIQHINRTKDKNHMIISIDAEKAFDKIQQPFMLKTLNKLGIHGTYLKIIRAIYDKPTANIILNGQKLKAFPLKTGTRQGCPLSPLVFNIVLEVLAWAIRQEKEIKGIQLGKEEVKLSLFADDMTVYLENPIISAQNLLKLISNFSKVSGYKINVQKSQAFLYTNNGQTESLIMSELPFTIASKRIKYLGIQLTRDVKDLFKENYKPLLNEIKEDTNKWKNIPCSWVGRINIVKMAILPKVIYRFNAIPIKLPMTFFTDLEKTTLNFIWNQKRARITKSILSQKNKAGGITLPDFKLYYTATVTKTAWYWYQNSMVLVPKQRYRSMEQNRALRNNAACLQLSDL

SEQ ID NO: 45288 - protein, 1404 aa, Homo sapiens
  DOMAIN (642)..(660): Ribonuclease II family proteins domain identified by eMATRIX, accession number BL01175D, p-value=8.435e-21, raw score of 11.74
  misc_feature (1)...(1404): Xaa = X or * as defined in Table 2
MHSCLPDATGEGELYNSLGSLTWSFLSMIGVLLWVDFSGDSIDLCSPLWNRTNLEALQKKLEELELDEQQRKRLEAFLTQKQKVGELKDDDFEKISELGAGNGGVVFKVSHKPSGLVMARKLIHLEIKPAIRNQIIRELQVLHECNSPYIVGFYGAFYSDGEISICMEHMVLLQERPCPGFLWMENSDYGLLLPLDLLLCLSFSFSKVLSDLVSDILIHGMKARNRSIHGDVVVVELLPKNEWKGRTVALCENDCDDKASGESPSEPMPTGRVVGILQKNWRDYVVTFPSKEEVQSQGKNAQKILVTPWDYRIPKIRISTQQAETLQDFRVVVRIDSWESTSVYPNGHFVRVLGRIGDLEGEIATILVENSISVIPFSEAQMCEMPVNTPESPWKVSPEEEQKRKDLRKSHLVFSIDPKGCEDVDDTLSVRTLNNGNLELGVHIADVTHFVAPNSYIDIEARTRYAVSIMWELDKASYEIKKVWYGRTIIRSAYKLFYEAAQELLDGNLSVVDDIPEFKDLDEKSRQAKLEELVWAIGKLTDIARHVRAKRDGCGALELEGVEVCVQLDDKKNIHDLIPKQPRKSNKTLADSLDNANDPHDPIVNRLLRSMATQAMSNALYFSTGSCAEEEFHHYGLALDKYTHFTSPIRRYSDIVVHRLLMAAISKDKKMEIKGNLFSNKDLEELCRHINNRNQAAQHSQKQSTELFQCMYFKDKDPATEERCISDGVIYSIRTNGNKRPDISEGEAQDHAQSIVAFKEDEARGQEIGKHSAVGHVPSATALPTLTGVERRAEAEMSGLGWAVGTDWTAYKPRRLGDTSLHINRAKDKNHMIISIDAEKAFDKIQQPFMLKTLNKLGIDGTYFKIIRAIYDIPTANIIPNGQKLEAFPLKTGTRQGCPLSPLLFNIVLEVLARAIRQEKEIKGIQLGKEEVKLSLFADDMIVYLENPIVSAQNLLKLISNFSKVSGYKINVQKSQAFLYTNNRQTESQIMSELPFTIASKRIKYLGIQLTRDVKDLFKENYKPLLKEIKEDTNKWKNIPCSWVGRINIVKMAILPKVIYRFNAIPIKLPMTFFTELEKTTLKFIWNQKRARIAKSILSQKNKAGGITLPDFKLYYKATVTKTAWYWYQNRDIDQWNRTEPSEIMPHIYNYLIFDKPEKNKQWGKDSLFNKWCWENWLAICRKLKLDPFLTPYTKINSRWIKDLNVRPKTIKTLEENLGITIQDIGVGKDFMSKTPKAMATKAKIDKWDLIKLKSFCTAKETTIRVNRQPTTWEKIFATYSSDKGLISRIYNELKQIYKKKTNNPIKKWAKDMNRHFSKEDIYAAKKHMKKCSPSLAIREMQIKTTMRYHLTPTRLIVIGIEECLRGKEKLETLYYWNSDTDHQVXWLGWPXWKSDHKKEQPSF

SEQ ID NO: 45289 - protein, 941 aa, Homo sapiens; identical to SEQ ID NO: 43660
  DOMAIN (479)..(526): kw TRANSCRIPTASE REVERSE II ORF2 domain identified by eMATRIX, accession number DM01354V, p-value=1.000e-40, raw score of 12.97

SEQ ID NO: 45290 - protein, 1084 aa, Homo sapiens; identical to SEQ ID NO: 44902
  DOMAIN (110)..(151): kw TRANSCRIPTASE REVERSE II ORF2 domain identified by eMATRIX, accession number DM01354I, p-value=1.000e-40, raw score of 15.55

SEQ ID NO: 45291 - protein, 939 aa, Homo sapiens
  DOMAIN (297)..(352): kw TRANSCRIPTASE REVERSE II ORF2 domain identified by eMATRIX, accession number DM01354Q, p-value=1.000e-40, raw score of 9.23
  misc_feature (1)...(939): Xaa = X or * as defined in Table 2
MEDEMNEMKREGKFREKRIKRNEQSLQEIWDYVKRPNLHLIGVPESDVENGTKLENTLQDIIQENFPNLARQANVQIQEIQRTPQRYSSRRATPRHIIVRFTKVEMKEKMLRAAREKGHCNSGKSHRSLWEQNKGIFTTCICDDAEDLQSPSTAGPWFGVLYTKGGPYPQEDIFSEEVHTGPKLRKKIQEYQLTSKWSKSDVQVSVERRMAGGNPNQCHIGEVLLDGFTAEFYRRYKEELVPFLLKLFQSIEKEGILPNSFYEASIILIQKPGRDTTKKENFRPISLMNIDAKILNKILAKRIQQHIEKLIHHDQVGFIPVMQGWFNICKSINVIQHINRAKDKNHMIISIDAEKAFDKIQQPFMLKTLNKLGIDGMYFKIIRAIYDKPTANIILNGQKLAAFPLKTGTRQGCPLSPLLFNIVLEVLARAIRQEKEIKGIQLGKEEVKLSLFADDMIVYLENPIVSAQNLLKLISNFSKVSGYKINVQKSQAFLYTNNRQTESQIMSELPFTSASKRIKYLGIQLTRDVKDLFKENYKPLLKEIKEDTNKWKNIPCSWVGRINIVKMAILPKVIYRFNAIPIKLPMPFFTELEKTTLKFIWNQKRALITKLILSQKNKAGGITLPDFKLYYKATVTKTAWYWYQNRDKDQWNRTEPSEITPHIYNYLIFDKPEKNKQWGKDSLFNKWYWENCLAICRKLKLDPFLTPYTKINSRWIKDLNVRLKTIKALEENLGNTIQDIGMGKDFMSKTPKAMATKDKIDKWDLIKPKSFCTAKETTIRVNRQPTKWEKIFATYSSDKGLISRNYNELKQIYKKKTIGPIKKWAEDMNRHFSKEDTYAAKKHMKKCSSSLAIREMQIKTTMRYHLTPVRMVIIKKSGNNRCWRGCGETGTLSHCWWDCKLIQPLWRFLRDXGPKTGGDSXMIQVKYXPQQKKKGCPNA

SEQ ID NO: 45292 - protein, 1115 aa, Homo sapiens; identical to SEQ ID NO: 43667
  DOMAIN (323)..(369): kw TRANSCRIPTASE REVERSE II ORF2 domain identified by eMATRIX, accession number DM01354O, p-value=1.000e-40, raw score of 8.73

SEQ ID NO: 45293 - protein, 1284 aa, Homo sapiens
  DOMAIN (569)..(594): 7 kw REVERSE TRANSCRIPTASE RNA POLYMERASE domain identified by eMATRIX, accession number DM00895E, p-value=3.333e-11, raw score of 15.72
  misc_feature (1)...(1284): Xaa = X or * as defined in Table 2
MGKKQNRKTGNSKTQSASPPPKERSSSPATEQSWMENDFDELREEGFRRSNYSELWEDIQTKGKEVENFEKNLEECITRITNTEKCLKELMELKTKARELHEECRSLRSRCDQLEERVSAMEDEMNEMKREGKFREKRIKRNEQSLQEIWDYVKRPNLRLIGVPESDVENGTKLENTLQDIIQENFPNLARQANVQIQEIQRMPQRYSSRRATPRHIIVRFTKVEMKEKMLRAARQKAPHHTYSKIDHIVGSKALLSKCKRTEIITNYLSDHSAIKLELRIKNLTQSRSTTWKLNNLLLNDYWVHNEMKAEIKMFFETNENKDTTYQNLWDTFKAVCRGKFIALNAYKRKQETSKIDTITSQLKELEKQEQTHSKASRRQEITKIRAELKEIETQKTLQKINESRSWFFERINKIDRPLARLIKKKREKNQIDTIKNDKGDITTDPTEIQTTIREYYKHLYANKLENLEEMDTFLDTYTLPRLNQEEVESLNRPITGSEIVAIINSLPTKKSPGPDGFTAEFYQRYKEELVPFLLQLFQSIEKEGILPNSFYEASIILIPKPGRDTTKKENFRPISLMNIDAKILNKILANRIQQHIKKLIHHDQVGFIPGTQGWFNIRKSINVIQHINRAKDKNHMIISIDAEKAFDKIQQPFMLKTLNKLGIDGTYFKIIRAIYDKPTANIILNGQKLEAFPLKTGTRQGCPLSPLLFNIVLEVLARAIRQEKEIKGIQLGKEEVKLSLFADDMIVYLENPIVSAQNLLKLISNFSKVSGYKINVQKSQAFLYTNNRQTESQIMSELPFTIASKRIKYLGIQLTRDVKDLFKENYKPLLKEIKEDTNKWKNIPCSWVGRINIVKMAILPKVIYRFNAIPIKLPMTFFTELEKTTLKFIWNQKRACISKSILSQKNKAGGITLPDFKLYYKATVTKTAWYWYQNRDIDQWNRTEPSEIMPHIYNYLIFDKPEKNKQWGKDSLFNKWCWENWLAICRKLKLDPFLTPYTKINSRWIKDLNVRPKTIKTLEENLGITIQDIGVGKDFMSKTPKAMATKAKIDKWDLIKLKSFCTAKETTIRVNRQPTTWEKIFTTYSSDKGLISRIYNELKQIYKKKTNNPIKKWAKDMNRHFSKEDIYAAKKHMKKCSSSLAIREMQIKTTMRYHLAPVRMAIIKKSGNNRLFTVAKTWIQPKCASMIHWMKKVXNIYTMKYNPAIKKEFTSFAAIWMELKATFLSKLMQEQKAKYCMFSLGFLLTHQLQLLKFMKMSTSQVPLVTLKQRRESQEPGKTKKHIY

SEQ ID NO: 45294 - protein, 853 aa, Homo sapiens; identical to SEQ ID NO: 32659
  DOMAIN (262)..(287): 7 kw REVERSE TRANSCRIPTASE RNA POLYMERASE domain identified by eMATRIX, accession number DM00895E, p-value=3.333e-11, raw score of 15.72

SEQ ID NO: 45295 - protein, 985 aa, Homo sapiens; identical to SEQ ID NO: 40444
  DOMAIN (81)..(122): kw TRANSCRIPTASE REVERSE II ORF2 domain identified by eMATRIX, accession number DM01354I, p-value=1.000e-40, raw score of 15.55

SEQ ID NO: 45296 - protein, 617 aa, Homo sapiens
  DOMAIN (162)..(205): kw TRANSCRIPTASE REVERSE II ORF2 domain identified by eMATRIX, accession number DM01354T, p-value=1.000e-40, raw score of 9.48
  misc_feature (1)...(617): Xaa = X or * as defined in Table 2
MGRNQSRKAENSKNQSASSPPKDCSSSPAMEQSWTENDFDELTEVGFRRSVITNFSELKEHVETNLKEAKHLEKRLDKWLTRIKSVEKILNDLMELKTMAQELHDTCRSFNSQFNQVEERVSVIEDQINEMNIDGTYLKIIRAIYDKPPRNIILNQQKLEAFPLKTGTRQGCPLSPLLFNIVLEVLARAIRQEKEIKGIQLGKEEVKLSLFADDMIVYLENPIVSAQNLLKLISNFSKVSGYKINVQKSQAFLYTNNRQTESQIMSELPFTIASKRIKYLGIQLTRDVKDLFKENYKPLLKEIKEDTNKWKNIPCSWVGRINIVKMAILPKVIYRFNAIPIKLPMTFFTELEKTTLKFIWNQKRARIAKSILSQKNKSGGITLPDFKLYYKATVTKTAWLYHTPLSCLPPXWNRTEPSEIIPHIMAVAQIQQVKLLLLQGQHASSRLQPTSSTKCGGWTASSASPRSMGLSSWKGNLASAIHYFPCKPLTLPSRISTSSSSWGCRQAHAVLEVLRWPPGLGWPGWHHLTLLHVPPVRITKSNGPRACTRASASHARHHQYNQEPSLSPLHSPLPPPEQVLVSTAERTEDRSYHRTLCRHSPYFKNEAADLRGEGYSS

SEQ ID NO: 45297 - protein, 1091 aa, Homo sapiens
  DOMAIN (154)..(195): kw TRANSCRIPTASE REVERSE II ORF2 domain identified by eMATRIX, accession number DM01354I, p-value=1.000e-40, raw score of 15.55
MVKGSIQQEELTILNIYAPNTGAPRFIKQVLSDLQRVLDSHTLIMGDFNTPLSTLDRSTRQKVNKDTQELNSALHQADLIDIYRTLHPKSTEYTFFSAPHHTCSKIDHIVGSKALLSKCKRTEIITNYLSDHSAIKLELRIKNLTQSRSTTWKLNNLLLNDYWVHNEMKAEIKMFFETNENKDTTYQNLWDAFKATASKTNKERREKNQIDTIKNDKGDITTDPTEIQTTIREYYKHLFANKLENLEEMDTFLDTYTLPRLNQEEVESLNRPITGSEIVAIINSLPTKKSPGPDGFTAEFYQRYMEELVPFLLKLFQSIEKEGILPNSFYEASIILIPKPGRDTTKKENFRPISLMNIDAKILNKILANRIQQQIKKLIHHDQVGFIPGMQGWFNIRKSINVIQHINRAKDKNHMIISIDAEKAFDKIQQPFMLKTLNKLGIDGTYFKIIRAIYDKPTANIILNGQKLEAFPLKTGTRQGCPLSPLLFNIVLEVLARAIRQEKEIKGIQLGKEEVKLSLFADDMIVYLENPIVSAQNLLKLISNFSKVSGYKINVQKSQAFLYTNNRQTESQIMGELPFTIASKRIKYLGIQLTRDVKDLFKENYKPLLKEIKEETNKWKNIPCSWVGRINIVKMAILPKVIYRFNAIPIKLPMTFFTELEKTTLKFIWNQKRARIAKSILSQKNKAGGITLPDFKLYYKATVTKTAWYWYQNRDIDQWNRTEPSEIMPHIYNYLIFDKPEKNKQWGKDSLFNKWCWENWLAICRKLKLDPFLTPYTKINSRWIKDLNVKPKTIKTLEENLGITIQDIGVGKDFMSKTPKAMATKDKIDKWDLIKLKSFCTAKETTIRVNRQPTTWEKIFATYSSDKGLISRIYNELKQIYKKKTNNPIKKWVKDMNRHFSKEDIYAAKKHMKKCSSSLAIREMQIKTTMRYHLTPVRMAIIKKSGNNSEGYPDLLNTEYEQISFGNQRGTKVVPGDPRETKTHADAEARSRIWLVLASVVQDRWTNIYEEISHLAPWNKQVTEQQPKSAAAQSLRPGPSDPVGLSFPGYCESGAPAAFLHARAETLKLSSATMSATEIKGEGQSQTGRTQ

SEQ ID NO: 45298 - protein, 758 aa, Homo sapiens; identical to SEQ ID NO: 35813
  DOMAIN (106)..(149): kw TRANSCRIPTASE REVERSE II ORF2 domain identified by eMATRIX, accession number DM01354T, p-value=1.000e-40, raw score of 9.48

SEQ ID NO: 45299 - protein, 865 aa, Homo sapiens
  DOMAIN (44)..(89): kw TRANSCRIPTASE REVERSE II ORF2 domain identified by eMATRIX, accession number DM01354N, p-value=1.000e-40, raw score of 13.17
MHSKQPLARLIKKKREKNQIDTIKNDKGDITTDPTEIQTTIREYYKHLYANKLENLEEMDKFLDTYTLPRLNQEEVESLNRPITGAEIVAIINSLPTKKSPGPDGFTAEFYQRYKEELHINRAKDKNHMIISIDAEKAFDKIQQPFMLKTLNKLGIDGTYFKIIRAIYDKPTANIILNGQKLEAFPLKTGTRQGCPLSPLLFNIVLEVLARAIRQEKEIKGIQLGKEEVKLSLFADDMTVYLENPIVSAQNLLKLISNFSKVSGYKINVQKSQAFLYTNNRQTESQIMSELPFTIASKRIKYLGIQLTRDVKDLFKENYKPLLKEIKEDTNKWKNIPCSWVGRINIMKMAILPKVIYRFNAIPIKLPMTFFTELEKTTLKFIWNQKKSPHRQGNPKPKERSWRHHDTMGKDFMSKTPKAMAAKAKIDKWDLIKLNSFCTAKETTIRVNRQPTEWEKIFAIYSSDKGLISRIYNELKQIYKKKTNNPIKKWTKDMNRHFSKEDFYAAQRHMKKCSSSLAIREMQIKTTYHAGPDGFTAEFYQRYKEELVPFLLKLFQSIEKEGILPNSFYEASIILIPKPGRDTTKKENFRPISLMNIDAKILNKILAKRIQQHIKKLIHHDQVGFIPGMQGWFNICKSINVIQHINRTKDKNHMIISIDAEKAFDKIQQLFMLKTLNKLGIDGTYLKIIRAIYDKPTANIILNGQKLEAFPLKTGTRQGCPLSPLLFNIVWEVLARAMRQEKEIKGIQLGKEEVKLSLFADDMIVYLENPIVSAQNLLKLISNFSKVSGYKINVQKSQAFLYTNNRQTESQIMSELPFTTASKRIKYLGIQLTRDEKDLFKENYKPLLKEIKEDTNKWKNIPCSW

SEQ ID NO: 45300 - protein, 882 aa, Homo sapiens; identical to SEQ ID NO: 38236
  DOMAIN (272)..(317): kw TRANSCRIPTASE REVERSE II ORF2 domain identified by eMATRIX, accession number DM01354N, p-value=1.000e-40, raw score of 13.17

SEQ ID NO: 45301 - protein, 743 aa, Homo sapiens; identical to SEQ ID NO: 39496
  DOMAIN (246)..(291): kw TRANSCRIPTASE REVERSE II ORF2 domain identified by eMATRIX, accession number DM01354N, p-value=1.000e-40, raw score of 13.17

SEQ ID NO: 45302 - protein, 320 aa, Homo sapiens; identical to SEQ ID NO: 40481
  DOMAIN (182)..(229): kw TRANSCRIPTASE REVERSE II ORF2 domain identified by eMATRIX, accession number DM01354V, p-value=1.000e-40, raw score of 12.97

SEQ ID NO: 45303 - protein, 976 aa, Homo sapiens
  DOMAIN (266)..(311): kw TRANSCRIPTASE REVERSE II ORF2 domain identified by eMATRIX, accession number DM01354N, p-value=1.000e-40, raw score of 13.17
MEDEMNEMKQEEKFREKRIKRNEQTLQEIWDYVKRPNLHLIGVPESDGENGTKLENTLQDIIQENFPNLARQANVQIQEIQRMPQRYSSRRATPRHIIVRFTKVEMKEKMLRAAREKDRSMRQKVNKDTQELNSALHQADLIDIYRTLHPKSTEYTFFSAPHHTYTKIDHILGSKALLRKCKRTEIITNYLSDHSAIKLELRIKNLTQNRSTTWKLNNLLLNDYWVHNKMKAEIKMFFETNENKDTTYQNLWDAFKANIQTTIKEYYKHLYANKLENLEEMDKFLDTYTLPRLNQEEVESLNRPITGAEIVAIINSLPTKKSPGPDGFTAEFYQRYKEELVPFLLKLFQSIEKQGILPNSFYEASTILIPKPGRDTTEKENFRPISLMNIDAKILNKILAKRIQQHIKKLIHHDQVGFIPGMQGWFNIHKSINVIQHINRAKDKNHMIISIDAEKAFDKIQQRFMLKTLNKLGIDGTYFKIIRAIYDKPTANIILNGQKLEAIPLKAGTRQGCPLSPLLFNIVLEVLARVIRQEKEIKGIQLGKEEVKLSLFADDMIVYLENPIVTAQNLLKLISNFSKVSGYKINVQKSQAFLYTNNRQTESQIMSELPFTIASKRIKYLGIQLTRDVKDLFKENYKPLLKEIKEDTNKWKNIPCSWVGRINIMKMAILPKPYVDGKAERALIVTLFLGLQGSWPHPRQMLLQIHMKFCSCQHPKALALVPAPAHLHSPSCDGWKAVGPSKWSPSLPALKQPASSSTPALEFLPAKGNLHPGQAPVSLLPLQQMPGEFDPTPVVQTTITIQEPQVVLKIKGRKVDLLLDTGVGLSALLSNPGPFSSLSTNERGISERLLIRYFFQLFSCSWGDLLFTHAFLIIPESPTPLLNRYILASMGTTILVASEQTICLPLVKTDINTEVWAIQGKIGQSTNAIPVQVHLKDPTSFPNQKQYPLKPEVRKGLEAIIDNKVAGPPQTLQQPL

SEQ ID NO: 45304 - protein, 594 aa, Homo sapiens; identical to SEQ ID NO: 34828
  DOMAIN (262)..(287): 7 kw REVERSE TRANSCRIPTASE RNA POLYMERASE domain identified by eMATRIX, accession number DM00895E, p-value=3.586e-10, raw score of 15.72

SEQ ID NO: 45305 - protein, 1627 aa, Homo sapiens
  DOMAIN (294)..(339): kw TRANSCRIPTASE REVERSE II ORF2 domain identified by eMATRIX, accession number DM01354N, p-value=1.000e-40, raw score of 13.17
MGKKQNRKTGNSKKQSASLPPKERSFSPATEQSWTENDFDELREEGFRRSNYYELREDIQTKGKEVENFEKNLEESPHHTYSKIDHILGSKALLSKCKRTEIITNYLSDHSAIKLELRIKNLTQNRSTTWKLNNLLLNDYWVPNEMKAEIKMFFETNENKDTTYQNLWEAFKAVCRGKFIALNAHKRKQERAKIDTLTSQLKELEKQEQTHSKASRRQEITKIRAELKERETQKTLQKINESRSWFFERINKIDRPLARLIKKKREKNQIEAIKNDKGVITTDPTEIQTTIREYYKHLYTNKLENLEEMDKFLDTYTLPRPNQEEVESLNRPITGSEIVAIINSLPTKKSPGPDGFTAKFYQRYKEELVSFLLKLFQSIEKEGILPNSFYEASIILKPKPGRDITKKENFRPISLMNIDAKILNKILAKRIQQHIKKLIHHDQVGFIPGMQGWFHISKSINVIQHINGAKDKNHMIISIDAEKAFDKIKQHFMLKTLNKLGIDGRYFKIIRAIYDKPTANIILNGHKLEAFPLKTGTRQGCPLSPLPFNIVLEVLARAIRQEKEIKGIQLGKEEVKLSLFADDMIVYLENPIVSAQNLLKLISNFSKVSGYNINVQKSQAFLYTNNRQTESQIMSELPFTMASKRIKYLGIQLTRDVKDLFKENYKPLLKEIKEDTNKWKNIPCSWVGRINIVKMAILPKVIYRFSAIPIKLPMTFFTELEKTTLKFIWNQKRARIVKSILSQKNKAGGTTLPDFKLYYKATVTKIAWYWYQNRDIDQWNRTEPSEIMPHIYNYLIFDKPEKNKQWGKDSLFNKWCWENWLAICRKLKLDPFLTPYTKINSRWIKDLNVRPKTIKTLEENLGITIQDIGMGKDFMSKTPKAMATKPKIDKWDLMKLKSFCTAKETTIRVNRQPTKWEKIFATYSSDKGLISRIYNELKQIYKKKTNNPIKKWAKDMNRHFSKEDIYAAKKHMKKCSPSLAIREMQIKTTMRYHLPPVRMAIIKKSGNNSLASGLSIDKIQQPFMLKTLNKLGIDGTYFKIIRAIYDKPTANIILNGQKLEAFPLKTGTRQGCPLSPLLFNIVLEVLARAIRQEKEIKGIQLGKEEVKLSLFADDMIVYLENPIVSAQNLLKLISNFSKVSGYKINVQKSQAFLYTNNRQTESQIMSELPFTIASKRIKYLGIQLTRDVKDLFKENYKPLLKEIKEDTNKWKNIPCSWVGRINIVKMAILPKVIYRFNAIPIKLPMTFFTELEKTTLKFIWNQKRARIAKSILSQKNKAGGITLPDFKLYYKATVTKTAWYWYQNRDIDQWNRTEPSEITPLTYNYLIFDKPEKNKQWGKDSLFNKWCWENWLAICRKLKLDPFLTPYTKINSRWIKDLNVRPKTIKTLEENLRITIQDIGMGEDFMSKTPKAMATKAKIDKWDLIKLKSFCTAKETTIRVNRQPTKWEKIFATYSSDKGLISRIYNELKPIYKKKTNNPIKKWAKDMNRHFSKEDIYAAKKHMKKCSSSLAIREMQIKTTMRYHLTPVRMAIIKKSGNNRSKDIKDREDPLAYGVFAPVVRVESSLQEGSWWVSFWTERGRAMWENIQIELGFRKKQDPGCHLTWKCGYYFYDGRRGGSCLQMQLTL

SEQ ID NO: 45306 - protein, 1947 aa, Homo sapiens
  DOMAIN (123)..(164): kw TRANSCRIPTASE REVERSE II ORF2 domain identified by eMATRIX, accession number DM01354I, p-value=1.000e-40, raw score of 15.55
MSSEWEWLRCSEVKGQRDVRPGCLGWDFRVYIVEDTQDEDRTWSVKEACELVLRVQEMIITRVVDAAPHHTYSKIDHIVGSKALLSKCKRTEIITNCLSDHSAIKLELRIKNLTQSRSTTWKLNNLLLNDYWVHNEMKAEIKMFFETNENKDTTYQNLWDAFKAVCRGKFIALNAYKRKQERSKIDTLTSQLKELEKQEQTHSKASRRQEITKIRAELKEIETQKTLQKINESRSWFFERINKIDRPLARLIKKKREKNQIDAIKNDKGDITTDPTEIQTTIREYYKQLYANKLENLEEMDTFLDTYTLPRLNQEEVESLNRPITGSEIVAIINSLPTKKSPGPDGFTAEFYQRYKEELVPFLLKLFQSIEKEGILPNSFYEASIILIPKPGRDTTKKENFRPISLMNIDAKILNKILANRIQQHIKKLIHHDQVGFIPGMQGWFNIRKSINVIQHINRAKDKNHMIISIDAEKAFDKIQQPFMLKTLNKLGIDGTYVKIIRAIYDKPTANIILNGQKLEAFPLKTGTRQGCPLSPLLFNIVLEVLARAIRQEKEIKGIQLGKEEVKLSLFADDMIVYLENPIVSAQNLLKLISNFSKVSGYKINVQKSQAFLYTNNRQTESQIMGELPFTIASKRIKYLGIQLTRDVKDLFKENYKPLLKEIKEDTNKWKNIPCSWVGRINIVKMAILPKVIYRFNAIPIKLPMTFFTELEKTTLKFIWNQKRARIAKSILSQKNKAGGITLPDFKLYYKATVTKTAWYWYQNRDIDQWNRTEPSEIMPHIYNYLIFDKPDKNKQWGKDSLFNKWCWENWLDIWRKLKLDPFLTPYTKINSRSIKDLHVRPKTIKTLEENLGDTIQDIGMGKDFMSKTSKAMATKAKIDKWDLIQLKSFCTAKETTIRVNRQPTEWEKIFAIYSSDKGLIFRIYKELKQIYKKKTNSPIKKWVKDMNRHFSKEAIYAAKRHMKKCSSSLAIREMQIKTTLSLPAQVSVVVMGFPSAGIPEACGKSGLFLAYSINPFPQSHWDQEQVMHWLCDVPSSIVVVNWALSVDQCRLQALRFSVHLIDLLSMLLRCNGFTGIQKAVEDHNRQQIPVTMTFFGTSLALGLWSFFLDPITELFVTSVLEERGHTNKLEMVNAGDFIANERLAGAGLLRFAGHLLQSLVASDFLVPEDITSEACKTAKWQPAPFSGSSIPVGYRHVASPNAPAGGRWRPWYFIPKRNRNSVYRRTQAEVAVGPSLEVLPRDDEWIGILFKEMVWPNFCGAAVLCWGIPSLPSQSGLSEACRLEKLGHSNSKDSGPPLPSGTPTCPGKAQHYCQGLAGIPSQAIRQEKEIKGIQLGKEEVKLSLFADDMIVYLENPIVSAQNLLKLISNFSKVSGYKINVQKSQAFLYTNNRQTERQIMSELPFTIASKRIKYLGIQLTRDVKDLFKENYKPLLKEIKEDTNKWKNIPCSWVGRINIVKMVILPKVIYRFNAIPIKLPMTFFTELEKTTLKFIWNQKRARIAKSILSQKNKAGGITLPDFKLYYKATVTKTAWYWYQNRDIDQWNRTEPSEITPHIYNYLIFDKPEKNKQWGKDSLFNKWCWENWLAICRKLKLDPFLTPYTKINSRWIKDLNVRPKTIKTLEENLGITIQDIGVGKDFMSKTPKAMATKAKIDKWDLIKLKSFCIAKETTIRVNRQPTTWEKIFTTYSSDKGLISRIYNELKQIYKKKTSNPIKKWAKDMNRHFSKEDIYAAKKHMKKCSSSLAIREMQIKTTMRYHLTPVRMAIIKKSGNNRNSTPGIFAQRNNPKDNRRLRHDSVHYFMIHKSKNKNKTPKSLKAQERQDWPTLQFLILLNKCTAVDMTKGLPGGAWGVWTDRGHFLGFSIGSTPTKGEHELREGAFHASPLFLPMLRVNTCKEPLAGSYFSASSTGWKPELHLQIKVNHYNNKLEEDTAYLQPRSPYRALVL

SEQ ID NO: 45307 - protein, 683 aa, Homo sapiens
  DOMAIN (149)..(194): kw TRANSCRIPTASE REVERSE II ORF2 domain identified by eMATRIX, accession number DM01354N, p-value=1.000e-40, raw score of 13.17
  misc_feature (1)...(683): Xaa = X or * as defined in Table 2
MKAEIKMFFETNKNKDTTYQNLWDAFKAVCRGKFIALNAHKRKQERSKIDTLTSQLKELEKQEQTHSKASRRQEITKIRAELKEIETQKTLQKINESRSWFFERINKIDRPLARLLKKKREKNQIDAIKNDKGDITTDPTEIQTTIREYYKHLYANKLENLEEMDKFLDTYTLPRLNQEEVESLNRPITGAEIVAIINSLPTKKSPGPDGFTAELYQRYKEGAVLEVLARAIRQEKEIKGIQLGKEEVKLSLFAGDMIVYLENPIVSAQNLLKLISNFSKVSGYKINVQKSQAFLYTNNRQTESQIMSELPFTIASKRIKYLGIQLTRDVKDLFKENYKPLLNEIKEDTNKWKNIPCSWVGRINIVKMAILPKVIYGFNAIPIKLPMTFFTELEKTTXKFIWNQKRARIAKXILSQKNKAGGITLPDFKLYYKATVTKTAWYWYQNRDIDQWSRTEPSEIMPHIYNYLIFDKPDKNKKWGKDSLFNKWCRENWLAICRKLKLDPFLTPYTKINSRWIKDLNVRPKTITTLEEKLSNTIQDIGMGKDSMSKTPKAMATNVKIQKWDLIKLKSFCTAKETTIRVNRQPTTWEKIFATYSSDKGLISRIYNELKQIYKKKTNNPIKKWVKDMNRHFSKEDIYAAKKHMKKCSPSLAIREMQIKTTMRYHLTPVRMAIIKKSGNNRC

SEQ ID NO: 45308 - protein, 1075 aa, Homo sapiens; identical to SEQ ID NO: 44907
  DOMAIN (279)..(324): kw TRANSCRIPTASE REVERSE II ORF2 domain identified by eMATRIX, accession number DM01354N, p-value=1.000e-40, raw score of 13.17

SEQ ID NO: 45309 - protein, 1301 aa, Homo sapiens
  DOMAIN (272)..(317): kw TRANSCRIPTASE REVERSE II ORF2 domain identified by eMATRIX, accession number DM01354N, p-value=1.000e-40, raw score of 13.17
MGDFNTPLSTLDRATRQKVNKDTQELNSALHQADLIDIYRTLHPKSTEYTFFSAPHHTYSKIDHILGSKALLSKCKRTEIITNYLSDHSAIKLELRIKNLTQNRSITWKLSNLLLNDYWVHNEMKADIKMFFETNENKDTTYQNLWDTFKAVCRGKFLALNAHKKKQERSKIDTLTSQLKELEKQEQTHSKASRRQEITKIGAELKEIETQKTLQKINESRSWFFERINKIDKPLARLIKKKREKNQIDAIKNDKGDITTDPTEIQTTIREYNKHLYANKLENLEEMDKFLDTYSLPRLNQEEVESLNRPITGAEIVAIINSLPTKKSPGPDGFTAKFYQRYKEECKILANQIQQHIKKLTHQDQVDFIPGMQGWFNIRKSINVIQHINRSKDKNHMIISIDAEKAFDKIQQPFMLKTLNKLRIDGTYLKIIRAIYDKPTANIILNGQKLEAFPLKTGTRQGCSLSPLLFNIVLEVLARAIRQEKEIKGIQLGKEEVKLSLFADNIIVYLENPIVSAQNLLKLISNFSKVSGYKINVQKSQAFLYTNNRQTESQIMSELPFTIASKRIKYLGIQLTRDVKDLFKENYKPLLKEIKEDTNKWKNIPCSWVGRINIVKMAILPKIIYRFNAIPIKLPMTFFTELEKTTLKFIWNQKRSRIAKSILSQKNRAGGITLSDFKLYYKATVTKTAWYWYQNRDIDQWNKTEPSEIMPHIYNYLIFDKPEKNEQWGKDSLFNKWCWENWLAICRKLKLDPFLTPYTKINSRWIKDLNVRPKTIKTLEENLGITIQDIGMGKDFMSKTPKAMATKAKIDKWDLIKLKNFCTAKETTIRVNRQPTKWEKIFTTYSSDKGLISRIYNELQQIYKKKTNNPIKKWAKDMNRHFSKEDIYAAKKHMKKCSPSLAIREMQIKTTMRYHVTPVRMATIKKSGNNSWRSCLQPWAAHSTTYRHPGTMEKKTSSGDTPTVFPSTLGRKKSTSAQLTELTALTLELSKGKVRNAPSKLDLSPFEMLYGWPFLTNDFLLDQETSELGKHVNSLARFQQELTQVAEAQPQEVGPPLFNPGYLVLPKQGGPYTILLSMPSAVKVTGIDSWIHHAQVKAWKTERAIPGSPAECLGYQCEEIRDLKLKIKRDKKMSKGYSSYSVPVIHSVIQSSSLCTTGTQKSRIEVWEPLPRFPKMYGYAWIPRQKFAAGAGPSWRTSVKAVQKGNVGSKPHHRDPTGALPSGAVRRGPPSSRPQNGRSTGSLHRVPGKVAGTQCQSVKPANGSVSLGSMAIFTILILPTHERGMFFHLFVSSFISLSSGL

SEQ ID NO: 45310 - protein, 1335 aa, Homo sapiens
  DOMAIN (246)..(291): kw TRANSCRIPTASE REVERSE II ORF2 domain identified by eMATRIX, accession number DM01354N, p-value=1.000e-40, raw score of 13.17
MGKKQNRKTGNSKTQSASPPPKERSSSPATEQSWMENDFDELREEGFRRSNYSELWEDIQTKGKEVENFEKNLEECITRITNTEKCLKELMELKTKARELREECRSLRSRCDQLEERVSAMEDEMNEMKREGKFREKRIKRNEQSLQEIWDYVKRPNLRLIGVPESDVENGTKLENTLQDIIQENFPNLARQANVQIQEIQRTPQRYSSRRATPRHIIVRFTKVEMKEKMLRAAREKEIQTTIREYYKHLYANKLENLEEMDTFLDTYTLPRLNQEEVESLNRPITGSEIVAIINSLPTKKSPGPDGFTAEFYQRYKEELVPFLLKLFQSIEKEGILPNSFYEASIILIPKPGRDTTKKENFRPISLMNIDAKILNKILANRIQQHIKKLIHHDQVGFIPGMQGWFNIRKSINVIQHINRAKDKNHMIISIDAEKAFDKIQQPFMLKTLNKLGIDGTYFKIIRAIYDKPTANIILNGQKLEAFPLKTGTRQGCPLSPLLFNIVLEVLARAIRQEKEIKGIQLGKEEVKLSLFADDMIVYLENPIVSAQNLLKLISNFSKVSGYKINVQKSQAFLYTNNRQTESQIMGELPFTIASKRIKYLGIQLTRDVKDLFKENYKPLLKEIKEDTNKWKNIPCSWVGRINIVKMAILPKVIYRFNAIPIKLPMTFFTELEKTTLKFIWNQKRARIAKSILSQKNKAGGITLPDFKLYYKATVTKTAWYWYQNRDIDQWNRTEPSEIMPHIYNYLIFDKPEKNKQWGKDSLFNKWCWENWLAICRKLKLDPFLTPYTKINSRWIKDLNVKPKTIKTLEENLGITIQDIGVGKDFMSKTPKAMATKDKIDKWDLIKLKSFCTAKETTIRVNRQPTTWEKIFATYSSDKGLISRIYNELKQIYKKKTNNPIKKWAKDMNRHFSKEDIYAAKKHMKKCSSSLAIREMQIKTTMRYHLTPVRMAIIKKSGNNRDNTKEALLCNNLVAEVLEAKQAQKLQGKAAVLSLSKIYAITETNAETPNRKMKIKLKRPMTKLHPSIQMLVVTSRPMKWEICLMGHFNQENLNEQPNLEITRREQKEQTHNPRTTSPTPLSMTDINNQHEHSFPQNAAKAQETISLVSAGVILSATLTSPPPTPLFDPATSFQMQEETAQLTHKGPSQQSADKTSTLAARQSSHCIIQHFSLRCHEGDSAQTLCPSERPSRTLLLNGRPHGSSGRLFQNSLGLSSTTDPGCGWFTGLDCPEHSWPGKTGQKECWWQGGSREQHLLFLPHLGPLLLSLSFTKNIEKGAGHSTWAAGSDAQHGAAIDPPPPLQLHVCFSETTKFKTPNCQGRIFRERPIQPAVIHV

SEQ ID NO: 45311 - protein, 807 aa, Homo sapiens
  DOMAIN (187)..(226): PROTEIN ZINC FINGER ZINC-FINGER METAL-BINDING NU domain identified by eMATRIX, accession number PD01066, p-value=8.744e-31, raw score of 19.43
SIGFPVMLVLSILLYTCEMFQDSVAFEDVAVTFTQEEWALLDPSQKNLCRDVMQETFRNLASIDDMIVYLENPIISAQNLLKLISNFSKVSGYKINVQKSQAFLYTNNRQTESQIMSELPFTIASKRIKYLGIQLTRDVKDLFKENYKPLLKEIKEDTNKWKSITCTWVGRINIVKMAILPKDSVVFEDVDVSFTQEEWALLDPSQKNLYRDVMQETFGNLSSIVLEAYGPKRFAAKLRNVGLPLYLPNGCAPNLSLILGGAGAKLEDMAAAYTAFARHGKAGKLRLQPDDPLLERPLMSSGAAWIIRRIMADEAQPLPDSALPRVAPLAWKTGTSYGYRDAWAIGVNARYVIGIWTGRPDGTPVVGQFGFASAVPLLNQVNNILLSRSANLPEDPRPNSVTRGVICWPGGQSLPEGDGNCRRRLATWLLDGSQPPTLLLPEQEGINGIRFPIWLDENGKLYGSQRRANPISAFRTLCRRENRVTGIRNVTARVDNTAITVMFQRREVVGLMSAGNIAPNMQALRGDPRLPEEQVFPAIPATGNQRKSVAHHVTDSVGPKLPSSGPRQGTGSKRTGVIMLDSICSEPQITPGTAEGFVVNMYATGYEITRTRDAINNVEALLGAESAVVKQGSRSEQVIPASETCGNATCGVPLPSVDTINALNRLKAYDKLSLDQRSQMRRIMLCVSDTIDKVVKIPGVSADDQRLLKKLKSDMLSTIEYAPVWIIMAVALALGIGTMIGGAVWQRLSVRKSSRRIVELLYEPRRASDDSITRGDITHQRTTIHACIERSKSYRVHDSGLDYSASR

SEQ ID NO: 45312 - protein, 1534 aa, Homo sapiens
  DOMAIN (336)..(377): kw TRANSCRIPTASE REVERSE II ORF2 domain identified by eMATRIX, accession number DM01354I, p-value=1.000e-40, raw score of 15.55
MGKKQNRKTGNSKTQSASPPPKERSSSPATEQSWMENDFDELREEGFRRSNYSELREDIQTKGKEVENFEKNLEECITRITNTEKCLKELMELKTKARKLREECRSLRSRCDQLEERVSAMEDEMNEMKREGKFREKRIKRNEQSLQEIWDYVKRPNLRLIGVPESDVENGTKLENTLQDIIQENFPNLARQANVQIQEIQRTPQRYSSRRATPRHIIVRFTKVEMKEKMLRAAREKDRSTRQKVNKDTQELNSALHQADLIDIYRTLHPKSTEYTFFSAPHHTYSKIDHIVGSKALLSKCKRTEIITNYLSDHSAIKLELRIKNLTQSRSTTWKLNNLLLNDYWVHNEMKAEIKMFFETNENKDTTYQNLWDALKAVCRGKFIALNAHKGKQERSEIDTLTSQLKELEKQEQTHSKASRRQEITKIRAELKEIETQKTLQKINESRSWFFERINKIDRPLARLIKKKREKNQIDTIKNDKGDITTDPTEIQTTIREYYKHLYANKLENLEEMDTFLDTYTLPRLNQEEVESLNRPITGSEIVAIINSLPTKKSPGPDGFTAEFYQRYKEELVPFLLKLFQSIGKEGILPNSFYEASIILTPKPGRDTTKKENFRPISLMNIDAKILNKILANRIQQHIKKLIHHDQVGFIPGMQGWFNIRKSINVIQHINRAKDKNHMIISIDAEKAFDKIQQPFMLKTLNKLGIDGTYFKIIRAIYDKPTANIILNGQKLEAFPLKTGTRQGCPLSPLLFNIVLEVLARAIRQEKEIKGIQLGKEEVKLSLFADDMIVYLENPIVSAQNLLKLISNFSKVSGYKINVQKSQAFLYTNNRQTESQIMGELPFTIASKRIKYLGIQLTRDVKDLFKENYKPLLKEIKEDTNKWKNIPCSWVGRINIVKMAILPKVIYRFNAIPIKLPMTFFTELEKTTLKFIWNQKRARIAKSILSQKNKAGGITLPDFKLYYKATVTKTAWYWYQNRDIDQWNRTEPSEIMPHIYNYLIFDKPEKNKQWGKDSLFNKWCWENWLAICRKLKLDPFLTPYTKINSRWIKDLNVRPKTIKTLEENLGITIQDIGVGKDFMSKTPKAMATKAKIDKWDLIKLKSFCTAKETTIRVNRQPTTWEKIFATYSSDKGLISRIYNELKQIYKKKTNNPIKKWAKDMNRHFSKEDIYAAKKHMKKCSSSLAIREMQIKTTMRYHLTPVRMAIIKKSGNNSSREAAPKPPRRRRRRSRILSRLLAKSGRPEAAANSSQLLPIRWAKQHASCASLLGAEPVSEGLGRLHSLALHTTYVEARPARGAQRKPAPGEALAGSQTRTQTWVRVGDLPVISDLPIALNLRKPCHLKPPNGAYQSVLQSVREAERGITEPPDIGCNLMGRSDSRNSTMAIDVPAHALCRSLGNLFKALPPPESIMTSVAGTKVRIIRKHDHSSAPAYARYPAQRRSRFLSPPETHQPQAHIYTKFFRRPSLLLDILPLCNTLINPTWFSHSAAMNIHGIKRNESMSFAGAWMELEVIILSKLTQEQKTKYRKFSLISGH

SEQ ID NO: 45313 - protein, 1602 aa, Homo sapiens
  DOMAIN (388)..(413): 7 kw REVERSE TRANSCRIPTASE RNA POLYMERASE domain identified by eMATRIX, accession number DM00895E, p-value=3.333e-11, raw score of 15.72
MVKGSIQQEELTILNIYAPNTGAPRFIKQLLSDLQRDLDSHTLIMGDFNTPLSTLDRSTRQKVNKDTQELNSALHQADLIDIYRTLHPKSTEYTLFSAPHHTYSKIDHILGSKALLSKCKRTEIITNYLSDHSAIKLELRIKNLTQSRSTTWKLNNLLLNDYWVHNEMKAEIKMFFETNENKDTTYQNLWDAFKAVCRGKFIALNAYKRKQERSKIDTLTSQLKELEKQEINKIDRPLARLIKKKREKNQIDTIKNDKGDITTDPTEIQTTIREYYKHLYTNKLENLEEMDTFLDTYTLPRLNQEEVESLNRPITGSEIVAIINSLPTKKSPGPDGFTAEFYQRYKEELVPFLLKLFQSIEKEGILPNSFYEASIILIPKPGRDTTEKENFRPISLMNIDAKILNKILANRIQQHIKKLIHHDQVGFIPGMQGWFNIRKSINVIQHINRAKDKNHMIISIDAEKAFDKIQQPFMLKTLNKLGIDGMYFKIIRAIYDKPTANIILNGQKLEAFPLKTGTTQGCPLSPLLFNIVLEVLARAIRQEKEIKGIQLGKEEVKLSLFADDMIVYLENPIVSAQNLLKLISNFSKVSGYKINVQKSQAFLYTNNRQTESQIMSELPFTIASKTIKYLGIQLTRDVKDLFKENYKPLLKEIKEDTNKWKNIPCSWVGRINIVKMAILPKVIYRFNAIPIKLPMTFFTELEKTTLKFIWNQKRARIAKSILSQKNKAGGITLPDFKLYYKATVTKTAWYWYQNRDIDQWNRTEPSEIMPHIYNYLIFDKPEKNKQWGKDSLFNKWCWENWLAICRKLKLDPFLTPYTKINPRWIKDLNVRPKTIKTLEENLGITFQDIGVGKDFMSKTPKAMATKAKIDKWDLIKLKSFCTAKETTMRVNRQPTTWEKIFATYASDKGLISRIYNELKQIYKKKTNNPIKKWAKDMNRHFSKEDIYAAKKHMKKCSSSLAIREMQIKTTMRYHLTPVRMAIIKKSGNNRSWYFEKINKIDRLLARLIKKKREKNQIDAIKNDKGDITTDPTEIQTTTREYYKHLYANKLENLEEMDKFLDTYNLPRLKQEEVESLNRPIRGSEIVAIINSLPTKKSPGPDGFTAEFYHRYKEELVPLLLKLFQSIEKEVILPNSFYEASIILIPKPDRDTAKKENFRPISLMNIDAKILNKILANRIQQHIKKLIHHDQVGFIPGMQGWFNIRKSVNVIQHINRTKDKNHMIISIDAEKSFDKIQQHFMLKTLNKLGIDGSYLKIIRATYDKPTANIILNGQKLEAFPLKTGTRHGCPLSPLLFNIVLEVLARAIRQEKEIKGIQLGKEEVKLSLFIDDMIVYLENPIISAQNLLKLISNFSKVSGYKINVQKSQAFLYTNNRQTESQIMSELPFTIASKRIKYLGIQLTRDVKDLFKENYKPLLEEIKEDPNKCKNIPCSWVGRIYIVKMAILPKCSSSAKGQTASASGSLTPLPPDGERPPKTGRQTPHTGELRLASGQYPAGMELPEEGAGSNLCCSAATTARDQNWMENQFDELTEVGFGKWVITNSSELKEHVLIQCKEAKNLHKRLQELLTRITSLERNINDLMELKNTVRELREAYTSINSQIN

SEQ ID NO: 45314 - protein, 1655 aa, Homo sapiens
  DOMAIN (1376)..(1422): ELEMENT TRANSPOSASE FOR TRANSPOSON TRANSPOSABLE domain identified by eMATRIX, accession number PD02712E, p-value=4.231e- 38, raw score of 17.07
TWKGTTSTSRCKIMPKYRSTRQKVNKDTQELNSALHQADLIDIYRTLHTKSTEYTFFSAPHHTYSKIDHIVGSKALLSKCKRTEIITNYLSDHSAIKLELRIKNLNQSRSTTWKLNNLLLNDYWVHNEMKAEIKMFFETNENKDTTYQNLWDAFKAVCRGKFIALNAHKRKQERSKIDTLTSQLKELEKQEQTHSKASRRQEITKIRAELKEIETQKTLQKINESRSWFFERINKIDRPLARLIKKKREENQIDTIKNDKGDITTDPTEIQTTIREYYKHLYANKLENLEEMDKFLDTYTLPRLNQEEVESLNRPITGAEIVAIINSLPTKKSPGPDGFTAEFYQRYKEELVPFLLKLFQSIEKEGILPNSFYEASIILIPKPGRDTTKKENFRPISLMNIDAKLLNKILANRIQQHIKKLIHHDQVGFIPGMQGWFNIRKSINVIQHINRAKDKNHMIISIDAEKAFDKIQQPFMLKTLNKLGIDGTYYFKIIRAIHDKPTANIILNGQKLEAFPLKTGTRQGCPLSPLLFNIVLEVLARAIRQEKEIKGIQLGKEEVKLSLFADDMIVYLENPIVSARNLLKLISNFSKVSGYKINVQKSQAFLCTNNTQTESQIMSELPFTIASKRIKYLGIQLTRDVKDLFKENYKPLLKEIKEDTNKWKNIPCSWVGRINIVKMAILPKVISRFNAIPIKLPMTFFTELEKTTLKFIWNQKRARITKSILSQKNKAGGITLPDFKLYYKPTVTKTAWYWYQNRDIDQWNRTEPSEITPHTYNYLIFDKPEKNKQWGKDSLFNKWCWENWLAICRKLKLDPFLTPYTKINSRWIKDLNVRPKTIKTLEENLGITIQDIGVGKDFMSKTPKAMATKAKIGKWYLIKLKSFCTAKETTIRVNRQPTTWEKIFATYSSDKGLISRIYNELKQIYKKKTNNPIKKWAKDMNRHFSKEDIYAAKKYVKKCSSSLAIREMQIKTTMRYHLTPVRMAIIKKSGNNSKKNKAGGIMPADFKLYYKAMGTKTAWDMDETENHHAQQTNTRTEKQTPHVLTHKWELNNENTWTQGRKHHTSGPVNSCLEKQEEPPSLLRLNNRIKQLLPPVDLTELLLEIDAQTGFTHEFAHVSESGARAQDLHISLCAVLMAEACNIGLEPLIKHNIPALTRHRLSWVKQNYLRAETLVRANARLVDFQSTLELAGRWGGGEVASADGMRLVTPVKTINSGSNRKYFCSGRGITWYNFVSDRYSGFHGIVVPGTLRDSIFVREGLLEQQTGLNPVEIMTDIAGSSDIIFGLFWLLGYQFSPRLADAGEAVFWRVNKSANYGVLDKLARGYADLSKAESQWDEMMRTAGSLKLGTIHASELIRSLLKSSRPSGLAQAIMEVGRVNKTLYLLNYIDDEDYRRRILTQLNRGEGRHAVARAICYGQRGEIRKRYREGQEDQLGALGLVTNAVVLWHTLYMEEALSWMRRNGEEIIDEDIAWLSPLMHGHINMAIRQEKEIKGIQLGKEEVKWSLFADDMIVYLENPIASAQNLLKLISNFSKVSGYKINVQKSQAFLYTNNRQTESQIMSELPFTIASKRIKYLGIQLTRDVKDLFKENYKPMLNEIKEDTNKWKNIPCSWIGRINIVKMAILPKLIYRFNAIPIKLPMTFFTELEKTTLKFI

SEQ ID NO: 45315 - protein, 2775 aa, Homo sapiens
  DOMAIN (532)..(573): kw TRANSCRIPTASE REVERSE II ORF2 domain identified by eMATRIX, accession number DM01354I, p-value=1.000e-40, raw score of 15.55
RKVFFIALKRMPAMKKAMNLFLGLSNVRTVHPEGFTVYISTHISFPSLSGYKTRLRSFGLVKQKKSPILLEVLAREIRQEKEIKGIQLGKEEVKLSLFADDMIVYLENPIVSAQNLLKLISNFSKVSGYKINVQKSQAFLYTNNRQTESQIMSELPFTIASKRIKYLGIQLTRDVKDLFKQNYKPLLNEIKEDTNKWKNIPCSWVGRINIVKMAILPKERSSSPATEQSWMENDFDELREEGFRRSNFSELKEKVRTHHKQDKNLEKNLEECITRITNTEKCLKELMELKTKARELHEECRSLRSRCDQLEERVSAMEDEMNEMKGEGKFREKRIKRNEQSLQEIWDYVKRPNLHLIGVPESDGENGTKLENTLQDIIQENFPNLARQANVQIQEIQRMPQRYSSRRATPRHIIVRFTKVEMKEKILKAAREKDRSTRQKVNKDTQELNSALHQADLIDIYRTLHPKSTEYTFFSAPHHTYSKIDHILGSKALLSKCERTEIITNYLSDHSAIKLELRIKNLTQNRSTTWKLNNLLLNDYWVHNEMKAEIKMFFETNENKDTTYQNLWDAFKAVCRGKFIALNAHKRKQERSKIDTLTSQLKELEKQEQTHSKASRRQEITKIRAELKEIETQKTFQKINESRSWFFERINKIDRPLARLIKKKREKNQIDTIKNDKGDITTNPTEIQTTIREYYKHLYANKLENLEEMDKFLDTNTLPRLNQEEVESLNRPITGSEIVAIINSLLTKKSPGPDGFTAEFYQRYKEELLGRDTTKKENFRTISLVNIDAKILNKILAKRIQQHVKKLIHYDQVGFIPGMQSWFNIRKSINVIQHIKRAKDRNHMIISIDAEKAFDKIQQPFMLKTLNKLGIDGTYFKIIRVIYDKPTANIILNGQQLEAFPLKTGTRQGCPPSPLLFNIVLEVLARAIRQEKEIKGIQLGKEEVKLSLFADHMIVYLENPIVSAQNLLKLISNFSKVSGYKINVQKSQAFLYTNNRQTESQIMSELPFTIASKRIKYLGIQLTRDVKDLFKENYKPLLKEIKEDTNKWKNIPCSWVGRINIVKMAILPKVIYRFNAIPIKLPMPFFTELEKTTLRFIWNQKRACIAKAILSQKNKAGGITLPDFKLYYKATVTKTAWYWYQNRDIDQCNRTEPSEITLHICNYLIFDKPEKNKQWGKDSLFNKWCWENWLAICRKLKLDPFLTPYTKINSRWIKDLNVRPKTIKTLEEKLGITIQDIGIGKDFMSKTPKAMATKDKIDKWDLIKLKSFCTAKETTIRVNRQPTKWEEIFATYSSDKGLISRIYNGLKQIYKKKTNNPIKKWAKDMNRHFSKEDIYAAKKHVKKCSSSLAIREMQIKTTMRYHLTPVRMAIIKKSGSNRCWRGCGEIGTLLHCWWDCKLVQPLWKSVWRFLRDLELEIPFDPAIPLLGIYPNDYKSCCYKDTCTLSLPEIRNCPTKSVPVPFSVDETQYHVEDTSPVSWQVKVLGKHIHQGSSYEDVWLPQRMQGKLTNRKDIHTKNPSVHHHHQRPKVDKTTKMGKKQNRKTGNSKKQSASPPPKERSSSPAMQQSWTENDFDELREEGFRRSNYSELREDIQTKGKEVENFEKNLEECITRITNTEKCLKELMELKTKARELREECRSLRSRCDQLEERVSAMEDEMNEMKREGKFRDKRIKRNEQSLQEIWDYVKRPNLRLIGVPESDVENGTKLENTLQDIIQENFPSLARQANVQIQEIQRTPQRYSSRRATPRHIIVRFTKVEMKEKMLRAAREKGRVTLKGKPIRLTADLSAETLQARREWGPIFNILKEKNFQPRISYPAKLSFISEGEIKYFIDKQMLRDFVTTRPALKELLKEALNMERNNRRKQERSKIDTLTSQLKELEKQEQTHSKASRRQEITKIRAELKEIETQKTLQKINESRSWFFERINKIDRPLARLIKKKREKNQIDTIKNDKGDITTDPTEIQTTIREYYKHLYANKLENLEEMDTFLDTYTLPRLNQEEVESLNRPITGSEIVAIINSLPTKKSPGPDGFTAEFYQRYKEELVPFLLKLFQSIEKEGILPNSFYEASIILIPKPGRDTTKKENFRPISLMNIDAKILNKILANRIQQHIKKLIHHDQVGFIPGMQGWFNIRKSINVIQHINRAKDKNHMIISIDAEKAFDKIQQPFMLKTLNKLGIDGKYFKIIRAIYDKPTANIILNGQKLEAFPLKTGTRQGCPLSPLLFNIVLEVLARAIKQEKEIKGIQLGKEEVKLSVFADDMIVYLENPIVSAQNLLKLISNFSKVSGYKINVQKSQAFLYTNNRQTESQIMSELPFTIASKRIKYLGIQLTRDVKDLFKENYKPLLKEIKEDTNKWKNIPCSWVGRINIVKMAILPKVIYRFNAIPIKLPMTFFTELEKTTLKFIWNQKRARIAKSILSQKNKAGGITLPDFKLYYKATVTKTAWYWYQNRDIDQWNRTEPSEIMPHIYNYLIFDKPEKNKQWGKDSLFNKWCWENWLAICRKLKLDPFLTPYTKINSRWIKDLNVRLKTIKTLEENLGITIQDIGVGKDFMSKTPKAMATKAKIDKWDLIKLKSFCTAKETTIRVNRQPTTWEKIFATYSSDKGLISRIYNELKQIYKKKTNNPIKKWAKDMNRHFSKEDIYAAKKHMKKCSSSLAIREMQIKTTMRYHLTPVRMAIIKKSGNNRRTATLSLLPAIRHEREAFHQREEEKEGGRILLLQNRVILCSCSLCPHLSPASKPKHRGLGRFKSQSTSMFSGVLSVRNSLHAPQVVSWLQR

SEQ ID NO: 45316 - protein, 1085 aa, Homo sapiens
  DOMAIN (194)..(235): kw TRANSCRIPTASE REVERSE II ORF2 domain identified by eMATRIX, accession number DM01354I, p-value=1.000e-40, raw score of 15.55
WRKIYQANGKQKKAGVAILVSDKTDFKPTKIKRDKEGHYIMVKGSIQQEELTILNIYAPNTGAPRFIKQVLSDLQRDLDSHTLIMGDFNTPLSTLDRLMRQKVNKDTQELNSALHQVDLIDIYRTLHPKSTEYTFFSAPHHTYSKIDHILGSKALLSKCKRTEIITNYLSDHSAIKLELRIKNLTQSRSTTWKLNNLLLNDYWVHNEMKAEIKMFFETNENKDTTYQNLWDAFKAVCRGKFIALNAYKRKQERSKIDTLTSQLKELEKQEQTRSKASRRQEITKIRAELKEIETQKTLQKINESRSWFFERINKIDRPLARLIKKKREKNQIDTIKNDKGDITTDPTEIQTTIREYYKHLYANKLENLEEMDTFLDTYTLPRLNQEEVESLNRPITGSEIVAIINSLPTKKSPGPDGFTAEFYQRYKEELHINRAKDKNHMIISIDAEKAFDKIQQPFMLKTLNKLGIDGTYFKIIRAIYDKPTANIILNGGQKLEAFPFEKLAQEQGCPSLTHSLFNIVLEVLARAIRQDKEIKGIQLGKEEVKLSLFADDMTVCIENPIVSAQNLLKLISNFSKVSGYKINVQKSQAFLYTDNRQTESQIMSELPFTIASKRIKYLGIQLTRDVKDLFKENYKPLLKEIKEDTNKWKNIPCSWVGRINIVKMAIMPKVIYRFNAIPIKLPMPFFTELEKTTLKFIWNQKRARITKSILSQKNKAGGITLPDFKLYYKATVTKTAWYWYQNRDIDQWNRTEPSEITPHIYNYLIFDKPEKNKQWGKDSLFNKWCWENWLAICRKLKLDPFLTPYTKMNSRWIKDLNVRPKTIKTLEENLGITIQDIGMGKDFMSKTPKAMATKAKIDKWDLIKLKSFCTAKETTIRVNRQPTKWEKIFPTYSSDKGLISRIYNELQQIYKKKTNNPIKKWAKDMNRHFSKEDIYAAKKHMKKCSSSLAIREMQIKTAMRYHLTPVRMAIIKKSGNNRCWRGCGEIGTLLHCWWDRKLVQPLWKSVWRFLRDLELEIPFDPAIPLLGIYPNDYKSCCYKDTCTQLSADENCADSIWRGRDDCEHLCIPTGGQGFGDEQEVPAGND

SEQ ID NO: 45317 - protein, 1168 aa, Homo sapiens
  DOMAIN (204)..(245): kw TRANSCRIPTASE REVERSE II ORF2 domain identified by eMATRIX, accession number DM01354I, p-value=1.000e-40, raw score of 15.55
MELKTKARELREECRSLRSPCNQLEERVSAMEDEMNEMKREGKFRDKRIKRNEQSLQEIWDFVKRPNLRLIGVPESDGENGTKLENTLQDIIQENFPNLARQANIQIQEIQRTPQRYSSRRATPRHIIVRFTKVEMKEKMLRAAREKAPHHTYSKIDHILGSKVLLSKCKRTEIITNYLSDHSAIKLELRIKNLTQNHSTTWKLNSLLLNDYWVHNEMKAEIKMFFETNENKDTTYQNLWDTFKAVCRGKFIALNAHKRKQERSKIDTLTSQLKELEKQEQTHSKASRRQEITKIRGELKEIEAQKTLQKINEYRSWFFERINKIDRPLARLIKKKREKNQIDTIKNDKGDITTDPTEIQITIREYYKHLYANKLENLEEMDKFLDTYTLPRLNQEVVESLKRPITGAEIVAIINSLPTKKSPGPDGFTAEFYQRYKEELIILIPKPGRDTTKKENFRPISLMNIDAKILNKILANRIQQHIKKLIHHDQVGFIPGMQGWLNICKSINVIQHINRAKDKNHMIISIDAEKAFDKIQQPFMLKTLNKLGIDGMYFKIIRAIYDKPTANIILNGQKLEAFPLETGTRQGCPLSPLLFNIVLEVLARAIRQEKEIKGIQLGKEEVKLSLFADDMIVYLENPIVSAQNLLKLISNFSKVSGYKINVQKSQAFLYTNNRQTERQIMSELPFTIASKRIKYLGIQLTRDVKDLFKENYKPLLKEIKEDTNKWKNIPCSWVGGRINLVKMAILPKVIYRFNAIPIKLPMTFFTELEKTTLKFIWNQKRALIAKSSLSQKNKTGGITLPDFKLYYKATVTKTSWYWYQNRDIDQWNRTEPSEIMPHIYNYLIFDKPDKNKQWGKDSLFNKWCWENWLAICTKLKLDPFLTPYTKINSRWIKDLNVRPKTIKTLEENLGITIQDIGVGKDFMSKTPKAMATKAKIDKWDLIKLKSFYTAKETTIRVNRQPTEWEKIFATYSSDKGLISRIYNELKQIYKKKTNNPIKKWARDMNRHFSKKDIYAAKKHMKKCSSSLAIREMQIKTTMRYHLTPVRMAIIKKSGNNRIRRHFQPRSAMFFCCCPGGEGSGLQWELLLAAWTVLPYPCPAATVGRFLKQAQTADHSFLGHVWRVPSSRSWTDKEILSLVVNRQNQEVVQLIGGLCGTHTISPTQHPATG

SEQ ID NO: 45318 - protein, 1388 aa, Homo sapiens
  DOMAIN (191)..(232): kw TRANSCRIPTASE REVERSE II ORF2 domain identified by eMATRIX, accession number DM01354I, p-value=1.000e-40, raw score of 15.55
  misc_feature (1)...(1388): Xaa = X or * as defined in Table 2
MYQANGKQKKAGVAILVSDKTDFKPTKIKRDKEGHYIMVKGSIQQEELTILNIYAPNTGAPTFIQQVLSDLQRDLDSHTLIIGDFNTPLSTSDRSTRQKVNKDTQELNSALHQADLIDIYRTLHPKSTEYTFFSAPHHTYSKIDHILGSKALLSKCKRTEIITNYLSDHSAIKLELMIKNLTQNHSTIWKLNNLLLNDYWVHKEMKAEIKMFFETNENKDTTYQNLWDTFKAVCRGKFIALNAHKRKQERSKIDTLTSQLKELEKQEQTLSKASRRQEITKIRAELKEIETQKTLQKINESRSRFFERINKIDSLLARLIKKKREKNQIDAIKNDKGDITTNPTEIQTTIREYYKHLYANKLENLEEMDKFLDTYTLPRLNQEEVESLNRPITGAEIVAIINSLPTKKSPGPDGFTAEFYQRYKEEQVPFLLKLFQSIEKEGILPNSFYVSSIILIPKPGRDTTKRENFRPISLMNIDAKILNKILANRIQQHIKKLIHHDQVGFIPGMQGWFNICKSINVIQHINRTKDKNHMIISIDAEKAFDKIQQPFMLKTLNKLDIDGLEVLARAIRQEKEIKGIQSGKEEVKLSLFADDMIAYLENPIVSAQNLLKLISNFNKVSGYKINVQKSQAFLCTNNRQTESQIMSELPFTIASKRIKYLGIQLTRDVKDLLQGDLQTTAQMGKDFMSKTPKAMATKAKIDKWDLIKLKSFCTAKETTIRVNRQPTTWEKIFTTYSSDKGLISRIYNELKQIYKKKTNNPIKKWVKDMNRHFSKEDIYAAKKHMKKCSSSLAIREMQIKSFQRKDQAAIFAILQPPLVITRQTGSGVDLKQTPTDLKLRDLTVRRKMNKQKGHPHQNPISSRRQEITKIRAELKKIETQKPFKKINESRSWFFEKINKIDRLLARLIKKKIEKNQIDAIKNDKGNITTNPTEIQTTIREYYKHLYANKLEHLEEMDKFLDIYTLPRLNQEEVESVNRPITGSEIEAIINSLPTKKSPGPDRFTAELYQRYKEELVPFLLKLFQSIEKEGILPNSFYEASIILISKPGRDTTKKENFRPISLMNIDAKILNKILANQIQQHIKKLIHHHQVGFIPGMQGWFNILKSINVIHHINRTKDKNHMIISIEAEKAFDKIQQPFMLKTLNKLGIDGTYLTYLKIIRAIYDKPTANIILNGQKLEAFPFKTGTRQGCPLSPLLFNIVLEALARAIRQEKEIKGIQLGKEDVKLSLFADDMIVYLENPIVSAQNLLKLISNFSEVSGYKINVQKSQAFLYTNNRQTESQIMSELPFTIASKRIKYLGIQLTRDVKDLFKENYKPLLNEIKEDTNKWKNIPCSWIGRINIVKMAILPKTLNQKFSYWFRVNKHYIHQRTFPLKETEFNTIATLYNX

SEQ ID NO: 45319 - protein, 1036 aa, Homo sapiens
  DOMAIN (316)..(361): kw TRANSCRIPTASE REVERSE II ORF2 domain identified by eMATRIX, accession number DM01354N, p-value=1.000e-40, raw score of 13.17
MVKGSIQQEELTILNIYAPNTGAPRFIKQVLSDLQRDLDSHTLIMGDFNTPLSTLDRSTRQKVNKDTQELNSALHQADLIDINRTLHPKSTEYTFFSAPHHTYSKIDHIVGSKALLSKCKRTEIITNYLSDHSAIKLELRIKNLTQSRSTPWKLNNLLLNDYWVHNEMKAEIKMFFETNKNKDTTYQNLWDAFKAVCRGKFIALNAYKRKQERSKIDTLTSQLKELEKQEQTHSKASRRQEITKIRAELKEIETQKTLQKINESRSWFFERINKIDRPLARLIKKKREKNQIDTIKNDKGDITTDPTEIQTTIREYYKHLYANKLENLEEMDTFLDTYTLPRLNQEEVESLNRPITGSEIVAIINSLPTKKSPGPDGFTAEFYQRYKEELHINRAKDKNHMIISIDAEKAFDKIQQRFMLKTLNKLVLEVLARAIRQEKEIKGIQLGKEEVKFSLFADDMIVYLENPIVSAQNLLKLISNFSKVSGYKINVQKSQAFLYTNNRQTESQIMSELPFIIASKRIKYLGIQLTRDVKDLFKENYKPLLKEIKEDTNKCKNIPCSWVGRINIVKMAILPKVIYRFNAIPIKLPMPFFTELEKTTLKFIWNQKRARIAKSILSQKNKAGGIMLPDFKPYYKATVTKTAWYWYQKRDIDQWNRTEPSEITPHIYNYLIFDKPEKNKQWGKDSLFNKWCWENWLAICRKLKLDPFLTPYTKINSRWIKDLNVRPKTIKTLEENLGNTIQDIGMGKDFMSKTPKAMATKDKIDKWDLIKLKSFCTAKETTIRVNRQPTKWEKIFTTYSSDKGLISRIYNELKQIYKKKTNNPIKKWAKDMNRHFSKEDIYTAKRHMKKCSSSLAIREIQIKPTMRYYLTPVRMAIIKKSGNNRSQLQNIVQRTCSESNIKRRAGIEKGIQWAKDANCSQESPVRPSQQVGAPLGRSFQRKDQAAIFAVLQPLLVIPRQTRSGVDLQHIPAGLQQRGLTVRRKTNKQKGIASTSTKATSTQKPHPKVTNIKDQSIGSSGQGNQARERNKGYSIRK

SEQ ID NO: 45320 - protein, 1843 aa, Homo sapiens
  DOMAIN (1508)..(1540): ABC transporters family proteins domain identified by eMATRIX, accession number BL00211B, p-value=3.250e-18, raw score of 13.37
MELKTKARELREECRSLRSRRNQLEERVSAMEDEMNEMKREGKFREKRIKRNEQSLQEIWDYVKRPNLRLIGVPESDAENGTKLENTLQDIIQEDFPNLARQANVQIQEIQRTPQRYSSRRATPRHIIVRFTKVEMKQKMLRAAREKDFKPTKIKRDKEGHYIMVKGSIQQEELTILNIYAPNTGAPRFIKQVLSDLQRDLDSHTLIMGDFNTPLSTLDRSTRQKVNKDTQELNSALHQADLIDIYRTLHPKSTEYTFFSAPHHTYSKIDHIVGSKALLSKCKRTQIITNYLSDHSAIKLELRIKNLTQSRSTTWKLNNLLLNDYWVHNEMKAEIKMFFETNENKDTTYQNLWDAFKAVCRGKFLALNAHKRKQERSKIDTLTSQLKEQEKQEQTHSKASRRQEITKIRAELKEIETQKTFQKINESRSWFFERINKIDRPLARLIKKKREKNQIDTIKNDKGDITTDPTEIHTTIREYYKNLYAKKLENLEEMDKFLETYTLPRPNQEEVESLNRPITGSEIVAIINSLPTKKSPGPDGFTAEFYQRYKEELVPFLLKLFQSIEKEGILPNSFDEASIILIPKLGRDTTKKENFRPIPLMNTDAKILNKILANRIQQHIKKLIHHDQVGFIPGMQGWFNVRKSINVIQHINRTNDKNHMIISIDGEKAFDKIQQPFMLKTLNKFGIDGMYLKIIRAIYDKLTANIILNGQKWEAFPLKTGTRQGCPLSPLLFNIVLEVLARAIRQEKETKGIQLGKEEVKLSLFADDMIVYLENPIVSAQNLLKLISNFSKVSGYKINVQKSQAFLYTNNRQTESQIMSELPFTIASKRIKYLGIQLTRDVKDLFKENYKPLLKEIKEDTNKWKNIPCSWVGRINIVKMAILPKVIYRFNAIPIKLPMTFFTELEKTTLKFIWNQKRARQKIAKSILSQKNKARGITLPDFKLYYKATVTKTAWHWYQNSMYWYQNRDIDQWNRTEPSEIMPHIYTILIFDKPLLEKNKQWGKDSLFIKWCWENWLAICRKLNLDPFLTPYTKINSRWIKDLNVRPKTIKTLEENLGITIQDIGVGKDFMSKTPKAMATKAKVDKWDLIKLKSFCTICTAKETTIRVNRQPTTWEKIFATYSSDKGLISRIYNELKQIYKKKTNNPIKKWAKDMNRHFSKEDIYAAKKHMKKCSSSLAIREMQIKTTMRYHLTPVRMAIIKKSGNNRDQRAGKISERLVITSEMIENIQSVKAYCWEEAMEKMIENLRQTELKLTRKAAYVRYFNSSAFFFSGFFVVFLSVLPYALIKGIILRKIFTTISFCIVLRMAVTRQFPWAVQTWYDSLGAINKIQDFLQKQEYKTLEYNLTTTEVVMENVTAFWEEGFGELFEKAKQNNNNRKTSNGDDSLFFSNFSLLGTPVLKDINFKIERGQLLAVAGSTGAGKTSLLMVIMGELEPSEGKIKHSGRISFCSQFSWIMPGTIKENIIFGVSYDEYRYRSVIKACQLEEDISKFAEKDNIVLGEGGITLSGGQRARISLARAVYKDADLYLLDSPFGYLDVLTEKEIFESCVCKLMANKTRILVTSKMEHLKKADKILILHEGSSYFYGTFSELQNLQPDFSSKLMGCDSFDQFSAERRNSILTETLHRFSLEGDAPVSWTETKKQSFKQTGEFGEKRKNSILNPINSIRKFSIVQKTPLQMNGIEEDSDEPLERRLSLVPDSEQGEAILPRISVISTGPTLQARRRQSVLNLMTHSVNQGQNIHRKTTASTRKVSLAPQANLTELDIYSRRLSQETGLEISEEINEEDLKECFFDDMESIPAVTTWNTYLRYITVHKSLIFVLIWCLVIFLAEWAPVRPEPPR

SEQ ID NO: 45321 - protein, 806 aa, Homo sapiens
  DOMAIN (687)..(734): kw TRANSCRIPTASE REVERSE II ORF2 domain identified by eMATRIX, accession number DM01354V, p-value=1.000e-40, raw score of 12.97
MGKKQNRKTGNSKKQSASPPPKERSSSPATEQSWMENDFDEMREEGFRRSNYSELREDIQTKGKEVENFEKNLEECITRITNTEKCLKELMELKTKARELREECRSLRSRCDQLEERVSVMEDEMNEMNDGENGTKLENTLQDIIQENFPNLARQANVQIQEIQRTPQRYSSRRATPRHIIVRFTKVEMKEKMLRAAREKDFKPTKIKREKEGHYIMVKGSIQQEELTILKIYAPNTGAPRFTKQVLSDLQRDLDSHTLIMGDFNTPLSTLDTSTRQKVKKDTQELNSALHQADLIDIYRALHPKSTEYTFFSAPHHTYSKIDHIVGSKALLSKCKRTEIITNYLSDHSAIKLELRIKNLTQNHSTTWKLNNLLLNDYWVHNEVKAEIKVFFETKENKDTTYQNLWDAFKAVCRGKFIALNAHKRKQERSKIDTLTSQLKELEKQEQTHSKASRRQEITNIRAELKEIETQKTLQKINESRSMGKDFMSTTPKAMATKAKIDKWDLIKLKSFCTAKETTITVNRQPTEWEKIFTIYPSDKGLISRIYKELKQIYKKKKKTTPSKSGRRHMNRHFSKEDIYAAKKTHEKNAHHHWPSEKCKSKPQANRQEKERKHIQIGKEEVKLSLFADDMIVYLENPIISAQNLLTLISNFGKVSGYKINVQKSQAFLYTNNRQTESQMMSELPFTIASKRIKYLGIQLTRDVKDLFKENYKPLLKEIKEDTNKWKNIPRSWVGRINIVKMAILPKQSLVTPPGKGGTEANKVCSGPPANCSSPIEEGLDCVKEKQTKRKKQHQQQKTPQKSHPK

SEQ ID NO: 45322 - protein, 607 aa, Homo sapiens
  DOMAIN (264)..(278): ANTHRANILATE SYNTHASE COMPONENT I SIGNATURE domain identified by eMATRIX, accession number PR00095B, p-value=8.650e-16, raw score of 6.36
MYSRFDIVVAEPICTLTTFGKETVVSDSQTRTTTTDDPLQVLQQVLDRADIRPTHNEDLPFQGGALGLFGYDLGRRFESLPDIAEQDIVLPDMAVGIYDWALIVDHQRHTVSLLSHNDVNARRAWLESQQFSPQEDFTLTSDWQSNMTREQYGEKFRQVQEYLHSGDCYQVNLAQRFHATYSGDECQAFLQLNHGNRAPFSAFLRLEQGAILKLSPERFILCDNSEIQTRPIKGTLPRLPDPQEDSKQAVKLANSAKDRAENLMIVDLMRNDIGRVAVAGSVKVPELFVVEPFPAVHHLHHNGATTRTVTRQRSAARSFSWWLNNRGSESTGYGNYRRTGTAATQCLVRHIGYLSFCGNMDTSITIRTLTAINGQIFCSAGGGIVADSQEEAEYQETFDKVNRILKQLENYRRALRDLKEEVAIRLSPFELSAFCSPSIASMATRYPNGRHIPPDLRLPKERGIIIVFTGNGKGKTTAAFGTATRAVGHGKKVGVVQFIKGTWPNGERNLLEPHGVEFQVMATGFTWDTQNRESDTAACREVWQHAKRMLADSSLDMVLLDELTYMVAYDYLPLEEVVQALNERPHQQTVIITGRGCHRDILELADT

SEQ ID NO: 45323 - protein, 541 aa, Homo sapiens
  DOMAIN (38)..(52): ANTHRANILATE SYNTHASE COMPONENT I SIGNATURE domain identified by eMATRIX, accession number PR00095B, p-value=8.650e-16, raw score of 6.36
MGRLAGGGLTPPPPSRTEDSKQAVKLANSAKDRAENLMIVDLMRNDIGRVAVAGSVKVPELFVVEPSLPCIICCRPMGDLQGKHPGSGPKHTGSYACLDTSHLPCHAELQLTPLWALGEGNTKIFETLTLEQYCHLPQYVTIVVRLMIWSSDSGDDNGKKANNPNHCNCIIDQIFTGGLQSDVTCQVCQDYTALVKPRLIQAVSMKMLHRGDVDASDRNLPMSREDSDAHAVEAPASEYTCVLRPSGVRLVLSTCVLNRPRNRSGICSNMNVVYDEQIVKAPCSTCKQSQNFSFELLTAFNNSAYSYEQNLEHICFSLPDYSRIWKLFMSILMAIQLFASVLTAGTGIDVFTTVNVQHLESLNDVVSGVTGIQVRETVPDPFFDAADDVVLVDLPPDDLRQARKKAKSILPGSGRAIEHFFRKGNLIALRELALRRTADRVDEQMRAWRGHPGEEKVWHTRDASFYASAITPAAKNWSAQRGWRHGWVFVADGVFQNGHSDISHPTSSFLQGDFDTSVERKCSPRLAVGTQLLCYQEVRAT

SEQ ID NO: 45324 - protein, 322 aa, Homo sapiens
NSKHYRSGQKKKLPTLPRAANSRWRSLKIGFTVSFDETLKPFVRDVSGSRLKDLPKPNKSDDETRANDAVNRYKLLKKDARTIAAQQVARLESAMCLRRRWSLENFQLFLVEHPLVRHLTRRLIWGVYSAENQLLACFRVAEDNSSSTADDDLFTLPEGDISIGTPHVLEISPTDAAALLFADYELLPPFRQLDRNSYALTEAERNASELTRWAGRKCPSGRVMGLANKGWIKGEPQDGGWIGWMIKPLGRWSLIMEIDEGFAVGMSPAELSAEQLLSKLWLWEGKAERYGWGSNSTQEAQFSVIDAITASELINDIEALFE

SEQ ID NO: 45325 - protein, 596 aa, Homo sapiens
  DOMAIN (353)..(401): kw DIHYDROFLAVONOL YOL151W YDR541C YGL157W domain identified by eMATRIX, accession number DM00934A, p-value=9.596e-14, raw score of 20.07
MFRPFRAGEYVDLGGVAGTVLSVQIFSTTMRTADGKIIVIPNGKIIAGNIINFSREPVRRNEFIIGVAYDSDIDQVKQILTNIIQSEDRILKDREMTVRLNELGASSINFVVRVWSNSGDLQNVYWDVLERIKREFDAAGISFPYPQMDVTLSGYGWRETPNVEEVFHRCGLEGLSCRMMETSFFMSHESLILGKRPWYLRLRGKLYLLLQRNALRAPDQFEIPPNRVIELGTQIKVKNFRLRELAGPHVLNIPTDAAAFGQLFADYELLPPFRQLDRNSYALTEAERNASELTRWAGRKCPSGRVMGLANKGWIKGEPQDGGWIGWMIKPLGRWSLIMEIDEGFAVTVMIIVTGGAGFIGSNIVKALNDKGITDILVVDNLKDGTKFVNLVDLNIADYMDKEDFLIQIMAGEEFGDVEAIFHEGACSSTTEWDGKYMMDNNYQYSKELLHYCLEREIPFLYASSAATYGGRTSDFIESREYEKPLNVYGYSKFLFDEYVRQILPEANSQIVGFRYFNVYGPREGHKGSMASVAFHLNTQLNNGESPKLFEGSENFKRDFVYVGDVADVNLWFLEHRRFRHLQSRYWSCGILPGGS

SEQ ID NO: 45326 - protein, 1016 aa, Homo sapiens
  DOMAIN (940)..(960): Binding-protein-dependent transport systems inner membrane co domain identified by eMATRIX, accession number BL00402B, p-value= 9.182e-14, raw score of 16.55
MRRQDTGRRGRKRRDAGRWQWRYWGKGSFTPMNATWDVAGKGEWHDSTITLTDLSTGFDQLQYGTMTVEKPRLILDKPIVWVRDAQHPSFSGALSLDAGQTLFTGGSVLPPSTLKFSVDGRDPTYFLFKGDLHAGEIGPVRVNGRWDGIRLRGNAWWPKQSLTVFQPLVPPDWKMNLRDGELYAQVAFSAAPEQGFRAGGHGVLKGGSAWMPDNQVNGVDFVLPFRFADGAWHLGTRGPVTLRIAKQRKEMRNNNLRQFKLLGPDVGFDSINDRPMAEELSKLLSKQNEENLLPKTILYCLNPRDNEVLGTMIENGASFAANPLYFDPKNIVELAIEAGCNCVASTYGVLASVSRRYAHRIPFLVKLNHNETLSYPNTYDQTLYASVEQAFNMGAVAVGATIYFGSEESRRQIEEISAAFERAHELGMDGGWIGLMIKPLGRWSLIMEIDEGFAVGMSPAELSAEQLLSKLWLWEGKAERYGWGRKSMDKELPRLADNAQLELKYKKGKTPLSHRRWPGEPVSVITGSLIQTLGDELLQKAEKKKNIVWRYENFSLEWQSAITQAINLIGEHKPSIPARTMAALACIAQNDSQQLLDEIVQQEGLEYATEVVIARQFIARCYESDPLVVTLQYQDEDYGYGYRSETYNEFDLRLRKHLSLAEESCWQRCADKLIAALPGINKVRRPFIALILPEKPEIANELVGLECPRTHFHSKEWLKVVANDPTAVRKLEHYWSQDIFSDREAATCRMKHSATRWPPLPNRLGHPPRSCIEVGAPATHRYRLLGVNPLSFLSSLSPVFSISVATVIGPTPPGTGVMYEARLAASSKYLISPSTTCIRSGQRLPQLTVQALQITFSSDFVGMALSTAYRHENQQDVLTEKGHQQNFSVNGFYGEWLAKFDIKVTYTWLGIAVAMAFTSIPFVVRTVQPVLEELGPEYEEAAETLGATRWQSFCKVVLPELSPALVAGVALSFTRSLGEFGAVIFIAGNIAWKTEVTSLMIFVRLQEFDYPAASAM

SEQ ID NO: 45327 - protein, 1182 aa, Homo sapiens
  DOMAIN (359)..(404): Amino acid permeases proteins domain identified by eMATRIX, accession number BL00218D, p-value=9.280e-35, raw score of 21.49
MGFHLSVATGTGFIALAGVAAEFGVVMLMYLRHAIEAVPSLNNPQTFSEQKLDEALYHGAVLRVRPKAMTVAVIIAGLLPILWGTGAGSEVMSRIAAPMIGGMITAPLLSLFIIPAAYKLMWLHRHRVPLNKKDTQGKGVKNASTVSEDTASNQEPTLHRGLHNRHIQLIALGGAIGTGLFLGIGPAIQMAGPAVLLGYGVAGIIAFLIMRQLGEMVVEEPVSGSFAHFAYKYWGPFAGFLSGWNYWVMFVLVGMAELTAAGIYMQYWFPDVPTWIWAAAFFIIINAVNLVNVRLYGETEFWFALIKVLAIIGMIGFGLWLLFSGHGGEKASIDNLWRYGGFFATGWNGLILSLAVIMFSFGGLELIGITAAEARDPENSIPKAVNQVVYRILLFYIGSLVVLLALYPNIPIDSINTMINTAVMVRMETGSKIGIPNDIGVTIANHEASCSPDKLTSFIIHERGQMGIIAQNKISSLGMLFGAIAWMMGIIHFSFGPFSAPPPTFESIVADKTAEIKRGLLAGIKGEKITTVEKKEDVDVDKILNQSGIALAIAALLCAFIGGMRKENRWGIRGALVFGGGTLAFHTLLFGIGIHFADIPYLFLPDRRFTGLSSLNNARRVIISGHYRQNFCFFSSTFTPCVGRCHSRVQLANSHLVDVDETPPSSAAVHLYATDADSIGNCGTDREFCPCNPIRRHAFCCERLQNGYHRSGYAFHLGHYGDRKVHHCCERFSEIYRRSRGVFISYQNRHNMDDILQNVPNHNIKVIVVTDGERILGLGDQAIGGMGIPIGKLSLYTACGGISPAYTLPVVLDVGTNNQQLLNDPLYMGWRNPRITDDEYYEFVDEFIQAVKQRWPDVLLQFEDFAQKNAMPLLNRYRNEICSFNDDIQGTAAVTVGTLIAASRAAGGQLSEKKIVFLGAGSAGCGIAEMIISQTQREGLSEEAARQKVFMVDRFGLLTDKMPNLLPFQTKLVQKRENLSDWDTDSDVLSLLDVVRNVKPDILIGVSGQTGLFTEEIIREMHKHCPRPIVMPLSNPTSRVEATPQDIIAWTEGNALVATGSPFNPVVWKDKIYPIAQCNNAFIFPGIGLGVIASGASRITDEMLMSASETLAQYSPLVLNGEGMVLPELKDIQKVSRAIAFAVGKMAQQQGVAVKTSAEALQQAIDDNFWQAEYRDYRRTSI

SEQ ID NO: 45328 - protein, 78 aa, Homo sapiens
  misc_feature (1)...(78): Xaa = X or * as defined in Table 2
SPVRCCISAVHRTYHRRTSALLRLAELHRLLEKCASRQWMYENIXSPFRQIAXCLPYSDHKNQRLHGLDSIFLARLLW

SEQ ID NO: 45329 - protein, 125 aa, Homo sapiens
  misc_feature (1)...(125): Xaa = X or * as defined in Table 2
WPLTVPYCGVGYASXAXVADNHRAVGYLSRWAGRKCPSGRVMGLANKGWIKGEPQDGGWIGWMIKPLGRWSLIMEIDEGFAVGMSPAELSAEQLLSKLWLWEGKAERYGWGSNSTQEAQFSVIDA

SEQ ID NO: 45330 - protein, 152 aa, Homo sapiens
  misc_feature (1)...(152): Xaa = X or * as defined in Table 2
DHGVASAATCVYTNEGHRQSYVRVCEYASRTRVSHHCSVXRVLRCEAIRIVSPDRSCXRDPEFSYLALPENYNRLFLPNSTNQTNNRIKTLNSIAIGKLLAAGGVYNGNIEGFRDTAEKLDGRTIDGYDQILNEKTAVIAKATASILLTKRS

SEQ ID NO: 45331 - protein, 128 aa, Homo sapiens
  misc_feature (1)...(128): Xaa = X or * as defined in Table 2
KPFGKLTYKLFEGHAWLVKAEKVRVGYRILGRLTYPFDIRFPALPFGLVLXKGAHFTVPRIWAGHACXLMPMALPMFRWKVTGLLFIPICLVKPSFLTLTIIIAIRRISTSTNCRKTPKQPSRWCKPR

SEQ ID NO: 45332 - protein, 159 aa, Homo sapiens
  misc_feature (1)...(159): Xaa = X or * as defined in Table 2
DGQQLIALHRLALRELQQAVHAGLPQQAKILFDGGSEIGKIPSEIYFCQLVKLILCPVLFPCWRRVAILWRRRDVLFFGSFSFSALVSPHLCGSYLPFVFDVGDRLXLSVGWSKEIWPCKXGFGHLMSVLNTPMKSLVEGFKHFPLAGFGYEYLSFFCR

SEQ ID NO: 45333 - protein, 29 aa, Homo sapiens
HLPPDRPSVSHCHLTLSFALYLRLQARLA

SEQ ID NO: 45334 - protein, 79 aa, Homo sapiens
  misc_feature (1)...(79): Xaa = X or * as defined in Table 2
AMRSAHRCTVFSALLNCWQITPHLTPSVMICGQLLTLVNRCXPSSTIFSIIPLSKQVARMFRSAMSPLNRARCWKVPCN

SEQ ID NO: 45335 - protein, 474 aa, Homo sapiens
  DOMAIN (122)..(143): SPUMAVIRUS ASPARTIC PROTEASE (A9) SIGNATURE domain identified by eMATRIX, accession number PR00920F, p-value=9.713e-09, raw score of 15.77
  misc_feature (1)...(474): Xaa = X or * as defined in Table 2
WRAVPSEPISFILKADTEKYVYLXNSSSAQYSGSCTRAYYLDTQHPTPRLCLIFGGKDSGLMLHLTAELARQMGKKICVLFIDWEAQFSCTINYVQSLRELYTDVIEEFYWDALPLTTQNSLSQYQPEWQCWEPDVEWVRQPPQDAITDPDFFCFYQPGMTFEQFVREFAEWFSQKRPAAMMIGIRADESYNRFVAIASLNKQRFADDKPWTTAAPGGHSWYIYPIYDWKVADIWTWYANHQSLCNPLYNLMYQAGVPLRHMRICEPFGPEQRQGLWLYHVIEPDRWAAIGSPADREEDAEEYLEAIMEARVTVAGMGLVMEVQDYFDGEADRLAKAWLAEYTPQIKSLKDERKEAYRQIVEMSTEPQDVDLVRPANKFEMTRVREGEKEADLPVWKHHLLCDESGNYPALLNHWETKVFEIETKREGFAFWYRNPQYTGQSSLGIAYVEAEQYKIVRPDFLFFAEQDGKMVVD

SEQ ID NO: 45336 - protein, 173 aa, Homo sapiens
PWLENLPVGICWSAVKKMGGTRSLVSCLAVTLVSPQLMNAYLLGQQLPEVWDFGMFSIAKVGYQAQVIPALYLVVVPVCSLILAVFLAHALIGPFGRMIGDGVAFAVRHLMTGSFAPIGAALFGFLYAPLVITGVHQTTLAIDLQMIQSIGCTPVLPVNALSNIDLWHISILV

SEQ ID NO: 45337 - protein, 285 aa, Homo sapiens
  misc_feature (1)...(285): Xaa = X or * as defined in Table 2
APASMTFEQFVREFAVMVFTKRPAAMMIGIRADESYTVLSPSPVXINNVLPTITWTFPQTIYDFLWLIGEAIFFYLPVGICWSAVKKMGGTRSLVSCLAVTLVSPQLMNAYLLGQQLPEVWDFGVCSLILAVFLAHALIGPFGRMIGDGVAFAVRHLMTGSFAPIGAALFGFLYAPLVITGVHQTTLAIDLLMMQSMGGTPVWPLIALSNIAQGSAVIGIIISSRKHNEREIPGEVFPRTGVGKGKSLGXPLHXLQPYRQHLGAGSYSQTLKKQIAESAVRLSIP

SEQ ID NO: 45338 - protein, 145 aa, Homo sapiens
MNPSVSGNGRLALKVANLAERNRIVKSKNAARRLPRRSTLKANRAKRQKVGRVVAVLPAKHRSTAAEYGCDFSGETADPETDALGRNDVHFVRPVHTVTLLLGDKVIPATILGIQSDRVIRGHRFMGEPEFTIDNADQYPEILRD

SEQ ID NO: 45339 - protein, 596 aa, Homo sapiens
  DOMAIN (514)..(569): ELEMENT INSERTION TRANSPOSABLE SEQUENCE TRANSPOSASE FOR domain identified by eMATRIX, accession number PD02662D, p-value= 1.000e-40, raw score of 21.71
WLLYRAHVKGESTEALLPNMVATSLAKLPIPKLMRWGATYVHFVRPVHTVTLLLGDKVIPATILGIQSDRVIRGHRFMGEPEFTIDNADQYPEILRDSGKVIADYEERKAKIKADAEEAARKIGGNADLSETLLEEVASLVEWPVVLTAKFEEKFLAISRTALVPYSADNMYQLVNDVQSYPQFLPGCTGSRILESTPGQMTAAVDVSKAGISKTFTTRNQLTSNQSILMNLVDGPFKKLIGGWKFTPLSQEACRIEFHLDFEFTNKLIELAFGRVFKELAANMVQAFTVRAKEVYSASMRYIYVIVYISYRPPNLLDSHIIGFSSITTHCAVTSHHYNSCDMTMTIHSYVTPYISVRVSLTQTYAPSPSRNLRITDLTIYRAISSEKSIDDTRHIHTIESRCRVCGAHDSRDAERLDRFAQTADEIRIADRGFSSRPECIRSLAFGEADYIVRVHWRGLRWLTAEGMRFDMMGFLRGLDCALISKTRLLSENRRKGRVVQAETLEAAGHVLLLTSLPEDEYSAEQVADCYRLRWQIELAFKRLKSLLHLDALRAKEPELAKVGIFANLLAAFLIDDIIQPSLDFPPRSAGSEKKN

SEQ ID NO: 45340 - protein, 331 aa, Homo sapiens
MSSPLHLFHIHKEGLKLRRLRVRITNEWRYSIGNKAFFSYAFIAPVNRNTDGIDIFAVRFQRANTFGHHRFGFDIATVGGDFHGIALGNAKFIRQRLPDFHKLLWLQNRVQQRVFGPVVEVLGQTIGGSDIRELIGFTQCFGVVFKDTCSRVRDNVWMQRVSSQRRFKRLVVFRERTFRHLIEGKQTPHAFLLHDKRPDAATRRRCAVVRNIPAGPLSAVPFQQLTLRIPRVTLRICGGAVIQNAAVKRPCPCPAQRVTEARRIGVITACHLVAFRRPATGENPAATGGCTVIAQLGERTKLLAFLDDYRTGCRIGNIGQRLTVALHRHFF

SEQ ID NO: 45341 - protein, 1873 aa, Homo sapiens
  DOMAIN (1485)..(1526): SYNTHETASE BETA CHAIN LIGASE PHENYLALANYL-TRNA domain identified by eMATRIX, accession number PD02410B, p-value=1.947e- 39, raw score of 25.05
MSEKTFLVEIGTEELPPKALRSLAESFAANFTAELDNAGLAHGTVQWFAAPRRLALKVANLAEAQPDREIEKRGPAIAQAFDAEGKPSKAAEGWARGCGITVDQAERLTTDKGEWLLYRAHVKGEGTEALLPNMVASSVAKLPIPKLMRWGASDVHFVRPVHTVTLLLGDKVIPATILGIQSDRVIRGHRFMGEPEFTIDNADQYPEILRERGKVIADYEERKAKIKADAEEAARKIGAKAWGTNVEFHVQNQPFPCCTGGGEGHAGFMKMAVQGFQVVEAINGATTEEGAFVQGNRLQAGAFNYSLNRDSDESWYLRSENAYRAEVPLYASMLTQARDYDRIVAGSRSHQTGVNGENNSVRLSIQGGHLGHDNNGGIARGATPESSGSYGFVRLEGDLMRTEVAELLGGSPEQVCVAAEIGMEHNLGLTCDPVAGQVQVPCIERNAIASVKAINAARMALRRTSAPRVSLDKVIETMYETGKDMNAKYRETSRGGLAIKVQVARMQKAQRIIKTYRRNRMIVCTICALVTLASTLSVRFIIFIAPTIAPVTIEPSTNEPITRSGSSIAIGIAPSVIPASPNSQARCEHRGSGYGKCRNHFDGGENGIRAVNAVRHCAQAECISGFIHWPSKTDRVQFAMPESDAEENPSKQMDQQQCLEIEKTLPIPAANVLETVRGLLQHRSFTMSNPNRIRSLIGAFAGSNPAAFHAEDGSGYLFLVEMLTDLNSRNPQVASRLIEPLIRLKRYDAKRQEKMRAALEQLKGLENLSGDLAANEVQILAFFQGDVSFFPVATTTDTLSVTSKDARFIVNLLYLPETHAETSDGAYVHLKPKHSCAEDPVDVYAVSTDTHFTHKAWHSSSETIAKIKYAMIGDPTGALTRNFDNMREDEGLADRATFVVDPQGIIQAIEVTAEGIGRDASDLLRKIKAAQYVASHPARHHLRRRVYLCQLTLQTPADDTYARHFHALIFSNDGTQRTTRVRTLIASASLGGVPKAPQRSTALTMFFRQLLPVGRHVIRCTFALHPHARKSYRILDPFLIVNRHTLGGDHIAAHDAHRAIPTSITWTLAPACSASTHTPVVPRVIFSACMAGHLTLWRNKRPLPTNTMQSTVPLHSRQKAFVSATAPTLTSFRGQLGLLLNQWGCILEDPVNPAIDSDALANQITMAGLEVDGVEPVAGSFHGVVVGEVVECAQHPNADKLRVTKVNVGGDRLLDIVCGAPNCRQGLRVAVATIGAVLPGDFKIKAAKLRGEPSEGMLCSFSELGISDDHSGIIELPADAPIGTDIREYLKLDDNTIEISVTPNRADCLGIIGVARDVAVLNQLPLVQPEIVPVGATIDDTLPITVEAPEACPRYLGRVALTVKAPTPLWMKEKLRRCGIRSIDAVVDVTNYVLLELGQPMHAFDKDRIEGGIVVRMAKEGETLVLLDGTEAKLNADTLVIADHNKALAMGGIFGGEHSGVNDETQNVLLECAFFSPLSITGRARRHGLHTDASHRYERGVDPALQHKAMERATRLLIDICGGEAGPVIDITNEATLPKRATITLRRSKLDRLIGHHIADEQVTDILRRLGCEVTEGKDEWQAVAPSWRFDMEIEEICLPYVNGSCVCLLFKPWEPLRIPHYKVRKQQVHGEDVTQQEHFHTVVPTVDVFQISTKERFGLGHQLKNGSHIENWHSILRNGLVVASNTRLQESRQNSTVEEDSEGDNDSEEFYYGGQRIKYLGIQLTRDVKDLFKENYKPLLNEIKEDTNKWKNIPWSWIGRINFVKIAILPKVVDLLVSMCRSALESPRKVVIFEPYPSVVDPNDPQMLAFNPRLSEVQPALPLVKPNRKVVGKGPVEMQPKGGRMRNGLESKQNTMAYVYILVKCIVLLDIF

SEQ ID NO: 45342 - protein, 217 aa, Homo sapiens
RIRYVIHRTRERAEADFVRRNFSGQRHGHIRTTVKAAAKRNHARASGMGASNFHRVFHRFRTGGEERGFGLPAHRGKGVDFLRQGDVAFIRHNLIRGVGKLLQLLLHRRDQIRVAMSGIQHRNASVIRSLCSPLIKFGGNAKFEEKFLAVPAEALVYTMKGDQKYFPVYANDGKLLPNFIFVANIESKDPQQIISGNEKVVRPRLADAEFFFPSKQK

SEQ ID NO: 45343 - protein, 1283 aa, Homo sapiens
  DOMAIN (504)..(517): GLUTAMYL-TRNA SYNTHETASE SIGNATURE domain identified by eMATRIX, accession number PR00987A, p-value=8.200e-13, raw score of 12.14
MDLGANGWQTFRYVVLPNLSSALLAGGMLAFALSFDEIIVTTFTAEQVDAAVRAADAAFAEWGQTTPKVRAECLLKLADVIEENGQVFAELESSNNTAFARASSNGDLPTKADLQAQLDSLNKQKDLSAQDKLVQQDLTDTLATLDKIDRIKEETVQLRQKVAEAPEKMRQATAALTALSDVDNDEETRKILSTLSLRQLETRVAQALDDLQNAQNDLASYNSQLVSLQTQPERVQNAMYNASQQLQQIRSRLDGTDVGETGLRPRQKVLMQAQQALLNAEMTSSALEAKIAQLEAEQARKLKKTEKDSLKDEVLHSLLPRAFSRFSQTMMWIDTVNGLIMVDCASAKKAEDTLALLRKSLGSLPVVPLSMENPIELTLTEWVRSGSAAQGFQLLDEAELKSLLEDGGVIRAKKQDLTSEEITNHIEAGKVVTKLALDWQQRIQFVMCDDGSLKRLKFCDELRDQNEDIDREDFAQRFDADFILMTGDWQRNSKEMTDTQYIGRFAPSPSGELHFGSLIAALGSYLQARARQGRWLVRIEDIDPPREVPGAAETILRQLEHYGLHWDGDVLWQSQRHDAYREALAWLHEQGLSYYCTCTRARIQSIGGIYDGHCRVLHHGPDNAAVRIRQQHPVTQFTDQLRGIIHADEKLAREDFIIHRRDGLFAYNLAVVVDDHFQGVTEIVRGADLIEPTINSQGCGYFRWVLSKVEYQTYSPGVAQPVIAPVFGQCSVNSRPSAVIENFGECLRTPQSMPPVDPCWNLSGLDNAGSQQATVQWFAAPRRLALKVANLAEAQPDREIEKRGPAIAQAFDAEGKPSKAAEGWARGCGITVDQAERLTTDKGEWLLYRAHVKGESTEALLPNMVATSLAKLPIPKLMRWGASDVHFVRPVHTVTLLLGDKVIPATILGIQSDRVIRGHRFMGEPEFTIDNADQYPEILRERGKVIADYEERKAKIKADAEEAARKIGGNADLSESLLEEVASLVEWPVVLTAKFEEKFLAVPAEALVYTMKGDQKYFPGIGAGLLFGKLLSVSFGPAGLGLAANFRQLITVLGVLAGAGIFNGVTKYVAQYHDNPQQLRRVVGTSSAMVLGFSTLMALVFVLAAAPISQGLFGNTDYQGLVRLVALVQMGIAWGNLLLALMKGFRDAAGNALSLIVGSLIGVLAYYVSYRLGGYEGALLGLALIPALVVIPAAIMLIKRGVIPLSYLKPSWDNGLAGQLSKFTLMALITSVTLPAARLRWLNSASVVPNIACAISGLLNCTSCSTSSSLTVYRRILQHWYRS

SEQ ID NO: 45344 - protein, 327 aa, Homo sapiens
  misc_feature (1)...(327): Xaa = X or * as defined in Table 2
PPKLGRKRGIFLPSHSNPNTNRICPNCCMNGVSTANTTSKSSLVICAWTKHALLNAILQPEQLWKSGSRWRINLALPRGYRESLLQPWQAERLTTDKGEWLLYRAHVKGESTEALLPNMVATSLAKLPIPKLMRWGASDVHFVRPVHTVTLLLGDKVIPATILGIQSDRVIAATGKAKIKADAEEAARKIGGNADLSESLLEEVASLVEWPVVLNAKFDEKFLAVPAEALVYTMKGDQKYFPVYANDGKLLPNFIFVANIESKDPQQIISGNEKSFVRLADAEFFFNTTXKRLFLPHQKLPPSQILHQQTRNYASFCHRHRDNWTSA

SEQ ID NO: 45345 - protein, 498 aa, Homo sapiens
SGGCAGLHGGLCSKEPFQASVQQGVAGHACAPAALQVPVCGTLSDCGSRAASLCENPSFISLYGRLVATSLAKLPIPKLMRWGASDVHFVRPVHTVTLLLGDKVIPATILGIQSDRVIRGHRFMGEPEFTIDNADQYPEILRERGKVIADYEERKAKIKADAEEAARKIGGNADAKFEEKFLAVPAEALVYTMKGDQKYFPVYANDGKLLPNFIFVANIESKDPQQIDRIQALAGWIAEQIGADVNHATRAGLLSKCDLMTNMVFEFTDTQGVMGMHYARHDGEAEDVAVALNEQYQPRFAGDDLPSNPVACALAIADKMDTLAGIFGIGQHPKGDKDPFALRRAALGVLRIIVEKNLNLDLQTLTEEAVRLYGDKLTNANVVDDVIDFMLGRFRAWYQDEGYTVDTIQAVLARRPTRPADFDDWHALGRAGTGDVVVGVRGRLAIVPLTDGLDEAGHSTGVLQGEVPQRLERAATVPGVTLQPQALQARGLRREGPQ

SEQ ID NO: 45346 - protein, 83 aa, Homo sapiens
  misc_feature (1)...(83): Xaa = X or * as defined in Table 2
VTPTGWRKRRIRQWCSDAGCGVNALSGLRFSHSLALFSAAMFILGVVSGITMSISPXILSCVRSKNPLLVSGSGPLSCNSTIH

SEQ ID NO: 45347 - protein, 240 aa, Homo sapiens
  misc_feature (1)...(240): Xaa = X or * as defined in Table 2
TKSPKIARSRHIPLCHFIFERRPIMTNSNRIKLTWISFLSYALTGALVIVPGMVMENIADYFNLPVSSMSNTFTFLNAGILISIFLNAWLMEIVPLKTQLRFGFLLMVLPVAGLMFSHSLALFSAAMFILGVVSGITMSIGTFLVTQMYEGRQRGYRLFLAASLFSMAGMIFPMIAAFLLAPSSXWXWVYACLGLAYVTIFIMTFGCEFPALGKHAPKSYAPVEKVKWGILGGASSFRAV

SEQ ID NO: 45348 - protein, 208 aa, Homo sapiens
  misc_feature (1)...(208): Xaa = X or * as defined in Table 2
LLEGKLTNRKQXHQHXQKARPCKKPIQSAQNWNREEYDELTEVGRRWVIITNSFELKEHVLTQWKEAKNLDKRLQEGLTRITSLEKKINDLMVLKNTARELHEAYTSINSRIDQAEERISEIEDQLNEIKLEDKIRGKRIKRQTNKQSLXKMWDYVKRPNLRLIGVPESDEENVTELENTLQDIIQENFPNLARQANIQIQEIQTLLR

SEQ ID NO: 45349 - protein, 377 aa, Homo sapiens
  DOMAIN (324)..(374): ELEMENT INSERTION TRANSPOSABLE SEQUENCE TRANSPOSASE FOR domain identified by eMATRIX, accession number PD02662B, p-value= 1.000e-40, raw score of 20.18
MATGFLPERSATLPANNIAAAIPARYTENAICNCASLALRSAAMRAQNHGYTKENDNRRNKIAAPDREHLIGKLLASFDCKHCGNNDRPDGGAQPGTADSVNKAVREDQIQPVWDSNGYRGAGPGVGLLKKTSARVVTLLGSLRKGSFNGMVARTLPKIAPASMEVNALPSIADIPLYDADVQQEEGFPATVEALAEQIRQADGVVIVTPEYNYSVPGDACIHDSFFVEEGPEELDTSARNAGALTRRREIRDAATLLRLGLAYGPGGMSLREVTAWAQLHDVATLSDVALLKRLRNAADWFGILAAQTLAVRAAVTGCTSGKRLRLVDGTAISAPGGGSAEWRLHMGYDPHTCQFTDFELTDSRDAERLDRPVTLY

SEQ ID NO: 45350 - protein, 125 aa, Homo sapiens
  misc_feature (1)...(125): Xaa = X or * as defined in Table 2
LNPSNKLALINPAASPIIKGVDLTANQIPCIADIPLYDADVQQEXCFPATVEALGEQIRQADGVVIVTPEYNYSVPGGLKNAIYWLSRLRQILVFLDAMVMNKPEFMGGVIQNKVDPQTGKVIDH

SEQ ID NO: 45351 - protein, 194 aa, Homo sapiens
TTTGVIMSEKLQVVTLLGSLRKGSFNGMVARTLPKIAPASMEVNALPSIADIPLYDADVQQEEGFPATVEALAEQIRQADGVVIVTPEYNYFVPGGLKNAMDWLSRLPDQPLAGKPVLIQTSSMGVIGGARCQYHLRQILVFLDAMVMNKPEFMGGVIQNKVDPQTGEVIDQGTLDHLTGQLTAFGEFIQRVKI

SEQ ID NO: 45352 - protein, 28 aa, Homo sapiens
PEKKPQLNPLLHLFSSAGLFSSLPGCHH

SEQ ID NO: 45353 - protein, 1829 aa, Homo sapiens
  DOMAIN (622)..(666): Glycosyl hydrolases family 31 proteins domain identified by eMATRIX, accession number BL00129D, p-value=1.000e-40, raw score of 16.76
NKMARKKFSGLEISLIVLFVIVTIIAIALIVVLATKTPAVDEISDSTSTPATTRVTTNPSDSGKCPNVLNDPVNVRINCIPEQFPTEGICAQRGCCWRPWNDSLIPWCFFVDNHGYNVQDMTTTSIGVEAKLNRIPSPTLFGNDINSVLFTTQNQTPNRFRFKITDPNNRRYEVPHQYVKEFTGPTVSDTLYDVKVAQNPFSIQVIRKSNGKTLFDTSIGPLVYSDQYLQISARLPSDYIYGIGEQVHKRFRHDLSWKTWPIFTRDQLPGDNNNNLYGHQTFFMCIEDTSGKSFGVFLMNSNAMEIFIQPTPIVTYRVTGGILDFYILLGDTPEQVVQQYQQLVGLPAMPAYWNLGFQLSRWNYKSLDVVKEVVRRNREAGIPFDTQVTDIDYMEDKKDFTYDQVAFNGLPQFVQDLHDHGQKYVIILDPAISIGRRANGTTYATYERGNTQHVWINESDGSTPIIGEVWPGLTVYPDFTNPNCIDWWANECSIFHQEVQYDGLWIDMNEVSSFIQGSTKGCNVNKLNYPPFTPDILDKLMYSKTICMDAVQNWGKQYDVHSLYGYSMAIATEQAVQKVFPNKRSFILTRSTFAGSGRHAAHWLGDNTASWEQMEWSITGMLEFSLFGIPLVGADICGFVAETTEELCRRWMQLGAFYPFSRNHNSDGYEHQDPAFFGQNSLLVKSSRQYLTIRYTLLPFLYTLFYKAHVFGETVARPVLHEFYEDTNSWIEDTEFLWGPALLITPVLKQGADTVSAYIPDAIWYDYESGAKRPWRKQRVDMYLPADKIGLHLRGGYIIPIQEPDVTTTASRKNPLGLIVALGENNTAKGDFFWDDGETKDTIQNGNYILYTFSVSNNTLDIVCTHSSYQEGTTLAFQTVKILGLTDSVTEVRVAENNQPMNAHSNFTYDASNQVLLIADLKLNLGRNFSVQWNQIFSENERFNCYPDADLATEQKCTQRGCVWRTGSSLSKAPECYFPRQDNSYSVNSARYSSMGITADLQLNTANARIKLPSDPISTLRVEVKYHKNDMLQFKIYDPQKKRYEVPVPLNIPTTPISTYEDRLYDVEIKENPFGIQIRRRSSGRVIWDSWLPGFAFNDQFIQISTRLPSEYIYGFGEVEHTAFKRDLNWNTWGMFTRDQPPGYKLNSYGFHPYYMALEEEGNAHGVFLLNSNAMDVTFQPTPALTYRTVGGILDFYMFLGPTPQVATKQYHEVIGHPVMPAYWALGFQLCRYGYANTSEVRELYDAMVAANIPYDVQYTDIDYMERQLDFTIGEAFQDLPQFVDKIRGEGMRYIIILDPAISGNETKTYPAFERGQQNDVFVKWPNTNDICWAKVWPDLPNITIDKTLTEDEAVNASRAHVAFPDFFRTSTAEWWAREIVDFYNEKMKFDGLWIDMNEPSSFVNGTTTNQCRNDELNYPPYFPELTKRTDGLHFRTICMEAEQILSDGTSVLHYDVHNLYGWSQMKPTHDALQKTTGKRGIVISRSTYPTSGRWGGHWLGDNYARWDNMDKSIIGMMEFSLFGISYTGADICGFFNNSEYHLCTRWMQLGDILSILKEYNIANTRRQDPASWNETFAEMSRNILNIRYTLLPYFYTQMHEIHANGGTVIRPLLHEFFDEKPTWDIFKQFLWGPAFMVTPVLEPYVQTVNAYVPNARWFDYHTGKDIGVRGQFQTFNASYDTINLHVRGGHILPCQEPAQNTFYSRQKHMKLIVAADDNQMAQGSLFWDDGESIDTYERDLYLSVQFNLNQTTLTSTILKRGYINKSETRLGSLHVWGKGTTPVNAVTLTYNGNKNSLPFNEDTTNMILRIDLTTHNVTLEEPIEINWS

SEQ ID NO: 45354 - protein, 605 aa, Homo sapiens
MEYYVAVKDNEILSFESTWVGLNFIISSVLHQAQRDMTSHIFTYFGELIMSTICTAADSREDPWFPQTLEGNTDHRWKYVFSTSQSRTRHITHMINLFNCITYTLLNPSSDFHMRVRGDKRAHPQRRGNNVSETFGGRPTMDLTHGKQPFQNTLIVLIVNDDRLTYLIHRLSDVSVDSTHETYRRSRLLTVVTPSELAAGVTSDLLSERDERADHQRVDERTTDDADALTDHDEDDHSAERRNERCRVTLPTTLTSVSDRMSTRYEPQLDSASASTSYYDADISDMSMTDPCAETMPTATNSVTEVRVAENNQPMNAHSNFTYDASNQVAPRKYHHGYRARHASPDAPSYGCLPACVNQNQRVFRTHTANINLSVIPTLTTGGVTGQVNAWHGTDDLRHIAGNRVFSDFICGDGRNAKRLLVLLGGADYVYRVLQASCGCDVVTEYSDCGPRTTNIDELPQTADMIRRACLPTIGCALLASAAVGNYGRRISIRRRTYTTSTYECNRPTTLQYIRARLPCTSDRRDVNVRYRLRTSSGCLITMLHRDSYGATSREYVDCPGPRLAFDLMPLGASLRATSLRSSWQTTFDAGLPSLQPPAGAPRPP

SEQ ID NO: 45355 - protein, 28 aa, Homo sapiens
PEKKPQLNPLLHLFSSAGLFSSLPGCHH

SEQ ID NO: 45356 - protein, 39 aa, Homo sapiens
HSKLMPWRRGDAPSAATGSPQPAERRRWGEERAGRFWFR

SEQ ID NO: 45357 - protein, 156 aa, Homo sapiens
  misc_feature (1)...(156): Xaa = X or * as defined in Table 2
LLLFLLLQSYDWSESGKRQSALHGRQKGLPKSPTAARGGSDPWPSCRHPXGPNRKRRKSRXPMETAPRRPSVSPALTPARPPGLTATPRLHPRPPRSPNPSANLLRRPTPDTXAHATFGPGRSRHHFPGQLSTERRRSAEGGRSRRNEASRREGGE

SEQ ID NO: 45358 - protein, 371 aa, Homo sapiens
MAQAYFGRPRAPHSPLRPVADLTWSESGKRQSALHGRQKGLPKSPTAARGGSDPCRHVGHPEARTGRGENPVTDGNSPAAAQCLRITKPQREPPPAPDTRHLSPRHIRAWARPATTFPGSFQQREEIGGGREKPGERGISPRGGGGTQTLPELDFPSSGCLLTRAARSLLDQDGGWAGPGVRGSRLGLAGEVRANPTVSGTPELSIASLPIPSHPFPAQLPRHAPLPCTLARRARFRALLGDHGDGTGTDLHRKTQSKSNLPWRRGDAPSAAAESPQPAERRRWGEERAGRFWFRFLFQLPWRLRRKGRSFHPIRLFCDLVASEWELGLRSAVASACPDALRSFATCGSTLERGREDSSTGNLGILWVMHQ

SEQ ID NO: 45359 - protein, 27 aa, Homo sapiens
MGTPSGSTLAHSLLGLAIMLHRAPASH

SEQ ID NO: 45360 - protein, 206 aa, Homo sapiens
  DOMAIN (6)..(41): Wnt-1 family proteins domain identified by eMATRIX, accession number BL00246B, p-value=5.846e-10, raw score of 13.69
  misc_feature (1)...(206): Xaa = X or * as defined in Table 2
RAAGNCFPEPGFVKQLSAAAAVVAPAAAATEGSIPDTGKSPSSISHWPNPQKNVICKRRGRVEQEQAWEKGRXRVVFGLXKSMRCPVDLLPQSCLCQRFLHQGKWILTKDYIIHSAKSGRWLDATTYEWGYKIEKDSRYSPQMQSAPKRWREELKRTGAPGAFHRWKVVLLVRTDKRSDSLIRFSDNFGDCDIRMEEKTFRTLMES

SEQ ID NO: 45361 - protein, 218 aa, Homo sapiens
  misc_feature (1)...(218): Xaa = X or * as defined in Table 2
FGKRGRTITLCILAVGMLCCRKGHTKPRRRPGASPISTHLHSSPPISTHLHTSPPPHRREEARSGQXRQSCGAAAARXPWWWNCDGWGPKCQRFSKHXDIAQPDEVSWGQXPWAVGALAGPHPPQASEGPLGCTPASICGSTRKPSKPLSKKPPQAARTSSSRIVIFTPISTRPPTQGQPEKAKSATPTNDLEGPSAKVKFVNFLMDETFPEPSFFFI

SEQ ID NO: 45362 - protein, 11 aa, Homo sapiens
MAYYTCGFFLH

SEQ ID NO: 45363 - protein, 264 aa, Homo sapiens
  misc_feature (1)...(264): Xaa = X or * as defined in Table 2
NLLGYQEINPPLQIFWDKLLAVSERDSSVKEESGDVESDDTMLXMLPCPXETTEFSSXPFRISSXLSSXSTAQIPAETCFAGGWYSIFCPQRIEQETMCLLXSWQSEVAVSCESPWPTALHHSHPNSRAPPPCYSKSTSSSLSSPLENSGXQNRPPSLLITSVLPLRITCLPXVSFIPPIMQLGGSFLSNDRLXQSFILPKNVSLEFVSFPLIXGAVSKPAISFNTSVSPLLVSDIFFALSLLPXGLGTWLIPSSSSLLLVRGF

SEQ ID NO: 45364 - protein, 510 aa, Homo sapiens
  DOMAIN (414)..(428): C2H2-TYPE ZINC FINGER SIGNATURE domain identified by eMATRIX, accession number PR00048A, p-value=9.526e-11, raw score of 10.52
  misc_feature (1)...(510): Xaa = X or * as defined in Table 2
XSSGSLGSRSPKSSKRKKRRRRNVNCLKNVVIWYEDHKHRCPYEPHLAELDPTFGLYTTAVWQCEAGHRPSETQNLDSDKVGNGLVAGSSDSSSSGSASDSEESPEGQPVKAAAAAAAATPTSPVGSSGLITQEGVHIPFDVHHVESLAEQGTPLCSNPAGNGPEALETVVCVPVPVQVGAGPSALFENVPQEALGEVVASCPMPGMVPGSQVIIIAGPGYDALTAEGIHLNMAAGSGVPGSGLGEEVPCAMMEGVAAYTQTEPEGSQPSTMDATAVAGIETKKEKEDLCLLKKEEKEEPVAPELATTVPESAEPEAEADGEELDGSDMSAIIYEIPKEPEKRRRSKRSRVMDADGLLEMFHCPYEGCSQVYVALSSFQNHERPKVCPHPGCGKKFYLSNHLRRHMIIHSGVREFTCETCGKSFKRKNHLEVHRRTHTGETPLEVRDLWLPVAGKRASFNWHMKKATLRRCKYNFTCDRLREALGEAGQRQVPHASKATRITSPPDPPDH

SEQ ID NO: 45365 - protein, 236 aa, Homo sapiens
MAEQRSRQALALPLAGCIQHTATRESFVKSKTKQGPGLLTVVDLELAGKIGDILMRVPGMLGQGVHMCVMALGESLAGFGPGVGGVAGGTRRGWTREESRQPWDPMCWCHGNPGAMEGAGAVEGAGVIGILVLWKVLVLWKVLVSWESWCYGRCWCCGRCWCHGDPGAVEGCLYHGDPGAMEAAGAKESAGALKVTGALKVVGAMEDAGAEEGTEALEGAYAPSYAARPGCFQVRL

SEQ ID NO: 45366 - protein, 318 aa, Homo sapiens
  DOMAIN (161)..(170): Zinc finger C3HC4 type (RING finger), proteins. domain identified by eMATRIX, accession number BL00518, p-value=3.667e-09, raw score of 12.23
  misc_feature (1)...(318): Xaa = X or * as defined in Table 2
MSRMGLLGFGERKELPNHPAVSEWPLTLVTGCSSGTVAEGEGNLTTSGLFSIVPLHPDGVAAGQRHSSLPRWGSQAEALLTSQTVDGQAEMLLTPQTMGGQEEMLLTSQTTGEDFITRSTESGTHSKSHKGDEGEPRWMLGWMLWVCDIAEPLVKAKLLDCKHTCCSVCLQQTRTSQKDVRCPWCSGVTKLPPDFSVSQLLDDPEVLAVITIPHASEHMPVFIRLPGSGCYSCPCPSPRSTRCCPEIXAATCCPGTGRSPSLCDHPCWTAASARQGSPGGGGGGAGQAGHGEKLHVVEGVHCHLGGLRLGLPPQHRAP

SEQ ID NO: 45367 - protein, 163 aa, Homo sapiens
  misc_feature (1)...(163): Xaa = X or * as defined in Table 2
VTELKGLANHVVVGSVSCETKDLFAALPQVVAVDINDLGTIKLSLEVTWSPFDKDDQPSAASSVNKASTVPKRFSTYSQSPPDTPSLREQAFLLTCCDGRRELGEWGQHAPRPLVQQPEPLPIQVAFRRPETPSSGPLDEEGAVAPVLANGHAPYSRTLSHIX

SEQ ID NO: 45368 - protein, 175 aa, Homo sapiens
SGRSAALLSARVNRSQSFAGVLGSHERGPRSFPVFSPPGPPRKPPALSRVSRMFSVAHPAAKVPQPERLDLVYTALKRGPDGLLGAVHQQEQEKLQGQIRESKRNSRLGEWREGFLYDLDKQVKSIERFLRRLEFHASKIDELYEAYCVQRRLRDGALHMGRAYTTGSPGSRDAG

SEQ ID NO: 45369 - protein, 385 aa, Homo sapiens
  misc_feature (1)...(385): Xaa = X or * as defined in Table 2
EPVLRRRPRQPRAGAQGFPVFSPPGPPRKPPALSRVSRMFSVAHPAAKVPQPERLDLVYTALKRGLQAYLEVHQQEQDKLQGQIRESKRNSRLVMAGGVLWTVVXERGAVTSLSASAGVLLIPPKYLPLLPTPAGLLYDLDKQVKSIERFLRRLEFHASKVRVQHVCRWDDELYEAYCVQRRLRDGAYNMVRAYTTGSPGSREARDSLAEATRGHREYTEDEGWGPMRQRHRSMCLLESELEAQLGEFHLRMKGCAVDINDLGTIKLSLEVTGAASSVNKASTVTKRSPPIARAHRTHPHFGNSFLSTRKPNTYTANHRRRPIEQHPDMRTPPPPHRARTNTGRKDKVRAHEGEKATPTRTRGAPHGKAQRLRPLYQYVTIATLS

SEQ ID NO: 45370 - protein, 312 aa, Homo sapiens
  misc_feature (1)...(312): Xaa = X or * as defined in Table 2
MSYNSKNYVETITTMNSVKFGETTPRNRTHYLSTNEKKIFLSGVFSNAYPAGLSRGWDSPWGSTPWVRHFCYLSSTQLCDQNCSLLSSLLPAGPSVCNRLLASAWQKSSSSASSEASETCQSVSECSSPTSDWSKVGSHEQPSGATLQRRKDRVEPCETQSPGPASGGTLGPSGEEAPRPRMSPATIAAKHGEEVSPAASDLAMVLTRGMSLXHQKSSRDSLQYSSGYSTQTTTPSCSEDTIPSQGRPAGLGPTKPVSIESTYLQSPQRLKQEWATEGKIQKLPPQIQVVNFQVDSSPSLPLIMVPEHMHVS

SEQ ID NO: 45371 - protein, 258 aa, Homo sapiens
MFVWSNVEGHSVAMFPWYSIPFLNPPCSHTRPSNLPVTQWPPTRENNLPSWQLLLTSIHQAQFLSALHKEQGSSSEKDGRSPNKWDKDHIRCPMSGGHDLQQAAPGPGRAHQGHPNQDNWTVSQMLSKWWYTLGPNERQKYHELAFQATAALQAHYVHIFPSKGRWELLHGSQRLDWGRCQLKLLGQQGQDVLHTNLGKEENSSCWGYKMECEEGFGPQGGDCGLGGVHAPLLSPEGLDSEQNTLIMGDIFHCAKKLP

SEQ ID NO: 45372 - protein, 103 aa, Homo sapiens
  misc_feature (1)...(103): Xaa = X or * as defined in Table 2
KISPMINVFCSESSPSGERRGAXTPPSPQSPPCGPKPSSPPSCSPSRNYFLLFQGLCAEHPALAAPAASVGTCPSPASGTHAAAPSGPWRGRCVHSGPGGRLW

SEQ ID NO: 45373 - protein, 125 aa, Homo sapiens
MITKVTAQLQCLSCVGWTHVHLTHKLSLGGTWSPGSGLEPECEATGGCGIAGQVACCLDTATKRARQCLQLPAGGVRRLHCLCAEHPAHADPAASVGTCPSPASGNHAAAPSGPAPTTSIRFTCS

SEQ ID NO: 45374 - protein, 148 aa, Homo sapiens
  misc_feature (1)...(148): Xaa = X or * as defined in Table 2
ELDYLYCSNSSAQCPGALLPSLALPGPAGSARQAGSPARRLCAPVQPSGRWPAPGGPGFPGSSCPASPTRQXLLTSGSGCPRPCHHPSGPPQXQSTQAWDWVILGPGAHGPSGQRCERCLPSRPSGPQTHSGVGSEPRAVRGPGVSFV

SEQ ID NO: 45375 - protein, 2639 aa, Homo sapiens
  DOMAIN (1236)..(1275): TRANSCRIPTION PROTEIN DNA-BINDIN domain identified by eMATRIX, accession number PD02448A, p-value=1.632e-11, raw score of 9.37
MPLPAPCQDLGRWLYLAALGWTKMKPMKKACTGLSGPGSGSKSPPATRAKALRRRGAGEGDKPEEEDDEAQQPQPQSGPEEAEEGEEEEAERGPGAEGPPLELHPGDPAPGPAEDPKGDGEAGRWEPSLSRKTATFKSRAPKKKYVEEHGAGSSGVAGAPEERVRTPEEASGLGVPPRPPTSTRSSSTDTASEHSADLEDEPAEACGPGPWPPGSTSGSYDLRQLRSQRVLARRGDGLFLPAVVRQVRRSQDLGVQFPGDRALTFYEGVPGAGVDVVLDATPPPGALVVGTAVCTCVEPGVAAYREGVVVEVATKPAAYKVRLSPGPSSQPGLPGSLPQPPQPLHREPEEAVWVARSSLRLLRPPWEPETMLRKPPTGPEEEQAEPGATLPPCPAALDPKQPEDAEVSKISFGGNLGTHCEEGEEKHPPALGTPALLPLPPPQLLSPPPKSPAFVGPGRPGEQPSPCQEGSQGGSRSSSVASLEKGTAPAARARTPLTAAQQKYKKGDVVCTPSGIRKKFNGKQWRRLCSRDGCMKESQRRGYCSRHLSMRTKEMEGLADSGPGGAGRPAAVAAREGSTEFDWGDETSRDSEASSVAARGDSRPRLVAPADLSRFEFDECEAAVMLVSLGSSRSGTPSFSPVSTQSPFSPAPSPSPSPLFGFRPANFSPINASPVIQRTAVRSRHLSASTPKAGVLTPPDLGPHPPPPAPRERHSSGILPTFQTNLTFTVPISPGRRKTELLPHPGALGAPGAGGGGAAPDFPKSDSLDSGVDSVSHTPTPSTPAGFRAVSPAVPFSRSRQPSPLLLLPPPAGLTSDPGPSVRRVPAVQRDSPVIVRNPDVPLPSKFPGEVGTAGEVRAGGPGRGCRETPVPPGVASGKPGLPPPLPAPVPITVPPAAPTAVAQPMPAFGLASSPFQPVAFHPSPAALLPVLVPSSYTSHPAPKKEVIMGRPGTDGQMEALTGPSQEVAGPGLEPSSLPLCPVNITGTAMEGSGGVLGTSPAATAEERAAGGAASAAEEVRAPAGSPLRRTMYSAHRPLMPASSAASRGLGMFVWTNVEPRSVAVFPWHSLVPFLAPSQPDPSVQPSEAQQPASHPVASNQSKEPAESAAVAHERPPGGTGSADPERPPGATCPESPGPGPPHPLGVVESGKGPPPTTEEEASGPPGEPRLDSETESDHDDAFLSIMSPEIQLPLPPGKRRTQSLSALPKERDSSSEKDGRSPNKREKDHIRRPMNAFMIFSKRHRALVHQRHPNQDNRTVSKILGEWWYALGPKEKQKYHDLAFQVKEAHFKAHPDWKWCNKDRKKSSSEAKPTSLGLAGGHKETRERSMSETGTAAAPGVSSELLSVAAQTLLSSDTKAPGSSSCGAERLHTVGGPGSARPRAFSHSGVHSLDGGEVDSQALQELTQMVSGPASYSGPKPSTQYGAPGPFAAPGEGGALAATGRPPLLPTRASRSQRAASEDMTSDEERMVICEEEGDDDVIADDGFGTTDIDLKCKERVTDSESGDSSGEDPEGNKGFGRKVFSPVIRSSFTHCRPPLDPEPPGPPDPPVAFGKGYGSAPSSSASSPASSSASAATSFSLGSGTFKAQESGQGSTAGPLRPPPPGAGGPATPSKATRFLPMDPATFRRKRPESVGGLEPPGPSVIAAPPSGGGNILQTLVLPPNKEEQEGGGARVPSAPAPSLAYGAPAAPLSRPAATMVTNVVRPVSSTPVPIASKPFPTSGRAEASPNDTAGARTEMGTGSRVPGGSPLGVSLVYSDKKSAAATSPAPHLVAGPLLGTVGKAPATVTNLLVGTPGYGAPAPPAVQFIAQGAPGGGTTAGSGAGAGSGPNGPVPLGILQPGALGKAGGITQVQYILPTLPQQLQVAPAPAPAPGTKAAAPSGPAPTTSIRFTLPPGTSTNGKVLAATAPTPGIPILQSVPSAPPPKAQSVSPVQAPPPGGSAQLLPGKVLVPLAAPSMSVRGGGAGQPLPLVSPPFSVPVQNGAQPPSKIIQLTPVPVSTPSGLVPPLSPATLPGPTSQPQKVLLPSSTRITYVQSAGGHALPLGTSPASSQAGTVTSYGPTSSVALGFTSLGPSGPAFVQPLLSAGQAPLLAPGQVGVSPVPSPQLPPACAAPGGPVITAFYSGSPAPTSSAPLAQPSQAPPSLVYTVATSTTPPAATILPKGPPAPATATPAPTSPFPSATAGSMTYSLVAPKAQRPSPKAPQKVKAAIASIPVGSFEAGASGRPGPAPRQPLEPGPVREPTAPESELEGQPTPPAPPPLPETWTPTARSSPPLPPPAEERTSAKGPETMASKFPSSSSDWRVPGQGLENRGEPPTPPSPAPAPAVAPGGSSESSSGRAAGDTPERKEAAGTGKKVKVRPPPLKKTFDSVDNRVLSEVDFEERFAELPEFRPEEVLPSPTLQSLATSPRAILGSYRKKRKNSTDLDSAPEDPTSPKRKMRRRSSCSSEPNTPKSAKCEGDIFTFDRTGTEAEDVLGELEYDKVPYSSLRRTLDQRRALVMQLFQDHGFFPSAQATAAFQARYADIFPSKVCLQLKIREVRQKIMQAATPTEQPPGAEAPLPVPPPTGTAAAPAPTPSPAGGPDPTSPSSDSGTAQAAPPLPPPPESGPGQPGWEGAPQPSPPPPGPSTAATGS

SEQ ID NO: 45376 - protein, 177 aa, Homo sapiens
  misc_feature (1)...(177): Xaa = X or * as defined in Table 2
GLPWRQHVRVEECGRSPLRPCSPGTPSPSXPLPAATRGPATCQSLSGLQPEKTTSPSCAAVAHERPPGPVPQCPAQGTGLIFXEGWTQPQQIRQGPHPVAHECAHDLQQAAPGPGGAHQGPSQPGXPDRQPDAERAVVHPGAQXDAEIQPGLPGEGGPLATRTERSPAQRPSPQARG

SEQ ID NO: 45377 - protein, 282 aa, Homo sapiens
  DOMAIN (86)..(141): Domain present in ZO-1 and Unc5-like netrin receptors domain identified by eMATRIX, accession number PF00791B, p-value=8.768e- 12, raw score of 28.49
  misc_feature (1)...(282): Xaa = X or * as defined in Table 2
MDLKTAVFNPARDGKLRLLTKXMASKSKEEVSSLISEKTNGATPLLMAARYGHLDMVEFLLEQCSASIEVGGSVNFDGETIEGAPPLWAASAAGHLKVVQSLLNHGASVNNTTLTNSTPLRAACFDGHLEIVKYLVEHKADLEVSNRHGHTCLMISCYKGHKEIAQYLLEKGADVNRKSVKGNTALHDCAESGSLDIMKMLLMYCAKMEKDGYGMTPLLSASVTGHTNIVDFLTHHAQTSKTERINALELLGATLFTQKEISCDESGRTRDLSPRRKPPHTT

SEQ ID NO: 45378 - protein, 146 aa, Homo sapiens
  misc_feature (1)...(146): Xaa = X or * as defined in Table 2
KLKTQKNNIGPQACNSQLASVSTRSPPPTLSVPIIMTDDSQASQLLLAAVTIRKLWSRMAPMLALPTGQSGQTGAEGQGKEGERGQSPCWKPRLDPKLCEPRQPAQLLXADVCTGPCGVRGCPADCRLPCLSPSSAQQPKEASRSA

SEQ ID NO: 45379 - protein, 84 aa, Homo sapiens
PDPRAPRCHHSRQAHHRPRRGSEPPSAPGLPQLHLPPEAPGEAHVEVLGDAGEKGDKGAPGRPGRVGPTGEKGTCSPGPALRAL

SEQ ID NO: 45380 - protein, 222 aa, Homo sapiens
  DOMAIN (30)..(59): Speract receptor repeat proteins domain proteins domain identified by eMATRIX, accession number BL00420A, p-value=6.400e- 11, raw score of 20.42
  misc_feature (1)...(222): Xaa = X or * as defined in Table 2
SAWPSCHCCHLDILSRPGDDACSVQILVPGLKGDAGEKGDKGAPGRPGRVGPTGEKGEKGDSGDIGPPGPNGEPGLPCECSQLRKAIGEMDNQVSQLTSELKFIKNAVAGVRETESKIYLLVKEEKPYADPPLSWQGRGGTLSMAQDEAVHGLKGAYLGQARLGRGFIGIHRPWKRRAPLLLFXTLSPLRSFXKGDGGGNTQKGSRKKRELAGQIWGPCIRR

SEQ ID NO: 45381 - protein, 114 aa, Homo sapiens
  misc_feature (1)...(114): Xaa = X or * as defined in Table 2
WRRLFLLGVLFRGYLGCLRSRSVLGRLKVSDMRIFFFACGCGHLSTLPSWPLRPSLWLRLXEEQELPSLSVPSSGRSASRLLXLGWRGFGPSPSPRLTVQFSGGRRAQGPSRTK

SEQ ID NO: 45382 - protein, 94 aa, Homo sapiens
APQLEQHRGQRPKNAACKNPALMRRVIPEGGYTLWLVFTMNKLWLVFTMNKPRFLSGDFKLKALLGYPSENPCFLKGSFKPNLPLVWCSHKKAW

SEQ ID NO: 45383 - protein, 9 aa, Homo sapiens
MLSQKGPPL

SEQ ID NO: 45384 - protein, 72 aa, Homo sapiens
  misc_feature (1)...(72): Xaa = X or * as defined in Table 2
EEQELPSLSVPSCLWGPCPRAGWLHSLHWPVSHSFSATSTFGMAIWTXSLASGIKPQSSSKVSSRIQVPPTM

SEQ ID NO: 45385 - protein, 82 aa, Homo sapiens
EKIWASSQEATLQAATKLTRGRSLVFTMNKLWLVFTMNKPRFLSGDFKLKALLGYPSENPCFLKGSFKPNLPLVWCSHKKAW

SEQ ID NO: 45386 - protein, 331 aa, Homo sapiens
  misc_feature (1)...(331): Xaa = X or * as defined in Table 2
DRKAINLQVKLEGAVALXKPGEAQLEFGKALGLFQSTLGHHFVNNKEKILGDFQEATLQAATKLTRGRSLVMENMEQLLSMRMEDQSQRNMPLSVVLIREKAHSPFENRKQEQGEGASPENFRARQGXFLAFKAAPPAXAASGPAAQERSVQEPSVNAPGXIPEGGLHTLAGVHHEXALAWCSPLNKPRFLWKRLPSRTFHFPVEDESAPGSKPSGDLLTLLLGGNAAGDFKLKPCLVYPSENPCFLKGSFKPNLPLVWCSHKKAWVQPGXQSETPFQKKKKKKKKAWVTMSLFQEWFLHFCSTVEARCTQYDLPYKGLPILDSTPGHPGC

SEQ ID NO: 45387 - protein, 124 aa, Homo sapiens
HASAHASGLQQSYQAVKEKSSEALEFMKRDLTEFTQVVQHDTACTIAATASVVKEKLATEGSSGATEKMKKGLSDFLGVISDTFAPSPDKTSTAMSSPYDGTKARLYSLQSDPATYCNEPDGPP

SEQ ID NO: 45388 - protein, 64 aa, Homo sapiens
  misc_feature (1)...(64): Xaa = X or * as defined in Table 2
YCTNNQKVNXTKEIITKRKTPSRQKKDSAFSPSHPLTEGLKWNDLTLSVSLTHDGFVWRRGKGV

SEQ ID NO: 45389 - protein, 271 aa, Homo sapiens
  misc_feature (1)...(271): Xaa = X or * as defined in Table 2
SWEDVGWWRSWLQQSYQAVKEKSSEALEFMKRDLTEFTQVVQHDTACTIAATASVVKEKLAIAACSRGACFLCPFSIQTEGSSGATEKMKKGLSDFLGVISDTFAPSPDKTIDCDVITLMGTPSGPAEPYDGTKARLYSLQSDPATYCNEPDGPPELFDAWLSQFCLEEKKGEISELLVGSPSIRALYTKMVPAAVSHSETFWHRYFYKVHQLEQEQARRDALKQRAVSGDSCTXSGVLTNEXKGSWVRDTERVRSLPLQTFSEGVGWREC

SEQ ID NO: 45390 - protein, 93 aa, Homo sapiens
RRFRAEGEDVGWWRSWLQQIYQAVKEKSSEALEFMKRDLTEFTQVVHDDTACTIAATASVGKENLAVSTTQTLPSNCPSQPVLCWAPNLSTIK

SEQ ID NO: 45391 - protein, 273 aa, Homo sapiens
MGFLHLGQAGLEFLTSGSSTDISEDWEKDFDLDMTEEEVQMALSKVDASGEPFCFWKGYPGGELETLIRLLQKLFFLKTDPAFVLSPSTLVKLHLWGNEGLQESLESLVLHDAALVILVPNLEKKGEISELLVGSPSIRALYTKMVPAAVSHSEFWHRYFYKVHQLEQEQARRARLKQRAEQSISEEPGWEEEEEELMGISPISPKEAKVPVAKISTFPEGRTLAPQSPCEENLVTSVEPPAEVTPSESSESIPKSPLPTRALGTDSGGSLLA

SEQ ID NO: 45392 - protein, 271 aa, Homo sapiens
  misc_feature (1)...(271): Xaa = X or * as defined in Table 2
AGNKPDPWAGRNRTAVLPDVSVFHREDVGWWRSWLQQSYQAVKEKSSEALEFMKRDLTEFTQVVQHDTVCTIAATASVVKEKLATEGSSGATEKMKKGLSDFLGVISDTFAPSPDKTIXRDVITLMGTPSGTAEPYDGTKARLYSLQADPATLLYXPDGPPELFDAWLSQFCLEEKKGEISELLVGSPSIRALYTKMVPAAVSHSEFWHRYFYKVHQLEQEQAPRDALKQRAEQSIFEEPGWEEEEEELMGILPIFPKEAKFPLAKISYIP

SEQ ID NO: 45393 - protein, 47 aa, Homo sapiens; identical to SEQ ID NO: 33408
  misc_feature (1)...(47): Xaa = X or * as defined in Table 2

SEQ ID NO: 45394 - protein, 123 aa, Homo sapiens
LGSGDLPWEINPLSSCSLLREKDPPTTSGPQTDQPKKHLTNFKSAHKNFQTPEPQRPGVPPEPPSPGACYKCQKSDHQAKECLQPRIPPKPCPICAGPHWKLDCSAHLAATLRAPGTLAQGSL

SEQ ID NO: 45395 - protein, 51 aa, Homo sapiens
HGLLNPINSPYNSPILPVQKPDKPYRKLESFTARAIKRHQIPSLRAMLMLI

SEQ ID NO: 45396 - protein, 41 aa, Homo sapiens
  misc_feature (1)...(41): Xaa = X or * as defined in Table 2
RCPIASEASWTITDXRCPIASEASWTITDALGNSYSGGMAF

SEQ ID NO: 45397 - protein, 38 aa, Homo sapiens
  misc_feature (1)...(38): Xaa = X or * as defined in Table 2
IIRHLCNDXTPREGCLPSPXPAWSDTFETWVNNQASLQ

SEQ ID NO: 45398 - protein, 92 aa, Homo sapiens
  misc_feature (1)...(92): Xaa = X or * as defined in Table 2
LKPVITCLLQLGLLKPINSPYNSPTLPVQKPDRPYSKPNSLPXLNPSLLQRNYTSIFLLTLNMPSISCTTMLLYGQKEISSLHKGPPSLMPF

SEQ ID NO: 45399 - protein, 285 aa, Homo sapiens
  misc_feature (1)...(285): Xaa = X or * as defined in Table 2
SCTPCWHLTGRLWGITAVRQKRHVLSVDPKLRHQSRTGKAAFPWCLIIAGTPLXLYTHVSRVSDHAGMPALVLHPLQQVPLFWGRGNTLXKDXSLLSLACVQHGLLKPINSPYNSPILPVVKPDKPYKLVQNLRLINQIVLPIHPVGEAPVPLETGGKSGKDCILWFECHLSHNTIEHQVSSSTFRIVVATGVLVSLHPQLYMAQNRERHAECLGESKGREQESLSGNPENSRFSLLTSRRYLYKSTRTIVLLGLAGPLKQKKLRSQHPSLYKYLQSFRNKDSYR

SEQ ID NO: 45400 - protein, 51 aa, Homo sapiens
  misc_feature (1)...(51): Xaa = X or * as defined in Table 2
WQVPLFWQPFPEPLELWPKAHLTDSFPDLLGLAAEDXRCPIASEAPCTQVI

SEQ ID NO: 45401 - protein, 73 aa, Homo sapiens
LGSGDLPWEINTQSSCSLLCEKDPPTTSGPQTNQPKKHLANFKSGPHWKSHCPTHLAASPRAPGTLAQGSLTP

SEQ ID NO: 45402 - protein, 36 aa, Homo sapiens
PLYSCSLLREKDPPMTSGPQTDQPKEHLTNFKSEGR

SEQ ID NO: 45403 - protein, 26 aa, Homo sapiens
  misc_feature (1)...(26): Xaa = X or * as defined in Table 2
LLLGLAAEDXRCWIASEALXTITDAK

SEQ ID NO: 45404 - protein, 197 aa, Homo sapiens
  misc_feature (1)...(197): Xaa = X or * as defined in Table 2
CTLPSHXNLITLTPLNANIPSHGMLXKDXSLLSLACYSTAFXGLXTPLTIPPFYLFKNQTRLTGXFRICPLSTKLFCLSTPWCQTHILSYPQYLPPQPIFLFWISNMLSLLFLCTLYPSLSSLSLGLTLTPIRLSKLPGPYCRKPSQTAPTSNHPSSFSGSWYSVETSYPLSSSIFRKGRTDSWSLKDTPHQAQPPT

SEQ ID NO: 45405 - protein, 92 aa, Homo sapiens
LGWLPGSSLTVLAKLDIVPLVDGLPVPVSVLFGWWALHDQLLVSSSTSVFLTMSSHFCVCPLGSPVFMGLSILLISKNLPLVLLTFSAAFLF

SEQ ID NO: 45406 - protein, 109 aa, Homo sapiens
RFLVSLMLPPAVVMLNHCYSLIFTNALVKRLFAWNMLSELATCAGNLATGPRNARSPGFLLSCVPSVRDPTGNQTVQLTWQPLPEPLELWPKAHLTDSFPDLLGLAAED

SEQ ID NO: 45407 - protein, 191 aa, Homo sapiens; identical to SEQ ID NO: 32212
  DOMAIN (170)..(181): RNase H domain identified by eMATRIX, accession number PF00075B, p-value=9.182e-13, raw score of 12.56

SEQ ID NO: 45408 - protein, 83 aa, Homo sapiens
RDQLQCLQLWDAGACYTCWKSATGPRNAHSTVFLLSHVPSVWDPTENRTVHLTWQPLPEPLELWPKAHLTDSFPDLLGLAAED

SEQ ID NO: 45409 - protein, 154 aa, Homo sapiens; identical to SEQ ID NO: 40549

SEQ ID NO: 45410 - protein, 99 aa, Homo sapiens
  misc_feature (1)...(99): Xaa = X or * as defined in Table 2
PCQTTQGRLLTAGTPLXSFTHVSRVSDHAGTPALVLHPXRQVPLFWGRGNHISGTQELPNTXTAVVQAFLPEPPPTGCLLHVPEIWPLGQGMPAGQDSS

SEQ ID NO: 45411 - protein, 94 aa, Homo sapiens
RLVWPTATQRAWSQSEAAAAKTVDLALSARNSATGPRNACSPGFLLSCAPSVWDFTGNRTVQLTRQPLPEPLELWPKAHLTDSFPDLLGLVTED

SEQ ID NO: 45412 - protein, 359 aa, Homo sapiens; identical to SEQ ID NO: 35623
  DOMAIN (315)..(327): RNase H domain identified by eMATRIX, accession number PF00075C, p-value=7.848e-10, raw score of 11.58

SEQ ID NO: 45413 - protein, 214 aa, Homo sapiens; identical to SEQ ID NO: 39426

SEQ ID NO: 45414 - protein, 263 aa, Homo sapiens
  misc_feature (1)...(263): Xaa = X or * as defined in Table 2
TALLLTQSLFGGLFTQTRMKFGAVTRIGGPPLGDQSPVLLFFVPRERSTYDLGPQTDQPKKHLTNFKSTSFVFSSCIPPPXPSSISLLPPWTTDHAPLTISLTTXSPLPCSMPISASHSMLXKDXSLLSLACYSMAFXSLXTLLTIPPFYLSXNQRRFTGXFRICALSTKLFCLSTPWCQTHILSYPQYLPPQSIILFWISNVLSLLFLCTLHPSLSSLSLGLTLTPFRLSKLPGLYCRKASQTAPITSVKPKFLPYLLPISA

SEQ ID NO: 45415 - protein, 138 aa, Homo sapiens; identical to SEQ ID NO: 32475
  misc_feature (1)...(138): Xaa = X or * as defined in Table 2

SEQ ID NO: 45416 - protein, 184 aa, Homo sapiens
  misc_feature (1)...(184): Xaa = X or * as defined in Table 2
LTSFLHCCLSHHYHGAQIHPRHFLHLICRCHCHQYCHHAYLDPCPQDSHHLHWCWQPLPEPLELRPKAHLTDSFPDLLGLAAEDXHCPIASEAALPPCFPRPDMITSRLQLQRRRQTALGVRYRNATYRTRTASTNSLRPRGSPFPLALVTNDRQVRSQLALWKRDRLLQLSPINRAISESSFT

SEQ ID NO: 45417 - protein, 184 aa, Homo sapiens; identical to SEQ ID NO: 30817
  DOMAIN (7)..(54): kw TRANSCRIPTASE REVERSE II ORF2 domain identified by eMATRIX, accession number DM01354V, p-value=1.000e-40, raw score of 12.97

SEQ ID NO: 45418 - protein, 91 aa, Homo sapiens
  misc_feature (1)...(91): Xaa = X or * as defined in Table 2
AAPRQAKPGPNSSSASAPRPYNPFITSPPHTWSGLQFHSATSPPPPAQQFPLKKVAQVKGTVKWLKTDAARSPQKPTGTITDALDNSHSGX

SEQ ID NO: 45419 - protein, 119 aa, Homo sapiens
  misc_feature (1)...(119): Xaa = X or * as defined in Table 2
MQPTIGNSQSVSRPTAXMPLAESHPITQLVGTVTTPRVTPLSIRHPWRCRSANAGAMILTMKQLAIVMRVYQHQVRRSMRPGRNGARSGMSAVGAYYSSCIRVMTALQSCTGDDEAVLL

SEQ ID NO: 45420 - protein, 210 aa, Homo sapiens
MNPPGSSINVKDDSKHLIVMIREGDTQLAVQQQPPGATGLPKTKGTSFIRGPKTPAPVTDWEGSLPLVFNHCRDTSLIFIHPRFRGVRPGRDACLGPSPLAASPAFLGEGQVPQPRISVPQSLISMPRPLSVAQPLISVPQPLISTPQPLSRFPGRYFNLSLCVNFDDPDSEGEHDTEISECRLLIRCSDKSSYARSFGQQRKPMKGVHS

SEQ ID NO: 45421 - protein, 125 aa, Homo sapiens
  misc_feature (1)...(125): Xaa = X or * as defined in Table 2
PGVRGAQGGPSIPRQCEESAIGPKFAWIISSFHWKQGMFNMEAPSSLFFVNMCAVKKQTTWGRPDRGFIWQPLPEPLELWPKAHLTDSFPDLLGLAAEDXHCPIASEAPALVYTAGLHCFSKPSQ

SEQ ID NO: 45422 - protein, 446 aa, Homo sapiens
  misc_feature (1)...(446): Xaa = X or * as defined in Table 2
CSEYEDSSPAPVPATDLSSTLSSSVPQPQDTGTSQQLHPLDPWHELLRAQELQGATNHKGYSHAEHEHAGLGVQGGNGALAFSNSGHRHAVPTISSGTGRRRTPSSSAFGLLNLHQWFVSGFQAFSDRLKAALSASLLLRFGDSDWLPSSSACKCLMLGLHFVIVGNICATLKEKYSSMLHLDVTMKKNGEKRTRLQKRKKGMPPHPAYEDLNIAAITLPANVVLHQPSGFRTSGQLDPVWWSLDTDAHEIWCQDPGLGSGDFPWEITPLSSYSLLHEKDPPTTSGPQTDQPKKHLTNFKSKTKETGFIHGPKTPAPVTDWEGSLPLVFNHSGTPLXLFTHVSRVSDHAGMPALVLHPXRQVPLFWRRGKIXLTSPSRCTIIEKSCNSLPPLXDKPQPHLQHTRTSKCLNRSGQAFLPEPPPTGCLLHVPEIWPLGQGMPAARDSS

SEQ ID NO: 45423 - protein, 702 aa, Homo sapiens
  misc_feature (1)...(702): Xaa = X or * as defined in Table 2
IDMIFTPGPPSTPKHKKSQKGSAFTFPSQQSPRNEPYVARPSTSEIEDQSMMGKFVKVERQVQDMGKKLDFLVDMHMQHMERLQVQVTEYYPTKGTSSPAEAEKKEDNRYSDLKTIICNYSETGPPEPPYSFHQVTIDKVSPYGFFAHDPVNLPRGGPSSGKVQATPPSSATTYVERPTVLPILTLLDSRVSCHSQADLQGPYSDRISPRQRRSITRDSDTPLSLMSVNHEELERSPSGFSISQDRDDYVFGPNGGSSWMREKRYLAEGETDTDTDPFTPSGSMPLSSTGDGISDSTVPLFLSSEILQKQVGQSITSMLGFLSRGPSMKLCMGLACVLSLWNTVSGIKGEAKKEKGMTFLPTTDSKKFFSLLSVTSYSSFAFHKFSVAVYNISNLKTVDPAKFPTRYCYCLNNRTNDLSDFTALLVDIIGNSTSYLTEIFKSTSILSVNQSNESDCIFICVMTGKSGRNLSDFWEIEEKYPIINYTFTSGLSGVLALLLTQSLFGGLFTRTRMKFGAVTRIGGPPLGNQSPSSCSLLHEKDPPTTSGPQTDQPKKHLTNFKSAARPTFLGQGQVPLNPFSFTLSEQVLLSXAARTPQSLISTPQPLISVPQSLISVPQPLLYFSGGQEPPPPPLLCVSSLFSRLASFTMGAFTHGTQTPSPTKATAPRYPQTGDLSAEWPFTAGEEPVLVPRPHQVSIASSS

SEQ ID NO: 45424 - protein, 309 aa, Homo sapiens; identical to SEQ ID NO: 33636

SEQ ID NO: 45425 - protein, 230 aa, Homo sapiens
  DOMAIN (143)..(186): 1 kw MIND INHIBITOR DIVISION CONTROL domain identified by eMATRIX, accession number DM01756B, p-value=4.822e-15, raw score of 22.91
MPRKQGDYRTRIWKFEDGLSNVLVIQLNKLIICVMCLDLALKGLRVLLVEGNDPQGTASMYHGWVPDLHIHAEDTLLPFYLGEKDDVTYAIYFTCWPGLDIIPSCLALHRIETELMGKFDEGKLPTDPHLMLRLAIETVAHDYDVIVIDSAPNLGIGTINVVCAADVLIVPTPAELFDYTSALQFFDMLRDLLKNVDLKGFEPDDPTGNRTVQLTWQPLPEPLELWLKAL

SEQ ID NO: 45426 - protein, 280 aa, Homo sapiens
MNPLHEGCQSDTRNYVGSWQGKHSDTYRYLGALDTPAPVFPTKVSATPAKQKVRPPYIPLRKEFESQYLGDLVISAFELCRTLADWGESGTSAQAQRLYERSYANPLMAAEPAQAVKLGWRPSPKPHIGDKSVSFWLLWMETKETHFIRGPKTPAPVTDWEGSFPLAFNHCRDTSLIIHPRFKGVRPRRDACLGPSPLAESPAFQGKGQVPQPLLSLSLPLLCFSREKARACYKCQKSDHQAKECLQPRITPKPCRICAGPTGNWTVQLTWQPLAEPLEL

SEQ ID NO: 45427 - protein, 166 aa, Homo sapiens
KAYKLSLQFPHFTCPKTGHALQVSSGFVESPTVTIVPGLDINLASHTIPDNTPEPHDCISLIHLTFTPFPHVSFFPVPHPDHTWFIDGSSTRPNCHSPAKTGYAIVQATSLPLRTSHFLSIVEIYPQGNNFSVFHLLFYYSSGIIQAPSLPYTSSSRICPHPGLAN

SEQ ID NO: 45428 - protein, 185 aa, Homo sapiens
SLQGRLSDYTPTFQGCQTTQGCLPWSFTLCSKSRFSGEGETRFKRIKACYHSPATAWPFKAYKLSLQFPHFTCRKTRQALQVSSESAPYQPNCFAYPPRGAEPIHSPILNTSLHNPLFCSGSQTCFLYSFLCTLHPSLSSLSLGLTLTPIRLSKLPGLYCLKSSQTAPITSVKPKFLPHLLPISA

SEQ ID NO: 45429 - protein, 47 aa, Homo sapiens
LGLGDLPWEINPLSSCSLLHEKDPPTTSGPQTDQPKEHLTNFKSVFT

SEQ ID NO: 45430 - protein, 576 aa, Homo sapiens
  DOMAIN (422)..(461): Alkylbase DNA glycosidases alkA family proteins domain identified by eMATRIX, accession number BL00516C, p-value=9.471e- 09, raw score of 21.06
  misc_feature (1)...(576): Xaa = X or * as defined in Table 2
LGSGDLPWEINPLSSCSLLREKDPPTTSGPQTHQPKEHLTNFKSDKGDMFYPWTQNYQCRSRTGKAAFPWCLITAGTPLXLYTHVSRVSDHAGMPALVLHPXRQVPLFWGRGKLLLARPSXVPILPQPLLLHPIIFLSPPLLTPGPAYSFVLXLALPHLPSNLLLKRWLEPKAXSSMTLKGLKPVITRLLQHGLLKPTNSPYNSPILPVLKPDKPYKLVQDLRLINQIVLPIHPVLGIIGLTSSVRRDAGQDLKRDRAEFLLGDEVHHPHRRRIAEARRLLLGQHFDPLHRLIGQVLELGEARYAPPVEQHHRLAPARRTGQRLHPLEQFGQAGRAQRRNRLGIEHRDRLDRPDDGAGNALAGDGDFRRGCLFAGIGIRPRYCRYRQSQDDRRPSHAAPRPRALPIPHRPATPIADVMVMFSVAIMSQLRLVLRHIDGISRWPPAVVFITDVKIWLVYPSDDCRIRSNDRDDMQGEAPAMSMNAAARVGDPIGHSFSQGLFGEALDGLFFARRSEVDMRAGNLGRLIARGLSGGRWTPADGQLTLGSRDVFINGPPATMTIRSTGQCRQHSGLRTV

SEQ ID NO: 45431 - protein, 491 aa, Homo sapiens
  DOMAIN (437)..(448): GUANYLIN PRECURSOR SIGNATURE domain identified by eMATRIX, accession number PR00774C, p-value=5.418e-09, raw score of 11.76
  misc_feature (1)...(491): Xaa = X or * as defined in Table 2
RSKYPNLVSLCPSPLFPRPDLLSLWPNPLFLHPNLLYLCAPIPYFHAPTSYLCTPTPYFHDPTPFPLFWKELATSARNLATRPRNACSPGFLLSCVPSVRDPTGNRTVQLTWQPLPEPLELWPKAHLTDSFPDLLGLAAEDXCCPIASESPXTSDILGRDTLLLALKVQTVVLQTACGEGHVAGNCGRPLETEGSLQLTATKKLRDSVLQPKSPEFCQQFTRAWNRTQVPDETEAPAGTYAAQSGDLPWEINPLSSCSLLHEKDPPTASGPQTDQPKEHLTNFKSGFRGVRPRRDACLGPSPLAASPAFLGKGQVPQPLLSVSLPLLRLSGGQETPNPFSFTLSGKSAFLEEQVPQPRISVPQSLISTPRPLISVAQSLISAPQPLISLCPNPLFPCPDLLSLHPNPLFPRPNPFPAFLEGACYKCQKSGHQAKECLQPGIPPKLRPICAGPHWKSDCPTHLAATPRAPGTLAQGSLTDSFPDLLGLAAED

SEQ ID NO: 45432 - protein, 71 aa, Homo sapiens
MSSVKAGTSHFHFFCGSSVASGHSGCIHACLGSEAGLTFLSSTVRVTQGVCDGPGGFPGNQSGSVSLQPLS

SEQ ID NO: 45433 - protein, 189 aa, Homo sapiens
  misc_feature (1)...(189): Xaa = X or * as defined in Table 2
LGLGDLPWEINPPSSCSLLREKDPPTTSGPQTYQPKKHLTNFKSACFERIKACYHSPAKAWPFKAYKLSLQFPHFTCLKTRHAIPSXFSDLCLINQIVLPIHPMVPNPYTLLCSIPPYTMHYSVLQLIRAFFTIPLHPXPSLYXVSLGLTLTPIRLSKLPGLHCRKASQTTPITSVKPKFHPHLLPIST

SEQ ID NO: 45434 - protein, 170 aa, Homo sapiens
  misc_feature (1)...(170): Xaa = X or * as defined in Table 2
LGSGDLPWEINPLSSCSLLCEKHPPTTSGPQTDQPKKHLTNFKSETKETCFIHEPKTLAPVTDXGRQPSLGVXSLQGRPLXSFSHISRVSDHAGMPALVLHPXRQVPLFWGRGKYPNPFSPCLLPLLCFSGDRGKYPNPFSPCLYSFSAFLGTGQVPQPLLSLSLPLLCF

SEQ ID NO: 45435 - protein, 228 aa, Homo sapiens
  misc_feature (1)...(228): Xaa = X or * as defined in Table 2
QCISELQFLLASTVRQTPATSPAHKNFQTPELQRPGVPPEPPPTGACYTCRKSGHWAKECPQPGIPPKAHLTDSFPDLLSLAAEDXHCPIASEAPETITDAELPVTLTVEAHLHPGEINSHVAHTKPVWWSLHRDAHEIWCCDSDRGTSLRRPIPCPPALCSVTKIHLRPQVLRPTSPRNISPISNPAAPHQAELGPNPSSSLCSSTLXSFYHLPSSHLVWLTVSFRD

SEQ ID NO: 45436 - protein, 324 aa, Homo sapiens
  misc_feature (1)...(324): Xaa = X or * as defined in Table 2
LRSGDLPWEINPLSSCSLLREKDPPTTSGPQTHQPKEHLTNFKSCKQDLFLLSSPTSLTIPQPLSPFNLGATLQSLPSLNFNSFHFLVETKETRFIRGPKTPAPVTVLGRQPSLGVXSLQRCLSDYTPTFQGCQTTQGRLPWSFTLSGKCPLFWGRGNTLXKDXSLLSLACYSMGLLNPINSPFPSSHFTCPKTRQAVTSXVQDLRLINHIVLLPIHPGGAQPHTLFCPQYRPVVLPIILFVYVKHAFFTIPLQPLIPSLSLPSLRLTLTPIRLNKLPGLCCCKAFRDSPHYLNQAQISSSSVTYLGIILIKAHVLSLPIVSDW

SEQ ID NO: 45437 - protein, 150 aa, Homo sapiens
  misc_feature (1)...(150): Xaa = X or * as defined in Table 2
KFGLVQLTLGKPLPEPLELWPKAHLTDSFPDLLGLAAEDXHCPIASEAPYTITDAELRVTLTVEGKSVPFLINTEATHSTLPSFQGPLSLASITVVGIDGQASKPLKTPQLWCQLRQYSFKHSFLVIPTCPVPLLGXDTLTKLSASLTIP

SEQ ID NO: 45438 - protein, 533 aa, Homo sapiens
  misc_feature (1)...(533): Xaa = X or * as defined in Table 2
MGLGKSLCILKDAVLALREIKGISFQYAPNTNRLWGYRQAKQTQHLSGISTLDCPQRYNGDDTGSVWALEPSCMLWACPLVFPSEIYYFISEDVWKHLDAQEKFAAVMGPSRRTSVRAVWKGNVGLEPPHRVPTGALPRVAVKRGPLSSRPQNGRSTYGLHCLKDTPTQEDWLVSVLPEGSRVGVDPLIIPTALGHGRTTFLKVLDFQGPAPCPAAMGVRLMAGPQCVSSDYWKKMAKVLRSAGHHLIPVKENLVDKIWTDRPERPCKPLLTLGLDYTGISWKDKVADLRLKMAERNVMWFVVTALDEIAWLFNLRGSDVEHNPVFFSYAIIRDXETFMLFIDGDRIDAPSVKEHLLLDLGLEAEYRIQVHPYKSILSELKALCADLSPREKVWVSDKASYAVXSETIPKDHRCCMPYTPICIAKAVKNSAESEGMRISDEKSAGNLTEDPFYVIDRTLITTGVVCNSTEKSSLMSVASADTAENLWHLFFHILPSERALTRKLRVLKLGPVNYSVQNPTAQLHQQGPHLGVA

SEQ ID NO: 45439 - protein, 252 aa, Homo sapiens
MKVYGSHPLKQRPKLYLEPFEPRLGPDLPGCEEQPPRVAQGSCDLGLAPETNQSSWTFVIILVNPEQTLTLFNSMKAERGKEAADEKLEVRRGYPEDLAKIIDEASTSDTQANRVWSKAPAKSSRPAEQQPYFRRKTSKQKGIVATSTIKDIHSQTPSKGHQHQRPKVDKSTKMGRNQCNKAENSKNQNASSPSKDHNSSPAKEQDWMENEFDELTEVGFRRWVITNSSELEEHVLTQCKEAKNLEKRLDDC

SEQ ID NO: 45440 - protein, 559 aa, Homo sapiens
MGSSLSPVLYVALPVRQPLLRSVVEERSTKMRVGSPGFQAKFRFYSQGLSWSARGEEGLVPAFWLQPYPRPLNFKAEMTEQKENQTYVDGGFRPYIHRRKNLTEGHKAEKEMEPWDGFSDESCRTHCQVHDYAKGHGEVQRERVDEQKEHLGGRRQDCQQQHLNRRLHCLSQGRRRVKPRAVLGVMAVPMDWLDLRDMAMTMLPQSTSSFRVWTLTTWSQLPGTSSGMMKAEEYCLLGITSQIEEVRLYIDWFAYLRHILADPFALYHYSSVLTKNPFSSEVILIRPIKPIGFKEKVSICLSSKDGKFFQLKKMRGEAKEGIRNSQNLSGKLCSFQVQLDESAVKTGYVQISVERNSNRSEKKRLYVCPSSDTSTTNDQLSFLGKWGARERTESEISSSGSQPSHILERLPGCIWWEQESRLPVALKKAFIGKDVGTLPGADSSEQFSEASFACFHPREISGPQTTRTWLSDSVPAPTTLMDHNSSPAREQNWMENEFDELTEVGFRRWVITNSSKLKKHVVTQCKEAKNFDKRLQELLTRITSLEKNINDLMELKNTA

SEQ ID NO: 45441 - protein, 466 aa, Homo sapiens
GPTEPHTGELWLESGGCPSGTKLPEEGTGSNLCCSTASAGDTQANRVCSGPPTNHSRPAADRPVRRKINKQKTATSTSTKRTSTQRPHPKVTNDHSSSPAREQNWMENEFDELTEVGFRRWVITNSSELKKHVLTQCKEAKNLEKRHSLGTKEPAALKGRTQYWQDSSPADLRPWLCATLLKQYKPTVFSHSTVAVHPRAGFLNLSTVDQHPVLDEPIAEAVCIIADTNKWSVQVATSQRKVPHNLKLGQDVLVSSQVSSLLQSILQLYKLHLPADFVGDILLDNNLKCVFQLGSILPVTFRSHDPYDGEGTDELRTAACSPDTEQLARQSGTYPVSLGQATVLEDSKAALPGLGPTLMAVTVVTTEAAVDMVVGDRGEERGGTLVAPGTRGLTEEIWFPVPSPSRWWSSHPVVAFITLAKYGPTSSPPVFHHGPNIIRHGAQGAASAGDSGSSSRCDRLPCRQNA

SEQ ID NO: 45442 - protein, 289 aa, Homo sapiens
  misc_feature (1)...(289): Xaa = X or * as defined in Table 2
FSSAGDTQANRVCSVPPTNHSRPAADRPVRRKVNKQKTATSTSTKRTSTQRPHPKVTNDHSSSPAREQNWMENEFDELTEVGFRRWVITNSSELKKHVLTQCKEAKNLEKRVRVNCLTRITXPXRRTIKTLMELKNTARELHEAYTSINSWINQAEERLSEIEDQLNEIKREDKITEKMKNSTTVRVAASMQSKLLQGVAEEGPLRLTRSASFSAEISMCHQWLFSTFGNGKSRNRYHCEKAHIEGNQLVEETGRAFKSRHRYGTGPLHKFEIHEYTELHHVLMLQGKC

SEQ ID NO: 45443 - protein, 86 aa, Homo sapiens
MTASSTKSWWETGEVQAQSAAKTPSCKLQTTQGEVILASWSQPDWGEPIDMYCINEHMTVVMKDLQLSVYSLWFPDSLGSCMGYWA

SEQ ID NO: 45444 - protein, 102 aa, Homo sapiens
LLMRSWSLPSAPRGFSCSCLQPQYPCRTESWPQTEPVPHPSPTNSWYWTQPCWAALWRPGGLAWGSGQQSFHSWGVESGPEVSRAPLGAEFLHMEYVSMGGG

SEQ ID NO: 45445 - protein, 373 aa, Homo sapiens
MLIGAFRVLEYNASIPKSKTLLVPSISEKGPRLPSYREKEGPRKFEEGSCEEIKMLEYALKQERSRWMNEEQGIVLMHSWSVVSAVYMYGRSVTPCAPKSDMRELGCFSLVESLGEDISWERVNELSTQVIIHLDGLSLTSYKNLISRERFSSNIYIPRHGQGSQRGTESSEAWYIDSQDSGEPLPNLPGWLEQCCDLGYHASLNRALRTFLSAELNLEQSKHEGLDAIENAVENLDATSDKQRLMEMYNNVFCPPMKFEFQPHMGDMSHVHSIEGPTTYKTRKETKPEVQGGFLNTSSLRPLVLITLTLSLNPDPSTVLSTKHNLPKAFTNTNSLSFRYGSRVTSYTALTTFCLLCHPHLSDSVLACSHEKG

SEQ ID NO: 45446 - protein, 89 aa, Homo sapiens
GLGAPLSRPRGFSCSCLQPQYPCRTESWPQTEPVPHPSPTNSWYWTQSCWAALWRPGGLAWGSGQQSFHSWGVESGPEVSRAPLGACAR

SEQ ID NO: 45447 - protein, 365 aa, Homo sapiens
  misc_feature (1)...(365): Xaa = X or * as defined in Table 2
GEGYKADLAAATVECPICQQQRLTLSPQYSHIPQGDQPTTWXQVDCIGPLLKGQRFVLTGIDTYSGYVFAYPVCNASAKTIISGLTECLIHCHGIPHSIASDQGTHFMAKEVWQWAHVHGIHXSYHVADYPEAAGLIEGWNGLLKSQLQCQLGDNTLQGWGKVLQKPMYALNQHLIYGTVSPIATIHGSRNQDWNGSSLRGWTFTILFTAPRREPGTYIASDQRTHFMAKEVWQWAHAHGIHWSYHVADYPEAAGLIEGWNGLLKSQLQCQLGDNTLQGWGKVLQKPMYALNQHLIYGTVSPIATIHGSRNQGMEVEVAPLTITPGDPQAKFLLPVPMTLCSAGLEVLVPEGGTLPPGHTTIPLN

SEQ ID NO: 45448 - protein, 780 aa, Homo sapiens
  DOMAIN (584)..(599): G-PROTEIN BETA WD-40 REPEAT SIGNATURE domain identified by eMATRIX, accession number PR00320A, p-value=5.320e-12, raw score of 16.74
MDEQAGPGVFFSNNHPGAGGAKGLGPLAEAAAAGDGAAAAGAARAQYSLPGILHFLQHEWARFEVERAQWEVERAELQAQIAFLQGERKGQENLKKDLVRRIKMLEYALKQERAKYHKLKYGTELNQGDMKPPSYDSDEGNETEVQPQQNSQLMWKQGRQLLRQYLQEVGYTDTILDVKSKRVRALLGFSIDVTDREDDKNQDSVVNGTEAEVKETAMIAKSELTDSASVLDNFKFLESAAADFSDEDEDDDVDGREKSVIDTSTIVRKKALPDSGEDRDTKEALKEFDFLVTSEEGDNESRSAGDGTDWEKEDQCLMPEAWNVDQGVITKLKEQYKKERKGKKGVKRPNRSKLQDMLANLRDVDELPSLQPSVGSPSRPSSSRLPEHEINRADEVEALTFPPSSGKSFIMGADEALESELGPGELAGLTVANEADSLTYDIANNKDALRKTWNPKFTLRSHFDGIRALAFHPIEPVLITASEDHTLKMWNLQKTAPAKKSTSLDVEPIYTFRAHKGPVLCVVMSSNGEQCYSGGTDGLIQGWNTTNPNIDPYDSYDPSVLRGPLLGHTDAVWGLAYSAAHQRLLSCSADGTLRLWNTTEVAPALSVFNDIKELGIPASVDLVSSDPSHMVASFSKGYTSIFNMETQQRILTLESNVDTTANSSCQINRVISHPTLSISITAHEDRHIKFYDNNTGKLIHSMVAHLEAVTSLAVDPNGLYLMSGSHDCSIRLWNLESKTCIQEFTAHRKKFEESIHDVAFHPSKCYIASAGADALAKVFV

SEQ ID NO: 45449 - protein, 165 aa, Homo sapiens
WKPIAMRKSRRRQEKLLPVQKEGQPKEGEREEGGPVQAQKVPNRLHLHWTTHLPSFFQLPLLLDSLWRALKFVVLEAIVKMIRFNGVLGKCEAIRAQALHEGGPPLPLAVFHNRRLQIVACSRISARLRGSPPPKSNNEQSSLSTDLRTDSQRLPPLSRNAQQKG

SEQ ID NO: 45450 - protein, 292 aa, Homo sapiens
  DOMAIN (63)..(101): 7 kw 103-1A LACTOYLGLUTATHIONE GLUTATHIONE LYASE domain identified by eMATRIX, accession number DM01181C, p-value=4.977e- 09, raw score of 17.27
MAVASTKSRWETGEVQAQSAAKTLSCKDIVAGDMSNKSFWEQKGGSKTSSTIKAQIAFLQGEGKGQENLKKDLVRMIKMLEYALKQKRAKYHKLKYGTELNQGAMKPPSYDSDEAQQQAMRSVHGPLHRLSAPPASQQKRPTERLGPASMCTLAGPAQQALGGETALAALSRRPVQAAVAAQVSHWSMCVNPAHLSSDLKLPVLSGVQNRRRLYNRSRLLCKLLCQLGHMTQQIQWYLRCQWQMAMLFGAFGRPPKPPLLSPNGPMNKVAMVAGMKVMHGLSNMDFHSPKLT

SEQ ID NO: 45451 - protein, 523 aa, Homo sapiens
MPIGKVGEYYIKGTLRATKESEQQSSALELSSDRVYLNEKEPGDQPWNAAFVFRGCGVALALRPPHLGWGEPRWAGFRGAFGFPFSTLNPSNWSLTLIIQGCKQEGFYSPSMRPRVVPKRGSAPKVRAEENAALPSRCPPGPLPVAQPRGLLMGAHVSSAPAVGVGAASCHRLCPGFPDRPRPTLRSCIMNAVVGGCDLRGQVYDPTGGWANEGTRDLSAVQGVPNHPGGRPCPTPQSSRQLPVVSRRPVVRPGGEAPPPLDILPAALALHQSLLTPQDPREDRPSPADLWAQDSWVGQPQELPVGSRVRTGTEPDTHSGSVCTSRQGKDGSGPLARESSVRVILQGPSSAWMMFPEYTPGPRARAGTAVVGAMARQTVNVCLTKVRLQHPEGIPGGGRGPLVPKPVCTCIVDVKGSRVWHVHICMSMGCRHVCLCGRSVGSWRMCTAGQTPKLARQASIELPSMAASSTKSWWETGEVQAQSAAKTPSCKDIVAGDMSKKSLWEQKGGSKTSSTIKMDSVTT

SEQ ID NO: 45452 - protein, 104 aa, Homo sapiens
  misc_feature (1)...(104): Xaa = X or * as defined in Table 2
LLMRSWSLPSAPRGFSCSCLQPQYPCRTESWPQTEPVPSPVSHRLLVLATAMLGSSMERLAGXLGGPASGLDGLGVLFQPLINLGDGQVWLGFLHTVTLLYGAV

SEQ ID NO: 45453 - protein, 337 aa, Homo sapiens
MSVHYTLNLRVFWPLVTGLCTALVCLYHVLRGSGGARAEPADGVDGGFPLLKVAVLLLLSYVLLRCRHAVRQRFLPGSPRLEGHAAFSSRHFREPGLSILLESYYEHEVRLSPHVLGHSKAHVSRIVGELVRAGRARGSPGLIPGGALALAFRGDFIQVGSAYEQHKIRRPDSFDVLVPLRLPPLVALEPRSLGEEPALAPAFRGCFLCALKAPPSPSGASGGHWLRDCKPFADAFCVVAWNSPPPYTSCPAALTTAAAAFLWLCVSFPAVHLGDGVFLVAPPPPPLPSAPLLELPEGLRAEALWGVNTARQEQKLLSWLQERAAPGACYLKCLQLL

SEQ ID NO: 45454 - protein, 146 aa, Homo sapiens
IQQDSQAPLYSIKETQRANTYLVEWEPGAETAFKTLKQALVQAPALSLPTGQNFSLYITERAGIAFGVLTQTRGTTPQPVVYLKDGEPIEHDYQQIIAQTYATQDDLLEVPLANPDLNLYTDGSSFVVNGIRRAGYAIVSNVTVLE

SEQ ID NO: 45455 - protein, 29 aa, Homo sapiens
NHWLLLTMDPRIQQDSQAPLYSIKETQRA

SEQ ID NO: 45456 - protein, 257 aa, Homo sapiens
  DOMAIN (172)..(222): ENV polyprotein (coat polyprotein) domain identified by eMATRIX, accession number PF00429, p-value=4.724e-11, raw score of 31.08
SKIQRDSQAPLYSIEETQRANTHLVEGEPEAEIAFKTLKQALVQAPALSLPTGQNFFLYITERAGIALGILTQTRETTPQPVAYLSKEVDVVAKVWLHCLRDGEPIKHDCQQIIVQIYAARDDLLEVPLANPDLNLYIDGSSFVENGIRRAGYAIVSDVTVLENSLAAVTLQNRQGLDLLTAEKGGLCTFSGKECCFYTNQSGISSPLEDTTTAGPFLHPIQQEVARAIIGQFPTAFGVSCLEGRLRGEASWTSWVE

SEQ ID NO: 45457 - protein, 453 aa, Homo sapiens
  misc_feature (1)...(453): Xaa = X or * as defined in Table 2
MGPEPKNTHPGSCTCPLACSSSHKGFECLAVEQGSYTPVASPIVGVKENQEILDLLELKYNQTRSAVTRCVLGAASTARIKQAEEGGRSRLAESSGLRLPFVLELPALEHQTPSSSGFELLDLHQRLATWSQAFNYRLKDTLLASLLLRFWDSDWLPCSSVCSWPIVGLHLVIIERNYSYQQGTETVVSSWATGVSAAASVSATIPINRVQGHCGFLGKRCFYCCIGECNHSDHQGPGTVAGSWARGVSATASQIQVDLGKFSDDPDRYIDVLHLTWRDVMLLLDQTLAFNENNVALAAAQEFGDTWYHRPVNDRMTAEQRDKFPTDIKTAAGIPWNHWLLLTMDPQTQRDSQAPLYSIXETQRANTYLVEWEPEAETSFKTLKQALVQAPALSILTGQNFSLYVTERARLALGVLTQTCGTTPLYQDELRKKTLRHRDSEGSGFNQLEASAD

SEQ ID NO: 45458 - protein, 1607 aa, Homo sapiens
  DOMAIN (1511)..(1555): Synapsins proteins domain identified by eMATRIX, accession number BL00415N, p-value=9.540e-09, raw score of 4.29
  misc_feature (1)...(1607): Xaa = X or * as defined in Table 2
AAPAPQLGLGPCKLASHLLSQSHLSQSVRSEAEQKAGASPASSIQREPLFKDQLKAPLPEQKRRSLLTVPLLTFRAQKCGPGSPLVARGGATDSWLVSEEFRLSDSTAPPTELRGQEATGITKPPASLHPQPHAWDWARGRDPRRHLLGTPELQEHSEKTTTETLPADMGKLRTWERKEATAGQAAEGAAGGIHFEATSLLRPSSYVPQTQGALSTTYKEAKMDRDLHLTPILAAQRARGPRIHSFPSDEMIEPSEDSFETMMEHKNPSSKQMESSEGSSNTTEATSGSGVRGEAGPASGPAQEKKEPPSGPLQEMEELPTDLLQDMEEPSSGPRKEIEDPPNDLLQDLEESCNGSHQARGDPLSGASDRMKEASVNPSGAREEQEAHTDLKESGREETPQEQNQTEHSTAELMAMVRSIISLYFRMQDLKEQQRVAEEILIKGINAGQLPAPKHFSGDRREFHEFIVLCQLTLQSYPRMFYNDRLRVGYVINHLSGLALEWAKALLQENSPLIGDFPAFLEAMSEVFEYRQALRVAEEAMFTIRQGGRSATEYIDEFQSLVPILGWPDEVLQAHLCQGLNEEIRHYLFRVPQPDSRRQSDCAHPANRREAGREKSYAQAAPRGPPPEPDLDRLTCSREVDGQQLVAREVHPDINRAHLFLLLMVRVNPYHSVAVQALVDSGADGNFMDEKFAQEHYVELYEKPYPQPVQSVDGSLIGNEPVWLYTEPLVCIHQNHQESIEFDIVPSPNFSVVLGIRWLRVHAPEVDWIKGRCTFHSPYCLKNCFRPPPPCIALERHGMSLLPGLPHPYSDLADVFNPKEAVMRLPTSQAQTDPMIFLNQSPLSFSRLETVITARPFTSVPPPRLGNLWVARMQERARLQEEYWDLQDMLTNRQDYIQMIPELFDQLHGAEWFTKLELRGTIVEESVNGHRTEDVWKAAFGLELEEMKSYQPFALSPDPIIPQNVIHFILKDMLGFFVLSYGQEVLIYSMSQEEHLHHVRQVLVRFRHHNVYCSLDKSQFHRQTVEFLGFVVTPKGVKLNKNVMTIITGYPTPGSKLSLRNFIEFVFPYRHFVERFSIIAEPLVRQLLSSYQFYWGVEEQEAFECLKRAFRKAPLLHHPKPQNPFYLETGVTGTALHASLIQIDDQTGKRACCAFYSRNISPIEVEYSQAEMKILPIRAAFMVWCRYLENTEEPIMILLNTEDLASLNNDRLTVLLPGHWVFFFSHFNFDVMELPEQDGGRALPPVRNPGGGEPSRGTLPPGKPCCWPQGDSPGIHRRNPGKKRMKNRMSSMNRSYGKSCWPXYPSTRSSTASSPTSAWPRSGPSFCTSSEASCTGRTPXPCSHPRATAREAMPLLRPAPAMRVARPQPQRSLRLILDSSLIAGSSITTAITQLLTQMPALVGANTIPAQELAELFLGPGRWQRNALHSQAHRGLQFTPGFWLTLCEFFGVRVTPQEGHLPALRQNRYLEAARRWXXGCRLARSPARRPATLPSVWPAXRPARHLAGQAGQRRAGGPTQPHSSHPPTPPTPPDGSPGPGIPGSRLLHIHSADGQLHLLSREQAARALSQFLTLIYRRALPIPAWESQPREQARLEELPDEDEDANLD

SEQ ID NO: 45459 - protein, 297 aa, Homo sapiens
  DOMAIN (138)..(193): Actins proteins domain identified by eMATRIX, accession number BL00406C, p-value=1.214e-32, raw score of 6.75
  misc_feature (1)...(297): Xaa = X or * as defined in Table 2
KKSTALVIDNGSCMCKAGFAGDDAPQAMFPSTVGFPGHQGVMVDMGQKDSYVGNEAQSKRSILTLKYPIKHGIITNWDNMEKIWHHFYNELHGAPEXQPVLLTEDPLNPKDNREKMTQIMFETFNTPAMYVAIRDVLSLYAFGRTTGIVMDCGHRVTHTVPIYEGYSLPHAILHLDLTGWDLTEYPCILLFSEKSYELPDGQVITIGNEWFWCPEVLFQPSFPCMESCRIHQTTINSIKKCDVDIRKDNTVLSGGTTMYPGIADRMQKEITALAPSTMKIKIIAPPERKFSVWIGCS

SEQ ID NO: 45460 - protein, 150 aa, Homo sapiens
  DOMAIN (45)..(100): Actins proteins domain identified by eMATRIX, accession number BL00406B, p-value=1.000e-40, raw score of 5.47
FRQGVMVGMGHKDSYVGDEAQSKRGILTLKYPIEHGIVTNWDDMEKIWHHTFYNELRVAPEEHPVLLTEAPLNPKANREKMTQIMFETFNTPAMYVAIQAVLSLYASGRTTGIVMDSGDGATHTVPIYEGYALPHAILRLDLAGRDLTDY

SEQ ID NO: 45461 - protein, 65 aa, Homo sapiens
  misc_feature (1)...(65): Xaa = X or * as defined in Table 2
LMKMKKVMXRAXKEEERRTPPAEDDFEKDLEWLINENEKSDASIIEVYIANSIHNNYITKCFAIL

SEQ ID NO: 45462 - protein, 537 aa, Homo sapiens
  DOMAIN (387)..(436): APOLIPOPROTEIN E PRECURSOR APO-E GLYCOPROTEIN PLAS domain identified by eMATRIX, accession number PD02807E, p-value=4.847e- 09, raw score of 10.90
KEEERRTPPAISVIPAAAFYTAYFLHKQKMNENKDTDSKKSEEYEDDFEKDLEWLINENEKSDASIIEMACEKEENINQDLKENETVMEHTKRHSDPDKSLQDEVSPRRNDIISVPGIQPLDPISDSDSENSFQESKLESQKDLEEEEDEEVRRYIMEKIVQANKLLQNQEPVNDKRERLLKFKDQLVDLEVPPLEDTTTSKNYFENERNMFGKLSQLCISNDFGQEDVLLSLTNGSCEENKDRTILVERDGKFELLNLQDIASQGFLPPINNANSTENDPQQLLPRSSNSSVSGTKKEDSTAKIHAVTHSSTGEPLAYIAQPPLNRKTCPSSAVNSDRSKGNGKSNHRTQSAHISPVTSTYCLSPRQKELQKQLEEKREKLKREEERRKIEEEKEKKRENDIVFKAWLQKKREQVLEMRRIQRAKEIEDMNSRENRDPQQAFRLWLKKKHEEQMKERQTEELRKQEECLFFLKGTEGRERAFKQWLRRKRMEKMAEQQAVRERTRQLRLEAKRSKQLQHHLYMSEAKPFRFTDHYN

SEQ ID NO: 45463 - protein, 387 aa, Homo sapiens
  DOMAIN (326)..(375): APOLIPOPROTEIN E PRECURSOR APO-E GLYCOPROTEIN PLAS domain identified by eMATRIX, accession number PD02807E, p-value=3.613e- 09, raw score of 10.90
  misc_feature (1)...(387): Xaa = X or * as defined in Table 2
MKAGWRQTQHLHDAGQLLHLILPGEQGVARVQLRRDAAQAPHVNGHVVGVAQDHFWGSVEPALDVRVYCGGKTGGKQRERREGRCGVEILMVGERKMNENKETDSKESEEYKDESEKDLEGLTNENEKSDASIIEMACEKEENINQDLKENETVIEHSKQLSDPDKSLQDEVSPRRNDFISVPSIQPLDPISDSDSENSFQESKLESQKDLEEEEDEEVLPRSSNSCVSGIKKEDSAAKIDVVTHSSTGEPLAYIASTYKLAYIPPLNRKTCPSSAAISDRSKGNGKSNHGQSAHISSVTSTYCLSPXQKELQKREQKREKLKREEEQQKIEEEEEKKRENGIVFKAWLQKKREQVLEMRRIQRAKEIEDMNSRVSKTSLKNKFIQI

SEQ ID NO: 45464 - protein, 1141 aa, Homo sapiens
  DOMAIN (270)..(305): Prion protein domain identified by eMATRIX, accession number BL00291A, p-value=4.687e-10, raw score of 4.49
  misc_feature (1)...(1141): Xaa = X or * as defined in Table 2
MVVSLGRVSSLSEDSDPTGRVGRXVDCKVDRSIWAGVWISEDAPSEAXEIGGLGRKXMLSGGPQSPSKHVHILXDQDSSSIPEPMGPCCPPHAPGKEPGTSCSIDTDGKLSGVSGDDSXTGTDGGESEEILLPQXQLPVTLPSLPLPGXVRYTSRSRSRSRSTRDPGRKSRPISGLRGLCGDGATSPLTPRHAPARDVQPGVSMAFAGDRGDGGRRGGASQPAPPGPAVPRPCAQYSARAMPASGRRESRGGGAPAPCAPALGPAPSREGQESWKKPKENSGGGRGGAGGRRPEEPIRFGSGGRPPGPSADLXGGCTAGPALLLRGTFTSPIRAPRDPAALHEPPGRPGGESRRQPRPRAPAGQPPADAPSPGERGRPLSRRGLGQPXRHNRTRAPSTARYLPSKSGGGSQSGPGPCAAEDMEFVSGSPGXVPXFHCPSLRLVPKVCGRAWSCRDXPXGPLPAAGGPDQKATPGPCPLGAPCPAQPXCGHQPGARGRTRSWTRPGDCLAPGRQPSTPPARPEPLHQLCQPRGWGGRGGGRGGRXRRREERGRGCRQHREGGTRGGPGASPYQQGVPPGNKPSRRVRGGCPGGRRWQGWLPRGQGGERNKTPEEEGTEEXGCPPDTFPVSYLXRMSMAPLGHXSASGWSPGNRKLGLRDQGPGSLGLCSPLSQHGLSHGLWGSPKAPTAYCGRCPAASAQLXSEADTLPPVXCCLVLWRGLSPGXLAAVPRXCESPILVPKACSLHGAGRRTGNPAFYLHRRGDQXNLQQRGLPGLSGPHSWLLDPAQHADSRPGLLQTPPRQHAIPQPSSRWRPLPASPGRRDCPDASCAPTSTPGCFWLMAGLLHMAGPQLGLPHSRASHLPADRVLRHHPPGAPVLPXAQHPKQTVTEDPRGGGREGVXPCHGVLGAFGPAPPCGPGAAVCRXWPAPRKRRAAFYPAEVPXLPVAFPPHSWGPSGQPGGDLSGLVPAYQHGPALAQGERGPQGPADQGVSKALPPVPGAQAXPGYWIXLRVCSQGYVAEVSAPVTVPPSASLLHREQRVQLCDGRPDHCVGPLEGAPALPSPTPSAPPFASERPTTACPGTAMPSSSTWFTSLAQREAGPARRPGPHPHPQLPLLLLPPPEGAEEKRNLGGGPAGGNEC

SEQ ID NO: 45465 - protein, 737 aa, Homo sapiens
MQHRLSGPSLAGPAANQADFQGLDNSQWGGSGSDRMAGAISPKVSAPLLNSNHQNTPEFSDVIPKFESEGEKSACDHTIGEQQQQQQPLARFPTRTLPWATGPSSSSSFQVDWDYIVVLSSQLLGQLNCRSLAEKQAAGRRALALGSNCCRPLEARHHWAGSFNPEPRFPICIVCLGITDPANSPSRPFAADTVLLSTHGSASYSHLLFTSDWQQLTSLAPLRCSERQLPSTCLETPLRGKTMLSRKRYKHPNYTEHSSMQPPRLIHLSPLRLTSGPAQSSPPPGPVTFLISICDHMTLLSTAVQWLPTAQRIQSTPLSLALLVLYEQTSCACVTMQASSLFDTISSVIWNYIVLCIEPVLTRRRCSGSLCGEVDGSRQWMGRKFPVMIKPKELGKECPRLPMGYRLCSTDAESNKLQPLLRLKMNTNGLTFCQAKGLSMNNHPVPVTPGWRAQPGGNSERVKMLIGHKPLPTANGDARVLQHNGVWPTKAPFPSPVEMALAPFYLLCTLYQESSPKAWQQLTPISTKEPTQLHPEQAMHLPLQHLLAEPCPPHVHPHLGQPWIFVIGPIPTTRRLSELKCFHWSQPLFTCTQKRTWYLIGTGLFQQDWIALSTSQLYLIQPFIDAKATLNVHTDSAWKKTRVVPATLKPRHRNCHFKPDNLMVLEVREEILRAQVNNKWCDAQRLAIGAVNEKTTYSGEKSREAKLHVNLRQFGEAKSFIYISLLFQLSAKRINET

SEQ ID NO: 45466 - protein, 119 aa, Homo sapiens
LEEWKCLNPAQRALYREVMLENYRNLEFVDSSLKSMMEFSSTGHGNTGEVIHTGTLQIHESHHTGDFCFPEIKKDIHHFEFQWQEIERNGHEAPMTETKELTGSTDRRDQRHAGNKPIK

SEQ ID NO: 45467 - protein, 345 aa, Homo sapiens
  DOMAIN (86)..(125): PROTEIN ZINC FINGER ZINC-FINGER METAL-BINDING NU domain identified by eMATRIX, accession number PD01066, p-value=7.188e-28, raw score of 19.43
  misc_feature (1)...(345): Xaa = X or * as defined in Table 2
MKIHKSGGLKATPQLYASQFSGVAILATWGPHRPRNSSTSFSTQSKLRRPDESSVDFQKLMLCKEATKKSKEKEPGMAFPQGHLIFSDVAIKFSVEEWKCLNPEQRALYREMMLENYRNLESVGXLFKIHDGVLINRARQYRSVPHRDIGKTXFLLPRNQERYSGLXVSVARNXKKWPXSTHDRNQRVNXVHTGEKPQKCNECGKTFSQKSYLQCHHRLHTGQKPYKXEXCDKVYSCRSQLKTHRRIHTGEKAYKCKVCEKAFWDNSCLSCQKRVHIGEKPYTALVMHKAIHTGEKPYTCNECGKAFSRKANLALYHRLHTGEKPYKCEECDKVYSRRSHLERHK

SEQ ID NO: 45468 - protein, 448 aa, Homo sapiens
  DOMAIN (337)..(391): Respiratory-chain NADH dehydrogenase subunit 1 proteins domain identified by eMATRIX, accession number BL00667B, p-value= 3.475e-27, raw score of 18.18
MTISIPLRKTQAAASGSAAILNSAFGVQLPRPAEPPMITRRRIYGLHSGHCESNSAILVNGPDGHQGNRLWCTHQGIPNRQKRRYPERLSVVLNKVVASHSRFAVHRCRITRCAYQWHSGPLGERNLRIPEMQQLQGIAGSFLNRDITRDGGHQLQVEFGCKNRGGNGDGIVNAGAANDLIDFTNIDTQLFRHFENNVFFTAFQRNASPPPSCCKRATTFCTRISGAHGFAMPVIQAFAPVLKLRKWLNPVSLVPGWQCEGSALLFRRMALVELAEYRDIIKLLGRQSVGPDASGWVFRLTPYVMVGVMLTIATALPVVTVGSPLPQLGDLITLLYLFAIARFFFAISGLDTGSPFTAIGASREAMLGVLVEPMLLLGLWVAAQVAGSTNISNITDTVYHWPLSQSIPLVLALCACAFATFIEMGKLPFDLAEDAAMHACRSPLDVHH

SEQ ID NO: 45469 - protein, 482 aa, Homo sapiens
MWRETKRYAAVLLLTPHYSASLLPDWPNLYLHQSGHHVPGVYLKFGSSNPIYPCVDSAKTVFPNAPLHDRVQSVRRMGPFKGVFRKVFSNLGFEYSLSTWATMGSPGSLGVSPFGKTLFVESASGSLDALWPTVEKEISSHKNYQKHSEKQIYDVRIELTGLNALPNISLNFYKNSVSKLLNRKKGLIHLLQPFILRLCVSLHKNREENLGITIQDVAMRLSALPNIVCRLYKKTASEVLKEWSTRWDEYTHHKEVSQKALPTLSVKIYKKNICQLLNQNNGPNSEMNALITKKSVKSASGYLESIAALVEKEISSYKNYTEAFYNLLCDVYSHVTEMKLSSIEQIGNTLFVESASGVWRALRPRGKEVNDIFIDQIANSVLVDSSKDICKRFEACGAMVKKENLHIKTRQKISEKLHWPFGAPRLTSLTGPEKTGKGEHPGAKARGELSGAPPLIHTRKLSLMSNVETLLLEKLQGYTGAH

SEQ ID NO: 45470 - protein, 322 aa, Homo sapiens
MTCAQHAGRCQLSQDLSREQLALLKLVLGGACTHSWPSPTPSTAAEGLRPDFPHAGQAGRRAAPTCVFAGSPEVLHAQELRPATATEAEGWQGRKPKNKNRWCPAWREKKPCLGGSALKQKRRRRIRAAHRAKGCCPREAPAGKQTMPTWRSANARQQARGEHKRNCKELKRSRQAAAVAGLSMNTGGADVTNKQNLRRLNPPANGLPVTRAHAERDVPGLTREAPPRPASTLRGGPSVRAGLRRRQRAPNLRMRGHQVLPPRPEPDMKPTCPDYSASLLPDWLTCTFTKSGHHVPGFTSTLVGVLAFNDQHNKEKIIVSET

SEQ ID NO: 45471 - protein, 125 aa, Homo sapiens
  DOMAIN (56)..(68): OPSIN RH3/RH4 SIGNATURE domain identified by eMATRIX, accession number PR00577C, p-value=7.750e-09, raw score of 12.63
  misc_feature (1)...(125): Xaa = X or * as defined in Table 2
GDHTTFLCLLMVNAEFKYNFKTIISXDLLKKDSGQYGHFTIFFRSMSIGCFSIYLCIFNFFHQCFAVFLVEIFTFLVKCIPQVDSIEDTTFGHPEEATPHPFSFFMRLEQFSHIFSSWPVSFTAH

SEQ ID NO: 45472 - protein, 161 aa, Homo sapiens
  DOMAIN (5)..(40): Prion protein domain identified by eMATRIX, accession number BL00291A, p-value=5.012e-10, raw score of 4.49
  misc_feature (1)...(161): Xaa = X or * as defined in Table 2
PTDRPRPRALAGARGPPGRAPRVPPPAGGPRPSQYGHGGRPNPRHGWHDAFCPNNTPYRERPLDSRYLTPGPLDMRGDSGFRTGRGSDVGSLKPTDTRRNGKIYLNGSNVFYYQQRLHPVHRGDGARRGFSGRTCLHRMVCXYEQTGHQSDQTXKARSAYG

SEQ ID NO: 45473 - protein, 225 aa, Homo sapiens
LAYSIFSKSALGLPVLIPLDHEGGNITAICCRMLRVTRVCVSSPRREPPVALWCGLRDRVFPVTGARARPLWACWFRFSGSGEIFLFFLVRRLFIPRRFLCPTAVAFTSGTVRVCSTHVRTLDREFRRHLRCLDQEYTARLAVRYVSCNGSALRPYDCCRGPKTRLASKLEKTFMPGAFRLLTDLQPSYSADFVFIGGRRGAGDRSVKVRAKTWARARVVEGESP

SEQ ID NO: 45474 - protein, 176 aa, Homo sapiens
  misc_feature (1)...(176): Xaa = X or * as defined in Table 2
LAFPDGMASLIMMSLPAMRTLAWAMAVSGNCIPEGQFSALSCADFGISPKLILXSSSAPNYLAMGISCPRADDLPEAGTAETDRACRSIPQYGTDLGWYPATAAGPQSESVQGAVXPHRYEAGXSTVWKPLKKKXKPLPRRXLARWQMIRFRKPSPLTTSLKLTCAWRFLDFRWLE

SEQ ID NO: 45475 - protein, 462 aa, Homo sapiens
  DOMAIN (287)..(313): Dihydrodipicolinate synthetase proteins domain identified by eMATRIX, accession number BL00665F, p-value=4.600e-23, raw score of 18.54
  misc_feature (1)...(462): Xaa = X or * as defined in Table 2
MIEHPRRRDNYRQSGPPVADKPTTKGEPLISDIVSDAQQANLLIPVDETPPVINDEQSTSTPLTTAQTMALAAVADKNTTKDEKADDLNEDVTASLSALFAMLPGFDNTPKVTDAPSTVLPTEKPTLFTKLTSEQLTTAQPDDAPGTPAQPLTPLVAEAQSKAEVISTPSPPSISGVTRSKMRQREWLVLPPEDSLVIRRSNKTSQLPAFNVPLSAAKAAASKPWRASNTACRNSRPSKVCSAEGEQWFSASGRGEIHSQSPARDMAQMCKLAAEGHFAEARVINQRLMPLHNKLFVEPNPIPVKWACKELGLVATDTLRLPMTPITDSGRETVSGDETYLEAAPLAELHAPAGMILPVTSGDYAIPVTNGSGAVGSYSAITEPGAGSDVGSLKTTYTRRNGKIYLNGSNVFYYQQRLHPVHRGDGARRGFSGQTCLHRMVCXYEQTGHQSDQTXKARSAYG

SEQ ID NO: 45476 - protein, 634 aa, Homo sapiens
  DOMAIN (107)..(133): Prokaryotic molybdopterin oxidoreductases proteins domain identified by eMATRIX, accession number BL00551B, p-value=7.107e- 21, raw score of 23.29
MLAILTGNVGINGGNSGAREGSYSLPFVRMPTLENPIQTSISMFMWTDAIERGPEMTALRDGVRGKDKLDVPIKMIWNYAGNCLINQHSEINRTHEILQDDKKCELIVVIDCHMTSSAKYADILLPDCTASEQMDFALDASCGNMSYVIFNDQVIKPRFECKTIYEMTSELAKPGVNHIQKAPRKLVDHQAGNHRIWPLLGPTSPYAATTTPKFRHRYISTTAGEKTSQEAQLTEWFSARPPTISHKPALPLQLTLITTGHEDEDDSEMWSLTALMGCHGRMEDVCQIRRNDTDGKVVLIAVILGMVVYGVFEGEGAGTLASTRPFWSGDAHVIPMITGATILCFSFTGFDGISNLSEETKDAERVIPRAIFLTALIGGMIFIFATYFLQLYFPDISRFKDPDASQPEIMLYVAGKAFQVGALIFSTITVLASGMAAHAGVARLMYVMGRDGVFPKSFFGYVHPKWRTPAMNIILVGAIALLAINFDLVMATALINFGALVAFTFVNLSVISQFWIREKRNKTLKDHFQYLFLPMCGALTVGALWVNLEESSMVLGLIWAAIGLIYLACVTKSFRNPVPQYEDRPIKCCHWTITDSLLYCFPDLTTDFCYSSLLLLLLGLLLLLLRLLLLLQLP

SEQ ID NO: 45477 - protein, 474 aa, Homo sapiens
  misc_feature (1)...(474): Xaa = X or * as defined in Table 2
YARVHSGRSSIRRSIPVSICIRSSIRGCVPVVHCIRSSIRRSIPVDHLYQIIHTKKHTRCPFVSDHPYEEAPDYSASLLPDWLPVPSSKVVITYPGFTSICGYYTTSSKACFSVFAWCFVTSDVPGRFSDEDEDDSEMWSLTALMGVMGGWKTSARSEVSILCSTSSKVIHSSYPYADRAFQVWSLDARFAHINKPFGVDRFSGEAPSRAITTMYGVKVLNRPATGTAHRLVPPDVPVHPHGGESNKPRVQTTVSSGISRLSIPISASALQNVPDKTHDISNITDTVYHCPLSQSSRWYWRFVPVRSPPLSNGQTAVRPGGSRAGAAGGPLSEYSGSGFGVMKWTKDQLTVTVKVHHLPEVVEFLYYKQGGWLSVLFGNDERKLNGHYAVYYVLSREKGTKCWITDSMDYRQRPAPTNDAETYEFINELGARKTTVVPIGPLHVTSDEPGHLRLFVDGENIIEANNEXIHRTQC

SEQ ID NO: 45478 - protein, 464 aa, Homo sapiens
  DOMAIN (331)..(362): Orn/Lys/Arg decarboxylases family 1 pyridoxal-P attachment si domain identified by eMATRIX, accession number BL00703I, p-value= 5.950e-33, raw score of 14.40
AFEQDKAVECDCCEQQTSVYYSGPFYCVDEVEHLCPWCIADGSAAEKFAGSFQDDASIEGVEFEYDEEDEFAGIKNTYPDEMLKELVERTPGYHGWQQEFWLAHCGDFCVFIGYVGWNDIKDRLDEFANLEEDCENFGIRNSDLAKCLQKGGHCQGYLFRCLHCGKLRLTWHGFKNIDNEHMYLDPIKVTLLTPGMEKDGTMSDFGIPASIVAKYLDEHGIVVEKTGPYNLLFLFSIGIDKTKALSLLRALTDFKRAFDLNLRVKNMLPSLYREDPEFYENMRIQELAQNIHKLIVHHNLPDLMYRAFEVLPPMVMTPYAAFQKELHGMTEEVSLDEMVGRINANMILPYPPGVPLVMPGEMITEETRPVLEFLQMLCEIGAHYPGFETDIHGAYRQADGRYTVKLGFDDNHAISLFSAYASLVYVTPILGGWLADRLLGNRTAVIAGALEHIHNGTWKSKLLG

SEQ ID NO: 45479 - protein, 463 aa, Homo sapiens
  DOMAIN (206)..(244): Orn/Lys/Arg decarboxylases family 1 pyridoxal-P attachment si domain identified by eMATRIX, accession number BL00703B, p-value= 3.520e-38, raw score of 19.06
MASDTLFMPARIVGHRSTGIVTTRARARYLRLRGPAIDRLSQCLVRIREGKIINPSQGSPENRFRLTNIVRIATVGDGGSQKPSLTDDLTRRLCSIIDSDPVDKVVLGAHPAVATPIAVVETASFGRFAPETVQQITDAPVHGAQGKAVYRWISDVPIRPQSPLVLFKTLGRKPKNRKSTFRLELGSLLDTGGPHKEADQYIARVFNADRSYMVTNGTSTANKIVGMYSAPAGSTILIDRNCHKSLTHLMMMSDVTPIYFRPTRNAYGILGGIPQSEFQHATIAKRKHQTQPGRYMLVITNSTYDGLLYNADFIKKTLDVKSIHFDSAWVPYTNFSPIYEGKCGMSGARVEGKVIYETQSTHKLLAAFSQASMIHVKGDVNEETFNEAYMMHTAASPHYGIVASTETAAAMMKGNAGKRLINGSIERAIKFRKEIKRLRTESDGWFFDNAAGYIDTITLGGPS

SEQ ID NO: 45480 - protein, 170 aa, Homo sapiens
  misc_feature (1)...(170): Xaa = X or * as defined in Table 2
FVGVKSAGNRLKTIDELANESRSSVGLTQAALKTLESSGAIRIERRGRNGSYLVEMDNKALLTHVDINNVVCAMPLPYTRLYEGLASGLKAQFDGIPFYYAHMRGADIRVECLLNGVYDMAVVSRLAAESYLPQKGLCLALXLGPPPYVGEYQLXQVKAKSEYVKRVGHV

SEQ ID NO: 45481 - protein, 1109 aa, Homo sapiens
  DOMAIN (602)..(615): DNA polymerase family B proteins domain identified by eMATRIX, accession number BL00116A, p-value=7.632e-13, raw score of 12.81
SGMDGKRRPGPGPGVPPKRARGGLWDDDDAPWPSQFEEDLALMEEMEAEHRLQEQEEEELQSVLEGVADGQVPPSAIDPRWLRPTPPALDPQTEPLIFQQLEIDHYVGPAQPVPGGPPPSRGSVPVLRAFGVTDEGFSVCCHIHGFAPYFYTPAPPGFGPEHMGDLQRELNLAISRDSRGGRELTGPAVLAVELCSRESMFGYHGHGPSPFLRITVALPRLVAPARRLLEQGIRVAGLGTPSFAPYEANVDFEIRFMVDTDIVGCNWLELPAGKYALRLKEKATQCQLEADVLWSDVVSHPPEGPWQRIAPLRVLSFDIECAGRKGIFPEPERDPVIQICSLGLRWGEPEPFLRLALTLRPCAPILGAKVQSYEKEEDLLQAWSTFIRIMDPDVITGYNIQNFDLPYLISRAQTLKVQTFPFLGRVAGLCSNIRDSSFQSKQTGRRDTKVVSMVGRVQMDMLQVLLREYKLRSHTLNAVSFHFLGEQKEDVQHSIITDLQNGNDQTRRRLAVYCLKDAYLPLRLLERLMVLVNAVEMARVTGVPLSYLLSRGQQVKVVSQLLRQAMHEGLLMPVVKSEGGEDYTGATVIEPLKGYYDVPIATLDFSSLYPSIMMAHNLCYTTLLRPGTAQKLGLTEDQFIRTPTGDEFVKTSVRKGLLPQILENLLSARKRAKAELAKETDPLRRQVLDGRQLALKVSANSVYGFTGAQVGKLPCLEISQSVTGFGRQMIEKTKQLVESKYTVENGYSTSAKVVYGDTDSVMCRFGVSSVAEAMALGREAADWVSGHFPSPIRLEFEKVYFPYLLISKKRYAGLLFSSRPDAHDRMDCKGLEAVRRDNCPLVANLVTASLRRLLIDRDPEGAVAHAQDVISDLLCNRIDISQLVITKELTRAASDYAGKQAHVELAERMRKRDPGSAPSLGDRVPYVIISAAKGVAAYMKSEDPLFVLEHSLPIDTQYYLEQQLAKPLLRIFEPILGEGRAEAVLLRGDHTRCKTVLTGKVGGLLAFAKRRNCCIGCRTVLSHQGAVCEFCQPRESELYQKEVSHLNALEERFSRLWTQCQRCQGSLHEDVICTSRDCPIFYMRKKVRKDLEDQEQLLRRFGPPGPEAW

SEQ ID NO: 45482 - protein, 291 aa, Homo sapiens
  misc_feature (1)...(291): Xaa = X or * as defined in Table 2
DPGADRRGSVWGLSDLRNTYNALYLTHSGRLSECPTPANEEKEPTNHNRTLTNQTQKEKKKTRTKDCTTRNKNSTRPGSGIIAGPSYYTVAGPPSAIDPRWLRPTPPALDPQXMPHTSKRGKRADQSQPNANKPNTEREKKDKNEGLHHKEQEQQRPGSGIIAGPSYYTVAGPPSAIDPRWLRPTPPALDPQTEPLIFQQLEIDHYVAGLTHEVMSLSHLTLVMRWGSVSAAHLAHWARCRWISTELTPNSITSTSSPLKDCSSSPAMEQSWLENDFDELTEDKKTCLCDH

SEQ ID NO: 45483 - protein, 195 aa, Homo sapiens
  DOMAIN (63)..(84): Homoserine dehydrogenase proteins domain identified by eMATRIX, accession number BL01042A, p-value=6.063e-18, raw score of 13.29
DGMRTLRGISAKFFAALARANINIVAIAQGSSERSISVVVNNDDATTGVRVTHQMLFNTDQVIEVFVIGVGGVGGALLEQLKRQQSWLKNKHIDLRVCGVANSKALLTNEELAQAKEPFNLGRLIRLVKEYHLLNPVIVDCTSSQAVADQYADFLREGFHVVTPNKKANTSAMGYYHQLRYAAEKSRRKFLYEHN

SEQ ID NO: 45484 - protein, 255 aa, Homo sapiens
  DOMAIN (28)..(83): Aspartokinase proteins domain identified by eMATRIX, accession number BL00324B, p-value=1.000e-40, raw score of 21.78
MVLMAGFTAGNEKGELVVLGRNGSDYSAAVLAACLRADCCEIWTDVDGVYTCDPRQVPDARLLKSMSYQEAMELSYFGAKVLHPRTITPIAQFQIPCLIKNTGNPQAPGTLIGASRDEDELPVKGISNLNNMAMFSVSGPGMKGMVGMAARVFAAMSRARISVVLITQSSSEYSISFCVPQSDCVRAERAMREEFYLELEESLLEPLAVTERLPIISVGSDGNPPPCGGISPKFFAALAPRPISKFVALCSGIPF

SEQ ID NO: 45485 - protein, 501 aa, Homo sapiens
  DOMAIN (36)..(91): Aspartokinase proteins domain identified by eMATRIX, accession number BL00324B, p-value=1.000e-40, raw score of 21.78
  misc_feature (1)...(501): Xaa = X or * as defined in Table 2
HSXVPANLYMELKACFTGANEKGELVVLGHNLAVSYFIALAASLRADCCEIWTDVDGVYTCDPRQVPDARLLKSMSYQEAMELSYFGAKVLHPRTITPIAQFQIPCLIKNTGNPQAPGTLIGASRDEDELPVKGISNLNNMAMFSVSGPGMKGMVGMAARVFAAMSRARISVGLITQSSSEYSISFCVPQSDCVRAERAMQEEFYLELKEGLLEPLAVTERLAIISVVGDGMRTLRGISAKFFAALARANINIVAIAQGSSERSISVVVNNDDATTGVRVTHQMLFNTDQVIEVFVIGVGGVGGALLEQLKRQQSWLKNKHIDLRVCGVANSKALLTNVHGLNLENWQEELAQAKEPFNLGRLIRLVKEYHLLNPVIVDCTSSQAVADQYADFLREGFHVVTPNKKANTSSMDYYHQLRYAAEKSRRKFLYEHNTFVSPHIRPLIERRGRSSTRDKWCARPSTERQQDNSAARILSCQQGNTSFEHTSSIRVGTTNSLNVL

SEQ ID NO: 45486 - protein, 87 aa, Homo sapiens
  DOMAIN (14)..(69): Sodium:solute symporter family proteins domain identified by eMATRIX, accession number BL00456C, p-value=5.979e-09, raw score of 24.55
ADIFAGAIFIKLALGLDLYLAIFILLAMTAVYTTTGKYVAYFAHSGYLLLIPPQPAISILSVNLVTAEVKAPFHFHYESQAQHQKHN

SEQ ID NO: 45487 - protein, 651 aa, Homo sapiens
  misc_feature (1)...(651): Xaa = X or * as defined in Table 2
RWLMRGMGIALPAAMASTVSPSTIAETPEPPPLSDWLRASGDVWVHLLGLDPHLSSLLLSICLFSRSLIWIFXLQPXSVALAFQMGASLFASNIGVIEGEGPQAKPLXCLTVSYFEMLNNLNAQGPKGKLSPCQCLSLQVMTMPEYLKKRWTLGQRSQWPQMHVSFSSXLFPFXADIFAGAIFIKQPSGEGKYMRTHGXNALVLFFLSLGGLEVVIINIGCLRFQXDISFYSDAFLAFNEVGGYESFTEKYVNATPSVVEGDNLTISASCYTPRADSFHIFRDAVTGKGRXLPLKSSPGLFHECVTFSRQVIVQRCLCGKDMSHVKAACIMFLFVXWLLVLPIWASLDSLLNSSPDMVACVVPSECVISTLSGLARQCPATNQCLYPFPAPGLRGLMLSVMLASLMSSLTSIFNSASTRTKAQWKXLXCFCLMFKLCCFLLRIFVLLLTVVSIVWVPLVQVSQNGQLIHYTESIXXXLTXISFSYFLNILIFFLLLLQGAFWGLMVGLAMGLIRMITEFAYGTGSCLAPSNCPKIICGVHYLYFSIKVPFYYTIANICLLLMHFCMVPVQLYRLCWVLRNTTLTRISSSFVIXIFCNHLLIFVPDYPEKSRGCLKKAYDLFCGLQKGPKLTKEEEEALSKKLTDTSERPSW

SEQ ID NO: 45488 - protein, 463 aa, Homo sapiens
  DOMAIN (313)..(356): RecF protein domain identified by eMATRIX, accession number BL00617A, p-value=8.393e-10, raw score of 25.53
MPRNDWADIAEMIVPLGKQRREISHLITTRSDIPRFTTMVAVKSVTSSVGNALYWIERFGIDALRVDAVASMIYRDYSRKEGEWIPNEFGGRENLEAIEFLRNTNRILGEQVSGAVTMAEESTDFPGVSRPQDMGGLGFWYKWNLGWMHDTLDYMKLDPVYRQYHHDKLTFGILYNYTENFVLPLSHDEVVHGKKSILDRMPGDAWQKFANLRAYYGWMWAFPGKKLLFMGNEFAQSREWNHDARLDCTKKSKRQEKKTKRTNRKQHKRMLTEAAKSSPIKEAPTTGFKQLLRPVYYPPKFTRPNLFPKTLGNHCLTINETLPANGITAIFGVSGAGKTSLINAISGLTRPQKGRIVLNGRVLNDAEKGICLTPEKRRVGYVFQDARLFPHYKVRGNLRYGMSLMNDYLRKQIIDISTRIAGTANNGDFTGQWITAANTVNFQIVTGTHNCHQYFIALRLIFG

SEQ ID NO: 45489 - protein, 489 aa, Homo sapiens
ITIMVMEKIHMLFTMHGAEGFMSSISERIKFLLAREGLKQRDLAEALSTSPQTVNNWIKRDALSREAAHQISEKFGYSLDWLLNEEGSPKKDLESNIPPESEWGTVDAWDKNTPLPDDEVEVPFLKDIEFACGDGRVHDEDHNGFKLRFSKATLRRVGANSDGSGVLCFPASGDSMEPVIPDGATVAVDTGNKRVIDGELYAINQGDLKRIKQLYRKPGGKILIRSINRDYDDEEADEADVEIIGFVFCVMEQMKMLDTLQNTQLQSAIVKAMYAATIESELDTQSAMDFILGADNKEQQSKLTGWLGEMASYYSAAPVRLGGARVPHLLPGDSLNLQSAQDTDNGYSTFEQSLLRYIAAGLGVSYEQLSRNYSQMSYSTARASANESWAYFMGRRKFVASRQACQMFLCWLEEAIVRRVVTLPSKARFSFQEARTAWGNANWIGSGRMAIDGLKEVQEAVMLIEAGLSTYEKECAKRGDDYQEIFAQQ

SEQ ID NO: 45490 - protein, 38 aa, Homo sapiens
  misc_feature (1)...(38): Xaa = X or * as defined in Table 2
LPRQLALSCVVHCQTLVPAIRCIDWGWLFXWXSVTPVM

SEQ ID NO: 45491 - protein, 431 aa, Homo sapiens
  misc_feature (1)...(431): Xaa = X or * as defined in Table 2
MGKIMSSYQHVDLIVDCDFEAYHRQPSSGTKSVVTGPSAQALITEKIVTYHWDQHVGDVLVLNIYCVINVLDHTVKAVIDDRFMGGITTINLQLMAIIVRYFFASGSAYIVAMLPVFAMLANVSGAPLMLTALALLFSNSYGGMVTHYGGAAGPVIFGVGYNDIKSLCFDERTRIDVADTYASNWRSRCNQTIFNGECPNTRQHIAAVRRGIDTLLMNDYLRKQIIDISTRIAGTANNGDFTGQWITAANTVNFQIVAGTHNCHQYFIALRLIFGILKYIQDRAREGLKQRDLAEALSTSPQTVNNWIKRDALSREAAQQISEKFGYSLDWLLNGEGSPKKDLESNIPPESEWGTVDAWDKNTPLPDDEVEVPFLKDIEFACGDGRVHDEDHNGFKLRFSKVVQPRVGCXQGXGXLLYLDSVXXGDPLEST

SEQ ID NO: 45492 - protein, 79 aa, Homo sapiens
  misc_feature (1)...(79): Xaa = X or * as defined in Table 2
SWMSSPRAFSSSTCLETAAPTRMATALTSAACRLPPAAGSGSPWAPAPYRWRARRRTGPMSDRQXRTSQPCPEPAAASR

SEQ ID NO: 45493 - protein, 554 aa, Homo sapiens
  DOMAIN (392)..(409): Zinc finger C2H2 type, domain proteins. domain identified by eMATRIX, accession number BL00028, p-value=5.500e-11, raw score of 16.07
  misc_feature (1)...(554): Xaa = X or * as defined in Table 2
MQDSAHLRRLPPAASRRVWLALGSCPLPLESSPAHRAYERPSVAHQPAVPGARRSLEVPSEVPLTVPALTPPRIPAMLTAVCGSLGSQHTEAPHASPPRLDLQPLQTYQGHTSPEAGDYPSPLQPGELQSLPLGPEVDFSQGYELPGASSRVTCEDLESDSPLAPGPFSKLLQPDMSHHYESWFRPTHPGAEDGSWWDLHPGTSWMDLPHTQGALTSPGHPGALQAGLGGYVGDHQLCAPPPHPHAHHLLPAAGGQHLLGPPDGAKALEVAAPESQGLDSSLDGAARPKGSRRSVPRSSGQTVCRCPNCLEAERLGAPCGPDGGKKKHLHNCHIPGCGKAYAKTSHLKAHLRWHSGDRPFVCNWLFCGKRFTRSDELQRHLQTHTGTKKFPCAVCSRVFMRSDHLAKHMKTHEGAKEEAAGAASGEGKAGGAVEPPGGKGKREAEGSMASSSPDSPCSCDCFVSVPPASAIPAVIFAHELGPTPGRGAGGGVCPRRHSHSWEPAPGLXAVGGGGGASGQAGDRGCHAXEAGRSSCSRRGSGLXRAGTSXISASS

SEQ ID NO: 45494 - protein, 157 aa, Homo sapiens
  DOMAIN (137)..(153): C-5 cytosine-specific DNA methylases proteins domain identified by eMATRIX, accession number BL00094B, p-value=2.149e- 10, raw score of 16.39
  misc_feature (1)...(157): Xaa = X or * as defined in Table 2
GRPSSPGVHGSSTQTPAHVGSFPGCGPIPPDACRRSKIRGPGGWGGVGGCRDGRNSRDLRNLPCPFLFLPGPXAAAPSPPWPAAGAAPCGQCLDGWPHSYSHGHSSAAGRGGICRSPPLLAGELRPPGIQYNGRTEVRGILSGSPCPPFSGAGSQSS

SEQ ID NO: 45495 - protein, 149 aa, Homo sapiens
  misc_feature (1)...(149): Xaa = X or * as defined in Table 2
PHQDLEEAMVLLXPPSPPAWPTMRTRKRPSSKVSSTSRPLRKSIMTTYAVPSRAPTPAXPSASKPTNAFSHMVGSEPRSHAHLDGRHRDSRXRKPRPLSGPRTLGGKSLRGSAGAGRGGVPRPRPLPENLDAPLWNSPGNSAGAAVQLA

SEQ ID NO: 45496 - protein, 366 aa, Homo sapiens
EGPSSEAAHPGGTPREQDGAMDPARKAGAQAMIWTAGWLLLLLLRGGAQALECYSCVQKADDGCSPNKMKTVKCAPGVDVCTEAVVAVETIHGQFSLAVRGCGSGLPGKNDRGLDLHGLLAFIQLQQCAQDRCNAKLNLTSRALDPAGNESAYPPNGVECYSCVGLSREACQGTSPPVVSCYNASDHVYKGCFDGNVTLTAANVTVSLPVRGCVQDEFCTRDGVTGPGFTLSGSCCQGSRCNSDLRNKTYFSPRIPPLVRLPPPEPTTVASTTSVTTSTSAPVRPTSTTKPMPAPTSQTPRQGVEHEASRDEEPRLTGGAAGHQDRSNSGQYPAKGGPQQPHNKGCVAPTAGLAALLLAVAAGVLL

SEQ ID NO: 45497 - protein, 197 aa, Homo sapiens
  DOMAIN (3)..(13): Ly-6 / u-PAR domain proteins domain identified by eMATRIX, accession number BL00983B, p-value=2.895e-09, raw score of 8.19
  misc_feature (1)...(197): Xaa = X or * as defined in Table 2
AQRAQALECYSCVQKADDGCSPNKMKTVKCAPGVDVCTEAVGAVESHPFWIWPRPFNAAPPPLSAWPGPYDTALQARPLYXQLQARGAESXELVHGQFSLAVRGCGSGLPGKNDRGLDLHGLLAFIQLQQCAQDRCNAKLNLTSRGLDPAGTSPPVVSCYNASDHVYKGCFDGNVTLTAEPTTVASTTSVTTSTSPQ

SEQ ID NO: 45498 - protein, 321 aa, Homo sapiens
  DOMAIN (106)..(124): GLUCOSE/RIBITOL DEHYDROGENASE FAMILY SIGNATURE domain identified by eMATRIX, accession number PR00081A, p-value=4.808e- 09, raw score of 10.53
MNVKGDTQGNTRVRVDNIGGVGAQTVNGIELIEVGGNSAGNFALTTGTVEAGAYVYTLAKGKGNDEKNSPSVYRPEAGSYISNIAAANSLFSHRLHDRHSCLQPLKILVTGGAGFIGSAVVRHIINNTQDSVVNVDKLTYAGNRESLADVSDSERYVFEHADICDAPAMARIFAQHQPDAVMHLAAESHVDRSITGPAAFIETNIVGTYVLLEAARNYWSALDSDKKNSFRFHHISTDEVYGDLPHPDEVNNTEELPLFTETTAYAPSSPYSASKASSDHLVRAWKRTYGLPTIVTNCSNNYGPYHFPEKLIPLVILNALE

SEQ ID NO: 45499 - protein, 67 aa, Homo sapiens
AGFLREWLFLFTRIANGGNRGMYLSVNGNYTGNNGLMTFNATLGGDNSPTDKMNVKGDTQGHASRSG

SEQ ID NO: 45500 - protein, 166 aa, Homo sapiens
MTRSLLSVFEEDAGTLTDYTNQLLQAMQRVYGAQLNLLHTELAKQLETQWFYLSYNSEKRISQTLSAMWRGRAAQATQGHWVWGMVEAVCSKVSTLKDLFGLASNEHDLSMAKYSRLPKKKENEKLAAFGQPTWCDPAERVGFLEPVGPDPGAKSAPSPRDRASTL

SEQ ID NO: 45501 - protein, 408 aa, Homo sapiens
MVKKGQLTAQAISSEGANPKPWRLPLGVEPAGAQKSRIEVWEPLPRFQRMYGNAWMSRQKSAAAVEPSWRTSARTAYVSLHTQSSLNKVGLKGPASIALAKGNTQTFQDCGPCSEHSLIPRDSEYQYTALKMETYQTQESSSSPATEQSWMENDFDELREEGFRRSNYSELREDIQTKGKEVENFEKNLEECITRITNTEKCLTELMELKTKARELCEECRSLRRPNLRLIGVPESDGENGTKLENTLQDIIQENFTNLARQANLQIQEIQRTQQRYSSRRATPRHIIVRFTKVEMKEKMLRAAREKGRVTLKGKPIRLTADLSAETLQARRQWGPIFNFLKEKNFQPRISYPAKLSFISEGEIKYFTEKQMLRDFVTTRPAIKELLKEALNMERNNQYQPLQNHAKM

SEQ ID NO: 45502 - protein, 451 aa, Homo sapiens; identical to SEQ ID NO: 32457

SEQ ID NO: 45503 - protein, 860 aa, Homo sapiens
  DOMAIN (334)..(379): kw TRANSCRIPTASE REVERSE II ORF2 domain identified by eMATRIX, accession number DM01354N, p-value=1.000e-40, raw score of 13.17
MTLESTNVKLKGEMDHAGNFAGYNCGDCKFGWTGPNCERKKPPVIRQNIHSLSPQEREQFLGALDLAKKRVHPDYVITTQHWLGLLGPNGTQPQFANCSVYDFFVWLHYYSVRDTLLDYALDAVMAINLTNGQCCTASYGQHLSVQALCANPGIPKLCTDTLGLPYKLHIGFAYIVEPKKIVSYVVLCVTCQGCWTFPVCKVWPPLLAAVEFNSLSATFRPFPGYQLSQGLAPLVPEQTDPFPAEKGERSSSPAMEQSWMENDFDELREEGFRRSNYSELREDIQTKGKEVENFEKNLEECITRITNTEKCLKELMELKTKARELQIQTTIREYYKHLYANKLENLEEMDKFLDTYTLPRLNQEEIESLNRPITGSEIVAIINSLPTKKSPEPDGFTAEFYQRYKEELHINRAKDKNHMIISIDAEKAFDKIQQPFMLKTLNKLGIDGTYFKIIRAIYDKPTANIILNGQKLEAFPLKTGTRQGCPLSPLLFNIVLEVLARAIRQEKEIKGIQLGKEEVKLSLFADDMIIYLENPIVSAQNLLKLISNFSKVSGYKINVEKSQAFLYTNNRQTESQIMSELPFTIASKRIKYLGIQLTRDMKDLFKENYKPLLKEIKEDTNKWKNIPCSWVGRINIVQNGPYCPRFYNPRLRTSLCRNGESLSRILTCFPWFLDQVTDIKEKLKLSKKVWSALPYTICKDESVTAGTSNEEECWNGHSKAREPLLFFKAPDPDRNIVSPRKSFPRPRGQAALANHDIPAQLSRLSSLLASPKAGSTRYLPEIMNDGLTNQINNPEVDVDITRPDTFIRQQIMALRVMTNKLKNAYNGNDVNFQDTKRTTRKEEQVDIAGKSKPQFSDKQN

SEQ ID NO: 45504 - protein, 1039 aa, Homo sapiens
  DOMAIN (408)..(453): kw TRANSCRIPTASE REVERSE II ORF2 domain identified by eMATRIX, accession number DM01354N, p-value=1.000e-40, raw score of 13.17
  DOMAIN (423)..(702): Reverse transcriptase domain identified by PFam, accession name rvt, E-value=7.5e-54, PFam score of 192.3
MGRTREAGCVAAGVVIGAGACYCVYRLAWGRDENEKIWDEDEESTDTSEIGVETVKGAKTNAGAGSGAKLQGDSEVKPEVSLGLEDCPGVKEKAHSGSHSGGGLEAKAKALFNTLKEQASAKAGKGARVGTISGNRTLAPSLPCPGGRGGGCHPTRSGSRAGGRASGKSKGKARSKSTRAPATTWPVRRGKFNFPYKIDDILSAPDLQKVLNILERTNDPFIQEVALVTLGNNAAYSFNQNAIRELGGVPIIAKLIKTKDPIIREKTYNALNNLSVNAENQGKIKTYISQVCDDTMVCRLDSAVQMAGLRLLTNMTVTNHYQHLLSYSFPDFFALLFLGNHFTKIQIMKLIINFTENPAMTRELVLLSFGTPLVLTTDLLQALSSLPFMESGLFQGEGDEIQITSIEYYKHLYANKLENLEEMDKLLDTYTLPRLNQEGVESLNRPITGSEIEAIINSLPTKKGPGPDGFTAKFCQRYKEELHIKKLIHHDQVGFIPGMQGWFNIRKSINVIEHINRTKDKNHMIILIDAEKAFDKIQQPFMLKTLNKLGIDGTYLKIIRAIYGKPTVNIILNRQKLEAFPLKTGTRQGCPLSPLLFNIVLEVLAKAIRQEKEIKGIQLGKEEVKLSLFADDMIVYLENPIISAQNLLKLTGNFSKVSGYKINVQKSQAFLYTNNRQTESQIMSELPFTIASKRIKYLGIQLTRDVKDLVKENYKPLLKEIKEDTNKWKNIPCSWVGRINILKMAILPKERSSSPATEQSWMENDFDELREEGFRRSNYSELQEDIQTKGKEVENFEKNLEECITRITNTEKCLKELMELKTKARELREECRSLRSRCDQLEERVSAMEDEMNEMKPNLRLIGVPESDGENGTKLENTLQDIIQENFPNLARQANIQIQEIQRTPQRHSSRRATPRHIIVRFTKVEMKEKMLRAAREKGRVTLKGKPIRLTADLSAETLQARREWGPIFNILKEKNFQPRISYPAKLNFISEGEIKYFTDKQMLRDFVTTRPALKELLKEALNMERNNRYQPLQNHAKM

SEQ ID NO: 45505 - protein, 420 aa, Homo sapiens
MDPNQEVISELPEKEFRRLIIKLLKVPERSHDPETKVAALEQVESQKRIQNWSGRLHLWGQGTDKQKDSSNLCRLKCPCLDSFEESSGSPQHAAGDLRTGRLPPQERSSSPAMEQSWMENDFDELREGFRRSNYSELWEDIQTKGKEVENFEKNLEECITRITNTEKCLKELMELKTKARELREECRSLRRRYDQLEERVSAMEDEMNEMKREGKFREKRIKRNEQSLQEIWDYVKRPNLRLIGVPESDGENGTKLENTLQDIIQENFSNLARQANVQIQEIHRTPQRYSSRRATPRHIIVRFTKVEMKEKMLRAAREKGRVTLKGKPIRLTADILAETLQARREWGPIFNILKEKNFQPRISYPAQLSFISVGKIKSFTDKQMLRDFVTTRPALKELLKEALNMERNNRYQPLQNHAKM

SEQ ID NO: 45506 - protein, 714 aa, Homo sapiens
MAAGVDCGDGVGARQHVFLVSAPPAGSEGTTRFDSDCSATLVLKLEGIIYLGSWASVPREDEKSACLVTHSGVGNDMPLAEGAPYSSKAGPLIKKTKIIKHFSKVFGGGGLYSVLENLGSEELTLCTENYCDGRYNEGTQAVRLGKFQPLDQVVVDNVFPNCILLLKLPGLEKLLHHVTEEKGNPEIDNKKYYKYSKEKTLKWLEKKVNQTVAALKTNNVNVSSRVQSTAFFSGDQASTDKEEDYIRYAHGLISDYIPKELSDDLSKYLKLPEPSASLPNPPSKKIKLSDEPVEAKEDYTKFNTKDLKTEKKNSKMTAAQKALAKVDKSGMKSIDTFFGVCASRFCTAKETLLYGSTKTEKGQVMVVAPRKAWRFSLQLQTLPEDSDFFFCTFLENRQERSSSPATEQSWMENDFDELREEGFRRSNYSELREDIQTKGKEVENFEKNLEECITRITNTEKCLKELMELKTKARELREECRSLRSRCNQLEERVSVMEDEMNEMKQEGKFREKRIKRNEQSLQEIWDYVKRPNLRLIGVPESDGENGTKLENTLQDIIQENFPNLARQANTQIQEIQRTPQRYSSRRATPRHIFVRFTKVEMKEKMLRAAREKGWVTHKGKPIRLTADLSAETLQARREWGPIFNILKEKNFQPRIAYPAKLSFISEGEVKYFTDKQMLRDFVTTRPALKELLKEALNMERNNRYQPLQNHAKM

SEQ ID NO: 45507 - protein, 471 aa, Homo sapiens
MAEGKEEQVPSYMDGSRQRKNEEDVKAETPDKTISSRAALRRGTSSDGRKLNGTFAVRGAGGYYMWGHTRAAFSVNPFGSLGQVSLKRKTVISELKQAVPRERSTGPRRQPKPSSWLKDTLFGGRSQDGRVGTAPVYSSQRERQRRRVISAFASEERSSSPATEQSWMENDFDELREEGFRRSNYSELREDIQTKGKEVENFEKNLEECITRITNTEKCLKALMELKTKARELREECRSLRSRCDQLEERVSAMEDEMNEMKREGKSREKRIKRNEQSLQEIWDYVKRPNLRLIGVPESDAENGTKLENTLQDIIQENFPNLARQANVQIQEIQRTPQRYSSRRATPRHIIVRFTKVEMKEKMLRAAREKGRVTLKGKPMRLTANLSAETLQARREWGPIFNTLKEKNFQPRISYPAKLSFISEGEIKYFTDKQMLRDFVTTRPALQELLKEARNMERNNRYQLLQNYAKM

SEQ ID NO: 45508 - protein, 719 aa, Homo sapiens
  DOMAIN (89)..(134): kw TRANSCRIPTASE REVERSE II ORF2 domain identified by eMATRIX, accession number DM01354N, p-value=1.000e-40, raw score of 13.17
  DOMAIN (279)..(527): Transmembrane region cyclic Nucleotide G domain identified by PFam, accession name CNG_membrane, E-value=0.00019, PFam score of -72.3
MGRNQSRKAENSKNQSTSSPPKERTSLPATEQSWMENDFDELREDGFRQSTTSKTNKEEKREELNSRNKNDKGDIISNPTDIQTTIREYYKHLYSNKLENLEEMDKFLDTYTLPRLNQEEVESLNRPITGYEIKAIINSLSTKKSPGQMDSQPNSTRDIILNFRTTYVSKSGQVIFEARSICIHYVTTWFIIDLIAALPFDLLYAFNVTVNVFVDKPAFPEYKVSDAKKSKFILLHFSTFKAGWDWFILLATFYVAVTVPYNVCFIGNDDLSTTRSTTVSDIAVEILFIIGPLDVRVSLVHLLKTVRLLRLLRLLQKLDRYSQHSTIVLTLLMSMFALLAHWMACIWYVIGKMEREDNSLLKWEVEGKLTNRKDIHTKNPSVHHHHQRPKVDKTTKMGKKQNRKTGNSKNQSASPPPKERSSSPATEQSWMENDFDELREEGFRRSNYSELQEDIQTKGKEVENFEKNLEECITRITNTEKCLKELMELKTKARELQRVSAMEDEMNEMKREGKFREKRIKRNEQSLQEIWDYVKRPNLRLIGVPESDGENGTKLENTLQDIIQENFPNLARQANIQIQEILRIPQRYSSRRATPRHIIVRFTKVEMKEKMLRAAREKGRVTLKGKPIRLTVDLSAETLQARREWGPIFNILKEKNFQPRISYPAKLSFISEGEIKYFTDKQMLRDFVTTRPAIKELLKEALNTERNHRYQPLQNHAKM

SEQ ID NO: 45509 - protein, 127 aa, Homo sapiens
MLMLNIGFKNFQFEHLKCSHGSYSEDIGFPNAGALSGAMFLLEEKHLLFGLKEEERLRASIRRESQQRRMREKQHQRGLSASYWNLIDTMRRRKARSPYSLAAIKNRYKGGIRDQKPSYDSLNLCMT

SEQ ID NO: 45510 - protein, 155 aa, Homo sapiens
DHSSSPAREQNWMENEFDELTEVGFRRWVITNSSELKKHVLTQCKEAKNLEKRLGELLTRITSLEKNINDLMELKNTARELHEAYTSINSWINQAEERLSEIEDQLNEIKREDKITEKMKNSTTVRVAASMQSKLLQGVAEEGPLRLTRSASFSA

SEQ ID NO: 45511 - protein, 380 aa, Homo sapiens; identical to SEQ ID NO: 37338

SEQ ID NO: 45512 - protein, 880 aa, Homo sapiens
  DOMAIN (493)..(540): kw TRANSCRIPTASE REVERSE II ORF2 domain identified by eMATRIX, accession number DM01354V, p-value=1.000e-40, raw score of 12.97
TLQSKSHYMGQARQASGASVWRAGCGHGQQQVLEPKWDERGSSIEEEHEQEHKQARSGMVNRYHDGPSSTPFSGIYSQGPVNVISGADRHLIQKSSSWHLLGALLGQSFQRKEQAAIFAVLQPLLVIPRQTGSGVDLQQTPADLQKRGLTVRGKTNKQKGIVATSAKRTSTQRPHPKDHNSLPAREQNWIENEFDERTEVGFRRWVITNSSKLKEHVLTQCKEANNAWLLVEFVQWDLLARDGGWKEKLGYLFLLFYPLWCHSSGSDCVPVQVYLINHTGIPFSAHCQEDRHRAFLLKDSDPSALIRSRQLQVFVKTLDIRQGSQLRNVCGQCPSQEHSSESWGSVMALTCPSQRACRGARVTGSKVPGPGWEELPLEVAMAPQNIHASGRGCGMTRTGETRPCFSPAILVLRPLHTQSTACSRRLFSQKNFWEHTEVRISLDPGGTSSYEEKLISNFSKVSGYKINVQKSQAFLYTNNGQTESQIMSELPFTIASKRIKYLGIQLTRDVKDLFKENYKPLLKEIKEDTNKWKNIPCSWVGGINIVKMAILPKVIYRFNAIPIKLPMPFFTELEKTTLKFIWNQKRARIAKSILSQKTKAGGITLPNFKLYYKATVTKTAWYWYQNRDIDQWNRTEPSEITPHSYNYLIFDKPEEKKQWGKDSLFNKWCWENWRAICRKLKLDPFLTPYTKINLRWIKDLNVRPKTIKTLEENLGITIQDIGMGKDFMSKTPKAMATKDKIDKWDLIKLKSLIKLKSTAKETTIRVNRQPKKWEKIFPTYSSDKGLISRIYNELKQIYKKKTNNPIKKWAKDMNRRFSKEDIYAAKKHMKKCSPSLAIREMQIKTTVRYHLTPVRMVIIKKSGNNRCWGGCGEIGTLLHC

SEQ ID NO: 45513 - protein, 238 aa, Homo sapiens
  DOMAIN (37)..(83): kw TRANSCRIPTASE REVERSE II ORF2 domain identified by eMATRIX, accession number DM01354O, p-value=1.381e-14, raw score of 8.73
MDKFLDNYTLRRLNQEEVKSLNRPITSSEIEAVINSLPTKKSPEPERFTAEFFQKYKEELSTIRLVPHFMFRTSPYAPPILSQRLPAKFSTWALDSNRPAVSLERGLPVTISLTEAQLMNPIKGKLLLLNQSMESLPSPVGYAIQDHNSSPARKQNCMENEFDELTEVGFRRWVITNSSELKEHVLTQCKEAENFEKRLHELLTRITSLEKNINDLMELKNTARELREAYTSINSQTD

SEQ ID NO: 45514 - protein, 181 aa, Homo sapiens
MKQPNRKRKLNMDSKERLDQDGRLVKMSFFVFCCVVSSEESEHEETQDLMCSELFWVLLHMWSLDQQHQHHLEDHNSSPARGQHWMENESDELTEVGFRRWVITNSSELKEHALTQCKEAKNLEKRLDKLLTRIISLEKNINELMELKSTARELREAYTSINSQIDQVEKGYQRLKINLMK

SEQ ID NO: 45515 - protein, 244 aa, Homo sapiens
MVIAEQVVFGYISKSEISSWFGAIAGRHLPVGADRHLIQESTGWHLAGAPLGWSFQRKEQTAIFAVLQPLLVIPRQTGYGVDLQQMPADLQQRFLTVRRKTNKQKGIVSTSTKRTSSEGHQHQRRKVDKFTEMGRNQHKKAENSKNQNASSPSKDHNSSPAREQNWMENEFDELTEVGFRRSVITNSSKLKEHVLTQCKEARKLEKRLDELLTRKTNLEKNINDLMELKNTAQELGEAYTSINS

SEQ ID NO: 45516 - protein, 517 aa, Homo sapiens
  DOMAIN (394)..(435): kw TRANSCRIPTASE REVERSE II ORF2 domain identified by eMATRIX, accession number DM01354I, p-value=1.419e-37, raw score of 15.55
MDEWINKRQYIHTMEYYSALKRKESLLHADSENIMLSERSQTQKDKSAIAKIYKKKVNSAKEVLNKEPKRRSEGSRSNPLLQKLKLNHKQKANGTWNTSKSEPFTPLERGLKPGSQMVWLVGSHPHRAQQTKIHWLEILAASTAAVWDRPGVLELEHLGEGAAVRRSFSRLKRPCLTALKRAVDLPAQRSSSAKGQTASSSGSLIPVYPDWETPPSHKHRRPKVDKSTKMGRNQRKKAENSKNKNASFPPKDLNSSPAREQNWMENEFDELTEVGFKMWVITNSSELKEHVLTQCKEAKNLEKRLDELLTRINSLEKNINDLMELKNTAWELREVYTTRHHTYSKIDNIIGSKTLLSKCKRTEIKTNSLPDHSASKLELRIKKLTKNCTTTQKLNNLLLNDCWVNNDMKAEIKMFFETNENKDTTYHNLWDTFKAVCRGKFIALNAQKRKQERSKTDTLTSKLKELEKQQQTNSKASRRQEITKIRTEPKEIETQKTLQKINESRSWIFEKINKIDH

SEQ ID NO: 45517 - protein, 282 aa, Homo sapiens
QAENSHININKKDVHSETPSEGHQRKRPKDHSSSPAREQNWMENEFDELTEVGFRRWVITNSSELKKHVLTQCKEAKNLEKRLGELLTRITSLEKNINDLMELKNTARELHEAYTSINSWINQAEERLSEIEDQLNEIKREDKITEKMKNSTTVLVSTWGSQLEQNNLPHIISPLFHSTHDLNISFYGGCLLQACSSKLLQGLAEGGPLRLTRSASFFAAKLCLTKHFLPTEMILIKSRKTTPDTQPRRLYLLQGVVDQTSRKGPTALNIRQKTFAAAPPHR

SEQ ID NO: 45518 - protein, 156 aa, Homo sapiens
MLAGQQREFPVGVGSADPALGAAGWPQRPGQARDLQLAMPEPPIPSMGSCAAGASPTSTAPCSKAPSPIDHPRAAECRRRARDWQAAPPAAPVRDPLGEASRAPESVKDVCIYDIMFDGGAGRFAAATLGTISELPAFPEERKSWKPKRQAPGALV

SEQ ID NO: 45519 - protein, 57 aa, Homo sapiens
  misc_feature (1)...(57): Xaa = X or * as defined in Table 2
XAASLARPPGSDKRWSIKLLWSQNIAVTSRQRPALRWHFQVMEKVEREAISSHPLAX

SEQ ID NO: 45520 - protein, 121 aa, Homo sapiens
  DOMAIN (59)..(104): Involucrin proteins domain identified by eMATRIX, accession number BL00795C, p-value=2.500e-09, raw score of 17.06
EPLPPEPPAVPSEVELQHLRKELERVAGELQSQVKNNQHISLLNRRQEERIREQEERLRKQEERLQEQHEKLRQLAKPQSVELKSQEVQSLQQQPDHFLGHLQQYVATLSAARWAAYQQLD

SEQ ID NO: 45521 - protein, 55 aa, Homo sapiens
EELCAKRRVFLFRESRGPYYLLPLSAEPLPPEPPAVPSEVELQHLRKELERVAGE

SEQ ID NO: 45522 - protein, 125 aa, Homo sapiens
  misc_feature (1)...(125): Xaa = X or * as defined in Table 2
XSGEPVPRASSSPEPKVRKNQSTEEHHQIFETTEETSGTSAGRSNVISLFARDTTAGVPDNLVPWVGLSWGIGGILGACLLLCRLCVSLLKESFQQLQLERDECAEHIEGERARWHQRMSKMSQE

SEQ ID NO: 45523 - protein, 69 aa, Homo sapiens
  misc_feature (1)...(69): Xaa = X or * as defined in Table 2
XKSITFYQNQGGRAKDAALGGGHHQAGAQGGDEGEAAGAAADGIAAYSNYNNGHRKFLAAAHNPADEPX

SEQ ID NO: 45524 - protein, 136 aa, Homo sapiens
  misc_feature (1)...(136): Xaa = X or * as defined in Table 2
RKFWRWMVVMAAQHSQAAQGQRRXXVSKGPXXPGPMGGPVLGHWWHSGGISLAVPSLPPPGKSSVFLFLFSASFSDMKLNPGTVSPRLIFGSYDDGFLVETVVKFDFQLWQKTPLHRAAGERRRAEQRGKLSFVMP

SEQ ID NO: 45525 - protein, 604 aa, Homo sapiens
  misc_feature (1)...(604): Xaa = X or * as defined in Table 2
MAEETQHNKLAAAKKKSATGFHREGPTSSATLKDLESPCQERAVVLDSTSVKISRLKNTIKSLKQQKKQVEHQLEEVTAPDNLVPWVGLSWGIGGILGACLLLCHLCLPLEKKANNERQKAERELEVQIQTLIIQKEELNTDLYHMERSLRYFEEESKDLAVRLQHSLQCKGELESALSAVIATEKKKANQLSSRSKARTEWKLEQSMREEALLKVQLTQLKESFQQVQLERDEYSEHLKGERARWQQRMRKMSQEICTLKKEKQQDMRRVEELERSLSKLKNQMAEPLPPEPPAVPSEVELQHLRKELERVAGELQSQVKNNQHISLLNRRQEERIREQEERLRKQEERLQEQHEKLRQLAKPHCAFSRSXTMRTRAHLQLEQQVKELQEQALARVFLQVELKSQEAQSLQQQPDHYLGHPAAEHLEAASQQNQQLTAQLSLMALPGEGHGGEHLDSEGEEAPRPMPSVPEDLESREAMVAFFKSAGASAQEKQAQLQEQVKEQRVCCQRLAHPVASAQKEPEAARGPGAPGPGGESSSFMDHLKEKADLSEPGEKRTLLHPPTGGDRRHQKTHHLLSEPGGCAKDAALGPGHHQAGAQGGDE

SEQ ID NO: 45526 - protein, 204 aa, Homo sapiens
  misc_feature (1)...(204): Xaa = X or * as defined in Table 2
YPGKRGLEWTXANSNRPAAEGPDESSSLPATEQSWMENDFDELRKEGFRRSVITNFSKLKEDVQTHRKEAKNLEKGLDEWLTRINSIEKTLNDLMEMKTMAXELHDTCTSFSSRVDQVEERLSVIXDQMNEMKXEEKFREKRVKRNEQSLQEIWNYVKRPNLHLIGVSEIDRENGTKLENTLQDIFQENFTYLARQANIQIQEI

SEQ ID NO: 45527 - protein, 455 aa, Homo sapiens
  DOMAIN (218)..(259): kw TRANSCRIPTASE REVERSE II ORF2 domain identified by eMATRIX, accession number DM01354I, p-value=5.071e-38, raw score of 15.55
QTERNSININKKDIHTKTPSVRHHHQRPKLHKTTKMGKKHSRKAENSKNQSGSLPPKECSSSPAVEQSWTENEFDEFTEEGFRRIESQMNEIKGEEKFREKRVKRNEQSLQEIWDYVKRPDLRLIGVPDSDGENGTRLENTLQDIIRENFPNLARQASIQIQEIQRTPQRYSSRRATPRHIIVRFTKVEMKEKMLRAAREKELKIKKLTQNCLTTWKLNNLLLNDYWVHNEMKGEIKMFFETNENIDTTYQNLWHTFKAVCRGKFIALNAHKRKQERSKIDTLASQLKEIEKQEQTHSKASRRQEITKIRVELKEIETQKSLQKINESRSWFFEKINKIDRPLPRLIKKKREKNQIDTIKNDKGDITTNPTEIQTISREYYKHLYANKLENLEEMDKFLDTYTLSGLNKEEVESLNTSITGSEVEAIINSIPTKKKSRTRWIHSRILPEVQGGAA

SEQ ID NO: 45528 - protein, 112 aa, Homo sapiens
LIEGKLTERNSININKKDIHTKTPSVGPPSSKTKDRSSLPAIEQSWMENDFDELTEVGFRRSVITNLSKLKEDVRIPHKEATNLEKRLDEWLTRINSIEKTLDDLMELKTMA

SEQ ID NO: 45529 - protein, 32 aa, Homo sapiens
  misc_feature (1)...(32): Xaa = X or * as defined in Table 2
KTFSPFYFSXRRRTVRDINGFTEYXEPEKLLG

SEQ ID NO: 45530 - protein, 241 aa, Homo sapiens
  DOMAIN (185)..(214): kw REPLICATION REPB REPA INITIATION domain identified by eMATRIX, accession number DM00653A, p-value=7.207e-27, raw score of 20.40
  DOMAIN (9)..(80): Leucine Rich Repeat domain identified by PFam, accession name LRR, E-value=1.1e-10, PFam score of 49.0
  misc_feature (1)...(241): Xaa = X or * as defined in Table 2
DDLFADLANLSHLFLHGNRLRLLTEHVFRGLGSLDRLLLHGNRLQGVHRAAFRGLSRLTILYLFNNSLASLPGEALADLPSLEFLRLNANPWACDCRARPLWAWFQRARVSSSDVTCATPPERQGRDLRALREGRFQACPPAGPTRPGSRARGNSFSNHLYGPSRGFTVYISTHVSFPIFIGLQNRFTQFRLSETKEITNPYAMRLYESLCQYRKPDGSGIVSLRVDWIIERYQLPQSYQX

SEQ ID NO: 45531 - protein, 492 aa, Homo sapiens
  DOMAIN (307)..(327): EOSINOPHIL MAJOR BASIC PROTEIN SIGNATURE domain identified by eMATRIX, accession number PR00770F, p-value=3.149e-17, raw score of 13.79
  DOMAIN (50)..(99): Leucine rich repeat C-terminal domain identified by PFam, accession name LRRCT, E-value=3.7e-08, PFam score of 40.6
MGIIVIIGVSIVKQTLGCELSSISFNPHNPCSPRALADLPSLEFLRLNANPWACDCRARPLWAWLQRARVSSSDVTCATPPERQGRDLRALREADFQARARGNSSSNHLYGVAEAGAPPADPSTLYRDLPAEDSRGRQGGDAPTEDDYWGGYGAQTDPRTPITCTPTLPSSHTHSHQAEPCSTCKHTNHPRVPQTGSFFFPTPKMSLAIASKVNLGLLLFSLLGFLLPSYLFYYRARLQQEYAANGMGPLKVLSGSENVCSRCYGGNLVSIHDFNFNYRIQCCTSTVNQAQVWIGGNLRGWFLWKRFCWTDGSHWNFAYWSPGQPGNGQGSCVALCTKEHQQYRKFLNISISTNLMKTILLLSHCTDEETDNDISNNNSGCDQQDEMLNLGFTIGSFVLSATTLPLGILMDRFGPRPVRLVGSACFTASCTLMALASRDVEALSPLIFLALSLNGFGGICLTFTSLTVSVTGLAWQQSSPEWEPMNVHGALF

SEQ ID NO: 45532 - protein, 807 aa, Homo sapiens
  DOMAIN (447)..(639): Leucine Rich Repeat domain identified by PFam, accession name LRR, E-value=4.4e-24, PFam score of 93.4
MNGKNKTNIYQEPTVCQALHWTLARIGKEEPRRGQRGEGLLCSRERQPRGLSSPGTAAPAAPAAPTPPALPGHRTRSGSPEGPEPILRRGGSADAPGRVKTWVNRPAAFVGKCLGDGSADTACDQAMKGQRGSNRKRKTSHSLTFPTSSDMHAGGLSAAHPCAHSRAPPPASPSPYKGSLGTRTDGLTDSRADSAASGARALGVDGQPQPSPPRRAPPRPVGADGSSRGPQPGRRRVERRGPATQPGDSRALPEPRGVPAVHPAGSGSEWERPPPAAPSPEHRDKMLPGLRRLLQASARRPQPFPEAARWVWSPCFSSGTLCPSFQSERPLLPFQGASFPGTTLHQRLCPVAALHGSGKGQKWQQSHCYAAAVMEEPPAPGRSSESLQGPLSWAGGAPASACLLLMLLALPLAAPSCPMLCTCYSSPPTVSCQANNFSSVPLSLPPSTQRLFLQNNLIRTLGARHLWVQPAHPVALLQQPLHHLPGHFPPLQALEELDLGDNRHLRSLEPDTFQGLERLQSLHLYRCQLSSLPGNIFRGLVSLQYLYLQENSLLHLQDDLFADLANLEPTSFLHGNRLRLLTEHVFRGLGSLDRLLLHGNRLQGVHRAAFRGLSRLTILYLFNNSLASLPGEALADLPSLEFLRLNANPWACDCRARPLWAWFQRARVSSSDVTCATPPERQGRDLRALREADFQACPPAAPTRPGSRARGNSSSNHLYGVAEAGAPPADPSTLYRDLPAEDSRGRQGGDAPTEDDYWGGYGGEDQRGEQMCPGAACQAPPDSRGPALSAGLPSPLLCLLLLVPHHL

SEQ ID NO: 45533 - protein, 146 aa, Homo sapiens; identical to SEQ ID NO: 34618
  DOMAIN (16)..(35): Eukaryotic  RNA-binding region RNP-1 proteins domain identified by eMATRIX, accession number BL00030A, p-value=1.000e- 12, raw score of 14.39
  DOMAIN (58)..(128): RNA recognition motif. domain identified by PFam, accession name rrm, E-value=6.4e-24, PFam score of 92.9
  misc_feature (1)...(146): Xaa = X or * as defined in Table 2

SEQ ID NO: 45534 - protein, 212 aa, Homo sapiens; identical to SEQ ID NO: 35426
  DOMAIN (173)..(193): kw ALLERGEN POLLEN CIM1 HOL-LI domain identified by eMATRIX, accession number DM01724, p-value=5.737e-09, raw score of 8.14
  DOMAIN (53)..(117): RNA recognition motif. domain identified by PFam, accession name rrm, E-value=1.7e-13, PFam score of 58.3

SEQ ID NO: 45535 - protein, 296 aa, Homo sapiens; identical to SEQ ID NO: 33725
  DOMAIN (16)..(35): Eukaryotic  RNA-binding region RNP-1 proteins domain identified by eMATRIX, accession number BL00030A, p-value=1.000e- 12, raw score of 14.39
  DOMAIN (16)..(153): RNA recognition motif. domain identified by PFam, accession name rrm, E-value=5.7e-33, PFam score of 123.0

SEQ ID NO: 45536 - protein, 95 aa, Homo sapiens; identical to SEQ ID NO: 39915

SEQ ID NO: 45537 - protein, 558 aa, Homo sapiens; identical to SEQ ID NO: 34621
  DOMAIN (426)..(471): kw TRANSCRIPTASE REVERSE II ORF2 domain identified by eMATRIX, accession number DM01354N, p-value=6.550e-34, raw score of 13.17
  DOMAIN (62)..(132): RNA recognition motif. domain identified by PFam, accession name rrm, E-value=1.4e-23, PFam score of 91.8

SEQ ID NO: 45538 - protein, 369 aa, Homo sapiens
  DOMAIN (52)..(71): Eukaryotic  RNA-binding region RNP-1 proteins domain identified by eMATRIX, accession number BL00030A, p-value=1.000e- 12, raw score of 14.39
  DOMAIN (53)..(236): RNA recognition motif. domain identified by PFam, accession name rrm, E-value=3.8e-18, PFam score of 73.7
  misc_feature (1)...(369): Xaa = X or * as defined in Table 2
KREGEGRLADTFVSLLLSARGRRRRSIVKVSLHPAVMSKSESPKEPEQLRKLFIGGLSFETTDESLRSHFEQWGTLTDCVVMRDPNTKRSRGFGFVTYATVEEVDAAMNARPHKVDGRVVEPKRAVSREDSQRPGAHLTVKKIFVGWHXRKTTFWGGKKKRAKKHHLRDYFEQYGKIEVIEIHXLDRGQWPRKRGFAFVTFDDPDSVDKIVIQKYHTVNGHNCEVRKALSKQEMASASSSQRGRSGSGNFGGGRGGGFGGNDNFGRGGNFSGRGGFGGTRGGGGYGGSVGDGYNGFGNDGSNFGGGGSYNDFGNYNNQSSNFGPMKGGNFGGRSSGPYGGGGQYFAKPRNQGGYGGSSSSSSYGSGRRF

SEQ ID NO: 45539 - protein, 178 aa, Homo sapiens
  DOMAIN (79)..(134): kw TRANSCRIPTASE REVERSE II ORF2 domain identified by eMATRIX, accession number DM01354Q, p-value=7.652e-31, raw score of 9.23
MRRLALRILAPERLQEQTNNPKRTHRPSEGSRLLLQDHRDTTNTVSAPTAEVGKPPPPPLEQVLVFTAERPIDGSHHRTLCGQPPVPARSQIIHHDQVGFIPGMQGWFHVLKPINVTHDINRIKNKNHMIISIDAEKAFNKIQHLFMIKTFSKIGIQGTHFNDNKSHLRQTHNQHNNE

SEQ ID NO: 45540 - protein, 162 aa, Homo sapiens
  DOMAIN (121)..(142): RIBOSOMAL PROTEIN L7A FAMILY SIGNATURE domain identified by eMATRIX, accession number PR00882G, p-value=8.500e-25, raw score of 10.27
KMRQRERAQGKKVAPAPAVVKKQEAKKVVNPLFEKRPKNFGIGQDIQPKRDLTRFVKWPRYIRLQRQRAILYKRLKVPPAINQFTQALDRQTATQLLKLAHKYRPGDKGALAKLVEAIRTNYNDRYDEIRRHWGGNVLGPKSVARIAKLEKAKAKELATKLG

SEQ ID NO: 45541 - protein, 276 aa, Homo sapiens
  DOMAIN (189)..(204): RIBOSOMAL PROTEIN L7A/RS6 FAMILY SIGNATURE domain identified by eMATRIX, accession number PR00881D, p-value=8.200e-13, raw score of 11.60
  DOMAIN (128)..(237): Ribosomal protein L7Ae domain identified by PFam, accession name Ribosomal_L7Ae, E-value=0.006, PFam score of 8.1
  misc_feature (1)...(276): Xaa = X or * as defined in Table 2
PPKMPKGKKAKGKKVAPAPAVVKKQEAKKVVNPLFEKRPKNFGIGQDIQPKRDLTRFVKWPRYIRLQRQRAILYKRLKVPPAINQFTQALDRQTATQLLKLVAHKYRPETKQEKKQRLLARAEKKAAWQKGTSPTKRPPVLRAGSXHPVTTLVENKKASAGWWIAHRRGFPSSLVVFLPALCREKWGSPYCIIKGKARLGRLVTRKTCTTVAFTQVNLGRQRALLLKLVEAIRTNYNDRYDEIRRHWGGNVLGPKSVARIAKLEKAKAKELATKLG

SEQ ID NO: 45542 - protein, 1932 aa, Homo sapiens; identical to SEQ ID NO: 44608
  DOMAIN (333)..(372): PROTEIN ZINC FINGER ZINC-FINGER METAL-BINDING NU domain identified by eMATRIX, accession number PD01066, p-value=1.247e-17, raw score of 19.43
  DOMAIN (459)..(908): Zinc finger, C2H2 type domain identified by PFam, accession name zf-C2H2, E-value=4.8e-75, PFam score of 262.7

SEQ ID NO: 45543 - protein, 736 aa, Homo sapiens
  DOMAIN (379)..(434): Receptor tyrosine kinase class III proteins domain identified by eMATRIX, accession number BL00240D, p-value=7.028e-11, raw score of 23.07
  DOMAIN (156)..(241): Fibronectin type III domain identified by PFam, accession name fn3, E-value=4.2e-17, PFam score of 70.3
MPRVEKNIPGRRNSKGFEDPLEVTQDVTREWAKKVVWKREKASKINGAYFCEGRVRGEAIRIRTMKMRQQATLTMTVDKGDNVNISFKKVLIKEEDAVIYKNGSFIHSVPRHEVPDILEVHLPHAQPQDAGVYSARYIGGNLFTSAFTRLIVRILPPQPENIKISNITHSSAVISWTILDGYSISSITIRYKVQGKNEDQHVDVKIKNATITQYQLKGLEPETAYQVDIFAENNIGSSNPAFSHELVTLPESQAPADLGGGKMLLIAILGSAGMTCLTVLLAFLIILQLKRANVQRRMAQAFQNVREEPAVQFNSGTLALNRKVKNNPDPTIYPVLDWNDIKFQDVIGEGNFGQVLKARIKKDGLRMDAAIKRMKEYASKDDHRDFAGELEVLCKLGHHPNIINLLGACEHRERGDRRHLENQVTPTLILRFSNTLSKRHTRRLYPEPGSEGPTPTEPRSLLAQQSEIKLHGGSEPPLLIFRQTGSGVDLQQTPTNLQLRVLTVRRKTDKRKGHPHQKPICSSPSSKTKEGFRRSNYSKLKEEVQTHGKEVKNLEKKLDKWLTRITNAEKSLKDLMELKTKARELCDECASLTSQFDQLDKRVSVMEDQMNEMKQEEKFREKRIKRNEQSLQEIWDYVKRPNLCLIGAPESDGENGTKLENTLQDIIQENFPNITRQANIQIQEIQRTPQRYSSRRATPRHIIVRFTKVEMKEKMLRAAREKGAGFLKRSTKLIDR

SEQ ID NO: 45544 - protein, 247 aa, Homo sapiens
PPLLIFRQTGSGVDLQQTPTNLQLRVLTVRRKTDKRKGHPHQKPICSSPSSKTKEGFRRSNYSKLKEEVQTHGKEVKNLEKKLDKWLTRITNAEKSLKDLMELKTKARELCDECASLTSQFDQLDKRVSVMEDQMNEMKQEEKFREKRIKRNEQSLQEIWDYVKRPNLCLIGAPESDGENGTKLENTLQDIIQENFPNITRQANIQIQEIQRTPQRYSSRRATPRHIIVRFTKVEMKEKMLRAAREK

SEQ ID NO: 45545 - protein, 206 aa, Homo sapiens; identical to SEQ ID NO: 44452

SEQ ID NO: 45546 - protein, 140 aa, Homo sapiens
  misc_feature (1)...(140): Xaa = X or * as defined in Table 2
EVSRNNTRTKTSYKQDMNTSKGFXKDTSTXPVTKERSSSPATEQCWTENDFDELREEGFRRSNYSELKEEVRTNGKEVKNLEKKLDEWLTRITNAEKSLKDLMELKTMARELCDERTSLSSRCDQLEERVSVMEDEMNEM

SEQ ID NO: 45547 - protein, 146 aa, Homo sapiens
SGSSICCSPISTVLQPPLLTPRQTGSGATSSKSPTDLQLRECSSSPAKEQSWMENDFDELREGFRRSNYSELKEEVQTHGKEVENLEKKIDEWLTRITNAEKSLKDLMELKTMAREQCDECTSLSSRRDQLEERVSVIEDQINEMK

SEQ ID NO: 45548 - protein, 483 aa, Homo sapiens
  DOMAIN (277)..(322): kw TRANSCRIPTASE REVERSE II ORF2 domain identified by eMATRIX, accession number DM01354N, p-value=1.000e-40, raw score of 13.17
  DOMAIN (1)..(55): Cytochrome P450 domain identified by PFam, accession name p450, E-value=5.8e-21, PFam score of 76.9
LSDLELAAQSIIFIFAGYETTSSVLSFTLYELATHPDVQQKLQKEIDAVLPNKERSSSPATEQSWTENDFDELREEGFRRSNYPELKEEVRTHGKEVRNLEKKIRQMVTRIINAEKSLKDLMELKTMARELRDECTSLSSQFNQLEERVSVMEDQMNEMKKEEKFRRKRIKRKEQSLQEIWDYVKRPNLRLIGVPESDGENRTKLENTLQDIIQENFPNLARQANIQIQEIQRTPQRYSSRRATPRHIIVRFTKVEMKEKMLRAAREKEIQTTIREYYKHLYANKLENLEEMDKFLDTYTLPRLNQEEVETLNRPITGSEIEAIINSLPTKKSPGPDGFTAEFYQRYKEDLVPFFLKLFQSIEKEGILPNSFYEASIILIPKPGRDTTKKENFRPISLMNSDTKILNKILANRIQQHIKKLIHHDQVGFIPGMQGWFNIRKSINIIQHINRTNDKTHMIISIDAEKAFNKIQQPFMLKTLNKL

SEQ ID NO: 45549 - protein, 52 aa, Homo sapiens
  misc_feature (1)...(52): Xaa = X or * as defined in Table 2
MGESTKSHVFNRLSHMLTKCHKKTLTLLPWPIPSPQCKLCARVNLNXHSVQE

SEQ ID NO: 45550 - protein, 1469 aa, Homo sapiens
  DOMAIN (1258)..(1306): 352 FIBRILLAR COLLAGEN CARBOXYL-TERMINAL domain identified by eMATRIX, accession number DM01418A, p-value=1.000e-40, raw score of 20.83
  DOMAIN (85)..(1199): Collagen triple helix repeat (20 copies) domain identified by PFam, accession name Collagen, E-value=6.8e-282, PFam score of 949.9
YLDMMSFVQKGSWLLLALLHPTIILAQQEAVEGGCSHLGQSYADRDVWKPEPCQICVCDSGSVLCDDIICDDQELDCPNPEIPFGECCAVCPQPPTAPTRPPNGQGPQGPKGDPGPPGIPGRNGDPGIPGQPGSPGSPGPPGICESCPTGPQNYSPQYDSYDVKSGVAVGGLAGYPGPAGPPGPPGPPGTSGHPGSPGSPGYQGPPGEPGQAGPSGPPGPPGAIGPSGPAGKDGESGRPGRPGERGLPGPPGIKGPAGIPGFPGMKGHRGFDGRNGEKGETGAPGLKGENGLPGENGAPGPMGPRGAPGERGRPGLPGAAGARGNDGARGSDGQPGPPGPPGTAGFPGSPGAKGEVGPAGSPGSNGAPGQRGEPGPQGHAGAQGPPGPPGINGSPGGKGEMGPAGIPGAPGLMGARGPPGPAGANGAPGLRGGAGEPGKNGAKGEPGPRGERGEAGIPGVPGAKGEDGKDGSPGEPGANGLPGAAGERGAPGFRGPAGPNGIPGEKGPAGERGAPGPAGPRGAAGEPGRDGVPGGPGMRGMPGSPGGPGSDGKPGPPGSQGESGRPGPPGPSGPRGQPGVMGFPGPKGNDGAPGKNGERGGPGGPGPQGPPGKNGETGPQGPPGPTGPGGDKGDTGPPGPQGLQGLPGTGGPPGENGKPGEPGPKGDAGAPGAPGGKGDAGAPGERGPPGLAGAPGLRGGAGPPGPEGGKGAAGPPGPPGAAGTPGLQGMPGERGGLGSPGPKGDKGEPGGPGADGVPGKDGPRGPTGPIGPPGPAGQPGDKGEGGAPGLPGIAGPRGSPGERGETGPPGPAGFPGAPGQNGEPGGKGERGAPGEKGEGGPPGVAGPPGGSGPAGPPGPQGVKGERGSPGGPGAAGFPGARGLPGPPGSNGNPGPPGPSGSPGKDGPPGPAGNTGAPGSPGVSGPKGDAGQPGEKGSPGAQGPPGAPGPLGIAGITGARGLAGPPGMPGPRGSPGPQGVKGESGKPGANGLSGERGPPGPQGLPGLAGTAGEPGRDGNPGSDGLPGRDGSPGGKGDRGENGSPGAPGAPGHPGPPGPVGPAGKSGDRGESGPAGPAGAPGPAGSRGAPGPQGPRGDKGETGERGAAGIKGHRGFPGNPGAPGSPGPAGQQGAIGSPGPAGPRGPVGPSGPPGKDGTSGHPGPIGPPGPRGNRGERGSEGSPGHPGQPGPPGPPGAPGPCCGGVGAAAIAGIGGEKAGGFAPYYGDEPMDFKINTDEIMTSLKSVNGQIESLISPDGSRKNPARNCRDLKFCHPELKSGEYWVDPNQGCKLDAIKVFCNMETGETCISANPLNVPRKHWWTDSSAEKKHVWFGESMDGGFQFSYGNPELPEDVLNVQLAFPRLLSARASQNITYHCKNSIAYMDQASGNVKKALKLMGSNEGEFKAEGNSKFTYTVLEDGCTKHTGEWSKTVFEYRTRKAVRLPIVDIAPYDIGGPDQEFGVDVGPVCFL

SEQ ID NO: 45551 - protein, 68 aa, Homo sapiens
  DOMAIN (35)..(68): Fibrillar collagen C-terminal domain identified by PFam, accession name COLFI, E-value=8.6e-21, PFam score of 54.5
RRRRKARERRRLAAEQGRRMKEQCKDGFSEQASGALKLMGSNEGEFKAEGNSKFTYTVLEDGCTKHTG

SEQ ID NO: 45552 - protein, 120 aa, Homo sapiens
SLIGCFNLDPNRVLDVILEVFECRPEHDDFFISLLESYMSMCEPQTLCHILGFKFKSYQEPNGETPSSLYRVAAVLLQFNLIDLDDLYVHLLPADNCIMDEHKREIAEAKQIVRKLTIIE

SEQ ID NO: 45553 - protein, 54 aa, Homo sapiens
  misc_feature (1)...(54): Xaa = X or * as defined in Table 2
LRQLLXLCPSWRLCLLGGWQLHLFFXRHHFVHLVSQRCSIAMSPSPRRCFSLHL

SEQ ID NO: 45554 - protein, 229 aa, Homo sapiens
  misc_feature (1)...(229): Xaa = X or * as defined in Table 2
XKNSILVKEENEGYAKLIAELGQDLSGSITSDLILENIKSLIGCFNLDPNRVLDVILEVFECRPEHDDFFISLLESYMTLRRFSPISVDGIYDRVLHRDIPLPREEQETDAFLLSQLQRGVPSSFTNALQHRPFTGVGLGDERNVHGALSAYKRICDETNKPGKPSWHGHISEKSDTSSRRASGPSGGIPEEDIVIIDDRFMSVIAPKHLLVGQDVEMEDSDTDDSDPV

SEQ ID NO: 45555 - protein, 125 aa, Homo sapiens
QSLPSSRMAPLGMLLGLLMAACFTFCLSHQPGQAVPAGSHVRLNLQTGEREAKLQYEDKFRNNLKGKRLDINTNTYTSQDLKSALAKFKEGAEMESSKEDKARQAEVKRLFRPIEELKNDFDELN

SEQ ID NO: 45556 - protein, 238 aa, Homo sapiens
MNLLPYEPDFSNLQKGSHAVLCFFPSNPKVQVEAIEGGALQKLLVILATEQPLTAKKKVLFALCSLLRHFPYAQRQFLKLGGLQVLRTLVQEKGTEVLAVRVVTLLYDLVTEKDAGLHPSSVSSASPNQPHDFLLPQEAQMFAEEEAELTQEMSPEKLQQYRQVHLLPGLWEQGWCEITAHLLALPEHDARPPASAGHLASLQAEYQVLASLELQDGEDEGYFQELLGSVNSLLKELR

SEQ ID NO: 45557 - protein, 333 aa, Homo sapiens
WPPASPSASVIRTVKEFALTNPEKSSTKETERKETKAEEELDAEVLEVFHPTHEWQALQPGQACPCRNPTYGLNLQTGEREAKLQYEDKFRNNLKGKRLDINTNTYTSQDLKSALAKFKEGAEMESSKEDKARQAEVKRLFRPIEELKKDFDELNVVIETDMQIMVRLINKFNSSSSSLEEKIAALFDLEYYVHQMDNAQDLLSFGGLQVVINGLNSTEPLVKEYAAFVLGAAFSSNPKVQEWEAIEGGALQKLLVILATEQPLTAKKKVLFALCSLLRHFPYAQRQFLKLGGLQVLRTLGAGEGHGGARRARGHTALRPCHREKCSPRRRLS

SEQ ID NO: 45558 - protein, 65 aa, Homo sapiens
  DOMAIN (44)..(65): Ribosomal protein L27e proteins domain identified by eMATRIX, accession number BL01107C, p-value=6.344e-26, raw score of 9.88
  DOMAIN (1)..(65): Ribosomal L27e protein family domain identified by PFam, accession name Ribosomal_L27e, E-value=2.4e-11, PFam score of 51.1
MGKFMKPGKVVLVLAGRYSGRKAVIVKDVFRDPALKRKARREAKVKFEERYKTGKNKWFFQKLRF

SEQ ID NO: 45559 - protein, 35 aa, Homo sapiens
KWAKFNETLGKVVPCPGLDGLLRDRKAVHRGRTIE

SEQ ID NO: 45560 - protein, 321 aa, Homo sapiens
HQLGRSALLDTRTVSMQKAKNGDAVTEPQVAENEANGKDTAEVDLLTKELEDFEMKKATARAVTGILASHPCSTDVHIINLSLTFHGQELPSDTKLELNSVRHYGLIGLNGTENSMLLSAVGKHGVPIPEHIDIYHLTREMPPSDKTPLHSLVTVSSPRQRDDMSDGHLCTARRHTDIRDDRSPDAPDTARSLARSTITTRRIFALATPSRTLQQVCSALAYTSHPAARTQPLASTALTRRYMLPSPQLPSLRDHRRTNPLHSAVATIPHTTTGEADVSLLCIGLSTLHYALVYHVSVLTALSAQSMSATDASIIFFEPKR

SEQ ID NO: 45561 - protein, 458 aa, Homo sapiens
  DOMAIN (33)..(50): Zinc finger C2H2 type, domain proteins. domain identified by eMATRIX, accession number BL00028, p-value=1.000e-14, raw score of 16.07
  DOMAIN (3)..(445): Zinc finger, C2H2 type domain identified by PFam, accession name zf-C2H2, E-value=2.3e-118, PFam score of 406.6
KPYKCNECGKAFNWSSTLTKHKRIHTGEKPYKCEECGKAFNQSSTLTRHKIVHTGEKPYKCEECGKAFKRSTTLTKHKRIYTKEKPYKCEECGKAFSVFSTLTKHKIIHTGAKPYKCEECGSAFRAFSTLTEHKRVHTGEKPYKCNECGKAFNWSSTLTKHKRIHTGEKPYKCEECGKAFNQSSTLTRHKIVHTGEKPYKCEECGKAFKRSTTLTKHKRIYTKEKPYKCEECGKAFSVFSTLTKHKIIHTGAKPYKCEECGSAFRAFSTLTEHKRVHTGEKPYKCNECGKAFNWSSTLTKHKRIHTGEKPYKCEECGKAFNQSSTLTRHKIVHTGEKPYKCEECGKAFKRSTTLTKHKRIYTKEKPYKCEECGKAFSVFSTLTKHKIIHTGAKPYKCEECGSAFRAFSTLTEHKRVHTGEKPYKCNECGKAFNWSSTLTKHKRIHTGEKPYKCEECGK

SEQ ID NO: 45562 - protein, 152 aa, Homo sapiens
  DOMAIN (37)..(76): PROTEIN ZINC FINGER ZINC-FINGER METAL-BINDING NU domain identified by eMATRIX, accession number PD01066, p-value=4.462e-33, raw score of 19.43
  DOMAIN (35)..(88): KRAB box domain identified by PFam, accession name KRAB, E- value=4.9e-21, PFam score of 83.3
MPRPEKLGKTQVPPLAECLTKDSFLGQKQASLGPLTFRDVTIEFSLEEWQCLDTVQQNLYRDVMLENYRNLVFLVISSHFTQDFWPDQSIKDSFQRIILRTYARCGHKNLRLEKIVKVSMRKHQIIHTGKKPYKCEECAKLLASPQPLENMR

SEQ ID NO: 45563 - protein, 132 aa, Homo sapiens
  DOMAIN (80)..(106): G-protein coupled receptors family 2 proteins domain identified by eMATRIX, accession number BL00649C, p-value=5.959e- 15, raw score of 17.82
  DOMAIN (14)..(132): 7 transmembrane receptor (Secretin family) domain identified by PFam, accession name 7tm_2, E-value=0.01, PFam score of -96.0
FAVLMAHYDVQEEDPVLTVITYMGLSVSLLCLLLAALTFLLCKAIQNTSTSLHLQLSLCLFLAHLLFLVAIDQTGHKVLCSIIAGTLHYLYLATLTWMLLEALYLFLTARNLTVVNYSSINRFMKKLMFPVG

SEQ ID NO: 45564 - protein, 381 aa, Homo sapiens
  DOMAIN (228)..(254): G-protein coupled receptors family 2 proteins domain identified by eMATRIX, accession number BL00649C, p-value=9.321e- 14, raw score of 17.82
  DOMAIN (162)..(361): 7 transmembrane receptor (Secretin family) domain identified by PFam, accession name 7tm_2, E-value=6.2e-36, PFam score of 132.8
AIETQAITDNCSEERKTFNLNVQMNSMDIRCSDIIQGDTQGPSVIAFISYSSLGNIINATFFEEMDKKDQVYLNSQVVSAAIGPKRNVSLSKSVTLTFQHVKMTPSTKKVFCVYWKSTGAGCSQWSRDGCFLIHVNKSHTMCNCSHLSSFAVLMALTSQEEDPVLTVITYVGLSVSLLCLLLAALTFLLCKAIRNTSTSLHLQLSLCLFLAHLLFLVGIDRTEPKVLCSIIAGALHYLYLAAFTWMLLEGVHLFLTARNLTVVNYSSINRLMKWIMFPVGYGVPAVTVAISAASWPHLYGTADRMLAFKATAQLFILGCTWCLGLLQVGPAAQVMAYLFTIINSLQGFFIFLVYCLLSQQAKHKFTPMEVPRQNHRCLQQN

SEQ ID NO: 45565 - protein, 45 aa, Homo sapiens
  misc_feature (1)...(45): Xaa = X or * as defined in Table 2
GRPPAPAARVSGPASVSAGXKRVSASGSVGVRSMRRGSALLPPNF

SEQ ID NO: 45566 - protein, 93 aa, Homo sapiens
MKFHDRGQMQPKPSPAEAVNSAPQREPEGSILRAADPLVWAAKAMSASRRGSCGGSSADPRHTERTPTEPDADTRFQPAETLAGPKTRAAGAG

SEQ ID NO: 45567 - protein, 180 aa, Homo sapiens
SFMTEAKSSPNPAQQRLSTQRPSESRKVPSSELQTLSCGLQRPCLHPGRPGPDPYYASASTRTRSPSARHAVWGRRGCYPEAAVRAREGPHPTLAPASTYGLASPPRADSAHRPRHRSLTRLLPNRKLGGSSADPRHTERTPTEPDADTRFQPAETLAGPKTRAAGAGGQPWDSANASPP

SEQ ID NO: 45568 - protein, 160 aa, Homo sapiens
  DOMAIN (47)..(60): NONHISTONE CHROMOSOMAL PROTEIN HMG17 FAMILY SIGNATURE domain identified by eMATRIX, accession number PR00925B, p-value=5.790e- 09, raw score of 3.73
MALEHLVVWHVHSEDQSFVVLKTDLGRRGCRHLRKTAPKAKKEAPAPSKAEAKAKALKAKKAVFERCSAATRKKEDPHFQFNFQGGPRHCGLPETAQNILWKSAPREKQALTPPMPIHPSFPADPLICLCREEDRKTTNTLVFHCGMFKGQQGTRFKTGL

SEQ ID NO: 45569 - protein, 436 aa, Homo sapiens
MLRMVGIEISNGQWSTPPCQVLHLEGNDIYNPKEQGLGNTCRWGWMAAGTRRNLCWAPFPFLNPVASLVLHSTIQIALQESKDRVLGTLINSPLVTSTDKANWSLRLALEVGDGGGLVGLSPQPVGSGAMSRCPNCTRKLIGSGISPTSSTLAEEQGSVVKTHSHQGGARCSKEKGWQILLILVAGLCQLVVVVQNVGVRKIPRKYLAALRVAIGHALAIERRRIRVDVADQAQDTDRDDRSFGRDRNRDSDKTDTDWRARSATDSFDDYPPRRGDDRFGDKYRDRYDSDQYGRGYWYEYRDGPCRDMDRYGGGSGRRAFGSGYRRDNDYRGGRDRYEDRYNRWDDGSCSSRDDFSRDDCRYNDRRPPQRPKLNLKPHNTPKGDDSSASTSQSSRASFVFGGAKPVDRAARETKVEEWLQKEQDKLQHQLDEAKLE

SEQ ID NO: 45570 - protein, 97 aa, Homo sapiens; identical to SEQ ID NO: 42987

SEQ ID NO: 45571 - protein, 80 aa, Homo sapiens
MEDSMDMDMSPLRPQNYLFGCELKATLKMCVQPTVSLGGFEITPPVVLRLKCGSGPVHISGQHLVAVEEMQSQKMKRRRM

SEQ ID NO: 45572 - protein, 90 aa, Homo sapiens; identical to SEQ ID NO: 36901

SEQ ID NO: 45573 - protein, 335 aa, Homo sapiens
  misc_feature (1)...(335): Xaa = X or * as defined in Table 2
CGGIHSVLRGCSLEPAFFYLRSAFSPTISACRHPMEDSMDMDMSPLRPQNYLFGCELKADKDYHFKVDNDENEHQLSLRTVSLGAGAKDELHIVEAEAMNYEGSPIKVTLATLKMSVQPTVFPWGAFEITPTQWSLRLKCGSGPVHISGQHFSKLLEEDAESEDEEEEDVKLLSISGKRSAPGGGSKVPQKKSKTLLLMKDDDDDDEEDDDEDDGXWMDFGWMEEAEEKAPSERNPIRDTPAKNAQKSNQNGKDSKPSSTPRSKGQESFKKQEKTPKTPKGPSSVEDIKAKMQASIEKGGSLPKVEAKFINYVKNCFRMTDQEAIQDLWQWRKSL

SEQ ID NO: 45574 - protein, 368 aa, Homo sapiens
MGALLDQEHSEHPAGSREMEVSGGSVTVANSSRGQRAKAQAFTTVADARKLWGMQGAPVGDCVHHCTEGGVGLGWSAGWHWSGCPFCDLQAVVITQVVKRQRMEQLGGLRKRQEDVEGLELPRVLLNGFDQNADSDMSNEVQTEVVLGEEEAISVGRGAKSGVGWVREIHALTLHMWGNLQPLWELRDSYLTTDVMYQSGEKLPLLHRIVCARSGAQQASVSPTQIPCTWQVNTDRLAPVSKKKEIILPDTIPVTLGSVDSLDVGVKDPGHPQSSIVSASSEEISSCNDLGQSETIHGGSGLDKPPDHKVDKGPTEERACLLSYSAGRKYKEYHILPEQGSEPPHHGDILSISFQAASHIAQTPPAHT

SEQ ID NO: 45575 - protein, 655 aa, Homo sapiens
  DOMAIN (565)..(618): Clathrin light chain proteins domain identified by eMATRIX, accession number BL00224B, p-value=6.236e-09, raw score of 16.94
MLASMGVVAKEMKYLSSPYPQHAFHTRIKSLMTVNFQAQLWLPNEAGPTGDGDWGGDTHGCPSFSPHLPRFIQKQPWGTGRRLLQEHFSCKSLVPVIPSRDIEAFHLHADLILNTLPSLVIIIGQIESHSEELRARVSTYESGEDTIQCITVTWKPKYGATRWKDPGSPDGPLEERRLEDLSTRNNSIRLFRGCGYRVKQNSSQRPNKVCGLPDTGVLLQTKCGLVRNSQRSAQTNTKQHEELFSTAGIPENLSRRQEVLPGHGFTGWVGWTWKLTSGEGVTFHHLSATHKLSHASCRQGNFKPKGAMSVTRSTVHPHLAFLSAEINGKCGRPCVFLGIWAINCGMAILYERLSALVCVSVSERHLDYTMRFLFDIPPSTLEARIGSPLWALSLHPLRSSTVTSSVELILPECTVAVLEIQYVFLGDTILFTTVGKARSGTRDRDGGRAQIMQVLQGKGRELDAAAQPEGQLLREVRVLGVPFIPRARVDAWLVHTVAVGSADEAHGLLGAAAASSTGGAGASVDGGSQAVQGGGGDPRAARSGPLDAGEEEKAPAEPTAQVADAGGCASEENEVLREKHEAVDHSSQREENEERVSALKENSLQQNNDDENKIAEKPDWEAEKTSESRNERHLNGADTSFFSLEDLFQLLSSQP

SEQ ID NO: 45576 - protein, 697 aa, Homo sapiens
  DOMAIN (590)..(607): JUN TRANSCRIPTION FACTOR SIGNATURE domain identified by eMATRIX, accession number PR00043B, p-value=6.422e-11, raw score of 8.73
  DOMAIN (589)..(653): bZIP transcription factor domain identified by PFam, accession name bZIP, E-value=1.5e-07, PFam score of 32.0
MKHLKRWWSAGGGLLHLTLLLSLAGLRVDLDLYLLLPPPTLLQDELLFLGGPASSAYALSPFSASGGWGRAGHLHPKGRELDPAAPPEGQLLREVRALGVPFVPRTSVDAWLVHSVAAGSADEAHGLLGAAAASSTGGAGASVDGGSQAVQGGGGDPRAARSGPLDAGEEEKAPAEPTAQVPDAGGCASEENGVLREKHEAVDHSSQHEENEERVSAQKENSLQQNDDDENKIAEKPDWEAEKTTESGNERHLNGTDTSFSLEDLFQLLSSQPENSLEGISIWGDIPLPGSISDGHEFFKHIYHVNFQPRLISQDVNLHEAILLCPNNTFRRDPTARTSQSQEPFLQLNSHTTNPEQTLPGTNLTGFLSPVDNHMRNLTSQDLLYDLDINIFDEINLMSLATEDNFDPIDVSQLFDEPDSDSGLSLDSSHNNTSVIKSNSSHSVCDEGAIGYCTDHESSSHHDLEGAVGGYYPEPSKLCHLDQSDSDFHGDLTFQHVFHNHTYHLQPTAPESTSEPFPWPGKSQKIRSRYLEDTDRNLSRDEQRAKALHIPFSVDEIVGMPVDSFNSMLSRYYLTDLQVSLIRDIRRRGKNKVAAQNCRKRKLDIILNLEDDVCNLQAKKETLKREQAQCNKAINIMKQKLHDLYHDIFSRLRDDQGRPVNPNHYALQCTHDGSILIVPKELVASGHKKETQKGKRK

SEQ ID NO: 45577 - protein, 112 aa, Homo sapiens
  misc_feature (1)...(112): Xaa = X or * as defined in Table 2
RRRFRVAAAAVGTAXAVVLSARPSETWETRGRRXRICPSSWPXGIXVNNGXKXRRHSVCQCSLWFPARCIKPYHSMARTQPGTRNKENGPAGPTALDNVASSDDTGRHRPQT

SEQ ID NO: 45578 - protein, 373 aa, Homo sapiens
IRMKSKEIIARCIKPYHSMARTQPGTRNKENGPAGPTALDNVASSDDTGRHRPQTTQLAPGFAHPLQLASFRRMVLFLSGEGRSRGGPELQFPASCRRGEGSPGVRESGSGGIAATSTPNYPPNQDSKEHDIRGAEHQKQEQPAKPPHTARSAYPPQKSSYPANAKATRHSPETAAAKEARAPAAAQPQRHQPNPSPAPHTRPATAATRQPERRVPSPTHRHPAATRLSPRRQSPSPRPHHDRRGFPRLAETLQHPMCPLPLVASAGHHRHHRLLLLLAPQAPEREASDEIVFSGRSRSRGCPTEFQESAMCFPNPGLPDSCGESQAVTILILRKFQKVIWVIEVPLDYKKGSWEYFSRMETIIMPFENIQSE

SEQ ID NO: 45579 - protein, 322 aa, Homo sapiens
  DOMAIN (232)..(247): ASPARTATE AMINOTRANSFERASE SIGNATURE domain identified by eMATRIX, accession number PR00799B, p-value=5.304e-17, raw score of 11.78
  DOMAIN (25)..(322): Aminotransferases class-I domain identified by PFam, accession name aminotran_1, E-value=2.9e-38, PFam score of 140.5
IPSCVVSGIAAAFHPGLASDAPARASSWWTHVEMGPPDPILGVTEGFKRDTNSKKMNLGVSAYRDHNGKPYSIHKAEAQIAAKNLDEDYLSIGRLAEFCKASAEVALGENSEVSKSGRFVTVQTISGTSALRIRASFLQRFLKFSQDVFLPKPTWGSRTPIFRDTGMQLQGYRYYDRKTCGFDFTDTVEDISKTPEQSLLLLHACSHNPTGVDPGPKQQKEIATVVKKTRNLFALFDMAYQGFASGNGNKDAWAVRHSANIRHCRCQSYTKNMVLHSEGVAGFTMVCKDADEAKRVESHLKILMCPMYSNPPLNGTRLLLPF

SEQ ID NO: 45580 - protein, 421 aa, Homo sapiens
  DOMAIN (32)..(63): Intermediate filaments proteins domain identified by eMATRIX, accession number BL00226C, p-value=1.000e-15, raw score of 13.23
  DOMAIN (1)..(89): Intermediate filament proteins domain identified by PFam, accession name filament, E-value=9.9e-27, PFam score of 102.2
MKKNHEEEVKGLQDQIASSGLTVEVDAPKSQDLAKIVADIQAQYDELARKKRQELDKYWSQQIEESTTVVTMQSTEVGTAEMTITELRRPGSPLASRPTGISGLIGLPGAPPPAPESESQSVHITLGMFAGGLKEMEQEEVLIHGVSYNAMCQILHFIYTSELELSLSNVQETLVAACQLQIPEIIHFCCDFLMSWVDEENILDVYRLAELFDLSRLTEQLDTYILKNFVAFSRTDKYRQLPLEKVYSLLSSNRLEVSCETEVYEGALLYHYSLEQVQADQISLHEPPKLLETVRFPLMEAEVLQRLHDKLDPSPLRDTVASALMYHRNESLQPSLQSPQTELRSDFQCVVGFGGIHSTPSTVLSDQAKYLNPLLGEWKHFTASLAPRMSNQGIAVLNNFVYLIGGDNNVQGFRAESRCWR

SEQ ID NO: 45581 - protein, 382 aa, Homo sapiens
  DOMAIN (304)..(351): Intermediate filaments proteins domain identified by eMATRIX, accession number BL00226D, p-value=9.426e-24, raw score of 19.10
  DOMAIN (97)..(349): Intermediate filament proteins domain identified by PFam, accession name filament, E-value=9.1e-79, PFam score of 275.1
MTGRQSLSPVLSLSSLDSMSFTTRSIFSTNYLFLGSVQVSNYGARPASCMASVYAGAGGSGSRISVSRSTSFRGGMGSGDLAAGMAGGLAGMGGIQNKKETMQSLNDRLASYLDRVRSLETKNRKLESKIREHLEKKGLQVRDWSHYLKTIEDLRVQIFANTVDNAGIVLQIDNACLAADDFRVKSLMTNVTWLPLETEMEALKEELLFMKKNHEEEVKGLQAQIASSELTVEIEKSTTVVTTQSTKVGDAEMTLTELRRTVQSLKMDLDSMRNLKASLENSLREVEARYTLQMEQLNRILLHLESEMAQSRAEGQHQIGEYEALLNIKVKLEAESATYHRLLDDDDFNLGDALDNSNSMQTIQKTTTRRKVVSETNDTKVL

SEQ ID NO: 45582 - protein, 62 aa, Homo sapiens
  DOMAIN (29)..(49): Intermediate filament proteins domain identified by PFam, accession name filament, E-value=0.013, PFam score of 13.6
FPLCVGPPLVIYFFLDVFQKRILKRENILDRVRSLETKNRKLESKIREHLLSVVMILTSLNS

SEQ ID NO: 45583 - protein, 456 aa, Homo sapiens
  DOMAIN (370)..(417): Intermediate filaments proteins domain identified by eMATRIX, accession number BL00226D, p-value=9.710e-33, raw score of 19.10
  DOMAIN (102)..(420): Intermediate filament proteins domain identified by PFam, accession name filament, E-value=3.3e-132, PFam score of 452.6
  misc_feature (1)...(456): Xaa = X or * as defined in Table 2
RGDPRVRRRTQSLSPVLSLSPDSMSFTTRSTFSTNYRTLGSVQAPSYGARPVSSAASVYAGAGGSGSRISVSRSTSFRGGMGSGGLATGIAGGLAGMGGIQNEKETMQSLNDRLASYLDRVRSLETENRRLESKNPEHLEKKGPQVRDWSHYFKIIEDLRAQIFANTVEQCPTTVLLRIDSARLAADDFRVKYETEAGPCAQSVENNIHGLCKVIDDTNVTRLQLETEIEALKEELLFMKKNHEEEVKGLXAQIASSELTVEVDAPKSQDLAEIMADIRAQYDELARKNREELDKYWSQQIEESTTVVTTQSAEVGAAETTLTELRRTVQSLEIDLDSMRNLKASLENSLREVEARYALQMEQLNGILLHLESELAQTRAEGQRQAQEYEALLNIKVKLEAEIATYRRLLEDGEDFNLGDALDSSNSMQTIQKTTTRRIVDGKVVSETNDTKVLRH

SEQ ID NO: 45584 - protein, 353 aa, Homo sapiens
GPWEMLMTIKSHPDAERQPQRVKKLTQVFWSSASLRERGKTYLFWPKLKKAAEIPAAYREALDEALGISGGGRDVGERVYKGPSMMANPQKPVLEALSSNKYLHILCAKHCDRHEGYKDEIKVKEASSRVNGCVEAMLSAPLPLDRRNEHVESKGKPFTMGLSPRVLSASRRDGLRERKGSFFRTVVLHDTKTDSNSDTETNSSTPPRTLLEMQILSPTWTYEISSSRTLGCGPSVFQQRASYSPSVSGPRLGCPLMDGGRMRCPPGNPESCVSEANLIPISVPVAPHAHQHLVLSVFWKITIVIGGKTCVAQNHSNEAKMKQRPEINHASPPGAFAWSQSGEPIASAMTVPA

SEQ ID NO: 45585 - protein, 261 aa, Homo sapiens
MWDVGQDSSLLRGAGGPGLQLWFGRLQLHLGGLREHRDAWVHSRGLGSCSGMQGAATPTQNGRGSCLSPAPASSMEHAAPAVPPCCSWCDSSSRSRWPATATTETGPRTVPSAQESAVGLLTASLLKGDSGSTGFCPLLMSLAAPGTQQCSLGFCCTFERKRSSVSPAAPGTAAPELAAALMLMPRKNQIAVYELLFKQGVMVAKEGVHLPRHPELADKNVPNLHIMKAMQSLKSQGHREEQFAWRHFYWHLTREGIQSIQ

SEQ ID NO: 45586 - protein, 130 aa, Homo sapiens
  DOMAIN (18)..(37): Eukaryotic  RNA-binding region RNP-1 proteins domain identified by eMATRIX, accession number BL00030A, p-value=5.500e- 10, raw score of 14.39
  DOMAIN (18)..(89): RNA recognition motif. domain identified by PFam, accession name rrm, E-value=2e-22, PFam score of 88.0
PRHAAAMSRYLRPPNTSLFVRNVADDTRSEDLRREFGRYGPIVDVYVPLDFYTRRPRGFAYVQFEDVRDAEDALHNLDRKWICGRQIEIQFAQGDRKTPNQMEDHGVAEAIPTMIDQTAAGIPSTVLLTT

SEQ ID NO: 45587 - protein, 238 aa, Homo sapiens
  DOMAIN (49)..(68): Eukaryotic  RNA-binding region RNP-1 proteins domain identified by eMATRIX, accession number BL00030A, p-value=5.500e- 10, raw score of 14.39
  DOMAIN (49)..(120): RNA recognition motif. domain identified by PFam, accession name rrm, E-value=2e-22, PFam score of 88.0
SVAVSKPSICVCLRLGRLSRGRFAEPVSAPFSLHAAAMSRYLRPPNTFLFVRNVADDTRSEDLRREFGRYGPIVDVYVPLDFYTRRPRGFAYVQFEDVRDAEDALHNLDRKWICGRQIEIQFAQGDRKTPNQMKAKEGRNVYSSSRYDDYDRYRRSRSRSYERRRSRSRSFDYNYRRSYSPRNSRPTGRPRRSRSHSDNDRFKHRNRSFSRSKSNSRSRSKSQPKKEMKAKSRSRSAS

SEQ ID NO: 45588 - protein, 74 aa, Homo sapiens
  DOMAIN (31)..(46): WILM'S TUMOUR PROTEIN SIGNATURE domain identified by eMATRIX, accession number PR00049D, p-value=8.500e-10, raw score of 0.00
RRSNEWGVPVPVPARTGGGHGQKTPPSPPLPPSSPPPSPSPPPPPAAPAKIPPPLPLPPLPPREAPPAPGPALP

SEQ ID NO: 45589 - protein, 174 aa, Homo sapiens
  DOMAIN (123)..(137): LEUCINE-RICH REPEAT SIGNATURE domain identified by eMATRIX, accession number PR00019B, p-value=6.040e-09, raw score of 11.36
  DOMAIN (81)..(172): Leucine Rich Repeat domain identified by PFam, accession name LRR, E-value=3.9e-10, PFam score of 47.1
KSCPETVSRRKNVGSIKKHQGDKFNPVCLKMTTKTEFVLCGWVPCRCLREGEEETVTTLDYSHCSLEQVPKEIFTFEKTLEELYLDANQIEELPKQLFNCQSLHKLSLPDNDLTTLPASIANLINLRELDVSKNGIQEFPENIKNCKVLTIVEASVNPISKLPDGFSQLLNLTQ

SEQ ID NO: 45590 - protein, 66 aa, Homo sapiens
LHMRLFGLNHIMAKGHDGRSNQRCSCVVIRVERLKEPLISNVDSRMMARVTSYEIVWARSYYGQGS

SEQ ID NO: 45591 - protein, 1569 aa, Homo sapiens
  DOMAIN (416)..(427): Caseins alpha/beta proteins domain identified by eMATRIX, accession number BL00306B, p-value=7.300e-09, raw score of 8.28
KMTSLAQQLQRLALPQSDASLLSRDEVASLLFDPKEAATIDRDTAFAIGCTGLEELLGIDPSFEQFEAPLFSQLAKTLERSVQTKAVNKQLDENISLFLIHLSPYFLLKPAQKCLEWLIHRFHIHLYNQDSLIACVLPYHETRIFVRVIQLLKINNSKHRWFWLLPVKQSGVPLAKGTLITHCYKDLGFMDFICSLVTKSVKVFAEYPGSSAQLRVLLAFYASTIVSALVAAEDVSDNIIAKLFPYIQKGLKSSLPDYRAATYMIICQISVKVTMENTFVNSLASQIIKTLTKIPSLIKDGLSCLIVLLQRQKPESLGKKYVQLILRNGASQRPFPHLCNVPDLITILHGISETYDVSPLLHYMLPHLVVSIIHHVTGEETEGMDGQIYKRHLEAILTKISLKNNLDHLLASLLFEEYISYSSQEEMDSNKVSLLNEQFLPLIRLLESKYPRTLDVVLEEHLKEIADLKKQELFHQFVSLSTSGGKYQEGVDESFIKEAVLARLGDDNIDVVLSAISAFEIFKEHFSSEVTISNLLNLFQRAELSKNGEWYEVLKIAADILIKEEILSENDQLSNQVVVCLLPFMVINNDDTESAEMKIAIYLSKSGICSLHPLLRGWEEALENVIKSTKPGKLIGVANQKMIELLADNINLGDPSSMLKMEIPSEWHIELMLDRGIPVELWAHYVEELNSTQRVAVEDSVFLVFSLKKFIYALKAPKSFPKGDIWWNPEQLKEDSRDYLHLLIGLFEMMLNGADAVHFRVLMKLFIKVHLEDVFQLFKFCSVLWTYGSSLSNPLNCSVKTVLQTQALYVGCAMLSSQKTQCKHQLASISSPVVTSLLINLGSPVKEVRRAAIQCLQALSGVASPFYLIIDHLISKAEEITSDAAYVIQDLATLFEELQREKKLKSHQKLSETLKNLLSCVYSCPSYIAKDLMKVLQGVNGEMVLSQLLPMAEQLLEKIQKEPTAVLKDEAMVLHLTLGKYNEFSVSLLNEDPKSLDIFIKAVHTTKELYAGMPTIQITALEKITKPFFAAISDEKVQQKLLRMLFDLLVNCKNSHCAQTVSSVFKGISVNAEQVRIELEPPDKAKPLGTVQQKRRQKMQQKKSQDLESVQEVGGSYWQRVTLILELLQHKKKLRSPQILVPTLFNLLSRCLEPLPQEQGNMEYTKQLILSCLLNICQKLSPDGGKIPKDILDEEKFNVELIVQCIRLSEMPQTHHHALLLLGTVAGIFPDKVLHNIMSIFTFMGANVMRLDDTYSFQVINKTVKMVIPALIQSDSGDSIEVSRNVEEIVVKIISVFVDALPHVPEHRRLPILVQLVDTLGAEKFLWILLILLFEQYVTKTVLAAAYGEKDAILEADTEFWFSVCCEFSVQHQIQSLMNILQYLLKLPEEKEETIPKAVSFNKSESQEEMLQVFNVETHTSKQLRHFKFLSVSFMSQLLSSNNFLKKVVESGGPEILKGLEERLLETVLGYISAVAQSMERNADKLTVKFWRALLSKAYDLLDKVNALLPTETFIPVIRGLVGNPLPSVRRKALDLLNNKLQQNISWKKTIVTRFLKLVPDLLAIVQRK

SEQ ID NO: 45592 - protein, 76 aa, Homo sapiens
  misc_feature (1)...(76): Xaa = X or * as defined in Table 2
GCLLXXCLCIRLSKNRAERALRPYSDVEALRLSSDFPFRQRPKGGSGWSLLSVEINQYYGPRVMIGRSNSEVVLVL

SEQ ID NO: 45593 - protein, 1008 aa, Homo sapiens
  DOMAIN (451)..(469): CADHERIN SIGNATURE domain identified by eMATRIX, accession number PR00205B, p-value=2.145e-10, raw score of 11.39
  DOMAIN (154)..(683): Cadherin domain identified by PFam, accession name cadherin, E-value=2.9e-79, PFam score of 276.7
AMEQAGTRPAATEHPRLRRPMPWLLLLPLLLLLLLLLPGPAASQLRYSVPEEQAPGALVGNVARALGLELRRLGPGCLRINHLGAPSPRYLELDLTSGALFVNERIDREALCEQRPRCLLSLEVLAHNPVAVSAVEVEILDINDNSPRFPRPNYQLQVSESVAPGARFHIESAQDPDVGANSVQTYELSPSEHFELDLKPLQENSKVLELVLRKGLDREQAALHHLVLTAVDGGIPARSGTAQISVRVLDTNDNSPAFDQSTYRVQLREDSPPGTLVVKLNASDPDEGSNGELRYSLSSYTSDRERQLFSIDASTGEVRVIGGLDYEEASSYQIYVQATDRGPVPMAGHCKVLVDIVDVNDNAPEVVLTDLYSPVPENATPNTIVAVLSVNDQDSGPNRKVSLGLEATLPFRLNGFGNSYTLVVSGPLDRERVAVYNITVTATDGGIPQLTSLRTLKVEISDINDNPPSFLEDSYSIYIQENILQGVLLCTVQATDPDEKENAEVTYSLLEREIQGLPVTSYVSINSASGSLYAVNSFDYEKFREFFVTVEAQDKGSPPLSSTVTANVYVVDMNDHAPHILYPTSTNSSAAFEMVPRTAPAGYLVTKVIAMDSDSGQNAWLFYHLAQTSDLDLFKVELHTGEIRTTRKMGDESGSTFNLTVVVRDNGEPSLSASVAITVAVVDRVSKILPDTQRHVKSPRTYSEITLYLIIALSTVSFIFLLTIIILSIIKCYRYTAYGTACCGGFCGVRERSPAELYKQANNNIDARIPHGLKVQPHFIEVRGNGSLTKTYCYKACLTAGSGSDTFMFYNTGAQTGPGPSGAQAAVTDSRNLTGQSGQNAGNLIILKNEAVSQNEPRQPNPDWRYSASLRAGMHSSVHLEEAGILRAGPGGPDQQWPTVSSATPEPEAGEVSPPVGAGVNSNSWTFKYGPGNPKQSGPGELPDKFIIPGSPAIISIRQEPTNSQIDKSDFITFGKKEETKKKKKKKKGNKTQEKKEKGNSTTDNSDQ

SEQ ID NO: 45594 - protein, 260 aa, Homo sapiens
MPCVNGKYNSTIQAGLQMAQILQDEGPYEVGIDEETGSQKGDGIIRSSRKLLFTMALFLETNLLKDPLSRERRWRLDELDSGGREKGVAVFLRSAGIRQVQVAMEQAGTRPAATEHPRLRRPMPWLLLLPLLLLLLLLLPGPAASQLRYSVPEEQAPGALVGNVARALGLELRRLGPGCLRINHLGAPSPRYLELDLTSGALFVNERIDREACLGSAGANPVAVSAVEVEILDINDNSPRFPRPNYQLQVTARCWWTSWT

SEQ ID NO: 45595 - protein, 54 aa, Homo sapiens
QTQQPHAIASLHFQLHLWRPPSPINCGKPEGLPSPFSFPFSSLIVKSPAYPSSK

SEQ ID NO: 45596 - protein, 337 aa, Homo sapiens
TCSSRARRPRRGRTVSQVRGPAPWAPRRARLQQRGSLRGAARSPASPTSAPSYSRASASAGPAALQPQGAVTPGPSANLAAPGGTLVPAEGPRMPPVTAQSASSHPAPSASQPSSPAAASRGSLSVPQEVTATLLASASSPTLDATRDAPATPRIAAPPGSATSSRGLGSQAQGSSLGTKESISDSFGLGSPAVTQRTTAPPDSAALSQDTRPEAAGSWPGPQTGACSVGSGTDRRDTAAATEAQHLSSESKEKTSAQKSGNCFGILKADFTISTLMDPEEMKDQFLRQVRLPSTDALKKQSISNYRPPGKGKPQQYLGDSAWNMVSAGTIEGFYKE

SEQ ID NO: 45597 - protein, 938 aa, Homo sapiens
  DOMAIN (600)..(861): WD domain, G-beta repeat domain identified by PFam, accession name WD40, E-value=8.5e-28, PFam score of 105.8
RGRLRRQGAPSPGSRRPDGVRGVGCECVTLSASDLVTMVRERKCILCHIVYSSKKEMDEHMRSMLHHRELENLKGRDIIHECRVCGVTEVGLSAYAKHISGQLHKDNVDAQEREDDGKGEEEEEDYFDKELIQLIKQRKEQSRFGIEMVPLVQNEQEALDLDGEPDLSSLEGFQWEGVSISSSPGLARKRSLSESSVIMDRAPSVYSFFSEEERSQVDQLLNISLREEELSKSLQCMDNNLLQARAALQTAYVEVQRLLMLKQQCFGQQPRYFYQCLGIFKAPETYEPSEHPDQVPCSLTRERRNSRSQTSIDAALLPTPFFPLFLEPPSSHVSPSPTGASLQITTSPTFQTHGSVPAPDSSVQIKQEPMSPEQDENVNAVPPSSACNVSKELLEANKTPLEKEPHSPADQPEQQAESTLTSAETRGSKKKKKLRKKKSLRAAHVPENSDTEQDVLTVKPVRKVKAGKLIKGGKVTTSTWEDSRTGREQESVRDEPDSDSSLEVLEIPNPQLEVVAIDSSESGEEKPDSPSKKDIWNSTEQNPLETSRSGCDEVSSTSEIGTRYKDGIPVSVAETQTVISSIKGSKNSSEISSEPGDDDEPTEGSFEGHQAAVNAIQIFGNLLYTCSADKTVRVYNLVSRKCIGVFEGHTSKVNCLLVTQTSGKNAALYTGSSDHTIRCYNVKSRECVEQLQLEDRVLCLHSRWRILYAGLANGTVVTFNIKNNKRLEIFECHGPRAVSCLATAQEGARKLLVVGSYDCTISVVNDLVFSGSSDQSVHAHNIHTGELVRIYKGHNHAVTVVNILGKVMVTACLDKFVRVYELQSHDRLQVYGGHKDMIMCMTIHKSMIYTGCYDGSIQAVRLNLMQNYRCWWHGCSLIFGVVDHLKQHLLTDHTNPNFQTLKCRWKNCDAFFTARKGSKQDAAGHIERHAEDDSKIDS

SEQ ID NO: 45598 - protein, 228 aa, Homo sapiens
NGEQKCILCHIVYSSKKRHSHECRRCGPTEVSLSAYAKHISGQLHKDNVDAQEREDDGKGEEEEEDYFDKELIQLIKQRKEQSRQEPSSSSQEVNSDDSSSATFSVSVFYVWLKTILLLTWPKEVKRLDTPGLELWLVPNMAELSEPEGPVDWKERCVALESQLMKFRVQASKIRELLAEKLHHNERLEYRDQRKDSASFQRKKQFTYKASGIEMASDLSKAPLEIRG

SEQ ID NO: 45599 - protein, 250 aa, Homo sapiens
LRLPRRSTRTRRGIWVRTGAAMGKVNVAKLRYMSRDDFRVLTAVEMGMKNHEIVPGSLIASIASLKHGGCNKVLRELVKHKLIAWERTKTVQGYRLTNAGYDYLALKTLSSRQVVECVGNQMGVGKESYIYIVANEEGQQFALKLHRLRRTSFRNLKNKRDYHIHRHNVSWLYLSRLSGMKEFCYMKQFCDEQGSQLRIHMMGGQMWAVPICQPRDLFVWFVLRAEACAGCGATSQQRGALGVTSTCYRD

SEQ ID NO: 45600 - protein, 342 aa, Homo sapiens
  DOMAIN (104)..(148): Ubiquitin-activating enzyme proteins domain identified by eMATRIX, accession number BL00536B, p-value=6.637e-14, raw score of 18.17
  DOMAIN (82)..(210): ThiF family domain identified by PFam, accession name ThiF_family, E-value=1e-05, PFam score of 27.7
MNKTITTQEEVLPLQADVVQREEELNSLKQKLAAALLAEQEPQPERLVSELQLPRKAAVFQDEILRSSRQLVLPELGVHRHVLVVCCGGLRCPLAGGLAAASVGRLGLVDCDVVEMSNLAYQVLHGEALAAQAKAASAAASLRGLNLAPPPAETVTNCADGGMLRVLTGVLGCLQPLKVLKIAASLGPSYSGSLLLFDALRGHFCCIRLRSCRLDCAACGKWPTVTHLLDYEAFCGSSATDKCRSLQLLGPEDRVSVTDYKRLLDSGAPHLLLDIRPKMELPRKAAVFHDEILRSSRQLVLPELGVLRHLLVVGCGGLRCPLAQYLAAAIVGRLGLVAYDVV

SEQ ID NO: 45601 - protein, 230 aa, Homo sapiens
  misc_feature (1)...(230): Xaa = X or * as defined in Table 2
QGTRRWSLGTCSLMTRTQFEVCTKVCVQESLQRPGEELKTRCPSVGAGYVNYGTPAHERIGAAVKTGREADKPEVTKQTQFSTRKDETSLFGVPLQXLLARHRAPPXRRTRRLLEVARTPMLPAQASRSELAARQDSAWASPAAPASPNRSVLRRCLLSARPPLCGPLLRVLPSWRRQQIRENSAEDXLHSEYRANRIRRRRGHPENWTKSXLENPENLTRRSSSAPAPC

SEQ ID NO: 45602 - protein, 119 aa, Homo sapiens
KNPPFRWLKRHPMGQYVLPVPCVHIRTVVPSSRGATVSQSPWISAAVGPRSSAVGYPGQSAPAGCGPRPPGGGSRSPPGRSVPGSGAWRWPRGRSEACTAPRAWRSALGESCGPAGSGA

SEQ ID NO: 45603 - protein, 113 aa, Homo sapiens
TLQKNSFEKNMKPVERAAFSKLGDRPLKKPRAPSFCSTCLAQSMRPLYLRTWPKAALACSNPPTCSRFLKRSSGYVRVLLMTPAPLPQSRFWRFSFFFPSAGMAHLYRCFKEL

SEQ ID NO: 45604 - protein, 161 aa, Homo sapiens
PLMTSAPWPSCCCWRSLSSGRPAGRQRQLPTSITTANQPAPSRRKKSTSRKKQRNLPAVSPAMVAIVRRSCDLYRWSVLHYASQERRVRDAAKPESDRKRTTTKTRRHWRYIKELESRQPGVADMRQQPTQLVEVPWNEQTPEQRQQTLQRQHGRETRCSV

SEQ ID NO: 45605 - protein, 130 aa, Homo sapiens; identical to SEQ ID NO: 43445
  DOMAIN (60)..(105): RIBOSOMAL PROTEIN 40S ZINC-FINGER METAL domain identified by eMATRIX, accession number PD01457A, p-value=1.000e-40, raw score of 16.51
  DOMAIN (1)..(59): Ubiquitin family domain identified by PFam, accession name ubiquitin, E-value=3e-43, PFam score of 138.2

SEQ ID NO: 45606 - protein, 146 aa, Homo sapiens; identical to SEQ ID NO: 43446
  DOMAIN (26)..(78): Ubiquitin domain proteins domain identified by eMATRIX, accession number BL00299, p-value=1.000e-40, raw score of 28.84
  DOMAIN (11)..(86): Ubiquitin family domain identified by PFam, accession name ubiquitin, E-value=3.7e-61, PFam score of 193.6

SEQ ID NO: 45607 - protein, 147 aa, Homo sapiens
  DOMAIN (67)..(119): Ubiquitin domain proteins domain identified by eMATRIX, accession number BL00299, p-value=7.857e-38, raw score of 28.84
  DOMAIN (52)..(126): Ubiquitin family domain identified by PFam, accession name ubiquitin, E-value=2e-50, PFam score of 160.4
MQTVLNLRAWHGLDAAPLTRDQGGPGCRFADHSLSSKGFPFTAICGEAATKLQIFVKTLRGKTITLEVEPSDAIENVKAKIQDKEGIPPDQQRLIFAGKQLEDGRTLSDCNIQKEPTLHLLLRLCGVAKKRKKSYPTPKKNKHKRKK

SEQ ID NO: 45608 - protein, 182 aa, Homo sapiens
  DOMAIN (33)..(85): Ubiquitin domain proteins domain identified by eMATRIX, accession number BL00299, p-value=8.875e-23, raw score of 28.84
  DOMAIN (17)..(103): Ubiquitin family domain identified by PFam, accession name ubiquitin, E-value=1.1e-19, PFam score of 65.4
  misc_feature (1)...(182): Xaa = X or * as defined in Table 2
IRGRVDPPSAVEPPPKMQIFVKTLTGKTITLEVEPLGYGXKNVKAQASRDKEGIPPDQQRLIFAGKQLEDGRTLSDYNIQKESTLHIFVLRLRGGAKKRKKKSYTTPKKIKHKRKKGXSLAVLKYYKVDENGKISRLRRECPSDECGCWGVYGQVTFDRHYCGKCCLTLLFQQTRMTSNCMS

SEQ ID NO: 45609 - protein, 315 aa, Homo sapiens
  DOMAIN (166)..(202): Ribosomal protein L6e proteins domain identified by eMATRIX, accession number BL01170A, p-value=9.143e-40, raw score of 12.34
  DOMAIN (139)..(315): Ribosomal protein L6e domain identified by PFam, accession name Ribosomal_L6e, E-value=2.2e-127, PFam score of 436.6
LDARRHWEGTPGFTHTSPDAWADAWGKMAGEKVEKPDTKEKKPEAKKVDAGGKVKKGNLKAKKPKKGKPHCSRNPVLLRGIGRYSRSAMYSRKAMYKRKYSAAKSKVEKKKKEKVLATVTKPVGGDKNGGTRVVKLRKMPRYYPTEDVPRKLLSHGKKPFSQHVRKLRASITPGTILIILTGRHRGKRVVFLKQLASGLLLVTGPLVLNRVPLRRTHQKFVIATFTKIDISNVKIPKHLTDAYFKKKKLRKPRHQEGEIFDTEKEKYEITEQRKIDQKAVDSQILPKIKAIPQLQGNLRSVFALTNGIYPHQLVF

SEQ ID NO: 45610 - protein, 113 aa, Homo sapiens
  DOMAIN (63)..(113): Ribosomal protein L6e domain identified by PFam, accession name Ribosomal_L6e, E-value=0.077, PFam score of -84.3
WCILGVTPSLMSRTALFLSRHTFFARSHSAASKLEKKKKEKVLATVTKPVGGDKNGGTRVVKLRKMPRYYPTEDVPRKLLSHGKKPFSQHVRKLRPSITPGTILIILTGRHRG

SEQ ID NO: 45611 - protein, 236 aa, Homo sapiens
  DOMAIN (1)..(35): Serine hydroxymethyltransferase domain identified by PFam, accession name SHMT, E-value=3.1e-19, PFam score of 66.4
MGLDLPDGGHLTHGFMTDKKKISATSIFFESMPYKGLLVGLVTAERSHGTTPPTLNPFAPHVSPTTKSVTSMDAPTYTWTGTTVSWPMNEWHKRTAPLVCRLNLANTRADHRPVALVEYMLQRTQDQDENVALEACEFWLTLAEQQVCKDVFVRHLPRLIPVLVNGMKYSDIDIILPKGDVEEDEMIPDSEQDIWPRFHRSRTVAQQHDEDGIEEEDDDDNEIDDDDTISDWNLRK

SEQ ID NO: 45612 - protein, 584 aa, Homo sapiens
  DOMAIN (365)..(379): PROKARYOTIC DNA TOPOISOMERASE I SIGNATURE domain identified by eMATRIX, accession number PR00417A, p-value=7.429e-15, raw score of 12.66
  DOMAIN (415)..(509): Prokaryotic DNA topoisomerase domain identified by PFam, accession name Topoisom_bac, E-value=6.5e-31, PFam score of 116.0
  misc_feature (1)...(584): Xaa = X or * as defined in Table 2
MRNEISDLTEELHQKEITIATVTKKAALLEKQLKMELEIKEKMLAKQKPWACLVNAMPAIQVVFNLGRFRKCQDPHKAQEWVYPGYSGSDCEVFPEIMTSKNREEAMPEWKLWKKVVLSGATDAPSWDGPTFTDLNVFAGNMGLSDCTLSLGKIWKIPGHFLHTSGPVSFHTKGLLNTPTKERWVGGFGSEGRGVPEPGGCFGVLAVPRRTPPSAAAMTGGERLGRAWAGDRAAASRSAPVPGTFGMMGWRPVAFGKNAKAYRGFGGIVTSLTPSCDKVTLLFVRILPGSGQSRDQSSPEKLTDTKSTSNKAYGFPECLRRPESTHIFFYDHQLGSEQPRGTKGTPLKWVSQKTLERETRQCQALVIWTDCDREGENIGFEIIHVCKAVKPNLQVLRARFSEITPHAVRTACENLTEPDQRVSDAVDVRQELDLRIGAAFTRFQTLRLQRIFPEVLAEQLISYGSCQFPTLGFVVERFKAIQAFVPEIFHRIKVTHDHKDGIVEFNWKRLSTLXPHGLPSSLSVVCGVRSLSCRSVGFCWRSTPDPVCLCITSGGCRTASIAEQQKLLPDPSYRSFIPEGQPPI

SEQ ID NO: 45613 - protein, 40 aa, Homo sapiens
VSSPCGGIRQNFLNLCICQETQLQHVEDYSRILCPSSSPH

SEQ ID NO: 45614 - protein, 80 aa, Homo sapiens
KAEASAVIWTEISCHVQHSPMGTCVRSTYLRAQILPAPQPSPGTCLGLTQLTSQECYVLNIKNGKLPLRLLTNAKLSMRS

SEQ ID NO: 45615 - protein, 1177 aa, Homo sapiens
MELVNCVLMSTLGNTCCPMAIAMFRSSSSLPRPGHSLTGSPLRVNLIHIKFPLNDFHQNVVKIKNKDPPLGAAIGKESCPIADNELHSLERRPLSPKLVQALGVAGLSRPGPPHTGCAIWLLLITDHKLLSEILYDLLHQGLDILADPPDEGGIPRGKNLVELLQLPGLEEDKAFQKEIGLKILVFKAYSTLSSDGPPLFSALRSLQGVQSSKVGESREEKSQTEEEDPGNPWVPQSLGASVSSSGKWGCLRTKPEKAQEGLPVASAKSSTNTRSPSSEQQSSLGLRPWTVLVCSPGVGESCSTEFPTSEMKHPLSLAARAEREELPVPAMEPQPTAWGSPHPEAVLQLEVAPESSGPCTDTAKDQQSDKLPDLMPPAVATGLSPGAESIAGDRRGREEVASMAPASSSHAAPSPGHGASLGVRDQGVQSELLYLTKERPLLFTRATALLPQDLFILPVLGLSICKLEVLRAGKGGCEEGFGQLLLLSEVASSSRHGVVNKPLTCTLSPLSDRLFTKQAVRAPSPVLFPGLEYCSHDIRDRSTGLCHLYPSDPAHRSALGLGSCSISLLTCLFHPNAFSMRQSGRVFSPLGEDAVAHTRFDTLCSQRPHLYWPNSRKYSTKDIVMEVLLALLDAPSWDGPTFTDLNVFAGNMGLSDCTLSLGKIWKIPGHFLHTSGPVSFHTKGLLNTPTKERWRKLIHYSHTGATSFKTSKLDNMNLSCFLSLLATAVIGKVRDAARAEKGELLRAEKTCSVTLLFRPHGGFVEWVLFPNVPIRQGHRAGLPEDKGPEPVGIYSSVDRFGILQLIPVLVNGMKYSDIDIILPKGDVEEDEMIPDSEQDIWPRFHRSRTVAQQHDEDGIEEEDDDDNEIDGDDTISDWNLRKCSVAALDVLANCLSDKKALVRSITCWTLSRYAHWVVSQPPDTYLKSLMTELLKRILDSNKRVPEAACSVFATLEEEACTELVAYLAYILDTLVFAFSKYQHKNLLILYNARGTLADSVGHHLNKPEYIQMLMPPLIQKRNMLKDEDKDLFPLPECPFSVATVLQSGFLPYCEPMYQHWVNLVQKTLAQSLLSNAQPDQYEAPDKDFMIVALDLLSGLAEGLGGNIEQLVARSNILTLTYQCMQDKMPEVRQSSFALLSDLTKACFQHVKPCVADFMPILGTNLTPEFISVCNNDT

SEQ ID NO: 45616 - protein, 927 aa, Homo sapiens
  misc_feature (1)...(927): Xaa = X or * as defined in Table 2
SISGPGQEAVPLRPKAEPPEGSGMVWDRQTKMEYEWKPDEQGLQQILQLLKESQSPDTTIQRTVQQKLEQLNQYPDFNNYLIFVLTKLKSEDEPTRSLSGLILKNNVKAHFQNFPNGVTDFIKSECLNNIGDSSPLIRATVGILITTIASKGELQNWPDLLPKLCSLLDSEDYNTCEGAFGALQKICEDSAEILDSDVLDRPLNIMIPKFLQFFKHSSPKIRSHAVACVNQFIISRTQALMLHIDSFTENLFALAGDEEPEVRKNVCRALVMLLEVRMDRLLPHMHNIVEYMLQRTQDQDENVALEACEFWLTLAEQPICKDVLVRHLPKLIPVLVNGMKYSDIDIILLKGDVEEDETIPDSEQDIRPRFHRSRTVAQQHDEDGIEEEDDDDDEIDDDDTISDWNLRKCSAAALDVLANVYRDELLPHILPLLKELLFHHEWVVKESGILVLGAIAEGCMQGMIPYLPELIPHLIQCLSDKKALVRSITCWTLSRYAHWVVSQPPDTSLKPLMTELLKRILDSNKRVQEAACSAFATLEEEACTELVPYLAYILDTLVFAFSKYQHKNLLILYDAIGTLADSVGHHLKQTQEYIQMLMPPLIQKWNMLKDEDKDLFPLLECLSSVATALQSGFLPYCEPVYQRCVNLVQKTLAQAMLNNAQPDQYEAPDKDFMIVALNLLSGLAEGLGGNIEQLVARSNILTLMYQCMQDKMPEVRQSSFALLGDLTKACFQHVKPCIADFMPILGTNLNPEFISVCNNATWGNWEEISIQMGYRRMQPYIPMGVGTSFVGKFIXQDPNTPKTLLENTAITIGRLGYVCPQEVAPMLQQFIRPWCTSLRNIRDNEEKDSAFRGICTMISVNPSGVIQDFIFFCDAVASWINPKDDLRDMFCKILHGFKNQVGDENWRRFSDQFPLPLKERLAAFYGV

SEQ ID NO: 45617 - protein, 148 aa, Homo sapiens
TWSWSPQAPSWARPSSQARAVSLLVARGQLCQGSRRRSGVGSRVDAGAARTALRTLGTRPRLRRPCGLGSHETKAAASGQDGQRGSRGRGSLGGRELGANEPLYQWRAHTLTVLFILTCTLGYVTLLEETPQDTAYNTKSEIAVVHLS

SEQ ID NO: 45618 - protein, 105 aa, Homo sapiens
MPVAVMAESAFSFKKLLDQCENQELEAPGGIATPPVYGQLLALYLLHNGQRIWQRDFPGIYTTINAHQWSETVQPIMEALRDATRRRAFALVSQAYTSIIADDFA

SEQ ID NO: 45619 - protein, 258 aa, Homo sapiens
  misc_feature (1)...(258): Xaa = X or * as defined in Table 2
RSGTQGRSAATAALNVIAGATPEGQSWGLAVRTVQRRGRPAKMPVAVMAESAVSFKKLLDQCENQELEAPGGIATPKVYGQLLALYLFHNDMNNARYLXKRIPPAIKSANSELGGIWSVGQRIWQRDFPWGIYTTINGHQWSETVQPIMEALRDATRETAPLPWVSQAYTSIIARXFCQPLLGLPVEEAVKGILEQGWQADSTTRNGSCPGKPVCRGPWDVFPFNKFISLYSEPAPVPPIPNEQQLARLTDYVAFLEN

SEQ ID NO: 45620 - protein, 176 aa, Homo sapiens
  DOMAIN (124)..(158): IMMUNOGLOBULIN V REGION domain identified by eMATRIX, accession number DM00031B, p-value=7.845e-11, raw score of 15.41
  DOMAIN (2)..(158): Immunoglobulin domain identified by PFam, accession name ig, E-value=3.6e-15, PFam score of 53.9
MATLTISRAQTEDEADYYCHRIKLVKEGLDERTHKAYLSSSGKGCEFHMVKPGSPLGPDILGSWAQSALIQPPSVSGSPGQSVTISCTGTSSDVGSYDYVSWYQQHPGTVPKPMIYNVNTQPSRVPDRFSGSKSGNTASMTISGLQAEDEADYYCCSYAGSYPVVFGGGTKLTVLG

SEQ ID NO: 45621 - protein, 113 aa, Homo sapiens
WISGGNSCATTLSDAGLSTTSNSIGSATGARQAESASSQSGGGALGRHCGASGKCAESLRREPVGSATNQWAPGWVVGRPASDSSHVVIGLGRSAWSPAEVTPSLIPGRGRTK

SEQ ID NO: 45622 - protein, 1872 aa, Homo sapiens
  DOMAIN (598)..(624): Dihydropteroate synthase proteins domain identified by eMATRIX, accession number BL00792F, p-value=7.513e-09, raw score of 17.58
MGQCKQSSQHCPLAEAGAPLRHRVWCSPENGGEKFLRTELHSGNAHLLRAQHRPRIFTDIGSHGPNSSPMRDGVPLVIEEETEARGGQVATIRVLDDPGVLSYVGWPVSRRRVEEEYDIESDPPVKGTLRPSRVRQWKTAKRNSREQRFAGAEITQPRAHNARETFGGGGASPYWLKEKVYQGLTLKSSGLRSDLRLRVRELQRRDTSSDSSDVTFLEAPGASPPSTGILETRRLGMVAYASRAAPQSSFKVLFHLYVRSHRLSIPAGALGWILKSVLQSVRVGHTSPGGIYKEGHPYGIVQRCILNRGDWLAKAECTKELETGNKEKEIQTEQKQGLRIKRNCDTRDTALGQLGGIVEDPQASPNLQEGTSFPRVQGCTALRRWLTRVFLLLPPSSSNDEPQRDSPVRGPGFLIPGTLSVDRHLRYFGILPTVSNAAVVKEVPTVSNAAVVTEAPTGSNAAVVTEAPTGSNAARVMEVPTGSNAAVVTEVPTGSNAAVVTEAPTGSNAAVVKEAPTGSNAARVMEVPTGSNAAVVKEAPTGSNAARVMEVPTGSNAAVVKEVPTGSNAAVVKEVPTGSNAAVVKEAPTGSNAARVMEVPTGSNAAVVTEAPTGSNAARVMEVPTGSNAAVVKEVPTGSNAAVVKEVPTGSNAAVVKEAPTGSNAARVMEVPTGSNAAVVTEVPTGSNAAVVKEAPTGSNAAVVKEVPTGSNAAAVTEVPTGSNAAVVTEAPTGSNAARVMEVPTGSNAAVVKEVPTGSNAAVVKEVPTGSNAAVVKEVPTGSNAAVVKEVPTGSNAARVTEVPTGSNAAVVTEAPTGSNAAVVKEAPTGSNAAAVKEAPTGSNAAVVTEVPTGSNAARVMEVPTGSNAAVVKEAPTGSNAAVVKEVPTGSNAAVVKEVPTGSNAARVMEVPTGSNAAVVTEAPTGSNAARVMEVPTGSNAAVVKEVPTGSNAAVVKEVPTGSNAAVVKEVPTGSNAAVVKEVPTGSNAARVTEVPTGSNAAVVTEAPTGSNAAVVKEAPTGSNAAAVKEAPTGSNAAVVTEVPTGSNAARVMEVPTGSNAAVVKEAPTGSNAAVVKEVPTGSNAAVVKEVPTGSNAARVMEVPTGSNAAVVTEAPTGSNAARVMEVPTGSNAAVVKEVPTGSNAAVVKEVPTGSNAAVVKEVPTGSNAAVVMEVPTGSNAAVVKEVPTGSNAAVVKEVPTGSNAAVVKEVPTGSNAAVVTEVPTGSNAARVTEVPTGSNAAVVTEAPTGSNAAVVKEAPTGSNAAAVKEAPTGSNAAVVTEVPTGSNAARVMEVPTGSNAAVVKEAPTGSNAAVVKEVPTGSNAAVVKEVPTGSNAARVMEVPTGSNAAVVTEAPTGSNAARVMEVPTGSNAAVVKEVPTGSNAAVVKEVPTGSNAAVVKEVPTGSNAAVVMEVPTGSNAAVVKEVPTGSNAAVVKEVPTGSNAAVVKEVPTGSNAAVVTEVPTGSNAARVTEVPTGSNAAVVTEVPTGSNAAVVTEVPTGSNAAVVTEVQAVRGGDFIFFGSIAHLQKSMFLQPVAHDPDFRANLGAQEGIERGTCTRLGTRPVSHRAWNCINENLVNSCKTNGVRAKALEKAPNVEQHTGLNPTEVITEPAILSAEAGSRTGSVQAIKGGGSAIIERLLQQQQQQQQQFTTRWRASSTCPIKNNDKLTREEQAFDVSSHFTSIQEAVDALNSKTIHWPADFCVVCDTILFSDAVGQGDKRTAFRRYAKEYKNSSTLLAQMIVASGAANNPTTNATAEKSAWLKRALATQNHKSADREEKAGSVSTGPAVKREEEHRVRVWDAAWCTVVYQVTPREMKFNVTHLVGLGKDNLAEAIQFLNARALPKGGKAANGRENPLQNYPYDYALLFS

SEQ ID NO: 45623 - protein, 394 aa, Homo sapiens
  DOMAIN (258)..(284): Dihydropteroate synthase proteins domain identified by eMATRIX, accession number BL00792F, p-value=8.342e-09, raw score of 17.58
MNVNLAEESKGKETVGDEIKGGGIQMVMLASQPLTSYCAARFITGHGQKLKSELKKTLQVIMLNIQKVRIPTRDGYNEKDILSTGKNVEKLELSNIAGYPSNIEKKEYQEQSVLSCCSERKDANPKSVVCSFFMQEQCTKGEKRFLIPGTLSVDRHLRYFGILPTVSNAAVVKEVPTVSNAAVVTEAPTGSNAAVVTEAPTGSNAARVMEVPTGSNAAVVTEVPTGSNAAVVTEAPTGSNAAVVKEAPTGSNAARVMEVPTGSNAAVVKEAPTGSNAARVMEVPTGSNAAVVKEVPTGSNAAVVKEVPTGSNAAVVKEAPTGSNAARVMEVPTGSNAAVVKEAPTGSNAARVMEVPTGSNAAVVKEVPTGSNAAVVKEVPTGVTLRWSRKRPRE

SEQ ID NO: 45624 - protein, 234 aa, Homo sapiens
  DOMAIN (115)..(157): Kringle domain proteins domain identified by eMATRIX, accession number BL00021D, p-value=2.200e-26, raw score of 24.56
  DOMAIN (80)..(156): Trypsin domain identified by PFam, accession name trypsin, E- value=1.6e-24, PFam score of 79.9
MELVLVFLCSLLAPMVLASDYQTLRIGGLVFAVVLFSVGILLILSRRCKCSFNQKPRAPGDEEAQVENLITANDKTSPFLREVQVNLIDFKKCNDYLVYDSYLTPRMMCAGDLRGGRDSCQNNRWYLAGVTSWGTGCGQRNKPGVYTKVTEVLPWIYSKMETSPVWADASGPGGAIAVLGWIVGFGGCSFPGPGPSSVKSCSRWLYEHQVLTQTPCWCRGCHQSDCAVANQADN

SEQ ID NO: 45625 - protein, 103 aa, Homo sapiens
  DOMAIN (28)..(64): ATP1G1 / PLM / MAT8 family proteins domain identified by eMATRIX, accession number BL01310, p-value=9.660e-24, raw score of 14.74
  DOMAIN (21)..(75): ATP1G1/PLM/MAT8 family domain identified by PFam, accession name ATP1G1_PLM_MAT8, E-value=1.5e-14, PFam score of 61.8
MELVLVFLCSLLAPMVLASAAEKEKEMDPFHYDYQTLRIGGLVFAVVLFSVGILLILSRRVQVQFQSESPRAPGDEEAQVGEPHHRQCNRSPRKQRTEVAAIQ

SEQ ID NO: 45626 - protein, 577 aa, Homo sapiens
  DOMAIN (327)..(340): PROTEIN ZINC-FINGER METAL-BINDI domain identified by eMATRIX, accession number PD00066, p-value=1.000e-14, raw score of 13.92
  DOMAIN (57)..(562): Zinc finger, C2H2 type domain identified by PFam, accession name zf-C2H2, E-value=3.6e-125, PFam score of 429.3
FQSRTFLKNWNPGEQSQKIICFQLGERAYQTDVLVKVPRQSSVFSENQRMNNPERWFESTGCGKTYNQNRAFNQHQRFHSGEKTYEHNECGKAFSWPSILSKHQRIHTGKKLYTCEDCGKSFSVHSYFIQHCKIHTREKPYECIKCGKAFSTHSSYVQHLKIHTGEKHHECNQCGKAFSHSSNLIHHQRIHSGEKPYKCKECGKAFNRQSNLIQHQRIHSGEKPYDCKECGKAFSTQLFLIQHQRIHTGEKPYECNECAKSFSLNRTLTVHQRIHTGEKPYRCNECGKSFSQCSQVIQHKRIHTGEKPYICNECGKSFGARLSLIQHQRIHTGEKPYGCREKPYECSECGKAFSQSFNLIHHQRTHNGEKSYECNECDKAFSLLSSLVQHQRIHNGDKPYECHKCGKAFSQGSHLIQHQRSHIGEKPYECNECGKTFGQISTLIKHERTHNGEKPYECSDCGKAFSQSAHLIHHQRIHTGENPYECSECGKAFNVCSSLIQHHRIHTGEKPYECSDCGKAFSQHSQFIQHQRIHTGEKPYMCNECEKSFSACLSLIQHKRIHTGEKPYVCAKCGKSF

SEQ ID NO: 45627 - protein, 117 aa, Homo sapiens
  DOMAIN (35)..(49): Interleukin-6 / G-CSF / MGF proteins domain identified by eMATRIX, accession number BL00254A, p-value=7.750e-09, raw score of 10.66
EAFGGERVSSTMSGLSGPPARRGPFPLALLLLFLLGPRLVLAISFHLPINSRKCLREEIQQGPASDWRVRDLRPVWGRWRPAQRTSRSQILLAIFSTPKRMQPRGNLPLTTEDYDMF

SEQ ID NO: 45628 - protein, 37 aa, Homo sapiens
  misc_feature (1)...(37): Xaa = X or * as defined in Table 2
YVYRRYGRFEXNDPSSALMSTXGKRCQDCLDQRENKK

SEQ ID NO: 45629 - protein, 117 aa, Homo sapiens
  DOMAIN (1)..(44): Glutathione S-transferases domain identified by PFam, accession name GST, E-value=3e-08, PFam score of 30.5
VLKSHGQDYLVGNKLSRADIHLVELLYYVEELDSSLISSFPLLKISMNPDRDHFIYDWVEPFLDEEGYPDPEKCGRIRWIVQRSPAILYPVGKNENSLQFTKSSCKQSRYLEICQWK

SEQ ID NO: 45630 - protein, 289 aa, Homo sapiens
MKLWVTHSQFIVEHINAMTTLAREHRALPPELAQEYLQSCEIAIQRCQQRLEYDEPGSSGDANIMDAPEMQPHEGAAGTLEQHLQRVIGHLNTMHTISSMAFTKEAEMLQVRSLQRYHNISAQNLLPRIFDEYHQHGSIFGIPEQQFYSPVRGKTVSVFGETCATPVGPAGGPHTQLAQNIVTSWLTGGRFIELKTVQILDRLELEKPCIDAEDECFNTQWSTEFTLLKAWDEYLKAWFALHLLEAMFQPSDSGGSSRVELHQGSSIALGAILTVYRGGLRCYLRDTCA

SEQ ID NO: 45631 - protein, 440 aa, Homo sapiens
  DOMAIN (135)..(155): ECOLI/SALMONELLA-TYPE PORIN SIGNATURE domain identified by eMATRIX, accession number PR00183F, p-value=1.529e-26, raw score of 14.09
  DOMAIN (1)..(189): General diffusion Gram-negative porins domain identified by PFam, accession name Gram-ve_porins, E-value=1.3e-111, PFam score of 367.0
MFPEFGGDSSAQTDNFMTKRASGLATYRNTDFFGVIDGLNLTLQYQGKNENRDVKKQNGDGFGTSLTYDFGGSDFAISGAYTNSDRTNEQNLQSRGTGKRAEAWATGLKYDANNIYLATFYSETRKMTPITGGFANKTQNFEAVAQYQFDFGLRPSLGYVLSKGKDIEGIGDEDLVNYIDVGATYYFNKIFHQGLKKGRKGQYLSNADLPRESSDQLAQNIVTSWLTGGRFIELKTVQILDRLELEKPCIDAEDECFNTEWSTEFTLLKAWDVYLKAWFACTFSKLLLVYCVSCALLRCQNLPVRSDLFLNHMVRDMKHTVEVMIPEAEIKARIAELGRQITERYKDSGSDMVLVGLLRGSFMFMADLCREVQVSHEVDFMTASSYGSGMSTTRDVKILKDDRRQRVPGGLKLWRFCPGPLLATPRVLCLGASVLSANCL

SEQ ID NO: 45632 - protein, 1223 aa, Homo sapiens
  DOMAIN (703)..(732): Chorismate synthase proteins domain identified by eMATRIX, accession number BL00787F, p-value=2.227e-30, raw score of 13.19
  DOMAIN (217)..(404): Bacterial type II secretion system pr domain identified by PFam, accession name GSPII_E, E-value=2.4e-122, PFam score of 413.6
MAAVCGTSGIASLFSQAAFAADSDIADGQTQRFDFSILQSMAHDLAQTAWRDVHNTTYNYKRLMSQRDALNQSLAEVQGQINVSFEFFPPRTSEMEQTLWNSIDRLSSLKPKFVSVTYGANSGERDRTHSIIKGIKDRTGLEAAPHLTCIDATPDELRTIARDYWNNGIRHIGALRGDLPPGSEMRSKIAQDIDQSVDLLSLSEEMPANEDLLNEDSAAPVIRLINAILSEAIKETASDIHIETYEKTMSIRFRIDGVLRTILQPNKKLAALLISRIKVMARLDIAEKRIPQDGRISLRIGRRNIDVRVSTLPSIYGERAVLRLLDKNSLQLSLNNLGMTAADKQDLENLIQLPHGIILVTGPTGSGKSTTLYAILSALNTPGRNILTVEDPVEYELERIGQTQPSDSGKSFIFNMSVGYNLEGIKQPPMQQFIDNMMDASDHPKFAQYRDTLNKLLQDDAFLARHGLQEKRESLQALPARIPTSMVHGVTLSTMHGCPPHEIEAICRYMLEEKGLNTFVKLNPTLLGYARVREILDVCGFGYIGLKEESFDHDLKLTQALEMLERLMALAKEKSLGFGVKLTNTLGTINNKGALPGDSTSGVLRTYERLLTAWMLTCPCADEHQRGESVKLATALTWWLRGSQNRDEITKDGFQSNHAGGILGGISSGQQIIAHMALKPTSSIDVPGRTINRFGEEVEMITKGRHDPCVGIRAVPIAEAMLAIVLMDHLLRQRAQNADVKTDIPRCAQSIGSFSNGCIVGADTLPIQSEHYQVMRTDQRRYFGHPDLVMFIQRLSSQVSNLGMGTVLIGDMGMPAGGRFNGGHASHQTGLDVDIFLQLPKTRWTSAQLLRPQALDLVSRDGKHVVSTLWKPEIFSLIKLAAQDKDVTRIFVNPAIKQQLCLDAGTIATGCAKCDPGVSIGAYAYLLTLRAQCLAHDLPDPLEPLEIDGTLLPRYVFIHGGPRVFTYYTPKEESIKLFHDYLDLHRSNPNLDVQMVPVSVMFGRAPGREKGEVNPPLRMLNGVQKFFAVLWLGRDSFVRFSPSVSLRRMADEHGTDKTIAQKLARVARMHFARQRLAAVGPRLPARQDLFNKLLASRAIAKAVEDEARSKKISHEKAQQNAIALMEEIAANFSYEMIRLTDRILGFTWNRLYQGINVHNAERVRQLAHDGHELVYVPCHRSHMDYLLLSYVLYHQGLVPPHIAAGINLNFWPAGPIFRRLGVI

SEQ ID NO: 45633 - protein, 226 aa, Homo sapiens
  DOMAIN (144)..(187): Glutathione S-transferases domain identified by PFam, accession name GST, E-value=5.1e-08, PFam score of 29.7
LESYLQLPSAEGKTVSVFGETCATPVGPAAGPHTQLAQNIVTSWLTGGRFIELKTVQILDRLELEKPCIDAEDECFNTEWSTEFTLLKAWDEYLKAWFALHLLEAMFQPSDSGKSFIFNMSVGYNLEGQPLNPKNYPSQGVPRVLKSHRQDYLVGNKLSWADIHLVELFYYVEELDSSLISSFPLLKPHTHVDNTKKGSHPHMCAYTDYVNNPNDRMPQREITFVS

SEQ ID NO: 45634 - protein, 83 aa, Homo sapiens
  DOMAIN (33)..(71): Glutathione S-transferases domain identified by PFam, accession name GST, E-value=9.9e-07, PFam score of 25.5
  misc_feature (1)...(83): Xaa = X or * as defined in Table 2
QRLTKLRETSRRLLSWQRSPSSTTSMHGAEWSPPRWLLAAAGVEFEEKFIKSAEDLDKVRNDGYLMFQQVPRLRLMGXSWSRV

SEQ ID NO: 45635 - protein, 143 aa, Homo sapiens
  DOMAIN (68)..(120): Ribosomal protein L31e proteins domain identified by eMATRIX, accession number BL01144, p-value=1.551e-32, raw score of 25.07
  DOMAIN (62)..(143): Ribosomal protein L31e domain identified by PFam, accession name Ribosomal_L31e, E-value=1.7e-29, PFam score of 111.4
NQRCTWAYSMTMEIFLISCVKTLSVRYAVQQLKTGVFCSLETQPSKMAPAKKGSKKKKGHSAIIEVVTQENTINIQKHIHEVGFKKCAPRALKEIQKFAMKEMGTPVVLIDTRLNKAVWAKRIRNVTNRIHLCLSRKCNEDKE

SEQ ID NO: 45636 - protein, 106 aa, Homo sapiens
  DOMAIN (70)..(85): Intermediate filaments proteins domain identified by eMATRIX, accession number BL00226A, p-value=8.200e-12, raw score of 12.77
  DOMAIN (71)..(106): Intermediate filament proteins domain identified by PFam, accession name filament, E-value=2.4e-14, PFam score of 57.8
LSSLASMSFTTCSAFTNYWSPGSVQVPSYGTQPVSHAASVYAGLGGSGSRISVSHSPMAGGLAGMGGIQNEKETMQSLRDRLASYLDRVRGLETENWKLESKIQEH

SEQ ID NO: 45637 - protein, 291 aa, Homo sapiens
  DOMAIN (204)..(235): Intermediate filaments proteins domain identified by eMATRIX, accession number BL00226C, p-value=8.683e-14, raw score of 13.23
  DOMAIN (92)..(267): Intermediate filament proteins domain identified by PFam, accession name filament, E-value=4.8e-58, PFam score of 206.3
MRKTYGICEKVSKDKIFESIGVREAEEKNKGTKSVFKEMIAKKLSKPGESSVLATTYGARLVSSTARVYAGAGGSGSRISVSRSTSFQGGLETIQNLRIQIFANTVDNACIVLQIDNARLAADDFRVKYETELAMRQSVENDIHGLRNVIDDTVTRLQLETEIEAVKEELLFMKKNLKEEAKSLQAQIASSGLMVEVDAPKSQDLAKVMADIRAQYDELAQKNGEELDKHWPQQIEESTTVVTTQSAEVGAAETTLTEMRRTVQFLEMTWTPGVIEVLSVFKYRVITEVAL

SEQ ID NO: 45638 - protein, 326 aa, Homo sapiens
  DOMAIN (268)..(299): Intermediate filaments proteins domain identified by eMATRIX, accession number BL00226C, p-value=5.800e-19, raw score of 13.23
  DOMAIN (102)..(326): Intermediate filament proteins domain identified by PFam, accession name filament, E-value=1.6e-75, PFam score of 264.3
RGDPRVRRRTQSLSPVLSLSPDSMSFTTRSTFSTNYRTLGSVQAPSYGARPVSSAASVYAGAGGSGSRISVSRSTSFRGGMGSGGLATGIAGGLAGMGGIQNEKETMQSLNDRLASYLDRVRSLETENRRLESKIREHLEKKGPQVRDWSHYFKIIEDLRAQIFANTVDNARIVLQIDNARLAADDFRVKYETELAMRQSVENDIHGLRNVIDDTNYHTDLQLETEIEALKEELLFMKKNHEEEVKGLQAQIASSGLTVEVDAPKSQDLAKIMADIRAQYDELARKNREELDKYWSQQIEESTTVVTTQSAEVGAAETTLTELRRT

SEQ ID NO: 45639 - protein, 146 aa, Homo sapiens
  DOMAIN (89)..(104): Intermediate filaments proteins domain identified by eMATRIX, accession number BL00226A, p-value=4.073e-11, raw score of 12.77
  DOMAIN (89)..(146): Intermediate filament proteins domain identified by PFam, accession name filament, E-value=1.4e-23, PFam score of 91.7
LHSDDLSLQMLRCSPVATAASYTSGPGAPISSSSFSRVGSSSFQGGLGGGFGGASGIGGITAVMVNQSLLRPLNLEVDPNIQARFVHTQEKEQIKTFNNKFASFIDKVRFLEQQNRMLEAKWSLLQQQKMAQSNMDNMFQSYINNL

SEQ ID NO: 45640 - protein, 426 aa, Homo sapiens
  DOMAIN (174)..(222): Intermediate filaments proteins domain identified by eMATRIX, accession number BL00226B, p-value=5.364e-28, raw score of 23.86
  DOMAIN (76)..(387): Intermediate filament proteins domain identified by PFam, accession name filament, E-value=4.4e-125, PFam score of 428.9
EIFPLVIQKSYKVSTSGPRAFSSRSYTSGPGAPISSSSFSRVGSSSFQGGLGGGFGGASGIGGITAVMVQVLHTQEKEQIKTFNNKFASFIDKVRFLEQQNRMLEAKWSLLQQQKMAQSNMDNMFQSYINNLRWQLETLGQEKLKLEAELGNMQELVEDFKKKYHDEINKHTEMENEFVLIEKDVDEAYKNKVELESHLEGLTDEINFLRQLHEEEIWELQSLISDTSVVLSIDSSHSLDMDNIITEVKAQYKEIANCSWAKADSMYQIKYEDLQMLARKHGDNLRCTKTDISEMNQNVSWLQAEIKGLKGQRASLEATITDAEKRRELAIKDANTKLLELEAALQWAKQDMAQQLRVYQELMNVKLALDIKTATYKKLLEGEESWQESRMQNMSIYSKTTSGYAGGLSSAYGGLTSPPLSYGLSS

SEQ ID NO: 45641 - protein, 275 aa, Homo sapiens
  DOMAIN (179)..(227): Intermediate filaments proteins domain identified by eMATRIX, accession number BL00226B, p-value=3.348e-35, raw score of 23.86
  DOMAIN (87)..(273): Intermediate filament proteins domain identified by PFam, accession name filament, E-value=3.2e-89, PFam score of 309.8
GDPEVLQGVQLLAPGPSAAAPTRVGPVPASAPRASPEWAAATFAVAWAAAMVGPAAWEASPQLRSTRALLSPLVLEVDPNIQAVRTQEKEQIKTLNNKFASFIDKVRFLEQQNKMLETKKTARSNMDNMFESYINNLRRHVETLGQEKLKLEADVGNMQGLVEDFKNKYEDEINKRTEMENEFVLIKKDVDEAYMNKVELESRLEGLTDEINFLRQLYEEEIRELQSQISDTSVVLSMDNSRSLDMDSIIAEVKAQYEDIANRSRAEAESMYQIN

SEQ ID NO: 45642 - protein, 51 aa, Homo sapiens; identical to SEQ ID NO: 34614
  DOMAIN (5)..(20): RIBOSOMAL PROTEIN L7A/RS6 FAMILY SIGNATURE domain identified by eMATRIX, accession number PR00881D, p-value=8.500e-16, raw score of 11.60

SEQ ID NO: 45643 - protein, 203 aa, Homo sapiens
  DOMAIN (157)..(197): Ribosomal protein L7Ae proteins domain identified by eMATRIX, accession number BL01082, p-value=4.971e-30, raw score of 20.37
  DOMAIN (124)..(202): Ribosomal protein L7Ae domain identified by PFam, accession name Ribosomal_L7Ae, E-value=9.8e-23, PFam score of 89.0
MIPVSEKSKIGQLNLMLKGKKTKGKKVALVPAAVKKQEAKKVVNLLFEKRPKNVGIGQTSSPKETCTCFVKWPRYIRLQQQTAILDNLSRPWTSKQLLSCLSWPTSTDQRQSKRISRGYWPRAEKKAASKGDIPNKRPPVLQAGVKTVTNLVENKKAQLVVIAHDVDPVELVVFLPVLHCKMGVPYCIIKGKARLGHLVHRKT

SEQ ID NO: 45644 - protein, 276 aa, Homo sapiens
  DOMAIN (157)..(197): Ribosomal protein L7Ae proteins domain identified by eMATRIX, accession number BL01082, p-value=5.286e-37, raw score of 20.37
  DOMAIN (127)..(227): Ribosomal protein L7Ae domain identified by PFam, accession name Ribosomal_L7Ae, E-value=3.6e-40, PFam score of 146.9
STPKMPKGKKAKGKKVAPAPAVVKKQEAKKVVNPLFEKRPKNFGIGQDIQPKRDLTRFVKWPRYIRLQRQRAILYKRLKVPPAINQFTQALDRQTATQLLKLAHKYRPETKQEKKQRLLARAEKKAAWPKGTFPTKRPPVLRAGVNTVTTLVENKKAQLVVIAHDVDPIELVVFLPALCRKMGVPYCIIKGKASLGRIVHRKTCTTVAFTQVNSEDKGALAKLVEAIRTNYNDRYDEIRRHWGGNVLGPKSVARIAKLEKAKAKELATKLGLNVHC

SEQ ID NO: 45645 - protein, 335 aa, Homo sapiens
  DOMAIN (193)..(248): Ribonucleotide reductase small subunit proteins domain identified by eMATRIX, accession number BL00368A, p-value=1.000e- 40, raw score of 36.98
  DOMAIN (211)..(335): Ribonucleotide reductases domain identified by PFam, accession name ribonuc_red, E-value=8.2e-73, PFam score of 213.8
WINLKGNLLRKRSLTSNFWPCKLRSRKRHTTRNLRMNLWLSSHPPQQSNTKPWCCQLSCSTSLLTLLGTSLPLLSYLIHLIPPGPRQYPVIHRTSTLLLQHISVGKEKFHKSQHWGFCNNVMMLQLQLSPLKGLSLVDKVNRPPALSGTRVLASKTAWRIFQEPSEPKTKAAAPGVEDEPLLRGNPCRFVIFPIEYHDIWQMYEKAEASFWTTEEVDLSKDIRHWESLKPEERYFISHVLVFFAASDGIINENLVERFSQIVQITEARCFYGFQIAMENIHSEMYSLLIDTYIKDPKEREFLFNAIETMPCVKKKADWALRWIGDKEATYGERVV

SEQ ID NO: 45646 - protein, 453 aa, Homo sapiens
  DOMAIN (148)..(203): Ribonucleotide reductase small subunit proteins domain identified by eMATRIX, accession number BL00368A, p-value=1.000e- 40, raw score of 36.98
  DOMAIN (167)..(440): Ribonucleotide reductases domain identified by PFam, accession name ribonuc_red, E-value=9e-174, PFam score of 507.8
QAQPMGRVGGMAQPMGRAGAPKPMGRAGSARRGRFKGCWSEGSPVHPVPAVLSWLLALLRCASTMLSLRVPLAPITDPQQLQLSPLKGLSLVDKENTPPALSGTRVLASKTARRIFQEPTEPKTKAAAPGVEDEPLLRENPRRFVIFPIEYHDIWQMYKKAEASFWTAEEVDLSKDIQHWESLKPEERYFISHVLAFFAASDGIVNENLVERFSQEVQITEARCFYGFQIAMENIHSEMYSLLIDTYIKDPKEREFLFNAIETMPCVKKKADWALRWIGDKEATYGERVVAFAAVEGIFFSGSFASIFWLKKRGLMPGLTFSNELISRDEGLHCDFACLMFKHLVHKPSEERVREIIINAVRIEQEFLTEALPVKLIGMNCTLMKQYIEFVADRLMLELGFSKVFRVENPFDFMENISLEGKTNFFEKRVGEYQRMGVMSSPTENSFTLDADF

SEQ ID NO: 45647 - protein, 207 aa, Homo sapiens
  DOMAIN (110)..(165): Actins proteins domain identified by eMATRIX, accession number BL00406B, p-value=1.000e-40, raw score of 5.47
  DOMAIN (27)..(207): Actin domain identified by PFam, accession name actin, E- value=2.7e-111, PFam score of 366.5
RFIKMLSRHHQHVHHVLPLLRAPLPVAMEEEIPALFIDNGSGMCKSSFAGDNALRAIFPSIIGHPRHQGVMVGMGQKDSYVGDQAQSKCGILTLKYPIKHGIVTNWDDMEKIWHHVFYNELCVALEEQVVLLTEAPLNPRANREKMTQIMFKTFNTQAMYVAIQAVLTLHSSGCTTGIVMDSGDGVTHTVPIYERHTLPHTILHLDL

SEQ ID NO: 45648 - protein, 321 aa, Homo sapiens
MRRDPTPPRGLPRQRPTPSPRTRSRGHQSQRPKAKSEPQPAPAATPGGRRAWEPRAQAGCPPPPRAASPRRLVQGERPESGNRSRQAAYPRRASRARTCTTRLPPTLRQRALTQRPCSMHRALAALKNKPLNHVHKVVKERLCPWLCSRQPEPFGVKFHHAHCKKFHSKNGNDLHPLGGPVFSQVSDCDRLEQNVKNEESQMFYRRLSNLTSSEEVLSFISTMETLPDTMAAGALQRICEVEKKDGDQGLPKEILENSIFQALCFQFEKEPSQLSNTSLVTALQALILLHVDPQSSLLLNLVADAKIVSGTELDSNHVMPE

SEQ ID NO: 45649 - protein, 75 aa, Homo sapiens
RVGLQTGEAAPSPHRDLRDTPDPRPWLARTHRMTTTLVSATIFDLSEVLCKVKGGGAFAFQKVFFFCLKKEPPKS

SEQ ID NO: 45650 - protein, 271 aa, Homo sapiens
MGRARKSGLGQRSRPTASRSEAAVQPGVRKARGAGNWRVGLQTGEAAPSPHRDLRDTPDPRPWLARTHRMTTTLVSATIFDLSEVLCKGNKMLNYSAPSAGGCLLDRKAVGTPAGGGFPRRHSVTLPSSKFHQNQLLSSLKGEPAPALSSRDSRFRDRSFSEGGDAAAAHPEAARGRPRSTPAATRRSCAAPARKTEPGSTGTSASIALALLRFPVPLPPPLPPGCWTAPRPSPHPPILSADDLLGSLTLPDGTNNPFCLLQPGAGKPLCP

SEQ ID NO: 45651 - protein, 43 aa, Homo sapiens
  misc_feature (1)...(43): Xaa = X or * as defined in Table 2
RKLLNEAPCXPMRXHSLLNRLATSCNSWTVPVVPKFSKLRRGL

SEQ ID NO: 45652 - protein, 77 aa, Homo sapiens
  misc_feature (1)...(77): Xaa = X or * as defined in Table 2
KIAGKNRLNRNQCKERKVQVLWISEKKKQREAVEDSPSLDCCHKFPPGSXERLHGXKRGQWFXPPHTVEKQMRSCLL

SEQ ID NO: 45653 - protein, 54 aa, Homo sapiens
LVATFVFSWGVDEMRVNCSSGVVIFKPFTPPASSDSGSAHSVARGKTWCGGELG

SEQ ID NO: 45654 - protein, 378 aa, Homo sapiens
  DOMAIN (146)..(160): PROTEIN SH3 DOMAIN REPEAT PRESYNA domain identified by eMATRIX, accession number PD00289, p-value=5.345e-09, raw score of 9.97
  DOMAIN (103)..(185): PDZ domain (Also known as DHR or GLGF) domain identified by PFam, accession name PDZ, E-value=0.00019, PFam score of 28.2
VCSTAGDVNGVCLLYDLLHIAVASGSAKGECFFARKPLLAEGVIYDCLQEFKEKKLVPATPHAQVLSYEALLSAHDTIAQKDFEPLLPPLPDNIPESEEAMRIVCLVKNQQPLGATIKRHEMTGDILVARIIHGGLAERSGLLYAGDKLVEVNGVSVEGLDPEQVIHILAPRPCLSPMSLADLPPLPREVLVLAGKLPVPSSSFLLQPREDCQGPQPSSLITWFAPLETEPGVDRAMSRGTIMFKVVPVSDPPVNSQQMVYVRAMTEYWPQEDPDIPCMDAGLPFQKGDILQIVDQNDALWWQARKISDPATCAGLVPSNHLLKRIWTEPGICIFTKRLRCSGKQREFWWSQPYQPHTCLKSTLCEYCNCPTGSSCLQ

SEQ ID NO: 45655 - protein, 135 aa, Homo sapiens
WSLVTRRALARVGLPGSPPPRLLLLPLLLGWGLRVAAAASASSSGAAAEDSSAMEELATEKEAEESHRQDSVSLLTFILLLTLTILTIWLFKHRRVRFLHETGLAMIYGLEKITIGVLDITGWPYCTIQPYNGFL

SEQ ID NO: 45656 - protein, 1268 aa, Homo sapiens
  DOMAIN (1120)..(1144): Guanine-nucleotide dissociation stimulators CDC25 family sign domain identified by eMATRIX, accession number BL00720B, p-value= 4.103e-18, raw score of 16.57
  DOMAIN (1030)..(1215): RasGEF domain identified by PFam, accession name RasGEF, E- value=1.7e-88, PFam score of 307.4
FRVAPSREPAGPWPRGRGETGGHPGALRTRTMQKSVRYNEGHALYLAFLARKEGTKRGFLSKKTAEASRWHEKWLALYQNVLFYFEGEQSCRPAGMYLLEGCSCERTPAPPRAGAGQGGVRDALDKQYYFTVLFGHEGQKPLELRCEEEQDGKEWMEAIHQASYADILIEREVLMQKYIHLVQIVETEKIAANQLRHQLEDQDTEIERLKSEIIALNKTKERMRPYQSNQEDEDPDIKKIKKVQSFMRGWLCRRKWKTIVQDYICSPHAESMRKRNQIVFTMVEAESEYVHQLYILVNGFLRPLRMAASSKKPPISHDDVSSIFLNSETIMFLHEIFHQGLKARIANWPTLILADLFDILLPMLNIYQEFVRNHQYSLQVLANCKQNRDFDKLLKQYEANPACEGRMLETFLTYPMFQIPRYIITLHELLAHTPHEHVERKSLEFAKSKLEELSRVMHDEVSDTENIRKNLAIERMIVEGCDILLDTSQTFIRQGSLIQVPSVERGKLSKVRLGSLSLKKEGERQCFLFTKHFLICTRSSGGKLHLLKTGGVLSLIDCTLIEEPDASDDDSKGSGQVFGHLDFKIVVEPPDRAAFTVVLLAPSRQEKAAWMSDISQCVDNIRCNGLMTIVFEENSKVTVPHMIKSDARLHKDDTDICFSKTLNSCKVPQIRYASVERLLERLTDLRFLSIDFLNTFLHTYRIFTTAAVVLGKLSDIYKRPFTSIPVRSLELFFATSQNNRGEHLVDGKSPRLCRKFSSPPPLAVSRTSSPVRARKLSLTSPLNSKIGALDLTTSSSPTTTTQSPAASPPPHTGQIPLDLSRGLSSPEQSPGTVEENVDNPRVDLCNKLKRSIQKAVLESAPADRAGVESSPAADTTELSPCRSPSTPRHLRYRQPGGQTADNAHCSVSPASAFAIATAAAGHGSPPGFNNTERTCDKEFIIRRTATNRVLNVLRHWVSKHAQDFELNNELKMNVLNLLEEVLRDPDLLPQERKAAANILRALSQDDQDDIHLKLEDIIQMTDCMKAECFESLSAMELAEQITLLDHVIFRSIPYEEFLGQGWMKLDKNERTPYIMKTSQHFNDMSNLVASQIMNYADVSSRANAIEKWVAVADICRCLHNYNGVLEITSALNRSAIYRLKKTWAKVSKQTKALMDKLQKTVSSEGRFKNLRETLKNCNPPAVPYLGMYLTDLAFIEEGTPNFTEEGLVNFSKMRMISHIIREIRQFQQTSYRIDHQPKVAQYLLDKDLIIDEDTLYELSLKIEPRLPA

SEQ ID NO: 45657 - protein, 90 aa, Homo sapiens
  DOMAIN (15)..(64): PH domain identified by PFam, accession name PH, E-value=7.6e -09, PFam score of 36.6
RPDVANLAFLARKEGTKRGFLSKKTAEASRWHEKWFALYQNVLFYFEGEQSCRPGMYLLEGCSSGGTSPRSFRSSSRDSPISIPLHPTAK

SEQ ID NO: 45658 - protein, 56 aa, Homo sapiens
LLAKMKFNPFVTSDRSKNRKRHFNAPSHIRRKIMSSPLSKELRQKYNVRSMPIRKD

SEQ ID NO: 45659 - protein, 156 aa, Homo sapiens
  DOMAIN (60)..(93): Ribosomal protein L24 proteins domain identified by eMATRIX, accession number BL01108A, p-value=2.241e-22, raw score of 20.33
  DOMAIN (61)..(120): KOW motif domain identified by PFam, accession name Ribosomal_L24, E-value=1.4e-21, PFam score of 85.1
DPRRVQAFPAKMKFNPFVTSDRSKNRKRHFNAPSHIRRKIMSSPLSKELRQKYNVRSMPIRKDDEVQVVRGHYKGQQIGKVVQVYRKKYVIYIERVQREKANGTTVHVGIHPSRVVITRLKLDKDRKRISDRKAKSRQVGKEKGKYKEETIEKMQE

SEQ ID NO: 45660 - protein, 118 aa, Homo sapiens
  misc_feature (1)...(118): Xaa = X or * as defined in Table 2
MANGPRAXFCENFQAALALSRVGLHKNPEKEPYKSKYSARALLEEVKALLGPAPEDEDERPEAEDGPGAGDHALGLPVAQRAVRLAVIEFHLGVNHIDTEELSAGEEHLVKCLRLLRS

SEQ ID NO: 45661 - protein, 291 aa, Homo sapiens
VKCRKAEGRRESRLQTFEESQAVEAAMANVPWAEVCEKFQAALALSRVELHKNPEKEPYKSKYSARANMEEVKALLGPAPEDEDERPEAEDGPGAGDHALGLPAEVVEPEGPVAQANRLRLAVIEFHLGVNHIDTEELSAGEEHLVKCLRLLRRYRLSHDCISLCIQAQTWRCIGVRDPPTSSCAFLSTSPTPVHSVKKIQTPGPLRPSNSTLVDDMESSFQTCFASPLSQDYVNGSNQEEIGTGVDRCIHKFLDIARQNISFLQKRLQLSVQKPEQVINEDVDVSELRNE

SEQ ID NO: 45662 - protein, 281 aa, Homo sapiens
  misc_feature (1)...(281): Xaa = X or * as defined in Table 2
WPGKVLAHRGLHPWHRDPHGSGGGAGQELRRQGGCLEQLLYDAAHAQRLPPLDSVLPRAALPQDCQRASACEGDPTLLRPSHSPGHPRGAEERVPSTACLQRSWEGRWNRALQQVGGLKSPWRGEYKEPRHPPPNQANYHQTLACPAERCFRQGPQGPGQLRRQQAEPLSSSLLSHQSPQSQTSLLPXLXARRSLGCGNPYLCPPWSQPLPETPAHQSGKQPSRSRNCSSWKXNYSSTACPSHFLWRSRSKFSRASASTASPCRMTVRRTHQRPLKARGTP

SEQ ID NO: 45663 - protein, 88 aa, Homo sapiens
RPHAESFVSGGIPDPPGPGPGSTGPGPLERQPCSLTSWPREPPSSSSMKMLTQGPSLTAPYKGTILGEVNPAHAISSSARNTSSRTSV

SEQ ID NO: 45664 - protein, 147 aa, Homo sapiens
  misc_feature (1)...(147): Xaa = X or * as defined in Table 2
TPAHPGVPPGQSGRHRHWQSAARSQLQPSAWXPKTGSLFATTWRCQTRASTCSAHWPLMAASPGAGGSSMASWRDRPXPCPPPPAPHLPEAAFLLRCHDACPXNTGSAVPRGSCQPPAQQWDQGLAATRWGQAERLPRIYNWALAPP

SEQ ID NO: 45665 - protein, 134 aa, Homo sapiens
FQASAERFGTEDDGSLRTRPPVMQSHQWPWRRPRPLVSRGRPQTTPERHDSGGSLPLTPRMESHSEDEDLAEGCRWPEAGTVGVPGPRAQGAAQRQAVLARKKHRRRPSKRKRHWRPYLELSWAEKQQRDERQS

SEQ ID NO: 45666 - protein, 72 aa, Homo sapiens
ACPKTSKNLRQRRLWNLAKHEFSVDMTCGGCAEAVSRVLISLEVRVKYDIDLPNKKVCIESEHSMDTLLATL

SEQ ID NO: 45667 - protein, 110 aa, Homo sapiens
MTAKSQAAAVWRRCGGGVSSASLDSEGGPALQEAYVRVVTEKSPTDWALFTYEGNSNDIRVAGTGEGGLEEMVEELNSGKVMYAFCRVKDPNSGLPKFVLINWTGEGVND

SEQ ID NO: 45668 - protein, 139 aa, Homo sapiens
SLWPPVIRGSPKGNRPAILTYHDVGLNMANKKSGDHPEREGTPRSFREVVSAFGPGSSKLQIPKGSAPRCGVPGRGARRELQSFRAGPRTQGSPVGPRCQSRRLRSAQEESAKARHGGLRAHRSFSWDIRMSSKERKFS

SEQ ID NO: 45669 - protein, 45 aa, Homo sapiens
  misc_feature (1)...(45): Xaa = X or * as defined in Table 2
PGRYRPNXLLLSDASPGAGNEFQSTFLTPTILPSLRFPVLYTPNS

SEQ ID NO: 45670 - protein, 216 aa, Homo sapiens
  DOMAIN (54)..(73): Eukaryotic  RNA-binding region RNP-1 proteins domain identified by eMATRIX, accession number BL00030A, p-value=1.000e- 12, raw score of 14.39
  DOMAIN (54)..(117): RNA recognition motif. domain identified by PFam, accession name rrm, E-value=1.7e-06, PFam score of 35.0
MSLRKLTIMVEGKGGPNIPHACGCRQRSSIKVSLLPAVTSKSESPKEPEQLRKLFIGGLSFETTDESLRSHFEQRRTLTDCAVMRDPNTKCSKGFGFVTYATMEEKYHTVNGHSCEARKALSKQEVASASSSQRGRSGSGNFGGGHGGGFGGNDNFGHGENFRGHSSFGGSHGGSGYGGSGDDYSGFGNDGSNFGGGGSYNDFGNYSNQSSNFGPM

SEQ ID NO: 45671 - protein, 1205 aa, Homo sapiens
  DOMAIN (901)..(920): Eukaryotic  RNA-binding region RNP-1 proteins domain identified by eMATRIX, accession number BL00030A, p-value=1.000e- 12, raw score of 14.39
  DOMAIN (345)..(758): Zinc finger, C2H2 type domain identified by PFam, accession name zf-C2H2, E-value=7.9e-86, PFam score of 298.5
MTGICYTEDERSYKKNAQPTAASKKQKETQKFCLRVDGQQKVKLSVLQEKSAQLTVQLKSQKFLGHPTAGRGRSELCLDLPDPPEDPVALETRSVGTWVRERDLGMPDGEAALAAKVAVLETQLKKALQELQAAQARQADPQPQAWPPPDSPVRVDTVRVVEGPREVEVVASTAAGAPAQRAQSLEPYGTGLRALAMPGRPESPPVFRSQEVVETMCPVPAAATSNVHMVKKISITERSCDGAAEMKWEDQNIGDQCQNAKRNLRMALTSSLGCGFLQVVLRLQNLQQVIVSYFGQCKFGCLQGQSCEHQEYGEKPYTHKQRGKAISHQHSFQTHERPPTGKKPFYCKECAKTFSSLGNLRRHMAAHHGDGPYKCKLCGKAFVWPSLFHLHERTHTGEKPYECKQCSKAFPFYSSYLRHERIHTGEKAYECKQCSKAFPDYSTYLRHERTHTGEKPYKCTQCGKAFSCYYYTRLHERTHTGEQPYACKQCGKTFYHHTSFRRHMIRHTGDGPHKCKICGKGFDCPSSVRNHETTHTGEKPYECKQCGKVLSHSSSFRSHMITHTGDGPQKCKICGKAFGCPSLFQRHERTHTGEKPYQCKQCGKAFSLAGSLRRHEATHTGVKPYKCQCGKAFSDLSSFQNHETTHTGEKPYECKECGKAFSCFKYLSQHKRTHTVQKPYECKTCRKAFSHFSNLKVHERIHSGEKPYECKECGKAFSWLTCLLRHERIHTGEKPYECLQCGKAFTRSRFLRGHEKTHTGEKLYECVCKVDKQNRAGYSPIMLTALATLKTQDDIETVLQLFRLGNINAKASQPYVAQGDLSGFQDIGGYTKRKLDFYSTLLAGSPGPQHPGSHLCPQTNLEKSRFSARGHRRRSIVKVSLHPAVMSKSESPKEPEQLRKLFIGGLSFETTDESLRSHFEQWGTLTDCVVMRDPNTKRSRGFGFVTYATVEEVDAAMNARPHKVDGRVVEPKRAVSREDSQRPGAHLTVKKIFVGGIKEDTEVHHLRDYFEQYGKIEVIEIMTDRGSGKKRGFAFVTFDDHDSVDKTVIQKYHTVNGHNCEVRKALSKQEMASASSSQRGRSGSGNFGGGRGGGFGGNDNFGRGGNFSGRGGFGGSRGGGGYGGSGDGYNGFGNDGSNFGGGGSYNDFGNYNNQSSNFGPMKGGNFGGRSSGPYGGGGQYFAKPRNQGGYGGSSSSSNYGSGRRF

SEQ ID NO: 45672 - protein, 505 aa, Homo sapiens
  DOMAIN (430)..(475): kw TRANSCRIPTASE REVERSE II ORF2 domain identified by eMATRIX, accession number DM01354N, p-value=8.571e-33, raw score of 13.17
  DOMAIN (150)..(305): Gag P30 core shell protein domain identified by PFam, accession name Gag_p30, E-value=1.8e-45, PFam score of 163.0
MGQVFRVVTGVGEQPGHPDQFPYIDSWLSIIQNHPKWLQACFETYCKTLMAQIKPGTIERDCKASVKEKDSQEKQKKPVLQAPPEELESPALYAPIYPSLARLRQEAAPAAPRGSDSEESTPQATPCREEPEPLPEKETSSSYRSNAVHFLIHNPTWADCKQLLQSLFNTEEHHRVIQAAFQWLENNAPAGTGYIRQYAQQALPIEADTGWDPNQAQGLQSLQWYREALLNGIKAGGKKATNIGKVSEVCQKPDESPSEFYERLCEAYQLYTPFDPEAAGNQCMVNVAFVSQAQGDIKRKLQKLEAKAVLRGKFIALNTYIKKAERAQTDILRSHLKELKKQEQTKSKASRRKDVTKIRAELNEIETTTTKIQKINETKSWFFEKINTINRPLARLTKKSREKLQITSLRKEMGDTTTDTTEIQKIIQGYYEHLYAHKLENLEEMNKFLEKYNAPSLNQEELHTLNRPIRNSEIEVVIKKLPTKKSPGQDGFRAESYQIFKEALV

SEQ ID NO: 45673 - protein, 358 aa, Homo sapiens
MPEDSLMRSQRTSNREQPEKPSCPVGGVLSSSKDQVSCEFPSPETIQGTVQTPVTAARVVSHSSSPVGGPEGERQGAICDSEMRSCKPLTRESGCSENKQPSVTASGPQGTTSVTPQPTPLTSEPSACPPGPEKVPLPAQRQMSRFKEASTMTNQAESEIKEVPSRAWQDAEVQAVASVESRSVSTSPSILTAFLKESRAPEHFEQEQLRVICHSTDHSGSLDPTNKGDAREKKPASPQVVKEKESTGTDTSDAKTLLLNPKSQESGGTESAANPTPSPIRKNQESTLEENRQTKTATSLSLPSDPMGDSSPGSGKKTPSRSVKASPRRPSRVSEFLKEQKLNVTAAAAQKRRVSRDT

SEQ ID NO: 45674 - protein, 73 aa, Homo sapiens
  misc_feature (1)...(73): Xaa = X or * as defined in Table 2
YYFDSPIHPLHLSGTLRPGGSRQFPCDPQFLCRLLHTLASLXSLPGDLLRGLLHKLVCRVERLDLASLYAVGR

SEQ ID NO: 45675 - protein, 46 aa, Homo sapiens
PPGPALGISRLGTIRGWEQLLQPPRRERGSKSSICPLSGISAPSST

SEQ ID NO: 45676 - protein, 142 aa, Homo sapiens
  misc_feature (1)...(142): Xaa = X or * as defined in Table 2
LPSSVPRQPKMQARCLSRSIRAVEIYESDLEEGQGLLHEFSQFVLDRPPPTQSRYAQELVHTCYLHTLASLXSLPGDLQRGLLHKLVCRAERLDLASHHAAVGRSELFFWTPYTHSPPGAGVGHPFPWHTRLPWGVPAEGHQ

SEQ ID NO: 45677 - protein, 102 aa, Homo sapiens
  misc_feature (1)...(102): Xaa = X or * as defined in Table 2
PSSSIPVYHCSLRGICIPVLGLKRAANVGVSLEASPPLLSTPGGLGICLSCGGTRTVGSRVGSIFPWXGEGTTGITGSISCKGSSDVGSNRTSGVDFPRRVE

SEQ ID NO: 45678 - protein, 91 aa, Homo sapiens
  DOMAIN (42)..(64): OLFACTORY RECEPTOR SIGNATURE domain identified by eMATRIX, accession number PR00245A, p-value=9.135e-15, raw score of 18.03
  DOMAIN (24)..(82): 7 transmembrane receptor (rhodopsin family) domain identified by PFam, accession name 7tm_1, E-value=4e-10, PFam score of 34.3
SEDPELQPVLAGLSRSMYLVMVLRNLLIILAVSSDSHLHTPMYFFLSNLCWADIGFTSAMVPKMIVDMQSHSRVIFYAGCLTPMSFLVLRF

SEQ ID NO: 45679 - protein, 295 aa, Homo sapiens
  DOMAIN (249)..(285): Synapsins proteins domain identified by eMATRIX, accession number BL00415B, p-value=9.338e-09, raw score of 9.91
  misc_feature (1)...(295): Xaa = X or * as defined in Table 2
MEEGWIRLPDGRVAAPQLLGAAVVLAVQETTHRGQESLEKLLGRYFYISPLSALAKTVRQRDFADFGTTIKQDFRLLGQTSVDRLLQLSQGQAVKGNQLLPVSLTSQCQVYKCVWNWWVLGLTDFKNEATDPPGVKLQTFLVSVTTHKGSVDPNSEKQQDLLQRAKEQSFHSVEGDPSRDFADFGTTIKQDFRLLGQTSVDRLLQLSQGQAVKGNQLLPVSLVKRKTTLAPNTQTASPRALADSLMQLARQVSRXRAISCCPSHXLPSAKCISVSGIGGFLVSLTSRMKPRTLLE

SEQ ID NO: 45680 - protein, 309 aa, Homo sapiens
  DOMAIN (29)..(240): Gag P30 core shell protein domain identified by PFam, accession name Gag_p30, E-value=4.1e-55, PFam score of 196.5
MGTQMPLREQQYTGIDEDGQVLERRVFGYQSFTCVDLLNWKNNTPPYSEKPQALIDLLQAVIQTHDPTWADWHQLLMFLFNSEERRRVLQAVTKWLEEHAPADYQNLQEYGRTQLPGTDPQLDPHEREEMQRLNRDREALLEGLMRGAQEATNVNKLSEVIQGKEESPAQLYERELWEAYRMYTPFDPDSPENQRMIHMALVSQSAEDMRRKLQKQAGLAGMNPPQLLEIASQVFVNRDAVDDLLLEHPTAVRCAKGTVVLHWHLEDCGYQLSKKKAQICRQQTGSLKDGPPVGGPWQQLPCQYKKQIS

SEQ ID NO: 45681 - protein, 75 aa, Homo sapiens
  misc_feature (1)...(75): Xaa = X or * as defined in Table 2
LQLQPTGCNFLYFYVGYMKILGFCFHHIVEERGGCLWYPCFYCNLSLLGGXRSCSHTRIVPSLLMPKLGPGGQVC

SEQ ID NO: 45682 - protein, 620 aa, Homo sapiens; identical to SEQ ID NO: 33954
  DOMAIN (433)..(473): G-protein coupled receptors proteins domain identified by eMATRIX, accession number BL00237A, p-value=7.171e-13, raw score of 27.68
  DOMAIN (39)..(228): Gag P30 core shell protein domain identified by PFam, accession name Gag_p30, E-value=2e-47, PFam score of 169.9

SEQ ID NO: 45683 - protein, 177 aa, Homo sapiens
  DOMAIN (44)..(66): OLFACTORY RECEPTOR SIGNATURE domain identified by eMATRIX, accession number PR00245A, p-value=7.061e-16, raw score of 18.03
  DOMAIN (26)..(139): 7 transmembrane receptor (rhodopsin family) domain identified by PFam, accession name 7tm_1, E-value=1.6e-17, PFam score of 57.8
SEDPELQPVLALLSLSLSMYLVTVLRNLLSILAVSSDSHLHTPMYFFLSNLCWADIGYTSATVPKMIVDTQSHGRVISHAGCLTQMSFLVLFACIEDMLLTVMAYDCFVAICCPLHYPVIVNPHLCVFFVLVSFFLSLLDSQFIPPVTEGVHPVIFFIIALWDVTPKVTRGVHRVTQ

SEQ ID NO: 45684 - protein, 130 aa, Homo sapiens
  DOMAIN (63)..(103): G-protein coupled receptors proteins domain identified by eMATRIX, accession number BL00237A, p-value=6.182e-14, raw score of 27.68
  DOMAIN (42)..(127): 7 transmembrane receptor (rhodopsin family) domain identified by PFam, accession name 7tm_1, E-value=1.5e-13, PFam score of 45.2
PVHIVGVAASRGQLVHLLGPERRFLSYQISPGEPEAVCLCWADIGFTLATVPKMIVDMQSHSRVISHAGCLTQMSFFILFACIEGMLLTVMAYDCFVAICRPLHYPVIVNPHLCVFFVLVSFFLSLLDSQ

SEQ ID NO: 45685 - protein, 788 aa, Homo sapiens
  DOMAIN (505)..(536): NADH-ubiquinone/plastoquinone oxidoreductase chain 4L domain identified by eMATRIX, accession number PF00420A, p-value=4.541e- 09, raw score of 16.63
  DOMAIN (12)..(135): Gag P30 core shell protein domain identified by PFam, accession name Gag_p30, E-value=3.1e-36, PFam score of 130.5
QNPQEYGRTHLPGTDPQLDPHETEDMQRLNRDREALLEGLMRGAQKATNVSKLSEVIQGKEESPAQFDERLCEAYRMYTPFDPDSPENQRMIHMALVRQSAEDMRRKLQKQAGLAGMNPSQLLEIASQMFVNRDAVSPKENGKENGDGVSKGWPPCLRALAATALLVQEANKLTLGQNLNIKASRAVVTLMNTKGHHWLTDARLIKYQTLLCENPRITIEVCNTLHPASLLPVSESTVEPDCVEVLDSVDSSRPDLRDQAWASGDWKLYVYGSSFFNPQGKREVQALAKTVRQRCVTCRQHDARQGPAVPHGIRAYGAAPFEGLQVDFKEMPKCGGNKYVLFLGRTYSGWVEAYPTRTEKAREVTPVLLRDLIPKFRPPLWIGSNNGPAFLAALVQKTAKILGKNVTGDVNSPAILRVVSSSPPLYIGNNITEDPELQPVLALLSLSLSMYLVTVLRNLLSILAVRSESPLHTTMYFFLSILCWADIGFTSATVPKMIVDMQWYSKVISHAGCLTQMSFLVLFACIEGMLLTVMAYDCFVGICRPLHYPVIVNPHLCVFFVLVSFFLSLLDSQLHSWIVLQFTIIKNVEISNFVCDPSQLLKLACSDSVINSIFIYFGSTMFGFLPISGILLSYYKIVPSILRISSSDGKYKAFSTYGSHLAFVCLFYGTGIGVYLTSAVAPPLRNGMVASVMYAVVTPMLNPFIYSLRNRDIQSALWREVLTSFWNSLKIDFMEAMYSRSSNTTDVSPTIAGNGSLYTIPSEQQKDDEGDDEDKEDDDRHHRIMNTY

SEQ ID NO: 45686 - protein, 345 aa, Homo sapiens
  DOMAIN (102)..(142): G-protein coupled receptors proteins domain identified by eMATRIX, accession number BL00237A, p-value=4.600e-13, raw score of 27.68
  DOMAIN (53)..(303): 7 transmembrane receptor (rhodopsin family) domain identified by PFam, accession name 7tm_1, E-value=3.4e-28, PFam score of 91.7
ENCHWGCEHPCDIGSSIILSPLAYWEQYHRVTYISRDTEGSIIVFPALVTMLRNLFIILAGSSDPHFHTPMYFFLSNLSWADIGFTSATVPKMIVDMQSHSRVISYAGCLTQMSFFVLFACIEDMLLTLMAYDRFVAICRPLHYPVIVNPHLCVFFVLVSFFLSLLDSQLHSWIVLQFTFFKNVEISNFVCDPSQLLNLACSDSVINSIFIYLDSIMFGFLPISGILLSYANNVPSILRISSSDRKSKAFSTCGSHLAVVCLFYGTGIGVYLTSAVSPPPRNGVMASVMYAVVTPMLNLFIYSLRNRDIQSALRRLLSRTVESHDLLSQDLLHPFSCVGEKGQPH

SEQ ID NO: 45687 - protein, 1026 aa, Homo sapiens
  DOMAIN (294)..(316): OLFACTORY RECEPTOR SIGNATURE domain identified by eMATRIX, accession number PR00245A, p-value=7.300e-19, raw score of 18.03
  DOMAIN (463)..(620): Gag P30 core shell protein domain identified by PFam, accession name Gag_p30, E-value=4.3e-36, PFam score of 130.0
MEEGWIRLPDGRLAVPQLLGAAVVLAVQETTHRDQESLEKLLGWYFYISLLSALAKTISTALRIGSDNGPVFLAALVQKTAKDPELQPALALLSLSLSMYLVTELRNLFSILAVSSDCPLHTPMYFFLSNLCWPDIGFTSAMVPKMIVDTQSHSRVISHAGCLTQMSFLLLAACIEGMLLTVMAYDCFVAICRPLHYPVIVNPHLCVFFVLVPFFLTLLDSQLHSWIVLQLTLIKNVEISNLGHSLTIFIYFHKDPELQPVVAGLFLSMCLVTVLGNLLIILAVSPDSHLPTPMYFFLSNLSLPDIGFTSTTVPKMSVDIQSHSRVISYAGCLTQMSLFAIFGGMEKRHAPEILRSKWQGGEAPPAIRGVIPPASPPAYIKIQMAGRRGAPRDAGNYIRINITGCVYTYCDIERSIMLSPSLEIRSNITARLRPKTGTQMPLRVQRYTGIDEDGHVVERRVFGEERRRVLQAGTKWLEEHALADYQNPQEYGRTQLPGTDPQLDPHEREEMQRLNRDREALLEGLMRGAQKATNVNKLSEVIQGKEESPAQFYERLCEAYRMYTPFDPDSPENQHMIHMALVRQSAEDMRRKLQKQAGLAGMNPSQLLEIASQVFINRDAVSPKENGKENGGWPPCLRALAATALLVQEANKLTLGQNLNIKASRAVVTLMNTKGHHWLTDARLTKYQTLLCENPRITTEVCNTLHPATLLPVSESPVEPDCVEVLDSVDSSRPDLRDQAWASVDWELYVDGSSFFNPQGERGAGYAVVTLDTVVEARSLPQATSAQKAELVAFIRALELSEVETVNIYTDSRGHQRASTLLGLGNSRADSEARKAASAPFWASVLPQAPDLGPTSSKEEKDLLQISTALRIGSDNGPVFLAALVQKTAKILGKNVTGDVNSPAILRVVSSPPPLHIGKQHHSKKECSRSQGDNKEKVSNEHVSNRIYVIMKFTGRFYDWTCTNLLSWNQRLETVGTHPNPHLRDKVVLISSGPPWWGNHVALTLERVVVFLFQYELVCGPAVPPL

SEQ ID NO: 45688 - protein, 544 aa, Homo sapiens
  DOMAIN (149)..(209): Gag P30 core shell protein domain identified by PFam, accession name Gag_p30, E-value=3.7e-13, PFam score of 49.5
MQAISAFGEGRVKSHFYWEKEIYISCLETEFIGSRGRSQSCRQCFGGDASAGRMFFRERLICVAAVLQNVEWIMGTISLGDYILINITGWVYTYCDIERNIMLSPSLDIRSNNTARLRPKTGTQMPLREQRYTGIDKDGHLVERRAFGYQPITCVNLLNWKNNTQNYTEKPQALIDFLQAVIQTHNPTLADWHQLLMFLFNSEERRRVLQAVTKWLEEHAPADYQNPQEYGRTQESVDWELYVDGSSFFNPQGERGAGYAVITLDTVDEDRSLPQATSAQKAELIAFIRALELSEGETVNIYTDSRGHQQASTLVGLGNSRADSEARKAASAPFGASVLPQAPDLGPTSSKEEKDFLQPQKVQARSWLLAASAPVSSEAFGWGDDYKNHVKCISEDQKYGGKGYEGKTHKGDIKQQAWIQNWMKNSLKVHNESILDQNSQRIQNGQLVLAGLFLSIVTGHGDGEPAHHLWPSALTPTSTPTCTSSSSNLSLPDIGFTSTTVPKMIVDIQSHSRVISYAGCLTQMSLFAIFGGMEERHAPECDGL

SEQ ID NO: 45689 - protein, 231 aa, Homo sapiens
LLTPRTDLQEMPLDNAEIEWYTDGSYLRGEVFQWYDHLALIFVPQTGIEDVIWHIEALPNYIQKVCERRNPYNQILSLQCAQHEIFLVSWKLVCKQLEGDDDMLVGTTASNLLLESEQSTSNLNEKINHLEYEDQYKDNNFGEGNDGGILEDKLISNNMGGPDSPDSVNPVEPMPTMTDQTTLVPNEEEAFALEPIDITVKETNAKRKRKLIVDSVKNLDSKTIRAQLNDY

SEQ ID NO: 45690 - protein, 269 aa, Homo sapiens
  misc_feature (1)...(269): Xaa = X or * as defined in Table 2
FKDDDMLVSTTTSNLLLESEQSTSNLNEKINHLEYEDQYKVDNFGEGNDGGILDDKLISNNDGGIFDDPPALSEAGVMLPEQPAHDDMDEDDNVSMGGPDSPDSVDPVEPMPTMTDQTTLVPNEEEAFALEPIDITVKETKAKRKRKLIVDSVKELDSKTIRAHLSDYSDIGTTLDLAPPTKKLMMWKETGGVQKLFSLPAQPLWNNRLLKLFTRCLTPLVPQDLIKRRKGGEADNLDEFLKEFEHPEVPREDQQQXHQQRDVIDEPII

SEQ ID NO: 45691 - protein, 197 aa, Homo sapiens
  DOMAIN (53)..(106): PWWP domain identified by PFam, accession name PWWP, E-value= 0.0039, PFam score of 16.6
MVNRSHFRGVGEPCHQQNSHGHLNSITETSNSPTLRAAPLQPTRDPSDMAVFEIDELPEGAVKPPANKYPIFFFGTHETAFLGPKDLFPYKEYKDKFGKSNKRKGFNEGLWEIENNPGVKFTGYQAIQQQSSSETEGEGGNTADASSEEEGDRVEEDGKGKRKNEKAGSKRKKSYTSKVTKKLLIVINVICISIKHF

SEQ ID NO: 45692 - protein, 244 aa, Homo sapiens
  DOMAIN (52)..(69): PWWP domain proteins domain identified by eMATRIX, accession number PF00855, p-value=1.000e-20, raw score of 13.75
  DOMAIN (48)..(124): PWWP domain identified by PFam, accession name PWWP, E-value= 2.6e-10, PFam score of 47.7
  misc_feature (1)...(244): Xaa = X or * as defined in Table 2
GKGWAGGASGPANHGPAAGGRSPGMLRGDQGLPGRGAAGMARPRSREYKAGDLVFAKMKGYPHWPARIDELPEASVKPPTNKYPIFFFWHPMKPAFLGPQDLFPYXEYRGKFGKSNNRKGFNEGLWEIENNPGSIRFTGYQAIQQQSSFRTEGEGGNTADASSEEEGDRVERDGKGKRKNEKAGSKRKKSYTSKKSSKQSRKSPGDEDDKDCKEEENKSSSEGGDAGNDTRNTTSDLQKTSEGT

SEQ ID NO: 45693 - protein, 425 aa, Homo sapiens
  DOMAIN (128)..(171): 'Homeobox' domain proteins domain identified by eMATRIX, accession number BL00027, p-value=7.188e-27, raw score of 26.43
  DOMAIN (114)..(170): Homeobox domain identified by PFam, accession name homeobox, E-value=1.7e-23, PFam score of 91.5
MWSGAGPGLAVWPQLVTVLSLSLSRLNCKWGLSFLACLLLGDMADAAMQHYGVNGYSLHAMNSLSAMYNLHQQAAQQAQHAPDYRPSVHALTLAERLADIILEARYGSQHRKQRRSRTAFTAQQLEALEKTFQKTHYPDVVMRERLAMCTNLPEARVQVWFKNRRAKFRKKQRSLQKEQLQKQKEAEGSHGEGKAEAPTPDTQLDTEQPPRLPGSDPPAELHLSLSEQSASESAPEDQPDREEDPRAGAEDPKAEKSPGADSKGLGCKRGSPKADSPGSLTITPVAPGGGLLGPSHSYSSSPLSPLPSAGAIPPAHGGHQQPGALLVLRSRGSGPCCCSGGCCCALPGRQHGPAGLTASASPTTSPCQQPLLPSQGVWGSPLLPAPPAGLAPASATLNSKTTSIENLRLRAKQHAASLGLDTLPN

SEQ ID NO: 45694 - protein, 384 aa, Homo sapiens
MVGDGRAWWLTPVIPALWEAEMGIGVPIMLAYVYGVVPISLCRGGGCGVSTANGKGVKIEFDEDDGPITVADAWRALKNPSIGESSIEGLTSVLSTSGSPTDGLSVMQGPYSETASFAALSGGTLSGGILSSGKGKYSRLEVQADVQKEIFPKDTASLGAISDNASTRAMAGSIISSYNPQDRECNNMEIQVDIEAKPSHYQLVSGSSTEDSLHVHAQMAENEEEGSGGGGSEEDPPCRHQSCEQKDCLASKPWDISLAQPESIRSDLESSDAQSDDVPDITSDECGSPRSHTAACPSTPRAQGISGELCALMDQVHHMQHSKWQHPSDLTTRKPELKAPFEIDQSNAFIRQRRKRRHKEEDIKTTRPSAYSSLSRLLRPVDLS

SEQ ID NO: 45695 - protein, 24 aa, Homo sapiens
EIVNFSEFPWAKTCDQRICEIKIT

SEQ ID NO: 45696 - protein, 448 aa, Homo sapiens
  DOMAIN (75)..(107): GTP-binding nuclear protein ran proteins domain identified by eMATRIX, accession number BL01115D, p-value=2.481e-09, raw score of 14.49
  DOMAIN (186)..(251): IBR domain identified by PFam, accession name IBR, E-value= 6.1e-24, PFam score of 93.0
MGSEKDSESPRSTSLHAAAPDPKCRSGGRRRRLTLHSVFSASARGRRARAKPQAEPPPPAAQPPPAPAPAAAQGPPPEALPAEPAAEAEAEAAAAAAEPGFDDEEAAEGGGPGAEEVECPLCLVRLPPERAPRLLSCPHRSCRDCLRHYLRLEISESRVPISCPECSERLNPHDIRLLLADPPLMHKYEEFMLRRYLASDPDCRWCPAPDCGYAVIAYGCASCPKLTCEREGCQTEFCYHCKQIWHPNQTCDMARQQRAQTLRVRTKHTSGLSYGQESGPADDIKPCPRCSAYIIKMNDGSCNHMTCAVCGCEFCWLCMKEISDLHYLSPSGCTFWGKKPWSRKKKILWQLGTLIGAPVGISLIAGIAIPAMVIGIPVYVGRNIHSRYDGKENSKHKRNLAITGGVTLSVIASPVIAAVSVGIGVPIMLAYVYGVVPISLCRGGGCGS

SEQ ID NO: 45697 - protein, 179 aa, Homo sapiens
PRNSRVDFIYQYWKLKRKANANQPLLTPKTDEVDNLAQQEQDVLYRRLKLFTHLRQDLERVRNLCYMVTRRERTKHAICKLQEQIFHLQMKLIEQDLCRERSGRRAKGRKSDSKRKGCEGSKGTTEKKEKVKAVPDSVLGQLGLSTSFPIDGTFFNSWLAQSVQITAENMAMSEWPLNN

SEQ ID NO: 45698 - protein, 175 aa, Homo sapiens
SRTTPGKAPKETWGQDAGSGKGGQGPPTRKPPRRTSSHLPSSPAAGDCPILATPESPPPLAPETPDEAASVAADSDVQVPGPAASPKPLGRLRPPRESKVTRRLPGARPDAGDGDHLSAVAERPKVSLHFDTETDGYFSDGEMSDSDVEAEDGGVQRGPREAGAKEVVRMGVLAS

SEQ ID NO: 45699 - protein, 994 aa, Homo sapiens
  DOMAIN (374)..(389): PHD-finger domain identified by eMATRIX, accession number PF00628, p-value=4.536e-10, raw score of 15.84
  DOMAIN (356)..(404): PHD-finger domain identified by PFam, accession name PHD, E- value=7.2e-15, PFam score of 62.8
MLLVMYWAPAPPPVHMSQFLTTGPKCLELSLDHGRDSQEITASGLLWLQHAACGLAQWNQKPHPPFLTLLQAEEPFERARSCDIYIRIKMLQTAQQHQVGLAPTERKEALRGSQSPQKSASGQRPGSLDRELLMLIKISKCLRVPSGPSSVLGTESTGPVPGELVLCQQDAGATQEGVCYGRELMICRCDSFPRLMEPWGVKGTPEVFRTDLITAMKIPDSYQLSPDDYYILADPWRQEWEKGVQVPAGAEAIPEPVVRILPPLEGPPAQASPSSTMLGEGSQPDWPGGSRYDLDEIDAYWLELINSELKEMERPELDELTLERVLEELETLCHQNMARAIETQEGLGIEYDEDVVCDVCRSPEGEDGNEMVFCDKCNVCVHQACYGILKVPTGSWLCRTCALGVQPKCLLCPKRGGALKPTRSGTKWVHVSCALWIPEVSIGCPEKMEPITKISHIPASRWALSASLGKECTGPGIQWSMPSCVTAFHVTCAFDHGLEMRLILAANDEAKFKSFCQEHSDGGPRNEPTSERAEPSQAGEDLEKVTLRKQRLYQLEEDFYELVEPAEVDERLHLAEALVDFIYQYWKLLRKANANQPLLTPKTDEVDNLGQQEQDVLYRRLKLFTHLRQDLERGSPNPLVPLPHPSPVTTSSCSQVRNLCYMVTRRERTKHAICKLQEQIFHLQMKLIEQDLCRERSGRRAKGKKSDSKRKGCEGSKGSTEKKEKVKAGPDSVLGQLAGLSTSFPIDGTFFNSWLAQSVQITAENMAMSEWPLNNGHREDPAPGLLSEELLQDEETLLSFMRDPSLRPGDPARKARGRTRLPAKKKPPPPPPQDGPGSRTTPDKAPKKTWGQDAGSGKGGQGPPTRKPPRRTSSHLPSSPAAGDCPILATPESPPPLAPETPDEAASVAADSDVQVPGPAASPKPLGRLRPPRESKLQQLSCEWEELSVLNCGISMGCWQEISPGAEGVSGWPAHLAMNTIVAADSSVTRTLST

SEQ ID NO: 45700 - protein, 62 aa, Homo sapiens
AGHPRIAPAPLSRYPQPPLRRSPTMPGEPPPAHRPLRAHPRHGPRPLRKDRGPATQVGVAPA

SEQ ID NO: 45701 - protein, 140 aa, Homo sapiens
FSGDEIMASEERQPMEEEWSRSSTISEKDGERWLPDTAGKAAQGIAGDVVWVSPLPPSKVSAASKPPKSSSSILQVAPAPLSRSPLPPLRRSPTLPGEPPPAHRPLRVHPRHGPRPLRGDRGPATQVGVAHAPPGFEHLR

SEQ ID NO: 45702 - protein, 103 aa, Homo sapiens
LTMLFAACVFSGDEIMASEERQPMEEEWSRSSTISGEDGERWTPDTAGKAAQGIAGDVVWVSPLPPSKVSAASKPPKSHHPFFKWHNFSNLMKMFYKMYFSKN

SEQ ID NO: 45703 - protein, 118 aa, Homo sapiens
TFENTRFWDVQIPVPTGERRNEWALPPPGAGSVPAGGWSRPLTPGRCDSQGRGRSRRAAPLSRSPLPPLRRSPTLPGEPPPAHRPLRVHPRHGPRPSHLACLNSQAPDASRLRASANQ

SEQ ID NO: 45704 - protein, 61 aa, Homo sapiens
TVMGSCTMSSVSCALSASSSSQKDSSMSLKEESTVNMTFRCSLPLAVISVVNSSLAELSKP

SEQ ID NO: 45705 - protein, 886 aa, Homo sapiens
  DOMAIN (870)..(883): PROTEIN ZINC-FINGER METAL-BINDI domain identified by eMATRIX, accession number PD00066, p-value=8.286e-12, raw score of 13.92
  DOMAIN (261)..(457): LIM domain containing proteins domain identified by PFam, accession name LIM, E-value=2.3e-42, PFam score of 154.2
  misc_feature (1)...(886): Xaa = X or * as defined in Table 2
MIINTIITTTTTITIIFIITIMSSSPITITNIITIIQHHHHHNDQRPSLGKCRGLYIRVRKVPGERATANSRCPINAQGIESCWNGVMALWLGPNSTCSRLPELTDSEDCQPADSPGDEDPKPWWDPPHEAPLTGYFHPYGAAFVPRHAGNFKDRREVPHQDTSFCSAGQFWILPSACKTGRVALTLTLLIGAYQTLTEADVKGLTAARAASPGAKWRTQFPCPAGTCSSQAGNGQLEDCLPYPPGPSAPVGSLSRSSANGEFIIGRVIKAMNNSWHPECFRCDLCQEVLADIGFVKNAGRHLCRPCHNREKARGLGKYICQKCHAIIDEQPLIFKNDPYHPDHFNCANCGIKLGVFLTDRKDLTADAQELKGELYCLPCHDKMGVPICGACRRPIEGRVVNAMGKQWHVEHFVCAKCEKPFLGHRHYERKGLAYCETHYNQLFGDVCFHCNRVIEGDDEGDGFAHRYSPYDSCEVDQSPLEGQQLKSIRKGPLAQSQPLPTPVMLHPGCKTQIREAPGSAALESVRRRPRPGLVPEEESESAAVEAVRHIHLQNFSRSLLETLNGQKLGGHFCDVTVCIHEASLRAHRCGLAIGSPSFQDKLLLGPSEIRVPSVVPVQTVRQLVELLYSGSLVVAQSEAPQVLMAASVLRIDSYRRMHADYRTRSSAPASTSAPAPLPTPVPPPLAPEQLRHRLRHLLAAHPRGTPVPRTALPAPPTPAKAEGLGAYPSLSAAPDDRGDNDDEETDDETDGEDGEGGGPGESQAPPSFPDCAAGFLNCCCXQRVRGVPCTHWPLXLQCTIRASPWPPPAFYPTLQPEAAPGTQLREAPAPSAAPTTAPSGTTARTPGAEPLAYACGHCCKTFSSSKNDTKHMFIHSGEKPHQCAV

SEQ ID NO: 45706 - protein, 61 aa, Homo sapiens; identical to SEQ ID NO: 45704

SEQ ID NO: 45707 - protein, 237 aa, Homo sapiens
  DOMAIN (149)..(170): PROTEIN REPEAT DOMAIN TPR NUCLEA domain identified by eMATRIX, accession number PD00126A, p-value=2.731e-10, raw score of 22.53
  DOMAIN (142)..(175): TPR Domain domain identified by PFam, accession name TPR, E- value=8.6e-07, PFam score of 36.0
FVPRRPAGKTPSDHRVLPRARPSAARAPTSPRIHSADAVHKCVTVVLRRLRQWLSGAFLLELATAAGLSAGFTRLGSQVGGAMRRSKAYGERYPASVQGSAPSPRQKSMKGFYFAKLYYEAKEYDLAKKYICTYINVQERDPKAHRFLGLLYELEENTEKAVECYRRSVELNPTQKDLVLKIAELLCKNDVTDGRAKYWVERAAKLFPGSPAIYKLKEQLLDCEGEDGWNKLFDLKK

SEQ ID NO: 45708 - protein, 345 aa, Homo sapiens
  DOMAIN (226)..(247): PROTEIN REPEAT DOMAIN TPR NUCLEA domain identified by eMATRIX, accession number PD00126A, p-value=2.731e-10, raw score of 22.53
  DOMAIN (59)..(154): LIM domain containing proteins domain identified by PFam, accession name LIM, E-value=5.3e-09, PFam score of 37.0
DLPLAVHGQVSDSGAQAVASRSGDESSIVCLKEESTVNMTFRCSLPLAVISVVSFTAKCQVKSEFIIGRVIKAMNNSWHPECSAVTSARKFWQILHLSRMLVDRKDLTADAQELKGELYCLPCHDKMGVPICGACRRPIEGRVVNAMGKQWHVEREQYMDPGILSALIDPKYLLILSHRGLHMKSMKGFYFAKLYYEAKEYDLAKKYICTYINVQERDPKAHRFLGLLYELEENTEKAVECYRRSVELNPTQKDLVLKIAELLCKNDVTDGRAKYWVERAAKLFPGSPAIYKLKNDGWVRGQMVPKPDDEGVQVRGRSGRPDAGWRLNRRSSVGGSAWRLRPQGS

SEQ ID NO: 45709 - protein, 105 aa, Homo sapiens
  misc_feature (1)...(105): Xaa = X or * as defined in Table 2
WGGPGRQPDGGRVPGRCGPRRPATWESPAACRPRPQSRHHSFEXGGSRSGSSHKRPCPSSPAVLRARDQVVLHTSFEATEGDSSHEDRSTPLARRCLCSHRSGEA

SEQ ID NO: 45710 - protein, 815 aa, Homo sapiens
  DOMAIN (752)..(772): kw TRANSCRIPTASE REVERSE II ORF2 domain identified by eMATRIX, accession number DM01354U, p-value=8.816e-12, raw score of 12.24
METSLMVQVCGGRDCNALLPGNLCSQPTQVLPLEVDGDDGPGGLPLNAAPPSSVPPVPPSEALPPPACPSAPAPWRSIISRLFGTSPAAEAAHPPPGGALDFGALRTSSCLSQSHGHIPGGPGLGLGAVRVPVPSEEDPASLFTEPVPAAEAPATVQSVEDFVANDRLDRSFLEDMTPARDEKKVGAKAAQQDSDTGRASRAPEQQIPHGGHWRGHSRSYERFRPPDMVSAGPGPSDGEALGGNPIVAGFQDDVDLEDQPRGSPPPPAGPVPSQDITLSSEEEAEVADPPKGPAPAPQQCSEPETKWSSIPASKPQRGTAPMTAAASPWPGGASVHTGLEKCSSTRPPAEIEPGKGEQASSSESDPEGPIAAQMLSFVMDDPDFESEASDTQCRAVRRVLPAQRAENAYGSAFQPGALKPECRPTLKGGPGPVPSKAGKKTEATSPRPTGGASPLAHGATVGAAWGLGMASWPIGSSLAPTRARTREPRLQRRVGSELPGDPCSGSGASCRQVCARGRATSVRLPALESLWPLSSDGSAAAREGLEGPRLRQAAAPGGPGPPLPPLSRPPSPARRMRGGAAVAGRGAAAPLEGRVRLGVGFLAETAVRAGAGALAAADAPPGSRTPRARPLVAAGSGAAGGRCPVPSRRQREAPSPLGGAGVDLQLECLTSEKAGVGAATGGVLEALARAIRQKKEIEEIQIGKEEVKLSLVADDMMFLLENPTDSSRKLLELMKEFSKVSRYKINGHKSVALLYINSHQAENHIKNSTPFTIAATNNNNKKKNLGIYLAKESKDSYNENYKTATERNHRWSQAR

SEQ ID NO: 45711 - protein, 313 aa, Homo sapiens
FMIWAGQNRKVQDFVIQLRMLTPVVPPPQAAPNAQQPRAAASAPQTRVRAPRWPLGNVVVLGTEDAAGPSRPASEPPASPALPGPALELGLPNHPKQTHRPRLAPRRSHPKDSCTIFKLNSFLKNIKFNNSVGDQVNLDYKLISGTEYDILNFWNFRILAKTGCSKDGHRNPRSRPTQEEGSGKPKKSLVKERSGAQEDLPVPPEEKLELSGTSMGPCCFSKTSYGIPHIIYILSYKGTTATAGHRWPAAYPAPLNCSVPPPETTMPVSDLGSPLHWASRIATPPSMWLCCLLAAALRVLAVSNSSAEVYSQS

SEQ ID NO: 45712 - protein, 168 aa, Homo sapiens
  DOMAIN (115)..(160): 186 DISCOIDIN I N-TERMINAL domain identified by eMATRIX, accession number DM00516, p-value=2.394e-13, raw score of 30.53
  DOMAIN (42)..(158): F5/8 type C domain identified by PFam, accession name F5_F8_type_C, E-value=4.9e-06, PFam score of 28.3
RSKPCRSSHNVFSWWAHSRPCCPWSGYSSRLCCLSCCITLGPYQLKNRQQRNGSYKSFGNYLCVGNRLLFWVWIIFQGKGRSWLPRSDWVTSYKVMVSNDSHTWVTVKNGSGDMIFEGNSEKEIPVLNELPVPMVARYIRINPQSWFDNGSICMRMEILGCPLPGWEH

SEQ ID NO: 45713 - protein, 125 aa, Homo sapiens
  misc_feature (1)...(125): Xaa = X or * as defined in Table 2
ARELLKAVWRPHKVAVMHCRGHQRASTLVGLGNSRADSEARKAPSAPFRASVTAPLLPQAPDLVPTYSKEENDFLQAKGGQVMEEGXIRLPDGRVAAVVLAVHETTHRGQELLEKLLGWYFYISH

SEQ ID NO: 45714 - protein, 201 aa, Homo sapiens
KMKTNQMGLKSKVVEMNATISEIRLNINRKDVEYQQEILQLEAVWKLHKVAVMHCKGHQRASTLVGLGNSRTDSESPKAASAPLRASVTAPLLPQAPDLVPTYSKEEKDFLQVEGGQVMEEGCIRLLDGRVAVPQLLGAAIVLAVHETTHLRSESSLGKLLGQLFSTISHFVSLCQNLTQRCVTCRQHNARQGPAVPPGMQ

SEQ ID NO: 45715 - protein, 292 aa, Homo sapiens
HARCTGIAARAGLLDPRHTGEALAARSRIDLARRPHWPRGCGTGGGGGGCAGLGGAWLRGNDVAVPARALVTAAPASSSMSPPIPAAARPVSSSPAASPSPRCGLRAGPAELRCPRRLRQARAEEPPRAGPAPGRRRPTPGICPAPLSPRLRAGGTAPSLPGVTRGSRVGRRLRPSLGGAGCRVGKRPPRLLPPGRRCSTGLPPPAGTGAPAGVCWEDGDPGHELAAALLRRLGGQIRALAGHRTAGWAQHGLSPREAVRPAPAARGTLLLRRSNSRRHLQNPANFGGTLAT

SEQ ID NO: 45716 - protein, 166 aa, Homo sapiens
GRRDSCLPGVVAPRACLHPRGQVPRLGSVGKMATPGMSWQQHYYGGSAAKFAPSPATAQLAGHSMDYSQEMHLKMSKKIAQLTKVIYALNTKNDEHESAIQALKDAHEEEIQHILAETREKILQYKSKVTEELDLRRKIQVLESSLEDHIKMKQQALTEFEAYKHR

SEQ ID NO: 45717 - protein, 67 aa, Homo sapiens
  misc_feature (1)...(67): Xaa = X or * as defined in Table 2
LQIDCKNKPAILRGPTDPLKEADCYCRTWERPQILLPKWEGTRKPILVIXQNKAHQHAPQITLLHQQ

SEQ ID NO: 45718 - protein, 87 aa, Homo sapiens
  misc_feature (1)...(87): Xaa = X or * as defined in Table 2
FFWGGIEEPCFVILSGSVFWFLLIWVGASASPVVGDVFGRGGSPFPTSTVGAFTVLWGVSWVLKRVCGSSWDCXFVLAINLELKFTM

SEQ ID NO: 45719 - protein, 47 aa, Homo sapiens
LFPSLARTWEGVLVRWKNKATIKLRSIGCPSAPCSKSPAAAAHWESC

SEQ ID NO: 45720 - protein, 88 aa, Homo sapiens
  misc_feature (1)...(88): Xaa = X or * as defined in Table 2
KNSNIQHSPKITLVHQQWFQTKKKFLIYLKKNSGGLVDPXMVHTTRLCADNPQYQPRARKSHSXVKGESTTLREHPMGQKNLNNSLQP

SEQ ID NO: 45721 - protein, 231 aa, Homo sapiens
  DOMAIN (166)..(186): SYNAPTOBREVIN SIGNATURE domain identified by eMATRIX, accession number PR00219C, p-value=7.900e-09, raw score of 9.04
MASKQVHSQEEVWYVPETGSYNDLKIDCKNKPEIPRGPTDPLKEATTPAGPRRHPKYCECPSCRSGKGRASSPKHTPPLEKLKVCLREKFPTLLGAESEPTQMRRNWKTNPGNMIKQGWSTPPTPKITLIHQQWIQIKKKSLIYLKKNSGEKTPSIFCKEKLMILMMMVMVMVVLIRVLMVVVLVHNLAFSGRPGAALGQQCQKLGRRAAYQAEENEKKQEPTSASVYSNI

SEQ ID NO: 45722 - protein, 158 aa, Homo sapiens
  DOMAIN (21)..(84): Eukaryotic protein kinase domain identified by PFam, accession name pkinase, E-value=2.4e-12, PFam score of 48.4
MSSWHSRLDWQWRNHFNFDHFEILRAIGKGSFGKVCIVQKNDTKKMYAMKYMNKQKCVERNEVRNVFKELQIMQGLEHPFLVNLCSPAMDPNQEEIPDLPEKEFRRLAIKLIREEPEKGEAQCKGIQNMIQEVKGEIFKQIDSLKKKQYKIQETLDTL

SEQ ID NO: 45723 - protein, 121 aa, Homo sapiens
  misc_feature (1)...(121): Xaa = X or * as defined in Table 2
SIPYKNKEEEEGKGGEYYIKGTCHGTKGSEQQPSALDLPSDRAYPNEKEPENXLWXLIXQNKALXHSPKNHTSSPRNGSKPRKKSLINLKKNSGGXLLSXLGRHQRKVKPNARKSKNQYKK

SEQ ID NO: 45724 - protein, 189 aa, Homo sapiens
  DOMAIN (70)..(90): TAILLESS COMPLEX POLYPEPTIDE 1 (CHAPERONE) SIGNATURE domain identified by eMATRIX, accession number PR00304C, p-value=7.429e- 23, raw score of 8.69
  DOMAIN (40)..(168): TCP-1/cpn60 chaperonin family domain identified by PFam, accession name cpn60_TCP1, E-value=1.9e-56, PFam score of 200.9
  misc_feature (1)...(189): Xaa = X or * as defined in Table 2
TGCPRCKQNSTCIAAVKMEGPLSVFGDRSTGETIRSQNDVTITNDGATILKLLEVEHPAAKVLCELADLQDKEVGDGTTSVVIIAAELLKNADELVKQKIHPTSVISGYRLACKEAVFYLTENLIVNTDELGRDCLINAAKTSMSSDIIGINGDFFANMVVDAVLAIHARHRGQPRYPVTLLYXSHGES

SEQ ID NO: 45725 - protein, 374 aa, Homo sapiens
  DOMAIN (204)..(227): TAILLESS COMPLEX POLYPEPTIDE 1 (CHAPERONE) SIGNATURE domain identified by eMATRIX, accession number PR00304D, p-value=5.500e- 27, raw score of 11.04
  DOMAIN (1)..(365): TCP-1/cpn60 chaperonin family domain identified by PFam, accession name cpn60_TCP1, E-value=1.8e-159, PFam score of 543.2
  misc_feature (1)...(374): Xaa = X or * as defined in Table 2
MVVDAVLAIKYTDIRGQPRYPVNSVNILKAHGRSQMESMLISGYALNCVVGSQGMPKRIVNAKIACLDFSLQKTKMKLGVQVVITDPEKLDQIRQRESDITKERIQKILATGANVILTTGGIDDMCLKYFVEAGAMAVRRVLKRDLKRIAKASGATILSTLANLEGEETFEAAMLGQAEEVVQERICDDELILIKNTKARTSASIILRGANDFMCDEMERSLHDALCVVKRVLESKSVVPGGGAVEAALSIYLENYATSMGSREQLAIAEFARSLLVIPNTLAVNAAQDSTDLVAKLRAFHNEAQVNPERKNLKWIGLDLSNGKPRDNKQAGVFEPTIVKVKSLKFATEAAITILRIDDLIKLHPEILRIKHGX

SEQ ID NO: 45726 - protein, 96 aa, Homo sapiens
NTAAGYNLQPTIKEDDERERWPTLMERLCSDGFAFPHYYIKPYHLKRIHRAVLRGNEDKVKNLLLTYYDANSRDRKERTVLHCGLCQWASGNCRSS

SEQ ID NO: 45727 - protein, 280 aa, Homo sapiens
  DOMAIN (34)..(89): Domain present in ZO-1 and Unc5-like netrin receptors domain identified by eMATRIX, accession number PF00791B, p-value=2.569e- 09, raw score of 28.49
  DOMAIN (29)..(127): Ank repeat domain identified by PFam, accession name ank, E- value=1.9e-22, PFam score of 88.0
SKAVQLEAGGLLQLFCCKMAPDPNITDVFGRTALHYAVYNEDTSMIEKLLSYGANIEECSEDEYPPLFLAVSQRKVKMVEFLLKKKANINAVDYLGRSALIHAVTLGEKDIVILLLQHNIDVFSRDVYGKLAEDYASEAKNRVIFELIYEYERKKHEELSINSNPVSSQKQPALKATSGKEDSISNIATEIKDGQKSGTVSSQKQPALKDTSDKNDSVSNTATEIKDEQKSGTVSSQKQPALKDTSDKNDSVSNTATEIKDEQKSGTSVFSETTGLEGYK

SEQ ID NO: 45728 - protein, 224 aa, Homo sapiens
ARGERGGCGHSFSRLKCSCLLALKRAADLPPQHSSSAKGQTASSSRGQKTTHTGELQLASGGWPSGTKLPEKGTGSKIFAVLQPPLVIPRQTRSGVDLQQNPADLQQRESNSININKKDIHTKTPYESQQYQRPNVDKSTTMRKNSHKKEENSKNQNTFSPTDHNSSPAREQNWTENEFDKLTEVGFRKWVITNSSELKEHVLTQCKEAKNLEKKLEELLTKIT

SEQ ID NO: 45729 - protein, 155 aa, Homo sapiens; identical to SEQ ID NO: 45510

SEQ ID NO: 45730 - protein, 210 aa, Homo sapiens
APGGRGSCGHSFRTLKRSCLLALKRAADLPAQCSSSAKGQTASSSGSLTPVPPEWERPSSRGQQTSERNSVNINKKDIHTKTPSEGHQHQRPKVDKSMKMRKNQCKKAENSKNQNTFSPAKDHNSLPAREQNWMENEFDEFTEGGFRRWVITNSSELKEHVLTQCKEAKNEKRLEELLTRITTLEKNINDLMELKNTARDLREAYRSINS

SEQ ID NO: 45731 - protein, 179 aa, Homo sapiens
MRLCGDGREGTGVIDEGSNSININKKDDHSKTPSKGHQHQRSKVDKSMKMRKNQCKKAENSKNQNASSPPKDHNSLPARERNWTENEFDELTDIGFRRWVITNSSNLKEQVLTQCKEAKNLDKRLQELLTRITSLEKNINDLMEVKNTARELREAYTSINSQIDQAEERISRLKIPLMK

SEQ ID NO: 45732 - protein, 205 aa, Homo sapiens; identical to SEQ ID NO: 43254

SEQ ID NO: 45733 - protein, 380 aa, Homo sapiens; identical to SEQ ID NO: 37338

SEQ ID NO: 45734 - protein, 492 aa, Homo sapiens; identical to SEQ ID NO: 37341
  DOMAIN (105)..(157): Sulfate transporters proteins domain identified by eMATRIX, accession number BL01130B, p-value=8.541e-15, raw score of 23.34
  misc_feature (1)...(492): Xaa = X or * as defined in Table 2

SEQ ID NO: 45735 - protein, 395 aa, Homo sapiens
MNTARARGYRRQAVEEAKSTVIDDAWDMGEERKRGLKMVVRLPAGATGCASEIQSSGESCAMVLPPTTTDRRVKPLHRRRTYPVPLWANQAPGFVLTRWIISVLLEKIQCGGAGLSFLPPASFPPLLPLVTSEEECEAALFLQRHSWGVITSQFFHDTLTSRGERDNWHLHQTQCRNGSQCETELTTTGLELLLSHGQQVSSSTKSNTKADAGNCTQSCLVQPWSGPGVWAGNCQCLLQPSHLSGTQPSSCQLSNPFSVMLAASETASQVERLQEGKLSAVASFMAMKLGNNDSLPDDFNLMRKEGGRKEGRRERREDHNSSPAREQNWMENEFDELTEVGFRRWVITNSSEQKEHVLTQCKEAKNHDKRLQELLTRITSLEKNINDLMELKNTA

SEQ ID NO: 45736 - protein, 789 aa, Homo sapiens
MRKNQCKNAEDSKNQNAASPPKVHNSLPAREQNWTENKFDKLTEVGIRRWVINSSELKEHVLTQCKEAKNLDKRLQELLTIIASLEKNINDLMELKNTARELHEVYASINSQIDQVEERISEIEDQLNEIKCEDKIREKRMKRNEQSLQEIWDYVKRPNLRWIGVPESDRENGTKLENTLPDITQENFPNLARQANIQIQEIQRTPQRYSSRRATPRYIIIRFTKVEMKEKMEVGAGILTVCLFNGTDRRLFVQRRTCSQRPGTDPVQAARGLAPRATGFHIPRPGLPLPVLRLPLKLNKAGDMRHWSRPPPEARIISEFLGCKEAVSTGNYVVRDMETKQQLAHLSGFSWPSLGHTAALVQVQNYGTLFPQDPSSKPVTWSFSYDKGAPKMWQSPFLEGESDWVREAPPVCRAPIEEEIGTDTQREGHVRTWEGNATCKPRRKASEETSPPDTLILDFQPPELLSTLKKRACERRGTIQDGQNWGPSCSSHVAWITVPQALGYKRITWDLDKMQIRVQQPWHSAFLMSSRETLVLLGQDHTLGGKGLAGNSRVSAFSKSSQRDGYPWSSHELSSQRGSHLQLAWRPIDTCGHVNQSPHGHHKWDIREKDIQKTWPRCDVGCLPKRWRTEQSSTLKYKRLYKKKLPVKGSSLPKNYELFKIHKENNDGPDFHKKTFGNRIEKSVAQNRSCPTQRTESPCGVRKPQQPVERTQDHWSTSSVELLTDNLYHATNHMNEPSKNRSPVLSCTFPATLECGCGQLGLQLPAILGHEKKGHSRDGRTDDFREPGF

SEQ ID NO: 45737 - protein, 248 aa, Homo sapiens
MRKKQGKKSENSKNQNASSPSKEYSSLPAREQNWMENEFDKLTEVGFRKWVITNSSELKEHVLTQCEEAKNLEKRLEELLTRITSLEKNINDLMELKKKTAGELCEAYTSINSRIDQAEERVSEIEDQLNEACLTRAPEGSTKHGKEQQAPATAKTCQIVKTVDTVKTNTRTENQTPHVLTPVLRLPPCVGCLATWGWSNQTVASASPAQTGRRFTGGTDQEATLLYDCSIVKRTRDIEIEALKMVEA

SEQ ID NO: 45738 - protein, 392 aa, Homo sapiens
MADLWSSGLMVRYTGEPVQAEREMLLFCPLELRYLPQIRLEMDSEAMALNSNVISIEMAFPSTLANHLDMVWVCVLAQISSRIVIPSVGGGAWVGGVTVQIGALAAGLAQPSGGYPREFGTSPTTALYIDEESHSFGFVIDTFQGNDLDVGHPAPCTGAEGQTSSPEKEMQIGAECARAALSCFPSKVWEKEDLQKRGLLEGKLTNSNSINIKKDNRAKIPSEGNQHQRPKVDKSMKMRKKQCKNAETSKNWNASSPAKDHNSLPAREKNWTENEFDKLTEVGFRRWVITNSSELKEQVLTQSKEAKNLDKRLQELLTRITSLEKNINDLTELKNTARVLCEAYISINSQINQVEERISEIEDQHKEIKPEDKIREKRMKRNEQTSKKYGTV

SEQ ID NO: 45739 - protein, 399 aa, Homo sapiens
MFPPCCAPPRRPSLPPNRARPRRPTHEPRTRAFDAPRSPRARPRALCSWPLFPVSHPPPPEPSDWADLDIFVCFLGPLEGCLWGFREAKDRGSFSQGWCLLSHGQPRPPGTKCTEAPPSLGLPGVMGEESKSAGDPRLFVVESVEFLQDVIEFMSAAHSVIACVRSSTYWQVYCKLGRVAANPKVREQVRLELSLVNSDLQMLKEELEGLNISHNKSATYSVGMQKKYSMICLAIDDDNKTDKTQKISKKLSFLSWGTNKNRQKSASTLCLPSVGAARPQDHNSSPAREQNWTENEFDKLTEVGFRRWVITNSSELKEHVLTQGKEAKNIEKMIDELLTRITTLEKNINDLMELKNTARELCEAYTSINSQINQAEKRKSEIEDQINEIKCEDKIREKE

SEQ ID NO: 45740 - protein, 238 aa, Homo sapiens
MTPYTYGIYVRRGLPYYIRLNFAEKEKQPQAGPSGNIPEGIVIIGDDHSVCVTVPEDLLVGQDLEVEDSEIDDPDPVALGERGSCGRSFSRLKRSCLPALKRAADLPAQCSSSAKGQTASSSGSLTPMYPYWETPRSRGRQTPHTGELRLDHNSLPAREQNWTENEFDELTEVGFRRWVITNFSELKECVLTQCKEAKNLEKRLEELLTRITSLAKNINDLIELKTQLENLIKPKDRL

SEQ ID NO: 45741 - protein, 154 aa, Homo sapiens
  misc_feature (1)...(154): Xaa = X or * as defined in Table 2
HQRTKVYKFTKMRKNQPKKPENSKTQNPSSPSKDHNSLPAREENWMENEFDKLTEVGFRRWVITNSSELKEHVLTQCKEAKNPDKRLEKLLTRIISLEKNINDLVELKNTAXELLEAYTNINSQIDQVEEKISSIEDQLNEIKLEDEIREKKKK

SEQ ID NO: 45742 - protein, 107 aa, Homo sapiens
QTKSNNVNIKKQDVHTKTPSEGHQHQRPKDHNSLPAREQNWIENEFDELTEVGFRRWVITNSSELKEHVLTQCKEAKNLEKRLQELLTRITSLEKNINDLMELKNTA

SEQ ID NO: 45743 - protein, 724 aa, Homo sapiens
  DOMAIN (402)..(447): kw TRANSCRIPTASE REVERSE II ORF2 domain identified by eMATRIX, accession number DM01354N, p-value=1.000e-40, raw score of 13.17
  DOMAIN (486)..(722): Reverse transcriptase domain identified by PFam, accession name rvt, E-value=2.7e-49, PFam score of 177.2
MGKDFRTKTPKAMATKAKIGKWDLITLKSFCTAKETVNTVNRQPTECLNLNKSSRYQGNQMKHEKSNHNPEDHTPNLSCLQFRDHNSSPAREQNWMENEFDELTEVGFRRWVITNSSELKEHVLTQCKEAKNLDKRLDKLLPRITSVEKNINDLMELKNTAQELHEAYTSINTQIDQAEEKISEIEDQLNEIKPNLRLIGVPESDGENGTKLENTLQDIIQENFSNLAKQANIQIQEIQRTPQRYSSRRTTPRHIIIRFTKVGMKEKMLRAAREKSRVTHKGKPIRLTVDLSAETRKEWGPIFSICKEKNFQPRISYPAKLSFISEGEIKSFTNKQMLRDFVTTRPALQELLKEALNMEKNNRPLARLIKKKREKNQIDTIKNGKGDITTDPTEIQTTIREYYKHPYANKLENLEEMDKFLDAHTLPRLNQEDVESLNRPITSSEIEAVIKSLPIKRSPGPDRFTAEFYQRYKEELVPFLLKLSQSIEKEGIFPNSFYEASIILIPKPGRDTTKKENFRPISLMNIDVKILNKILANRIQQHIKKLIHHDQVGFIPGMQGWINICNSINVIHHINRTNDKNHNMIISIDAEKAFDKIQQHFMLKTLNKLGIDGTYLKIIRAIYEKPTANIMLNWQKLEAFHLKTSKKQRCPLSPLLFNIVLEVLARAIRQEKEIKDIQLGKEEVKLSLFADDKIVYLENPIISAQNLLKLISNFSKVLGFKINV

SEQ ID NO: 45744 - protein, 546 aa, Homo sapiens
  DOMAIN (235)..(278): 1 kw MIND INHIBITOR DIVISION CONTROL domain identified by eMATRIX, accession number DM01756B, p-value=4.822e-15, raw score of 22.91
  DOMAIN (200)..(303): ParA family ATPase domain identified by PFam, accession name ParA, E-value=1.2e-22, PFam score of 88.6
  misc_feature (1)...(546): Xaa = X or * as defined in Table 2
MKLMETLNQCINAGHEMTKAIAIAQFNDDSPEARKITRRWRIGEAADLVGVSSQAIRDAEKAGRLPHPDMEIRGRVEQRVGYTIEQINHMRDVFGTRLRRAEDVFPPVIGVAAHKGGVYKTSVSVHLAQDLALKGLRVLLVEGNDPQGTASMYHGWVPDLHIHAEDTLLPFYLGEKDDVTYAIKPTCWPGLDIIPSCLALHRIETELMGKFDEGKLPTDPHLMLRLAIETVAHDYDVIVIDSAPNLGIGTINVVCAADVLIVPTPAELFDYTSALQFFDMLRDLLKNVDLKGFEPDHLTPAGNCYVVRRNEDCIGFFSGFYNVISLGVYLVEQQKGWEDTHSKTPSKGHQHQRSKVDKSTKMRKNWSKNAENSKNQNALSPPNDRNSSPARAQNWMENKFDKLTEVGFRRQVITNTSELKEHILTQSKEAKNLDKRLQELLTRITSLEKNINDLMELKNTARELREAFTSFCVNCEAVSLITSLREDSHWLEDSKGHRMRRHQEXKCEYFHPPHPGLQFYQLPESDSHSDPLWPHGGSFLSSVVRC

SEQ ID NO: 45745 - protein, 517 aa, Homo sapiens; identical to SEQ ID NO: 45516
  DOMAIN (394)..(435): kw TRANSCRIPTASE REVERSE II ORF2 domain identified by eMATRIX, accession number DM01354I, p-value=1.419e-37, raw score of 15.55

SEQ ID NO: 45746 - protein, 295 aa, Homo sapiens
  DOMAIN (259)..(290): kw TRANSCRIPTASE REVERSE II ORF2 domain identified by eMATRIX, accession number DM01354G, p-value=3.717e-30, raw score of 11.57
  misc_feature (1)...(295): Xaa = X or * as defined in Table 2
QTERNSTSTSKTPSEGHQHQRPKVDKSTKMGRNQCKKAXNSKSQNACCPPKDHSSLPAREQTWMENEFDELTEVGFRRWVITNSSKLKEHVLTQCKEAKNLEKRLEELLTRITNLEKNINDLMELKNTARELREAYTSINSRIDQAKERMSEIVDQLNERNDRENGTKLENTLQDITQDNFPYLARQVNIQIQETQRMPQRYYSRRVTPRHIIVRFAKVEMKEKMLRAAREKDTSVKQKVNKDIQELNSALHQVDLIAIYRTLHPKSTEYTFFSAPHHTYSKTDHIVHSILCDSG

SEQ ID NO: 45747 - protein, 104 aa, Homo sapiens
  misc_feature (1)...(104): Xaa = X or * as defined in Table 2
SSQLNKAPSLFNPVSEEFCLWLLLLQKELLTRITSLEKNTNDLVDLKNTAXELHEAHTSINSXIDQVEERISECEDHLTEIRHSEKMKTALLKXDMQTRREKKK

SEQ ID NO: 45748 - protein, 395 aa, Homo sapiens
  misc_feature (1)...(395): Xaa = X or * as defined in Table 2
QTERNSININKKDNYAKTPSKGHQQQRPKVDKSTKMRKNQHKKAXKFPKPGMPSSPPKDHNCSPAREQNWMENEFNEFDELTGAGFRRWVITNSSELKEHVVTQCKEAKNLEKRLQELLTRITSLEKNINDLMELKQDITQENFMKHTQVSIAQADQGRKERVSEIEDPTLMDIKCEDKIREKKIKKRNEQSLQEIWGYVKRPNLRLISVPESDGENGNKXENILQDIIQENFPFPNLTRQANIQIQETQRTLQRYPLRRATPRHIIIRFTKVEMKEKMLRAAREKGRVTHKGKPIRLTENLSAETLXARREXXPILNILKERNFQPRISYRAKLSFISKGKREIKSFIDKQTLRDFVTTRPALQELLKEAVNMERKNQYQPLQKHTKLKRPLTL

SEQ ID NO: 45749 - protein, 105 aa, Homo sapiens
  DOMAIN (73)..(85): PEPSIN (A1) ASPARTIC PROTEASE FAMILY SIGNATURE domain identified by eMATRIX, accession number PR00792C, p-value=1.000e- 12, raw score of 9.10
  DOMAIN (57)..(104): Eukaryotic aspartyl protease domain identified by PFam, accession name asp, E-value=7.9e-20, PFam score of 71.2
MAGLATELEPDLRRKRKELQLWHLQTPESDLRKLAAGTAIEHSLTFPFSELPKPMPSITMNGETIACAEGCQAIVDTGTSLLTGPTSPIANIQSDIGASENSDGD

SEQ ID NO: 45750 - protein, 925 aa, Homo sapiens
  DOMAIN (82)..(103): PEPSIN (A1) ASPARTIC PROTEASE FAMILY SIGNATURE domain identified by eMATRIX, accession number PR00792A, p-value=2.929e- 22, raw score of 11.54
  DOMAIN (67)..(450): Eukaryotic aspartyl protease domain identified by PFam, accession name asp, E-value=4.4e-195, PFam score of 661.5
MKWLLLLGLVALSECIMYKVPLIRKKSLRRTLSERGLLKDFLKKHNLNPARKYFPQWKAPTLVDEQPLENYLDMEYFGTIGIGTPAQDFTVLFDTGSSNLWVPSVYCSSLACTNHNRFNPEDSSTYQSTSETVSITYGTGSMTGILGYDTVQVGGISDTNQIFGLSETEPGSFLYYAPFDGILGLAYPSISSSGATPVFDNIWNQGLVSQDLFSVYLSALSVLMVSGNNSDGAHCMGPGLRGKETTLVTPQDSPGKCPINGRSEEATADGHTNGRTKKFMSSPLTFHSDDKSGSVVIFGGIDSSYYTGSLNWVPVTVEGYWQITVDSITMNGETIACAEGCQAIVDTGTSLLTGPTSPIANIQSDIGASENSDGDMVVSCSAISSLPDIVFTINGVQYPVPPSAYILQSEGSCISGFQGMNVPTESGELWILGDVFIRQYFTVFDRANNQKPTVTCLQAMHLITFKIRSLETGLIILPFEKLPDFQARLTRSNSKCQGQLEVYLKDGWHMVCSQSWGRSSKQWEDPSQASKVCQRLNCGVPLSLGPFLVTYTPQSSIICYGQLGSFSNCSHSRNDMCHSLGLTCLECLIAEPQKTTPPTTRPPPTTTPEPTAPPRLQLVAQSGGQHCAGVVEFYSGSLGGTISYEAQDKTQDLENFLCNNLQCGSFLKHLPETEAGRAQDPGEPREHQPLPIQWKIQNSSCTSLEHCFRKIKPQKSGRVLALLCSGFQPKVQSRLVGGSSICEGTVEVRQGAQWAALCDSSSARSSLRWEEVCREQQCGSVNSYRVLDAGDPTSRGLFCPHQKLSQCHELWERNSYCKKVFVTCQDPNPAGLAAGTVASIILALVLLVVLLVVCGPLAYKKLVKKFRQKKQRQWIGPTGMNQNMSFHRNHTATVRSHAENPTASHVDNEYSQPPRNSRLSAYPGP

SEQ ID NO: 45751 - protein, 339 aa, Homo sapiens
  DOMAIN (82)..(103): PEPSIN (A1) ASPARTIC PROTEASE FAMILY SIGNATURE domain identified by eMATRIX, accession number PR00792A, p-value=6.250e- 23, raw score of 11.54
  DOMAIN (67)..(339): Eukaryotic aspartyl protease domain identified by PFam, accession name asp, E-value=5.4e-175, PFam score of 594.7
MKWLLLLGLVALSECIMYKVPLIRKKSLRRTLSERGLLKDFLKKHNLNPARKYFPQWEAPTLVDEQPLENYLDMEYFGTIGIGTPAQDFTVVFDTGSSNLWVPSVYCSSLACTNHNRFNPEDSSTYQSTSETVSITYGTGSMTGILGYDTVQVGGISDTNQIFGLSETEPGSFLYYAPFDGILGLAYPSISSSGATPVFDNIWNQGLVSQDLFSVYLSADDQSGSVVIFGGIDSSYYTGSLNWVPVTVEGYWQITVDSITMNGEAIACAEGCQAIVDTGTSLLTGPTSPIANIQSDIGASENSDGDMVVSCSAISSLPDIVFTINGVQYPVPPSAYILQ

SEQ ID NO: 45752 - protein, 1028 aa, Homo sapiens
  DOMAIN (489)..(505): Calcium-binding EGF-like domain proteins pattern proteins domain identified by eMATRIX, accession number BL01187B, p-value= 2.350e-14, raw score of 12.04
  DOMAIN (325)..(459): Eukaryotic aspartyl protease domain identified by PFam, accession name asp, E-value=8.7e-71, PFam score of 246.4
MWAGLLLRAACVALLLPGAPARGYTGRKPPGHFAAESRGCPHCVWQLPILLSCCHKMAGLATEVEPDLRRKRKELQLWHLQTPESDLRKLAAGTAIEHSLTFPFSELPKPMPRAAIPSLQLTLAAVAVGRQLHARPTLAHKPTFCVHTVALAGGGYTFVNVWKDRKHVFTQWSSQEELTHLQQTPPYTYSSSSSPKHNNPPSSPPHNTILLISPPHLHRPLLKGFAVIHVSPRLVTTRLGPHYIALHCEMFAPKVGLSVLMVSGNNSDGAHCMGPGLRGKETTLVTPQDSPGKCPINGRSEEATADGHTNGRTKKFMSSPLTFHSDDKSGSVVIFGGIDSSYYTGSLNWVPVTVEGYWQITVDSITMNGETIACAEGCQAIVDTGTSLLTGPTSPIANIQSDIGASENSDGDMVVSCSAISSLPDIVFTINGVQYPVPPSAYILQLWILGDVFIRQYFTSSTVHTTRSAWRVWFKHTDECLGTPCQQRCKNSIGSYKCSCRTGFHLHGNRHSCVEKVPKCFELRDGRKKGSVAQTKQLSAARTSRRRKRVSDAIGDASLSPFLPQHRGQLRMHMRTWFQDGKVTCEKASEGKRVTSFVNFFAACDARVTDSYSEDHSPLVMKWVLFLDIKADLCFTWIDLSSGSEVQVLLLPPLYSDPGSTGLSIFQQLSATSLHTMTSKKLVNSVAGCADDALAGLVACNPNLQLLQGHRVALRSDLDSLKGRVALLSGGGSGHEPAHAAKSIHLANTHEPTVYLALYWALGIPDRQGFIGKGMLTGVIAGAVFTSPAVGSILAAITAVAQPPTRKRRMHHGIGGASGGSTPVGPNARSDGTSPVAAALRQTPRGLRWGQSAVRRGVYRVLSGVVPFTVRGAPAGCCSPGGVLLGSQTRVTETPRWTVKTMVNTAEKPSLTNPIPLGCVVATVSATLSCKCFDIVLWLFLGSVCLCNEKYVQKMSQALCSFGCGSGICIAPNVCSCQDGEQGATCPETHGPCGEYGCDLTCNHGGCQEVARVCPVGFSMTETAVGIS

SEQ ID NO: 45753 - protein, 366 aa, Homo sapiens
  DOMAIN (89)..(105): Eukaryotic and viral aspartyl proteases proteins domain identified by eMATRIX, accession number BL00141A, p-value=2.636e- 19, raw score of 12.10
  DOMAIN (67)..(366): Eukaryotic aspartyl protease domain identified by PFam, accession name asp, E-value=1.6e-94, PFam score of 327.5
MKWLLLLGLVALSECIMYKVPLIRKKSLRRTLSERGLLKDFLKKHNLNPARKYFPQWEAPTLVDEQPLENYLDMEYFGTIGIGTPAQDFTVVFDTGSSNLWVPSVYCSSLACTNHNRFNPEDSSTYQSTSETVSITYGTGSMTGILGYDTVQSGYHHGNHRLNLKGLCSSKRSSTTPPLYDLGQVASPPSGSVSSCDDQSGSVVIFGGIYSSYYTGGLNWVPVTVEGYWQITVDSITMNGEAIACAEGCQAIVEPGTFFVTGPTSPIANIQSDIEASEELDGDSVLICSAISSLPDIVFTINGVQYPVPPSAYILQSEGSCISGFQGMNLPTESEELWILGDVFHPASTLTVFDRANNQVGLAPVA

SEQ ID NO: 45754 - protein, 255 aa, Homo sapiens
  DOMAIN (124)..(158): Iron-containing alcohol dehydrogenases proteins domain identified by eMATRIX, accession number BL00913D, p-value=6.040e- 30, raw score of 24.20
  DOMAIN (1)..(188): Iron-containing alcohol dehydrogenases domain identified by PFam, accession name Fe-ADH, E-value=2.2e-111, PFam score of 383.4
MAGDVQKALEERNIFSVIYDGTQPNPTTENVAAGLKLLKENNCDSVISLGGGSPHDCAKGIALVAANGGDIRDYEGVDRSAKPQLPMIAINTTAGTASEMTRFCIITDEARHIKMAIVDKHVTPLLSVNDSSLMIGMPKSLTAATGMDALTHAIEAYVSIAATPITDACALKAVTMIAENLPLAVEDGTWHYIGICGGFAFILLQLVLITAFAHSWNKNCICDWGKYPNCQLRIVWNYLKSVKPIITVAEENAEG

SEQ ID NO: 45755 - protein, 84 aa, Homo sapiens; identical to SEQ ID NO: 37082
  misc_feature (1)...(84): Xaa = X or * as defined in Table 2

SEQ ID NO: 45756 - protein, 299 aa, Homo sapiens
CLPFGGPKPNPWDKDGGCQGRPQPRHLPGPGTAAQRRQQCPSEKSLLCRWPSLTASTCSRLFYILLHVGASCNLLPPAVKDSSGKGVGQDTQVLSGSGAVYRVCAGTATFHLLQAVLLVHLHSPTSPRAQLHNSFWLLKLLFLLGLCAIAFCIPDEHLFPAWHYIGICGGFAFILLQLVLITAFAHSWNKNCNEASYLAEVFGPLWIVKVYSYEFQKPSLCFCCPETVEADKGQRGGAARPADQETPPAPPVQVQHLFLQLFCLPLRLLPWLTLCHGYPYQLVQASAGCGCKPFAPYSL

SEQ ID NO: 45757 - protein, 338 aa, Homo sapiens
  DOMAIN (184)..(199): RIBOSOMAL PROTEIN P2 SIGNATURE domain identified by eMATRIX, accession number PR00456E, p-value=5.443e-09, raw score of 3.06
MERRGPGAATARGRARPGGGPSVGLLATGSSLNPSFHGVARIVPGFIRIARPRDGSFAYESVPWQQSATQPAGSLSVVTTVWGVGNATQSQVLGNPMGPAGSPSGSSMMPGVAGGSSALTSPQCLGQQAFAEGGANKGYVQQGVYSRGGYPGAPGFTTGYAGGPGGLGLPSHAARPSTDFTQAAAAAAVAAAAATATATATGHRGCSPGEAEPGAEPDGAMGAGQSFNSQFLQHGGPRGPSVPAGMNPTGIGGVMGPSGLSPLAMNPTRAAGMTPLYAGQRLPQHGYPGPPQAQPLPRQGVKRTYSEVYPGQQYLQGAYPVHSGLSQFPTWQETPRHP

SEQ ID NO: 45758 - protein, 194 aa, Homo sapiens
  DOMAIN (65)..(93): Dehydrins proteins domain identified by eMATRIX, accession number BL00315A, p-value=1.403e-09, raw score of 9.35
MGVKMLLVLQSETGRGRRRRGGRGGRRGRRRRRRREEKKKEDEEEEEAVAVAVEEEEGEEEGEEGEEEGVEEEEEGRRGRKKKKEEERRRKKKKKEEGRRRKKKKNTVWWELYSRLHSWLLQVKKMRLQEVVRLTWQDEGSKSGISSWFGCIAGMWLPEGQAVVIVISLLDLATQQVYQAPDWYWGLSAQNPVM

SEQ ID NO: 45759 - protein, 294 aa, Homo sapiens
MDAFRFRLPLPPAASACRFCRRFCRRFCLRPRKRTSFCSFGSFGRSWTHHSLTLASVNKKVQTVLPETGGFSHETEKADTPLQLSHGRVGPAIHLHQSLEPGSRPAQGSRSPVPPNSRTAQGSPNPAPPNSHPAQGSPNPAPPNSHPAQGSPNAVPPKSHPAQGSPNPVPPNSHPAQGSPNPAPRPTAPRRTGLPEPSSSPQPPCPGLPEPSSSPQLPHPGLPEPSCLGCLPPAWTAWDRVPCACPQGRTSPPRKGATSHGLKVAAQAPQGAEPQRDLPEQNPTVVTERQRRLL

SEQ ID NO: 45760 - protein, 146 aa, Homo sapiens
  misc_feature (1)...(146): Xaa = X or * as defined in Table 2
GPWPRPVAYLSKQLYRVSKGWPPGLRALAEMALLAQEADKLTLRQNPNIIGPHAVVTLMTTKGHHXFTNARLTYVKIPTXPLKFGNTLNPTTLLPVSESPVEHNCVDVLDSVYSSRPNLRDHPXTSVDCERYVDRSSFTNRCKVTR

SEQ ID NO: 45761 - protein, 122 aa, Homo sapiens
SESPVEHNCVEVLDSVYSSRPDFRDHPWMSLDWELYVDGSNFVNSQGERCVGYAVVTLDAVIEAKSLPQGTSAQKAELIALIRASELSEGDRVWIKDWNVAPLRPWWKRPQTIILTTPTVVK

SEQ ID NO: 45762 - protein, 55 aa, Homo sapiens
MCQKEKKCSWSFNPDCGTLAKASGLSLKTTRRGFQSLAPVSKGPGSNGPVSTRSR

SEQ ID NO: 45763 - protein, 570 aa, Homo sapiens
  DOMAIN (110)..(127): RNase H domain identified by eMATRIX, accession number PF00075A, p-value=8.714e-09, raw score of 14.44
  DOMAIN (401)..(481): Integrase core domain identified by PFam, accession name rve, E-value=1.8e-07, PFam score of 29.9
MRPRDIWSCSPEAAVYAELKDPSRHQGQQQQRGDSSFLSCCSERADSASSGYLVLLALHRFLPLVTVHWGKGNDQTFRGLLDTGSELILIPGHPKCHCGPPVKVGAYGGQKTDESWRMSVDYRKLNQVVTPIAAAVLDVVSLLEQINTSSGTWYVVIDLASAFFSIPVHKARQKQFACSWLGQQYTFTVLPQRYIYSLALSHNLIRRDLDRFLLPQDITLVHYIDDIMLIGSSEQEVANAVDLLKGMFAISQKVEACRRIVCESRERKKMCYKKQLMQEMLYNFKVIRPPECKTIEETVYMQESPVEHNCVEVLDSVYSSRPDLRDHLWTSVDWELYVDGSSFINPQGERCAGYAVVILDAVIEAKSLPQGTSAQKAELIALIWALELSEGPTVLSGIQAYGEAPFEDLNIDFTKMPKCGSNKYLLVPVCTYSGWVEAYPTRTKKARVLLRDLIARFGLPLWIGSENGPAFVADLVQKTAKVMSVDQRLERSPLAATVERTPDCHLDHSHSCEGRGNPSLGPPQLRKTCSTGDLVGETKPRQPLQSDSEEVDKPCSSHTRKPTGPLMAEA

SEQ ID NO: 45764 - protein, 187 aa, Homo sapiens
  misc_feature (1)...(187): Xaa = X or * as defined in Table 2
QNSLRSMCQKEKKMAAGVLTHTCGPWPRPVAYLSKQLDRISKGWPPGLRALAATALLAQEADKLTLGKTXIXRPPHAVVTLMNTKGHHWLTNARLTKYQSLLCENPHITTEVCNTLNPTTLLLVSESLVEHNCVEVLDSVYSSRLNLRDHPXTSVDWXLHVDGSSFTNPCKVTLKKMTSAAPVTPRS

SEQ ID NO: 45765 - protein, 51 aa, Homo sapiens
MVIDLRAREAEAGFVKVPHAPMPGDGPGRSVCEWGSHLFFPRVLVNSDIPQ

SEQ ID NO: 45766 - protein, 291 aa, Homo sapiens
  DOMAIN (36)..(290): Dihydroorotase-like domain identified by PFam, accession name Dihydrooratase, E-value=1.3e-06, PFam score of -71.3
LGKLRLESCGLVAAVRPHSGGLAMPLPNATRPASGRSEDAELKLALEHGHRSESLQGRKHRGVHDNSDIPQAALVGGTTMIIGHVLPDKETSLVDAYEKCRGLADPKVCCDYALHVGITWWAPKVKAEMETLVREKGVNSFQMFMTYKDLYMLRDSELYQVLHACKDIGAIARVHAENGELVAEGAKEALDLGITGPEGIEISRPEELEAEATHRVITIANRTHCPIYLVNVSSISAGDVIAAAKMQGKVVLAETTTAHATLTGLHYYHQDWSHAAAYVTVPPLRLGIPPH

SEQ ID NO: 45767 - protein, 98 aa, Homo sapiens
VSRRASSGSPVPLGSLHLQHSAPAPSAAPKPRSPPARLSRPHLRGESAAPSPLSPGPASLAAAAAARVPAQPSPAPSTTPAPRTTLAPRVPHRLAPAP

SEQ ID NO: 45768 - protein, 73 aa, Homo sapiens
  DOMAIN (33)..(45): GLUCOSE/RIBITOL DEHYDROGENASE FAMILY SIGNATURE domain identified by eMATRIX, accession number PR00081B, p-value=6.727e- 11, raw score of 10.38
RLWEHRSVSAGASGWGLSSPGCLLLHPSLPEEERVDILINNAGVMRCPHWTTEDGFEMQFGVNHLGEAWAGAA

SEQ ID NO: 45769 - protein, 376 aa, Homo sapiens
MTGSRTWGADRGHLRGLGKKKPVPVLLGSLLNRPVPAGRTLRGALRTLSLLAAQGLWRRRPCFTERIWKGSGFQQFSLPCSTPWRRRRKRIGRPHLGHWGRTEAAFRSERLRNPDLIQAGYYSFASLTRREPRSWRPLLAADVTGHQTGIAAMRHKLKGGHSTVTDLQELLGCPLSKPAENVTAGNKENLPENVTASESDAEDTSHWIRAHPNDRILTGHFGTDPVSGTGHIHRCGSTGVFLLVHQAGRRSEGHSNQQRGCDAVPPLDPEDGFEMQFGVNHLDFDDLNWQTRKYNPKPPTARASSPSSSSPRAEPAAARLWCDCQRPAPRRARTELGRHTGIHGSTFSAPHSCLSPTRQQCRSFLIPKGTAGAQYE

SEQ ID NO: 45770 - protein, 22 aa, Homo sapiens
LWGLPCSLLCLLQVCKSHTLCS

SEQ ID NO: 45771 - protein, 184 aa, Homo sapiens
  DOMAIN (143)..(155): GLUCOSE/RIBITOL DEHYDROGENASE FAMILY SIGNATURE domain identified by eMATRIX, accession number PR00081B, p-value=6.727e- 11, raw score of 10.38
  DOMAIN (66)..(183): short chain dehydrogenase domain identified by PFam, accession name adh_short, E-value=0.00015, PFam score of -15.5
ELPRRLVCSKLRADPGRLTPDACARPGMSRYLLPLSALGTVAGAAVLLKDYVTGGACPSKATIPGKTVIVTGANTGIGKQTALELARRGGNIILACRDMEKCEAAAKDIRGETLNHHVNARHLDLASLKSIREFAAKIIEEEERVDILINNAGVMRCPHWTTEDGFEMQFGVNHLGHFLLTTWC

SEQ ID NO: 45772 - protein, 182 aa, Homo sapiens
AERLGGGGGGVMAPAADREGYWGPTTSTLDWCEENYSVTWYIAEFWNTVSNLIMIIPPMFGAIQSVRDGLEKRYIASYLALTVVGMGSWCFHMTLKYEMQLLDELPMIYSCCIFVYCMFECFKIKNSVNYHLLFTLVLFSLIVTTVYLKVKEPIFHQVMYGMLVFTLVLRSIYIGTWVYPMA

SEQ ID NO: 45773 - protein, 103 aa, Homo sapiens
MAPAADREGYWGPTTSTLDWCEENYSVTWYIAEFSWLMSGFLPTPSSLRDLTASRWVRSLPPSRSPAGRQPGPAEELPKASPCPWGKSLSRPFASFSASSGPS

SEQ ID NO: 45774 - protein, 535 aa, Homo sapiens
WQLPHPPAAPSARQILRACQLSSVTAVAQSCLYGKQLCGLTTGNIAGAGLLFFGGGIGGTILYAKWASHFRERVEKTIPYSDKLFEVVLGSAPYNVPLPKKSTQSGPLKISSVSEVTKEFKQPASQLQKQKGDTPASATAGDTVLVPGVQHEESLKTDHPAIDEGKPTPALSEEASSSSIRERPCEEIAACLAQEEKQEQVKTESLAKSFEDALRQTANVTLQAIAAQNTVVQAVNAHSNILKAAMDNSEIEGKKKSAKWHTVQGALKEHRKAVDEAANALLKAKEEVQAAQFESKLVSQYHELVGQAQDDFKRQLDSITPEVLPGWKGMSVSDPADKLSTDDLNSLIARAHRHIDQLNRELAEQKATEKQHITLALEKQTLEEKVQEQELKYEFEQNLSEKLSEQELQFHHLSQEQVHNFTLDINTAYARLRGIEHAVQSHAVAEEEARKAYQLWLSVEALKYSMKTSSAEMPAVPLGSAVEAIKANCSDNEFTKALATAIPPESLTHGVYSEETLRVRFYAVQKLARRVAMID

SEQ ID NO: 45775 - protein, 795 aa, Homo sapiens
  misc_feature (1)...(795): Xaa = X or * as defined in Table 2
PKCCFFCLLSGETAAAQSCLCGKVVLRPLRPCRRYSTSGSSGLTTGKIAGAGLLFVGGGIGGTILYAKWDSHFRESVEKTIPYSDKLFEMVLGPAAYNVPLPKKSIQSGPLXISSVSEVMKESNRPASQLQKQKGDTPASATAPTEAAQIISAAGDTLSVPAPAVQPEESLKTDHPEIGEGKPTPALSEEASSSSIRERPPEEVAARLAQQEKQEQVKIESLAKSLEDALRQTASVTLQAIAAQNAAVQAVNAHSNILKAAMDNSEIAGEKKSAQWRTVEGALKERRKAVDEAADALLKAKXLLMDFNKEELEKMKSVIENAKKKEVAGAKPHITAAEGKLHNMIVDLDNVVKKVQAAQSEAKVVSQYHELVVQARDDFKRELDSITPEVLPGWKGMSVSDLADKLSTDDLNSLIAHAHRRIDQLNRELAEQKATEKQHITLALEKQKLEEKRAFDSAVAKAFRNIHRKLKYRAXTGQKRXKEVRDAMENEMRTQLRRQAAAHTDHLRDVLRVQEQELKSEFEQNLSEKLSEQELQFRRLSQEQVDNFTLDINTAYARLRGIEQAVQSHAVAEEEARKAHQLWLSVEALKYSMKTSSAETTSIPLGSAVEAIKANCSDNEFTQALTAAIPPESLTRGVVTVKRPLGARFYAVQKLARRVAMIDETRNSLYQYFLSYLQSLLLFPPQQLKPPPELCPEDINTFKLLSYASYCIEHGDLELAAKFVNQLKGESRRVAQDWLKEARNMTLETKQIVEEILTAYASAVGIGTTQVQARVRFRKVFNKSFFMSKEISSDR

SEQ ID NO: 45776 - protein, 404 aa, Homo sapiens
MPKKRQALVEFEDVLGACNAVNYAADNQIYIAGHPAFVNYSTSQKISRPGDSDDSRSVNSVLLFTILNPIYSITTPTRLNVFKNDQDTWDYTNPNLSGQGDPGSNPNKRQRQPPLLGDHPAEYGGPHGGYHSHYHDEGYGPPPPHYEGRRMGPPVGEYGPHADSPVIMVYGLDQSKMNCDRVFNVFCLYGNVEKVKISLKKQSPGGRPMGEEWLDGYAVDRAITHLNNNFMFGQKLNVCVGAQAREGSRGTGERKGGEWGPAEEHSEAEVLTHTEMGCGSVSKQPAIMPGQSYGLEDGSCSYKDFSESRNNRFSTPEQAAKNRIQHPSNVLHFFNAPLEVTEENFFEICDELGVKRPSSVKVFSGKSERSSSGLLEWESKSDALETLGFLNHYQMKNPSINLVT

SEQ ID NO: 45777 - protein, 215 aa, Homo sapiens
MESFGVLPLFLGADAGYVGVIAGVRCLLSGVVPVDLEEFTGDVLFSACGPRSFESGSKKTVVQLLFRVMPSRVVRLATTCRWDPKPSLDLCHFGGNEACCQTPLCECVGVRRAEGDNLLICRRLMPSQKPKPLALLEETCKLPERQVVNAKEKFLEEMKKCYSSEHMNDKKAKLYYYRYGESLSGLYRRSNQPQPSLKPKPNREQGPNSLQLCDG

SEQ ID NO: 45778 - protein, 224 aa, Homo sapiens
  DOMAIN (114)..(174): RNA recognition motif. domain identified by PFam, accession name rrm, E-value=0.018, PFam score of 20.9
SPPNPRAPYLFPASLQNPANWSPHFQYLPILSQPRSVLTAFRQQAQPRISMPQAQTPFRPQMERLDQNIRRSNQPQHSLKPKLIQSKALTLFNSVKAEKDEEAAEEKFEVTRVVHIRGLIDGVVEADIVEALQEFGLISYVMVMSKKRQALVEFEDVLEACNAVNYTADNQIHIAGHPAFVNYSTSQKISRPGNSDDRSVNSVLLFTILNPIYSITTDVLYTIG

SEQ ID NO: 45779 - protein, 567 aa, Homo sapiens
  DOMAIN (204)..(247): PROTEIN NUCLEAR RIBONUCLEOPROTEIN domain identified by eMATRIX, accession number PD02784B, p-value=4.713e-16, raw score of 26.46
  DOMAIN (82)..(436): RNA recognition motif. domain identified by PFam, accession name rrm, E-value=0.0025, PFam score of 24.5
  misc_feature (1)...(567): Xaa = X or * as defined in Table 2
DEQRRRSGAMVKMAAAGGGGGGGRYYGGGSEGGRAPKRLKTDNAGDQHGGGGGGGGGAGAAGGGGGGENYDDPHKTPASPVVHIRGLIDGVVEADLVEALQEFGPISYVVVMPKKRQSLVXFEDVLGAGNAVNYAADNQIYIAGHPAFVNYSTSQKISRPGDSDDSRSVNSVLLFTILNPIYSITTDVLYTICNPCGPVQRIVIFRKNGVQAMVEFDSVQSAQRAKASLNGADIYSGCCTLKIEYAKPTRLNVFKNDQDTWDYTNPNLSGQGDPGSNPNKRQRQPPLLGDHPAEYGGPHGGYHSHYHDEGYGPPPPHYEGRRMGPPVGGHRRGPSRYGPQYGHPPPPPPPPEYGPHADSPVLMVYGLDQSKMNGDRVFNVFCLYGNVEKVKFMKSKPGAAMVEMADGYAVDRAITHLNNNFMFGQKLNVCVSKQPAIMPGQSYGLEDGSCSYKDFSESRNNRFSTPEQAAKNRIQHPSNVLHFFNAPLEVTEENFFEICDELGVKRPSSVKVFSGKSERSSSGLLEWESKSDALETLGFLNHYQMKNPNGPYPYTLKLCFSTAQHAS

SEQ ID NO: 45780 - protein, 176 aa, Homo sapiens
  DOMAIN (89)..(102): ADENINE NUCLEOTIDE TRANSLOCATOR 1 SIGNATURE domain identified by eMATRIX, accession number PR00927C, p-value=2.600e-14, raw score of 11.61
  DOMAIN (39)..(176): Mitochondrial carrier proteins domain identified by PFam, accession name mito_carr, E-value=1.8e-33, PFam score of 117.7
NHQIRNDFTISPGVKADSRTSPIPQQPASSFDITEAAVSFAKDSLAGGVAAAISKMAVAPIERVKRVPKEHGVLSWCGNLASVIRYFPTQALNFTFKDKYKQIFLDGVDKRSQFWRYFAGNLASGGATGATSLCFVYPLDFAHTRVAADVGKAGAERELRGFGDCLVKIYKSDGIK

SEQ ID NO: 45781 - protein, 484 aa, Homo sapiens
  DOMAIN (179)..(202): MITOCHONDRIAL CARRIER PROTEIN SIGNATURE domain identified by eMATRIX, accession number PR00926F, p-value=2.029e-18, raw score of 17.75
  DOMAIN (55)..(243): Mitochondrial carrier proteins domain identified by PFam, accession name mito_carr, E-value=3.3e-34, PFam score of 120.2
MGHLMSLIIRDPSLSLCDHVNPENLPQSQSRLPTLSRPAVACLLFPFNMIDVTVSFAKDFLGDGVATAIFKIAVAPTVQVKLLMQALNFAFKDKYKQIFLGGVDKRTQFWLYFAGNLTSGCAAGATSLCFVYPLDFAHTRLAADVIIIYRAAYFGIYDTRNGMLPDPKNTHIVISWMIAQTVRAVAGLASYPLDTVRPRMMMQSGCKGTDLMYTGMLDCWRKIASDEGGKAFLKGAWSSVLRGTVQIIKMGECMGTMSRHSEIETSFPEARRAEWDHQDTQLMKKLMAVQAQHRPFTEDPSTLNSTAAPLPDPYFCRGQYLVLAESFFSPIQKIWNSCPSSRKNAIPGQLEACRVSMPRGALNRPPCSLLPSHTPRHPKSRGGQDGRGLLRKTCSHCYALPAAAGVSTAAAPDGPPPPSVPTVDNVCVLAVSSHDRPSVYVCVLTPSSYKDTGHTELGSTSMTSFRPNYIFKDPIYKYSHIPRY

SEQ ID NO: 45782 - protein, 325 aa, Homo sapiens
  DOMAIN (36)..(61): Mitochondrial energy transfer proteins domain identified by eMATRIX, accession number BL00215A, p-value=8.579e-19, raw score of 15.82
  DOMAIN (30)..(325): Mitochondrial carrier proteins domain identified by PFam, accession name mito_carr, E-value=5.3e-85, PFam score of 294.3
  misc_feature (1)...(325): Xaa = X or * as defined in Table 2
RSAGVKAGSRPSPVLQQSASSFNMTDAAVSFAKDFLAGGVAAAISKTAVAPIERVKLLLQVQHASKQIAADKQYKGIIGCVVRIPKEQGVLSFWRGNLANVIRYFPTQALNFAFKDKYKQIFLGGVDKRTQFWRYFARNLASGGAAGATSLCFVYPLDFARTRLAADVGKAGAEREFRGLGDCLVKIYKSDGIKGLYQGFNVSVQGIIIYRAAYFGIYDTAKGMLPDPKNTHIVISWMIAQTVHCCCPGXLPYPFDTRSVRRNEXMQSGRKGTDIMYTGTLDCWRKIARDEGGKAFFKGAWSNVLRGMGGAFVLVLYEXKSKKYT

SEQ ID NO: 45783 - protein, 204 aa, Homo sapiens
MGKKQSRKTGNSKNQSTSPPPKQRSSSPATEQSWMENDFDELREEGFRTSNYSELKEEVRTHGKKVKNFEKKLDEWLTRISNAEKSLNDLMELKTTARELCDECTSLSSRCNQLEERVSAMEDEVNEMNVSESDGENGTKLENTLQDIIQENFPNLARQANIQIQEIQTTTERYSSRRATPRHIIVRFTKIEMKENMLRAAREK

SEQ ID NO: 45784 - protein, 565 aa, Homo sapiens; identical to SEQ ID NO: 34113
  DOMAIN (441)..(482): kw TRANSCRIPTASE REVERSE II ORF2 domain identified by eMATRIX, accession number DM01354I, p-value=1.000e-40, raw score of 15.55
  DOMAIN (196)..(427): AP endonuclease family 1 domain identified by PFam, accession name AP_endonucleas1, E-value=4.6e-53, PFam score of 189.7

SEQ ID NO: 45785 - protein, 198 aa, Homo sapiens; identical to SEQ ID NO: 41987

SEQ ID NO: 45786 - protein, 1052 aa, Homo sapiens
  DOMAIN (255)..(284): kw REPLICATION REPB REPA INITIATION domain identified by eMATRIX, accession number DM00653A, p-value=7.207e-27, raw score of 20.40
  DOMAIN (239)..(281): Initiator RepB protein domain identified by PFam, accession name RepB_protein, E-value=0.0091, PFam score of 12.3
MQEQQQASSLIRSGNGRLPGSGAQRTPCHIRRDGSQRRVCDDCKQQWWKAKYNIPSGLHACTATLEETHILDSGAHVQVFYKGQLHVMRVPCTDYFDTQKNPNLSHLHGSVMAETAVINHKKRKNSPRIVQSNDLTEAAYSLSRDQKRMLYLFVDQIRKSDGTLQEHDGICEIHVAKYAEIFGLTSAEASKDIRQALKSFAGKEVVFYRPEEDAGDEKGYESFPWFIKRAHSPSRGLYSVHINPYLIPFFIGLQNRFTQFRLSETKEITNPYAMRLYESLCQYRKPDGSSIVSLKIDWDIEPYPAGLKEQIKSDVFLLSSCVEVLPNAEIGFLKCLAIIGLWAVSLFSYNNCFICTPAFGRRVSGVIEIADGSRRRKAAALTESDYRVLVGELDDEQMAALSRLGNDYRPTSAYERGQRYASRLQNEFAGNISALADAENISRKIITRCINTAKLPKSVVALFSHPGELSARSGDALQKAFTDKEELLKQQASNLHEQKKAGAINTQLVETLLSDSRRIPDFMSKTPKAMVTKAKIDKWDLIKLKSFCTAKETTIRVNRQPTEWEKIFATYSSDKGLISRIYKELKQSYRKKTTLSTSGGHEKWRRNLKLNVALLIWFCCDPTQISFLIVAAKIPMSCEGSGGRRNPMITRQTGSGVDLQQTPADLQKRDFTGRRKTNKQKGIAPTSTKITSTWKPHPKDCNSSPAREQNWMENEFDKLTEVGFRRWTITNSSKLKERVLTQCKEATNLAKRLEKLLTRITSLEKNKNDLMELKNTAQELREAYTSISGRINQAEQRTSEIEDQLNEIKRRGVSVCPQPSEDTPRSTARVPKGMVPFRPRVPLVTPPREKKEAPWLACLRTRALRILIDPPSQVWDIVSCDAENETKLENTLQDIIQENFPNLARQANVQIQEIQRTPQRYSSRRATPRHIIVRFTKVEMKEKMLRAAREKGRVTLKGKPIRLTADLSAETLQARREWGPIFNTLKEKNFQPRISYPAKISFISEGEIKYFTDKQMLRDFVTSRPALEDLLKEALNMERNNRYQLLQNHAKT

SEQ ID NO: 45787 - protein, 293 aa, Homo sapiens
MGKKQNRKTGNSKTQSVSPPPKERSSSPATEQSWMENDFDELREEGFRRSNYSELWEDIQTKGKEVENFEKNLEECITRITNTEKCLKELMELKTKARELHEECRSLRNRPNLRLIGVPESDGENGTKLENTLQDIIQENFPNLARQANVQIQEIQRTPQRYSSRRATPRHIIVRFTKVEMKEKMLRAAREKGRVTVKGKPIRLTADLSAETLQARREWGPIFNILKENNFQPRISYPAKLSFISEGEIKYFTDKQMLRDFVTTRPALKELLKEALNMERNNRYQPLQNHAKM

SEQ ID NO: 45788 - protein, 268 aa, Homo sapiens
  DOMAIN (56)..(97): 2'-5'-oligoadenylate synthetases proteins domain identified by eMATRIX, accession number BL00832B, p-value=5.342e-09, raw score of 15.45
MEQSWMENDSDELTDEDVRTHCKEAKKLEERLNEWLTRINSVEKNLNDLMELKTMARELHDACTTFNSQFNQMEERVSVIEDQINEIKQEEKFREKRVKRNEQSLQEIWDYVKIPNLCLIGVPASDGENGTKLENTLQDIIQENFPNLARQANIQIQEIQRTPQRYSLRRATPRHIIVRFTKVEMKEKVLRAAREKGLVTHKGKPIRLTADLSAETLQATREWGPIFNILKEKNFQPRISYPAKLSLISEGEITSFTDKQMLRDFCQH

SEQ ID NO: 45789 - protein, 409 aa, Homo sapiens
  DOMAIN (247)..(292): kw TRANSCRIPTASE REVERSE II ORF2 domain identified by eMATRIX, accession number DM01354N, p-value=1.000e-40, raw score of 13.17
MEDEMNEMKHEEKFRGKRIKRNEQSLQELWDYVKRPHLHLIDVPESDGENGTKLENTLQDIIQENFPNLARQANIQIQEMQRKPQRYSSRRATPRHIIVRFTKVEMKEKMLRAARDKGQVTHKGKPIRLTADLLAETLQARREWGPIFNILKEKNFQPRISYPAKLRFTSEGEIKSFTDKQMLRDFVTTRPALKQLLKEALNMERNNRLPARLIKKKREKNQIDATKNDKGDITTDPTEIQTTIREYYKHLYANKLENLEEMDKFPDTYTLPRLNQEEVESLNRPITGSEIEAIIKSLPTKKRPGPDRFTAEFYQRYKEELVPFLLKLFQSTEKEGILPNSFYEASIILIAKPGRDTTKKENFRPISLLNIDAKILNKILANRIQQHIKKLIHHDQVGFIPGMQGWFNI

SEQ ID NO: 45790 - protein, 275 aa, Homo sapiens
PYHTEWAKTGSIPFENRHKTRTLFLTTPIQHSIESSGQGNQQSGPSSKGLLRFAGGPLHSLLTWVPPAPGGISSGGCRTATIKQEIWDYVKRPNLRLIGVPESDVENGTKLENTLQDIIQENFPNLARQANVQIQEIQRTPQRYSSRRATPRHIIVRFTKVEMKEKMLRAAREKGRVTLKGKPIRLTADLSAETLQARREWGPIFNILKEKNFQPRISYPAKLSFISEGEIKYFIDKQMLRDFVTTRPALKELLKEALNMERNNRYQPLQNHAKM

SEQ ID NO: 45791 - protein, 337 aa, Homo sapiens; identical to SEQ ID NO: 42053
  DOMAIN (126)..(147): Glyceraldehyde 3-phosphate dehydrogenase proteins domain identified by eMATRIX, accession number BL00071E, p-value=7.545e- 17, raw score of 11.48
  DOMAIN (29)..(153): glyceraldehyde 3-phosphate dehydrogenases domain identified by PFam, accession name gpdh, E-value=3.5e-38, PFam score of 130.1

SEQ ID NO: 45792 - protein, 848 aa, Homo sapiens
MWLQALCACRNELLNSTSHKALLRMNVTTTTHLVAPNMCQVLNPGLLSFSSNLVAVFRVTHTPISTFEEGKLTNRKDIHTKNPSVRHHHQRPKVDKTTKMGKKQSRKTGNCKKQSASPPPKECSSSPAMEQSWMGNDFDELREEGFRQSNYSELQEEIQTNGKEVKNFEKKLDDWITRITNTEKSLKELMELKAKARELLEECRSPRSQCDQLEERVSVMEDEMNEMKREGKFREKRIKRNEQILQEIWDYVKRPNLHLIGVPESDGENGTKLENTLQDIMQENFPNLARQANIQIQEIQRTPQRYSLRRATPRHIIVRFTKVEMKEKMLRAAREKGQVTHKGKPIRLTADLFAETLQARREWGPIFNILKEKMGKKQSRKTGNCKKQSASPPPKECSSSPAMEQSWMGNDFDELREEGFRQSNYSELQEEIQTNGKEVKNFEKKLDDWITRITNTEKSLKELMELKAKARELLEECRSPRSQCDQLEERVSVMEDEMNEMKREGKFREKRIKRNEQILQEIWDYVKRPNLHLIGVPESDGENGTKLENTLQDIMQENFPNLARQANIQIQEIQRTPQRYSLRRATPRHIIVRFTKVEMKEKMLRAAREKGQVTHKGKPIRLTADLFAETLQARREWGPIFNILKEKMGKKQSRKTGNCKKQSASPPPKECSSSPAMEQSWMWNDFDELREEGFRRSNYSELQEEIQTNGKEVKNFEKKLDDWITRITNAEKSLKELMELKAKARELREECRSPRSQCDQLEERVSVMEDEMNEMKREGKFREKRIKPRISYPAELSFISEGEIKYFTDNQMLRDFVTTRSALKELLKEALNMERNNRYQPLQKHAKM

SEQ ID NO: 45793 - protein, 259 aa, Homo sapiens; identical to SEQ ID NO: 42054

SEQ ID NO: 45794 - protein, 904 aa, Homo sapiens
  DOMAIN (147)..(194): kw TRANSCRIPTASE REVERSE II ORF2 domain identified by eMATRIX, accession number DM01354V, p-value=6.818e-10, raw score of 12.97
VGPSKEQGCPEFSEYFPLHMDKKYRAVSGIPICGNYRYRKLSLCQMAMKAKEKNKTRKGKGELQVEYVVKEGLAKKVPLEQRPEGVEGQHMHAPPGSLRIEPPGLALHCQCLSTLSGDLGTTQLNPPPLTLEHSSQGPEVGPTKPAATTTAGTPPWAWGLNYPMKDLYKKNCKTLIKEIEEDTNGKISHAHGLEELILLNTHTAQSNLQIQSNLYESTNIIFHRNRKNNLTIHMEPKRARIDTAILSKKNKVGDIPLPGIKTYYKAIVSKTAWYAFQILNGSPCLALIDSESPVFKAKVQALKPSKHITFPWLYYQQHNHTYGTCELKQLYSGRSSQALESQMLPKDRQMERNTLPPVDTGPPSRTVGASCSSSTSGEDAGKKLFPGHTFCEHPEDSSDVVKPPGRPRRAFPISSEALWESECRARTSYSSQHFEKSCDVVNKARNAQSENYLECPAQNRKSRSGSYSHYDYTACHSHLSEASPLTLATVPLENPSGIEGGQLRNDSQKTLDGSKEHINLTNGIPTDLQPRVLSVRRKTNKQKDFTLKTHLYITISKTKSRINPQRWGKNRTKKMGNSKTQSTFPPPKERSSSPATEQSWMENDFDELREEGFRQSNYSELREDIQTKGKEVENFEKNLEECITRITNTEKCLKELMELKTKARELREECRSLRNRCDQLEERVSAMEDEMNEMKQEGKFREKRIKRNEQSLQEIWDYVKRPNLRLIGVPESDAENGTTLENTLQDIIQENFPNLARQANIQIQEIQRTPQRYSSRRATPRHIIVRFTKVEMKEKMLRTAREKGRVTLKGKPIRLTADLLAETLQARRDWGPIFNILKEKNCQPRISYPAKLSFISEGEIKYFTDKQMLRDFVTTRPALKELLKEALNMERNNRYQPLQNHAKM

SEQ ID NO: 45795 - protein, 284 aa, Homo sapiens
MLNVLQCVGCPPPPNKAPGIAEQKAADNFCRLKRLRLKALKRAVVLPAWRLSSENGQTASTKRVSVIEDQINEIKPEDKVREKRVKRNEQSLQEIWDYVRTPNLCLIGVPESDGENGTTLENTLQYIIQENFPNLARQANIQIQEIQRTPQTYSSRRATPRHIIVRFTKVEMKEKVLRAAREKGRVTHKGKPIRVTADLLAETLQARREWGPIFNILKEKNIQPRISYPAKLSFTSEGEIKSFTDKQMLGDFVTTKPASQELLKEALNTERNNQYQPLQKHAKL

SEQ ID NO: 45796 - protein, 420 aa, Homo sapiens; identical to SEQ ID NO: 43256

SEQ ID NO: 45797 - protein, 379 aa, Homo sapiens
GNSYDHDYEFELGTLLLGGLADVGLAVGQGQQEEFAGNELGFCRFRNHHQTGFSPAGANQRGPLAATLSGPGGEGQSAVARLTGEKKNHPGAQYANRLSPRVGRFINAAGTTGFPTGKRAVSATQLMDFADFGTTIKQDFRLLGQTSVDRLLQLSQGQAVKGNQLLPVSLVKRKTTLAPNTQTASPRALADSLMQLARQVSRLESGHDVENGTKLENTLQDIIQENFPNLARQANVQIQEIQRTPQRYSSRRATPRHIIVRFTKVEMKEKMLRAAREKGRVTLKGKPIRLTADLSAETLQARREWGPIFNILKEKNFQPRISYPAKLSFISEGEIKYFIDKQMLRDFVTTRPALKELLKEALNMERNNRYQPLQNHAKM

SEQ ID NO: 45798 - protein, 526 aa, Homo sapiens
MPMEPYSLLTQQSKIDLGCRSLEHNSSPAREQNWMDNEFDKLTEVGFKGRQFDRLEERISVIEDRISETKQEDKIREKRVKRNKQHLQEIWDYVKRPNLRLIGVPESGGDNGTKLENTLQGIIQENFPNLARQANIHIQEIQRTPQRYSSRRATPRHIIVRFTKVEMKEKMLRAAREKGQVTHKGRPIRLTAGLSAETLQARREWGPIFNILKEKNFQPRISYPVKLSFISKGEIKFFTDKQMLRDFITIRPALQELLKEALDVDRNNWTVTERELQEGSTFQQMQQFQQFLGLLEDFSHTGFQPAPIPNPPISIEPYDNGLGEGLAQLASEESAAPCPKTDILQFPFTGVAGDQQRALQMAACGDCLSTFFDSLCLIDSDPVGSHGLSTLSVACSTHDSSMAQKPSLFRIQYTLLITIKYYEPLSFWRDWKSEETQVWKGELEEETYYELAGIKIIQMRNAIEELFRAYSRKGVSHQHLRCGRDSNTGTRVGSACHSVQISEKKDGERLFDKIGHGVTKPWAFIS

SEQ ID NO: 45799 - protein, 552 aa, Homo sapiens
MRHADISKGHLQTEKETSSVSVQVQKPQKREANSAAVSLQPKAQETLKNHSPRGRRSPKCPGGNHNFQLNGIIVVYSGGSVPSFGTKTSGPAEHNAMGTGSKSLASGSLGVMLLQDDGEHGNTTVNTISMGPLLNFFSHKGTDKQKDSNNLCRLKCPCLTALKRAVVLPARSWRSENGQTASSKGKLTTRKDIYTENPSVHHHHQRPKVDKTTKMGKKQNRKTGNSKTQSASPPPKERSSSLATEQSWMENDFDELREEGFRRSNYSELREDIQTKGKEVENFEKNLEECITRITNTEKCLKELMELKTKARELREECRSLRSRCDQLEERVSAMEDEMNEMKREGKFREKRIKRNEQSLQEIWDYVKRPNLRLIGVPESDVENGTKLENTLQDIIQENFPNLARQANVQIQEIQRTPQRYSSRRATPRHILVRFTKVEMKEKMLRAAREKGQVTLKGKPIRLTADLSAETLQARREWGPIFNILKEKNFQPRISYPAKLSFISEGEIKYFIDKQMLRDFVTTRPALKELLKESLNMERNNRYQPLQNHAKM

SEQ ID NO: 45800 - protein, 373 aa, Homo sapiens
MPLNKKQSVTTRSNLGDRKHDNCVRNRFVTSAECWERVSSAYSTCHGYSIECSEVNEPLGFSGNTILSAQQPPTHAASGTDTCARDQLKTKARELREECRSLRSRCDQLEERVSAMEDEMNEMKREGKYREKRIKRNEQSLQEIWDYVKRPNLRLIGVPESDAENGTKLENTLQDIIQENFPNLARQANIQIQEIQRTPQRCSSRRATPRHIIVRFTKVEMKEKMLRAAREKGRVTLKGKPIRLTADLSAETLQARREWGPIFNILKEKNFQPRISYPAKLSFISEGEIKYFTDKQMLTDFVTIRPGLKELLKEALNMERNSWAKCSHAGLCHTFPFEQMAERFVCNVELVKGEGLPDRDQEGRFNLLSGGMV

SEQ ID NO: 45801 - protein, 514 aa, Homo sapiens
MRNGALQSRYYAVPMVSTTHRPGNSLQCLCFWNWWVLGLTDFKNEAVDPHALGWSIGLGTMEQGAALIGEAWAAQEPMESGGDSGMVGCRSRALPHGKAAKARREIQRSATEGASSGLGQPRKGLPQCSSGLKGSSSATKVGAQGEEAPRGSESCEGCQHAVTSHLRHKGPGFQAQNWEAFWADTELAAGVSVIPQWRLESQASLKEKQQLQSGAYRSNSYLPGTAPRGRSGCGCSFSRLKHSCLPALKRAADPAAQHSSSAKGQTASSSGSLTPVPPDWETLSSRGQQTPHREELQLACGRCPPGIKLPETGTGSNLCFSAASTERNSININQKDFHTETPSELHQHQRPKTTEIRKNQCKKAENSKIQKTSSPPKDHNSSPAREQNWMENEFDELIAVGFRRWVTNSSELKEHVLTQGKEAENLEKRLEEMLTRIASLEKNINDLTKLENTLQDIIQENFPNLARQANIQIQEIQRTPQRYSSRRATPRHIIVRFTKVEMEKKNVKDSQRES

SEQ ID NO: 45802 - protein, 527 aa, Homo sapiens
MRAEYTKRSIHIFGLQENHIVSGIGGFLVSPTSRMKPRTLALDLKVLQVPTRVRSPAGFTQWIRHLAAGGAACQSRAPLGGRWDWALSSRGRRSSGRLGRTGAHGGGGDAHAWWAVGSEPCPAGRLLRLGEKLSTAAAGPGGDDSNNNSCCRGRDSWLVVFIMKVHLPATSPRAKKIMVITVSGHFSLGSFTKTVIGKESDRVNSLQSLKLKKSNLPNLTNPRFTRREEKGEKGAQERIDSLRRTGVIHEKQTAVSVENFIAELLPDKITNTEKCLKELMKLKAKARELHEECRSLRSRRDQLEERVSVMEDEMNEMKREGKFREKRIKRNEQSLQEIWDYVKRPNLRLTGVPESDGENGTKLENTLQDIIQENFPNLARQANIQIQEIQRMPQRYSSRRATPRHIIIRFTKVEMKEKMLRAAREKGRVTHKGKPMRLTADLSAETLQARREWGPIFNILKEKNFQPRISYPAKLSFVSEGEIKYFTDKQMLRDFVTTRPALKELLKEALNMERNNWYQLLQNHAKM

SEQ ID NO: 45803 - protein, 99 aa, Homo sapiens
  misc_feature (1)...(99): Xaa = X or * as defined in Table 2
MHFGTEIALFPWSSQPTDPEDSLRCLHHQGPGFQAQNWAAIWADTELAAGXXXXXXXXXXXXXXYASGAWNTSKTKMFAPLERGLKPSSLARWVPPPQS

SEQ ID NO: 45804 - protein, 323 aa, Homo sapiens
MGKKQNRKTGNSKMQSASPPPKERSSSPATEQSWMENDFDELREEGFRRSNYSELREDIQTKGKEVENFEKNLEECITRITNTEKCLKELMELKTKARELQRVSAMEDEMNEMKREGKFREKRIKRNEQSLQEIWDYVKRPNLRLIGVPESDGENGTKLENTLQDIIQENFPNLARQANIQIQEILRIPQRYSSRRATPRHIIVRFTKVEMKEKMLRAAREKGRVTLKGKPIRLTVDLSAETLQARREWGPIFNILKEKNFQPRISYPAKLSFISEGEIKYFTDKQMLRDFVTTRPALQELLKEALNMERNNRYQPLQNHAKM

SEQ ID NO: 45805 - protein, 965 aa, Homo sapiens
  DOMAIN (380)..(421): kw TRANSCRIPTASE REVERSE II ORF2 domain identified by eMATRIX, accession number DM01354I, p-value=1.000e-40, raw score of 15.55
  DOMAIN (626)..(901): Reverse transcriptase domain identified by PFam, accession name rvt, E-value=1.1e-83, PFam score of 291.4
MGKKQSRKTGNSKNQSASPPPKERSSSPAMEQSWMENDFDDLREEGFRQSNYSELKEEVRTHGKEVKNLEKKLDEWLTRITNAEKSLKDLMELKTTARELHDECTSLKRVSVTEDQMNEMKREEKFREKRIKRNEQSLQEIWDYVKRPNLHLIGVPESDGENGTKLENTLQDIIQENFPNLVRQANIQIQEIQRTPQRYSSRRATPRHIIVRFTKVEMKEKMLRAAREKGRVTHKGKPIRLTADLLAETLQARREWGPIFNILKEKNFQPRISYPAKLSFIDRSTRQKVNKDTQELNSALHQADLIDIYRTLHPKSTEYTFFSAPHHTYSKIDHIVGSKALLSKCKRTEIITNCLSDHSAIKLELRIKKLTRDHSTTWKLNNLLLNDYWVHNEMKAEIKMFFETNENKDKTYQNLWDTFKTVCRGKFIALNAHKRKQERSKIDTLTSQLKGLEKQEQTHSKASRRQEITKIRAELKEIETQKTLQKINESRSWFFEKINKIDRPLARLIKNKREENQIDAIKNDKGDITTDPTEIQTAISEYYKHLYANKLENLEEMDKFLDTYTLPRLNQEEVESLNRPITGSEIEAIINSLPTKKSPGPDGFMAEFYQRDKEELVPFLLKLFQSIEKEGILPNSFYEASIMLIPKPGRDTTKKENFRPISLMNIDAKILNKILANRIQQHIKKLIHHDQVGFIPGMQGWFNLRKSLNVIQHINRTNDKNHMIISIDAEKAFDKIQQPFMLKTLNKLGIDGMYLKIIRAIYDRPTANIILNGQKLEAFPLKTGTRQGCPLSPLLFNIVLEVLARAIRQEKEIKGIQLGKEEVKLSLFADDMTVYLENAIVSAPNLLKLIGNFSKVSGYKINVQKSQAFLYTNNRQTESQIMSELPFRIASKRIKYLGIQLTRDVKDLFKQNYKPLLNEIKEDTNKWKNIPCSWVGRINIVKMAILPKKYKRSSETTMNTSIHSN

SEQ ID NO: 45806 - protein, 202 aa, Homo sapiens
  DOMAIN (74)..(118): Synapsins proteins domain identified by eMATRIX, accession number BL00415N, p-value=6.978e-09, raw score of 4.29
SPYENFQVALQAKPYCDFAILGKMNRDVAGFEDKGEDLKLRNTVASKNHTGKTGGGTRDPAWRRRSRRGPPGSPGAPPLEQPLPPASGPPRNPRDSRRRTDPGRVQRGPRTGEDAGGTVRAPGAPGPLRGLGGRRPAETAANGKVFLQKYLLGPRATHSQTGGRAGAEASSLCLTSSKRSMHDVSSGTVGTSWETSLKTSQR

SEQ ID NO: 45807 - protein, 65 aa, Homo sapiens
  misc_feature (1)...(65): Xaa = X or * as defined in Table 2
RSHALALDSAGSSSPESPHXRASIPHTALGQNAGSWAGTAHSHHGPFLWSDPRHPQVVPHRTCCP

SEQ ID NO: 45808 - protein, 40 aa, Homo sapiens
  misc_feature (1)...(40): Xaa = X or * as defined in Table 2
EFSTKPRLSGPXSSWEMLILEPLAPDTTIDLKLLYSDRDF

SEQ ID NO: 45809 - protein, 288 aa, Homo sapiens
  DOMAIN (151)..(200): Eukaryotic RNA polymerase II heptapeptide repeat proteins domain identified by eMATRIX, accession number BL00115Z, p-value= 1.000e-40, raw score of 3.12
LLANVSQLLADISQLLANFTQLFSHFSQLLTYLSKLFTHLPQLLTHFPKLLTHQPELFSNQSQLHPNITRYSPTSPSYSPTSPNYTPTSPNYSPTSPSYSPTSPSYSRDLTKLLPFQPTIHTTVSNLYPKLTQLQPQFAQLQPNLTQVPPTSPSYSPSSPEYTPTSPKYSPTSPKYSPTSPKYSPTSPTYSPTTPKYSPTSPTYSQPLQSTPQPLPSTHLLAPLTRPLPPSTRPPAPPTRPPPPKAQPTLPLPLVTRPPAPPTVSQARLSARMTVTRRTEGTWGAAAG

SEQ ID NO: 45810 - protein, 309 aa, Homo sapiens
  DOMAIN (54)..(103): Eukaryotic RNA polymerase II heptapeptide repeat proteins domain identified by eMATRIX, accession number BL00115N, p-value= 1.000e-40, raw score of 20.57
  DOMAIN (50)..(152): RNA polymerase alpha subunit domain identified by PFam, accession name RNA_pol_A, E-value=1.1e-32, PFam score of 92.3
SVVLRPLLVVAAATATTPVAAAAATNTAKKTATVMVGEMVAGERGVLQMGHDITRFFYSNIQTVINNWLLIEGHTIGIGDSIADSKTYQDIQNTIKKAKQDVIETFENQVPRILNDARDKTGSSAQKSLSEYNNFKSMVVSGAKGSKINISQGGGSQGGRGGPPISMWLLALCLVGLAGAQRGGGGPGGGAPGGPGLGLGSLGEERFPVVNTAYGRVRGVRRELNNEILGPVVQFLGVPYATPPLGARRFQPPEAPASWPGVRNATTLPPACPQNLHGALPAIMLPVWFTDNLEAAATYGGCFRVPKKA

SEQ ID NO: 45811 - protein, 162 aa, Homo sapiens
  misc_feature (1)...(162): Xaa = X or * as defined in Table 2
TNLQEKNKQPHQKVGKRYKQTLLKRRHLCSQQAHEKMLIITGHQRNANQNHNEIPSHTSXNGDHXKVRKQQMLERMWRNRNAFTLWVGVXTSSTIVEDSMAIPQGSRTRNTIXLSHPITGYIPKGLXIMLLXRHMHTYAYCGSIHNSKDLEPTQRSINDRLD

SEQ ID NO: 45812 - protein, 102 aa, Homo sapiens
MEYYAAIKKDEFMSLAGTWMKLETIIVSKLSQGQKTKHHMFSLIGVHLSRVGSLNSCSWIPPMHLGAGVGPELSQSATPPGVFLLDAEATEKEAAQRMNPGE

SEQ ID NO: 45813 - protein, 127 aa, Homo sapiens
  misc_feature (1)...(127): Xaa = X or * as defined in Table 2
LPPPHDRLWCVMFPTLCPSVLIVQFPPMSENMRCLVFCPCNSLLRMMVSSFIHVPTKDMNSGILXSRPADIELFSINLVNKKIFLKGKFGDPLSLQRQLRNIVFSMPCCFPSFLLPWVFSQLSVKPH

SEQ ID NO: 45814 - protein, 48 aa, Homo sapiens
  DOMAIN (12)..(48): Synapsin domain identified by PFam, accession name Synapsin, E-value=3.8e-11, PFam score of 44.8
DPAFLAPSPVLMKQAPQATSGLMEPPGPSTPIVQRPRILLVIDDAHTD

SEQ ID NO: 45815 - protein, 279 aa, Homo sapiens
  DOMAIN (213)..(246): ESICULAR LUMEN DOMAIN domain identified by eMATRIX, accession number DM01292C, p-value=4.672e-09, raw score of 12.45
MGKDFMSKTPKAMATKAKIDKWDLIKLKSFCTAKETTIRVNRQPTEWEKIFATYSSDKGLISRIYKELKQIYKKKTNNPIKKWAKDINGHFSKEDIYAGKKHMQKCSSSLVIREMQVKTTMRYHLMPVRMVIIKKLGNNRDMDEAGNHHSEQAITRTENQTPHVLTHSQAPCMKSNNALIVILGTVTLDAVGIGLVMPVLPGLLRDIVHSDSIASHYGVLLALYALMQFLCAPVLGALSDRFGRRPVLLASLLGATIDYAIMATTPVLWIYPLVNSPSC

SEQ ID NO: 45816 - protein, 297 aa, Homo sapiens; identical to SEQ ID NO: 42448
  DOMAIN (156)..(205): kw TRANSCRIPTASE REVERSE II ORF2 domain identified by eMATRIX, accession number DM01354Z, p-value=8.742e-13, raw score of 9.06
  DOMAIN (13)..(294): Protein of unknown function UPF0096 domain identified by PFam, accession name UPF0096, E-value=2.4e-12, PFam score of 54.4

SEQ ID NO: 45817 - protein, 1148 aa, Homo sapiens
  DOMAIN (223)..(266): kw TRANSCRIPTASE REVERSE II ORF2 domain identified by eMATRIX, accession number DM01354T, p-value=1.000e-40, raw score of 9.48
  DOMAIN (7)..(156): RNA polymerase alpha subunit domain identified by PFam, accession name RNA_pol_A, E-value=6.7e-96, PFam score of 270.1
  misc_feature (1)...(1148): Xaa = X or * as defined in Table 2
MYSHVITVCRHVKNGDILLLNRQPTLHRPSIQAHRARILPEEKVLRLHYANCKAYNADFDGDEMNAHFPQSELGRAEAYVLACTDQQYLVPKDGQPLAGLIQDHMVSGASMTTRGCFFTREHYMELVYRGLTDKVGRVKLLSPSILKPFPLWTGKQHINRTKDKNHMIISIDAEKAFDKIQQPFMLKTLNKLGIDGTYLKIIRAIYDKPTASIILNGQKLEAFPLKTGTRQGCPLSPLLFNIVLEVLARAIRQEKEIKSIQLGKEEVKLSLFADDMIVYLENPTVSAQNLLKLMSNFSKVSGYKINVQKSQAFLYTNNRQTESQIMSGLPFTITSKRITYLGIQLTRDVKDLFKENYKPLLKEIKEDTNKWKNIPCSWVGRINIVKMAILPKVIYRFNTIPIKLPMTFLTELEKTTLKFIWNQKRAHIAKSILSQKNKAGGIMLPDFKLYYKATVTKTAWYWYQNRDIDQWNRTEPSEIMPHIYNYLIFDKPDKNKQWGKDSLFNKWCWENWLAICRKLKLDPFLTPYTKINSRWIKDLHVRPKTIKTLEENLGNTIQDIGMGKDFMSKTPKAMATKAKIDKWDLIKLKSFCTAKETTIRVNRQPTEWEKIFATYSSDKGLISRIYNELKQIYKKKTNNPIKKWAKDMNRHFSEEDIYAAKKHMKKCSSSLAIREMQIKTTMRYHLTPVRMVIIKKSGNNRCWRGCGEIGTLLHCWWDCKLVQPLWKSVWQFLRDLELEIPFDPAIPLLGIYPEDYKPCCYKDTCTRMFIAALFTIAKTWNQPKCPTMIDGIKKMWHIYTMEYYAAIKKDEFMSFVGTWMKLETIILSKLSQGQKTKHRMFSLIVRTLSCRSVGVYSKSTPDPVCLSISSSGCRTADISVSQMLLPDCSSGSFVSEEYPKVMSGHKEDEEGSGHRLAWMMPSVKESHWGLLFSKERTSHFDQHDLGDVTLHQSEPEDDARETYLRRGVLGPGEAFGALTSTCHTTCRAAFNKVQSSGSVQAKGVDTERRLRTQTLETXEMSPYTSQNPRTMPERHTLEEVFWGLERHLVPSHLPAIPHAGQPLTKSNPQGLSKQRGWTQRGDXGPGEAFGALTSTCHTTCRAAFNKVQSSGSVQAKGVDTERRLRTQTLETPAWLQIPVPRLDDYVFG

SEQ ID NO: 45818 - protein, 258 aa, Homo sapiens
  DOMAIN (11)..(174): RNA recognition motif. domain identified by PFam, accession name rrm, E-value=1.1e-22, PFam score of 88.7
IPMKDHDAIKLFIGQIPRNLDEKDLKPLFEEFGKIYELTVLKDRFTGMHKGCAFLTYCERESALKAQSALHEQKTLPGMNRPIQVKPADSESRGEDKKLFVGMLNKQQSEDDVRRLFEAFGNIEECTILRGPERQTAKGCAFVKYSSHAEAAGRPSTRLHGSQTMPGAFVPVWVGQVSADTDKERTMRRMQQMAGQMGMFNPMAIPFGAYGAYAQALMQQQAALMASVAQGGYLNPMAAFAAAQMQQMAALNMNGLAA

SEQ ID NO: 45819 - protein, 470 aa, Homo sapiens
  DOMAIN (306)..(385): RNA recognition motif. domain identified by PFam, accession name rrm, E-value=1.6e-05, PFam score of 31.8
MEYYAAIKKDEFISFVGTWMKLETIILSKLSQMQKTKHRIFSLIVLCDITDILKEFTVAEAGGFALNEIMKEICKSRFSAKVSLHWKMWHSTASLGYHRVNVTNPDPLNLCLGHCWLGLRDTGQKQACGGPGVCPGMFRRACGGNAPCKEAPSVTEASSPDGSVLCLGSHVPITPAPLSSAQMVCHMVEDRRTVELILGATHNLFFSTSPLTWSLRAIPGNCVLFLKDYVTEPVRSQSILHIAGPTFKQTPNLPFLKFPEATKAHGPNVYQNDSTCPEPTAQVSHWSSVSSTLIASPVPGPEDRKLFVGMLNKQQSEDDVRRLFEAFGNIEECTILRGPDGNSKARPLASSQGAPSVKYSSHAEAQAAINALHGSQTMPLMQQQAALMASVAQGGYLNPMAAFAAAQMQQMAALNPNGLAAAPMTPTQANGQPAAEEIFANGIHPYPAQSPTAADPLQQAYAGVQQYAGR

SEQ ID NO: 45820 - protein, 210 aa, Homo sapiens
  misc_feature (1)...(210): Xaa = X or * as defined in Table 2
DLRKDSPWEHRQCDKREPGNSAPPAPHSWGFAVFNPRAGDVRQLCKRADTRTPSPRAPFGSAGACRGCGRAGARSLASPKARTCISSARRRAGGPLQLGAGSGQAKRPDRXTRREGANAXKTLHLHSSLAPSPGGVLAGFQEPPGRPQVACCAATAAGGIRAGERRPAAAAAAAPWAQKLRRLRLQRRGPPGCRXXMVSFPRLFSGSTSR

SEQ ID NO: 45821 - protein, 255 aa, Homo sapiens
MCDFGKSTSLPASPTSSSANGRDNSTYRLKEQGGFMHSVASRDSCAESARYTDAHYAKSGYGAYTPSSYGANLAASLLEKEKLGFKPVPTSSFLTRPRTYGPSSLLDYDRGRPLLRPDITGGGKRAESQTRGTERPLGSGLSGGSGFPYGVTNNCLSYLPINAYDQGVTLTQKLDSQSDLARDFSSLRTSDSYRIDPRNLGRSPMLARTRKELCTLQGLYQTASCPEYLVDYLENYGRKGSASQVPSQAPPSRVP

SEQ ID NO: 45822 - protein, 721 aa, Homo sapiens
SAEAMSGDGATEQAAEYVPEKVKKAEKKLEENPYDLDAWSILIREAQNQPIDKARKTYERLVAQFPSSGRFWKLYIEAEIKAKNYDKGEKLFQRCLMKVLHIDLWKCYLSYVRETKGKLPSYKGKMAQAYDFALDKIGMEIMSYQIWVDYINFLKGVEAVGSYAENQRITAVRRVYQRGCVNPMINIEQLWRDYNKYEEGINIHLAKKMIEDRSRDYMNARRVAKEYETVMKGLDRNAPSVPPQNTPQEAQQVDMWKKYIQWEKSNPLRTEDQTLITKRVMFAYEQCLLVLGHHPDIWYEAAQYLEQSSKLLAEKGDMNNAKLFSDEAANIYERAISTLLKKNMLLYFAYADYEESRMKYEKVHSIYNRLLAIEDIDPTLVYIQYMKFARRAEGIKSGRMIFKKAREDTRTRHHVYVTAALMEYYCSKDKSVAFKIFELGLKKYGDIPEYVLAYIDYLSHLNEDNNTRVLFERVLTSGSLPPEKSGEIWARFLAFESNIGDLASILKVEKRRFTAFKEEYEGKETALLVDRYKFMDLYPCSASELKALGYKDVSRAKLAAIIPDPVVAPSIVPVLKDEVDRKPEYPKPDTQQMIPFQPRHLAPPGLHPVPGGVFPVPPAAVVLMKLLPPPICFQGPFVQVDELMEIFRRCKIPNTVEEAVRIITGGAPELAVEGNGPVESNAVLTKAVKRPNEDSDEDEEKGAVVPPVHDIYRARQQKRIR

SEQ ID NO: 45823 - protein, 137 aa, Homo sapiens
  misc_feature (1)...(137): Xaa = X or * as defined in Table 2
SAEAMSGDGATEQAAEYVPEKVKKAEKKLEENPYDLDAWSILIREAQVXXYRITFPSLWVQSHYLVLPVNNIFIILTLXMLFIGFQFXNQPIDKARKTYERLVAQFPSSGRFWKLYIEAEVTILFYFFLYQYCSIHL

SEQ ID NO: 45824 - protein, 106 aa, Homo sapiens
SAEAMSGDGATEQAAEYVPEKVKKAEKELEENPYDLDAWSILIREAQNQPIDKARKTYERLVAQFPSSGRFWKLYIEAEVTILFYFIFSYISIAAFTVVIENKLGT

SEQ ID NO: 45825 - protein, 278 aa, Homo sapiens
  DOMAIN (173)..(228): Actins proteins domain identified by eMATRIX, accession number BL00406D, p-value=1.000e-40, raw score of 12.58
  DOMAIN (1)..(278): Actin domain identified by PFam, accession name actin, E- value=7.4e-155, PFam score of 509.4
MDDDIAALVVDNSSGMCKAGFAGDDVPWAIFPSIVGCTRHQVMMLHVAPEEHPVLLTEAPLNPKANCEKMTQIMFETFNTPAMYVAIQAMLSLYASVRTAHVQGLHTTAEREIVRDIKKLCYVALDFEREMAMVASSSSLEKSYKLLDGQVITIGNERFHCPEALFQPSFLGMESCGIHKTTFNYIMKCDVDICKDLYTNTVLSGGTTMYPGITNRMQKKITALAPSMMKIKIIAPPERKYSVWISGSILASLSTFQQMWISKQKYDQSGPSIVHECF

SEQ ID NO: 45826 - protein, 96 aa, Homo sapiens
  DOMAIN (32)..(87): Actins proteins domain identified by eMATRIX, accession number BL00406D, p-value=3.032e-39, raw score of 12.58
  DOMAIN (26)..(96): Actin domain identified by PFam, accession name actin, E- value=5.7e-32, PFam score of 106.2
SFMRWQKGQLPQLCLHRESHCSPYPQPSFLGMEPADIHETTFNSIMKCDVDIHKGLYANAVLSSGTTMYPGIANRMQKEITALAPSMMKIKIIAPA

SEQ ID NO: 45827 - protein, 401 aa, Homo sapiens
  DOMAIN (7)..(42): Actins proteins domain identified by eMATRIX, accession number BL00406A, p-value=1.000e-40, raw score of 9.95
  DOMAIN (1)..(388): Actin domain identified by PFam, accession name actin, E- value=3.6e-216, PFam score of 710.6
MEEEIAALVIDNGSGMCKAGFAGDDAPRAVFPSIVGRPRHQGVMVGMGQKDSYVGDEAQSKRGILTLKYPIEHGIVTNWDDMEKIWHHTFYNELRVAPEEHPVLLTEAPLNPKANREKMTQIMFETFNTPAMYVAIQAVLSLYASGRTTGIVMDSGDGVTHTVPIYEGYALPHAILRLDLAGRDLTDYLMKILTERGYSFTTTAEREIVRDIKEKLCYVALDFEQEMATAASSSSLEKSYELPDSPRSSTNWQLSGFRLPLRHSFQPSFLGMESCGIHETTFNSIMKCDVDIRKDLYANTVLSGRTPPCTLGIADRMQKEITALAPSTMKIKIIAPPERKYSVWIGGFHPWAWLSHLSSKMWVQQARSMTESGPLHSSTANGFLGGLLTLVAFTPFLWTKP

SEQ ID NO: 45828 - protein, 784 aa, Homo sapiens
  DOMAIN (142)..(160): 5-HYDROXYTRYPTAMINE 1B RECEPTOR SIGNATURE domain identified by eMATRIX, accession number PR00513D, p-value=7.319e-09, raw score of 11.06
  DOMAIN (343)..(604): HlyD family secretion protein domain identified by PFam, accession name HlyD, E-value=0.0024, PFam score of 14.9
  misc_feature (1)...(784): Xaa = X or * as defined in Table 2
MKQITFAPRNHLLTNTNTWTPDSQWLVFDMRTSGASFTGETIERVNIPTGYVEKPNKQCRHSVTRYGHGGHSDHTPSLTVATVATQITPRHSGHGSHCDRNLSLATATAATLITPHHLLWPRWPLGSHSVTWCGHGGHSDHTPSPTTATAVTRITSRHPLRPQQSLGSHPVTHYSHGSHSDCIPVTRYAHGGHSDHTPSLAMATAATQMALCHSLWPRQPLGYLVNKIRRKRCTDGVSPSGKAPVFDTGIPWFESRYPSHLLRVSGSPPGYWGIAKRHQILNVSNMFGKFKTNLLGYRQAVRHRILIPAFRGSNPRTPANLFKTLTLISNMRALENDFFNSPPRKTVQFGGTVTEVLLKYKTAIEKRLEKLAVDPHRDRAQMLKVENVQQAWQQWINKLPPARREDEDVKEIRWMIEELRVSYFAQQLGKNSRAESMLWSFHKAAIEAARTNIIQAQTRVEAAQATERRIAADIDDSELKAPRDGRVQYRVAKPGEVLAAGGRVLNMVDLSDVYMTFFLPTEQAGTLKLGGEARLILDAAPDLRIPATISFVASVAQFTPKTVETSDERLKLMFRVKARIPPELLQQHLEYVKTGLPGVAWSFLYSINQTICLRLDSIEAKLQALEATCKSLEEKLDLVTNKQHSPIQVPMVAGSPLRTTQMCNKVRCVNPXATVVPPPVPQPTTQQYQGLDAGATTRVPRSLLRSEGSQTQKSPSCGSHSQDNSGGRKAVGARRDRWWLGAGKGPDCRGAKCGLPLSGQKCPTLDPYQVVGCTSKTGEPYVCT

SEQ ID NO: 45829 - protein, 318 aa, Homo sapiens
MSSGRRDALARGLGNSGDGAPHLGEHRQLEDVGGVTVTVTWTGRLQAAGCWTRSVSSTAAAGRREPSTRDGAALSTEPPDPPERLGHRGSRAGLTALGHVRTRGSSQRGGRPEPWEHWLENGTRRTELVDGVSYESWRRRPCRGQLESRLVLENHVATDEDEPALKCQRLEINCQDPSIKSFLYSINQTICLRLDSIEAKLQALEATCKSLEEKLDLVTNKQHSPIQVPMVAGSPLRTTQMCNKVRCAMHWLCVSCIFTCLPGWRPAAPDQGPAAISLCSLPSSSQGHREPLALGLPSALPPAHRQRLRGSATVPIPP

SEQ ID NO: 45830 - protein, 218 aa, Homo sapiens
  DOMAIN (43)..(103): Zinc finger, C3HC4 type (RING finger) domain identified by PFam, accession name zf-C3HC4, E-value=2.1e-05, PFam score of 21.8
MQMPKPSRVQQALAEATPKPEPEPEQVIKNYTEELKVPPDEDCIICMEKLSTASGYSDVTDSKAIGSLAVGHLTKCSHAFHLLCLLAMYCNGNKDGSLQCPSCKTIYGEKTGTQPQGKMEVLRFQMSLPGHEDCGTILIVYSIPHELLKVAWKRRLIFTVGTSSTTGETDTVVWNEIHHKTEMDRNITGHGYPDPNYLQNVLAELAAQGVTEDCLEQQ

SEQ ID NO: 45831 - protein, 274 aa, Homo sapiens
GGFLHHASFFVGRGRTLLMYFSLLGATPKPEPEPEQVIKNYTEELKVPPDEDCIICMEKLSAASGYSDVTDSKAVGPLAVGCLTKCSHAFHLLCLLAMYCNGNKGPEHPNPGKPFTARGFPASATFQTTPGPQELVPYTPQITAWDLEGKVTATTFSLEQPRCVFDGLASTNDTVWLVVAFSNASRGFQNPETLADIPASPQLLTDGHYMTLPVSPDQLPCDDPMAGSGGAPVLRVGHDHGCHQQPFCNAPLPGPGPYRWVVPTGALGLGLCLG

SEQ ID NO: 45832 - protein, 182 aa, Homo sapiens
GSSAGEASSSLRRLSPSQPISRPLLPAGEKVLVVWIEDQTSHNIPLSQQSKTTLFNSMKAERGKEVTEEKLEARRGWFMRFKERSCFPNVKVQGEAANADIEAVACYPEYLAKITDEGGYTEQQIFSVDETALYWKKMPSRTFLARRKNCHSHPSFSSQHLVQSAAINIKAKSSTSKKIMTP

SEQ ID NO: 45833 - protein, 35 aa, Homo sapiens
FLNKLAFALRCGLALNSFLRKIQEPSLGSKSGSLS

SEQ ID NO: 45834 - protein, 139 aa, Homo sapiens
LWLLQEVGYCRDLSHIAALFLLYLPEEDAFWALVQLLASERHSLQGFHSPNGGTVQGLQDQQEHVVATSQPKTMGHQDKKDLCGQCSPLGCLIRILIDGISLGLTLRLWDVYLVEGEQALMPITRIAFKVQQKRLTKTS

SEQ ID NO: 45835 - protein, 294 aa, Homo sapiens
  DOMAIN (35)..(201): TBC domain identified by PFam, accession name TBC, E-value= 0.00058, PFam score of -46.4
QQMQQEMRRKSKWMAMLGKWETYQNSTKGHLMKRVYKGIPMNVRAEVWSVLLNIQEIKAKNPRQYRVMKEKGKRSSEHIHQIDLAVSQTLRNHMFFRDRYGTKQQELFYILLAYSKYNPVVGYCRDLSHIAALFLLYLPEEDTFWALVQLLASERHSCRVGEQLPLGLHAARPGDGHPGQPRHLPCVASLLGAFRTSLLTVPKEPGTDPPEPKSDAFHPHQQKASHPPRGCPLCPGATPSGSDSVQLALRNLRVLLPFSCSGSSCPWYPRKEALHPGGLEEQRGLQPLMGLVTG

SEQ ID NO: 45836 - protein, 108 aa, Homo sapiens
  misc_feature (1)...(108): Xaa = X or * as defined in Table 2
ALAAAVYPSHSERTGEEAKKICSVRXLLRSAQEEIFLRGKNSRTGVLXKLLQRKXRYQRALGLAMLSEWTISPKGPVSTGITKPMLTASRVTVPRMTMSALLDFIHGA

SEQ ID NO: 45837 - protein, 2129 aa, Homo sapiens
  DOMAIN (1925)..(1956): Protein kinases ATP-binding region proteins domain identified by eMATRIX, accession number BL00107A, p-value=3.842e-18, raw score of 18.39
  DOMAIN (553)..(2069): Eukaryotic protein kinase domain identified by PFam, accession name pkinase, E-value=1.4e-126, PFam score of 433.9
MANDLPHSNSGDGQKPSSPDLFTAPLLADPTVGFLPNDAEELFIFLTEITEITIPCRVTDPQLVVTLHEKKGDVALPVPYDHQRGFSGIFEDRSYICKTTIGDREVDSDAYYVYRLQVSSINVSVNAVQTVVRQGENITLMCIVIGNEVVNFEWTYPRKEVMWGQAGVGGGARNGWISGLQADFSPAPPDLGGLPNLLLQSGRLVEPVTDFLLDMPYHIRSILHIPSAELEDSGTYTCNVTESVNDHQDEKAINITVVESGYVRLLGEVGTLQFAELHRSRTLQVVFEAYPPPTVLWFKDNRTLGDSSAGEIALSTRNVSETRYVSELTLVRVKVAEAGHYTMRAFHEDAEVQLSFQLQINVPVRVLELSESHPDSGEQTVRCRGRGMPQPNIIWSACRDLKRCPRELPPTLLGNSSEEESQLETNVTYWEEEQEFEVVSTLRLQHVDRPLSVRCTLRNAVGQDTQEVIVVPHSLPFKVVVISAILALVVLTIISLIILIMLWQKKPRYEIRWKVIESVSSDGHEYIYVDPMQLPYDSTWELPRDQLVLATARSSEKQALMSELKIMSHLGPHLNVVNLLGACTKGGPIYIITEYCRYGDLVDYLHRNKHTFLQHHSDKRRPPSAELYSNALPVGLPLPSHVSLTGESDGGYMDMSKDESVDYVPMLDMKGDVKYADIESSNYMAPYDNYVPSAPERTCRATLINESPVLSYMDLVGFSYQVANGMEFLASKNVRVVLVGQSGGCGECVHRDLAARNVLICEGKLVKICDFGLARDIMRDSNYISKGSTFLPLKWMAPESIFNSLYTTLSDVWSFGILLWEIFTLGGTPYPELPMNEQFYNAIKRGYRMAQPAHASDEIYEIMQKCWEEKFEIRPPFSQLVLLLERLLGEGYKKARLPGFHGLRSPLDTSSVLYTAVQPNEGDNDYIIPLPDPKPEVADEGPLEGSPSLASSTLNEVNTSSTISCDSPLEPQDEPEPEPQLELQARIEAGVLCDRQLLEPRFQVQVSHDQAPGRRRADRVSKSVRARSEEKVEKREEEEEEEERKRRELRPGEKCQETQGATRDYKTGTQSGKGRLMGQVEAEVCGTGRRSVGVYAGAASVQYSREGGWREKRQRSDCKGPCQGIPVIEPSVPELVVKPGATVTLRCVGNGSVEWDGPPSPHWTLYSDGSSSILSTNNATFQNTGTYRCTEPGDPLGGSAAIHLYVKDPARPWNVLAQEVVVFEDQDALLPCLLTDPVLEAGVSLVRVRGRPLMRHTNYSFSPWHGFTIHRAKFIQSQDYQCSALMGGRKVMSITIRLKVQKREESNISIMFREPGCSGVSPPVSVIPGPPALTLVPAELVRIRGEAAQIVCSASSVDVNFDVFLQHNNTKLAIPQQSDFHNNRYQKVLTLNLDQVDFQHAGNYSCVASNVQGKHSTSMFFRVVESAYLNLSSEQNLIQEVTVGEGLNLKVMVEAYPGLQGFNWTYLGPFSDHQPEPKLANATTKDTYRHTFTLSLPRLKPSEAGRYSFLARNPGGWRALTFELTLRYPPEVSVIWTFINGSGTLLCAASGYPQPNVTWLQCSGHTDRCDEAQVLQVWDDPYPEVLSQEPFHKVTVQSLLTVETLEHNQTYECRAHNSVGSGSWAFIPISAGAHTHPPDEFLFTPVVVACMSIMALLLLLLLLLLYKYKQKPKYQVRWKIIESYEGNSYTFIDPTQLPYNEKWEFPRNNLQFGPVGVAGSPWALGQRPFGAQGLKGPVCVAGKTLGAGAFGKVVEATAFGLGKEDAVLKVAVKMLKSTAHADEKEALMSELKIMSHLGQHENIVNLLGACTHGGPVLVITEYCCYGDLLNFLRRKAEAMLGPSLSPGQDPEGGVDYKNIHLEKKYVRRDSGFSSQGVDTYVEMRPVSTSSNDSFSEQDLDKEDGRPLELRDLLHFSSQVAQGMAFLASKNCIHRDVAARNVLLTNGHVAKIGDFGLARDIMNDSNYIVKGNARLPVKWMAPESIFDCVYTVQSDVWSYGILLWEIFSLGLNPYPGILVNSKFYKLVKDGYQMAQPAFAPKNIYSIMQACWALEPTHRPTFQQICSFLQEQAQEDRRERDYTNLPSSSRSGGSGSSSSELEEESSSEHLTCCEQGDIAQPLLQPNNYQFC

SEQ ID NO: 45838 - protein, 1055 aa, Homo sapiens
  DOMAIN (657)..(706): Receptor tyrosine kinase class III proteins domain identified by eMATRIX, accession number BL00240C, p-value=1.000e-40, raw score of 22.58
  DOMAIN (665)..(995): Eukaryotic protein kinase domain identified by PFam, accession name pkinase, E-value=2.1e-68, PFam score of 240.7
GEGGEERRGRGRGREEAEGTAARLKGEEEDQPKEEEEENKTNSQCRGEERVSSVPIPAELVAESSVPWAPCSPAPACHFPTEAMGPGVLLLLLVATAWHGQGIPVIEPSVPELVVKPGATVTLRCVGNGSVEWDGPASPHWTLYSDGSSSILSTNNATFQNTGTYRCTEPGDPLGGSAAIHLYVKDPARPWNVLAQEVVVFEDQDALLPCLLTDPVLEAGVSLVRVRGRPLMRHTNYSFSPWHGFTIHRAKFIQSQDYQCSALMGGRKVMSISIRLKVQKVIPGPPALTLVPAELVRIRGEAAQIVCSASSVDVNFDVFLQHNNTKLAIPQQSDFHNNRYQKVLTLNLDQVDFQHAGNYSCVASNVQGKHSTSMFFRVVESAYLNLSSEQNLIQEVTVGEGLNLKVMVEAYPGLQGFNWTYLGPFSDHQPEPKLANATTKDTYRHTFTLSLPRLKPSEAGRYSFLARNPGGWRALTFELTLRYPPEVSVIWTFINGSGTLLCAASGYPQPNVTWLQCSGHTDRCDEAQVLQVWDDPYPEVLSQEPFHKVTVQSLLTVETLEHNQTYECRAHNSVGSGSWAFIPISAGAHTHPPDEFLFTPVVVACMSIMALLLLLLLLLLYKYKQKPKYQVRWKIIESYEGNSYTFIDPTQLPYNEKWEFPRNNLQFGKTLGAGAFGKVVEATAFGLGKEDAVLKVAVKMLKSTAHADEKEALMSELKIMSHLGQHENIVNLLGACTHGGPVLVITEYCCYGDLLNFLRRKAEAMLGPSLSPGQDPEGGVDYKNIHLEKKYVRRDSGFSSQGVDTYVEMRPVSTSSNDSFSEQDLDKEDGRPLELRDLLHFSSQVAQGMAFLASKNCIHRDVAARNVLLTNGHVAKIGDFGLARDIMNDSNYIVKGNARLPVKWMAPESIFDCVYTVQSDVWSYGILLWEIFSLGLNPYPGILVNSKFYKLVKDGYQMAQPAFAPKNIYSIMQACWALEPTHRPTFQQICSFLQEQAQEDRRERDYTNLPSSSRSGGSGSSSSELEEESSSEHLTCCEQGDIAQPLLQPNNYQFC

SEQ ID NO: 45839 - protein, 137 aa, Homo sapiens
  misc_feature (1)...(137): Xaa = X or * as defined in Table 2
GSVESPLGQKTPRTSSASPCWPSTNLYRMELELYGPHVTSQVVKSTRCAPIRWSAAPSILCEVRVPVTMWTCLPLPATGRLSMWXIWPRQWPCVLTSATQSXLTRCGGGTRAVSLAPQSHLXVCPAQSSWTSIILWT

SEQ ID NO: 45840 - protein, 128 aa, Homo sapiens
RVQDIPAKRGIPQFRPKIKGIGQSYKQHYPARPWNVLAQKVVVFEDQDALLPCLLTDPVLEAGVSLVRVRGRPLMRHTNYSFSPWHGFTIHRAKFIQSQDYQCSALMGGRKVMSISIRLKVQKAVNRA

SEQ ID NO: 45841 - protein, 87 aa, Homo sapiens
PTPKVELEFWKSRYEDLKYIYNQLRTITVRGMAKLLDKLQSSYFPAFKAMYRDVVADGTAISWPFEHQTRSTLIKIAKPAKSMIRSR

SEQ ID NO: 45842 - protein, 39 aa, Homo sapiens
KHILTYGTEEQRGDFTRKREKTHSAPRNGEGVLKKFTYF

SEQ ID NO: 45843 - protein, 1405 aa, Homo sapiens
MRLAEERAALAAENADGEPGADRRLRLLGTYVAMSLRPAAGAWERCAGSAEAEQLLQAFLGRDAAEGPRPLLVVRPGPRGLAIRPGLEVGPESGLAGAKALFFLRTGPEPPGPDSFRGAVVCGDLPAAPLEHLAALFSEVVLPVLANEKNRLNWPHMICEDVRRHAHSLQCDLSVILEQVKGKTLLPLPAGSEKMEFADSKSETVLDSIDKSVIYAIESAVIKWSYQVQVVLKRESSQPLLQGENPTPKVELEFWKSRYDDLTYIYNQLRTITVRGMAKLLDKLQSSYFPAFKAMYRDVVAGPCEIIQVEELIDLTQQCSWSCPFVSFKHWGQDIQFWGGHYGACVTNSRVVISILHFLFLLSDGTAISWPFEHQTRSTLIKIAKPAKSMIRTLAEAQDIHVHLIPLQRHLEALENAEFPEVKPQLRPLLHVVCLIWATCKSYRSPGRLTVLLQEICNLLIQQASNYLSPEDLLRSEVEESQRKLQVVSDTLSFFKQEFQDRRENLHTYFKENQEVKEWDFQSSLVFVRLDGFLGQLHVVEGLLKTALDFHKLGKVEFSGVRGNALSQQVQQMHEEFQEMYRLLSGSSSDCLYLQSTDFENDVSEFNQKVEDLDRRLGTIFIQAFDDAPGLEHAFKLLDIAGNLLERPLVARDTSDKYLVLIQMFNKDLDAVRMIYSQHVQEEAELGFSPVHKNMPTVAGGLRWAQELRQRIQGPFSNFGRITHPITLENLLKMHIPGPHLSLAESESGVGCESAPSASSSCDSDGDQEFIEILSGTALMRKGGETDRAEKEVELLSCKKVAMGVSAGPPGSLGPSELFCLRTPTSADHDQAPVSWEGAYEVAVVSDPCRYETRLYEDWCRTVSEKSQYNLSQPLLKRDPETKEITINFNPQLISVLKEMSYLEPREMKHMPETAAAMFSSRDFYRQLVANLELMANWYNKVMKTLLEVEFPLVEEELQNIDLRLRAAEETLNWKTEGICDYVTEITSSIHDLEQRIQKTKDNVEEIQNIMKTWVTPIFKTKDGKRESLLSLDDRHDRMEKYYNLIKESGLKIHALVQVDLDGIPDLANMRRTLMERVQRMMGLCCGYQSTFSQYSYLYVEDRKEVLGQFLLYGHILTPEEIEDHVEDGIPENPPLLSQFKVQIDSYETLYEEVCRLEPIKVFDGWMKIDIRPFKASLLNIIKRWSLLFKQHLVDHVTHSLANLDAFIKKSESGLLKKVEKGDFQGLVEIMGHLMAVKERQSNTDEMFEPLKQTIELLKTYEQELPETVFKQLEELPEKWNNIKKVAITVKQQVAPLQANEVTLLRQRCTAFDAEQQQFWEQFHKEAPFRYGPNTAASLSVNTAVFESWIIFLWGGFPPVVKRSASGPLLSINGSNQEAKLELNGPTSADVPARLGALCPNAPAL

SEQ ID NO: 45844 - protein, 156 aa, Homo sapiens
  misc_feature (1)...(156): Xaa = X or * as defined in Table 2
RPGCGEWLGNAELWGQECQLHYSPPVSPWENSSGPRFSISKTGSLIPPLLNDICQNQKPQIILSHPARCLGLLDHFPQQWERRQAQNRAETGXGQRSAQGQTFRQRPLSVSGNCRVPPRATVSRKPRPAPAYALSLKSPRRRPPRTGPAPPGLVPC

SEQ ID NO: 45845 - protein, 414 aa, Homo sapiens
  DOMAIN (256)..(297): B-box zinc finger domain identified by PFam, accession name zf-B_box, E-value=0.0033, PFam score of 24.1
MLELCRPPENLSYKRQIPLPGSSFNTLALKRKQRIQQPSNNPTFPDSDFREAWGESLLLQVPKPVSSVQGPSLDCWTVSMDSERFNIKRYKEPSSFFSGTHRVALELAVKMSESYYRYMEETKFLPAATCWELSQQEDFKTNILSEDLVSVARKPVSANSEPNEQCVGSTGRQRDIGESPQSSFATGFGDFRKLPALHCETLIPELNSSDSTASFGENIDIFLREPSPKMDFKTNILLKNLVTIARKASLWQFLSSEKQICGTHRQTKKMFCDMDKSLLCLLCSNSQEHGAHKHHPIEEAAEEHREKLLKQMRILWKKIQENQRNLYEEGRTAFLWRGNVVLRAQMIRNEYRKLHPVLHKEEKQHLERLNKEYQEIFQQLQRSWVKMDQKSKHLKEMYQELMEMCHKPDVELLQ

SEQ ID NO: 45846 - protein, 369 aa, Homo sapiens
  DOMAIN (60)..(69): Zinc finger C3HC4 type (RING finger), proteins. domain identified by eMATRIX, accession number BL00518, p-value=2.800e-11, raw score of 12.23
  DOMAIN (118)..(159): B-box zinc finger domain identified by PFam, accession name zf-B_box, E-value=0.00065, PFam score of 26.4
VDLPPGAPVRQSGSHGSVLRDHKTEGEARVLPLHQRVGKAGGRGATPGPHVHEDPVTICCGHSFCRPCICLSWEEAQSPANCRACREPSQKKDFKTNILLKNLVTIARKASLWQFLSSEKQICGTHRQTKKMFCDMDKSLLCLLCSNSQEHGAHKHYPIEEAAEEHREKLLKQMRILWKKIQENQRDLYEERRTAFLWRKRTLRLKGMTSGAQGTSQKVALGLLQQPLCHTVRAQSNSARVHKQRGGDAVSSGAGIPDPKAQRFPATLRSQAFTCTAGRRWGSGETVLHPLQRAGVRGAVAELHRQLLLSSSAAGFEECEGLCTSGPHITQGPDHQELYLSHEGVWTLFTCTGDRWKVLSGVPCPDFYL

SEQ ID NO: 45847 - protein, 898 aa, Homo sapiens
MRMAATAWAGLQGPPLPTLCPAVRTGLYCRDQAHAERATDVVLLAPFCQPKTRSHGTCPPTERDPRGEGSTEYPGRVDGIQGWGTRALTGWTDRRLLCQACQTLPPRHWFLPGARGWLGGSPCAHGQESLPSQPSPILLRVESVKSRMLRRRAQEEDSTVLIDVSPPEAEKRGSYGSTAHASEPGGQQAAACRAGSPAKPRIADFVLVWEEDLKLDRQQDSAARDRTDMHRTWRETFLDNLRAAGLCVDQQDVQDGNTTVHYALLSASWAVLCYYAEDLRLKLPLQDYPTRPPTGRPACCAWLGIPNVLLEVVPDVPPEYYSCRFRVNKLPRFLGSDNQDTFFTSTKRHQILFEILAKTPYGHEKKNLLGIHQLLAEGVLSAAFPLHDGPFKTPPEGPQAPRLNQRQVLFQHWARWGKWNKYQPLDHVRRYFGEKVALYFAWLGFYTGWLLPAAVVGTLVFLVGCFLVFSDIPTQELCGSKDSFEMCPLCLDCPFWLLSSACALAQVREEAGRLFDHGGTVFFSLFMALWAVLLLEYWKRKSATLAYRWDCSDYEDTEERPRPQFAASAPMTAPNPITGEDEPYFPERSRARRMLAGSVVIVVMVAVVVMCLVSIILYRAIMAIVVSRSGNTLLAAWASRIASLTGSVVNLVFILILSKIYVSLAHVLTRWEMHRTQTKFEDAFTLKVFIFQFVNFYSSPVYIAFFKGRFVGYPGNYHTLFGVRNEECAAGGCLIELAQELLVIMVGKQVINNMQEVLIPKLKGWWQKFRLRSKKRKAGASAGASQGPWEDDYELVPCEGLFDEYLEMGAGFCPNACPELVPELTEPEKARDQPEARSAGQDSRPEAVLQFGFVTIFVAACPLAPLFALLNNWVEIRLDARKFGGSSRAHQGLGVAWG

SEQ ID NO: 45848 - protein, 307 aa, Homo sapiens
  DOMAIN (208)..(255): kw TRANSCRIPTASE REVERSE II ORF2 domain identified by eMATRIX, accession number DM01354V, p-value=1.000e-40, raw score of 12.97
  DOMAIN (2)..(221): Reverse transcriptase domain identified by PFam, accession name rvt, E-value=0.00039, PFam score of -10.9
MISQFIPENYFSGKSSATSGWARAQRDFRVGAGSARPALLSGRLAPPALGSERLSTRASSCGGLPRATPRGRAPPPATRHPVPSTAQRLRSAAARQRLAGSSARGRDALGKASWAPESVLEVLARAVRQEKEIKGILLGKEEVKLSLFAGDMIVYLENPIISAQNLLKLMSNFSKVSGYKISVQKSHAFVYTNNRQSESQIMSELPFTVATKRIKYLGIQLTRDVKDLFKENYKPLLNEIQEDTNKWKNIPCSWVGRINIVKMAILPKVIYRFNAIPIKLPMTFFTELEKTKFIWNQKRAHIAKTIL

SEQ ID NO: 45849 - protein, 275 aa, Homo sapiens
  DOMAIN (153)..(164): RNase H domain identified by eMATRIX, accession number PF00075F, p-value=2.588e-10, raw score of 12.87
  DOMAIN (90)..(216): RNase H domain identified by PFam, accession name rnaseH, E- value=2.8e-20, PFam score of 80.8
MVAGHFQGGASLVFSDLGYLASQTTRNGILGHVLYSLFVESPTITIVPGPDFNLASHIIPDTTPDPHDCISLTHLTFTPSPHISFFPVSHSDHTWFIDGSSTRPNRHSPAKAGYAIVSSTSVIEATILPCSTTSQQAKLVALSQALTLAKGLHVNIYTDSKYAFHILTTMQSYWLKEFSLLHKEAGVIHCKRHQKASDPIALGNACADKVARQAASFPTSVSHSNSDADKVARQAASSPTSVLTASFSPSHRPLPPTPPLKPPPINLFSHKANGS

SEQ ID NO: 45850 - protein, 496 aa, Homo sapiens
  DOMAIN (275)..(286): RNase H domain identified by eMATRIX, accession number PF00075F, p-value=5.500e-12, raw score of 12.87
  DOMAIN (212)..(359): RNase H domain identified by PFam, accession name rnaseH, E- value=1.3e-36, PFam score of 135.0
MVGYFRLWIPGFAILTKPLYKLTKGNLADPIDPKSFPHSSFCSLKTALETAPTLALPDSSQPASLHTAEVQGCAVGILTQGPGSRPVAFLSKQLDLTVLGWPSCLRAAAAAALILLEALKITNYAQLTLYSSHNFQNLFSSSHLTHILSAPGLLQLYLHFVESPTITIVPGPDFNPASHIIPDTTPDPHDCISLIHLTFTPFPHISFFPVSHPDHTWFIDGSSTRPNRHSPAKAGYAIVSSTSIIEATALPPSTTSQQAELVALTQALTLAKGLCVNIYTDSKYAFHILHHHAVIWAERGFLTTQGSSIINASLIKTLLKAALLPKEAGVIHCKGHQKASDPIALGNAYVDKVARQAASSPTSVSHSNSDADKVARQAASSPTSVPDGQFFSFTSATPTYSPAETSTYQSLLTQGKWFLDLGKYLLPASQAPSILSSFHNLFHVGYKPLACLLEPLISFPSWKSILKEITSQFPICYSTTPHGLFRPPPFPTHQAQ

SEQ ID NO: 45851 - protein, 491 aa, Homo sapiens
MPIKVDWIKKSRTHTPRDTMSPKRGINISIQEYRNTPDASILSELRLERDTNTQVYTYEQEHTNKNNGHQAIDKQNKGHIRRESDRGEYYPLDCRPTGSLTDKGWGMLLCGMMTAGKPTPILTFLLDVGLPGGTAINKSSVIRVRNREEGNVEKWGERQVDQRDAVMRVRCGIRNNVEAGLKYGPGTMKVSLSVFYTTQQCRRYLSVLCFAGLARASVPFNEDFQMSLDEKLFSNLHPLGSSSSPPKSLLHCPLLEHQFTMLGFSDLGAQLASPSGSHTRAAGVAACQPAPTLTWLSPWVARGLGTLEQGVVLVGEARAAQEPMEWVGGSCMVGCRSRALPRGKAAKAWREIQRSAGAGGAPVSPWSGGAPSRACPPSASSVRFLCAARRLACNTYSPVLYCVRNWWILGLTDFNNEATDPRDPFLANVPGQLAAVAIGTCDGNVYSAGDRDYRFALESILKACTLALALEEVGPPAVQDKIGADPTGLPF

SEQ ID NO: 45852 - protein, 102 aa, Homo sapiens
  misc_feature (1)...(102): Xaa = X or * as defined in Table 2
GFLGACAGREFKMAPPXSSLSGXKLSVSPCPGLLISAEGPEAVFSIVXNARVRGFILEVSETKNPPIPDTISTKHASLMSDSYREKKLVPVVYPHSSTPSFQ

SEQ ID NO: 45853 - protein, 333 aa, Homo sapiens
MEAPQGALEQDGPAVLSQQRHRKKPFTATPIDPSYHRSHAISLSVIIGYCVPPSHAAEMAAYGWTMGKSKLMAGQWITQSQVFCDSSTDGPRQHKAQTAILTKLQSQQRSTNNSTVSHRQQWVNCRLLRVKCQRLRAHKELLPVQRWLWRQGRCVPTTSLVAVSETAGAGAAALALSRLCRCLQVSASARPFSSRTLSPQPKCWAMAASHQPIKGILKNKTSRTSSMVALSEQPCRTVHEELSKKCQKWDEMNILSTYHPADKDYGLMKIDEPSPPYHGLTGDDENACSDTETTETMVSDILAKKLAAAEGLEPKYWVQEQESSGEEDLLAEE

SEQ ID NO: 45854 - protein, 617 aa, Homo sapiens
  DOMAIN (101)..(124): ACTIN SIGNATURE domain identified by eMATRIX, accession number PR00190C, p-value=8.846e-24, raw score of 11.49
  DOMAIN (63)..(371): Actin domain identified by PFam, accession name actin, E- value=7.8e-160, PFam score of 525.8
MGQQCVAGRDSASVSPQSKRTTQPLGLASGSIAAWTTKTVSTLQAQSLTLTTLPPIHTCHQFTMDNDIAVLVVDNGSGMWKGVMMGMGRKDFYVSNKAQSKRGIMTLKYPMEHGIITNWDDMEKIWHHTFYNELHVAPKEHRMLLTEANHKKMTQIMFETFNTPAVYMAIQAMLSLYTYGCTTGIVMDSSDGVTHTVPIYEGYALPRAILCLDVAGRDLTNYLMKILTEHSYSFTTMAEREIVCDIKEKLYYVTLDFEQEMATAASSSSLEKSYELSDGQVITIGNELSCCPEALFQPSFLSMESCDIHKTTFNSIMKCDMDIRKDLYTNTVLFGGNNMYPGIANRVQKIVTLVWMGSSILALLSTFQQMWHPVLDEPIAEAVCIIADMDKWTVQVASSQRRVTDNKLGKEVLVSSLVSNLLHSTLQLYKHNLSPNFCVMHLEDRLQELYFKSKMLSEYLRGQMRVHVKELGVVLGAGVPSPQSPVPRPVLVHGLLGSSRTAGGRPFRIDQALLCRQLSQEISFYLKRYEVCVEFLLCRMAASTSAYSKSAVEVAEESAKPDLATPWASGFGHNSSLQSERLPTVLPQNAIFAQVLSAFPVSPTDGEDGTTTPRQTP

SEQ ID NO: 45855 - protein, 115 aa, Homo sapiens
  misc_feature (1)...(115): Xaa = X or * as defined in Table 2
GKPDGDKVSQHLLLWKGYSFPPSLMKLSLAGYEILSXKFFSLRTLNIGPPLSSGFRVSAERSTVSLMDFPLCITQCFSPAALNIFSFISTLVNLTIMCLGVALLEQYLCCVLCIS

SEQ ID NO: 45856 - protein, 153 aa, Homo sapiens
  DOMAIN (77)..(94): ACTIN SIGNATURE domain identified by eMATRIX, accession number PR00190G, p-value=1.600e-21, raw score of 12.62
  DOMAIN (6)..(153): Actin domain identified by PFam, accession name actin, E- value=2.4e-98, PFam score of 324.0
GRVGFIYEGYALPHAILRLDLAGRDLTDYLMKILTERGYSFTTTAEREIVRDIKEKLCYVALDFEQEMATAASSSSLEKSYELPDGQVITIGNERFRCPEALFQPSFLGMESCGIHETTFNSIMKCDVDIRKDLYANTVLSGGTTMYPGIADR

SEQ ID NO: 45857 - protein, 676 aa, Homo sapiens
  DOMAIN (569)..(586): ACTIN SIGNATURE domain identified by eMATRIX, accession number PR00190G, p-value=3.100e-16, raw score of 12.62
  DOMAIN (439)..(676): Actin domain identified by PFam, accession name actin, E- value=6.1e-120, PFam score of 394.9
MATEVFLIPYALLQCSLASYPSKPGIYVPSPQMWVGSVTCSDQKNTIEVLVPKAYTLARQQYKSLSEQVYSCHQGTLNTRAQESAASLLKPARPRTRQKKETPNTSEHQKEQTLDTPPLRTVTLTTRVRGFILEVSETKNPPISDTMGLDISKQEEVLGRESDEQGEQSQGLSEMQTALAMLLTREPISAKQAPHEPPRRQEDNTQAREGETRSRKTRAEGQKGHAHAENERNAKERESERKRQEAEDENGKEKQERNEGTHARHMKRRKRDEKKRQGQNKPGNKRPEGNEEAQRRRKKNRERQRFSFYQSGPSAAGLLVFAGGPLQSLFAWVSPLEAAEQQRFLSVPSSGPLRKFCLYFGFVGNATPLRGLNTHGRLLTPAHGTRRRHTRPLNSPVPEKAGSTTESNGSPYGQNPGPLPPKGNRAQGEKWMGRRIQGTTRPRAREANHKKMTQIMFETFNTPAVYMAIQAMLSLYTYGCTTGIVMDSSDGVTHTVPIYEGYALPRAILCLDVAGRDLTNYLMKILTEHSYSFTTMAEREIVCDIKEKLYYVTLDFEQEMATAASSSSLEKSYELSDGQVITIGNELSCCPEALFQPSFLSMESCDIHKTTFNSIMKCDMDIRKDLYTNTVLFGGNNMYPGIANRVQKIVTLVWMGSSILALLSTFQQMWVSKQEY

SEQ ID NO: 45858 - protein, 133 aa, Homo sapiens
VPYFHFTCSHSSASQLPFLQMMKIAKTCSLGLNRLPEAKLKAFPTPRVTSLWPRQRGRPRRGCGRNRSGSLVSAARGVGGRSQAAAARRDAPSPPATSRMPPRQGSVSWGCARNAPGRRADPEVRRQPGPSCT

SEQ ID NO: 45859 - protein, 145 aa, Homo sapiens
  DOMAIN (45)..(90): Involucrin proteins domain identified by eMATRIX, accession number BL00795C, p-value=6.500e-09, raw score of 17.06
MTTSFHGDDPSGTPSAKFIIDMVEIAPGWFREILPSGSNVTFPAPTRKGKQKRGRHLQNGLFQGEKKKQQQQQQQQQQQQQQQQQQQQQKKTFLPPYFSLTGQAVYRKNMREFSKKQQKQSDLVPRLLNGVVDKHLATGHQLLRE

SEQ ID NO: 45860 - protein, 112 aa, Homo sapiens
  DOMAIN (84)..(108): CLASS II CYTOCHROME C SIGNATURE domain identified by eMATRIX, accession number PR00608A, p-value=7.623e-10, raw score of 13.74
HRCSTGAFSTAASNSNADRPPPARRRGLPRRGPPSRRRSPRPPRREPWPRTRRPRTRTAKARRRATLEGRCRRACGHWQPRAAAAAAAAAAAVAAAAAAAAAAAAAGASATW

SEQ ID NO: 45861 - protein, 342 aa, Homo sapiens
  DOMAIN (262)..(276): OXYTOCIN RECEPTOR SIGNATURE domain identified by eMATRIX, accession number PR00665E, p-value=9.780e-09, raw score of 5.60
  misc_feature (1)...(342): Xaa = X or * as defined in Table 2
RRNTSSKCRSRNCRCPRSPHRHRPSLRPRSQQPKCKCRPRSRRSSRAPSSRRSRPQGLVPCXRAPPWPTSRWPGSPGFPLLNCSRKGRCRPRHPSQPRCPCRSLRWCPSRQLWSPHRESPPCPXTSRGSAWRSVSHRRQQDRPWWTQPVHMQQLLKLKQQAVQQQKAIQPQAAQGPAAVQQKITAQQITTPGAQQKVAYAAQRALKNPVSYHTHLPGPETGRGPASADPDPGCKTSSSCSTANTRGQHPASCLCFPAGFSTDCGAHAGDGGRAAGADDPCSDRDCPGGSAETHSAAGGDHGVGPAPDSRRSQPSPGARQLRQPKPAAQVTDEGPCCQAKDTY

SEQ ID NO: 45862 - protein, 208 aa, Homo sapiens
  DOMAIN (94)..(132): Outer Capsid protein VP4 (Hemagglutinin) domain identified by eMATRIX, accession number PF00426S, p-value=9.531e-10, raw score of 15.67
  misc_feature (1)...(208): Xaa = X or * as defined in Table 2
RALCGESRLPLARKLSXAKKSVQRSTLQSRRIWVCWFHFANXSLFXKQGRTXESPLXLXLIPASXRPSTSESPPLXKANFQQPHRGLXEKVAEGRRGPXXEYYTSSSSSSSSSSSSSSSSSSSSSSSSSSSSSSSSSSSSSNNSSNSRHRRRRRRRLLSFLSRRRRHSRCCLSRSRPRRRPRRHPARLWLRSRCTDQRKNFQLPRKTV

SEQ ID NO: 45863 - protein, 264 aa, Homo sapiens
AKNDSKRQNFGHRGQPTFGADKAKGERVRTSSTIRRTSYLDTITGPYLTGQWPRDPHGHYPSCMKDKATQTPSCWAEEGAEKRSHQRSASWGSADQLKEETPTDLQQNAQQKLYKPEEVGCLISDFLKEKENCQPRILYAGKLSSECTPDEEAVNIVEMITKDLEYYINLVDKEWQGLRGLTPILKEVLRVKCYQTASHATKKSGMKGKVSQFGKLHCYFKKLPQLPLPSATAILISQLTSTRQELHHKKDCNLLKTQMIISIF

SEQ ID NO: 45864 - protein, 128 aa, Homo sapiens
QHQAIMVLEVQALEPYLCVANGSSLMVPQGDQGTINMAELHLGTNLDIRSGDEVHYHPQLPQHPGLLNGCGAFSMDVGPVHTDATLQVTIALEGPLAPLKLAWHKKIYIFQGEAAEIRRDQLEVRSWG

SEQ ID NO: 45865 - protein, 55 aa, Homo sapiens
  misc_feature (1)...(55): Xaa = X or * as defined in Table 2
LFMFFCLLYIRXQLLHPGYNAPFQNTAATRGRGIAQTAPEAAFQLFLHQRVRFHC

SEQ ID NO: 45866 - protein, 62 aa, Homo sapiens
  misc_feature (1)...(62): Xaa = X or * as defined in Table 2
PDGDGIESINYLGQYGHFHDIDSSYPXAWNVLPFVCILFYFIEQWFIVLLEEVFHIPCKLDS

SEQ ID NO: 45867 - protein, 949 aa, Homo sapiens
  DOMAIN (349)..(384): Troponin domain identified by eMATRIX, accession number PF00992A, p-value=6.344e-12, raw score of 16.67
  DOMAIN (663)..(789): Laminin G domain identified by PFam, accession name laminin_G, E-value=1.9e-16, PFam score of 61.8
MSEKTQQGKLAAAKKKLKAYWQRKSPGIPAGANRKKKVNGSSPDTATSGGYHSPGDSATGIYGEGRASSTTLEDLESQYQELSVALDSSSAIISQLTENINSLVRTSKEEKKHEIHLVQKLGRSLFKLKNQMAEPLAPEPPAGPSKVEQLQDETNHLRKELESVGRQLQAEVENNQMLSLLNRRQEERLREQEERLHEQEERQREQEDRLHEQEERLREHEERLCEQEERLCEQEERLREQEERLHEQEERLREQEERLCEQEERLREHEERLCEQEERLREQEERLCEQEERLREQEERLCEQEERLREQEERLCEQEKLPGQERLLEEVEKLLEQERRQEEQERLLERERLLEEVEKLLEQERQQEEQERLLERERLLEEVEKLLEQERRQEEQERLLERERLLDEVEELLDEVEELLEQERLRQQDERLWQQETLQELERLRELERLRELERMLELGWEALYEQRAEPRSGFEELNNENKSTLQLEQQVKELKKSALLRLELRHQGEAELGERRREVPRVVAAVTAAPDGLTFRAPPARGETNNENGLVDGGKVGMQPLVLFERSLYPGSLLCSGKAHCTLDAADPLHSKPLFNCPPPPTTSKTEILDSCNCSPSESVRGAEKGDQELLANIKQAEKHEKNHPEVTVAMALTDIDLQLQFSMSQPEALLLLAAGPADHLLLQLYSGHLQVRLVLGQEELRLQTPAEILLSDSVPHTTVLTVSEDWPTLSVNGFLNASSVVLGAPLEVPYGLFVGSTGRLGLPYLRGTSHPLRGCLHAAALNGRRLLQPLTPNKHEGCAEEFSANDDVALGFSGSHSLAALPAWGTQDEGTLEFTLTTQSWQAPLAFQAAGWHGDFIHVDIFEGHLWSMVEKGQGTVLLLNSVPVTDAQPHKVSIHINIHQLEISMDQYPTCTLNRGVLSYLEPRDSLLLGELVQRPLVTSRNTAQA

SEQ ID NO: 45868 - protein, 944 aa, Homo sapiens; identical to SEQ ID NO: 40571
  DOMAIN (700)..(745): kw TRANSCRIPTASE REVERSE II ORF2 domain identified by eMATRIX, accession number DM01354N, p-value=1.000e-40, raw score of 13.17
  DOMAIN (70)..(943): Reverse transcriptase domain identified by PFam, accession name rvt, E-value=8.6e-18, PFam score of 72.5

SEQ ID NO: 45869 - protein, 137 aa, Homo sapiens
MVLSSIRSFKDFSTLDILVSHLSNLFSRFLASLPWVRTSSFSSKKFDRLRRDVQMGFWCGCPFCLLVFLLTIRTLSCRSVGVCWRSTPDLVCLGISSTLKALLAFSVGRLVAWGKFSALLTSCLGTNSVQLAGAWWK

SEQ ID NO: 45870 - protein, 1907 aa, Homo sapiens
  DOMAIN (601)..(847): Laminin G domain identified by PFam, accession name laminin_G, E-value=1.2e-16, PFam score of 62.6
MAVLSLPLAPPTLMPPAHFNLVEMQVKATLKEYWQRKSPGIPAGANRKKKINGSSPDTATSGGYHSPGDSATGIYGEGHASSATLEDLELRQPTPSTSPNDCSLYPSPQSSSNSSSLHAPHSQYRELAVALHSSSAIISQLSENINSLNNENKSALQLERQVKELKLGELKETVTSDPSNNGWEAVTSLWEGERLPARGAEEPRGSESTAAARPVPVSPAAVRGRLVAGEPGSYQPAETAAKAQLSLMALPGEGYGGGHLDNEEEAPRPMLNIPGDLESREAMVAFFNSAGASAQEEQSVCCQPLAHPVASSQKKPEAAAPAPETGGESVCGDTHWALQEAMEKLQESTSARGQCQRRSTGRGGHRQAGPGPGGDEGETNNENGLVDGGKVGMQPLVLFERSLYPGSLLCSGKAHCTLDAADPLHSKPLFNCPPPPHHLQDRDSGFLQLQPLRECKRVRKRRLGNEGSSAVRVSKALASKASEASVGVGASLAMRSSSTRQPLAVTTKPGDQASDVSLSARSGSQTWEGDSSGAQGMQVRTGRGLWLQEPPRRRPELLGISGSDLLQSQGLGWTQASFFGENHLEVTVAMALTDIDLQLQFSTSQPEALLLLAAGPADHLLLQLYSGHLQVRVVLGQEELRLQIPAEMLLSDSIPYTTVLTVSEGWPTLSVNGFLNASSVVLGAPLEVPYGLFVGNTGSLGLPYLRGTSHPLRGCLHAATLNGHSLLRPLTPDMHEGCAEEFSTSDDVALGFSGPHSLAAFPAWGTQNKGTLELALTTQIWQAPLTFQAAGWHGDFIHVDIFEGHLWFMVEKGQGTVLLLNSVLVADVQTLKVSIHINTHQLEISMDQYPTHLSVNGQRWGLREALLTHNMAAGCRLEEVEEYEDNTYGHYEAFSTLAPRAWLSMDLAEPCMLEPGLPPVFTNFTQLLTISPVVVTEGGTAEWWHVQPMLALMEAELHKSQDLTFRVSNGLQASPPSMLKVVAIQPAIQIHCSTGLHLAQDSAMPILPTNLSVETSTVGQDVTVLFCVTRGLQFREVQKQGAGGVEGAEWWATQSFHQQDVEQGHMRYLSTNPQHYAEDTVKNLDLQVQVSWEILSNLSFLVTIQRATVWMLQLRPLHTQHPAEALTTAHLEATLEEAGPSPPTFHSEVVQAPRKGNLQLQGTTLSDGQGFTQDDVQAGEVTYRAMAHASVAVEDTFCFHVTAPLYFSPLCTFSIHTGGDPDMPVLTNVLLVPEGGGCVLSADQLFVKSLNSARWQLLTPHNMAFSNADSGFVDAQLVLTHKDLLSGSIMATDEPMQPIFCFIQEGLRKRRVLFTHSGDHGWILLHVSDRQHQAILVLETGPCWGQLLQATQPATAFAQKDLLVGAVLFGHNGSLSSRNTLAFSMDVGPSQWMWGLLNGCGASAHRQCTRCTLQVTIALEGPLAPLKLAWHKKIYIFLGEAAEIRRDQLEAERELFHSRAEQGRLFVGRPGQAAHLMLPPGDCVSIWTQHMITTTEFIISEPLANLYSCGDQNTLMEELAKQAQQRDKMLCMHHALKEANDINRTTVSMPMPPPVDDTWLQVQSVPEEHRYQGLAPIAPKSPIRATQRSAQGLVARSLMGWFPPGPGFNAVRGMTEIGIRCEELEGNWVKSCSVGRSVVWVTLRIATGQSREQRQNEEELCGEGGAPGGEPSKSKEYDFLGFNAVGSREPWKALRWRNDSRTLVSKPCLPEQHGWSSEHARHECAGSWCTCLCVRVSICVVTLPTHVLQCAEWLHAPDPCSTCRPRTLGFLMAQRGLWHSLQPAVPYRSTILVQCSFSIRLGGCWMGLSKQEVALGQWVGRHGDHRRGKPEGAGIGLNSLALGISPRAVLAESCGPARGSCLLTSPLQRAPPPLSFRDMRGLRTASPRHPSHPSGQAWRCCAGSCVA

SEQ ID NO: 45871 - protein, 369 aa, Homo sapiens
  DOMAIN (323)..(368): kw TRANSCRIPTASE REVERSE II ORF2 domain identified by eMATRIX, accession number DM01354N, p-value=5.714e-33, raw score of 13.17
MGKKQNRKTGNSKNQSTSPPPQEHSSSPAMEQRITNAEKYLKDLMELKTTAQELHDECTSLSSPFDQLEERVSVMEDQMNEMKREEKFREKRIKRNEQSLKEIWDYVKRPNLPLIGVPESDRENGNKLENTLQDIIQENFPNLARHANIQIQEIQRMPQRYSSKRATPRYIIVRFTKVEMKEKMLRAARDKSLVTHKGKLIRLTAGKFIALIAHKGNQERSKIDTLTSQLKELEKQEQTHSKPSRRQEITKIRAELKEIETQTTLQKINESRSWFFEKINKIDRLLARLIKKKREKNQIDAIKNDKGDITTDPTEIQTTIREYYKHHYANKLENLKEMNKFLDTYTLPRLKQEEVESLNRPIKALKLRQ

SEQ ID NO: 45872 - protein, 267 aa, Homo sapiens
  DOMAIN (25)..(64): Phosphoglycerate mutase family domain identified by PFam, accession name PGAM, E-value=4.7e-06, PFam score of 26.0
MGALKEKSVACNVERPSPEPNHDGQGVDEPLSETGFKQAAAAGIFLNNVKFTHAFSSDLMRTKQPPLLIPRQTGSGVDLQQTPTDLQLRILTVRRKTNKQKGHPYQNPICTSPSSKTKARQANIQIQEIQRMPQRYSSRRATPRCIIVRFTKVEMKEKMLRAAREKGQVTHKGNPIRLTADLLVKTLQARREWGPIFNILKEKNFQPRISYPAKLSFISEGEIKSFTDKQMLRDFGTTRPALKELLKEALNMERNNQYQPLQKHVRL

SEQ ID NO: 45873 - protein, 565 aa, Homo sapiens
  DOMAIN (77)..(132): kw TRANSCRIPTASE REVERSE II ORF2 domain identified by eMATRIX, accession number DM01354Q, p-value=1.000e-40, raw score of 9.23
  DOMAIN (32)..(564): Reverse transcriptase domain identified by PFam, accession name rvt, E-value=2.9e-53, PFam score of 190.4
MGSCPGGFTAEFYQRYKEELVPFLLKLFQSIEKQGTLPNSFYEASIILIPKPGRDTTKKENFRPISLMNIDAKILNKILTNRIQQHIKKLIHHDQVGFIHGMQGWFNIRKSINVIQHINRTNDKKHMIISIDAEKAFDKIQQPFMLKTLNKLGTWMKLETIILSKRSQGQKTKHRMFSLIVNIIPTIKILIKQNMTAMETLCPIFKLEGDTMDNPIANRRVRTAVPTSVVCLHVGTEPEARLPHGPMITAQSPFGQCLPGVVGQFRKREDLKKEGHTKLLSKKEARPQTGLRTWALDSGTKGTDEGEPPLLIPRQTGSAVDLQQITTDLQLRVLTVRRKTNKQKGHPHQNPTCTSPSSKNKEKEGILPNSFYEASIILIPKPGRDTTKKENFRPISLMNIEAKILNKVLANRIQQHIKNLIHHDQVGFIHGMQGWFNIRKSINVIQHINRTNDKNHIIISIDAEKAFDKIQQPFMLKTLNKLGIDGTYLKIIRAIYDKPTANIILNEQKLEAFPLKTGTRQGCPLSPLLFNIVLELLARAIRQEKEIKGIQLGKEEVKLPCLQMT

SEQ ID NO: 45874 - protein, 104 aa, Homo sapiens
NLAVNPSGPGLFLIGKLLIIASISEHVIGLFRDSTSSWFSLGRVYVSRNLSVSSRFSLVFDDGDVQMGFWCGCPLCLLVFLLTAGPSAAGLLEFAGGPLQTLFA

SEQ ID NO: 45875 - protein, 927 aa, Homo sapiens
  DOMAIN (585)..(640): kw TRANSCRIPTASE REVERSE II ORF2 domain identified by eMATRIX, accession number DM01354Q, p-value=1.000e-40, raw score of 9.23
  DOMAIN (534)..(813): Reverse transcriptase domain identified by PFam, accession name rvt, E-value=5.1e-66, PFam score of 232.7
  misc_feature (1)...(927): Xaa = X or * as defined in Table 2
MYGTGYRDVAGKWAIDPDSKREFLDVTQEGIQGCDFSGTCRQTLSILTQPLRQWGLEGIKKPNSWIISEESVSNGGPPLLIPRQTASGVDLQQTPTDLQLRVLTVRRKTNKQKGIASTSTKRTSTPKPHLYVTIIKDQSYIKPQRWGKNIAEKLKILKIRVALSLQRNAAPHQQWNKAGRRMSLMSSQKKASEVIESQMNEIKGEEKFREKRVKRNEQSLQEIWDYVKRPDLRLIGVPDSDGENGTRLENTLQDIIRENFPNLARQASIQIQEIQRTPQRYSSRRATPRHIIVRFTKVEMKEKMLRAAREKELKIKKLTQNCLTTWKLNNLLLNDYWVHNEMKGEIKMFFETNENIDTTYQNLWHTFKAVCRGKFIALNAHKRKQERSKIDTLASQLKEIEKQEQTHSKASRRQEITKIRVELKEIETQKSLQKINESRSWFFEKINKIDRPLPRLIKKKREKNQIDTIKNDKGDITTNPTEIQTISREYYKHLYANKLENLEEMDKFLDTYTLSGLNKEEVESLNTSITGSEVEAIINSIPTKKKSRTRWIHSRILPELSRDTTKKENFRPISLMNIDVKILNKMLANGIQQHIKKLIHHDQVGFIPGMQGWFNIHKSINVIQHINRTKDKNHMIISIDAEKAFDKIQQPFMLKTLNKLDIDGTYLKIIRAIYDKPTANIILNGQKLEAFPLKSSTRQGCPLSPHLFNIVLEVLARAIRQEKEIKGIQLGKEEVKLSLFADDMIVYLENPIISAQNLLKLISNFSKVSGYKINVQKSQAFLYTSNRQTESQIMSELPFTIASKRIKYLEIQLTRDVKDLFKENYKPLLNEIKEDTNKWKNIPCSWIGRINIVKMAILPKDDKKCVSDDHDADNDSDNDGDNFLQXRRXLSASLSSKILHLSLLSCDKAPHSILEETLQQPXKGKGP

SEQ ID NO: 45876 - protein, 662 aa, Homo sapiens; identical to SEQ ID NO: 34164
  DOMAIN (170)..(216): kw TRANSCRIPTASE REVERSE II ORF2 domain identified by eMATRIX, accession number DM01354O, p-value=1.000e-40, raw score of 8.73
  DOMAIN (205)..(453): Reverse transcriptase domain identified by PFam, accession name rvt, E-value=7.7e-11, PFam score of 49.4

SEQ ID NO: 45877 - protein, 253 aa, Homo sapiens; identical to SEQ ID NO: 31356

SEQ ID NO: 45878 - protein, 54 aa, Homo sapiens
  misc_feature (1)...(54): Xaa = X or * as defined in Table 2
GQPERKVGLPTKGSPSDXQRISRQKLYKPKESGGQYSTFLKKRIFNPEFHIQPN

SEQ ID NO: 45879 - protein, 127 aa, Homo sapiens
  DOMAIN (98)..(127): Laminin G domain identified by PFam, accession name laminin_G, E-value=0.00078, PFam score of 17.7
AVTTKPGDQASDVSLSARSGSQTWEGDSSGAQGMQVRTGRGLWLQEPPRRRPELLGISGSDLLQSQGLGWTQASFFGENHLEVTVAMALTDIDLQLQFSTSQPEALLLLAAGPADHLLLQLYSGHLQ

SEQ ID NO: 45880 - protein, 331 aa, Homo sapiens
  DOMAIN (29)..(217): Laminin G domain identified by PFam, accession name laminin_G, E-value=2.3e-05, PFam score of 23.1
VRVVLGQEELRLQIPAEMLLSDSIPYTTVLTVSEGWPTLSVNGFLNASSVVLGAPLEVPYGLFVGNTGSLGLPYLRGTSHPLRGCLHAATLNGHSLLRPLTPDMHEGCAEEFSTSDDVALGFSGPHSLAAFPAWGTQNKGTLELALTTQIWQAPLTFQAAGWHGDFIHVDIFEGHLWFMVEKGQGTVLLLNSVLVADVQTLKVSIHINTHQLEISMDQYPTHLSVNGQRWGLREALLTHNMAAGCRLEEVEEYEDNTYGHYEAFSTLAPRAWLSMDLAEPCMLEPGLPPVFTNFTQLLTISPVVVTEGGTAEWWHVQPMLALMEAELHKSQ

SEQ ID NO: 45881 - protein, 153 aa, Homo sapiens
SPCWGQLLQATQPATAFAQKDLLVGAVLFGHNGSLSSRNTLAFSMDVGPSQWMWGLLNGCGASAHRQCTRCTLQVTIALEGPLAPLKLAWHKKIYIFLGEAAEIRRDQLEAERELFHSRAEQGRLFVGRPGQAAHLMLPPGDCVSIWTQHMIT

SEQ ID NO: 45882 - protein, 43 aa, Homo sapiens
TVPDLMSDLAHQSPQTISVKKMNSIPAASRVQCAFPEHSSDPG

SEQ ID NO: 45883 - protein, 186 aa, Homo sapiens
MDPNQEEIPDLPEKELRRLIIKLFREGPENGKAQCKEIQKMMQEVKGEAGIIGVTEEEDNSKSLENIFGGIIEENFPGLVRDLDIQIQEAQRIPGKFIAKRSSPKHIVIRLSKVKTKEKSLKSCETEAPVTTLSCRSVGVDWRSTPDPVCLGISSTGCRTADIGEPQMLLPDHSSGSFVSEEYLAV

SEQ ID NO: 45884 - protein, 109 aa, Homo sapiens
EKAVGRWIFQSKRYRSPCEKPYSKGLQVQRTVPEGPSKAARAAQAPGPNLLPCLPTPQTPEFIISEPLANMYSCGNQNTLMEELAEQAQQHDEMLHMHHALKEALSIIS

SEQ ID NO: 45885 - protein, 234 aa, Homo sapiens
VSDGQHQAITVLEVQALEPYLCVANGSGLMVPQGGQGTINMAELHLGTNLNICSRDEAHYHVTDSPHWGQLLQATQPATAFSQQDLLVGAVFYGHNGSLSSRNTLAFSMDVGPVHTDATLQVTIALEGPVAPLKLAQHKEIYIFQGEAAEIRRDQLEVAQEAVPPADIVFSVKSPPSAGYLVMVLRGILADEPPSLDPVQSFSQEAVDTGRILYLHSRPEARSHAFSLDVASAW

SEQ ID NO: 45886 - protein, 59 aa, Homo sapiens
  misc_feature (1)...(59): Xaa = X or * as defined in Table 2
AFAPAPCTLVPGVLRGPPILLRETGLAHXCPAVISPPKSLPWLPTAYSVESQQVILFGL

SEQ ID NO: 45887 - protein, 119 aa, Homo sapiens
  misc_feature (1)...(119): Xaa = X or * as defined in Table 2
GAAVAGTQNLCLGGGGAVGGSXRGALNGEGLLHPGYNAPFQNTAATRDRGIAQTAPEAAFQLFLHQRVRFHCXFLLWREGRGRXARREPLSRPQPPAGPLGGALPAPPLPDASTLVGVG

SEQ ID NO: 45888 - protein, 110 aa, Homo sapiens
MSIRSAWCRAEFNSWISLLTFCLVDLSLVFDDGDIQMGFWCGCPFCLLVFLLTAGPSAAGLLEFAGGPLQTLFAWASAVVAAEQQILVSSKCCCLIVPLEVLSQRSTWPC

SEQ ID NO: 45889 - protein, 89 aa, Homo sapiens
EYFVKTVKEDVAIGADCSHECYYSSFPQLKEYWQRKSPGIPEGANRKKKINGSSPDTATSGGYHSPGDVSLGWPGSWGQGAQGAVEGNC

SEQ ID NO: 45890 - protein, 104 aa, Homo sapiens
VCVWGDPPGPAGGHGEAAATLWKEKVDLKERVEKLELQFIHLSGQTDTIGRKYISQGAVSETQHWERRTSSGWPGPGGDEGEPAGAAGQVLQLVGDHKEGHGKF

SEQ ID NO: 45891 - protein, 441 aa, Homo sapiens
  DOMAIN (155)..(281): Laminin G domain identified by PFam, accession name laminin_G, E-value=2.5e-15, PFam score of 57.9
MGPAVLGQGEEGAAGSARMLWTPAAAETVRFSLFPHVQPIVFKEKLTMKTDSLMEEKLECSLWCCLSDPSTPGRCCVLERRIVPWMQQESYSSSSPIWSVDSDEPNLTSVLERLEDTKDNSSLLANIKQAEKHEKNHPEVTVAMALTDIDLQLQFSMSQPEALLLLAAGPADHLLLQLYSGHLQVRLVLGQEELRLQTPAEILLSDSVPHTTVLTVSEDWPTLSVNGFLNASSVVLGAPLEVPYGLFVGNTGRLGLPYLRGTSHPLRGCLHAAALNGRRLLQPLTPNKHEGCAEEFSANDDVALGFSRSHSLAALPAWGTQDEGTLEFTLTTQSWQAPLAFQAAGWHGDFIHVDIFEGHLWSMVEKGQGTVLLLNSVPVTDAQPHKVSIHINIHQLEISMDQYPTCTLNRGVLSYLEPRDSLLLGELVQRPLVTSRNTAQA

SEQ ID NO: 45892 - protein, 181 aa, Homo sapiens
  misc_feature (1)...(181): Xaa = X or * as defined in Table 2
GTVFLWRRRGTLIFRVSGFSALFFPPSLWFYLPFVFDDGDLQMEFWYELSFLLMLLLFLCACWFSFXQSGPSAAGLLEFAGGPLQTLFAWVSAAVAEEQWILVNRKCCCLIVPLEVLSQRSTRPCEVSVHPYVHCCLGIEELNIYCSLHSLGLFEAILLGKAFEELGCCDPSLFATVAVSA

SEQ ID NO: 45893 - protein, 1909 aa, Homo sapiens
  DOMAIN (223)..(244): E7 protein Early protein. domain identified by eMATRIX, accession number PF00527C, p-value=9.509e-09, raw score of 17.24
  DOMAIN (651)..(897): Laminin G domain identified by PFam, accession name laminin_G, E-value=1.2e-16, PFam score of 62.6
MDSHRPTAWPAAVLAGRSPVAAESERYCSRQPPLPRRQALLSVLVLASDTRLPFPWSSQTFCGILSKPLVLSGPLQTQGETNNENGLVGGGEVGMQPLVLFERSLFPGRCCVLERRIVPWMRQESYSSSSPIWFVDSDELNLTSVLECLEDDKNNNLLHQQLKWLICGLCRLYNLPKHLDVAMPDQPLPMGQSGPSAAGLLEFTGGPLQTLFAWVSAALAAEKQILVNCKCCCLIVPLEVLSQRSTWQYELKEYWQRKSPGIPAGANRKKKINGSSPDTATSGGYHSPGDSATGIYGEGHASSATLEDLELRQPTPSTSPNDCSLYPSPQSSSNSSSLHAPHSQYRELAVALHSSSAIISQLSENINSLERLQEQDERLWQQETLWELERMLELEWEALYKQQAEPHSSFEELNNENKSALQLERQVKELKLGEPGSYQPAETAAKAQLSLMALPGEGYGGGHLDNEEEAPRPMLNIPGDLESREAMVAFFNSAGASAQEEQSVCCQPLAHPVASSQKKPEAAAPAPETGGESVCGDTHWALQEAMEKLQESTSARGQCQRRSTGRGGHRQAGPGPGGDEGETNNENGLVDGGKVGMQPLVLFERSLYPGSLLCSGKAHCTLDAAASFFGENHLEVTVAMALTDIDLQLQFSTSQPEALLLLAAGPADHLLLQLYSGHLQVRVVLGQEELRLQIPAEMLLSDSIPYTTVLTVSEGWPTLSVNGFLNASSVVLGAPLEVPYGLFVGNTGSLGLPYLRGTSHPLRGCLHAATLNGHSLLRPLTPDMHEGCAEEFSTSDDVALGFSGPHSLAAFPAWGTQNKGTLELALTTQIWQAPLTFQAAGWHGDFIHVDIFEGHLWFMVEKGQGTVLLLNSVLVADVQTLKVSIHINTHQLEISMDQYPTRCRLEEVEEYEDNTYGHYEAFSTLAPRAWLSMDLAEPCMLEPGLPPVFTNFTQLLTISPVVVTEGGTAEWWHVQPMLALMEAELHKSQDLTFRVSNGLQASPPSMLKVVAIQPAIQIHCSTGLHLAQDSAMPILPTNLSVETSTVGQDVTVLFCVTRGLQFREVQKQGAGGVEGAEWWATQSFHQQDVEQGHMRYLSTNPQHYAEDTVKNLDLQVQVSWEILSNLSFLVTIQRATVWMLQLRPLHTQHPAEALTTAHLEATLEEAGPSPPTFHSEVVQAPRKGNLQLQGTTLSDGQGFTQDDVQAGEVTYRAMAHASVAVEDTFCFHVTAPLYFSPLCTFSIHTGGDPDMPVLTNVLLVPEGGGCVLSADQLFVKSLNSARWQLLTPHNMAFSNADSGFVDAQLVLTHKDLLSGSIMATDEPMQPIFCFIQEGLRKRRVLFTHSGDHGWILLQQHQAILVLEVQALEPYLYVANGSGLKVPQGDQGTINMAELHLGTNLDIRSGDGPCWGQLLQATQPATAFAQKDLLVGAVLFGHNGSLSSRNTLAFSMDVGPSQWMWGLLNGCGASAHRQCTRCTLQVTIALEGPLAPLKLAWHKKIYIFLGEAAEIRRDQLETTEFIISEPLANLYSCGDQNTLMEELAKQAQQRDKMLCMHHALKEANDINRTTVSMPMPPPVDDTWLQVQSVPEEHRYQGLAPIAPKSPIRATQRSAQGLVARSLMGWFPPGPGFNAVRGMTEIGIRCEELEGNWVKSCSVGRSVVWVTLRIATGQSREQRQNEEELCGEGGAPGGEPSKSKEYDFLGFNAVGSREPWKALRWRNDSRTLVSKPCLPEQHGWSSEHARHECAGSWCTCLCVRVSICVVTLPTHVLQCAEWLHAPDPCSTCRPRTLGFLMAQRGLWHSLQPAVPYRSTILVQAVFLLYQVWWLLDRALQARGGPGPVGWKTWGPQKREARGGWHWSELSSTGNQSPCCACGVLWTSKRKLSPDIAPPTCTTSIELPGHAWPADS

SEQ ID NO: 45894 - protein, 173 aa, Homo sapiens
CSAAWAPKLQLLSVCRQQLPGNPRARSHSHHRRTRARCPSGCGQARHSAGSWHKLQFPLCPWKMRSPLKMRSLLKMIPSESRMVVTFLISALESTEQYHGGVYTPCDIDSNIILSPPDISNNITEGVYTPCDIDRHLIPFFLPLDMRLQVLMPLDSGTCTSGFPEALRPSASD

SEQ ID NO: 45895 - protein, 420 aa, Homo sapiens
  DOMAIN (268)..(311): kw TRANSCRIPTASE REVERSE II ORF2 domain identified by eMATRIX, accession number DM01354T, p-value=9.727e-13, raw score of 9.48
MSEHNITEECQQENQSIEQWRSIAHSDSIEVSWLHEVIKTYLKAKSTKLDLMKKLKELSSQPSRKPKPFIPSQEGTGDNDVIYSTERLSKLLNQKKGSTRLYDKPLSNLLNQKKVSTRTEGLTVDSRADMRNVTTILLSTESSSTDSSSSMDSSSSMDSSSSIGRVETATCAMIPVQKSKRSGPPQGPSAATGDGAEGRFLPRCSRPWADRLAWSQPRRHLAPGPSAATGDGAEGRFPPLCSCCGTDRLAWPQPQGHLALLPRCGECGRARELPGDCCLHAEGGCSSVLEVLARAIRQKKEIEEIQIGKQEVKLSLVADDIIFCLENATDSSRNLLELIKEFSKVSRYKINGHKSVALPYINSYQAENHIKNSTPFTIAATNNNNKKKNLGIYLAKESKDSYNENYKTATERNHRWSQAR

SEQ ID NO: 45896 - protein, 146 aa, Homo sapiens
  misc_feature (1)...(146): Xaa = X or * as defined in Table 2
XFLVLLNFIGSPRIRNTESNNFNQSKGMDSGFAGGEDEIYNVYDQAWRGGKDMAQSIYRPSKNLDKDMYGDDLEARIKTNRFVPDKEFSGSDRRQRGREGPVQFEEDPFGLDKFLEEAKQHGGSKRPSDSSRPKEHEHEGKKRRKE

SEQ ID NO: 45897 - protein, 428 aa, Homo sapiens
RTSICWTMDSSVQNTVLGPTRSSVKGVMEWLQYLQMERRCTLSISMESMPRVAEDAGDVGAAEPLHLEPPAGPLEVEQQLQAEIKHLRKTLESLAGQLQAQVEANEGSSHLNRQQDERLREWKAELWEEQGETGRSSVQKDRTTISHALSQNHQLEEQLAKERLEATSQQNQQLQSQMSLMALPGEGDELGSKEEEEAPQPMPSILEDLKSREAMVAFLNSALVSAEEEQQAQLHGQLKEQRVCCQHLAHPVALAQKEPEAAAPTPRTGGDSAVWTVDLQVEKTKFIMFTIKPGEVVNKDMAQSIYRSGKNLDKDMYGHDLEARRKTNRPLETTFYFLSYELDYSRCFIGCLKCLCLPSPSATIGSFLKPSQKQKPVCLLYSLQNHEPIKPLFFINYPDSDSYRHTQVIRILLSGSIHVQVPATKTPL

SEQ ID NO: 45898 - protein, 555 aa, Homo sapiens
  DOMAIN (506)..(525): GLYCERALDEHYDE-3-PHOSPHATE DEHYDROGENASE SIGNATURE domain identified by eMATRIX, accession number PR00078B, p-value=4.767e- 17, raw score of 7.45
  DOMAIN (369)..(554): glyceraldehyde 3-phosphate dehydrogenases domain identified by PFam, accession name gpdh, E-value=3.1e-91, PFam score of 307.4
MGGHVGGRHRMLTPKLIPETLAAGSMKINPEEPNRPPINGAPGGPALPLAAGDSGSEQAGEPALAASELQGWDSTLGSPGSLRGTGIVATRSGSRGFRLSPASLGRRSRDRKTKELAFAGSGLATRGQRASSDAAAGPPLSRCSPARTPQLPVRGSLTGPRAPAPPRARVCLLSCSCRQPFPPLTGGLNVGRPSGPSWKICPRSLPSASAETGIRRRRAAAHPPLQQPPLCGESLPSVQCSANADSSIPVPSRWSQDACRNTGAAGPPGYPACVNNRNRTDKNSQLDETHHMKTKVTDRGGFGAFTMLLRVVDTGHTSCSGSVEWDPRLYGDQADLSRSGHLDRPGAHHDYYTAIKKCEEGKSLDTTVKVKAGVNGFGRIEHLVTKPAFNSGKVDIVTINDPFVDLNNMVYMFQYDSTHGKFCGTVKAENRKLVASGNPITVFQERDPSKIKWYIAESTCIFTTMEKAGADLQGGAKRVIISAPSADAPMFVMDVNHEKYDNSLKIVSNASCITNCLAPLANVIHNFGIVEGPMTTVHAITATQKIVDGPSGKLA

SEQ ID NO: 45899 - protein, 363 aa, Homo sapiens
  DOMAIN (208)..(263): Glyceraldehyde 3-phosphate dehydrogenase proteins domain identified by eMATRIX, accession number BL00071D, p-value=1.000e- 40, raw score of 19.39
  DOMAIN (28)..(363): glyceraldehyde 3-phosphate dehydrogenases domain identified by PFam, accession name gpdh, E-value=2.3e-181, PFam score of 608.6
  misc_feature (1)...(363): Xaa = X or * as defined in Table 2
GRVGCSTVSRIFSCVASRATSLRTPMGKVKVGVNGFGRIGRLVTRAAFNSGKVDIVAINDPFIDLNYMVYMFQYDSTHGKFHGTVKAENGKLVINGNPITIFQERYPSKIKWGDAGAEYFVESTGVFTTMEKAGAHLQGGAKRVIISAPSADAPMFVMGVNHEKYDNSLKIISNASCTTNCLTPLAKVIHDNFGIVEGLMTTVHAITATQKTLDGPSGKLWRDGRGAFQNIIPASTGAAKAVGKVIPXAERGKLTGMAFRVPTANVSVVDLTCRLEKPAKYDDIKKVVKQGVGGPPQGAILGYTEHQVVSSDCNSGPPVFPPFDAGAGIALNDHFVKLISWYDNEFGYSNRVVDLMAHMASKE

SEQ ID NO: 45900 - protein, 33 aa, Homo sapiens
GKLQEQQIKTVPFTNPWGADLSCSPPGRKKKEP

SEQ ID NO: 45901 - protein, 116 aa, Homo sapiens
SQQQVYFPGAQLCAKPVNQSREQPWPVYPSLELSANAGLAIGTGGNGGAWWPPPGDQPPRTNSKGDSAWLGRPPCSSQWSRSASTLVAKSHSNLDLSEIITYPLNMLVDAIFLHQI

SEQ ID NO: 45902 - protein, 337 aa, Homo sapiens
  DOMAIN (51)..(146): Dynamin GTPase effector domain identified by PFam, accession name GED, E-value=1.2e-18, PFam score of 75.4
DRAGPPGAPRLGQQLLCAIILLGLAAKKKEINITIIKQLLKKFLNKKPSYGLERQMETTQNLVDSYMAIVNKTVWDLMVGVMPKTIMHVMINNTKEFIFSELLSNLYSRGDQKTLMEESAEQAQWRDEMLRMYHVLKEALGIIGDINTTTISTPWGPVDNSWLQVQSVLARRRSPGLAPTAPSLPTPHRLSLGALGTGSVPTLLHHPGSSSVSSLSGLVADCFGLPKARGGPGQRLPFPSLPGRLFCDLAVAPPAPKAAPFICDFVYCCDQASEPVGCQGQTAPHRLHGSPLGIPQAPPGSIQAWLRAAVFWKGALCPRCGRHIQEFLLHRCTLVSL

SEQ ID NO: 45903 - protein, 231 aa, Homo sapiens
  DOMAIN (58)..(153): Dynamin GTPase effector domain identified by PFam, accession name GED, E-value=2.2e-18, PFam score of 74.5
PKALIKTSNKSSLSYQLTTHSGTMACPWIRHEVLLSRLGFLVLENTNMDKRPSKLLRWLERQMETTQNLVDSYMAIVNKTVWDLMVGVMPKTIMHVMINNTKEFIFSELLSNLYSRGDQKTLMEESAEQAQWRDEMLRMYHVLKEALGIIGNINTTTISTPWGPVDNSCLQVQSVLAGCSFIILVQAVFLLYQAWWLLFWAPQGERWPWTSGLEDTVTREEGSPKGLSISL

SEQ ID NO: 45904 - protein, 66 aa, Homo sapiens
  misc_feature (1)...(66): Xaa = X or * as defined in Table 2
AQKHHLTXLSFLPRHXILTXNLTKIPTSKIKKTPRSRSPRRSTSCFLDNLAPSCGCSGKGSSWRIC

SEQ ID NO: 45905 - protein, 407 aa, Homo sapiens
  DOMAIN (331)..(383): Respiratory-chain NADH dehydrogenase subunit 1 proteins domain identified by eMATRIX, accession number BL00667A, p-value= 9.640e-20, raw score of 20.80
  DOMAIN (321)..(395): NADH dehydrogenases domain identified by PFam, accession name NADHdh, E-value=8.8e-32, PFam score of 117.4
KDHQLRKKLRRRGKQGAFTAALPPGSPRPPLRGGRSGGVGLGVRGQRTPQAPQAVTPSEGPEPLWGPVLGGGGEHRRGTGASAAAGASMRRLGAAGGGAGAGPQRGVGARVVVSEEANSPGAAITSNRETQDANEGLSAPRPECLLHPTCRLLYVPLIVRDWVCHTRSVVLLQVVNVTGIAVGTGLASAYDTLMSQSFGVKNLKRVGIILQRGVLILMLCCFPCWADLVNTERILLLLKQDPKSPGWTRECFQEWGSYIHLVIPSMFMVCTEQWTFEIGNFLAGLIDVMELGTQGIICELASVAYMNYFRLNPQPPISDFTINLAFLTLTERKILGYIQLRKGPDIVGPYGLLQPFTDAVKFTKEPLWPSTSTITLYIIAPTLALSIIVLLALPTRMLAATPRPRGT

SEQ ID NO: 45906 - protein, 391 aa, Homo sapiens
  DOMAIN (280)..(316): kw TRANSCRIPTASE REVERSE II ORF2 domain identified by eMATRIX, accession number DM01354F, p-value=3.526e-27, raw score of 14.56
  DOMAIN (165)..(373): AP endonuclease family 1 domain identified by PFam, accession name AP_endonucleas1, E-value=2.2e-41, PFam score of 150.9
MNECRGVEITTVCSEDWIQRHLPGAVVPLKGEGNVGVATEDHYQEDSFGFGLRGTGKPLKLEKSRPGAVTHTSPSDGLTQYVPDSLTAMPAAAVVIWVIRPGCGVQQQIGFLRHSNIDDIRPRTIIRAVAPVKLHGIRIKMASFTSATRLTDEQVITAPADSGIVIPRFSDNWVAGGKTHLTHKDSHKLKVKGWKKAFHANGHQKQAGVAILTSDKTNFKATAVKKDKEGHYIMVKGLDQQENITILNIYAPNTGAPKFMKQLLIDVRNEIDSNTIIAGDFNTPLTALDRSSIQKVNKETMDLNYTLEQMDLKDIYRTLHPTTAEYTIYSTVHGTFSKIDYMTGHKTSLNKFKKSEIISSSLSDHSGIKLEIDSKRNHQNHANTWKLITCS

SEQ ID NO: 45907 - protein, 481 aa, Homo sapiens
  DOMAIN (138)..(166): kw TRANSCRIPTASE REVERSE II ORF2 domain identified by eMATRIX, accession number DM01354A, p-value=9.871e-15, raw score of 11.77
AQAQGDLNFVPEPLAGVIEDPEGKLHPLTKDVSGIPGALMTAVSTRPYHQYSNAQIEYCEDQVVYLPKALKPLTDDRSEKEEPERSQMFEDFEEATSIGKGGEYYIKETPCGTKESEQQPSAQDLPSDRAYPNEKEPENQLCLNAPLKKYRIAEWIRIHQPTICCLRETYLTHKDSYKLKDHNSLPARKCNLMENEFDELTEVGFRRWVIINSSKLKEHVVTQCKEAKNCEKRQIDQVEERISVIEDQFNEIKREDKIREKRIKRNEHSRQEIWDYVKRPNLHLIGVPESDGENGTKLENTLQRIIQENFPNLARQANIPIQEIQRIPQRYSSRRATPREIIIRFTKVEMKEKMLRAAKEKGRDMHKGNPIRLTADLSAETLQARRQWGLIFNILKEKNFQPRISYPAKLSFISKGETKSFTDKQMLRDFVTTRPALQELLRENTKHEKKQLVPTMAKTYQIIKNIETMKKLHQLMGKTTS

SEQ ID NO: 45908 - protein, 71 aa, Homo sapiens
  DOMAIN (35)..(63): kw TRANSCRIPTASE REVERSE II ORF2 domain identified by eMATRIX, accession number DM01354B, p-value=5.415e-21, raw score of 14.71
MDPKQEEIPDSPEKEFRRYRIAEWIRIHQPIICCLQETHLTHKDSHKLKVKGWNKAFHANGHQKSAARETK

SEQ ID NO: 45909 - protein, 508 aa, Homo sapiens
  DOMAIN (332)..(360): kw TRANSCRIPTASE REVERSE II ORF2 domain identified by eMATRIX, accession number DM01354D, p-value=6.857e-19, raw score of 10.59
  DOMAIN (278)..(485): AP endonuclease family 1 domain identified by PFam, accession name AP_endonucleas1, E-value=1.7e-05, PFam score of -33.1
MKLEDLHTCYQNLPCSSSNQDILVLPQAQQESIWAFGHGRCGAQASHGQGTGEEHLRAASEFMLVLRQESSTPCFHQLLVAFTQDFVPLYQDFENFYTRNLYMRIRDNWNRPICSAPGPLFDVMERVSDDYNWTFRFTGRVIKDVINMGSYNFLGLAAKYDESMRTIKDVLKVYGTSVASTRHEMGEFTSSWQNALCVGGVLQADSVPQGPPWSWKMGRHSSLLEQNGKPHFYDKLIVESFEEAPLHVMVFTYMGYGIGTLFGYLRDFLRNWGIEKCNAAVERKEQKETHLTHKDSHKLKVNGWKEAFHANRHQKIAGVAILILDKTNFKATAVKKDKEEHYIMKKGLVQQENITILNIYAPNTGDPKFIKRLLTDLRNETDSNTIIVRDFSTPLTALDRITSLEKNINDLMELKNTAQKLREAYTSINTQIDQAEERISEIEDQLNEIKRENKIRERRIKRNEQSLQEIWDYVKRPNLHLIDVPESDRENGTKLENTLQDIIQEKNV

SEQ ID NO: 45910 - protein, 191 aa, Homo sapiens
  DOMAIN (38)..(72): Tubulin subunits alpha beta, and gamma proteins. domain identified by eMATRIX, accession number BL00227A, p-value=2.317e- 24, raw score of 24.55
  DOMAIN (38)..(175): Tubulin/FtsZ family domain identified by PFam, accession name tubulin, E-value=9.9e-52, PFam score of 185.3
MALSERSQPQDHVSHDRIYVKHPEYANLYRQKVDYTLPRVSISIHVGQAGVQIGNARWELYCLELAIQPDGQMPSDKTIGGGDDSFNMFFSEIGAGKHVPRAVFVDLEPTVVDRCLGHWMAAFLGEEVHTGTYRQLFHPEQLISGKEDAANNYSRGHYTIGKEDLVLDRIHKLLTSQCRKPKATMWLSQAT

SEQ ID NO: 45911 - protein, 86 aa, Homo sapiens
  DOMAIN (49)..(75): Aminotransferases class-III pyridoxal-phosphate attachment si domain identified by eMATRIX, accession number BL00600B, p-value= 7.811e-14, raw score of 19.60
  DOMAIN (3)..(86): Aminotransferases class-III pyridoxal-pho domain identified by PFam, accession name aminotran_3, E-value=4.6e-13, PFam score of 39.2
GRSTSVGHCHPGVVKAALKQMELLNTNSRFLHDNIVEYAKRLSATLPEKLSVCYFTNSGSEANDLALRLARQFRGHQDVITLDHAY

SEQ ID NO: 45912 - protein, 239 aa, Homo sapiens
  DOMAIN (58)..(127): Aminotransferases class-III pyridoxal-pho domain identified by PFam, accession name aminotran_3, E-value=0.069, PFam score of 7.1
EARRPCTLHLRSALHPATMCELYSKRDTLGLRKKHIGPSCKVFFASDPIKIVRAQRQYMFDENGEQYLDCINNVAHVGHCHPEVVKAALKQMELLNTNSRFLHDNIVEYAKRLSATLPGETLCLLFYKFRGYWPSSTNPSSRPAAPASPPAAERAGDFRAGRKPSVPGSRSVSGSPRGPCSRLSLSTFCTRYCPLSALTSGPGCPYPMCFFLSPRVSRLLYSSHMVAGCRALRRCKNSH

SEQ ID NO: 45913 - protein, 401 aa, Homo sapiens
  misc_feature (1)...(401): Xaa = X or * as defined in Table 2
GGLWEKMAAAAQSRVVRYLSMSRSAITAIATSVCHGPPCRQLHHALMPHGKGGRSSVSGIVATVFGATGFLGRYVVNHLGTAWGSQVIIPYRVXIKYXQSMHLSFPWGXPGGQLSVFLGNWGTARDXRFLFRRVSYNTGNVGSSILFGTRLGETKNFDFWRDVFVKIPQAIAQLSKGSWEFEKFISCFHIWNGGIIXKALSXDIXGNKAVGEKVVRDAFPEAIIVKPSDIFGREDRFLNSFASMHRFGPIPLGSLGWKTVKQPVYVVDVSKGIVNAVKDPDANGKSFAFVGPSRYLLFHLVKYIFAVAHRLFLPFPLPLFAYRWVARVFEISPFEPWITRDKVERMHITDMKLPHLPGLEDLGIQATPLELKAIEVLRRHRTYRWLSAEIEDVKPAKTVNI

SEQ ID NO: 45914 - protein, 262 aa, Homo sapiens
GLWEKMAAAAQSRVVRVLSMSRSAITAIATSVCHGPPCRQLHHALMPHGKGGRSSVSGIVATGFGATGFLRRYVVNHLGRMGSQVIIPYRCDKYDIMHLRPMGDLGQLLFLEWDARDKDSIRRVVQHSNVVINLIGTRPWKSKNSDYEDVFVKIPQAIAQLSKEAGVEKFIHVSHLNANIKSSSRYLRNKNRKREKEEMKKDLLSKKEPEPEDLENSQLIHIAKNEKACFEENTKSVAEQPFDEEIVDATHQLTSYLGRSQE

SEQ ID NO: 45915 - protein, 277 aa, Homo sapiens
  DOMAIN (74)..(83): Zinc finger C3HC4 type (RING finger), proteins. domain identified by eMATRIX, accession number BL00518, p-value=6.571e-10, raw score of 12.23
  DOMAIN (58)..(97): Zinc finger, C3HC4 type (RING finger) domain identified by PFam, accession name zf-C3HC4, E-value=1.1e-10, PFam score of 38.9
RKSSSVHNAASGLLGSRAPGAHRHLGRCRCRHRLVSPSPAMAEDLSAATSYTEDDFYCPVCQEVLKTPVRTTACQHVFCRKCFLTAMRESGAHCPLCRGNVTRRERACPERALDLENIMRKFSGSCRCCAKQIKFYRMRHHYKSCKKYQDEYGVSSIIPNFQISQDSVGNRIENNTGIKQIPGAPAFGDGRVGCRQRNAKTELLAAAGESPCTMSLGSGPNLGPSPRSKSSSVTSPQPCFTEHPRERFVSFPVHYVLEGSRMSFLLWSLKTDRIFGH

SEQ ID NO: 45916 - protein, 342 aa, Homo sapiens
  DOMAIN (216)..(234): RIBOSOMAL PROTEIN S2 SIGNATURE domain identified by eMATRIX, accession number PR00395C, p-value=4.857e-15, raw score of 16.17
  DOMAIN (140)..(307): Ribosomal protein S2 domain identified by PFam, accession name Ribosomal_S2, E-value=1.4e-57, PFam score of 204.7
MKVVCKEVKFEKQCPEAVLLHWEQTDDDENKRCDLREPRKPETHTKGPGLLVPTTQPGRNEGQSGADGKHARCSKTSCCLSGKEPSFIITEHCPLVPVQNTTIKPDSGIRILQTLDSRETFTMSTALDVLQMKEEDVLKFLAAGTHLGGTDLDFRMEQHICKRKSGGIYIINLKRSWEKLLLVAPAIVAIENPADVSVISSSSTGQRAMLKCAAATGATPIAGHFTPGTFTNQIQATFPNPRVLVVTDCRTGHQPLAEASYVNNLPTIALCHTDSPLHHVDIAIPCNRKAHSVDLMWMLAREILPMRGTIARKHWWEDPEEIEKEEQAAADKALTKEEFQGE

SEQ ID NO: 45917 - protein, 140 aa, Homo sapiens
  DOMAIN (2)..(17): RIBOSOMAL PROTEIN S2 SIGNATURE domain identified by eMATRIX, accession number PR00395F, p-value=8.875e-13, raw score of 10.56
  DOMAIN (4)..(31): Ribosomal protein S2 domain identified by PFam, accession name Ribosomal_S2, E-value=3.5e-09, PFam score of 36.4
  misc_feature (1)...(140): Xaa = X or * as defined in Table 2
TAEIAIPCNNKGAHSVGXMWRMLAREDLRMRGTISGEHPWEVMPDLYFYRDTEEIEKEEQAAADKAVTKEEFQGEWTAPAPEFTATQPEAADWSEGVQVPSVPIQQFPTEDWSAQPATEDWSAAPTAQATEWVGATTDWS

SEQ ID NO: 45918 - protein, 147 aa, Homo sapiens
  DOMAIN (28)..(82): Ribosomal protein S2 proteins domain identified by eMATRIX, accession number BL00962B, p-value=4.600e-36, raw score of 36.15
  DOMAIN (18)..(147): Ribosomal protein S2 domain identified by PFam, accession name Ribosomal_S2, E-value=2e-66, PFam score of 234.1
MSGALDVLQMKEEDVLKFLAAGTHLGGTNLDFQMEQYIYKRKSDGIYIINLKRTWEKLLLAARAIVAIENPADVSVISSRNTGQRAVLKFAAATGATPIAGRFTPGTFTNQIQAAFREPRLLVVTDPRADHQPLTEASYVNLPTIAL

SEQ ID NO: 45919 - protein, 434 aa, Homo sapiens
  DOMAIN (80)..(91): Trp-Asp (WD) repeat proteins proteins domain identified by eMATRIX, accession number BL00678, p-value=9.308e-11, raw score of 9.67
  DOMAIN (54)..(178): WD domain, G-beta repeat domain identified by PFam, accession name WD40, E-value=1.8e-28, PFam score of 108.0
MDSFGQPRPEDNQSVVRRMQKKYWKTKQVFIKATGKKEDEHLVASDAELDAKLETPIVTLSGHMEAVSSVLWSDAEEICSASWDHTIRVWDVESGSLKSTLTGNKVFNCISYSPLCKRLASGSTDRHIRLWDPRTKDGSLVSLSLTSHTGWVTSVKWSPTHEQQLISGSLDNIVKLWDTRSCKAPLYDLAAHEDKVLSVDWTDTGVSLGNRVRLCRRKDETERDKRGPTDLQQSDVSTAEKPSEFHKHVEFDFLIKGQFLRMPLDKHMEMENISSQLLVSGDLDVHGQFNIHQLLLLKQLTGHVLLGSLEDGFQLGTGILNGQLPLLLSIWDGSLQGSPLAFEALILSLKQADVLDQGCDQELGLQLTDLLFIQLNEEVDLVSQLFQVVDVALKHAVHVAPSYFLLLQKDPLGLQYLVLLLQEGYLLSEGGKLV

SEQ ID NO: 45920 - protein, 269 aa, Homo sapiens
  DOMAIN (139)..(154): G-PROTEIN BETA WD-40 REPEAT SIGNATURE domain identified by eMATRIX, accession number PR00320B, p-value=5.629e-10, raw score of 12.19
  DOMAIN (156)..(197): WD domain, G-beta repeat domain identified by PFam, accession name WD40, E-value=0.0014, PFam score of 25.3
KAGASCCGSANPYVSVGKSCVLLAMAQLQTRFYTDNKKYAVDDVPLSIPAASEIADLSNIINKLLKDKNEFHKHVEFDFLIKGQFLRMPLDRHMEMENISSEEVVEIEYVEKYTAPQARSNAWFHDDWISSIKRGRGRILTGSYDKTSRIWSLEGKSIMTIVGHTDVVKDVAWVKKDSLSCLLLSASMDQTILLWEWNVERNKVKALHCCKGHAGSVNSIAVDGSGTKYFGLRIEPKPAVSLVEEINSLSYRWTADNYKVGSGGKEEED

SEQ ID NO: 45921 - protein, 130 aa, Homo sapiens
  DOMAIN (24)..(37): PROTEIN ZINC-FINGER METAL-BINDI domain identified by eMATRIX, accession number PD00066, p-value=1.600e-09, raw score of 13.92
  DOMAIN (2)..(56): Zinc finger, C2H2 type domain identified by PFam, accession name zf-C2H2, E-value=0.091, PFam score of 19.3
  misc_feature (1)...(130): Xaa = X or * as defined in Table 2
VFCCPHCSLTFSKSFSSFSRLVRHQQTHWKQKSYLCPICDLSFGEKEGLMDHLEGLXRQGPGQSSHHKCRVILGQWLGFSHDVPTMAGEEWKHGGDQSPPRIHTPRRRGLREKACKGDKTKEAVSILKHK

SEQ ID NO: 45922 - protein, 67 aa, Homo sapiens
  misc_feature (1)...(67): Xaa = X or * as defined in Table 2
VYFKQVTLDSSCRLXERQVKSTSSWNILSSTWRLPFCPTSVVLRFLTWICLRTISTSSISWFPADSS

SEQ ID NO: 45923 - protein, 226 aa, Homo sapiens
  DOMAIN (134)..(173): PROTEIN ZINC FINGER ZINC-FINGER METAL-BINDING NU domain identified by eMATRIX, accession number PD01066, p-value=6.824e-27, raw score of 19.43
  DOMAIN (132)..(187): KRAB box domain identified by PFam, accession name KRAB, E- value=1.3e-16, PFam score of 68.6
TRWPSFEGSKIVLNCGRGEFGQQNEKGKNSLLEQIHLSQEATSNPGAFAGPLHLPSYWEVDSPRKESSQAWAPGQEWIKLERDTTEEKMFEQLKPIEPVQKTLPWVGEVAATLQEAMKRDCWREARVKKKPVTFEDVAVNFTQEEWDCLDASQRVLYQDVMSETFKNLTSVAWVRKKEEEEEEEEEEEEEEEEEEEEEEEEEEEEEEEEEEEEGEEEEEEEEEGEN

SEQ ID NO: 45924 - protein, 667 aa, Homo sapiens
  DOMAIN (210)..(249): PROTEIN ZINC FINGER ZINC-FINGER METAL-BINDING NU domain identified by eMATRIX, accession number PD01066, p-value=5.415e-26, raw score of 19.43
  DOMAIN (307)..(599): Zinc finger, C2H2 type domain identified by PFam, accession name zf-C2H2, E-value=2.4e-25, PFam score of 97.6
MLESAGNQDIEDVDIVLRQIQVKNRSTTEVGQNGNLQVEVSYTQAHIAPRPLASQGTWPHFVSSAPQPCFQVQNHSKYQNLYYSGFIRETEPISKGDVGEWLSAGKGESSAMFASEQEISKDEQGTPVLGSFYWEVDSPRKESSQAWAPGQEWIKLERDTTEEKMFEQLKPIEPVQKTLPWVGEVAATLQEAMKRDCWREARVKKKPVTFEDVAVNFTQEEWDCLDASQRVLYQDVMSETFKNLTSVEGKKKELREQHPSLRDEGTSDDKVFLACRGAGQCPLSAPAGTMDRTRVLQASQAGPPFFFATTVGKCFSRRSYLYSHQFVHNPKLTNSCSQCGKLFRSPKSLSYHRRMHLGERPFCCTLCDKTYCDASGLSRHRRVHLGYRPHSCSVCGKSFRDQSELKRHQKIHQNQEPVDGNQECTLRIPGTQAEFQTPIARSQRSIQGLLDVNHAPVARSQEPIFRTEGPMAQNQASVLKNQAPVTRTQAPITGTLCQDARSNSHPVKPSRLNVFCCPHCSLTFSKKSYLSRHQKAHLTEPPNYCFHCSKSFSSFSRLVRHQQTHWKQKSYLCPICDLSFGEKEGLMDHWRGYKGKDLCQSSHHKCRVILGQWLGFSHDVPTMAGEEWKHGGDQSPPRIHTPRRRGLREKACKGDKTKEAVSILKHK

SEQ ID NO: 45925 - protein, 349 aa, Homo sapiens
  DOMAIN (241)..(260): TYROSINE KINASE CATALYTIC DOMAIN SIGNATURE domain identified by eMATRIX, accession number PR00109B, p-value=5.235e-12, raw score of 12.27
  DOMAIN (128)..(348): Eukaryotic protein kinase domain identified by PFam, accession name pkinase, E-value=1.2e-54, PFam score of 195.0
MPSLAELFEGSSKAFGAAASQLNFPVASGEMLKFKYGLRNPLHAVAAEPIASRTSRLNLFFQGKPPFMTQQQMSPLSREGILDALFVLFEECSQPALMKIKHVSNFVRKYSDTIAELQELQPSAKDFEVRSLVGCGHFAEVQVVREKATGDIYAMKVMKKKALLAQEQVSFFEEERNILSRSTSPWIPQLQYAFQDKNHLYLVMEYQPGGDLLSLLNRYEDQLDENLIQFYLAELILAVHSVHLMGYVHRDIKPENILVDRTGHIKLVDFGSAAKMNSNKMVNAKLPIGTPDYMAPEVLTVMNGDGKGTYGLDCDWWSVGVIAYEMIYGRSPFAEGTSARTFNNIMNFQ

SEQ ID NO: 45926 - protein, 108 aa, Homo sapiens
  misc_feature (1)...(108): Xaa = X or * as defined in Table 2
KRQQAFGLLDLHQWFARGSQGFRLQTEGCIIGFPTFEVXRHSGFLSCQSSCTGSFSSVWADVPLMFEGAAQPVXPVPSRGSADFRPLSICXRSSRILLVKRCENSGVR

SEQ ID NO: 45927 - protein, 71 aa, Homo sapiens
ITMKSQRQIIKKAVTTKEMKSVCRRDTPAFMFIAALFKIAKIRIQRLCLSTDEWIKKMWYIHTMEYYSTLK

SEQ ID NO: 45928 - protein, 371 aa, Homo sapiens
  misc_feature (1)...(371): Xaa = X or * as defined in Table 2
XPSRILMLIITNPWPKSYFDAAGRLTPEFSQRLTNKIRELLHQMERGLKSSHPRDGTGYTGWAGIAALYLHLYEGLGDPAYLQVAHGYVKQSLNCLTKRSITFLCGDAGPLAVAAVLYHKMNNEKQAEDCITRLIHLNKNFGVEKIPQSHIQQICETILTSGENLARKRNFTAKSPLMYEWYQEYYVGAAHGLAGIYYYLMQPSLQVSQGKLHSLVKPSVDYVCQLKFPSGNYPPCIGDNRDLLVHWCHGAPGVIYMLIQAYKVFREEKYLCDAYQCADVIWQYGLLKKGYGLCHGSAGNAYAFLTLYNLTQDMKYLYRACKFAEWCLEYGEHGCRTPDTPFSLFEGMAGTIYFLADLLVPTKARFPAFEL

SEQ ID NO: 45929 - protein, 85 aa, Homo sapiens
ICLLQTSASPLPARSTFTPPAQSLSRQKEKVVSSRSFLQQRGWRAVSCSLLFYTCSPQLATENPPTDLGRGGRHVTSGLFVPLTI

SEQ ID NO: 45930 - protein, 344 aa, Homo sapiens
MKAQRPEECLKHIIVVLDPVLLQMEGGGQLLGALQTMECRCVIEAQAVPCSVTWRRRAGPSEDREDWVEEPTVLVLLRAEAFVSMIDNGKQGSLDSTMKGKETLQGFVTDITAKTAGKALSLVIVDQEKCFSLELLFFDFLPCTSAQNPPRRGKQGANKQTKKQQQRQPEASIGSMVSRVDAEEALVDLQLHTEAQAQIVQSWKELADFTCAFTKAVAEAPFKKLRDETTFSFCLESDWAGGVKVDLAGRGLALVWRRQIQQLNRVSLEMASAVVNAYPSPQLLVQAYQQCFSDKERQNLLADIQVRRGEGVTSTSRRIGPELSRRIYLQMTTLQPHLSLDSAD

SEQ ID NO: 45931 - protein, 804 aa, Homo sapiens
  DOMAIN (280)..(788): RNA recognition motif. domain identified by PFam, accession name rrm, E-value=9.3e-31, PFam score of 115.6
  misc_feature (1)...(804): Xaa = X or * as defined in Table 2
MAKSKGCSAATLASTHQILVTPWSCDNQKCLQTLPNVPGGTKLLLCEDHWFRNDSCNQAIPTIATLLSFPSLQASLWTTHFLSPLNHHPVNPDSHLEQPPGQSPRLNFEAGDPERAPHALGCKRSRTRATSDRQPMASRDPGWGKASVGKACALGSAVLPAGNDCTTDNLGLGSAGFEDLRLRLGQGPPRRQGALQAAPRKASSCAAGQRLAPDSSFSRKRRPSRQRLGCETAAVADTAEAKSSEAPAFGWSTMDEAGSSASGGGFRRALDEPPNSRIFLVISKYTPESVLRERFSPFGDIQDIWVVRDKHTKESKGIAFVKFARSSQACRAMEEMHGQCLGPNDTKPIKVRVPGSGCPRGKEWASWTSLHLLLCRGEGGVEHPFPAADQTAPGLGTGAALRRGSPPTKLRRVAGKGTGCGVFAPRERTRQPRPPGDRTAVAGLPSPSPSLIHQLLSSLPNSSXPTLSTFLTFLSQMPRFPYIKNGKTLPFPQVFIAQSRSSGSHRDVEDEELTRIFVMIPKSYTEEDLREKFKVYGDIEYCSIIKNKVTGESKGLGYVRYLKPSQAAQAIENCDRSFRAILAEPKNKASESSEQDYYSNMRQEALGHEPRVNMFPFGHGVVQYFNVASAIYAKYKLHGFQYPPGNRIGVSFIDDGSNATEKMATQMVAAQLASMVWNNPSQQQFMQFGGSSGSQLPQIQTDVVLPSCKKKAPAETPVKERLFIVFNPHPLPLDVLEDIFCRFGNLIEVYLVSGKNVGYAKYADRISANDAIATLHGKILNGVRLKVMLADSPREESNKRQRTY

SEQ ID NO: 45932 - protein, 562 aa, Homo sapiens
  DOMAIN (53)..(356): RNA recognition motif. domain identified by PFam, accession name rrm, E-value=1.7e-22, PFam score of 88.1
DSSVWQTPQKQRAVRPLHSGGAPWTKLAALRATRGFRPGVDSLDEPPNSRIFLVISKYTPESVLRERFSPFGDIQDIWVVRDKHTKESKGIAFVKFARSSQACRAMEEMHGQCLGPNDTKPIKVRVPGSGCPRGKEWASWTSLHLLLCRGEGGVEHPFPAADQTAPGLGTGAALRRGSPPTKLRRVAGKGTGCGVFAPRERTRQPRPPGDRTAVAGLPLSLALTNPPALEFTAKLVLAYFEYFSDLPLSDAQISIYKKRKNSTFPQVFIAQSRSSGSHRDVEDEELTRIFVMIPKSYTEEDLREKFKVYGDIEYCSIIKNKVTGESKGLGYVRYLKPSQAAQAIENCDRSFRAILAEPKNKASESSEQDYYSNMRQEALGHEPRVNMFPFGHGVVQYFNVASAIYAKYKLHGFQYPPGNRIGVSFIDDGSNATDLLIKMATQMVAAQRLHQWCGITQVSNNLWQFGGSSGSQLPQIQTDVVLPSCKKKAPAETPVKERLFIVFNPHPLPLDVLEDIFCRFGNLIEVYLVSGKNVGYAKYADRISANDAIATLHWKDSEWGET

SEQ ID NO: 45933 - protein, 51 aa, Homo sapiens
GEGCSRPVWSRPARMESRPLNCSSGGSPGSRMLMPWPGLWPPRSPAASLLS

SEQ ID NO: 45934 - protein, 287 aa, Homo sapiens
HAASPCCCYEEKQSPLQKHLRVCSLRTWSLAARVAEGTAETVDPSAAPKTSVWSSRVCWGRLLATISPSVNETDTCGMEDRRLVVCRPWRAQCHMKAWGWRHPEEGGTHSGAPSAVLQALAVAIQLGGHLADPLLQVDPLSSCGAVSLDILIYLVFYYRTASVPETYIVKTLFKKLESQSLIQSNVLTRSNSMKAERGEEAAKEKSEASRGWFMRFKERSCLHNIKMQGEAASADVEAAASYPKDLAKITDEHGYTKQQFDVYKTAFCWRVMLKKYVKLLFVLCPLP

SEQ ID NO: 45935 - protein, 233 aa, Homo sapiens
RLSTTVMRGAFVFMHKMPRLWLDYCQFLMDQGRVTHTRRTFDRALRALPITQHSRIWPLYLRFLRSHPLPETAVRGYRRFLKLSPESAEEYIEYLKSSDRLDEAAQRLATVVNDERFVSKAGKSNYQLWHELCDLISQNPDKVQSLNVDAIIRGGLTRFTDQLGKLWCSLADYYIRSGHFEKIRKAPVNGGPTWMVGQNSVPRFQTRRLTPLKRKGPLVTDFREKQPTPLAQE

SEQ ID NO: 45936 - protein, 57 aa, Homo sapiens
  misc_feature (1)...(57): Xaa = X or * as defined in Table 2
ARPCRWCPGSXTSASAPGPGLRPCPPGGDRTPASPPLHNQAAAAPPGPGTWRGAAAS

SEQ ID NO: 45937 - protein, 63 aa, Homo sapiens
EFGHVNMVMVRSLEPQEIADVSVQMCSPSRAGMYQGQWRMCTATGLYYGGEYVLVQPRVKELR

SEQ ID NO: 45938 - protein, 108 aa, Homo sapiens
  misc_feature (1)...(108): Xaa = X or * as defined in Table 2
LAKCGCLEARGRARQTSGRPRPTDGGPXSPCWETGKGHPVLGRRGSPGKQGLXSLPQSCQGQWRCAASRLLSSKNSWACMGSREAVSQETGTSSSSLGLMRPSDKKPS

SEQ ID NO: 45939 - protein, 80 aa, Homo sapiens
KETSTLLPLPKRTDNQMKTTLKDPGGSEFDSNSKNTWAPAPDTWAPAPDQTEQDQNRLSQNSVNLSPSSHANNLISSDLQ

SEQ ID NO: 45940 - protein, 139 aa, Homo sapiens
  misc_feature (1)...(139): Xaa = X or * as defined in Table 2
XSSPQRSGVAKLASSGPPPGPRARRRGGGLVVKRRGSGCPVPAMEGMDVDLDPELMQKFSCLGTTDKDVLISEFQRLLGFQLNPAGCAFFLDMTNWNLQAAIGAYYDFESPNISVPSMSFVEDVTIRGRGSQYLRILSL

SEQ ID NO: 45941 - protein, 605 aa, Homo sapiens; identical to SEQ ID NO: 34065
  DOMAIN (220)..(237): RNase H domain identified by eMATRIX, accession number PF00075A, p-value=4.000e-09, raw score of 14.44
  DOMAIN (466)..(512): Integrase core domain identified by PFam, accession name rve, E-value=0.0097, PFam score of 13.5

SEQ ID NO: 45942 - protein, 637 aa, Homo sapiens
MDGSSCVFIDCLWLIQAAEPSKMEETAHGKLPSKSSVLVPYWEWSWRSPAAVAVSWPHQVSTVRMRALIGKEWDPATWNGDMWEDPDEAGDTELINSDEHFWPEVTASPSPVVATSSPPPMLLSAFPPLSEEINPALPEAVARQNNVDSPQKPPPTPLFASRPITRLKAWWAPRVSECIIGIDIFSSWQNPCIGSLTGRVRATVVGKAKWKPLELPSPRKIANQKEYHIPGGIVEITATIKDLKDAGVAIPTTSSFSSPIWPVQKTDGAWRMTVDYCKLNQVVTPITAAVPDVVSLLETHINNAEASRQQISAFKVQVEMSLNLKSYTWLKDQLTVRENKDIFGDLKTEKVFYTEESCWKRKSIRAGRMARRRAPGSGHSGVPGGRWRDPTGFHFSSGEWQTSGGTTLQKKMKRRLHRRNRVIEWLETPENVVTPVLAHDLILTAAIFRTYHVKFRDAHAEMHMLTPRDLGCHSQPRPVGEWTPGIIYQLDLLSLQLSTPHGRRSTQVSGCRGWDECFWALAGAELCVALGQQEESGDMNVLKMVNVGDFIANKSGCQWDEELERGWSGKVLLYVSGCGASLINGVVFPCICRHTCTFYPLQCSFPRQLMAQLYIWVCALTSAFPSPSLISTSRKAA

SEQ ID NO: 45943 - protein, 230 aa, Homo sapiens
PVSCSGHSRWAAAAISIALSMIETVNMVFTFYSRHHGTISTRVLIGKRPERQDGQDTVNLGTLEETASPSPVVTTSPPQPMLPSAFPPLSEEINPALPEATVMASPEAVARQDNVDSAQEPPPTPLCASRPTTRQKSWWGARGEVESVTHEEMHYTGKELLEFSNLYKEKSGEQAWEWILRVWDNGGRNIQLDHPEFVDLGPLSRNSAFNVAVRGVKKGSKSLFAWLGEI

SEQ ID NO: 45944 - protein, 45 aa, Homo sapiens
MLSCQMPLEQVLSGLELFDPSEPLEQALLSGPWVSWQEPSWLEAF

SEQ ID NO: 45945 - protein, 262 aa, Homo sapiens
  DOMAIN (171)..(186): RIBOSOMAL PROTEIN P2 SIGNATURE domain identified by eMATRIX, accession number PR00456E, p-value=5.146e-11, raw score of 3.06
  DOMAIN (16)..(102): Ribosomal protein L14 domain identified by PFam, accession name Ribosomal_L14e, E-value=0.002, PFam score of 5.1
  misc_feature (1)...(262): Xaa = X or * as defined in Table 2
GAERLPEGPGKRMVFRRFVEVGRVAYVSFGPHAGKIVSAMVDVFDQNKGFWSNGPCTQVRRQAMPFKCMQLTDFILKFPHSAHQKYVRQSLGRREDINTKLGQPTRWGQGRFESQEEKEKPRLTDFXSVFXSXXRAKENXRDRINPRNEVXEAFKRAAFPGKASSQKKAPGYXGVLLAAAAAAAAAAAAAAAAAAAAAKVPAKKITAASKKAPAQKVPAQKATGQKAAPAPKAQNGSKSSKPQKAPAPKASGKESISGNHKK

SEQ ID NO: 45946 - protein, 322 aa, Homo sapiens
ACPRPRWPDVLQWLAQVIRAARPALHCQQQQQSQDKPCPPFAPLPHPHHHPHLAHQQPASGGSSPCLRCNSCASSGAPAAGAGDNLSLLLRTSSPGGAFRTRTSSPLSGSSCCCCCCSSRRGSQLNVSELTPSSHASALRQQYAQQSAQQSASASQYHQCHSLQPAASPTGSLGSLGSGPPLSHHHHHPHPAHHQHHQPQARRESNPFTEIAMSSCRYNGGVMRPLSNLSASRRNLALYGTGGGGSTGGGGGGGGSGHGSSSGTKSSKKKNQNIGYKLGHRRALFEKRKRLSDYALIFGMFGIVVMVIETELSWGAYDKVQA

SEQ ID NO: 45947 - protein, 606 aa, Homo sapiens
  DOMAIN (411)..(421): TYPE I ANTIFREEZE PROTEIN SIGNATURE domain identified by eMATRIX, accession number PR00308C, p-value=7.545e-09, raw score of 3.83
MWHIYTKEYYAAIEKDEFMSFAGTWMKLETVILSKLTQEQKTKHHMFSLCFEYTIPLASGHYGLVMRSCDYRGESARARPLSHPPLQLGLGKDARYLRICDRSLLCVCAAGDVMPIVLVRPTNRTRRLDSTGAGMGPSSHQQQESPLPTITHCAGSSAASSQSSRRRRRAPHTCIASSSNRARTSPCPPFAPLPHPHHHPHLAHQQPASGGSSPCLRCNSCASSGAPAAGAGDNLSLLLRTSSPGGAFRTRTSSPLSGSSCCCCCCSSRRGSQLNVSELTPSSHASALRQQYAQQSAQQSASASQYHQCHSLQPAASPTGSLGSLGSGPPLSHHHHHPHPAHHQHHQPQARRESNPFTEIAMSSCRYNGGVMRPLSNLSASRRNLHEMDSEAQPLQPPASVGGGGGASSPSAAAAAAAAAVSSSAPEIVVSKPEHNNSNNLALYGTGGGGSTGGGGGGGGSGHGSSSGTKSSKKKNQNIGYKLGHRRALFEKRKRLSDYALIFGMFGIVVMVIETELSWGAYDKASLYSLALKCLISLSTIILLGLIIVYHAREIQLFMANYGADDWRSALTYEPIFLILLEALRGVIHATPCRVSLSLWDGLDLP

SEQ ID NO: 45948 - protein, 806 aa, Homo sapiens; identical to SEQ ID NO: 37831

SEQ ID NO: 45949 - protein, 82 aa, Homo sapiens
  misc_feature (1)...(82): Xaa = X or * as defined in Table 2
SEPPHRGPTGALPSGAVRRGPLSSRPQIGRSTDSLHCVPGKATDAQRQPVKAAGSGAVPCKATGWSCPKLXEPISCINVTIC

SEQ ID NO: 45950 - protein, 232 aa, Homo sapiens
MAETAVINHKKRKNSPRIVQSNDLTEAAYSLSRDQKRMLYLFVDQLPQSDGTLQEQKSICEIHVAKYAEIFGLTSAEASKDIRQALNRFAGKEVVFIGTGPSAAGLLEFARGPLQTLFAWVSAAVFVEQRFFVNRECCCLIVPLEVLSQRSTRPREVSVCPYWGVPPSSAFLVEAIWAWLKEVAVPKVEGQTKPNLGEALCPSMVMGRQRIRHRGQSTVLEKDAEETYQVEK

SEQ ID NO: 45951 - protein, 108 aa, Homo sapiens
  DOMAIN (40)..(76): Granulins proteins domain identified by eMATRIX, accession number BL00799B, p-value=9.598e-09, raw score of 11.02
  misc_feature (1)...(108): Xaa = X or * as defined in Table 2
FHTSRPFWNISELSRFCIQKYKKPWHSVSDFYRYQFFICQGTACCPASLRMXHCPNXILQGTSSQNCCSCSGKSCSPMQQRHRSTVCSGSGTFCVGSCESFEGTYFSR

SEQ ID NO: 45952 - protein, 546 aa, Homo sapiens
  DOMAIN (300)..(318): Anaphylatoxin domain proteins domain identified by eMATRIX, accession number BL01177D, p-value=5.167e-09, raw score of 17.50
  DOMAIN (271)..(531): EGF-like domain identified by PFam, accession name EGF, E- value=1.5e-24, PFam score of 95.0
MSCDTNGEVEGGRVDSKTRGRQEVERNTETHLGSGLNCDIPLIFLTYEWRGILEYKIFSVKTGEVLGKPGQLGHPTGQTTFFETGTQVTSMQEMGSYSFGQPHPVALQGTAPLPAAFTGWRLASVAFPGTQCKLSVDLPIWGLEDSGPLLTAPLGSAPVGPLCGGSDPTFPFCTALTGPSAASLLEFARGPLQTLFAWVSAEVSAEQGFFVNHECCCLIVPLEVLSQRSTRPCEVSVCPYWGVPPRDRSNQCPSGFTLDSVGPFCADEDECAAGNPCSHSCHNAMGTYYCSCPKGLTIAADGRTCQDIDECALGRHTCHAGQDCDNTIGSYRCVVRCGSGFRRTSDGLSCQDINECQESSPCHQRCFNAIGSFHCGCEPGYQLKGRKCMDVNECRQNVCRPDQHCKNTRGGYKCIDLCPNGMTKAENGTCIGECLAVSVTEISCAVNKSNIDECKDGTHQCRYNQICENTRGSYRCVCPRGYRSQGVGRPCMDIDECENTDACQHECKNTFGSYQCICPPGYQLTHNGKTCQGKLPFKQIESGGGQ

SEQ ID NO: 45953 - protein, 222 aa, Homo sapiens
MGFCHDGRSIAFRGERGNDESAIEMIKVSHLKQYLAVVFRDKPLELWDVRTCTLLREMSKNFPTITALILTGRCASLKWRSKPKKEEFMGYRQWNPTQESSKGDFEIQLEGGPSMATVYRTEMQPVQIGIELLPSPLSFHPSPNSGIPNDPSWLLSTATLHPPTGVERSSSPATEQRWTENDFDELREEGFRRSNYSELREDTQTKGKEVENFEKNLEECIT

SEQ ID NO: 45954 - protein, 107 aa, Homo sapiens [sequence omitted]

SEQ ID NO: 45955 - protein, 480 aa, Homo sapiens
MLASTQGQDSNPSVNHVTWPPIWLEKFVSIPGTAIAALIKLELSQQERSGKWSLNSPLTLVKNACADPQSLVLPSCSLVLGKGGTTVETEEYFGGLAGGRVFTVVQKIGSHSKQLLASISELQYSQLHWPVQMQIQVLRMAAQLPTPSSKHHGTDSSDQAKGNQAPSTQEMPNVKQPFQPAWTKERSQDGAEKPMQAGPGTQESGTRCYQMLAPTRVAAVFSVPQLCPLSLQAASSQGAFFSTIIWYKTGFLYISSTSDQKALALEPLGDSRLPVLNNNLTSCFLFYLNTTGQETEALGKVEVARGLTVNCARIGGQEPSLLEEDPPRIPSRMPRSRASASLLWAQEGCGSPQNVLLARDELKGVTLTGKIKRMIKNQGIGQRAVENLLLKHLSDMIHHFMVQMEANLETVIRISIRPAAIFRPITAAARRGRRGAGCQLAPQPAADPKPPRTHARSLLGRRCRRPKAVIFYLPLLKIHC

SEQ ID NO: 45956 - protein, 236 aa, Homo sapiens
  DOMAIN (158)..(176): RIBOSOMAL PROTEIN S2 SIGNATURE domain identified by eMATRIX, accession number PR00395C, p-value=2.125e-16, raw score of 16.17
  DOMAIN (82)..(236): Ribosomal protein S2 domain identified by PFam, accession name Ribosomal_S2, E-value=7.1e-61, PFam score of 215.7
MEVTASPQGVSAVSKGDQKWTALGKGLTFIKAVGSIQRNRWRGWQLKALYQCTTIAGATGVFLRVYRALDVLQMEEEDVLKFLAAGIHLGGTNLDFQMKQYIYKKKCDGVYIINLKRTWEKLLLAACAIVAIENPADVRVISSRNTGQRAILKFAAATGATPIAGRFTPGIFTNQIQATFQEPQHLFFTDSRADHSPLTEASYVNLHTIAPRNTDSPLCYVDIAIPCKKGAHSVGL

SEQ ID NO: 45957 - protein, 226 aa, Homo sapiens
  DOMAIN (34)..(88): Ribosomal protein S2 proteins domain identified by eMATRIX, accession number BL00962B, p-value=4.600e-36, raw score of 36.15
  DOMAIN (24)..(193): Ribosomal protein S2 domain identified by PFam, accession name Ribosomal_S2, E-value=2.4e-97, PFam score of 336.8
REIFINVRSLLMACFVKEEDVLKFLAAGTHLGGTNLDFQMEQYIYKRKSDGIYIINLKRTWEKLLLAARAIVAIENPADVSVISSRNTGQRAVLKFAAATGATPIAGRFTPGTFTNQIQAAFREPRLLVVTDPRADHQPLTEASYVNLPTIALCNTDSPLRYVDIAIPCNNKGAHSVGLMWWMLAREVLRMRGTISREHPWEVMPDLYFYRDPEEIEKEEQAAAEE

SEQ ID NO: 45958 - protein, 588 aa, Homo sapiens
  DOMAIN (236)..(284): KH domain identified by PFam, accession name KH-domain, E- value=0.00013, PFam score of 28.8
MQTAAFLLDFCSLTLPRGCCVASVPVSPFGSPHLEYASLPSRLAARYAGEDVGEQLSRDKFEVRGEREMSGANIRYTGAVKAGQVVRLRYPEKSIRAHPCPFHGPTVVSTWEVEANLITGETEMELDLEVIVNLQLLLAALSVNKTNQELLPLVLMFELPIAGILQPVPDPNSPSIQHISQTYNISVSFKQRSRMYGATVIVRGSQNNTSAVKEGTAMLLEHLAGSLASAIPVSTQLDIAAQHHLFMMGRNGSNIKHIMQRTGAQIHFPDPSNPQKKSTVYLQGTIESVCLARQYLMPTAAPGNNEHPRGLSHKKHHTNDERPPLSNDAPTKQHLPPPTVGTSAGARDVARPDRQRLNPMNASYNVLTSLTESGYQQLFVDKLLPLLELYDAKLIKNFDSCQTAPPVHPLNNLGRPRLNIRRRIQPPSREHGCIIPARTDLTAYTTLRRTHFTFTHATQPRHDRVTRLRRTPLLQNLHFPRWNALISGYVLAVDIRTRAREIARSFRPGVNYWENWLAICRKLKLDPFLTPYTKINSRWIKDLIVRPKTIKTLEENLGNTIQDIGMGKDFMTKTPKQWQQKPKLTNGI

SEQ ID NO: 45959 - protein, 105 aa, Homo sapiens
  DOMAIN (42)..(57): WILM'S TUMOUR PROTEIN SIGNATURE domain identified by eMATRIX, accession number PR00049D, p-value=9.857e-10, raw score of 0.00
PYRDCLREPEGQGGREKVGPEGGSENPQQPKAAGVLSKHLPGAPAQPPQRPPSSPPPLAGPLTERVEKVCDFLDAAGDYLNVLPVSPVLVNLPLHRILLSRHGRR

SEQ ID NO: 45960 - protein, 27 aa, Homo sapiens
PSPGESPPLQPDPPVPPWPPPEEEPRA

SEQ ID NO: 45961 - protein, 56 aa, Homo sapiens
SLPRPGSWREFFVLRAWVVWLRERVGYHAGQHIRFAIRRQVLDRLQQAGPAWIQGK

SEQ ID NO: 45962 - protein, 152 aa, Homo sapiens; identical to SEQ ID NO: 35184
  misc_feature (1)...(152): Xaa = X or * as defined in Table 2

SEQ ID NO: 45963 - protein, 279 aa, Homo sapiens
  DOMAIN (19)..(32): PROTEIN ZINC-FINGER METAL-BINDI domain identified by eMATRIX, accession number PD00066, p-value=1.000e-10, raw score of 13.92
  DOMAIN (59)..(252): Domain of unknown function DUF4 domain identified by PFam, accession name DUF4, E-value=2.6e-42, PFam score of 150.5
MAYKLCGKEFNRMHNLMGHMHLHSDSKPFKCLYCPSKFTLKGNLTRHMKVKHGVMERGLHSQEIIDLRTNIDPHGTAQALMQADLQQDLRVDSGKPLVFHQLIQVADNRWYWYQRYHHLLVDGFSFPAITRQIANIYCTWLRGEPTPASPFTPFADVVEEYQQYRESEAWQRDAAFWAEQRRQLPPPASLSPAPLPGRSASADILRLKLEFTDGEFRQLATQLSGVQRTDLALALAALWLGRLCNRMDYAAGRQYFSYKIADASGVQARLGLAVGNHPQ

SEQ ID NO: 45964 - protein, 391 aa, Homo sapiens
  DOMAIN (242)..(351): Domain of unknown function DUF4 domain identified by PFam, accession name DUF4, E-value=2e-15, PFam score of 56.8
MWPRPVSTSWAQAIKVGQSMLVPSLFALFLGKIGAPDVTTIDQTRRQQPVRRQALVQFSNVIFTMYEVNMQTLNRQRSNRVEIWRYAFKIGGQQQFHLSLERVYQRGFINLYPLDAAFRQFCQHLLINRQNVIQQAQAVKLFTFHFPQPQPGNRSQQHRFHLVAQRQRLGHFVQQLRPGQFELLAFNELRHHVVIVGVKPFGHFRCRYFTETLHQSGLLGFPYVTPNVHISLALAIIMLGTRDAAFWAEQRRQLPPPASLSPAPLPGRSASADILRLKLEFTDGEFRQLATQLSSVQRTDISLALAALWLGRLCNRMDYAAGFIFMRRLGSAALTATGPVLNVLPLGIHIAAQETLPELATRLAAQLKKMRRHQRYDAEQIVRDSGRAAGD

SEQ ID NO: 45965 - protein, 978 aa, Homo sapiens
  DOMAIN (35)..(82): Methylmalonyl-CoA mutase proteins domain identified by eMATRIX, accession number BL00544C, p-value=1.000e-40, raw score of 21.04
  DOMAIN (692)..(916): Domain of unknown function DUF4 domain identified by PFam, accession name DUF4, E-value=2.8e-60, PFam score of 213.0
  misc_feature (1)...(978): Xaa = X or * as defined in Table 2
MDLFMNVAMLRAARYLWSEAVSGFGAQDPKSLALRTHCQTSGWSLTEQDPYNNVIRTTIEALAATLGGTQSLHTNVFDEALGLPTDFSARIARNTQIIIQEESELCRTVDPLAGSYYIESLTDQIVKQARAIIQQIDEAGGMAKAIEAGLPKRMIEEASAREQSLIDQGKRVIVGVNKYKLDHEDETDVLEIDNVMVRNEQIASLERIRATRDDAASDTREIVDLTNGNIKTFNGSIIIYARFDTGRHLFSGGNTVKTAHFHIAFKDHFAVNFELRHYAVNGFVQLGRVSGVIPVKIGLLIMGCQQLRFGIDAAPVIRERQIDGRFQVNTGCFRHVVSGVNKVHCLAVNTRIKRTNIILAICRASQASCAVMRGDIDQPITARDHRSMTTARYSQPSSVLLAELLTRAYPCPPLTPRIPAAAGHPEHAAHCFDAELSLMFFNKDILHFRRFAKYVAAFWRIASSSSRSASWRLRRAISPCTQPVVPTARINLAYTKVTSPISGRIGKSNVTEGALVQNGQATALATVQQLDPIYVDVTQSSNDFLRLKQELANGTLKQENGKAKVSLITSDGIKFPQDGTLEFSDVTVDQTTGSITLRAIFPNPDHTLLPGMFVRARLEEGLNPNAILVPQQGVTRTPRGDATVLVVGADDKVETRPIVASQAIGDKWLVTEGLKAGDRVVISGLQKVRPGVQPGIWMAEKLSELPSAWSVAHYVELTGEVDSPLLARAVVAGLAQADTLRMRFTEDNGEVWQWVDDALTFELPEIIDLRTNIDPHGTAQALMQADLQQDLRVDSGKPLVFHQLIQVADNRWYWYQRYHHLLVDGFSFPAITRQIANIYCTWLRGEPTPASPFTPFADVVEEYQQYRESEAWQRDAAFWAEQRRQLPPPASLSPAPLPGRSGSADILRLKLEFTDGEYXQLATQLSGGQIARRALDLMNGSSARICAAIPLSTEFRFTSSISTTTRSGLLNANCLYFS

SEQ ID NO: 45966 - protein, 592 aa, Homo sapiens
  DOMAIN (492)..(514): SPUMAVIRUS ASPARTIC PROTEASE (A9) SIGNATURE domain identified by eMATRIX, accession number PR00920C, p-value=9.561e-10, raw score of 13.24
MSVRFVADRGYPHRHDQRSRYQSFQAGWLQPRISKDEIISPVVQFCWWIEHADGPSLSPAASDSDYPPGEMFLDSDVNPEDPGADGVLAGITLVGCATRCNVPRSNCSSRGDTPVLDKGQGEVATIANGKVNPSQSTEEATEATEHPVALLFAADACLVASSFEADADDADDAAELADDAAAVFEDSALVSDAFAFVSDVFAAEADLAAALACSVASPAFVVAVEADDAALSADFPAAVALAEACPALVDAALADDPQTPSAQAQFKVINRTGCQGMGLRLNIRNIQLVIKYLDIEYRTKQRFITCRSPAVTGNLFGIVTLMTTHFFQLCGQSGCQFRQRFLRRNVNTQRQNVEHGSGSRQRRRAQSTHKDKSGGVVHTIAQSPQPQGCQRKGPRKDGGVGGTQRGGRMSLLQISGLFVVWLLCTLFIATLTWFEFRRVRFNFNVFFSLLFLLTFFFGFPLTSVLVFRFDVGVAPPEILLQALLSAGCFYAVYYVTYKTRLRKRVADVPRRPLFTMNRVETNLTWVILMGIALVSVGIFFMHNGFLLFRLNSYSQIFSSEVSGVALKRFFYFFMGPCKWSPRLTKHDPERYE

SEQ ID NO: 45967 - protein, 480 aa, Homo sapiens
  DOMAIN (84)..(103): PYRIDINE NUCLEOTIDE DISULPHIDE REDUCTASE CLASS-II SIGNATURE domain identified by eMATRIX, accession number PR00469I, p-value= 5.909e-21, raw score of 13.83
  DOMAIN (281)..(462): Domain of unknown function DUF4 domain identified by PFam, accession name DUF4, E-value=6.1e-42, PFam score of 149.2
MCGQRRPYGTVQMVHEGVRAVGTASTEAQWGHMPAATGTVRSPVWLQWSQLTHRPNTAIFEGQLELENGYIKVQSGIHGNATQTSIPGVFAAGDVMDHIYRQAITSAELTRWLKQQSVISQRWLNISRLLGFVSGILIIAQAWFMARILQHMIMENIPREALLLPFTLLVLTFVLRAWVVWLRERVGYHAGQHIRFAIRRQVLDRLQQAGPAWIQGKPAGSWATLVLEQIDDMHDYYARYLPQMALAVSVPLLIVVAIFPSNWAAALILLGTAPLNPLVMALALMQADLQQDLRVDSGKPLVFHQLIQVADNRWYWYQRYHHLLVDGFSFPAITRQIANIYCTWLRGEPTPASPFTPFADVVEEYQQYRESEAWQRDAAFWAEQRRQLPPPASLSPAPLPGRSASADILRLKLEFTDGEFRQLATQLSGVQRTDLALALAALWLGRLCNRMDYAAGFIFMRRLGLGGLDGYRNRASPFCR

SEQ ID NO: 45968 - protein, 105 aa, Homo sapiens; identical to SEQ ID NO: 45959
  DOMAIN (42)..(57): WILM'S TUMOUR PROTEIN SIGNATURE domain identified by eMATRIX, accession number PR00049D, p-value=9.857e-10, raw score of 0.00

SEQ ID NO: 45969 - protein, 27 aa, Homo sapiens
PSPGESPPLQPDPPVPPWPPPEEEPRA

SEQ ID NO: 45970 - protein, 93 aa, Homo sapiens; identical to SEQ ID NO: 40891
  misc_feature (1)...(93): Xaa = X or * as defined in Table 2

SEQ ID NO: 45971 - protein, 53 aa, Homo sapiens
RKEMASGFSKGPTLGCCRRALPDGDTQLQLLLRGNHDSVLGAKRRDKGEAGPD

SEQ ID NO: 45972 - protein, 424 aa, Homo sapiens
  DOMAIN (39)..(52): LUTEOVIRUS ORF6 PROTEIN SIGNATURE domain identified by eMATRIX, accession number PR00910A, p-value=9.036e-09, raw score of 2.51
HTLHSLVTILGTWALHSGPALLLPRPGSGLDFLLSPVLPSPQPPGLPTPTPFTNAVQLLLTLKLVSLASEVQDLHLAQRKEMASGFSKGPTLGLLRRRALPDGDTQLQLLLRGNHDRPVLPLPHLPGLAGAALPRGSASLRPLLRRAWPAPLFGLLFLLSSHLFPLEAVREDAFYARPLPARLFYMIPVFFAFRMRFYVAWIAAECGCIAAGFGAYPVAAKARAGGGPTLQCPPPSSPEKAASLEYDYETIRNIDCYSTDFCVRVRDGMRYWNMTVQWWLAQYIYKSAPARSYVLRTAWTMLLSAYWHGLHPGYYLSFLTIPLCLAAEGRLESALRGRLSPGGQKAWDWVHWFLKMRAYDYMCMGFVLLSLADTLRYWASIYFCIHFLALAALGLGLALGGGSPSRRKAASQPTSLAPEKLREE

SEQ ID NO: 45973 - protein, 156 aa, Homo sapiens
RDGEQPLWAWGSPCSPVAPTLCILWAPSSGPGPSFRPSPAPATPWLWPGLSPISCDSEPSASWACPLPCPSPKPDRWLLTLKLVSLASEVQDLHLAQRKEMASGFSKGPTLGLLRRRALPDGDTQLQLLLRGNHDSVLGAKRRDKGGQTTIIFVQV

SEQ ID NO: 45974 - protein, 142 aa, Homo sapiens
MTHDALPNLSQAPDPPTLSGLECYACIGVHQDDCAIGRSRRVQCHQDQTACFQGNGRMTVGNFSVPVYIRTCHRALLHHLMGTTSPWTAIGPPRGSCLLRGYLCNRKSMTQPFTSASATTPPRALQVLALLLPVLLLVGLSA

SEQ ID NO: 45975 - protein, 231 aa, Homo sapiens
HITRGRSCTRWTSSAMAKGAPRVILLCLFGAALCLTGSRALQCYSFEHTYFGPFDLRAMKLPSISCPHERFEAILSLDTGYRAPVTLARKGCWTGPPAGQDAIEPGRAAARLLGVRGCTTDKCNAHLMTHDALPNLSQAPDPPTLSGAECYACIGVHQDDCAIGRSRRVQCHQDQTACFQGNGRMTVGKGLEGWKGLGKGYGGRAAMRVVIPDRPNRETWPCSEVGGMTLV

SEQ ID NO: 45976 - protein, 546 aa, Homo sapiens
  DOMAIN (458)..(482): kw ANNEXIN ANTIGEN PROLINE TUMOR domain identified by eMATRIX, accession number DM00250B, p-value=1.000e-09, raw score of 13.84
  DOMAIN (80)..(539): Collagen triple helix repeat (20 copies) domain identified by PFam, accession name Collagen, E-value=3.5e-14, PFam score of 60.6
  misc_feature (1)...(546): Xaa = X or * as defined in Table 2
DEGRAKGHHTWQQTRENESQAKGETPYKTIRFRETYYHKNSMGETTPMIQLSPTGSLPQHVGIMGATIQDKIWVRTGLPGFPGTPGLPVSSGFPGSPGFPGLQGPPVSYGPTGIPGPIGPPGPPGLMVSSGPPGLPGPKVILGLNFQGPKGEKVSKGLQGPPGPPGQISEQKRPIDVEFQKGDQVSNGDRGPPGPPGIRGPPVSTGGEKGEKGEQGEPGKRVSEGKDGENGQPGIPVSSGDPGYPGEPGRDGEKGKNVMGPPGPPGFPGERGQKGDEGPPGISIPGPPGLDGQPGAPGLPGPPGPAGPHIPPSKLGDTCFNCIGTGISGPPGQPGLPGLPGPPGKLGAPGAPGFPGSKGEPGDILTFPGMKGDKGELGSPGAPGLPGLPGTPGQDGLPGLPGPKGEPVSCTFKGERGPPGNPGLPGLPGNIGPMGPPGFGPPGPVGEKGIQGVAGNPGQPGIPGKFGDPGQTITQPGKPGLPGNPGRDGDVGLPGMXGLPGQPGLPGIPGSKGEPGIPGIGLPGPPGPKGMLLTNGKSTQWSEDSS

SEQ ID NO: 45977 - protein, 62 aa, Homo sapiens; identical to SEQ ID NO: 35197
  misc_feature (1)...(62): Xaa = X or * as defined in Table 2

SEQ ID NO: 45978 - protein, 1693 aa, Homo sapiens
  DOMAIN (1167)..(1211): Synapsins proteins domain identified by eMATRIX, accession number BL00415N, p-value=4.229e-10, raw score of 4.29
  DOMAIN (50)..(1462): Collagen triple helix repeat (20 copies) domain identified by PFam, accession name Collagen, E-value=7.1e-185, PFam score of 627.6
RSCGSRRRMKLRGVSLAAGLFLLALSLWGQPAEAAACYGCSPGSKCDCSGIKGEKGERGFPGLEGHPGLPGFPGPEGPPGPRGQKGDDGIPGPPGPKGIRGPPGLPGFPGTPGLPGMPGHDGAPGPQGIPGCNGTKGERGFPGSPGFPGLQGPPGPPGIPGMKGEPGSIIMSSLPGPKGNPGYPGPPGIQGLPGPTGIPGPIGPPGPPGLMGPPGPPGLPGPKGNMGLNFQGPKGEKGEQGLQGPPGPPGQISEQKRPIDVEFQKGDQGLPGDRGPPGPPGIRGPPGPPGGEKGEKGEQGEPGKRGKPGKDGENGQPGIPGLPGDPGYPGEPGRDGEKGQKGDTGPPGPPGLVIPRPGTGITIGEKGNIGLPGLPGEKGERGFPGIQGPPGLPGPPGAAVMGPPGPPGFPGERGQKGDEGPPGISIPGPPGLDGQPGAPGLPGPPGPAGPHIPPSDEICEPGPPGPPGSPGDKGLQGEQGVKGDKGDTCFNCIGTGISGPPGQPGLPGLPGPPGSLGFPGQKGEKGQAGATGPKGLPGIPGAPGAPGFPGSKGEPGDILTFPGMKGDKGELGSPGAPGLPGLPGTPGQDGLPGLPGPKGEPGGITFKGERGPPGNPGLPGLPGNIGPMGPPGFGPPGPVGEKGIQGVAGNPGQPGIPGPKGDPGQTITQPGKPGFRGNPGRDGDVGLPGDPGLPGQPGLPGIPGSKGEPGIPGIGLPGPPGPKGFPGIPGPPGAPGTPGRIGLEGPPGPPGFPGPKGEPGFALPGPPGPPGLPGFKGALGPKGDRGFPGPPGPPGRTGLDGLPGPKGDVGPNGQPGPMGPPGLPGIGVQGPPGPPGIPGPIGQPGLHGIPGEKGDPGPPGLDVPGPPGERGSPGIPGAPGPIGPPGSPGLPGKAGRSGFPGTKGEMGMMGPPGPPGPLGIPGRSGVPGLKGDDGLQGQPGLPGPTGEKGSKGEPGLPGPPGPMDPNLLGSKGEKGEPGLPGIPGVSGPKGYQGLPGDPGQPGLSGQPGLPGPPGPKGNPGLPGQPGLIGPPGLKGTIGDMGFPGPQGVEGPPGPSGVPGQPGSPGLPGQKGDKGDPGISSIGLPGLPGPKGEPGLPGYPGNPGIKGSVGDPGLPGLPGTPGAKGQPGLPGFPGTPGPPGPKGISGPPGNPGLPGEPGPVGGGGHPGQPGPPGEKGKPGQDGIPGPAGQKGEPGQPGFGNPGPPGLPGLSGQKGDGGLPGIPGNPGLPGPKGEPGFHGFPGVQGPPGPPGSPGPALEGPKGNPGPQGPPGRPGLPGPEGPPGLPGNGGIKGEKGNPGQPGLPGLPGLKGDQGPPGLQGNPGRPGLNGMKGDPGLPGVPGFPGMKGPSGVPGSAGPEGEPGLIGPPGPPGLPGPSGQSIIIKGDAGPPGIPGQPGLKGLPGPQGPQGLPGPTGPPGDPGRNGLPGFDGAGGRKGDPGLPGQPGTRGLDGPPGPDGLQGPPGPPGTSSVAHGFLITRHSQTTDAPQCPQGTLQVYEGFSLLYVQGNKRAHGQDLGTAGSCLRRFSTMPFMFCNINNVCNFASRNDYSYWLSTPEPMPMSMQPLKGQSIQPFISRCAVCEAPAVVIAVHSQTIQIPHCPQGWDSLWIGYSFMMHTSAGAEGSGQALASPGSCLEEFRSAPFIECHGRGTCNYYANSYSFWLATVDVSDMFSKPQSETLKAGDLRTRISRCQVCMKRT

SEQ ID NO: 45979 - protein, 156 aa, Homo sapiens
  DOMAIN (65)..(92): C1q domain proteins domain identified by eMATRIX, accession number BL01113A, p-value=2.161e-15, raw score of 17.99
  DOMAIN (26)..(85): Collagen triple helix repeat (20 copies) domain identified by PFam, accession name Collagen, E-value=3.8e-12, PFam score of 53.8
FNYLPPGPSHNDVGIMGATIQDKIWGPPGLPGFPGTPGLPGERGFPGSPGFPGLQGPPGLPGPTGIPGPIGPPGPPGLMGPPGPPGLPGPKGNMGLNFQGPKGEKGEQGLQGPPGPPGQISEQKRPIDVEFQKGDQVSNGDRGPPGPPGIRGPPVS

SEQ ID NO: 45980 - protein, 36 aa, Homo sapiens
KKGAGQVVDDVQLAQRLAQANEIVLSWNCWMLCKQY

SEQ ID NO: 45981 - protein, 39 aa, Homo sapiens
FLSYTMLMDKGITQLEGICFLYTALMCGEKGPKKFRIGS

SEQ ID NO: 45982 - protein, 124 aa, Homo sapiens
  DOMAIN (98)..(124): Ribosomal protein S7 proteins domain identified by eMATRIX, accession number BL00052B, p-value=8.875e-16, raw score of 15.17
  DOMAIN (1)..(124): Ribosomal protein S7p/S5e domain identified by PFam, accession name Ribosomal_S7, E-value=5.6e-34, PFam score of 126.3
RFRKAQCTIVERLTNSMMMHGRNNGKKLMTVRIVKHAFEIIHLLTGENPLQVLVNAIINDVSPLRRVNHAIWLLCTGAREAAFRNIKTIAECLADELINAAKGSSNSYAIKNKDELERVAKSNR

SEQ ID NO: 45983 - protein, 296 aa, Homo sapiens
  DOMAIN (230)..(277): Ribosomal protein S7 proteins domain identified by eMATRIX, accession number BL00052A, p-value=3.195e-18, raw score of 27.85
  DOMAIN (177)..(296): Ribosomal protein S7p/S5e domain identified by PFam, accession name Ribosomal_S7, E-value=1.4e-07, PFam score of 30.0
QAFLPITPDQLSNYKVFAKKTALWQNDDVHSQHKGEYRNAAGEPKYRNSVTTHSEGKWQSEKGKDLGVGYWSMACYKLGHIAGNEQQKHICGGIAKKWKQPKCPPTGKWPAVVKPATESEGGGAKKEEKAHLPRVVEKELHESSRHIRHSIESVLLQAFTQKDYTAVKEKYAKYLPHSAERYAAKRFRKAQCPIVECLTYSMMTHGRNNRKKLMIMRIVKHAFEIIQLLTGDNPLQVLVNAIINSGPREDSTLTGRARIVRRQAVAVSPLSRVNQAIWPQCTGALEAAFRNIKTIA

SEQ ID NO: 45984 - protein, 178 aa, Homo sapiens
  DOMAIN (78)..(125): Ribosomal protein S7 proteins domain identified by eMATRIX, accession number BL00052A, p-value=1.750e-30, raw score of 27.85
  DOMAIN (25)..(178): Ribosomal protein S7p/S5e domain identified by PFam, accession name Ribosomal_S7, E-value=8e-71, PFam score of 248.7
DVQINDISLQDYIAVKEKYAKYLPHSAGRYAAKRFRKAQCPIVERLTNSMMMHGRNNGKKLMTVRIVKHAFEIIHLLTGENPLQVLVNAIINSGPREDSTRIGRAGTVRRQAVDVSPLRRVNQAIWLLCTGAREAAFRNIKTIAECLADELINAAKGSSNSYAIKKKDELERVAKSNR

SEQ ID NO: 45985 - protein, 143 aa, Homo sapiens
LQGASVEKKMAQVLHVPAPFTGTPGPASPPAFPAKDPDPPYSVETPYGYRLDLDFLKYVDDIEKGHTLRRVAVQRRPRLSSLPRGPGSWWTSTESLCSNASGDSRHSAYSYCGRGFYPQYGALETRGGFNPRVERTLLDARRR

SEQ ID NO: 45986 - protein, 267 aa, Homo sapiens
MEEMGGGGELETLLSLNKVFFRYEKVKSLKKMHAKDPDPPYSVETPYGYRLDLDFLKYVDDIEKGHTLRRVAVQRRPRLSSLPRGPGSWWTSTESLCSNARTCEQQLDLQAHTTDRLATGVFPDAGVTVDQEPLVACPGITEGYTCLLVTPHYVPSAPISLTDTHRRVCSILCHTGTRTGSKSRREDWDTWKPGIDKLVSWTLEDLRVASQVYQLGSDQITKDARNRRLCRSQGSQQIQDRESAENLITILKSYALTIKADAETSLM

SEQ ID NO: 45987 - protein, 293 aa, Homo sapiens
  misc_feature (1)...(293): Xaa = X or * as defined in Table 2
LPLSLPRAARPAVAPHLPPREPGPALPLPPPQPPRPPSLPGSAQGCNSXRTGTAAAGAGPFAPASMSLRVQTPCWPQRGAREPPGSCASWLFCAVWQMVRAHSGCPLAPPPAAAAWVAAQLQPXDGHEGPGGXETSXVLRLRPTPTPPLPTWCCTVRPRRPVLPFCLIMRRRTAGPPCAPIAAAPTTPSSLRRGKVPTGRPPVLXGXAAVMLTMAVTITRTVTTSCNAAAVMPPKTGTAHRAPLTPGTVXRDLCLVKPTAQMPPSAPPWTAPPRVAVAPVIVLPAISNLGAFA

SEQ ID NO: 45988 - protein, 119 aa, Homo sapiens
GRERGDKGGAVQTLQDLVNVHLGLTYPPRPCGHSPPSWASPQAPLQPPLRGEPGHGWGSPSGLGQGKSEGLGPAHLPRAARPAVAPHLPPREPGPALPLPPPQPPRPPSLPGSAQGCNS

SEQ ID NO: 45989 - protein, 75 aa, Homo sapiens
MQSMTKMYCGPLDQPASPCSNVDDIEVKLEIMLLTERDDGKEVLDVGEERRYEIEEYDSKWTRKYNCLAVLRVHS

SEQ ID NO: 45990 - protein, 87 aa, Homo sapiens
SPALQPIHFNPFIFNLLVKFVSSRIKAVKLQIVLQMEPQMQSMTKIYHGPLDRPASPCSDVDDIEGTPPEEISTAQPLLRPNSAGSS

SEQ ID NO: 45991 - protein, 338 aa, Homo sapiens
MPGQDNIFQEVLVDGAPVQELQRTSLPSASDLSQMLLLVPGEVHQILNRNAYIMESWLSSSSPTVSRSCRYSTSPQLLLGSYTGMDSGERWGFGKHEVSDLLVQYLLVRVAAQVLDEFLLCEVCPPASGVVNQQDSSRFLITHGYLLDVCESFFGNKGDHHFVPPDSRRRTRQSPRKLSHDRALLSCRSDCCGWHFRHAAAVILDGQFDLISFCATVTTTSLACECLRRYLMPHGQFATSGLPERRHQARRQLIIQLHREPNLALYSSQLASSAGRIQARAPAENRNKVFSREEPTIAMPPQSNVVSPWNGSIEAEWSIIVMPIVDSWQRDVLYEGGI

SEQ ID NO: 45992 - protein, 278 aa, Homo sapiens
  DOMAIN (162)..(201): 5 kw NUCLEOSIDE TRANSPORT DEPENDENT NA domain identified by eMATRIX, accession number DM01857E, p-value=8.147e-35, raw score of 18.90
  DOMAIN (1)..(275): Na+ dependent nucleoside transporter domain identified by PFam, accession name Nucleoside_tra2, E-value=7.1e-68, PFam score of 238.9
MGLLIRILGSIFQKALNISKIESFVAVTTIFLGQNEIPAIVKPFIDRMNRNELFTAIWYRDGVHCWFDDELVMPEWAYQLTTSRQPSLRRSHLKICRSSETPPKSFIEAAASGAMTGLKIAAGVATVVMAFVAIIALINGIIGGIGGWFGFANASLESIFGYVLAPLAWIMGVDWSDANLAGSLIGQKLANNEFVAYLSFSPYLQTGGTLEVKTIAIISFALCGFANFGSIGVVVGAFSAISPKRAPEIAQLGLRALAAATLSNLMSATIAGFFIGLA

SEQ ID NO: 45993 - protein, 279 aa, Homo sapiens
  misc_feature (1)...(279): Xaa = X or * as defined in Table 2
AVFLSTSNEAVYKIFDDSPCPFTAKTCNPETFPSSNESRQCPNARCQFAFYGGESGYHRALLGLQIFNAFMFFWLANFVLALGQVTLAGAFASYYWALRKPDDLPAFPLFSAFGRALRYHTGSLAFGALILAIVQIIRVILEYLDQRLKAAENKFSYCLMTCLKCCFWCLEKFIKFLNRNAYIMIAIYGTNFCTSARNACFLLMRNIIRVDVLDKITDFLFLXGKLLIVGIVGILAFFFFTHRIRIVQDTSPPLNYYWVPILTVIVGSYLIAHGFFQRY

SEQ ID NO: 45994 - protein, 226 aa, Homo sapiens
FRGMGDERPHYYGKHGTPQKYDPTFKGPIYNRGCTDIICCVFLLLAIVGYVAVGIIAWTHGDPRKVIYPTDSRGEFCGQKGTKNENKPYLFYFNIVKCASPLVLAGIQCPTPQICVEKCPDRYLTYLNARSSRDFEYYKQFCVPGVPRTIKKANGVLEAGNSPCAYLKITPSLGTDYPWFLLEFQCPTPQICVEKCPDRYLTYLNARSSRDFEYYKQFCVPGVQEQ

SEQ ID NO: 45995 - protein, 347 aa, Homo sapiens; identical to SEQ ID NO: 39770
  DOMAIN (180)..(228): Intermediate filaments proteins domain identified by eMATRIX, accession number BL00226B, p-value=1.643e-31, raw score of 23.86
  DOMAIN (77)..(342): Intermediate filament proteins domain identified by PFam, accession name filament, E-value=1.1e-78, PFam score of 274.8

SEQ ID NO: 45996 - protein, 1301 aa, Homo sapiens
  DOMAIN (64)..(112): Intermediate filaments proteins domain identified by eMATRIX, accession number BL00226B, p-value=4.240e-34, raw score of 23.86
  DOMAIN (3)..(756): Intermediate filament proteins domain identified by PFam, accession name filament, E-value=2.5e-103, PFam score of 356.7
  misc_feature (1)...(1301): Xaa = X or * as defined in Table 2
STQQKTARSNMDNMFESYINNLRRHVETLGQEKLKLEAELGNMQGLVEDFKNKYEDEINKRTEMENEFVLIKKDVDEAYINKVELESRLEGLTDEINFLRQLYEEEIRELQSWISDTSVVLSMDNSRSLDMNSVIAEVKAQYEEIANRSQAEAESMYQIKDEELQSLAGKHGDNLRCTKTXDLLRXTRNISRLQAEIEGLKGQRAFLEAAIADAEQCGELAIKDANAKLSELEAALQRAKQDMAWQLRLMNVRLALDIEIATYKKLLEGEESRLESGMQNMSIHTKTTSGYASGLSSACGGLTSPGLSYGLGASSFSRTSYSRAVVVKIETRDGKLVSESSDVLPKDIVAVLNEEGGYHQIGPAEYCTDSFIMSVTIAFATQLEQIHLCCGDQSLGSTEIPLTGLLKKGSTEINQHPVTVEGAFTLDPPNRAKQKLAPIPVELAPTSLIELKTQNEHEPEHSKKKVLTPIKEKTLTGPKSPTVSPVPSHNQSPPTKDDATESEVESLQYDKDTKPNPKASSSVPASLAQLVTTSNASEVASGQKIAVPATSHHFCFSIDLRSIHALEIGFPINCILRYSYPFFGSAAPIMTNPPVEVRKNMEVFLPQSYCAFDFATMPHQLQDTFLRIPLLVELWHKDKMSKDLLLGIARIQLSNILSSEKTRFLGSNGEQCWRQTYSESVPVIAAQGSIDCFNESIIQGDEKLNDAENKYKILEKEFQQFKDQQNNKPEIRLQSEINLLTLEKVELERKLESATKSKLHYKQQWGRALKELARLKQGVSAVQQKPSSLPPAPCPSEIQTEPRETLEYKAALELEMWKEMQEDIFENQLKQKELAHMQALAEEWKKRDRERESLVKKKLQREKKELQSERQRNLQELQDSIRRAKEDCIHQVELERLKIKQLEEDKHRLQQQPLHVGLPPSSGLTFCKNNLIRDFMPMISETVYIWDFHMQALIGFVWSSFACSKGHRRNRTQKKTEVSVLNGPRRASNKFNMLSTEYEFLVAAAVDWLSQDSKWLQDSHIVPDVKLCVVASAYRQSYQSLGNDISLGYRARRLEPYDPASPVACVRRVQGEGQASSVTSESTCRALNGLKAEKYLRDYYNRVYKTATACAVYKPALTNSLRQAIRSPRTIAQEGRITNPLQLPTALLPARLPVLVLLKRIELLQIVGVTLRLKHSLLYHNVRSPETEVLTDVLLGSVLPERPLIAAPGLELIQSYPVWTTLLILPGAQLVISTLPVLYLALIRLIRVPNHHRALNSLPPTGLQETYSLIQLPEVISAIDRVILALATNTLHPARNYCRTF

SEQ ID NO: 45997 - protein, 266 aa, Homo sapiens
  DOMAIN (228)..(258): ALDO-KETO REDUCTASE SIGNATURE domain identified by eMATRIX, accession number PR00069D, p-value=4.682e-29, raw score of 19.36
  DOMAIN (107)..(264): Aldo/keto reductase family domain identified by PFam, accession name aldo_ket_red, E-value=3.3e-73, PFam score of 256.6
MKPRTLVVSVTVLKDGVSRVCSFRCSDVSRISSFQWVRGLADFRNEATDPHGLLDDILTLRQDKGSFMICWLKGKAPPGDPAPPRITPTVRFSTMDLSAASHRIPLSDGNSIPIIGLGTYSEPKSLWATNHVPEMVRPTLERTLRVLQLDYVDLYIIEVPMAFKPGDEIYPRDENGKWLYHKSNLCATWEAMEACKDAGLVKSLGVSNFNRRQLELILNKPGLKHKPVSNQVECHPYFTQPKLLKFCQQHDIVITAYSPLWTSTNP

SEQ ID NO: 45998 - protein, 143 aa, Homo sapiens
  DOMAIN (47)..(85): Aldo/keto reductase family proteins domain identified by eMATRIX, accession number BL00798E, p-value=7.462e-24, raw score of 20.32
  DOMAIN (16)..(143): Aldo/keto reductase family domain identified by PFam, accession name aldo_ket_red, E-value=1.5e-37, PFam score of 135.6
WKQHSHHQTWYLLTSEACKDAGLVKSLGVSSFNSRQLELIQNNPGLKPKPVSNEVECHPYYTQPKLLKFRQQHDIVMIAYSPLGTTRNPTWTNMSSLPSLKDALLKRCNKITAQVILRFNIQQGVVVIPKSFNPEKIKENLQA

SEQ ID NO: 45999 - protein, 26 aa, Homo sapiens
  misc_feature (1)...(26): Xaa = X or * as defined in Table 2
RHAPQVLGGLSEGTXGGHRCPARGHW

SEQ ID NO: 46000 - protein, 76 aa, Homo sapiens
  misc_feature (1)...(76): Xaa = X or * as defined in Table 2
XSQPINLNHYATKKSVAESMLDVALFMSNAMRLKAVLEQGPSSHYYTTLVTLISLSLLLQVVIGVLLVVIARLKPE

SEQ ID NO: 46001 - protein, 1029 aa, Homo sapiens
  DOMAIN (553)..(598): kw TRANSCRIPTASE REVERSE II ORF2 domain identified by eMATRIX, accession number DM01354N, p-value=1.000e-40, raw score of 13.17
  DOMAIN (637)..(912): Reverse transcriptase domain identified by PFam, accession name rvt, E-value=1.6e-80, PFam score of 280.9
MGKKHNRKTGNSKNQSASPPPKEHSSSPPTEQSWTENDFGKLREGFRRSNYSELQEDIQTKGKEVENFEKNLEECKNRITNTEKCLKELMELKTKARELQRVSAMEDEMNEMKREGKFREKRIKRSEQSLQEIWDYVKRPNLRLIGVPESDGENGTKLENTLQDSIQENFPNLARQANVQIQEIQRTPQRYSSRRATPRHMIVRFTKVEMKEKMLRAAREKDFKTTKIKRDKEGHYIKVKGSIQQEELTILNTYASNTGAPRFIKQVLSDLQRDLDSHTLIMGDFNTPLSTLDRSTRQKDNKDTQELNSALHQVDLIDIYRTLHLKSTEYTFFSAPHHTYSKINHILGSKALLSKCKRTEIITNYLSDHSAIKLELRIKNLTQNCSTTWKLNNLLLNNYWIHNEMKAEIKMFFETNENKDTTYQNLWDAFKAVCRGKFIALNAHKRKQERSKIDTLTSQLKELEKQEQTHSKASRRQEITKIRAELKEIETQKTLQKINESRSWFFERINKIDRPLARLIKKKREKNQIDAIKNDKGDITTDPTEIQTTIREYYKHLYANKLENLEEMDKFLDTYTLPRLNQEEVESLNRPITGSEIVAIINSFPTKKSPGPDGFTAEFYQRYKEELVPFLLKLFQSIEKEGILPNSFYEASIILIPKPGRDTTKKENFRPISLMNIDAKILNKILANGIQQHIKKLIHHDQVGFIPGMQGWFNIRKSINVIQHINRAKDKNHMNISIDAENAFDKIQQPFMLKTLNKLGIDGTYFKIIRAIYDKPTANIILNGQKLEAFPLKTGTRQECPLSPLLFNIVLEVLARAIRQEKEIKGSQLGKEEVKLSLLADDMIVYLENPIVSAQNLLKLISNFSKVSGYKINVQKSQAFLYTNNRQTESQIMNELPFTIASKRRKYLGIQLTRDVKDLFKENYKPLLKEIKEDTNKWKNIPCSWVGRINIVKMAILPKVIYRFNAIPIKLPMPFFTELEKTTLKFIWNQKKVRITKSILSQKNKAGGITLPDFKLYYKATVTKTAWYW

SEQ ID NO: 46002 - protein, 744 aa, Homo sapiens
  DOMAIN (472)..(513): kw TRANSCRIPTASE REVERSE II ORF2 domain identified by eMATRIX, accession number DM01354I, p-value=1.000e-40, raw score of 15.55
  DOMAIN (248)..(458): AP endonuclease family 1 domain identified by PFam, accession name AP_endonucleas1, E-value=1.7e-59, PFam score of 211.1
MGKKQNRKTGNSKKQSASPPPKERSSSPATEQSWMENDFDELREEGFRRSNYSELREDIQTKGKEVENFEKNLEECITRITNTEKCLKELMELKTKARELHEECRSLRSRCDQLEERVSAMEDEINEMKPNLRLIGVPESDGENGTKLENTLQDIIQENFLNLARQANVQIQEIQRTPQRYSLRRATPIHIIVRFTKVEMKEKMLRAAREKRRVTLKGKPIRLTVDLLAETLQARREWGSIFNILKEKNFQPRISYPAKLSFETHLTCRDTHRLKIKGWRKICQANGKQKKAGVAILVSDKTDFKPTKIKRDKEGHYIMVKGSIQQEELTILNVYAPNTGAPRFIKQVLSDLQRDLDSHTLIMGDFNTPLSTLDRSMRQKVNKDTQELNSALHQADLIDIYRTLHPKSTAYTFFSAPHHTYSKIDHILGSKALLSKCKRTEIITNCLSDHSAIKLELRIKNLTQNRSTTWKLNNLLLNDYWVHNEMKAEIKMFFETNENKDTTYQNLWDAFKAVCRGKFIALNAHKRKQERSKIDTLTSQLKELEKQEINKIDRPLARLIKKKEKNQIDAIKNDKGDITTDPTEIKTTIREYYKHLYANKLENLEEMDKFLDKYTLPRLNQEEVESLNRPITGAEIVAIINSLPTKKSPGPDGFTAEFYQRYKEELLVCPTFLFEKHPVNYDFEQETLHFSPISLRSSEELNLSTYRLYGWSEEQSLWVIRTWARVQKFRAAVPLVNEPHTTEA

SEQ ID NO: 46003 - protein, 695 aa, Homo sapiens
  DOMAIN (100)..(147): kw TRANSCRIPTASE REVERSE II ORF2 domain identified by eMATRIX, accession number DM01354V, p-value=1.000e-40, raw score of 12.97
MPSLTTPIQHSVGSSARAIRQKKEIKRIQLGKEEVKLSLFADDITVHVKNPITSAQNLLKLISNFSKVSGYKINVEKSQAFLYTNNRQTESQIMSELPFRIASKRIKYLGIQLTREVKDLFKDNYKPLLNEIKEDTNKWKNIPCSWIGRINIMKMAILPELEKTTLKFTWNQKRACIAKTILSQKNKAGGITLPDFKLYYKATVIKTAWYWYQNRDTDKWNRTESAEIIPHIYNHLIFDKRDKNKKWGKDSLFNKWCWENWLAICRKLKLDPFLTPYTKINSRWIKDLNVRPKTIKTLEENLGNTIQDICMRKDFMSKTLKAMATKAKIDKWDLIKLKSFCTAKETTIKMNSKRNSVPHQQQNKKTGNSKKQSASPPPRERSSSPATEQSWMENDFDELSEEGFRRSNYSELREDIQTKGKEVENFEKNLEECITRITNTEKCLKELMELKTKARELHEECRSLRSRCDQLEERVSAMEDEMNEMKREEKFREKRIKRNEQGLQEIWDYVKRPNLHLIGVPESDGENGTKLENTLQDIIQENFPNLARQANVQIQEIQRMPQRYSSRRATPRHIIVRFTKVEMKEKMLRAAREKGRITLKGKPIRLTADLSAETLQARREWGPIFNILKEKNFQPRISYPAKLSFISEGEIKYFTDKQMLRDFVTSRPALKELLKEALNLERNNWYQPLQNHAKM

SEQ ID NO: 46004 - protein, 504 aa, Homo sapiens; identical to SEQ ID NO: 36888
  DOMAIN (369)..(414): kw TRANSCRIPTASE REVERSE II ORF2 domain identified by eMATRIX, accession number DM01354N, p-value=1.000e-40, raw score of 13.17

SEQ ID NO: 46005 - protein, 420 aa, Homo sapiens; identical to SEQ ID NO: 45505

SEQ ID NO: 46006 - protein, 714 aa, Homo sapiens; identical to SEQ ID NO: 45506

SEQ ID NO: 46007 - protein, 451 aa, Homo sapiens; identical to SEQ ID NO: 32457

SEQ ID NO: 46008 - protein, 580 aa, Homo sapiens
  DOMAIN (57)..(100): kw TRANSCRIPTASE REVERSE II ORF2 domain identified by eMATRIX, accession number DM01354T, p-value=2.263e-35, raw score of 9.48
  DOMAIN (1)..(162): Reverse transcriptase domain identified by PFam, accession name rvt, E-value=0.0036, PFam score of -24.6
MIISIDAEKAFDKIQHPYIIKTLSKINIQGTYLNVIKAIYDKPTANIILNGEKLKAFSLRTGARQGCSLSPLLFNTVLEALARAIRQEKETKGIQIGKEEVKLSLFADDMIVYLENPKDSSRKLLELIKECSKVSGYKINVPQISSSSTHQQRTSRESNQELNPCYNSCKNKNKNKNKILRNIPNKRVKRPLQGKLQNTAERNHRRHKQIESHPLLMDLQLRVLSVRRKTNNRKDIHTKNPSVHHHHQRPKVDKTTKMGKKQNRKTGNSKKQSASPPPKERSSSPATEQSWMENDFDELREEGFRRSNYSDLREDTRTKGKEVENFEKNLAECITRTTNTEKCLKELMELKTKARELQRVSAMEDEMNEMKREGKFREKRIKRNEQSLQEIWDYVKRPNLRLIGVPESDGENGTKLENTLQDIIQENFPNLARQANVQIQEIQRTPQTYSSRRATPRHIIVRFTKVEMKEKMLKAAREKGRVTLKGKPIRLTADLSAETLQARREWGPIFNILKEKNFQPRISYPAKLSFISEGEIKYLTDKQMLRDFVTTRPALKEVLKEALNMERNNRYEPLQNHAKM

SEQ ID NO: 46009 - protein, 665 aa, Homo sapiens
  DOMAIN (110)..(151): kw TRANSCRIPTASE REVERSE II ORF2 domain identified by eMATRIX, accession number DM01354I, p-value=5.500e-39, raw score of 15.55
MGDFNTPLSTLDRSTTQKVNKDTQELNSALQQADLIDIYKTLHPKSTEYTFFSAPHHTYSKIDHIIGSKALLSKCKRTEITTNYLSDHRAIELEIRIKKLTQNHTTTWKLNNLLRNDYWVNNEMKAEIKMFFETNENKDTTYQNLWDTFKAVCRGKCTALNAHKRKQERSKINTLTSQLKELEKQEETNSKASRRQEITKIRAELKEIKTQKTLQKISESGRRSQDGRIGTAPVYSSQRERRRRQVISAFPSEGTDKQKDSSNLCRLTCPCLTALKRAVVLPARSWRSENGQTASSKGKLTTRKDIYTENPSVHHHHQRTKVDKTTKMGKKQNRKTGNSKTQSTSPPPKERSSSPATEQSWMENDFDELKEEGFRRSNYSELREDIQTKGKEVENFEKNLEECITRIANTEKCLKELMELKTKARELREECRSLRSRCDQLEERVSAMEDEMNEMKREGKFREKRIKRNEQSLQEIWDYVKRPNLRLIGIPESDVENGTKLENTLQDIIQENFPNLARQANVQIQEIQRMPQRYSSRRATPRHIIVRFTKVEMKEKMLRAAREKGRVTLKGKPIRLTADLSAETLQARREWGPIFNILKEKNFQPRISYPAKLSFISEGEIKYFIDKQMLRDFVTTMPALKELLKEALNMERNNRYQLLQNHAKM

SEQ ID NO: 46010 - protein, 1053 aa, Homo sapiens
  DOMAIN (439)..(486): kw TRANSCRIPTASE REVERSE II ORF2 domain identified by eMATRIX, accession number DM01354V, p-value=1.000e-40, raw score of 12.97
  DOMAIN (254)..(452): Reverse transcriptase domain identified by PFam, accession name rvt, E-value=4.9e-05, PFam score of 1.8
MYRRSSRPSARSQDEKSMCKNHKHSYTPITNREPKHERTPICNCYKENKIPKNTAYKGCEGPLQGELQTTAQGNKRGHKQMEKHSMLMDRKNQYRENGHTAQKIKTTIREYYKHFYTNKLENLEEIDKFLETYTLLSLNQEEVESLNRPITSSEIEEVINSLPTKKVQDQTKSQPDSIREGKLTNRKDIHTKNPSVHHHHQRPKVDKTTKMGKKQNRKTGNSKTQSASSPPPKERSSSPATEQSWMENDFDELREEGFRRSNYSELREDIQTKGKEVENFEKNLEECITRITNTEKYLKELMELKTKARELREECRSLRSRCDQLEERVSVMEDETKMKEKMLRAAREKVLEVLARAIRQEKEIKGIQLGKEEVKLSLFADDMIVYLENPIVSAENLLKLISNFSKVSGYKINVQKSQAFFYTNNRQTESQIISELPFISASKRIKYLGIQLTRDVKDLFKENYKPLLNEIKEDTNKWKNIPCLWVGRINIMKMAILPKVIYRFNAIPIKLPMTFFTELEKTTLKFIWNQKRARIAKSILSQMNKAGGITLPDFKLYYKATVTKTAWYWYQNRDIDQWNRTQPSEITPCIYNYLVFDKPEKNKQWGKDSLLNKWCWENWPAICRKLKLDPFLTPYTKINSRWIKDLNVRPKTIKTLEENLGNTIQDICMRKDFMSKTLKAMATKAKIDKWDLIKLKSFCTAKETTIKMNSKRNSVPHQQQNKKTGNSKKQSASPPPRERSSSPATEQSWMENDFDELSEEGFRRSNYSELREDIQTKGKEVENFEKNLEECITRITNTEKCLKELMELKTKARELHEECRSLRSRCDQLEERVSAMEDEMNEMKREEKFREKRIKRNEQGLQEIWDYVKRPNLHLIGVPESDGENGTKLENTLQDIIQENFPNLARQANVQIQEIQRMPQRYSSRRATPRHIIVRFTKVEMKEKMLRAAREKGRITLKGKPIRLTADLSAETLQARREWGPIFNILKEKNFQPRISYPAKLSFISEGEIKYFTDKQMLRDFVTSRPALKELLKEALNLERNNWYQPLQNHAKM

SEQ ID NO: 46011 - protein, 35 aa, Homo sapiens; identical to SEQ ID NO: 36512
  misc_feature (1)...(35): Xaa = X or * as defined in Table 2

SEQ ID NO: 46012 - protein, 385 aa, Homo sapiens
  DOMAIN (298)..(339): kw TRANSCRIPTASE REVERSE II ORF2 domain identified by eMATRIX, accession number DM01354I, p-value=1.000e-40, raw score of 15.55
  DOMAIN (104)..(284): AP endonuclease family 1 domain identified by PFam, accession name AP_endonucleas1, E-value=3.7e-06, PFam score of -23.0
MKREEKFREKRIKRNEQSLQEMWDYVKRPNLRLIDVPESDRENGTKLENTLQDIILENFPNLARQANIQIQEIQRMPQRYSSRRATTRNLIVRFTKVEMKEKMLRAAREKGRVTHKGKPIRLTADLLAETLQARREWGPIFNILKEKNFQPRISYPAKLSFISEGEIKYFTEKQMLRDFVTTSPALEELLKEALNMERNNRTTRQKVNKDIQELNSALHQADLIDISRTLHPKSTEYTFFSAPHHTYSKIDHIVGSKALLSKCKRTEIITKCLSDHSAIKLELRIKKLTQNCTTTWKLNNLLLNDYWVQNEMKAEIKMFFENNENKDTTYQNLWDTFKAVCRGKFIALNAHKRKQKRSKTDTLTSQLKELEKEEKHIQKLAEGKK

SEQ ID NO: 46013 - protein, 566 aa, Homo sapiens
  DOMAIN (441)..(482): kw TRANSCRIPTASE REVERSE II ORF2 domain identified by eMATRIX, accession number DM01354I, p-value=1.000e-40, raw score of 15.55
  DOMAIN (196)..(427): AP endonuclease family 1 domain identified by PFam, accession name AP_endonucleas1, E-value=4.6e-53, PFam score of 189.7
MELKAKAQELREECRSLRSRCNQLEESVSVMEDEMNEMKREGKFREKRIKRNEQSLQEIWDYVKRPNLRLTGVHESDGENGTKLENTLQDIIQENFPNLARQANIQIQEIQRTPQRYSSRRATPRHIIVRFTKVEMKEKMLRAAREKGWVTHKGKPIRLTVDLSAETLQARREWGPIFNILKEKNFQPRISYPAKLSFISEGEIKSFTDKQMLTDFVTTRPALQELLKEALNMERKNRDTHRLKIKGWRKIYQANGKQKKAGVAILVSDKTDFKPTKILKDKEGHYIIVKGLIQQEELTILNTYAPSTGAPRFIKQVRSDLQRDLDSHTLIIGDFNTPLSTLDRSTRQKVNKDTQELNSALHQADLIDIYRTLHPKSTEYTFFSAPHHTYSKIDHIVGSKALLSKCKRTEIITNYLSDHSAIKLELRIKKLTQNHSTTWKLNNLLLNDYWVHNEMKAEIKMFFETNENKDTTYQNLWDTFKVVCTGKFIALNAHKRKQERSKIDTLTSQLKELEKQEQTHSKASRRQEITKIRAELKEIETQKTLQKINESRSWFFERINKIDRPL

SEQ ID NO: 46014 - protein, 352 aa, Homo sapiens
  DOMAIN (259)..(300): kw TRANSCRIPTASE REVERSE II ORF2 domain identified by eMATRIX, accession number DM01354I, p-value=1.000e-40, raw score of 15.55
  DOMAIN (32)..(247): AP endonuclease family 1 domain identified by PFam, accession name AP_endonucleas1, E-value=5.8e-49, PFam score of 176.1
  misc_feature (1)...(352): Xaa = X or * as defined in Table 2
TSTELSTPNQQNIHFFQHHTTSIPKLTTYLEVKLSSXKKHXTWKGTTGTSCCINHAKIVTHRLKIKGWRKIYQANGKQKKAGVANLVSDKTDFKPTKIKRDKEGHYIMVKGSIQQEELTTLNIYAPNTGAPRFIKQVLSDLQRDLDSHTLIMGDFNTPLLTLDRSTRQKVNKDTQELNSALHQADLIDIYRTLHPKSTEYTFFSAPHHIYSKTDHILGSKALLSKCKRTEIITNYLSDHSAIKLELRIKNLTKNRSTTWKLNNLLLNDYWVHNEMKAEMKMFFETNENKDTTYQNLWDTFKAMCRGKFIAVNAHKRKQERSKIDTLTSQLKELEKQEQTHSKASRRQEITKI

SEQ ID NO: 46015 - protein, 59 aa, Homo sapiens
  misc_feature (1)...(59): Xaa = X or * as defined in Table 2
KPWQKNYVTHAQASVADLIKWKKGYQXLKIKXMKXSKKRSLEKKEXKETNKASKKYGTI

SEQ ID NO: 46016 - protein, 59 aa, Homo sapiens
  misc_feature (1)...(59): Xaa = X or * as defined in Table 2
KPWHKNYIMHAQASVANLINWKKGYQXLKIKXVKXSEKRSLEKKEXKEMNKASKKYGTM

SEQ ID NO: 46017 - protein, 294 aa, Homo sapiens
SGSSICGSPISAVLQPPLLIPRQTGSGVDLQQTPTDLQLRVLTVRRKTKKQKGHPHQNPTCTSPSSKTKVGERVSVIEDQMKEMKREKKFREKRVKRNEQSLQEIWDYVKRPNLRLIGVPESDGENGTKLENTLQDIMRENFPNRARQANIQIQEIQRMPQRYSSRRATPRHIIIRFTKVEMKEKMLRAAREKGWVTHKGKPIRLTADLLAETLQARREWEPIFNILKGKNFQPRISYPAKLNFISEGEIKSFTDKQMLRDFVITRPALQELLKEALNLERNNWYQPLQKHAKL

SEQ ID NO: 46018 - protein, 511 aa, Homo sapiens
  DOMAIN (53)..(106): Chaperonins cpn60 proteins domain identified by eMATRIX, accession number BL00296D, p-value=3.106e-31, raw score of 11.15
  DOMAIN (53)..(154): TCP-1/cpn60 chaperonin family domain identified by PFam, accession name cpn60_TCP1, E-value=5.5e-12, PFam score of 47.8
VFTDIEAAQAKKWRTKRKVNTVRLRTEVELLAYLGASELKLVFSVCQRKEVLSLVIIAEDIDREARSTFIFNRLKVGLQIIAVKAPDFGDNRKNQREDTAIATGGLAQIEKYIQEIVEQLDVTTSEYEKEKLNVCLAKLSDGVAVLKAGGTSDVKECSSSPAMQQSWMESDFDELREEGFRRSNFSKLKEEVRMHRKEAKSLEKKLDEWLTRITSVEKSLNDLMELKTMARELHNQCTSFSSQFHQLEERVSVIEDQMNEMKREEKFREKTVKRNEQSLQEIWDYVKRPNPCLIGIPQSDGENGTKLENTLQDIMQENFPNLARQANIQIQEIQRMPQRYSSRRATPRHIIVRFTKVEMKEKMLRAAREKGWVTYKGKPIRLTADLLAETLQARREWGPIFTILKEKNFQPRISCPAKLSFISEGEIKSFTDKQMLRDFVTTRPGLKELLKEALNMERNSWAKCSHAGLCHTFPFEQMAERFVCNVELVKGEGLPDRDQEGRFNLLSGGMV

SEQ ID NO: 46019 - protein, 1093 aa, Homo sapiens
  DOMAIN (898)..(938): kw TRANSCRIPTASE REVERSE II ORF2 domain identified by eMATRIX, accession number DM01354Y, p-value=1.000e-40, raw score of 10.69
  DOMAIN (609)..(796): Reverse transcriptase domain identified by PFam, accession name rvt, E-value=0.02, PFam score of -35.3
NPQRSLDPADRNSCAHQRSSRNNPCPRTHNGPWTLLIGIAALTYAAAETLVFLPDHMEDRGRVNQHVVGTPELHGFPLCQPSAQPRSKGKEEAVSRQINGPNSKELGVVREPFPGKPDTHVFSPAAALVAFHWPTGHHILIHGRKERRNKGNCSSIPDSFQQESQNFPEMPITDFSLHLIDQNDVRCLPNRDARALTPDSLRPSPRARRGVEKNAHLADPGRRASQTLARLVRRRVEPNLRALPPIPRSADSLNADSGAPKLFTTTARELKLSRRLSMIRPTNSGVFAPVVHTPRTASLLRRTDFPITTQRFLPLSPTPAGPKLAPLEIRTVIFVPPRPLPVRQTPSYFPTPSSRALSWEIRCVSRTNELVNVWGEVARAPGVRAAPSPISEMGNSRPFPIVRFRESRKGKLTNIKDIYTKTPSVCHHHQRPKLDKTTKMERNQSRNAENSENQSASSPPKEHNSSPATEQSWTENDFDELREEGFRRSVITNFSKLKEDVRTHRKEAKNLEKRLDEWLTRINSVEKTLNDLMELKTMAQELRDTYTSFSSRFDQVEERVSVIEDQMNEIKRRGVSVCPQPSEDTPRSTARVPKGMVPFRPRVPLVTPPREKKEAPWLACLRTRALRILIDPPSQVWDIVSCDAENETKLENTLQDIIQENFPNLARQANIQIRGNYRERPQRLPPREQQLQAHLIVRFTKVEMKGKNIKGSPERKSTRPALKELLKEEALNMERNNSSNLLKLISNFSKVSGYKINVQKSQAFLYTNNRQTESQIMSELPFTIASKSIKYLGIQLTRDVKDLFKENYKPLLNETKGHKKRKNLPCSWVGRINIVKTAILPKVIYRFNAIPIKLPMIFFTELEKTTLKFMWNQKRACIAKTILSQKNKAGGITLPDFKLYYKSTVTKTAWYWYQNRDIDPWNRTEPSEIIPHIYNHLIFDKPEKNKQWGKDSLFNKWCWENWLGIYRKLKLDLFLMPYTKINSRWIKDLNVRPKTIKTLEENLGNTIQDIGIGKDFMTKTPKAMATKAKIDKWDLIKLKSFCTAKETTIRVNRQPTEWQKIFTIYLSDKGLISRIYKELKQIYKKKSTPSKSG

SEQ ID NO: 46020 - protein, 142 aa, Homo sapiens
EPSQRHSQDLQGWSQEHQVCLHRVGWGHCATCILPAATASHEGPEAWTARLLVPQTAVGICSAFSGLPTSTHEPTGMHFLPSEAHEKPRTQPDQKRGRDDLPCTPSTCLHTSLFLDTGQEFGTCRMAGLKEHVAGDNRERRQ

SEQ ID NO: 46021 - protein, 23 aa, Homo sapiens
  misc_feature (1)...(23): Xaa = X or * as defined in Table 2
ELKFXXFPILSPSRKTSPLRQGS

SEQ ID NO: 46022 - protein, 209 aa, Homo sapiens
  DOMAIN (28)..(60): kw TRANSCRIPTASE REVERSE II ORF2 domain identified by eMATRIX, accession number DM01354J, p-value=1.214e-29, raw score of 15.12
  misc_feature (1)...(209): Xaa = X or * as defined in Table 2
MKAEIKMFFETNENKDTTYQNLWNTFKAVRRGKFIALNAHKRKQERSKIDTLTSQLKELEKQEQTHSQASRRLNQEEVESLNRPITGSEIEAIINSLPTKKRPGPDGFTAEFYQRYKEELPKYLLKQLQQSLRIPNQCAKITSIPKHQXQTNREPNHEXTPIHNCFKDNKIPRNPTYKGREGPLQGELRTIAQRNKRGHKQMEEHSMLM

SEQ ID NO: 46023 - protein, 1276 aa, Homo sapiens
  DOMAIN (941)..(982): kw TRANSCRIPTASE REVERSE II ORF2 domain identified by eMATRIX, accession number DM01354I, p-value=1.000e-40, raw score of 15.55
MQLPVQTIAADGYVIKLQKRTTEDGHQSPERHQFPHLSSYSEQETTRVPFAKAVASGFPGDTTLVFCASPQPSPQVHLPTQAVADIFSEFHEHYARISTAPSVTLSKANMMGSEFPTARLSNSKYPETLEVGESAQPVPMYTWKTVAQDRKDGVSPPLLEKQSITKSISNKPVELSSKVVEVDASKADHMKKMASMGLVHSMAGSGLVLSRSEILKEISSLRNGCAIYRSEFISTDPSSWVVPRPRTNEENNGESMLKNKVMDWMIIQQQSSFYLCMNGKGTMIPNVLGSVSCAGHPTSILTLYYQSPTPHRADGTRTNRSSVDTTSSIIQQVGQPPTVPVKQSSSTSSKVAKASSPELSFKANKNGLQPSPLFLPPNEAFRPPSISHPRSYFPYPVPKATAIRPFSLHDKGPVYPHPVLLPNNSLFLGCLASKPRLPYVVPMGHPEFLIYQDALGFGMVQPMLITHRPIEITKKEKPERRSHSQERACRKDPTLQNQFSEMLEASSTAFHPEVPNDSLKLNPSWNQDSNQQREKRGETRERSHSHERACHKDPTVQNQFSEMLEAGSTEFHPEVHTDNLKLNLSWNQGKTVSRNKKIVYIDLLQEEPDAKTEANMSKPCFTVKNIGQNAKPAKPPIVKASLQQHGDFIMLREELGHIGDLHEAYALKRTPANKENIGMPVSTSFLEPTLVSDGHAVTFGKIQEYPKPYCLGSAPLSMDIISTYTKDGANEAKSSDGKLLKPKPSNLVKRVTTSAGCMADRLKCVTTELYADSSQLSWEQRALQKPRTPSHTNSAQLTQRGGKEIRTKSQNVFWRRILPARITVRDVGKHSPGNKQHNSFKALKDEDLPVEKYLMERQPVGEPAADQVAMDVMHSPILQLERKHKVSSDSNQTETTAEKLPEDSFLKNKQKQVYIDHSAIKLELELRIKKLNKNCSTTRKLNNLLLNDYWVHNEMKAEIKMFFETNENKDTTYQNLWDTFKSVGRGKFIALNAHKTKQERSKIDTLMSQLKELEKQEQTHSKASRRLNQEEVESLNRPITGSEIEAIINSLPTKKIQDQMDSQPNSTRGPPPKNKVLSNNASSQKPTHSSCIPLLRLPDKQQKVNESIKTDMLCTDKEEECPAASLLQKYTNNKQLLEEPTRRDQDDQIRTGAGLQLQVRATQKCIILIPQPSRDTTKKGNFSPTSLMNIDAKILNKILANGIQQHIKKLIHHNQVGFIAAMKEQINTEIGTKQWGIAVKILENVEVILELGNGQKLEKFGELRRRQEEKEKFGTS

SEQ ID NO: 46024 - protein, 544 aa, Homo sapiens
  DOMAIN (303)..(328): 7 kw REVERSE TRANSCRIPTASE RNA POLYMERASE domain identified by eMATRIX, accession number DM00895E, p-value=3.333e-11, raw score of 15.72
  DOMAIN (281)..(504): Reverse transcriptase domain identified by PFam, accession name rvt, E-value=1.8e-51, PFam score of 184.4
NCLSDHSAIKLELRIKKLTQNCSTTWKLNNLLLNDYWVHNEMKAEIKIFFETNENKDTTYQNLWDTFKAVCRGKFTALNAHKRKQERSKIDTLTSQLKELEKQEQTHSKASRRQEITKIRAELKEIETQKTLQNINESRSLFFEKINKIDRPLARLIKKKREKDQIEAIKNDKGDITTDPTEIQTTIREYYKHLYANKLEYLEEMDKFLDTYTLPRLTQEEVESLNRPTTGSEIEAIINSLPTKKSPGPDGFTAEFYQRYKEELVPFLLKLFQSIEKEGILPNSFYEASIILIPKPGRDTTKKENFRPISLMNIDAKILNKILANRIQQHIKKLIHHDQVGFIPGMQGWFNIRKSINVIQHINRAKDKNHMIISIDAGKAFDKIQQSFMLKALNKLDIDGTAIRQEKEIKGIQLGKEEVKLSLFADDMIVYLENPIVSAQNLLKLISNFSKVSGYKINVQKSQAFLYTNNRQTESQIMSELPFTIASKRIKYLGIQLTRDVKDLFKENYKPLLKEIKEDINKWKNIPCSWVGRINIVKMAILPK

SEQ ID NO: 46025 - protein, 520 aa, Homo sapiens
  DOMAIN (128)..(164): Thiamine pyrophosphate enzymes proteins domain identified by eMATRIX, accession number BL00187C, p-value=4.857e-27, raw score of 26.34
  DOMAIN (68)..(269): Thiamine pyrophosphate enzymes domain identified by PFam, accession name TPP_enzymes, E-value=5e-119, PFam score of 384.8
MTTSMLNAKLLPSAPSAAVVVVRVVVVVGNAPTSRKVGPEEKDWSMASSGTTSTRKRFTGAEFIVHFLEQQGIKIVTGIPGGSILPVYDALSQSTQIRHILARHEQGAGFIAQGMARTDGKPAVCMACSGPGATNLVTAIADARLDSIPLICITGQVPASMIGTDAFQEVDTYGISIPITKHNYLVRHIEELPQVMSDAFRIAQSGRPGPVWIDIPKDVQTAVFEIETQAGMAEKAAAPAFTEESIRDAAAMINAAKRPVLYLGGGVIMRPHGSFSVCTLGKYGYANGTASTVRQYSCTTYVLVRFTSVDAEVNSYVHAFYEFSSRQLFQQCDSFVDVVLFGCINFLADNTHALGQFSHFLVLHYQAHGTCSTFDGASHRFNVGTSHVGSFGLRDFLQLSAGNFTHFVFVRLTGTRLDTSRFFQQNCCRRGLGNESERTVSVNGDYYRNRQTFFDGISFCVERFAEFHDVYALLTQSRTYWRTRVSHTSCNLQLDIGLYFLSHYKFLKLGNNASERLPVI

SEQ ID NO: 46026 - protein, 1444 aa, Homo sapiens
  DOMAIN (996)..(1012): kw ANNEXIN ANTIGEN PROLINE TUMOR domain identified by eMATRIX, accession number DM00250A, p-value=6.211e-10, raw score of 10.52
MVVLSNRKDRKGKGEKEKSIACGELGKARSSEWPEKGPSITATLNQKFRRLLISCEGIFSSSPISLQVSLSEEKKVRCNRPLTGSKPVNYQIQSDPGPSPVSVMTSKPSLDQKFAQTQLQTQICGALEPERELTMISSCSKRETAQWVWQKILFVDISINFVHNCLTGKNPNVLQLVNSGIPVETDVYARCERYIYTVIGGLCFCMYAFKVKWQVVECKCGQQTRKCACRDVKPGPRRRPLRYRCFQKPSNRLGSASLGAGFWAGRRDAKSGHDDDPSGALFSVTMDRDLEQALDRAENIIEIAQQRPPRRRYSPRAGKTLQEKLYDIYVEECGKEPEDPQELRSNVNLLEKLVRRESLPCLLVNLYPGNQGYSVMLQREDGSFAETIRLPYEERALLDYLDAEELPPALGDVLDKASVNIFHSGCVIVEVRDYRQSSNMQPPGYQSRHILLRPTMQTLAHDVKMMTRDGQKWSQEDKLQLESQLILATAEPLCLDPSVAVACTANRLLYNKQKMNTDPMKRCLQRYSWPSVKPQQEQSDCPPPPELRVSTSGQKEERKVGQPCELNIAKAGSCVDTWKGRPCDLAVPSEVDVEKLAKGYQSVTAADPQLPVWPAQEVEDPFGFALEAGCQAWDTKPSIMQSFNDPLLCGKIRPRKKARQKSQKSPWQPFPDDHSAWLRPGSETDAGRAVSQAQESVQSKVKGPGKMSHSSSGPASVSQLSSWKTPEQPDPVWVQSSVSGKGEKHPPPRTQLPSSSGKISSGNSFPPQQAGSPLKRPFSAAAAIAAAAAAAAAAAAAAAAAAPAPALAAAAAPALAAAAAPALAAAAAPAPAPAAAPAVAAAPAAAASAAPSHSQKPSVPLIQASRPCPAAQPPTKFIKIAPAIQLRTGSTGLKAINVEGPVQGAQALGSSFKPVQAPGSGAPAPAGISGSDLQSSGGPLPDARPGAVQASSPAPLQFFLNTPEGLRPLTLLQVPQGSAVLTGPQQQSHQLVSLQQLQQPTAAHPPQPGPQGSALGLSTQGQAFPAQQLLKVNPTRARSGLQPQPQPAVLSLLGSAQVPQQGVQLPSVLRQQQPQPQPPKLQLQPQWQPKPRQEQPQSQQQQPQHIQLQTQQLRVLQQPQHIQLQTQQLRVLQQPVFLATGAVQIVQPHPVLNSHVWLVAIVWVSAVLEGQEQSRLWGQSIRHDLGLGHTGGVRFMMLIACSGLELLEILMAYGHLGQDLQDQVAPAMERGGWKRIFAGEEVKELKAQATGRIIYVDTKIIKNSYCWHSVEEDDNESGPRIFKNTQVTVTEVNQVGLGGWALRISISKFPGVAAAAAGSGTIHILRTCLDANHMVALQDPVWRVAASGLVQTMEDTSRSEIGRERQAYLFLQPTPCQAMLVSSFFPLCVRGNRLWVKSSLVIHPWCLRRFHKCIHIPYQGLAGQSNSRPLWGSDWHLTSDGITI

SEQ ID NO: 46027 - protein, 773 aa, Homo sapiens
  DOMAIN (694)..(707): GLIADIN domain identified by eMATRIX, accession number DM00406, p-value=8.054e-10, raw score of 7.73
MRIDGAQELTLALPFASGVACRDVKPGPRRRPLRYRCFQKPSNRLGSASLGAGFWAGRRDAKSGHDDDPSGALFSVTMDRDLEQALDRAENIIEIAQQRPPRRRYSPRAGKTLQEKLYDIYVEECGKEPEDPQELRSNVNLLEKLVRRESLPCLLVNLYPGNQGYSVMLQREDGSFAETIRLPYEERALLDYLDAEELPPALGDVLDKASVNIFHSGCVIVEVRDYRQSSNMQPPGYQSRHILLRPTMQTLAPEVKTMTRDGEKWSQEDKFPLESQLILATAEPLCLDPSVAVACTANRLLYNKQKMNTDPMEQCLQRYSWPSVKPQQEQSDCPPPPELRVSTSGQKEERKVGQPCELNITKAGSCVDTWKGRPCDLAVPSEVDVEKLAKGYQSVTAADPQLPVWPAQEVEDPFRHAWEAGCQAWDTKPNIMQSFNDPLLCGKIRPRKKARQKSQKSPWQPFPDDHSAWLRPGSETDAGRAVSQAQESVQSKVKGPGKMSHSSSGPASVSQLSSWKTPEQPDPVWVQSSVSGKGEKHPPPRTQLPSSSGKISSGNSFPPQQAGSPLKRPFPAAAPAVAAAAPAPAPAPAAAPALAAAAVAAAAGGAAPSHSQKPSVPLIKASRRRPAAGRPTRFVKIAPAIQVRTGSTGLIGHQRGGPSPGSPGISGSGLQSSGGPLPDARPGSSAGCPAPLCLGQQPQPLLLLQPQPQPQQIQLQTQPLRVLQQPVFLATGAVQIVQPHPEPPAMTQPKTTATFSRNQIFICPWSLICALDP

SEQ ID NO: 46028 - protein, 489 aa, Homo sapiens
YDSYIVVIDDADITRGDDAVPRDHHSSTSMVVFRHIRLDVIVVDGDDQHRRMVGRRCRSAWFRRGSLDVDQVIGDTAAGRLNVMGDITRDARRDKVKNERYGVAPSVAFGLGTANRLYLNYLHVTQHNTPDGGIPTIGLPGYSAPSAGTAALNHSGKVDTHNFYGTDSDYDDSTTDTATMRFEHDINDNTTIRNTTRWSRSWTWSRTANTKDVSNKILTNQTNLTSTFYTGSIGHDVSTGVEFTRETQTNYGVNPVTLPAVNIYHPDSSIHPGGLTRNGANANGQTDTFAIYAFDTLQITRDFELNGGIRLDNYHTEYDSATACGGSGRGAITCPTGVAKGSPVTTVDTAKSGNLMNWKAGALYHLTENGNVYINYAVSQQPPGGNNFALAQSGSGNSANRTDFNPQKANTSEIGTKWQVRGSSRVNVMHEVNTPHQCVRFRPARSAPGCCQSPCHRSGKHMQYGLSKCQPGQYNSVKSGERVNGVTFQ

SEQ ID NO: 46029 - protein, 117 aa, Homo sapiens
  DOMAIN (24)..(116): SCAN domain identified by PFam, accession name SCAN, E-value= 3e-51, PFam score of 183.7
  misc_feature (1)...(117): Xaa = X or * as defined in Table 2
PXARMPSPLGPPCLPVMDPETTLEEPETARLRFRGFCYQEVAGPREALARLRELCCQWLQPEAHSKEQMLEMLVLEQFLGTLPTEIHAWVRGQRPGSPEEAAALIEGLQHDPGQLLG

SEQ ID NO: 46030 - protein, 115 aa, Homo sapiens
  misc_feature (1)...(115): Xaa = X or * as defined in Table 2
PAFGGSAPSERLELHVDGPPPRPQAPGDCGVGRSWRAEMHDRALRGTNPRRHLRSCCARARRRPXRRSAPPGPRANPSXSSWGPSTPGNYRCRYRSWVPHTFKSELNDPVELLVA

SEQ ID NO: 46031 - protein, 692 aa, Homo sapiens
  DOMAIN (499)..(591): SCAN domain identified by PFam, accession name SCAN, E-value= 3.7e-18, PFam score of 73.7
MKPGLRRRRGRGLGCGLGPQLRATWSGAVLAGRDAVLRCEGPIPDVTFELLREGETKAVKTVRTPGAGAKLELIFVGPQHAGNYRCRYRSLVAHTFESELSDPVELLVAVAATLNIHLRLVHMLHIPAAGEGSFREGTHFLKPSPVKMPLVFRVGRRRVLNQGPQGVPIPIPRSCEHLNWQKGLCGVTKCAAPLLRGPPCPAVLRKEIPFVSLKPGLMSSKASEAEPLGPRLGSHQSTAAALGPRYNGSADAIRPHTAWAVIQTTISRFTWSLTQVNVPSRTVSLAVRRDRYMTSRTTTNPEEGCRGTFWARRNGCSPSACAVAEAALEACLADVRYPVVALSCGRLQKRRDFRETNAAMSNKEKSLASARFFVEVQVTLGALCTVQATGQSMLVFSTTQMSSYSEKFLTSKHASLSPRLQLADRWRDQGMKWQSPQWGELRPAASHTAEQEPGLAASKAFRDLQNLSNSAFLSLTSLSAGHQCISAIVVMMSKKEITPQGQLAAASFGELQPVALKCPWLKSQHVESWLRPEAHSKEQMLEMLVLEQFLGTLPPEIQAWVRGQRPGSPEEAAALVEGLQHDPGQLLGWITAHVLKQEVLPAAQKTEEPLGSPHPSGTVESPGEGPQDTRIEGSVQLSCSVKEEPNVDGQEVAPSSPPLAAQSPEGNHGHQEPASTSFHPPRIQVSSPKWEV

SEQ ID NO: 46032 - protein, 69 aa, Homo sapiens
MLRLKSAKIAQNENLISCKERAEIVEKQTQAFIMRVADLQLKKTDGSWKMTVDYHKLNQVVTTIAAAVP

SEQ ID NO: 46033 - protein, 123 aa, Homo sapiens
  misc_feature (1)...(123): Xaa = X or * as defined in Table 2
EVAQMPRVSTPATLPSLPQPALMAPWTVPYDQLMEEEKARARYAGTIQKWTAAALQPLSRTSLKDSGEGTSKWGRSVDTTQPLSPAIPVIFQXAHEQSGHSGMDGGYAWALQHGLALTNTDLA

SEQ ID NO: 46034 - protein, 88 aa, Homo sapiens; identical to SEQ ID NO: 33995
  DOMAIN (25)..(41): AUXIN BINDING PROTEIN SIGNATURE domain identified by eMATRIX, accession number PR00655E, p-value=7.333e-09, raw score of 8.06

SEQ ID NO: 46035 - protein, 194 aa, Homo sapiens; identical to SEQ ID NO: 38086

SEQ ID NO: 46036 - protein, 522 aa, Homo sapiens; identical to SEQ ID NO: 36483

SEQ ID NO: 46037 - protein, 327 aa, Homo sapiens
  DOMAIN (182)..(199): RNase H domain identified by eMATRIX, accession number PF00075A, p-value=6.000e-09, raw score of 14.44
  misc_feature (1)...(327): Xaa = X or * as defined in Table 2
MVAIAKVLIAYKEDSDSHNQPNTRMTVSKGPVSAVEGGRRGQDSDDCVEENDAVRTWPPSRILRTESHPSPHTCSWRRHLLSSCPYTGMSFPIPSSGNISSTHAVISFPPLSEEMNPMLPKATVMTSLEAAARQNLKSRQAPRCEVESVTHEEVYYTRKELFEFSNLYRKKSGEQIREWILRKTDGSWRITVDYRKLNQMVTPIAAAVPDVVVSLLEQINTSPGTWLCHNLIWRDLDCFLLPQNITLVHYTDDIMQIGSSEQEVANTLDLLPALMASWENSPXSIDRGREDXSLVHKWFCTICRHHPKVDSCSTTAPFXDIPEGQQL

SEQ ID NO: 46038 - protein, 124 aa, Homo sapiens; identical to SEQ ID NO: 33997
  misc_feature (1)...(124): Xaa = X or * as defined in Table 2

SEQ ID NO: 46039 - protein, 109 aa, Homo sapiens
ARIQGSRNQGVEVEVAPLTVTPSDPLANVLLPVPATLPSAGLEILVPEEGRLPPGDTTMMPLNWNLRLPHGHFGLLLPLNQQAKKGVAVLGGVIALDCQDEISLLLYKG

SEQ ID NO: 46040 - protein, 904 aa, Homo sapiens; identical to SEQ ID NO: 37053
  DOMAIN (538)..(547): Zinc finger C3HC4 type (RING finger), proteins. domain identified by eMATRIX, accession number BL00518, p-value=2.800e-11, raw score of 12.23

SEQ ID NO: 46041 - protein, 192 aa, Homo sapiens
  DOMAIN (47)..(64): RNase H domain identified by eMATRIX, accession number PF00075A, p-value=6.000e-09, raw score of 14.44
  misc_feature (1)...(192): Xaa = X or * as defined in Table 2
LKSRQAPRCEVESVTHEEVYYTRKELFEFSNLYRKKSGEQIREWILRKTDGSWRITVDYRKLNQMVTPIAAAVPDVVVSLLEQINTSPGTWLCHNLIWRDLDCFLLPQNITLVHYTDDIMQIGSSEQEVANTLDLLPALMASWENSPXSIDRGREDXSLVHKWFCTICRHHPKVDSCSTTAPFXDIPEGQQL

SEQ ID NO: 46042 - protein, 153 aa, Homo sapiens; identical to SEQ ID NO: 45025
  DOMAIN (42)..(58): AUXIN BINDING PROTEIN SIGNATURE domain identified by eMATRIX, accession number PR00655E, p-value=6.556e-09, raw score of 8.06

SEQ ID NO: 46043 - protein, 457 aa, Homo sapiens; identical to SEQ ID NO: 33999

SEQ ID NO: 46044 - protein, 271 aa, Homo sapiens
  DOMAIN (234)..(250): AUXIN BINDING PROTEIN SIGNATURE domain identified by eMATRIX, accession number PR00655E, p-value=9.000e-09, raw score of 8.06
  misc_feature (1)...(271): Xaa = X or * as defined in Table 2
MDNEFSDSIHNTFGHMWRTKEHNEAGWLLLSSVDKVMKENDELRDSISWLQKQILSLKSAKIALSESLISCRERAEIVEKQTQAVIMRMADPQGKVHAQPQQVSTVKGRTLIGKEWDPATWNGDVWEDPDEAGDTEFVNSDEPFLPEVTASPSPRDLWPFTRVTLHWGKGNDQTFWGLLDTGSELVMIPGDPKCHCGPPVKVGGLWSSAAVADVVSLLEQINTSPGTWYAAIDLANAFFSIPVHKAHQKQFAFSCHKVGRAQQHPSSNGSX

SEQ ID NO: 46045 - protein, 382 aa, Homo sapiens
  DOMAIN (63)..(80): RNase H domain identified by eMATRIX, accession number PF00075A, p-value=7.429e-09, raw score of 14.44
  DOMAIN (176)..(312): Integrase core domain identified by PFam, accession name rve, E-value=2.7e-11, PFam score of 43.0
  misc_feature (1)...(382): Xaa = X or * as defined in Table 2
PRGRNRRRKTFQERRMTLNESPEKIGKWIECYGHPPASKLVEIYIHTVFVEDKLSICIRSFNKKADGSWRMTVDYCKLNQVVTAIAAAIPEWFHCLSKLIHLLIPGMQPLTWQHALFSIPVHKGYINSLALCQXCYLERTXLLFTSTRYHTGPLHXXHYADWIQCARSRKQTGLTGKGQRFVLTERDTYYGFTYPAHNASAKTTIHGCTECLTHPHVIPHSIASEQDTHFTAKEVWQWAHGNGIHWSYHVPHHPEIARLIEWWNGLLKSQVQCHLGDNTLQGWGKVLQKAVYALNQYPIYGTVSPIARIHGSRNQGVEVEVAPLTITPSDPLAKCLFPVPKTLCAACLEVLLPGGGMLPPGDTTTIPLNRKLRFPLEHFGLL

SEQ ID NO: 46046 - protein, 478 aa, Homo sapiens
  DOMAIN (240)..(285): DNA polymerase (viral) N-terminal domain proteins domain identified by eMATRIX, accession number PF00242M, p-value=8.941e- 09, raw score of 12.96
  DOMAIN (31)..(216): Reverse transcriptase domain identified by PFam, accession name rvt, E-value=1.6e-22, PFam score of 88.2
DTISHQLEWRSLKSQETTGIAEISATIKDLKGAGVVIPTTSLFNSSVWPVQKTDKSWRMTVDYCKLNQVLTPNAAAVPDVVPLLEQINTSPGTWYAAIDLANAIFSIPVHKAQQKQFAFSWQGQQYTFTVLPQGYISSLALCHNLIRRDLDGFLLLQNITLLVHYVDDIMLIGSSEQEVANALDLLVRHLCVRGWEISPTKIQGPSTLVKFLGVQWCGACRDILSKVKDKLLHLAPPTTKKEAQRLVGLFGFWRQHIPHLGGLLQPLYLVIQKAAIFEWNPEPEKVLQKVQAAVQAALPLGPYDPTDPIMLEVLVADRDAVWSLWQALIGESQQRPVGFWSMALPSSADNYSPFERQLFACSWALVETECLTMGHQVTMQPELPIMNWMLSDPSSHKVVQAQQHQEVAQMPRVSTPATLPSLPQPALMAPWTVPYDQLMEEEKARARYAGTIQKWTAAALQPLSRTSLKDSGEGTSKW

SEQ ID NO: 46047 - protein, 287 aa, Homo sapiens; identical to SEQ ID NO: 31761
  DOMAIN (200)..(243): 1 kw MIND INHIBITOR DIVISION CONTROL domain identified by eMATRIX, accession number DM01756B, p-value=4.822e-15, raw score of 22.91
  DOMAIN (165)..(270): ParA family ATPase domain identified by PFam, accession name ParA, E-value=3.6e-23, PFam score of 90.4

SEQ ID NO: 46048 - protein, 28 aa, Homo sapiens
SGKESVRERWARVPVALGVAAGMSLFRF

SEQ ID NO: 46049 - protein, 37 aa, Homo sapiens
  misc_feature (1)...(37): Xaa = X or * as defined in Table 2
MVQEASEVIGQLQSSAAKXAMHWAGFSYLTKKSLNAN

SEQ ID NO: 46050 - protein, 241 aa, Homo sapiens
MSTLLNKTLTALPKELNPQLPDPSQDGTAGTPAISTTTTGEIRKSRVMTTEITSKVEKSPTTATGNSSCPSTETEEEKAKRLLYCSLCKVAVNSASQLEAHNSGTKHKTMLEARNGSGTIKAFPRAGVKGKGPVNKGNTGLQNKTFHCEICDVHVNSETQLKQASEVIGQCQSSAAKLRRSGKESVSEPRARVPGALGVAASNTVSGIGGFLVSLTSRMKPRTLVVSVTVLKGGVSRVRSF

SEQ ID NO: 46051 - protein, 60 aa, Homo sapiens
  misc_feature (1)...(60): Xaa = X or * as defined in Table 2
ARGAARSMKHTSGDETKRQKLDXVRLTGIRASREEVTKEAGPRKRIMCSGMDELNGGLQL

SEQ ID NO: 46052 - protein, 351 aa, Homo sapiens
MLAAPCAGCPVLEKLPELPVPGVGEAAHSAGVSVMVQKASKVIGQRQSSAIKLRRSGKESVREPWARVPGALGVAARQVGQSDFQWGPVQIEHGLGGIPGCRHSLAQWPDFQHLKQDPGAGSPGGTPGCCGSGVMKFLCAGDVAEVSLTVEARNCNSEIRCYLAASVLLLYTLKDSEESYKTYLRVKWVKSMVGEFRGGVPSRPSSLTVDKVGDGSGDDNDGVGDQTSHNTPLSQRLIQSKALTLFNPLKAERDEKAAEEKFEANRGWFMRFKERSCLYNIKVQEEAASADGEATASYPEDLDKTIDEGSYTKQHIFNVDKIAFSWRKVLSRIFTAREKSMPSFKELQRTG

SEQ ID NO: 46053 - protein, 94 aa, Homo sapiens
PGVRGAQGGPSIPRQCEESAIGPKFAWIISSFHWKQGMFNMEAPSSLFFVNMCAVKKQTTWGRPDRGFIWQPLPEPLELWPKALRLTPSQIFSA

SEQ ID NO: 46054 - protein, 261 aa, Homo sapiens
  DOMAIN (112)..(148): Ribosomal protein L6e proteins domain identified by eMATRIX, accession number BL01170A, p-value=9.143e-40, raw score of 12.34
  DOMAIN (83)..(261): Ribosomal protein L6e domain identified by PFam, accession name Ribosomal_L6e, E-value=3e-130, PFam score of 446.1
KRVTSKLKSPRRGSPHCSRNPVLLRGIGRYSRSAMYSRKAMYKRKYSAAKSKVEKKKKEKVLATVTKPVGGDKNGGTRVVKLRKMPRYYPTEDVPRKLLSHGKKPFSQHVRKLRASITPGTILIILTGRHRGKRVVFLKQLASGLLLVTGPLVLNRVPLRRTHQKFVIATFTKIDISNVKIPKHLTDAYFKKKKLRKPRHQEGEIFDTEKEKYEITEQRKIDQKAVDSQILPKIKAIPQLQGYLRSVFALTNGIYPHKLVF

SEQ ID NO: 46055 - protein, 116 aa, Homo sapiens
  DOMAIN (66)..(116): Ribosomal protein L6e domain identified by PFam, accession name Ribosomal_L6e, E-value=0.077, PFam score of -84.3
MVEGGILRVNTSVECKTGPFFFSPHILWREPFCSVQVGKKKKEKVLATVTKPVGGDKNGGTRVVKLRKMPRYYPTEDVPRKLLSHGKKPFSQHVRKLRPSITPGTILIILTGRHRG

SEQ ID NO: 46056 - protein, 129 aa, Homo sapiens
PPLVIPRQTGSGVDLQQTPTDLQLRDLTVRRKTNKQKGTASTSRKRTSTPKPHCVSESDGENGTKLENTLQDIIQENSPNLVRQANIEIQEIKRTPQRYSSRRATPRHIIVRFTKVQMKEKMLRAAREK

SEQ ID NO: 46057 - protein, 151 aa, Homo sapiens
  DOMAIN (60)..(107): kw TRANSCRIPTASE REVERSE II ORF2 domain identified by eMATRIX, accession number DM01354V, p-value=1.000e-40, raw score of 12.97
MKLPEEGSLSDICCSAIFAVLQPLLVIPRETGSGVDLQQTPTDLQLRQTESQIMSELPFTVASKRIKYLGIQLTKDVKDLFKEIYKPLLSEIKEDTNKWKSIPCSWLGRINIVKMAILPKVTYIFNAIHIKLPMTELEKTKFIWNRKRACI

SEQ ID NO: 46058 - protein, 168 aa, Homo sapiens
MHFQFQREIHTGNINLGILKLVVTFKAAEYKEITCVRELSPETYPCLKIWEPPLVVPRQTGSGVDLQQTPTDLQLRDLTIRSKTNKQKGIVSTSTERTSTPKLQLINSVEKSLNDLLELKTMARELRDTCTNFSSRFDQVEERVSVTEDQINEMKQEEKFREKRVKKK

SEQ ID NO: 46059 - protein, 612 aa, Homo sapiens
  DOMAIN (347)..(549): EPSP synthase domain identified by PFam, accession name EPSP_syntase, E-value=5e-83, PFam score of 289.3
MGQPLRPQANYSQIHHPPQASVARHPSREQLIDYLMLKVAHQPPYTQPHCSPRQGHELAKQEIRVRVEKDPELGFSISGGVGGRGNPFRPDDDGIFVTRVQPEGPASKLLQPGDKIIQTSESTTTVKSKVDEREKYMIGNSVQKISEPEAEISPGSLPVTANMKASENLKHIVNHDDVFEPLLVIPSQTGSGVDLQRTPTDLQQRDLTVGRKTNKHKGIASTSTKRTSTPKPHLFPFHKDTSHIGYGTNLTPVFRAQDDESMAIILTMSVSDFNYSRTSLSKRPNARVGSEHSLLDPPGKSKVPRDWREQVLRHIEAKKLEKLVIEITALEQGRGNNPQLPHYAGWKISGRAPDRIVLKGVERLGGGVYRVLPDRIETGTFLVAAAISRGKIICRNAQPDTLDAVLAKLRDAGADIEVGEDWISLDMHGKRPKAVNVRTAPHPAFPTDMQAQFTLLNLVAEGTGFITETVFENRFMHVPELSRMGAHAEIESNTVICHGVEKLSGAQVMATDLRASASLVLAGCIAEGTTVVDRIYHIDRGYERIEDKLRALGANIERVKGAYSRALLKRIQNIRKARQFDVYVNDQKVGSFNPDVRNAQKVLPTLADCTND

SEQ ID NO: 46060 - protein, 554 aa, Homo sapiens
  DOMAIN (142)..(187): kw TRANSCRIPTASE REVERSE II ORF2 domain identified by eMATRIX, accession number DM01354N, p-value=1.000e-40, raw score of 13.17
RGEMNSRGRNNLSIINKTDFPFIALNAHKRKHERSKIDTLTSQLKELEKQEQTNSKASRSHEITKIRAELKEIETHNKPFKKISESRSWFFIFYFERINKIDRPLARLIKKKREKNQIDTIKNDKGDITTDPTEIQTTIREYYKHLYANKLENLEEMDKFLDTYTLPRLNQEEVESLNRPITGSEIEAIINSLPTKRSPGPDGFTAEFYQRLKQCRKAHLDPVSLTHRSGPGAREDRLSDSGDASRGCWNLSQHAAVTSPESEERRIRTLSCRSVGVCRRSTPDPVCLGISSGGCRTVNIGEQQMLLPDRSSGSFVSEGYRPCEVSAPTGGCPPVRCLMINTVSLIGVKFTEVFDSINISEHLELACLQDHNSLLAREQNWTEDEFDELTEVGFRRWVITNSSELKEEVQTHCKEVKNLETRLDEWLTRITNAEKSLKDLMELKTMAGELRDACTRFSSRFNQLEERVTEIEDQMNEMKQEEKFREKRIKRNEQSLQEIWDYVKRPNLHWLGVPESDRENGTKLENTLQDIIQENFPNLARQTNIQIQEMQRMP

SEQ ID NO: 46061 - protein, 272 aa, Homo sapiens
  DOMAIN (185)..(226): kw TRANSCRIPTASE REVERSE II ORF2 domain identified by eMATRIX, accession number DM01354I, p-value=3.618e-28, raw score of 15.55
GKGATFSSGNRGTSDLQLVRDALRSLRNSFSGHDPQHHTIDSLEQGISSLMERLHVMETQKKQERKPPLVIPRQTGSGVDLQQTPTDLQLRDLTVRRKTNEQKGIASASTKRTSTPKPHRRSPTSKTKAPHCTYSKIYHIIGSKTLFSKCKRKEITTNSLSDHGAIKLELRIKKLTQNGTTTWKLDNLLLNDCWLNNEMKAEIKMFFETNEIKDTMYKNPWDTFKAVCTGEFISLNAHKRKQERSKIDIRTSQLKELEKQEQTNSKLVEGKK

SEQ ID NO: 46062 - protein, 792 aa, Homo sapiens
  DOMAIN (112)..(167): kw TRANSCRIPTASE REVERSE II ORF2 domain identified by eMATRIX, accession number DM01354Q, p-value=1.000e-40, raw score of 9.23
  DOMAIN (67)..(341): Reverse transcriptase domain identified by PFam, accession name rvt, E-value=3.1e-62, PFam score of 220.2
  misc_feature (1)...(792): Xaa = X or * as defined in Table 2
QTERNSININRNGHQHQNPICRSPSSKTKGSIKPQRSGRNQSRKAENSKDQRTSSPTKDCSSSPATEQRWMENDFDELTEVVLQKPGRDTTKQKEKFRPISLMNIDVKILNKILANRIQQHIKKLIHHDQVGFISGMQGWFNICKSINVIHHINRTNDKNHMIISIDAEKAFDKIQQPFMLKTLKKLGIDGTYLKIIRAIYDKSTASIILNGQKLEAFPLKDRTRQGCPLSPLLFNIALEVLARAIRQEKDIKCIQLGKEKVRLSLFAEDMIVYLENPIVSAPNLFKLISNFSKVSGYKINVQKSQVFLYINNRQRESQIMNEFPFTIARRRIKYLGIQLTRDVKDLFKENYKPLLKEIKEDTNKWKNMPCSWIGRINIMKMAILAKVIYRFNAIPIKLPMTFFTELEKTTLKCIXNQKRAHIAKPILSQKNKAGGITLPDFKLHYKAAVTKTAWYWYQNRDIDQRNRTEPTEIMLHIYNHLIFDKPDKNKKWGNDSLFNKWCWENWLAICRKLKRDPFLTPYTKINSRWIEDLNIRPETIKTLEENLGNTIQDIAMGKDFMSKTPKAMATKAKIDKWDLIKLKNFCTAKETTIRVNRQPTEWEKIFAIYSSDKGIISRIYNELKQIYKKKNNPIKKWAKDINRHFSKEDIQAASKHVKKHSTSRIFMQIKTTLGYHLTPVRMATIKKSKNNRCWCGCGEKGTLIHCWMVRPLWLQVWWSLLEVHSRPCLPGYHQQRLQNSKDCCLFLPLEGKLHPRGVPARCQPELCCMRCLLTPAGRCLQIRRHGGQGPT

SEQ ID NO: 46063 - protein, 302 aa, Homo sapiens
  DOMAIN (24)..(216): Reverse transcriptase domain identified by PFam, accession name rvt, E-value=0.002, PFam score of -21.0
  misc_feature (1)...(302): Xaa = X or * as defined in Table 2
MVNQKRYHIPGGTAEISGTIKKLKNAGVVIPTTSPLNSPIWPVQKTDGSWRMTMDYHKLNQVVTPIAVAVPYVVALLEQINTFSCTWYAAIDLANTFFSFSVHKAHKKXFAFSRQGQQYTFTVHPYDNYSPFERQLLACYWASVETEHLTMGYQVTIQLELPIMNWVLSDPSSHKLGHAKQHSIIKWKWYIRDRARAGPEGTARIHRSRNQGVEVEVAPLTITPSDPLARFLLPVPTILHSAGLEVLVPEGGTLPLGDTTTIPFNWKLRLPPGHFRLLLPLNQQAKKGVTVFAGVIEAIKMK

SEQ ID NO: 46064 - protein, 303 aa, Homo sapiens
  DOMAIN (184)..(236): ELEMENT TRANSPOSABLE INSERTION PROTEIN TRANSPOSITION DNA domain identified by eMATRIX, accession number PD02455C, p-value= 8.406e-10, raw score of 29.23
  DOMAIN (137)..(274): Integrase core domain identified by PFam, accession name rve, E-value=1.5e-24, PFam score of 88.9
MVLEVSVSDRDAVWRLWRAPIGESQQRSLGFWSKVLPYSADNYFPFERQLLACYWALLETDRLTVGHQVTLQPELPIMNWVLSDPSSHKVGHVHQHSIIKWKWYIRDQTRAGPEGTTTPVITQWDAHEQSGLSGRDGKGQRFVLTGVDTYSGYWFAYPAHNASAKTSIYGFTECLIHCHGIPHSIASDQGTLFTAKEVWQWAHAHGIHWSYHIPHHPIAAGLIEWWNGLLKSQLQCQLGDNTLQGWGKDLQKAMYSLNQRLIYSTVSPISRIHGSRNQRVEVEVAPLTITLSDPLAKFFFLLP

SEQ ID NO: 46065 - protein, 251 aa, Homo sapiens
  DOMAIN (115)..(221): dUTPase domain identified by PFam, accession name dUTPase, E- value=9e-05, PFam score of 17.4
MQNNVDSFQEPPPTPLFSSRPIARLKSKQAPRGEAESVTHEELESIRLRAKTSDKISSLTFRRGWGKVLQKAMYALNQHPIYGTVFPIPRIDGSRNQGVEVKVAPLTITLSDPLAKFLLPVLSALHSAGLEVLVPEGGILPPGAGDMRMIQLNWKLSLPPGYFGLLLPLSQQTKKGVTDLGGVIDLDYQDEISLLFHIKVNGKLQQPNPDRTTSGPDPSGMKVWVTPPGKEPQPAEGLAEGKGNTEWVVEE

SEQ ID NO: 46066 - protein, 274 aa, Homo sapiens
  DOMAIN (90)..(102): RNase H domain identified by eMATRIX, accession number PF00075C, p-value=4.326e-10, raw score of 11.58
  DOMAIN (4)..(186): Reverse transcriptase domain identified by PFam, accession name rvt, E-value=1.4e-06, PFam score of 23.7
VETVHLMLQIGEFKKTDVSWKTVDYHKLNQVVTPTAAAVPDVVSLLEQINTYPGTWYAVIDLENAFFSVPVHNAHQKGFAFSWQGQQYTFTVLPQGYINSPTLCHNLIRRDPGHFSYPQDITLVHYIDDIMLIGSSEKEVANTLDLLPIYQVTLKAANYEWGPEQEKAVQQVQAAVQAALPLGQHNPADPTVLEVSVADRDAIWNLWQAPIARIHGSRNQGVEVEVAPLTITPSDPLAKFLPPVPATFCSAGLEVLVPEGGMLPPGEIETIPLK

SEQ ID NO: 46067 - protein, 38 aa, Homo sapiens
  misc_feature (1)...(38): Xaa = X or * as defined in Table 2
VNQFGVIFCAAIINXYECLKQSFKTQTDYFPSPLNTSQ

SEQ ID NO: 46068 - protein, 124 aa, Homo sapiens
MPHCEQAHGETHSEELRAPTAAKFKKAGAVSLKRAQSQALGAAVPAPPRVLASRKHAAQWSLASGDTPAFLPPSSPPGYIRYSPDLVQNAVRDTLKDRIQSKCCQKTSGSNVKIVESKEGNNLP

SEQ ID NO: 46069 - protein, 233 aa, Homo sapiens
  DOMAIN (146)..(178): ABC transporters family proteins domain identified by eMATRIX, accession number BL00211B, p-value=5.846e-28, raw score of 13.37
  DOMAIN (44)..(222): ABC transporter domain identified by PFam, accession name ABC_tran, E-value=1.3e-51, PFam score of 184.8
SLGTGTLRVLLGTAEAQMLQFSHLYADYGGKPALEDINLTLESGELLVVLGPSGCGKTTLLNLIAGFVPYQHGSIQLAGKRIEGPGAERGVVFQNEGLLPWRNVQDTVAFGLQLAGIKKMQRLKFAHQMLKKVGLEGADKRYIWQLSGGQRQRVGIARALAANPQLLLLDEPFGALDAFTRDQMQTLLLNLWQETGKQVLLITHDIEEAVFMATELVLLSSAPGRVLERLPHI

SEQ ID NO: 46070 - protein, 137 aa, Homo sapiens
  DOMAIN (69)..(95): Nuclear transition protein 2 proteins domain identified by eMATRIX, accession number BL00970B, p-value=6.242e-09, raw score of 10.09
  misc_feature (1)...(137): Xaa = X or * as defined in Table 2
LWLVCINCFIPAFLLMLRWLPRLKPLSQLSVPTYRLPSVPFLKPTGMESPEAISRVSGKGILXRDSDAYSVSLSYHYPHRHPSSIIVDHRSSIDPXPIVDHSSSIAKRSGTFPLGYWEVFVQLTFGQQRQASGILQY

SEQ ID NO: 46071 - protein, 137 aa, Homo sapiens
  misc_feature (1)...(137): Xaa = X or * as defined in Table 2
HPGLETTDLLSPLPAALEPQGQGRPSIQGAPRGSFTRIEAGTPHVPAPCPAAQRNQGWGLVGAWLGFMAPXEQSVASSWKXPLMKSQYSREVISHLPLVPMQQGRPVMTQSMWGWLVWFPALFLVQIGHLVMSSGHS

SEQ ID NO: 46072 - protein, 153 aa, Homo sapiens
  DOMAIN (16)..(71): Ribonucleotide reductase small subunit proteins domain identified by eMATRIX, accession number BL00368A, p-value=9.100e- 31, raw score of 36.98
  DOMAIN (34)..(153): Ribonucleotide reductases domain identified by PFam, accession name ribonuc_red, E-value=4.4e-38, PFam score of 112.7
GISMKLSRISAINWNKISDDKDLEVWNRLTSNFWLPEKVPLSNDIGAWQTLTVVEQQLTMRVFTGLTLVDTLQNVIGAPSLMPDALTPHEEAGLSNISFMEAGHARSYSSIFSTLCQTKDVDAAYAWSEENAPLQRKAQIIQQHYRGDDPLKK

SEQ ID NO: 46073 - protein, 375 aa, Homo sapiens
  DOMAIN (193)..(215): Sodium:sulfate symporter family proteins domain identified by eMATRIX, accession number BL01271C, p-value=5.500e-09, raw score of 13.62
MMLWACFFLDEGVFAGGDQTSVDPMVLEQYVVVANYQKQESSEISLSVGQVVDIIEKNESESLVILTWRNKETCRHAREMGSPSVTGRRLNFAPTCLNSKRLQPWADELIPGVACGNGRRRELAQKARATSDSRKFLVGVGVSPEIAQTRCQMSLPFLRTLQGDRSFQLLILVGIGLSFFVPFAPKSWPAAIDWHTIITLSGLMLLTKGVELSGYFDVLGRKMVRRFATERRLAMFMVLAAALLSTFLTNDVALFIVVPLTITLKRLCEIPVNRLIIFEALAVNAGSLLTPIGNPQNILIWGRSGLSFAGFIAQMAPLWRNDVTLLLLCWCCFPGPAGMLAIYLYMFTLEYEYEYMNMAHSGTEYYADVKKYQRS

SEQ ID NO: 46074 - protein, 81 aa, Homo sapiens
  misc_feature (1)...(81): Xaa = X or * as defined in Table 2
SHKHYADALLYPAPDVCTACXLLRGNRRDQSKSTAKRHLTAAHFRFVRMVRHGNHSRLRPDSFRXPVSPDRXPPLRAAHFR

SEQ ID NO: 46075 - protein, 142 aa, Homo sapiens
  DOMAIN (117)..(137): NEUTROPHIL CYTOSOL FACTOR 1 SIGNATURE domain identified by eMATRIX, accession number PR00498C, p-value=5.500e-10, raw score of 8.33
  DOMAIN (10)..(131): PX domain identified by PFam, accession name PX, E-value=4.2e -22, PFam score of 86.9
AGGGAAMPPRRIIVEVKVLDVQKRRVPNKHYVYIIRVTWSSGSTEAIYRRYSKFFDLQMQMLDKFPMEGGQKDPKQRIIPFLPGKILFRRSHIRDVAVKRLIPIDEYCKALIQLPPYISQCDEVLQFFETRPEDLNPPKEEH

SEQ ID NO: 46076 - protein, 445 aa, Homo sapiens
  DOMAIN (180)..(200): NEUTROPHIL CYTOSOL FACTOR 1 SIGNATURE domain identified by eMATRIX, accession number PR00498E, p-value=9.446e-14, raw score of 13.75
  DOMAIN (152)..(206): SH3 domain identified by PFam, accession name SH3, E-value= 6.7e-10, PFam score of 46.3
MEVFYILLSNPVATSLLVAIEQFNPLTTVGPLFCPTTSSLVHEHVPIPTTLEAYGKPLVSTSANLSGLPPCRTVVEVRGPAGMQGFSHSSHYSTRLGTFSLTICFDSLTRVLNRMQMLDKFPMEGGQKDPKQRIIPFLPGGDQTSVDPMVLEQYVVVANYQKQESSEISLSVGQVVDIIEKNESGWWFVSTAEEQGWVPATCLEGQDGVQDEFSLQPEEVSWRYWSLPRPVAAAGLWVTCMPSDHAVLSVKLRHRETHLPGPAHLRAQTEGKLQSWGFEPSGRLYPGVDAGLDSEKSESSDQDTDHDSMSVNQDYSAHLVSAHSRCLTNTWGIFKSIPSSDPHSSPLRKAACTLEETGLHSAILKTVKVRVSGKKLGLERDSLRDCCLIGWHCGVVITNVATLSNAQWPGTRGPEKQTTGYKKAGLMAKFQIKKGVAFKTTARRK

SEQ ID NO: 46077 - protein, 221 aa, Homo sapiens
  DOMAIN (104)..(136): ABC transporters family proteins domain identified by eMATRIX, accession number BL00211B, p-value=7.353e-24, raw score of 13.37
  DOMAIN (20)..(171): ABC transporter domain identified by PFam, accession name ABC_tran, E-value=6.7e-08, PFam score of 32.6
WTRWRASAADNLAHGRWGEQKLVVTTGASGAPDRQAARCGCIWRKISWYRSKGSKHPLTPKEVEKTGWGLKIRGMGKQQIAERVKEAARILELDGLLKRRPRELSGGQRQRVAMARAIVRDPAVFLFDEPLSNLDAKLRVQMRLELQQLHRRDQVEAMTLAQRVMVMNGGVAEQIGTPVEVDGDDTLEILGADNLAHDAGRAEAGGDWRIRSARRSSTCAH

SEQ ID NO: 46078 - protein, 299 aa, Homo sapiens
  DOMAIN (84)..(299): 5'-3' exonuclease domain identified by PFam, accession name 5_3_exonuclease, E-value=1.6e-10, PFam score of 19.8
MAAIAFLITWFLSHDKKRIRILKRLSGGGNMADEFPGGAVVFTVLNLTHWLEDWGLPVHWRSSCMPSGLEYLIVLIFKGVIVAVHLLIVDALNLIRRIHAVQGSPCVETCQHALDQLIMHSQPTHAVAVFDDENRSSGWRHQGLPDYKAGRPPMPEELHDEMPALRAAFEQRGVPCWSTSGNEADDLAATLAVKVTQAGHQATIVSTDKGYCQLLSPTLRIRDYFQKRWLDAPFIDKEFGVQPQQLPDYWGLAGISSSKVPGVAGIGPKSATQLLVEFQSLDGIYENLDAVAEKWRHKL

SEQ ID NO: 46079 - protein, 450 aa, Homo sapiens
MVYIVFVNPQILGAAQMDPKVVFVTTCLIAGIGSIAMGIFANLPVALAPAMGLNAFFAFVVVGPMGISWQTGMGAIFWGAVGLFLLTLFRIRYWMISNIPLSLRIGITSGIGLFIALMGLTNTGVIVANKDTLVMIGDLSSHGVLLDGVYSIPPDISGVIGEVDLSEGTDAAFHGFWLWPCTMLNVTPIKGMMTVIYEFPVDSETTLQNYDIYFTNEELTDEQKSLIEWYRDVFRPEDLRLVESVQKGLKSRGYRGQGRIMADSSGSGISEHGIAHFHNLLAQVKRFTLVATDGKPLPAFTGGSHVIVQMSDGDNQYSNAYSLLSSPHDTSCYQIAVRLEENSRGGSRFLHQQAWQQIAAEIGISIDAQFNESLKGISRDESLRRILQHGGKEGDFNSQERAQLAYPPKSALCPLTTRVDGQRCSTRHSLFANYRFTRIQGRPRRKMLLC

SEQ ID NO: 46080 - protein, 155 aa, Homo sapiens
NENHRTFLALTDNPGISILLPRNLNMINGAIVPVIHKQGVSKTQRQQVQHRFFTKIVVDTVNLALLEVFANLIIDFLRGRQRRPQRFLHDYACRFSIQFCLAKPFANCAKSAGRHGKVVNGDTIFLIQHRAETAECSSVIDIEITKIQTCTQGVP

SEQ ID NO: 46081 - protein, 366 aa, Homo sapiens
  misc_feature (1)...(366): Xaa = X or * as defined in Table 2
MINLIGSDVNYDWLKLPLVHLHWYDKEVRPGRKVGHLNLTDSDTSRLTATLEALIPLLPPEYASGVIWAQSLIRCVKHRIRHCAPIAGCGTGCRPDKTRQASHQAQMSNAYDYSEIQGIGKQKAANRVAEPRTYHSFASITDRRADLLKPGNHAQDGRLTAARRADKHDELFIGNFQKADNRGQVSDSVEGNSNCAPVKPAPIPTERIPLALMASMPACASSMPIHACGGTPSPAQAARKISGSGFEFLSWEASAQKVKNSRSSSAAKIVGAFRETEASPTEICCARRSASKERMPGXARADPHRAHTAGVNGVNARLRIFNADTCLRRHAQPCTGGEKDFRVRFRVFKLGSIRAEGEKLAQLQRR

SEQ ID NO: 46082 - protein, 551 aa, Homo sapiens
  DOMAIN (370)..(390): PHOSPHOGLYCERATE KINASE FAMILY SIGNATURE domain identified by eMATRIX, accession number PR00477F, p-value=6.344e-16, raw score of 7.63
  DOMAIN (250)..(471): Phosphoglycerate kinases domain identified by PFam, accession name PGK, E-value=3.2e-89, PFam score of 309.8
MRGHNWIDMDQARQQSTPHTDRKICHKNDRPRTTPLRKIDAHPHTLIILPAESTLSTTKYKLRALLVENTNKDKSAVSVVFRGSVLHQQAANFPNLMLCFQLKNGVNACNDFIMLFVDDNAAGSIERAASPCINEKQHAFSESVPAIAAVRGLGSMIAVEFNDPQTGEPSAAIAQKIQQRALAQGLLLLTCGAYGNACKRRIDYVCRIKHSRRIRQVVLLNFAKSGAFSTTRGTDDKLTPVIQPRASGEYNEEFSLLPVVNYLKDKLSNPVRLVKDYLDGVDVAEGELVVLENVRFNKGEKKDDETLSKKYAALCDVFVMDAFGTAHLRAGFLLTGIGKLRCSLRCAGPLLAAELDALGKALKEPARPMVAIVGGSKVSTKLTVLDSLSKIADQLIVGGGIANTFIAAQGHDVGKSLYEADLVDEAKRLLTTCNIPVPSDVRVATEFSETAPANLKSVNDVKADEQILDIVRDLDAANVVINAVFSYVTNVWGWAFEWYMVVMLFGWFWLVFGPYAKKRLGNEPPEFSTASWIFMMFALLYVCCRTVLGID

SEQ ID NO: 46083 - protein, 453 aa, Homo sapiens
  DOMAIN (361)..(403): Purine and other phosphorylases family 2 proteins domain identified by eMATRIX, accession number BL01240C, p-value=8.138e- 34, raw score of 25.01
  DOMAIN (224)..(415): phosphorylases family 2 domain identified by PFam, accession name Mtap_PNP, E-value=4.1e-102, PFam score of 352.6
MAFQVKIHQIRAFVEVARQGSIRGASRMLNMSQPALSKSIQELEEGLAAQLFFRRSKGVTLTDAGESFYQHASLILEELRAAQEDIRQRQGQLAGQINIGMGASISRSLMPAVISRFHQQHPQVKVRIMEGQLVSMINELRQGELDFTINTYYQGPYDHEFTFEKLLEKQFAIFCRPGHPAIGARSIKQLLDYSWTMPTPHGSYYKQLSELLDDQAQTPQRIPILGSGLGALADQIENAVAISYEKLPGFPGVPVVCMKGRGHFYEGRGMTIMTDAIRTFKLLGCELLFCTNAAGSLRPEVGAGSLVALKDHINTMPGTPMVGLNDDRFGERFFSLANAYDAEYRALLQKVAKEEGFPLTEGVFVSYPGPNFETAAEIRMMQIIGGDVVGMSVVPEVISARHCDLKVVAVSAITNMAEGLSDVKLSHAQTLAAAELSKQNFINLICGFLRKIA

SEQ ID NO: 46084 - protein, 113 aa, Homo sapiens
QIGIQPDTHRILCAEKLYVTDAIQTAKRIFNVRGHIVRDIVLHLRDIRIGPGLEGKGNCHAEVSKFPVSELAEDQLNDESRELGFYLQKGLFEEYAWFGRGHGHDLAPFDDYH

SEQ ID NO: 46085 - protein, 231 aa, Homo sapiens
  DOMAIN (77)..(93): PHOSPHOGLYCERATE KINASE FAMILY SIGNATURE domain identified by eMATRIX, accession number PR00477C, p-value=4.600e-13, raw score of 14.67
  DOMAIN (38)..(231): Phosphoglycerate kinases domain identified by PFam, accession name PGK, E-value=1.4e-57, PFam score of 204.7
GTKPRDIDHILGTFITPGMPKGGKLDVYAAPELPLKLLGRPTEGEYNEEFSLLPVVNYLKDKLSNPVRLDGVDVAEGELVVLENVRFNKGEKKDDEHRAQASTHGIGKFADVACAGPLLAAVLDSLSKIADQLIVGGGIANTFIAAQGHDVGKSLYEADLVDEAKRLLTTCNIPVPSDVRVATEFSETAPATLKSVRHSDKISYISTGGGAFLELWKVKYLPAVAMLEERG

SEQ ID NO: 46086 - protein, 141 aa, Homo sapiens
  misc_feature (1)...(141): Xaa = X or * as defined in Table 2
RGLVALSSERRCRLRRRNHPESGTRSPDPAGAASLSRRFFYAPPGTPETGCGYSSRSRSQRKRLSTWRCNSXETPKSPPKACCRPARIPAPRSSSVKKASACGPAAVMKKRCRKASITPISKITCAIHRMRRWTCTKRAAF

SEQ ID NO: 46087 - protein, 96 aa, Homo sapiens
  misc_feature (1)...(96): Xaa = X or * as defined in Table 2
IQIHERSWRYLHWWSSVRRRAAXYGAPLXRDGIQRGTRRISQVYQXSSVRQLRRDASASGSAPRVCREYAAACYLRHEHWSCDAVSPTPRMLKSFV

SEQ ID NO: 46088 - protein, 1449 aa, Homo sapiens
  DOMAIN (1240)..(1251): Neutral zinc metallopeptidases zinc-binding region proteins. domain identified by eMATRIX, accession number BL00142, p-value= 2.688e-10, raw score of 8.38
  DOMAIN (843)..(1448): Peptidase family M3 domain identified by PFam, accession name Peptidase_M3, E-value=3e-105, PFam score of 363.1
MEKPRPLEAPSAWPQDDVQCGVTVGMDGAAVRANRTPWPQDLEQTKWIEIKKSAFTWSSQLSLNRGFLTCKDENNNAGLLRVSSYSSREDQLKNIASDSLFMLPGGLCQSPTGTSHCSNQMETQGQGSPGGAVRGDKALGPEKARQGCGMNGSGKYCKFRVLAIQGKPECLATLMQPDLGDSPGLREMNVVEHLRASFPVEQWYWRGGQRGEAEGARSSKAENNTSLICNFRLDYAPIEKQWDLHFADYFAEDLKLLAPLAKDGLVDVDEKGIQVTAKGRLLICNICMCFDTYLRQKARMQQFSRDLLGTPLVSTIPVDFTTEINSFSGADNTGSFHVACTVSTCTETSIGSAGLLWRRLTNQRVRATSTTPDIIIMSILLIQCLLGLSTIPFSAQYPDGSEMMKLVGWAQSIVTFRGGSSEMLNGVAFVFRLHLVLGMTIFLLFPFTRLVHVWSAPFEYFTRRYQIVYHVDAFTSQPFRGNSAGVVFPADNLSEAQMQLIARELGHSETAFLLHSDDSDVRIRYFTPTVEVPICAVMAEVKRKWGDRFVAVTQKNTGKGGALMNGLNYATCDQVFLSDADTYVPPDQDGMGYMLAEIERGADAVGGIPSTALKGAGLLPHIRATVKLPMIVMKRTLQQLLGGAPFIISGACGMFRTDVLRKFGFSDRTKVEDLDLTWTLVANGYRIRQANRCIVYPQECNSPREEWRRWRRWIVGYAPGGRSETLLEDPPDGSVTQSQFDAVGRLRAQTDAAGINRVQPGCGDGPHHAHNHAGCRASAFYYNHHNQLTSATGPDGLELRREYDELGRLIQETAPDGDITRYRYDNPHSDLPCATEDATGSRKTMTWSRYGQLLSFTDCSGYVTRYDHDRFGQMTAVHREEGLSQYRAYDSRGQLIAVKDTQGHETRYEYNAAGDLTTVIAPDGSRNGTQYDAWGKAICTTQGGLTRSMEYDAAGRVIRLTSENGSHTTFRYDVLDRLIQETGFDGRTQRYHHDLTGKLIRSEDEGLVTHWHYDEADRLTHRTVNGETAERWQYDERGWLTDISHISERHRVTVHYGYDSKGRLASEHLTVHHPQTNELLWQHETRLAYKRTGLANRCIPDTCPPVNAYLGTACCQHEICDTPWLSYRDPFTGKSWLSGRYELHKRIYGITAKERKDVDVWHPDVRFFELYDENNELRGSFYLDLYARENKRGGAWMDDCVGQMRKADGSLQKPVAYLTCNFNRPVNGKPALFTHDEVITLFHEFGHGLHHMLTRIETAGVSGISGVPWDAVELPSQFMENWCWEPEALAFISGHYETGEPLPKELLDKMLAAKNYQAALFILRQLEFGLFDFRLHAEFRPDQGAKILETLAEIKKLVAVVPSPSWGRFPHAFSHIFAGGYAAGYYSYLWADVLAADAFSRFEEEGIFNRETGQSFLDNILSRGGSEEPMDLFKRFRGREPQLDVSKIP

SEQ ID NO: 46089 - protein, 953 aa, Homo sapiens
  DOMAIN (239)..(264): Prokaryotic transglycosylases proteins domain identified by eMATRIX, accession number BL00922A, p-value=7.677e-22, raw score of 18.42
  DOMAIN (749)..(953): AIR synthase related protein domain identified by PFam, accession name AIRS, E-value=4.4e-30, PFam score of 113.4
MIQKIGYPRLECRIPYTTHRTGMSKISRAGLIAPLLISCSTTKKADTYNEAWVKDTNGFDILMGQFAHNIENIWGFKEVVIAGPKDYVKYTDQYQTRSHINFDDGTITIETIAGTEPAAHLRRAIIKTLLMGDDPSSVDLYSDVDDITISKEPFLYGQVVDNTGQPIRWEGRASNFADYLLKNRLKSRSNGLRIIYSVTINMVPNHLDKRAHKYLGMVRQASRKYGVDESLILAIMQTESSFNPYAVSRSDALGLMQVVQHTAGKDVFRSSGEIRHAEPHWGPAAGRGSRHTQANPAEPVGEKGHADSSFTQSQLNPVGSSRAQTDPAARTTEYSPDVLTSATGPDGLELRREYDELGRLIQETAPDGDITRYRYDNPHSDLPCATEDATGSRKTMTWSRYGQLLSFTDCSGYVTRYDHDRFGQMTAVHREEGLSQYRAYDSRGQLIAVKDTQGHETRYEYNIAGDLTAVIAPDGSRNGTQYDAWGKAVRTTQGGLTRSMEYDAAGRVIRLTSENGSHTTFRYDVLDRLIQETGFDAAHSVIRVFIIGSWPKVKLGRRVSLNTPAQLSLPLYLPDDETFASFWPGDNSSLLAALQNVLRQEHSGYIYLWAREGAGRSHLLHAACAELSQRGDAVGYVPLDKRTWFVPEVLDGMEHLSLVCIDNIECIAGDELWEMAIFDLYNRILESGKTRLLITGDRPPRQLNLGLPDLASRLDWGQIYKLQPLSDEDKLQALQLRARLRGFELPEDVGRFLLKRLDREMRDDFGALCALPQKYREPVLISGPDGVGTKLRLAMDLQRHDTIGIDLVAMCVNDLLSRCFCLDYYATGQLDVDTASAVISGIAEGCLQSGCSLVGGETAEMPGMYHGEDYDVAGFCVGVVEKSEIIDGSKVSDGDVLIALGSSGPHSNGYSLVRKILEVSGCDPQTTELDGKPLADHLLAPTRIYVKSVLELD

SEQ ID NO: 46090 - protein, 489 aa, Homo sapiens
MLHSRGFLAEVFGILARHNISVDLITTSEVSVALTLDTTGSTSTGDTLLTQSLLMELSALCRVEVEEGLALVALIGNDLSKACGVGKEVFGVLEPFNIRMICYGASSHNLCFLVPGEDAEQDGTGTSGIGAQKKKMYANNGAIDRKLLFEATFVTIEKCCDTNQKGDDTHALGQPIRGHDKSLAGSFCYACRSEEGLSQYRAYDSRGQLIAVKDTQGHETRYEYNIAGDLTAVIAPDGSRNGTQYDAWGKAVRTTQGGLTRSMEYDAAGRVIRLTSENGSHTTFRYDVLDRLIQETGFDGRTQRYHHDLTGKLIRSEDEGLVTHWHYDEADRLTHRTVKGETAERWQYDERGWLTDISHISEGHRVAVHYRYDEKGRLTGERQTVHHPQTEALLWQHETRHAYNAQGLANRCIPDSLPAVEWLTYGSGYLAGMKLGDTPLVEYTRDRLHRETLRSFGRYELTTAYTPAGQLQSQHLNSLLTYRHANFAL

SEQ ID NO: 46091 - protein, 455 aa, Homo sapiens
  DOMAIN (112)..(128): Prokaryotic molybdopterin oxidoreductases proteins domain identified by eMATRIX, accession number BL00551A, p-value=3.182e- 10, raw score of 17.41
MSKLLERFRYFKQKGETFADGHGQVMHSNRDWEDSYRQRWQFDKIVRSTHGVNCTGSCSWKIYVKNGLVTWEIQQTDYPRTRPDLPNHEPRGCPRGASYSWYLYSANRLKYPLIRKRLIELWREALKQHSDPAADNDLIARFQSFTNQPFIANRLTGNDRARFNLTFIVNNQHATAITTTGTFLPEWSTTFIITLILQSKVQAIDLTKEAIVTVGCNTISTTVHEVVSASIGIATKFWQHIGPCFYVIYDTVVTTIVESRTTEYSPDVVTGLITRITTPDGRASAFYNNHHSQLTSATGPDGLEIRREYDEWGRLIQETAPDGDITRYRYDNPHSDLPCATEDATGSRKTMTWSRYGQLLSFTDCSGYVTRYDHDRFGQVTAVHREEGLSQYRAYDSRGQLIAVKDTQGHETRYEYNAAGDIRQCESDLQSPSCSQYRAIDGESLSETARYSVHQ

SEQ ID NO: 46092 - protein, 458 aa, Homo sapiens
  misc_feature (1)...(458): Xaa = X or * as defined in Table 2
TADSPETLRCQTSGENARGAGTVERAGKSLWRSLRXSHRPXSTRTGDIHCQIQTNFSLFNXQHPGQHRYGSGTAIINQSLITHDPEYPENLPAAPLVRYGWTPRGELAVVYDRSGKQVRSFTYDDKYRGRMVAHRHTGRPEIRYRYDSDGRVTEQLNPAGLSYTYQYEKDRITITDSLDRREVLHTQGEAGLKRVVKKEHADGSVTQSQFDAVGRLRAQTDAAGRTTEYSPDVVTGLITRITTPDGRASAFYYNHHNQLTSATGPDGLELRREYDELGRLIQETAPDGDITRYRYDNPHSDLPCATEDATGSRKTMTWSRYGQLLSFTDCSGYVTRYDHDRFGQMTAVHREERLSQYRAFDRRGTVIAVKETQGLETGFEYHFPVPDGVIAPKGSRNGNSQSVGKRRSTEDIRGXTRWRGYTADRRAAKTHARVEXHLRARPRVCALFFPKQCERHDN

SEQ ID NO: 46093 - protein, 544 aa, Homo sapiens
  DOMAIN (82)..(107): kw PERIPLASMIC GALACTOSE RIBOSE XYLOSE domain identified by eMATRIX, accession number DM01011C, p-value=1.600e-18, raw score of 17.35
DNNAKLFRAGQMKVLKPYVDSGKIKVVGDQWVDGWLPENALKIMENALTANNNKIDAVVASNDATAGGAIQALSAQGLSGKVAISGQDADLAGIKRIAAGTQTMTVYKPITLLANTAAEIAVELGNGQEPKADTTLNNGLKDVPSRLLTPIDVNKNNIKDTNLPAAPLVRYGWTPRGELAVVYDRSGKQVRTFTYDDKYRGRMVAHRHTGRPEIRYRYDSDGRVTEQLNPAGLSYTYQYEKDRITITDSLDRREVLHTQGEAGLKRVVKKEHADGSVTQSQFDAVGRLRAQTDAAGRTTEYSPDVVTGLITRITTPDGRASAFYYNHHNQLTSATGPDGLELRREYDELGRLIQETAPDGDITRYRYDNPHSDLPCATEDATGSRKTMTWSRYGQLLSFTDCSGYVTRYDHDRFGQMTAVHREEGLSQYRAYDSRGQLIAVKDTQGHETRYEYNIAGDLTAVIAPDGSRNGTQYDAWGKAVRTTQGGLTRSMEYDAAGRVIRLTSENGSHTTFRYDVLEQYCGQVIKAHAVSRFVICIGSANPS

SEQ ID NO: 46094 - protein, 209 aa, Homo sapiens
  DOMAIN (159)..(178): TYPE III EGF-LIKE SIGNATURE domain identified by eMATRIX, accession number PR00011D, p-value=3.739e-09, raw score of 14.03
MSTEIARLKRQLAERMKSWLSSKRPRHTSRSAEMKYVFIEKHQAEFSIKQCAACSGWPAAAGIRVSAADKDKHASAVPPTRDSVVLAAFTRLRRQGLRAKAPGSSARSATAHTACLCRKSVGAGFLRQWPEPEVAGDITYLRTDEGWLYLQWSLTCGHVPLLAGQCPTHDGATGLRCPADGAVRRKTPPNVIVHTDRGGSTVQQIIRRN

SEQ ID NO: 46095 - protein, 64 aa, Homo sapiens
PQSRKICSSEPAMPDSRRRPASIGTKRSLRPQTIRVCALISARRGPKSGNCFGLASRLLTKFSR

SEQ ID NO: 46096 - protein, 97 aa, Homo sapiens
  misc_feature (1)...(97): Xaa = X or * as defined in Table 2
LASISTSCAPPKVNCGVMAIFLASDSRLWSGLRAQATSRSTLSLMTRSGLWLAIQXNALRSWLASHETKRPPSTLGGNTVPSXALRLGILASSRILL

SEQ ID NO: 46097 - protein, 67 aa, Homo sapiens
ESTEMHVSNASCKNGRKSWLSSKSPRNTSRSASLLKNIRLSSASKQCAACSGWPAAAGIRGVSGGQG

SEQ ID NO: 46098 - protein, 506 aa, Homo sapiens
  DOMAIN (238)..(494): Penicillin binding protein transpeptid domain identified by PFam, accession name Transpeptidase, E-value=0.00037, PFam score of -51.6
MKAAAKTQKPKRQEEHANFISWRFALLCGCILLALAFLLGRVAWLQVISPDMLVKEGDMRSLRVQQVSTSRGMITDRSGRPLAVSVPVKAIWADPKEVHDAGGISVGDRWKALANALNIPLDQLSARINANPKGRFIYLARQVNPDMADYIKKLKLPGIHLREESRRYYPSGEVTAHLIGFTNVDSQGIEGVEKSFDKWLTGQPGERIVRKDRYGRVIEDISSTDSQAAHNLALSIDERLQALVYRELNNAVAFNKAESGSAVLVDVNTGEVLAMANSPSYNPNNLSGTPKEAMRNRTITDVFEPGSTVKPMVVMTALQPRQHTHRITSSKRNCTFRNEAQSQYQSGFATFLLRFVEFATRHHCCQTHCQRWHHTCRHNRRHRAIGLSTQQTHTECVRCFVYRTAHVSTHHATEDRPQQNRIRSPHGLQPVSQPFENASNWFTDQEVTRDEEAASGHEESEFHRRHFEKPVLAFNAEPLKWFLRDILESDALRTCWTCDNSQFADV

SEQ ID NO: 46099 - protein, 253 aa, Homo sapiens
  DOMAIN (119)..(171): ELEMENT TRANSPOSABLE INSERTION PROTEIN TRANSPOSITION DNA domain identified by eMATRIX, accession number PD02455C, p-value= 1.000e-40, raw score of 29.23
  DOMAIN (72)..(175): Integrase core domain identified by PFam, accession name rve, E-value=7.6e-23, PFam score of 83.0
  misc_feature (1)...(253): Xaa = X or * as defined in Table 2
VLAAFTRSKQRYGAPRLTDELRAQGYPFNVKTVAASMRRQGLRAKASRKFSPVSYRAHGLPVSENLLEQDFYASSPNQKWAGDITYLRTDEGWLYLAVVIDLWSRAMALLRRKSPGNVIVHTDRGGQYCSADYQAQLKRHNLRGSMSAKGCCYDNACVESFFHSLKVECIHGEHFISREIMRATVFIISNVITIGGGGTVAARGGVPXAVKSNVNDVRRNCLARSSNNGWIFPPVVVNGWRQQALTIVAGICC

SEQ ID NO: 46100 - protein, 468 aa, Homo sapiens
  misc_feature (1)...(468): Xaa = X or * as defined in Table 2
MRASXNAAAXLXSAAWAVLSQRQRELLPYPVCRKPDAKPRHTREAPEMKYVFIEKHQASSASKQCAACSGWPAAVVYVVSAADKDKHASAVRQHCDSVVLAAFTRVHAGSLASKALAIDRFTVIDQIRFTADSMPSSSASSLPSTEMVIFPVTVFDFLHAHQNLPRAGTVGFQIIKDKQLVEFFMRISAAFGLGDVSYARIHNPCHGSDHAPRQWLPLRQTLDFCQPKCAVIVRVSQHAQITSKSLISGREKNDVPPEFYRAVKMSVKTAVKRKSACWIFRASMWVDRRCQSATAETGKTECSSVIIDLRSNGVRDNNGKVREDSDTDGQFSIKARWWCWLTASVLGFRNLCRGNAGLRSCAVVGEPTFAGFELLDGGKSGTRGSRTLPANSQFASDGINRKVTERTCIRRLLVLQLSARTSADKRRFGKNVDTSDEWIVTRTGIRERTLPRQTKPFQPWALKRDTRN

SEQ ID NO: 46101 - protein, 1084 aa, Homo sapiens
MCNQVIPQVHKGANAGSVEICTEETVSNTKPVTLHTTNLGQGINKLSPVPQNPTRVTRRVLIPPFTSNNEFNTYAARGATTATRSSGQSSCSRWVTQFYGNPYNNSTNSMEDESYYGGQHSAGDERAPQAAVPAAITNLDVWLRTRFTFDVLSMPAIMRSRRMRLWKKPNKYLAAVGCRCLSADGQQRARADSLDEQRSRYAQISRPGIIDKWMWLYSRHADKHRQTNGVQHRQHPFGKRLGWRTSTMVSMLGPLQRPDRAMSRIVPPPTAVTRPVPEHQKGPYAIFRLQNAGDGKYRCADYIQPKTSIVQSPLSPWKVRHGLIGNTGCGPAAHHVSLLSASGPTTAMVADFLAVTFRDGFSATPSFRAHFTRFFTVQAAFGIGIPGEGNGEWVVTIRWRSCGKIRCVCLPERGLACVVTVGTFLHSRGALLNDSGEHNLQDAINHRLRILLPRHHLLMKWPIPAFRWHHRHTETDPAHHNDYYYSVRRSVEICQSHNRHATCARSRRLITTHEFARIAGRLSCRRNGVLAADPSATLCFPLIENISQPVVAALIEGKAGPDIAPLFVHFRADDDVMPGCQWPAGLSLWLRYRDLDFMGDAFGRQQARRLVRASAALSIAVPSIRNLLPLPSRLHPALLSLRSELNQLIFNLDFQVGYRLVRPGNTFAGRLVPVLNVLEGEDAETNALAQNVVARNAARRWTAIYRSETTPRPLIMVVCEQYQRVYPDKQSIHRPAITPHCFAEIFEVNLMAKPVPGGTTLNRLNACFPISGTHNVRGCAPFPGVLFFKCLIITKTIDGHRVSMTRSTDQQRRYAGKVLHQHPCRAGCEALILFRVNIKDNKTSRNDLITTQIDKRGEPCGKANDNPAAAGSRIAFGAIEESLLWSAEQRRLRWRRRWLVDLMRDRLDLRLWIVDVESGTGVYESCTVLFRISQPDYMTSGCNDYADAFCHDASGAVSPITAVVVVTSGIAAFRLLRCVMPVDHRVVAAEVHRQMSVIIVIWLVAINNRHTVSLSADASSSFMMLVFHRRQLQAQTSCLRHFQGVDSQHGSQRHRNLTRMPPKRALKRTSSFASSNCRQHAAQC

SEQ ID NO: 46102 - protein, 803 aa, Homo sapiens
  DOMAIN (107)..(556): Penicillin binding protein transpeptid domain identified by PFam, accession name Transpeptidase, E-value=2.6e-10, PFam score of 47.7
MVNTCQQRFNRHRTRAVGAVNGDNVRARLRQRINIFNIGRDAYRRILQIACCMLRQGIEGVEKSFDKWLTGQPGERIVRKDRYGRVIEDISSTDSQAAHNLALSIDERLQALVYRELNNAVAFNKAESGSAVLVDVNTGEVLAMANSPSYNPNNLSGTPKEAMRNRTITDVFEPGSTVKPMVVMTALQRGVVRENSVLNTIPYRINGHEIKDVARYSELTLTGVLQKSTWETVSTLTDSIIDKRRMTHHLQRTITPMACVIQHLQEQRLTDLFTVECTAESLGSAQVDRQIKRHLTIRPQRNALLCRKPGNNRENLREHMHMMMAIKMRSMRPNITFTLGAGLLSKKNTSACRTMSNVPLPYDFHSAALRSKAEIDAGFARIWQVMHDGIERGMNTEGVLPGPLNVPRRAVALRRQLVSSDNISNDPMNVIDWINMYALAVSEENAAGGRVVTAPTNGACGIIPAVLAYYDKFRRPVNERSIARYFLAAGAIGALYKMNASISGAEVGCQGEIGVACSMAAAGLTELLGGSPAQNMEGKIDRPEEYADIATKCVTNFREKNRDRCLVILSRNDEALNSQRTSEELHHYYEIVWDEEQTHKFKNISPHLQRIKAFKTLGGPHGNITVDMVISAQELLQEDMATFDGHIVEALMKMPEVNAMYPELKLHAIGWVKHKCIPGAKWPEIQAEMRIWKKRREGERKETGKYTSVVDLARARANQQYTENSTGKISPVIAAIHREYKQTWKTLDDELAYGRCFADRQNLMVCLRSMPNVFTGSCARMRCCLSENLLYRHRNGHIQAEWP

SEQ ID NO: 46103 - protein, 933 aa, Homo sapiens
MRSRFLRVAFYHYSVTSLPALPALRYYRLGSGVNVSHNTGFLRSPKRCGQALTCPVTLFGQSSQLVHRRAETARVQALTRVGMVHFAHQRVSPSPAASSNVWRLPVRCAAGEKSARIVMDTLRDINQTTASPWSSRCIRWITPWLLRTHRRPAPGARLLRGSSQQFDNERFDHLYRTLTAYGEEAERESRLLVPGLRGYRAELGMNTFFAEFASCLTEFRRVYAKVWLCVNQMNRGQADAAAIAADCDDSRRIYTDAQLLRDDIQTLLRQNDIDQDRFGRLNIDPPLEFDVIFSVDHNFLTEVHRGFMDFSESVVKRNQITVQPYGHAIKMFTGIATNLNKKTVRSSFRRGKLQYNVHDRTVNNHREPRRYQIHLVKGHRIVQFAINQRLRRSSILSARLCAAWLSEKKYLQLRDHSGLYAQWLTRLPAIYRNSSQRLNPLTIDVSKANEVSSQRNRKRFTATNIHVTSHGTEFTLKPQPVASMFCCRCRGVKYCECAGSRCALHVRGRTLDAIKAGLANLKAVPAVCSPSNWQKTSCCSTILQRQCRFNDCSSPGTGEMPGYRVLVVGDMAELALKAKPAMYRWCVTTVLNTLQQARYADHGRDYDPAAIVISVLLWAYPSIRTLVRVGGAGWRPVAGRSNKCCPPPNPTNPPNPTQPPYAHHATFRSPARRHLANPRKENAQPGDEVGKVFDFFEALAEDAAWSCGLLATSVRSRATADAASGAKQPAFERPAYTPTGETIVVRCQTVDTWCKLSSKTPVTEMDVKRLTSVCRCPFAELNNASPYRSEGDGNARVSALREAVYHQVYTTYCFSPVRSDERLKHCRKRMNRLRLTNSTVGRKLVATAGVPQWPFRYTYRSLLGAVFVRYFSVHTGRTQLLVLLVRHAGATFPPVSLTVLIRGPCCNAGSSRFCNKRVPLKAPYARKLRVKAI

SEQ ID NO: 46104 - protein, 36 aa, Homo sapiens
VWGLMIRIAPLDTQDIDLQIIAALRNSWRYQLICLC

SEQ ID NO: 46105 - protein, 103 aa, Homo sapiens
  misc_feature (1)...(103): Xaa = X or * as defined in Table 2
PGSRAVIGWSMSPRMTAHWPAMPCRWRCGGVRTYAPEPTGXRRWLQNCSACSSXXLRKTSRKNRTTXRTPARSSSAPPLMLKQPFTRQWPLNTPWKPPRLSPS

SEQ ID NO: 46106 - protein, 144 aa, Homo sapiens
  misc_feature (1)...(144): Xaa = X or * as defined in Table 2
SCDSYRLSSRAAAVTPMRSASFRASGFLLVILFVCRVSVVGCRVLAWSGGSVFRRGVPLAWTVLRWVRRRCGCGVGRCRGLSAVVYPSGIITVDSARSWRIMGRSGSPLATVGLAGCWSQPRLXTDAFSKLQGFRVFTGDTICM

SEQ ID NO: 46107 - protein, 1037 aa, Homo sapiens
  DOMAIN (190)..(206): GLYCOSYL HYDROLASE FAMILY 2 SIGNATURE domain identified by eMATRIX, accession number PR00132A, p-value=3.727e-14, raw score of 13.45
  DOMAIN (108)..(634): Glycosyl hydrolases family 2 domain identified by PFam, accession name Glyco_hydro_2, E-value=2.4e-18, PFam score of 52.2
MAEGMRTIGRAMLKNKHMTITEFVAQRMRDAQQKGEISPDINTAMTSRLLLDLTYGVLADIEAEDLARKRRLLRITRDDWRYLNRILILSLFRRAGDNCARVSYQTPTREIKKLDGLWAFSLDRENCGIDQRWWESALQESRAIAVPGSFNDQFADADIRNYAGNVWYQREVFIPKGWAGQRIVLRFDAVTHYGKVWVNNQEVMEHQGGYTPFEADVTPYVIAGKSVRITVCVNNELNWQTIPPGMVITDENGKKKQSYFHDFFNYAGIHRSVMLYTTPNTWVDDITVVTHVAPDCEHANNIVYRAVIQFSTVVYVAVTVDSQVTIRVHSNNTVTVVRLGSIPGTVVHQISVQNVIAAMDIEHTRYYVTVMVSDVAAGQFQFVSTESFSIELINVHIQYTAVSYGDSIGVQHSPEFRSEALKLAERIGVTAAARELSLYESQLYNWRSKQQNQQTSSERELEMSTEIARRDILREAPEMKYVFIEKHQAEFSIKAMCRVLRVARSGWYTWCQRRTRISTRQQFRQHCDSVVLAAFTRSKQRYGAPRLTDELRAQAVPFNVKTRAASCAVRAEGKAPRIQPVVTRKACWSKLWAEFSRQKSASQLHACFVRISAGIPLMAGIMGPRTKYPTQLNNHRDHNNSHKDFQRSNTSTIEIQVVPPVQWAQFKQLAQLTDEPPTAARPRARRSLGVRAAGADSNKIVFWLHHVTVTGDDKRCSFIRDCQQCFKFAQHAIGTPVFCQLNGGFDQMALMHFQFTFKQFEQRKSIRSTARKARDDFVVVQTADLFHVAFHYGIAQRGLTITSDDHMAVTAYAYYSCHELTPWLRIQSTNPVQNLERTDGPSKGSDILRRRFGRKGRHGQLLINGIVRVRIGRCKTVYDGVFEVLQWLLFLSAVPPVQLLTGWCVTAKALPDISAISALTAVKHGNCSSLTPLLNPKICWSRIFTPVARPEVGRRHHWSLTCGHVPLLAVNVATHDGATGLRCPAEALWRRKRPRNVIVHTDVATYASETNRLKALLQNCSACSSVKAQKNFRKNRT

SEQ ID NO: 46108 - protein, 55 aa, Homo sapiens
  misc_feature (1)...(55): Xaa = X or * as defined in Table 2
SVCYPGRNXIPSGXNXPRIWSDPVQRRERAGKKWLHENPGWRKXXPDYHYRSEAD

SEQ ID NO: 46109 - protein, 485 aa, Homo sapiens
  DOMAIN (137)..(171): ELEMENT TRANSPOSABLE INSERTION PROTEIN TRANSPOSITION DNA domain identified by eMATRIX, accession number PD02455B, p-value= 1.964e-15, raw score of 21.87
  DOMAIN (141)..(230): Integrase core domain identified by PFam, accession name rve, E-value=2.5e-21, PFam score of 77.8
MSTEIARLKRQLADGMKSWLSSKRPRHTSRAPEMKYVFIEKHQAEFASKQCAACSGWPATAGNVVSAADKDKHASAVPPHCDSVVLAAFTRSKQRLPLNVKTVAASLRRQGLRARPPGSSARSATAHTACLVRKSVGAGFLRQWPEPKWAGDITYLRTDEGWLYLAVVIDLWSRAVIGWSMSPRMTAQLACDALQMALWRRKKPRNVIVHTDRGGQFGDRWKALANALNIPLDQLSARISANPKGGFIYLAREVNPDMADYIKKLKLPGIHVREESRRYYPSGEVTAHLIGFTNVDSQGIEGVEKSFDKWLTGQPGERIVRKDRYGRVIEDISSTDSQAAHNLALSIDERLQALVYRELNNAVAFNKAESGSAVLVDVNTGEVLAMANSPSYNPNNLSGTPKEAMRNRTITDVFEPGSTVKPMVVMTALQRGVVRENSVLNTIPYRINGHEIKDVARITTEEDFNHASAARFVCAAAERALQNHH

SEQ ID NO: 46110 - protein, 309 aa, Homo sapiens
VQSKNLSHFTWICHAETAVINHKKRKNSPRIVQSNDLTEAAYSLSRDQKRMLYLFVDQIRKSDGTLQEHDGICEIHVAKYAEIFGLTSAEASKDIRQALKSFAGKEVVFYRPEEDAGDEKGYESFPWFIKHWVTISPQTSAYERGQRYASRCKNEFAGNISALADAENISRKIITRCINTAKLPKSVVALFSHPGELSARSGDALQKAFTDKEELLKQQASNLHEQKKAGVIFEAEEVITLLTSVLKTSSASRTSLSSRHQFAPGATVLYKGDKMVLNLDRSRVPTECKRKLRPFLRNLKSQGGPLEST

SEQ ID NO: 46111 - protein, 157 aa, Homo sapiens
CDNLKTCHTSHGSVMAETAVINHKKRKNSPRIVQSNDLTEAAYSLSRDQKRMLYLFVDQIRKSDGTLQEHDGICEIHVAKYAEIFGLTSAEATAVLTESDYRVLVGELDDEQMAALSRLGNDYRPTSAYERGQRYASRLQNEFAGNISALADAENIS

SEQ ID NO: 46112 - protein, 171 aa, Homo sapiens
MLSVKMPVSSYSFHPSLGQSGDPLESTCRHCDNLKTCHTSHGSVMAETAVINHKKRKNSPRIVQSNDLTEAAYSLSRDQKRMLYLFVDQIRKSDGTLQEHDGICEIHVAKYAEIFGLTSAEASKDIRQALKSFAGKEVVFYRPEEDAGDEKGTSRHDQIFHAAAAIEACYL

SEQ ID NO: 46113 - protein, 84 aa, Homo sapiens
CDNLKTCHTSHGSVMAETAVINHKKRKNSPRIVQSNDLTGAAYSLSRDQKRVLRYEPVSQFRLSETQKHQSVCHAFIRIPVSVS

SEQ ID NO: 46114 - protein, 595 aa, Homo sapiens; identical to SEQ ID NO: 35573
  DOMAIN (232)..(261): kw REPLICATION REPB REPA INITIATION domain identified by eMATRIX, accession number DM00653A, p-value=7.207e-27, raw score of 20.40
  DOMAIN (410)..(535): ParA family ATPase domain identified by PFam, accession name ParA, E-value=1.7e-22, PFam score of 88.2

SEQ ID NO: 46115 - protein, 577 aa, Homo sapiens; identical to SEQ ID NO: 35575
  DOMAIN (410)..(439): kw REPLICATION REPB REPA INITIATION domain identified by eMATRIX, accession number DM00653A, p-value=7.207e-27, raw score of 20.40
  DOMAIN (394)..(436): Initiator RepB protein domain identified by PFam, accession name RepB_protein, E-value=0.0091, PFam score of 12.3

SEQ ID NO: 46116 - protein, 323 aa, Homo sapiens
  DOMAIN (268)..(297): kw REPLICATION REPB REPA INITIATION domain identified by eMATRIX, accession number DM00653A, p-value=7.207e-27, raw score of 20.40
  DOMAIN (252)..(294): Initiator RepB protein domain identified by PFam, accession name RepB_protein, E-value=0.0091, PFam score of 12.3
NVQQFIDEGNYTSGDNHTLRDPHYVEDKGHKYLVFEANTGTENGYQGEESLFNKAYYGGGTNFFRKESQKLQQSAKKRDAELANGALGIIELNNDYTLKKVMKPLITSNTCDNLKTCHTSHGSVMAETAVINHKKRKNSPRIVQSNDLTEAAYSLSRDQKRMLYLFVDQIRKSDGTLQEHDGICEIHVAKYAEIFGLTSAEASKDIRQALKSFAGKEVVFYRPEEDAGDEKGYESFPWFIKRAHSPSRGLYSVHINPYLIPFFIGLQNRFTQFRLSETKEITNPYAMRLYESLCQYQGGGEEEEEEEEEGGGGERGGEGGGEK

SEQ ID NO: 46117 - protein, 381 aa, Homo sapiens
  DOMAIN (352)..(381): kw REPLICATION REPB REPA INITIATION domain identified by eMATRIX, accession number DM00653A, p-value=3.605e-22, raw score of 20.40
  DOMAIN (115)..(204): Cyclic nucleotide-binding domain identified by PFam, accession name cNMP_binding, E-value=3.7e-13, PFam score of 57.2
DSEYVFVVVDFLIGVLIFATIVGNIGSMISNMNAARAEFQARIDAIKQYVRGRNQDLMLSSNICTFRNVSKDMEKRVIKWFDYLWTNKKTVDEKEVLKYLPDKLRAEIAINVHLDTVGKVYSPGDYICKKGDIGREMYIIKEGKLAVVADDGVTQFVVLSDGSYFGEISILNIKGSKAGNRRTANIKSIGYSDLCDNLKTCHTSHGSVMAETAVINHKKRKNSPRIVQSNDLTEAAYSLSRDQKRMLYLFVDQIRKSDGTLQEHDGICEIHVAKYAEIFGLTSAEASKDIRQALKSFAGKEVVFYRPEEDAGDEKGYESFPWFIKRAHSPSRGLYSVHINPYLIPFFIGLQNRFTQFPLSETKEITNSYAMRLYESLCQES

SEQ ID NO: 46118 - protein, 185 aa, Homo sapiens
CDNLKTCHTSHGSVLAETAVINHKKRKNSPRIVQSNDLTEAAYSLSRDQKRMLYLFVDQIRKSDGTLQEHDGICEIHVAKYAEIFGLTSAEASKDIRQALKSFAGKEVVFYRPEEDARDEKSYESFPWVIKRTSKWTACRRVRGGLFLPILTHRNDRGRWLQMTLTTAGIRHTIALGYRARIRNH

SEQ ID NO: 46119 - protein, 330 aa, Homo sapiens
  DOMAIN (13)..(56): 1 kw MIND INHIBITOR DIVISION CONTROL domain identified by eMATRIX, accession number DM01756B, p-value=2.421e-14, raw score of 22.91
  DOMAIN (1)..(92): ParA family ATPase domain identified by PFam, accession name ParA, E-value=9.2e-12, PFam score of 52.5
  misc_feature (1)...(330): Xaa = X or * as defined in Table 2
MLRLAIETVAHDYDVIVIDSAPNLGIGTINVLCAADVLIVGTPAELFDYTSALQFFDMLRDLLKNVDLKGFEPDVRILLTKYSNSNGSQSPWMEEQIPDAWGSMGLKNVVRETDEVGKGQIRMRTGFEQAIDQRFSTXARLYRHNQAYASSIQGDGAEDEDERIVRFHTRCDNLKTCHTSHGSVMAETAVINHKKRKNSPRIVQSNNLTEAAYSLSRDQKPMLYLFVDQIKKSDGTLQEHDRICEIHVAKYAEIFGLTLFETNKDIRPALKKFPGEGRVLQSLMGHKFISSTEVYTKVFALDLGAPHPVAILDSRSLMPVAIAETIIPEE

SEQ ID NO: 46120 - protein, 389 aa, Homo sapiens
  DOMAIN (284)..(313): kw REPLICATION REPB REPA INITIATION domain identified by eMATRIX, accession number DM00653A, p-value=7.207e-27, raw score of 20.40
  DOMAIN (1)..(145): Eukaryotic porin domain identified by PFam, accession name Euk_porin, E-value=7.4e-05, PFam score of -65.2
MLTLILLDLQFMAQLAGYQMSFNSTKSKQTKNNFAVGYRTGDFQLHTNVNDGAEFGGSVYQKVCEELDALINLAWTSSTSCTRFGLAAKFQLKPIAFISTKVNHWLTGVSYTPPLEAGVKLNLSALCDNLKTCHTSHGSVMAETAVINHKKRKNSPRIVQSNDLTEAAYSLSRDQKRMLYLFVDQIRKSDGTLQEHDGICEIHVAKYAEIFGLTSAEASKDIRQALKSFAGKEVVFYRPEEDAGDEKGYESFPWFIKRAHSPSRGLYSVHINPYLIPFFIGLQNRFTQFRLSETKEITNPYAMRLYESLCQYRKPDGSGIVSLKIDWIIERYQLPQTYQRMPDFRRRFLQEEFESLNRQITGSEIVAMINSLSTKKSPGPDGFTAEFYQ

SEQ ID NO: 46121 - protein, 503 aa, Homo sapiens
  DOMAIN (396)..(425): kw REPLICATION REPB REPA INITIATION domain identified by eMATRIX, accession number DM00653A, p-value=7.207e-27, raw score of 20.40
  DOMAIN (380)..(492): Initiator RepB protein domain identified by PFam, accession name RepB_protein, E-value=1.1e-07, PFam score of 29.7
MNMNIKKIVKQATVLTFTTALLAGGATQAFAKENNQKAYKETYGVSHITRHDMLQIPKQQQNEKYQVPQFDQSTIKNIESAKGLDVWDSWPLQNADGTVAEYNGYHVVFALAGSPKDADDTSIYMFYQKVGDNSIDSWKNAGRVFKDSDKFDANDPILKDQTQEWSGSATFTSDGKIRLFYTDYSEIASTGTKMATTAMAIWSPCDNLKTCHTSHGSVMAETAVINHKKRKNSPRIVQSNDLTEAAYSLSRDQKRMLDLFRDQIRKTDGTLQEHDCICEIHVAKYAEIFGLTSAEASKDIRQALKSFAGKEVVFYRPEEDAGDEKSYEQPSKDIRQALKSFAGKEVVFYRPEEDAGDEKGYESFPWFIKRAHSPSRGLYSVHINPYLIPFFIGLQNRFTQFRLSETKEITNPYAMRLYESLCQYRKPDGSGIVSLKIDWIIERYQLPQSYQRMPDFRRRFLQVCVNEINSRTPMRLSYIEKKKGRQTTHIVFSFRDITSMTTG

SEQ ID NO: 46122 - protein, 186 aa, Homo sapiens
RAPMKAPAGVLLVARTVPSSYFNSDCAFCSPLTFPRAPDPSFLSLLWCDNLKTCHTSHGSVMAETAVINHKKRKNSPRIVQSNDLTEAAYSLSRDQKRMLYLFVDQIRKSDGTLQEHDGICEIHVAKYAEIFGLTSAEAKCLFKIQTSATSLPPDGSKIVVEGQQQLSGVIYISGQHLAGGGESFG

SEQ ID NO: 46123 - protein, 591 aa, Homo sapiens
  DOMAIN (106)..(149): 1 kw MIND INHIBITOR DIVISION CONTROL domain identified by eMATRIX, accession number DM01756B, p-value=4.822e-15, raw score of 22.91
  DOMAIN (71)..(185): ParA family ATPase domain identified by PFam, accession name ParA, E-value=2.7e-28, PFam score of 107.5
DLALKGLRVLLVEGNDPQGTASMYHGWVPDLHIHAEDTLLPFYLGEKDDVTYAIKPTCWPGLDIIPSCLALHRIETELMGKFDEGKLPTDPHLMLRLAIETVAHDYDVIVIDSAPNLGIGTINVVCAADVLIVPTPAELFDYTSALQFFDMLRDLLKNVDLKGFEPDVRILLTKYSNSNGSQSPWRRRGVLLESHVSGRVKLTVFLWDLADFGTTIKQDFRLLGQTSVDRLLQLSQGQAVKGNQLLPVSLCDNLKTCHTSHGSVMAETAVINHKKRKNSPRIVQSNDLTEAAYSLSRDQKRMLYLFVDQIRKSDGTLQEHDGILPTDPHMMLRVTIELDADDYDVIVIVSVHTMCIGTIKLAWAADVPTVPSHDEWSDYTSAVQCVNMLRDLLNNVDLQERGSSRVEMQGCKPSIRLELNNGRMPSHSLNGNSPEGEFWLEGNWPHSEPLWPKILHSGAAQEAQLLQSDAPKDSRDFADFGTTIKQDFRLLGQTSVDRLLQLSQGQAVKGNQLLPVSLVKRKTTLAPNTQTASPRALADSLMQLARQVSRLESGQSPPSRQFKWGSLKVRLGLYAPRPKNLFGDGHEVAIA

SEQ ID NO: 46124 - protein, 752 aa, Homo sapiens; identical to SEQ ID NO: 40759
  DOMAIN (645)..(674): kw REPLICATION REPB REPA INITIATION domain identified by eMATRIX, accession number DM00653A, p-value=7.207e-27, raw score of 20.40
  DOMAIN (200)..(307): ParA family ATPase domain identified by PFam, accession name ParA, E-value=5.2e-23, PFam score of 89.9

SEQ ID NO: 46125 - protein, 270 aa, Homo sapiens
  misc_feature (1)...(270): Xaa = X or * as defined in Table 2
MEVLASWATFTLGQTEQHVDWISAGAAPQGPIVKQLPSPVPPTEQLEQEKPVTIGSAPSTPNKLLLSHSNCQLPRPLRSITNISACFSLELAIDHRGFPHSPGARSLYSNSVFGTYQLCDLCDNLKTCHTSHGSVMAETAVINHKKRKNSPLIVQSNDLTEAAYSLSRDQKRMLYLFVDQIRKSDGTLQEHDGICEIHVAKYAEIFGLTSAEASKDIRQALKSFAGKEVVFYRPEEDAGDEKGYESFPWFIKRSPEXRRGKFPFTQMGQD

SEQ ID NO: 46126 - protein, 591 aa, Homo sapiens
  DOMAIN (543)..(570): C1q domain proteins domain identified by eMATRIX, accession number BL01113A, p-value=6.170e-10, raw score of 17.99
MGKKQSRKTGNSKNQSASPPPKERSSSPAMEQSWTDNDFDELREEGFRRSNYCELLGGNSNLMANKLKSFEKKLDDDELLASPSRTPISGPNGDPAGPKFVKAAATTGKARQRFHPATTTFHGRTPAPPLAHPAPTVSTPASTQHPARRHQVARPDRSSTPLPARIALRVFCPTPSTAPPEHPRQNPNPAPQTDSALPGADDVRVSTTDPERRHPHPTNTTTPGPGRVLRKELNRPRRPIHHRRRRFHVQRAWQLPVPHRHHHLDHTSHTRRRLRMTDVRLDRPQPQRPPRITITTVGGDQRLRLDRSYQPESPCDGDLRQLQMAGRAPCSPLSMLVLEKCDNLKTCHTSHGSVMAETAVINHKKRKNSPRIVQSNDLTEAAYSLSRDQKRMLYLFVDQIRKSDGTLQEHDGICEIHVAKYAEIFGLTSAEASKDIRQALKSFAGKEVVFYRPEEDAGDEKQNAKNEHGTTSSLPTQFKTDHMESQKDHPHKEETSPKVPHLVQESQKDHLHKEATNLKVPHPHPGKPQGPPPQEGNKPQRPPPPGRPQGPPPPGGNPQQPLPPPAGKPQGPPPPPQGGRPHRPPQGQPPQ

SEQ ID NO: 46127 - protein, 584 aa, Homo sapiens
  DOMAIN (3)..(45): Chloramphenicol acetyltransferase proteins domain identified by eMATRIX, accession number BL00100C, p-value=6.885e-39, raw score of 23.60
  DOMAIN (1)..(114): Chloramphenicol acetyltransferase domain identified by PFam, accession name CAT, E-value=5.6e-79, PFam score of 275.8
MKNGELVIWDSVHPCYTVFHEQTETFSSLWSEYHDDFRQFLHIYSQDVACYGENLAYFPKGFIENMFFVSANPWVSFTSFDLNVANMDNFFAPVFTMGKYYTQGDKVLMPLAIQCDNLKTCHTSHGSVMAETAVINHKKRKNSPRIVQSNDLTEAAYSLSRDQKRMLYLFVDQIRKSDGTLQEHDGICEIHVAKYAEIFGLTSAEASKDIRQALKSFAGKEVVFYRPEEDAGDEKSYESFPWFIKRIPNLLLHPRGLRAITIAVFGKQNTYIRLEPFKINVLEQITKHIEKLQCGGVVKQLSRRGNNQHISSTYDINRADTQVRRAVNNYDIIVMSNSFNGPVGASKISSEPGDDDEPTEGSFEGHQAAVNAIQIFGNLLYTCSADKTVRVYNLVNNKRLEIFECHGPRAVSCLATAQEGARKLLVVGSYDCTISVRDARNGLLLKTLEGHSKTILCMKAKGQSKPCRRMPFIMAIGSTESSTTSTVFIMLHGSYEALKGGNTTEAMEDFTGGVAEFFEIRDAPSDMYKIMKKAIERGSLMGCSIDGGELQVSRSLLPNEGQHRAFVWDRANVLFEEAGTGSQL

SEQ ID NO: 46128 - protein, 241 aa, Homo sapiens
  DOMAIN (210)..(239): kw REPLICATION REPB REPA INITIATION domain identified by eMATRIX, accession number DM00653A, p-value=7.207e-27, raw score of 20.40
  DOMAIN (194)..(236): Initiator RepB protein domain identified by PFam, accession name RepB_protein, E-value=0.0091, PFam score of 12.3
MPASGNENDLNMPSGTIEIFVRCYVEVERIMSAWTEQPNEHRTMMWSVLLQPCDNLKTCHTSHGSVMAETAVINHKKRKNSPRIVQSNDLTEAAYSLSRDQKRMLYLFVDQIRKSDGTLQEHDGICEIHVAKYAEIFGLTSAEASKDIRQALKSFAGKEVVFYRPEEDAGDEKGYESFPWFIKRAHSPSRGLYSVHINPYLIPFFIGLQNRFTQFRLSETKEITNPYAMRLYESLCQYRKS

SEQ ID NO: 46129 - protein, 106 aa, Homo sapiens
  misc_feature (1)...(106): Xaa = X or * as defined in Table 2
MAETAVINHKKRKNSPRIVQSNDLTEAAYSLSRDQKRMLYLFVDQIRKSDGTLQEHDGICEIHVAKYAEIFGLTSAEARSPAEIAEGLVERHIPVLISNHDTMLTX

SEQ ID NO: 46130 - protein, 707 aa, Homo sapiens
  DOMAIN (600)..(629): kw REPLICATION REPB REPA INITIATION domain identified by eMATRIX, accession number DM00653A, p-value=7.207e-27, raw score of 20.40
  DOMAIN (266)..(439): "Phage" integrase family domain identified by PFam, accession name Phage_integrase, E-value=2.8e-13, PFam score of 57.6
MNMNIKKIVKQATVLTFTTALLAGGATQAFAKENNQKAYKETYGVSHITRHDMLQIPKQQQNEKYQVPQFDQSTIKNIESAKGLDVWDSWPLQNADGTVAEYNGYHVVFALAGSPKDADDTSIYMFYQKVGDNSIDSWKNAGRVFKDSDKFDANDPILKDQTQEWSGSATFTSDGKIRLFYTDYSGKHYGKQSLTTAQVNVSKSDDTLKINGVEDHKTIFDGDGKTYQNVQQFIDEGNYTSGDNHTLRDPHYVEDKGHKYLVFEANTGTENGYQGEESLFNKAYYGGGTNFFRKESQKLQQSAKKRDAELANGALGIIELNNDYTLKKVMKPLITSNTVFIRDKLMERRNRRTGRTEKARIWEVTDRTVRTWIGEAVAAAAADGVTFSVPVTPHTFRHSYAMHMLYAGIPLKVLQSLMGHKSISSTEVYTKVFALDVAARHRCDNLKTCHTSHGSVMAETAVINHKKRKNSPRIVQSNDLTEAAYSLSRDQKRMLYLFVDQIRKSDGTLQEHDGICEIHVAKYAEIFGLTSAEASKDIRQALKSFAGKEVVFYRPEEDAGDEKGYESFPWFIKRAHSPSRGLYSVHINPYLIPFFIGLQNRFTQFRLSETKEITNPYAMRLYESLCQYRKPDGSGIVSLKIDWIIERYQLPQSYQRMPDFRRRFLQVCVNEINSRTPMRLSYIEKKKGRQTTHIVFSFRDITSMTTG

SEQ ID NO: 46131 - protein, 851 aa, Homo sapiens
  DOMAIN (806)..(823): kw REPLICATION REPB REPA INITIATION domain identified by eMATRIX, accession number DM00653B, p-value=3.250e-15, raw score of 16.63
  DOMAIN (128)..(840): Initiator RepB protein domain identified by PFam, accession name RepB_protein, E-value=1e-07, PFam score of 29.7
MAETAVINHKKRKNSPRIVQSNDLTEAAYSLSRDQKRMLYLFVDQIRKSDGTLQEHDGICEIHVAKYAEIFGLTSAEASKDIRQALKSFAGKEVVFYRPEEDAGDEKGYESFPWFIKRAHSPSRGLYSVHINPYLIPFFIGLQNRFTQFRLSETKEITDPYAMRLYKYPVSVSGFRKWGGRRKGSRKAHTLPVWGRDVKLTLKVLRGDSVEKTFRVGSGNERAQKLLTEDALDDLIPSFLLTGQQTPAFGRRVSGVIEIADGSRRRKAAALTESDYRVLVGELDDEQMAALSRLVLMNVVSVMQADCRMNLLEILSALADAECDNLKTCHTSHGSVMAETAVINHKKRKNSPRIVQSNDLTEAAYSLSRDQKRMLYLFVDQIRKSDGTLQEHDGICEIHVAKYAEIFGLTSAEASKDIRQALKSFAGKEVVFYRPEEDAGDEKGYESFPWFIKQSNNININKKDNHTETLSEGHQQQRPKVDKSTKMRKNQHKKAENSKNQNAASPPKGHNSSSAREQNRTENEFDELIEMHMLYAGIPLKVLQSLMGHKSISSTEVYTKVFALDVAARHRELRMQKTYKAKATAYDMARSQNNNSEKLLVYRKLLQVLTGLYKRSNLGVRLYACCGLLLCPAYPQHFAHGYVDKIPGYPGRAGTLTGLHPMQCDNLKTCHTSHGSVMAETAVINHKKRKNSPRIVQSNDLTEAAYSLSRDQKRMLYLFVDQIRKSDGTLQEHDGICEIHVAKYAEIFGLTSAEAKITNPYAMRLYESLCQYRKPDGSGIVSLKIDWIIERYQLPQSYQRMPDFRRRFLQVCVNEINSRTPMRLSYIEKKKGRQTTHIVFSFRDITSMTTG

SEQ ID NO: 46132 - protein, 1942 aa, Homo sapiens
  DOMAIN (1590)..(1632): Chloramphenicol acetyltransferase proteins domain identified by eMATRIX, accession number BL00100C, p-value=1.000e-39, raw score of 23.60
  DOMAIN (1529)..(1663): Chloramphenicol acetyltransferase domain identified by PFam, accession name CAT, E-value=2e-88, PFam score of 307.1
  misc_feature (1)...(1942): Xaa = X or * as defined in Table 2
MQEQQQASSLIRSGNGRLPGSGAQRTPCHIRRDGSQRRVCDDCKQQWWKAKYNIPSGLHACTATLEETHILDSGAHVQVFYKGQLHVMRVPCTDYFDTQKNPNLSHLHGSVMAETAVINHKKRKNSPRIVQSNDLTEAAYSLSRDQKRMLYLFVDQIRKSDGTLQEHDGICEIHVAKYAEIFGLTSAEASKDIRQALKSFAGKEVVFYRPEEDAGDEKGYESFPWFIKRAHSPSRGLYSVHINPYLIPFFIGLQNRFTQFRLSETKEITNPYAMRLYESLCQYRKPDGSSIVSLKIDWDIEPYPAGLKEQIKSDVFLLSSCVEVLPNAEIGFLKCLAIIGLWAVSLFSYNNCFICTPAFGRRVSGVIEIADGSRRRKAAALTESDYRVLVGELDDEQMAALSRLGNDYRPTSAYERGQRYASRLQNEFAGNISALADAENISRKIITRCINTAKLPKSVVALFSHPGELSARSGDALQKAFTDKEELLKQQASNLHEQKKAGAINTQLVETLLSDSRRIPDFMSKTPKAMVTKAKIDKWDLIKLKSFCTAKETTIRVNRQPTEWEKIFATYSSDKGLISRIYKELKQSYRKKTTLSTSGGHEKWRRNLKLNVALLIWFCCDPTQISFLIVAAKIPMSCEGSGGRRNPMITRQTGSGVDLQQTPADLQKRDFTGRRKTNKQKGIAPTSTKITSTWKPHPKDCNSSPAREQNWMENEFDKLTEVGFRRWTITNSSKLKERVLTQCKEATNLAKRLEKLLTRITSLEKNKNDLMELKNTAQELREAYTSISGRINQAEQRTSEIEDQLNEIKRRGVSVCPQPSEDTPRSTARVPKGMVPFRPRVPLVTPPREKKEAPWLACLRTRALRILIDPPSQVWDIVSCDAENETKLENTLQDIIQENFPNLARQANVQIQEIQRTPQRYSSRRATPRHIIVRFTKVEMKEKMLRAAREKGRVTLKGKPIRLTADLSAETLQARREWGPIFNTLKEKNFQPRISYPAKISFISEGEIKYFTDKQMLRDFVTSRPALEDLLKEALNMERNNRLVKSLAWASQNGFRSPALLPLSLMLCAPLQEADGTNLGWLAHCGLLCTGDHPSGLGKPGRHGADRHHPEGLDRELTGDNRGQLVGGATQAFAKENNQKAYKETYGVSHITRHDMLQIPKQQQNEKYQVPQFDQSTIKNIESAKGLDVWDSWPLQNADGTVAEYNGYHVVFALAGSPKDADDTSIYMFYQKVGDNSIDSWKNAGRVFKDSDKFDANDPILKDQTQEWSGSATFTSDGKIRLFYTDYSGKHYGKQSLTTAQVNVSKSDDTLKINGVEDHKTIFDGDGKTYQNVQQFIDEGNYTSGDNHTLRDPHYVEDKGHKYLVFEANTGTENGYQGEESLFNKAYYGGGTNFFRKESQKLQQSAKKRDAELANGALGIIELNNDYTLKKVMKPLITSNTVTDEIERANVFKMNGKWYLFTDSRGSKMTIDGCQPTCSEALQNFQRYTGIQHVHRIGMAERMWCDRNRERHTVSSSGGTRLPNPGPARSEHFEAFQSVAQCTYNQTVQLDITAFLKTVKKNKHKFYPAFIHILARLMNAHPEFRMAMKDGELVIWDSVHPCYTVFHEQTETFSSLWSEYHDDFRQFLHIYSQDVACYGENLAYFPKGFIENMFFVSANPWSSLELAVIMGPILANKCDNLKTCHTSHGSVMAETAVINHKKRKNSPRIVQSNDLTEAAYSLSRDQKRMLYLFVDQIRKSDGTLQEHDGICEIHVAKYAEIFGLTSAEASKDIRQALKSFAGKEVVFYRPEEDAGDEKGYESFPWFIKRAHSPSRGLYSVHINPYLIPFFIGLQNRFTQFRLSETKEITNPYAMRXYESLCQYRKPDGSGIVSLKIDWIIERYQLPQSYQRMPDFRRRFLQVCVNEINSRTPMRLSYIEKKKGRQTTHIVFSFRDITSMTTG

SEQ ID NO: 46133 - protein, 178 aa, Homo sapiens
MDLSWRKQRLSITRNVKIARESSSQTTSLRRRYSLSRDQKRMLYLFVDQIRKSDGTLQEHDGICEIHVAKYAEIFGLTFCGTHKDIRQALKSFAGKEVVFYRPEEDAGDEKGYESFPWFIKRAHSPSRGLFSGHIPPISHSLLYRGKEPANTNSAYLKQKKSPILLEVLAREIRQEKK

SEQ ID NO: 46134 - protein, 136 aa, Homo sapiens
MVGAGGGKREMSPTLEINHRPLATMGVENQTLAVSFTTLCVDARSQHDYIALSRLFHTVMLFDVPVMTRLMESEARRFIALVDEFYERHVKLVVSAEVPLYEIYQGDRLKFEFQRCLSRLQEMQSEEYLKREHLAG

SEQ ID NO: 46135 - protein, 452 aa, Homo sapiens
  DOMAIN (237)..(273): PROTEIN TRANSCRIPTION REGULATION domain identified by eMATRIX, accession number PD02985A, p-value=9.182e-35, raw score of 17.54
  DOMAIN (231)..(393): SUA5/yciO/yrdC family domain identified by PFam, accession name Sua5_yciO_yrdC, E-value=4.2e-72, PFam score of 253.0
MRQSMATKLQDGNTPCLAATPSEPRPTVLVFDSGVGGLSVYDEIRHLLPDLHYIYAFDNVAFPYGEKSEAFIVERVVAIVTAVQERYPLALAVVACNTASTVSLPALREKFDFPVVGVVPAIKPAARLTANGIVGLLATRGTVKRSYTHELIARFANECQIEMLGSTEGTSRMSKSLSMRLIFSNPNQSTGDPLDRRFHAQPVACPECGPHLEWVSHGEHAEQEAALQAAIAQLKMGKIVAIKGIGGFHLACDARNSNAVATLRARKHRPAKPLAVMLPVADGLPDAARQLLTTPAAPIVLVDKKYVPELCDDIAPDLNEVGVMLPANPLQHLLLQELQCPLVMTSGNLSGKPPAISNEQALADLQGIADGFLIHNRDIVQRMGRCVVFFDQSEAANPGANCGTNAGCVLFRYFKARILHGLNASDNSILNEGIHLALFFARDNVLTVKILY

SEQ ID NO: 46136 - protein, 405 aa, Homo sapiens
  DOMAIN (51)..(87): PROTEIN TRANSCRIPTION REGULATION domain identified by eMATRIX, accession number PD02985A, p-value=9.182e-35, raw score of 17.54
  DOMAIN (45)..(209): SUA5/yciO/yrdC family domain identified by PFam, accession name Sua5_yciO_yrdC, E-value=1.8e-72, PFam score of 254.2
MPYDRPFTVMAAFPLCPACDKEYRDPLDRRFHAQPVACPECGPHLEWLKMGKIVAIKGIGGFHLACDARNSNAVATLRARKHRPAKPLAVMLPVADGLPDAARQLLTTPAAPIVLVDKKYVPELCDDIAPDLNEVGVMLPANPLQHLLLQELQCPLVMTSGNLSGKPPAISNEQALADLQGIADGFLIHNRDIVQRMDDSVVRERRNAAPFAGAVLSQHLGDLSDDGIQMQWRERYSLMQNIYDFTPQYVVHDAHPGYVSSQWAREMNLPTQTVLHHHAHAAACLAEHQWPLDGGDVIALTLDGIAQPDERSRSEDVDRAHQRGHERDRRRRRSGTSHLTRVDLKEDGKGLKIVRQSLPYGTASGTHGLYFCAYCARLHNIEQQLLSMFGDTDGKRDAMLRSPNR

SEQ ID NO: 46137 - protein, 658 aa, Homo sapiens
  DOMAIN (70)..(106): PROTEIN TRANSCRIPTION REGULATION domain identified by eMATRIX, accession number PD02985A, p-value=9.182e-35, raw score of 17.54
  DOMAIN (64)..(231): SUA5/yciO/yrdC family domain identified by PFam, accession name Sua5_yciO_yrdC, E-value=1.8e-78, PFam score of 274.1
MPYDRPFTVMAAFPLCPACDKEYRDPLDRRFHAQPVACPECGPHLEWVSHGEHAEQEAALQAAIAQLKMGKIVAIKGIGGFHLACDARNSNAVATLRARKHRPAKPLAVMLPVADGLPDAARQLLTTPAAPIVLVDKKYVPELCDDIAPDLNEVGVMLPANPLQHLLLQELQCPLVMTSGNLSGKPPAISNEQALADLQGIADGFLIHNRDIVQRMDDSVVRESGEMLRRSRGYVPDALALPPGFKNVPPVLCLGADLKNTFCLVRGEQAVLSQHLGDLSDDGIQMQWREALRLMQNIYDFTPQYVVHDAHPGYVSSQWAREMNLPTQTVLHHHAHAAACLAEHQWPLDGGDVIALTLDGIGMGENGALWGGECLRVNYRECEHLAACLQWRFRCDCSEQPWVQPGCALLTVNSRVLHQLRDIHYIIRHLTETLGTDNLAESHLQVANELFYRNKAAWLVGKLITPSGTLPFLLPIHQTDDGELFIDTCLTTTAEASIVFGFARSYFMVYAPLPAALVEWLREILPGKTTAELYMAIGCQKHAKTESYREYLVYLQGCNEQFIEAPGIRGMVMLVFTLPGFDRVFKVIKDRFAPQKEMSAAHVRACYQLVNEHDRVGRMADTRSLKTLLLEKRHISPALMALLLQEAAANIHDLGEQL

SEQ ID NO: 46138 - protein, 234 aa, Homo sapiens
  misc_feature (1)...(234): Xaa = X or * as defined in Table 2
LQARFPLSWRNFPITFACYAGLFCLSASIIYPDHLCPVSVPRAFAGPRHRRHLLVLHRGCGLRHTKRPGPGPGPARALAIWPPDPGCXRCRRPSLPASSLRSSATPTCTSTQPALEWCVAVYAICFILAAIAILLNLGECTNVLPIPFPSFLSALALLSVLLYATALVLWPLYQFDEKYGGQPRRSRDVSCSRRHAYYVGAWDRRLAEAILTAINLLTYVADLMHSAHLDFSKV

SEQ ID NO: 46139 - protein, 284 aa, Homo sapiens
  DOMAIN (185)..(221): PROTEIN TRANSCRIPTION REGULATION domain identified by eMATRIX, accession number PD02985A, p-value=7.792e-20, raw score of 17.54
  DOMAIN (190)..(284): SUA5/yciO/yrdC family domain identified by PFam, accession name Sua5_yciO_yrdC, E-value=0.032, PFam score of -35.7
MAQPLAKQWTPVSPRALLVSISSMPPRPAADVTVCRHRNCTLRELLYGFAYAAAQQLNLHGDVCNDGDGVEVRLREDPETFLVQLYQHCPPLARTGGTMNTQIVPDAATCPASLSEMNTPGERRYRYPFINCTHYGPSFPIIRAMPYDRPFTVMAAFPLCPACDKEYRDPLDRRFHAQPVACPECGPHLEWGIGGFHLACDARNSNAVATLRARKHRPAKPLAVMLPVADGLPDAARQLLTTPAGAGLWLGGNGYPRAPDNANSTAMSCASHAHSFGGGHPRGR

SEQ ID NO: 46140 - protein, 895 aa, Homo sapiens
  DOMAIN (352)..(373): GTP1/OBG GTP-BINDING PROTEIN FAMILY SIGNATURE domain identified by eMATRIX, accession number PR00326A, p-value=8.442e- 13, raw score of 8.75
  DOMAIN (222)..(504): GTPase of unknown function domain identified by PFam, accession name MMR_HSR1, E-value=1.7e-07, PFam score of 10.2
MGATPPRNPYHSQEQHKNPQAPTERQTNHPSLTPPQVTTMAPQTGPIPRHTTTTTPTREETQNLTQPPPENAKNEPTRQKARHMKKTIIFACHHTAFMYTPPHFLLYLCSINLLNASSSPGTASHIITNSIDTSHPDTFHPTRVRHGLIIPSRQILPKRHIILPTAITANGLLVSNITHPEHTSQSTHLQSPYFGIYHRTVQNKCRQGTLEDPLQCHGGPVILDLLLKRILTIPGLRIARPGEFSERAFLNDKLDLAQAEAIADLIDASSEQAARSALNSLQGAFSARVNHLVEALTHLRIYVEAAIDFPDEEIDFLSDGKIEAQLNDVIADLDAVRAEARQGSLLREGMKVVIAGRPNAGKSSLLNALAGREAAIVTDIAGTTRDVLREHIHIDGMPLHIIDTAGLREASDEVERIGIERAWQEIEQADRVLFMVDGTTTDAVDPAEIWPEFIARLPAKLPITVVRHKADITGETLGMSDVNGHALIRLSDRTGDRRGTCCVPISNRAWASTPTWKAASWRVVATTGAGTGRENLHQANAHSATHPDNGGGRLRRHSKSATTGPTPTTEGRYQNQTAKRQQTMDAIAKSLQSITASSSHIHHQHSTVTSHRHRTQHTSAIHICSITSGHNHILTSHNRTQISHCASHRHSSHVPIRRTDTKIHIPRTHSHSRSKHNSKSIYIQRQDLLLCNCIAMHVLTRNQPTQYSGTIPVARYRQDHAVARHNTEAPTCAQYITSSRGTRQSQHTQHVPTRCKLHTTVANTATTRPIPWRYAAHNSQVELVPAPTLLANVVNTRSSIQSTSSQSIQLIWLQISCNSTQVTPHPVSHTLTAVPQCTSTATAIIQQLPTSASLLAFCINIHTVQHTPYIPVHQCTSQHHIYQQHHTDCCAVYHI

SEQ ID NO: 46141 - protein, 526 aa, Homo sapiens
  DOMAIN (12)..(38): COMPONENT PHOSPHOTRANSFERASE SYST domain identified by eMATRIX, accession number PD02963A, p-value=3.250e-25, raw score of 12.85
  DOMAIN (48)..(191): Integrase core domain identified by PFam, accession name rve, E-value=6.5e-28, PFam score of 100.5
MNELVQILKNTRQHLMTGVSHMIPFVVSGGILLAVSVMLYDKGVNQLRLRVTFALDCCDREALHWAVTTGGFNSETVQDVMLGAVERRFGNDLPSSPVEWLTDNGSCYRANETRQFARMLGLEPKNTAVRSPESNGIAESFVKTIKRDYISIMPKPDGLTAAKNLAEAFEHYNEWHPHSALGYRSPREYLRQRACNGTPNTSLPTPQAFDRSCPINATSAKTFFHRQPTQCGKLHQAEIASATYRQWRLNRCIKGLMPRSLLTCGLSLPKYYAARGCRKLPRGNRENAAIFSLCKTKHTPRKESTIKVHMKTQKQITKTLRPISLMNIDAKILNKILANRIQQHIKKLIHHDQVGFIPGMQGCFNIRKSINVIQHINRTKDKNHMIISIDAEKAFDKVQQPFMLKTLNKLERKPMLNAEHPRLDRPTYPPAPAGHQRATSNTRGPHGHSQTNTTHAPAEPPKTPRAPHCPPTLLPPPNTARTPTGTPNPRDPPPTERPSPRPHRRQHARIPPPPPQAPSNPGGDPP

SEQ ID NO: 46142 - protein, 292 aa, Homo sapiens
  DOMAIN (127)..(153): COMPONENT PHOSPHOTRANSFERASE SYST domain identified by eMATRIX, accession number PD02963A, p-value=3.250e-25, raw score of 12.85
MQAAHRLRPAYRIKTGKPPALADYHPAYQEMLSRKQDRVIDQIDFGIKDTVEILHMGQIQSMGREFALSLRFSIHGHNVHGNESPEMGPERRSGFYDEWSPERIIQYYRPAREQLMNELVQILKNTRQHLMTGVSHMIPFVVSGGILLAVSVMLYGKGAVPDAVADPNLKKLFDIGVAGLTLMVPFLAAYIGYSIAERSALAPCAIGAWVGNSFGAGFFGALIDAFPRLSEEINPALPEAKVMACLEAVARQDNVDSPQELPPTPLFASRPITRLKSWWAPGGEVESGTHKK

SEQ ID NO: 46143 - protein, 140 aa, Homo sapiens
RNLHALALNIFKDEGREAFLKLMETTDIFIEASKGPAFARRGITDEVLWQHNPKLVIAHLSGFGQYGTEEYTNLPAYNTIAQAFSGYLIQNGDVDQPMPAFPYTADYFSGLTATTAALAALHKVRETGKGESIDIAMYEV

SEQ ID NO: 46144 - protein, 45 aa, Homo sapiens
  misc_feature (1)...(45): Xaa = X or * as defined in Table 2
NNRSHPALCTNRPPRTRLVFYPLLAPNAXLAALQKGWAYGAGHNA

SEQ ID NO: 46145 - protein, 1338 aa, Homo sapiens
  DOMAIN (369)..(401): PROTEIN PLASMID NODULATION COBALT RESISTANCE TRA domain identified by eMATRIX, accession number PD02581B, p-value=9.735e- 28, raw score of 19.43
  DOMAIN (976)..(1118): Prokaryotic DNA topoisomerase domain identified by PFam, accession name Topoisom_bac, E-value=4.3e-53, PFam score of 189.8
MRFCLYVCTPLVWFFNGLANIIFRIFKLPMVRKDDITSDDIYAVVEAGALAGVLRKQEHELIENVFELESRTVPSSMTPRENVIWFDLHEDEQSLKNKVAEHPHSKFLVCNEDIDHIIGYVDSKDLLNRVLANQSLALNSGVQIRNTLIVPDTLTLSEALESFKTAGEDFAVIMNEYALVVGIITLNDVMTTLMGDLVGQGLEEQIVARDENSWLIDGGTPIDDVMRVLDIDEFPQSGNYENIGGFMMFMLRKIRNARFGASYFNQQLAYAQLQIAEETLRNYQQSYAFVEKQLLTGSSNVLALEQARGVIESTRSDIAKRQGELAQANNALQLLLGSYGKLPQAQTVNSDSLQSVKLPAGLSSQILLQRPDIMEAEHALMAANANIGAARAAFFPSISLTSGISTASSDLSSLFNASSGMWNFIPKIEIPIFNAGRNQANLDIAEIRQQQSVVNYEQKIQNAFKEVADALALRQSLNDQISAQQRYLASLQITLQRARALYQHGAVSNLEVLDAERSLFATRQTYLDRNMSGKVNEVSWRSELVEVASIYSTVLKIDIHFFIVDQVFHIAIERHIHFDLTMPVAGGHDMRMLEAAHTSRTASSCEIPYAGNWLAGLHAPTAMPRTAAISMRTNSLPALWRPYEHVPPTLATQVAALAAIVPVALAIGVDPAYIVASAPACYGYYILPTYPSDLAAIQFDRSGTTHIGRFVINHSFILPGLIGVSVSCVFGWIFAAIVADFDGETILKVEPEALTLLAQQAFHDASFMLRPAHQKQVAAILHDPEASENDKYVALQFLRNSEIAAKGVLPTCQDTGTAIIVGNKGRALWTGGVMKKRCRRRYTPISRYLRYSRWGLACHAPDHDYAELQDKIGVMSKIGYNGTKILEIDSRAPYSEVLEQAQKAVSLVAIVSDRRNGAFRTIIRNSAWLGSSNVVSALLGLLALSCAGKGMTPAMFGVLVIVQSYAKSISDFIRFQTCIDLDIAKGKFVAKARFLAEAGWRTLLGSKERDEENDGTPLPVVAKGDELLCEKGEVVERQTQPPRHFTDATLLSAMTGIARFVQDKDLKKILRATDGLGTEATRAGIIELLFKRGFLTKKGRYIHSTDAGKALFHSLPEMATRPDMTAHWESVLTQISEKQCRYQDFMQPLVGTLYQLIDQAKRTPVRQFRGIVAPGSGGSADKKKAAPRKREGRYLHSDIDTVERMEIIRDLSLGEFDVLVGINLLREGLDMPELSLVAILDADKEGFLRSERSLIQTIGRAARNVNGIAILYGDKITPSMAQATWTKAERRREKQQKYNEEHGITPQGLNKKVVDILALGQNIGQNQSEGQRKIAPDC

SEQ ID NO: 46146 - protein, 60 aa, Homo sapiens
  misc_feature (1)...(60): Xaa = X or * as defined in Table 2
SGHPFIPLKDLTQIAIGDVFNNNLILWANREIIHSVPXRYXHDANIQCFVVISSFVRSQQ

SEQ ID NO: 46147 - protein, 364 aa, Homo sapiens
IFQEHIMDHLPMPKFGPLAGLRVVFSEMWRAEVIWIENVAWADTIRVQPNYPQLSRRNLHALSLNIFKDEGREAFLKLMETTDIFIEASKGPAFARRGITDEVLWEDKPKLVIGHLSGFAHQVSQISTHQGSSNWVSPDQLQCNTQTNSPKQLFSTHCMQCRPNSTTNSRQFQSNPVNHALNHQSKPHHPLVYAQHKAKRAHRAKSITASRKQATTFQQVGAPAGGHTHTSSSHPQTTKALEQVKHLTTRQAILSKAKPQATSPIPRDTGPLRGRQFHALNPSTTVIGQPANQRIGQHGHPQFKPKTPFWPQPKEKVPNRQCTSKTYSNGEQNIPQTYAIRTKNRSTYPRNLKQQPLNPGKAKT

SEQ ID NO: 46148 - protein, 121 aa, Homo sapiens
  misc_feature (1)...(121): Xaa = X or * as defined in Table 2
QTTGISFQGRGGAGPGVPTRTQCLRCHGGRHGHPSHLCKPNKGDPRKIRLKMSWRXPWFAIGPRDWSSSRPKPTSPRGSCRSFIEASKMSAPVVWSTKTHSSRSMLSFSLMEDFVTALSIL

SEQ ID NO: 46149 - protein, 149 aa, Homo sapiens; identical to SEQ ID NO: 39551

SEQ ID NO: 46150 - protein, 511 aa, Homo sapiens
  DOMAIN (387)..(403): Purine/pyrimidine phosphoribosyl transferases proteins domain identified by eMATRIX, accession number BL00103B, p-value=3.172e- 12, raw score of 9.64
  DOMAIN (302)..(446): Phosphoribosyl transferase domain identified by PFam, accession name Pribosyltran, E-value=1.2e-24, PFam score of 95.4
  misc_feature (1)...(511): Xaa = X or * as defined in Table 2
MLLEQLSQHKLDMIISDCPIDSTQQEGLFSVRIGECGVSFWCTNPPPEKPFPACLEERRLLIPGRRSMLGRKLLNWFNSQGLNVEILGEFDDAALMKAFGAMHNAIFVAPTLYAYDFYADKTVVEIGRVENVMEEYHAIFAERMIQHPAVQRICNTDYSALFSPAKLRRALYHPASTELHPACGKDFRQLYRRIQNQIQRHALWHKIFDVEIPHPILIIARVSANMPHTGCRIAIEWPGKVVEAILRLTNDAPEYLPIGFNHKSKMRSEGMNPYQRQFMELALSNQVLKCGEFTLNRGRKSPYFFNAGLFNTGRDLALLARFYAEALVDSGIEFDLLLAPAYKGIPIATTTAVALAEHHDLDLPYCFNRKEAKDHGEGGNLVGSALQGRVMLVDDVITAGTAIRESMEIIQANGATLAGVLISLDRQERGRXCDHRRNGDSRVDGDYSGQWRDACWRVDFARSSGTRARRDFGDSGSXAXLQLQSDLYHHPERPDCLPGREAGNGGTSGGG

SEQ ID NO: 46151 - protein, 361 aa, Homo sapiens
  DOMAIN (264)..(291): Transthyretin-like family domain identified by eMATRIX, accession number PF01060A, p-value=6.600e-09, raw score of 18.32
MIVAFCLYKYCPFAGLQRDFMRIASTVAARGHHVRVYTQSWEGDCPKAFELIQVPVKSHTNHGRNAEYYAWVQNHLKEHPADRVVGFNKMPGLDVYFAADVCYAEKVAQEKGFLYRLTSRYRHYAAFERATFEQGKSTKLMMLTDKQIADFQKHYQTEPERFQILPPGIYPDRKYSEQIPNSREIYRQKNGIKEQQTYYCQVGSDFGRKGCFAAKVPLVSGAAIRMEGQITVFTYQDGEPCYRCLSRLFGENALTCVEAGVMAPLIGVIGSLQAMEAIKMLAGYGKPASGKIVMYDAMTCQFREMKLMRNPGCEQFMRMQNVRLNRRSAKRSLPVLLKLRHSGINRRIANHLLCHIQWQSN

SEQ ID NO: 46152 - protein, 82 aa, Homo sapiens
  misc_feature (1)...(82): Xaa = X or * as defined in Table 2
CTQFRKTCFTCKASNGFCFATSCNLIYTSEIICRGPTGXHNLIASLLQRIDNLRKFIVIPTLKYLTRCRLDDNIMIFYAQGI

SEQ ID NO: 46153 - protein, 85 aa, Homo sapiens
  misc_feature (1)...(85): Xaa = X or * as defined in Table 2
PANAWAEMWEYSAWQRRMYSMGXTSKVVVHPGATDRWXNTNGCYRIFWIAAPFVPAAVIHGNILPTHGACVHKGFGRAPAGAAVE

SEQ ID NO: 46154 - protein, 254 aa, Homo sapiens; identical to SEQ ID NO: 43146

SEQ ID NO: 46155 - protein, 241 aa, Homo sapiens
  DOMAIN (207)..(226): RECOVERIN FAMILY SIGNATURE domain identified by eMATRIX, accession number PR00450E, p-value=7.058e-14, raw score of 12.14
  DOMAIN (194)..(222): EF hand domain identified by PFam, accession name efhand, E- value=4.1e-05, PFam score of 30.4
  misc_feature (1)...(241): Xaa = X or * as defined in Table 2
VPACAGLKKEARSLLASPPRLLNTKLQASCRALFSPPIQSRQTTGISFQGRGGAGPGVPTRTQCLRCHGGRHGHPSHLCKPNKGDPRKIRLKMSWRXPWFAIGPRDWSSSRPRPTSPRGSCRSFIEASKMSAPVVWSTKTHSSRSMLSFSLMEMPARMPITSSMPSTPLRQGSVKFEDFVTALSILLRGTVHEKLRWTFNLYDINKDGYINQEEMMDIVKAIYDMMGKYTYPVLKEDTPRQ

SEQ ID NO: 46156 - protein, 973 aa, Homo sapiens
  DOMAIN (536)..(604): Glycosyl transferases group 1 domain identified by PFam, accession name Glycos_transf_1, E-value=1.9e-12, PFam score of 49.3
MVKDASQSQASLGLDAFLPASGVQYTHERSPDSPLKSQECPSGVVNEDTFKQIYAQFFPHGGLMSENGTGKKASVFGSTGSGALLLEEGERRREQPLIEMRKPPHVLINYQAKVGGNSIPSPSLCKPAFPPLPSWAVDLASARQKEDASRSLQNKEEDFYTSQPGFPALALGCCLRVNLLLGHRGISAGSSYRPITSTPCHLCKLGQEVFAKPLNLQDQCQQNLVMQVLKLVLNCLNFDFIGSSADESADDLCTVQIPTTWRTMGLVGCDGVCCRTRWCQCLATAVVSGVGGGPWLLPACSSGPSMISKRKKFVHKWAKDLVEPRHGLENVWDLPRAMAGSYLMYKQRKWKIMEFGKWALQHKMTVKDIERLQLYNKVKEQPVQVEGSGRASTIFWVLKTFKGGKSPCGAPGECVAWTQCRILGWVQIHFKEHPADRVVGLIKMPGLDFYFAADVCYAEKVAQEKGFLYRLTSRYRHYAAFERATFEQGKSTKLMMLTDKQIADFQKHYQTEPERFQILPPGIYPDRKYSEQIPNSREIYRQKNGIKEQQNLLLQVGSDFGRKGVDRSIEALASLPESLRHNTLLFVVGQDKPRKFEALAEKLGSERASMEFKRYEYNAAGDLTAVITPDGNRSETQYDAWGKAVSTTQGGLTRSMEYDAAGRVISLTNENGSHSVFSYDALDRLEDEGLVILWYYDESDRITHRTVNGEPAEQCQYDGHGWLTDISHLSEGHRVAVHDGYDDKGRLTGECQTVENPETGELLWQHETKHAYNEQGLANRVTPDSLPPVEWLTYGSGYLAGMKLGGTPLVEYTRDRLHRETVRSFGSMAGSNAAYELTSTYTPAGHVTEPAHLNSLVYDRDYGWNDNGDLVRISGPRQTREYGYSATGRLESVRTLAPDLYIRIPYATDPAGNRLPDKELHPDSTLTVWPDNRIAEDAHYVYRHDEYGRLTEKTDRIPAGVIRTDDERTHHYH

SEQ ID NO: 46157 - protein, 507 aa, Homo sapiens; identical to SEQ ID NO: 32534
  DOMAIN (308)..(353): kw TRANSCRIPTASE REVERSE II ORF2 domain identified by eMATRIX, accession number DM01354N, p-value=1.000e-40, raw score of 13.17

SEQ ID NO: 46158 - protein, 393 aa, Homo sapiens; identical to SEQ ID NO: 37416
  DOMAIN (37)..(83): kw TRANSCRIPTASE REVERSE II ORF2 domain identified by eMATRIX, accession number DM01354O, p-value=1.000e-40, raw score of 8.73
  DOMAIN (70)..(251): Reverse transcriptase domain identified by PFam, accession name rvt, E-value=1.7e-22, PFam score of 88.2

SEQ ID NO: 46159 - protein, 230 aa, Homo sapiens
  DOMAIN (150)..(195): kw TRANSCRIPTASE REVERSE II ORF2 domain identified by eMATRIX, accession number DM01354N, p-value=1.000e-40, raw score of 13.17
MENDFDELREEGFRRSNYSKLREDIQTKGKEVENFEKNLEECITRITNTEKCLKELMELKTKARELREECRSLRSRCDQLEERVSAMEDEMNEMKREGKSWFFEKSNKIDRPLARLIKKKREKNQIDTIKNDKGDITTNPTEMQTTIREYYKHLYTNKLENLEEMDKFLDTYTLPRLNQEEVESLNRPVTGSEIVAIINSLPTKKSPGPDGFTAEFYQRYKEELVPFLLK

SEQ ID NO: 46160 - protein, 153 aa, Homo sapiens
  DOMAIN (84)..(129): kw TRANSCRIPTASE REVERSE II ORF2 domain identified by eMATRIX, accession number DM01354N, p-value=1.000e-40, raw score of 13.17
MELKTKARELREECRSLRSRCDQLEERVSAMEDEMNEMKREGKFREKRIKRNEQSLQEIWDYVKRPNLRLIGVPEKIQTTNREYYKHLYANKLENLEEMDTFLDTYTLPRLNQEEVESLNRPITGAEIVAIINSLPTKKSPGPDGFTAEFYQS

SEQ ID NO: 46161 - protein, 239 aa, Homo sapiens
  DOMAIN (37)..(83): kw TRANSCRIPTASE REVERSE II ORF2 domain identified by eMATRIX, accession number DM01354O, p-value=1.000e-40, raw score of 8.73
  DOMAIN (70)..(235): Reverse transcriptase domain identified by PFam, accession name rvt, E-value=2.7e-07, PFam score of 33.9
MDKFLDTYTLPRLNQEEVESLNRPITGSEIVAIINSLPTKKSPGPDGFTAEFYQRYKEELVPFLLKLFQSIEKEGILPNSFYEASIILIPKPGRDTTKKEHFRPISLMNIDAKILNKILAKRIQQHIKKLIHHDQVGFIPGMQGWFNIRKSINVIQHINRAKDKNHMIISIDAEKAFDKIQQPFMLKTLNKLGPWKPEAWHAVQGHTGKHQGCQETDRVKGKHGQEPSLWFPQEEISKA

SEQ ID NO: 46162 - protein, 1183 aa, Homo sapiens
  DOMAIN (272)..(317): kw TRANSCRIPTASE REVERSE II ORF2 domain identified by eMATRIX, accession number DM01354N, p-value=1.000e-40, raw score of 13.17
  DOMAIN (356)..(630): Reverse transcriptase domain identified by PFam, accession name rvt, E-value=2.4e-71, PFam score of 250.4
MGDFNTPLSTLDRSRRQKVNKDTQELNSALHQVDLIDIYRTLHHKSTEYTFFSAPHHTYSKIDHIVGSKALLSKCKRTEIITNYLSDHSAIKLELRIKNLTQNRSTTWKLNNLLLNDYWIHNKMKAEIKMFFETNKNKDTTYQNLWDAFKAVCRGKFIALNAHKRKQERSKIDTLTSQLKELEKQEQTHSKASRRQEVTKIRAELKEIETQKTLQKINESRSWFFERINKIDRMLARLIKKKREKNQIDTIKNDKGDITTDPTEIQTTIREYYKHLYANKLENLEEMDKFLDTYTLPRLNQEEVESLNRPITGAEIVAIINSLPTKKSPGPDGFTAEFYQRYKEELVPFLLKLFQSIEKEGILPNSFYEASIILIPKPGRDTTKKENFRPISLMNIDAKILNKILAKRIQQHIKKLIHHDQVGFIPGMQGWFNIRKSINVIQHINRNKDKNHMIISIDAEKAFDKIQQPFMLKTLNRLGIDGTYFKIIRAIYDKPTANIVLKGQKLEAFPLKTGTRQGCPLSPLVFNIVLEVLARAIRQEKEIKGIQLGKEEVKLSLFADDMIVYLENPIVSAQNLLKLISTSAKSQDTKSMYKNHKHSYTPTTDKQSQIMSELPFTTASKIIKYLGIQLTRDVKDLFKENYKPLLKEIKEDTNKWKNIPCSWVGRINIVKMAILPKVIYRFNAIPIKLPMTFFTQLEKTTLKFIWNQKRARIAKAILSQKNKAGGITLPDFKLYYKATVTKTAWYWYQNRDIDQWNRTEPSEITPHIYNYLIFDKPEKNKQWGKDSLFNKWCWENWLAICRKLKLDPFLTPYTKINSRWIKDLNVRPKTIKTLEENLGITIQDIGMGKDFMSKTPKAMATKAKIDKWDLIKLKSFCTAKETTIRVNRQPTKWEKIFATSSSDKGLISRIYNELQQIYKKKTNNPIKKWAKDMNRHFSKEDIYAAKKHMKKCSSSLAIREMQIKTTMRYHLTPVRMAIIKKSGNNRNPTYKGCEGPLQGELQTTAQGNKRGYKQMEEHSMLMGRKNQYRENGHTAQELEKTTLKFIWNQKRARIAKAILSQKNKAGGITLPDFKLYYKATVTKTVWRSDIKRQRLHQNLEKKVNPDSHSTNFIFEKFISPVGFIEAITQEIKERGFYIDLRVIFVVLRWKLDSKAKAVIKHLGGPGLNCDRPDKAGSGLLKLG

SEQ ID NO: 46163 - protein, 107 aa, Homo sapiens
  DOMAIN (37)..(83): kw TRANSCRIPTASE REVERSE II ORF2 domain identified by eMATRIX, accession number DM01354O, p-value=1.171e-18, raw score of 8.73
MDKFLDTYTLPRLNQEEVESLNRPITGAEIVAIINSLPTKKSPAPDGFTAEFYQRYKEELIRVFRPPNYSGTIALALLVSLVGGLLYLRRNNLEFIYNKTGWAMVSL

SEQ ID NO: 46164 - protein, 120 aa, Homo sapiens
  DOMAIN (37)..(83): kw TRANSCRIPTASE REVERSE II ORF2 domain identified by eMATRIX, accession number DM01354O, p-value=7.417e-17, raw score of 8.73
MDTFLDTYTLPRLNQEEVESLNRPITGAEIVAIINSLPTKKSPGPDGSIAEFYQRYKEELCPDSSGSPTTVQGHEVLKVEAGPQEGQQKGSASGWHTITSAHVSVFSDSPMANPTVSIAG

SEQ ID NO: 46165 - protein, 163 aa, Homo sapiens
  DOMAIN (54)..(99): kw TRANSCRIPTASE REVERSE II ORF2 domain identified by eMATRIX, accession number DM01354N, p-value=1.000e-40, raw score of 13.17
MWESLEPPRDLLSGFDKNVDSDMNNKVRSGVVSDGDEEHVGNWSKEIQTTIREYYKHLYANKLENLEETDKFLDTYTLPRLNQEEVESLNRPITGAEIVAIINSLPTKKSPGPDGFTAEFYQRYKEELHINRAKDKNHMIISIDAEKAFDKIQQRFMLKTLNE

SEQ ID NO: 46166 - protein, 554 aa, Homo sapiens
  DOMAIN (244)..(289): kw TRANSCRIPTASE REVERSE II ORF2 domain identified by eMATRIX, accession number DM01354N, p-value=1.000e-40, raw score of 13.17
  DOMAIN (259)..(507): Reverse transcriptase domain identified by PFam, accession name rvt, E-value=2.9e-46, PFam score of 167.1
  misc_feature (1)...(554): Xaa = X or * as defined in Table 2
MLKGSIQQEELTVLNIYAPNTGAPRCIKQVLSDVQRDLDSNTLIMGDFNTPLSTLDRSTRQKVNKDTQELNSALHQADLIDIYRTLHPKSTEYTFFSAPHHTYSKIDHILGSKALLSKCKRTEIITNSLSDHSAIKLELRIKNLTQNRSTTWKLNNLLLNDYWVHNEMKAEIKMFFETKENKDTTYQNLWDAFKAVCRGKFIALNAYKRKQERSKIDTLTSQLKELEKQEQTHSKEIQTTIREYYKHLYTNKLENLEEMDKFLDTYTLPRLNQEEVESLNRPITGSEIVAIINSLPTKKSPGPDGFTAEFYQRYKEEMHINRAKDKNHMIISIDAEKAFDKIQQPFMLKTLNKLGIDGTYFKIIRAIYDKPTVNIILNGQKLEAFPLKTGTRQGCPLSPLLFNIVLEVLARAIRQEKEIKGIQLGKEEVKLSLFADDMIVYLENPIVSAQNLLKLISNFSKVSGYKINVQKSQAFLYTNNRQTESQIMSELPFTIASKRIKYLGIQFTRDVKDLFKENYKPAQGNKRGYKQMEEHSMLMGRKNQYRENGHTAQX

SEQ ID NO: 46167 - protein, 531 aa, Homo sapiens; identical to SEQ ID NO: 38214
  DOMAIN (236)..(281): kw TRANSCRIPTASE REVERSE II ORF2 domain identified by eMATRIX, accession number DM01354N, p-value=1.000e-40, raw score of 13.17
  misc_feature (1)...(531): Xaa = X or * as defined in Table 2

SEQ ID NO: 46168 - protein, 392 aa, Homo sapiens
  DOMAIN (154)..(195): kw TRANSCRIPTASE REVERSE II ORF2 domain identified by eMATRIX, accession number DM01354I, p-value=1.000e-40, raw score of 15.55
  DOMAIN (1)..(140): AP endonuclease family 1 domain identified by PFam, accession name AP_endonucleas1, E-value=8.8e-07, PFam score of -13.3
MVKGSIQQEELTILNIYALNTGAPRFIKQVLSDLQRDLDSHTLIMGDFNTPLSTLDRSMRQKVNKDTQELNSALHQADLIDIYGTLHPQSTEYTFFSAPYHTYSKIDHILGSKALLSKCKRREIIINYLSDHSAIKLELRIKNLTQNLSTTWKLNNLLLNDYLVHNEMKAEIKMFFETNENKDTTYQNLWDTFKAVCGGKFIALNAHKRKQERSKIDTLTSQLKELEKQEQTHSKASRRQEITKIRAELKEIETQKTLQKMNPGAEIQTTIREYYKHLYTNKLENLEEMDKFLDTYTLPRLNQEEVESLNRPITGSEIVAIINSLPTKKSPGPDGFTAEFYQRYKEELAQQSLQVRAVHEDTHCSSSSNLDSLPLLGFAQSESKISGLGYSQ

SEQ ID NO: 46169 - protein, 1221 aa, Homo sapiens; identical to SEQ ID NO: 35785
  DOMAIN (387)..(432): kw TRANSCRIPTASE REVERSE II ORF2 domain identified by eMATRIX, accession number DM01354N, p-value=1.000e-40, raw score of 13.17
  DOMAIN (473)..(746): Reverse transcriptase domain identified by PFam, accession name rvt, E-value=1.8e-87, PFam score of 304.0

SEQ ID NO: 46170 - protein, 665 aa, Homo sapiens
  DOMAIN (149)..(194): kw TRANSCRIPTASE REVERSE II ORF2 domain identified by eMATRIX, accession number DM01354N, p-value=1.000e-40, raw score of 13.17
  DOMAIN (200)..(432): Reverse transcriptase domain identified by PFam, accession name rvt, E-value=5e-05, PFam score of 1.7
MKAEIKMFFETNENKDTTYQNLWDTFKAVCRGKFIALNAHNRKQERSKIDTLTSQLKELEKQEQTYSKASRRQEITKIRAELKEIETQKTLQKINESRSWFFERINKIDRPLARLIKKKRQKNQMDTIKNDKGDITTDPTEIQTTVREYYKHLYTNKLENLEEMDKFLDTYTLPRLNQEEVESLNRPITGAEIVAIINSLPTKKSPGPDGFTAEFYQRYKEELPGRDTTKEENFRPISLMNIDAKILNKILANQIQQHIKKIIHHDQVGFIPGMQGWFNIRKSINVIQHINRAKDKNHMIMSIDAEKAFDKIQQPFMLKTLNKLGIKYLGIQLTRDVKDLFKENYKPLLKEIKEDTNKWNNIPCSWVGRINIVKTAILPKVIYRFNAIPIKLPMPFFTELEKTTLKFIWNQKRACITNSILSQKNKAGGITLPDFKLYYKATVTKTAWYWYQNRNIDQWNRTEPSEITPHIYNYVIFDKPDKNKKWGKDSLFNKWCWENWLAICRKLKLDPFLTPYTKINSRWIKDLNVRPKTIKTLEENPGSTIQDIGMGKDFMSKTPKAMATKDKIDKWDLIKLKSFCTAKETTIRVNRQPTEWEKIFATYSSDKGLIISRTYNELKQIYKKETNNSIKKWVKDMNRHFSKEDIYAAKKHMKNFSSSLAIREM

SEQ ID NO: 46171 - protein, 1397 aa, Homo sapiens
  DOMAIN (154)..(195): kw TRANSCRIPTASE REVERSE II ORF2 domain identified by eMATRIX, accession number DM01354I, p-value=1.000e-40, raw score of 15.55
  DOMAIN (400)..(664): Reverse transcriptase domain identified by PFam, accession name rvt, E-value=2.7e-14, PFam score of 60.9
MVKGSIQQEELTILNTYAAHTGAPRLIKQVLSDLQRDLDSHTIIMGDFNTPLSTLDRSTRQKVNKDTQELKSALHQADLTDIYRTLHHKSTEYTFFSAPHHIYSKIDHILGSKALLSKCKRTEIITNYLSDHSAIKLELWIKNLTQNHSTTWELNNLLLNDYWVHNEMKAEIKMFFETNENKDTTYHNLWDTFKAVCRGKFIPLNAHKRKQERSKIDTLTSQLKELEKQEQTHSKASRRQEITKIRAELKEIETQKTLQKINESRSWFFERINKIDRLLARLIKKKREKNQIDAIKNDKGDITTDPTEIQTTIREYCKHLYANKLENLEEMDKFLDTYTLPRLNQEEVESLNRPITGAEIVAIINSLPTKKSPGPDGFTAKFYQRYKEELVPFLLKLFQSIEKEGILPNSFYEASIILIPKPGRDTTKKENFRPISLMNIDAKILNKKLAKRIQQHIKKLIHHDQVGFIPGMQGWFNIRKSINVIQHINRAKDKNHMIISIDAEKAFDKIQQPFMLKTLNKLGIKYLGIHLTRDVKDLFKENYKPLLKEIKEDTNKWKNIPCSWVGRINIVKMAILPKELEKTTLKFIWNQKRARIAKSILSQKNKAGGITLPDFKLYYKATVTKTACLIDCFLLDSAPLNVSMSPTGDFLATSHVDHLGIYLWSNISLYSVVSLRPLPADYVPSIVMLPGTCQTQDVEVSEETVEPSDELIEYDSPEQLNEQLVTLSLLPESRWKNLLNLDVIKIVHTFKGHKAEIHFLQPFGDHIISVDTDGILIIWHIYSEEEYLQLTFDKSVFKISAILHPSTYLNKILLGSEQGSLQLWNVKSNQKYPIRQTFIPAGYLLGAHGLKTQAPAVDVVAIGLMSGQVIIHNIKFNETLMKFRQDWGPITSISFRTDGHPVMAAGSPCGHIGLWDLEDKKLINQMRNAHSTAIAGLTFLHREPLLVTNGADNALRIWIFDGPTGEGRLLRFRMGHSAPLTNIRYYGQNGQQILSARLINKKRVKRKGLQNTMSVRLPPITKFAAEEARESDWDGIIACHQGKLSCSTWNYQKSTIGAYFLKPKELKKDDITATMRKDRTKKVTQLNDYNQVITGLKFNADDTALNLLKESGPSGIETELRSLSPDCGGSIEVMQSFLKMIGMMLDRKRDFELAQAYLALFLKLVKDSSEPLPYLLKLSLILAGWGIHITEVQDLTLGMKDGSSPRVTTSYTPHGLFGERRDKLTLCPFSYGPHPSHQQGHRTLALFQIIWDMSHSPLSLCRKQRLVCVAPIPIRKPGFRPRGAVEVQKLSLVAVSNSVPQDICCMAADGRLVFAAYGNVFSAFARNKEKKNKPKEPPKVPKSAPFFIPTIPGLVPRYAAPEQNNDPQQISGSIRFSDSRRSINPIVHCAFEVVHSL

SEQ ID NO: 46172 - protein, 552 aa, Homo sapiens; identical to SEQ ID NO: 35765
  DOMAIN (189)..(234): kw TRANSCRIPTASE REVERSE II ORF2 domain identified by eMATRIX, accession number DM01354N, p-value=1.000e-40, raw score of 13.17
  DOMAIN (204)..(452): Reverse transcriptase domain identified by PFam, accession name rvt, E-value=3.6e-48, PFam score of 173.5

SEQ ID NO: 46173 - protein, 580 aa, Homo sapiens
  DOMAIN (364)..(393): Dihydrodipicolinate reductase proteins domain identified by eMATRIX, accession number BL01298B, p-value=4.600e-28, raw score of 18.79
  DOMAIN (292)..(473): Dihydrodipicolinate reductase domain identified by PFam, accession name DapB, E-value=1.2e-86, PFam score of 301.3
MKSAQYRKWCWQRQKIWSTLRSGLARYVSGWRKLHRRKKTSFRIKREIYHYRVIFLSSPTGVRMWDVIDLSRWQFALTALYHFLFVPLTLGLIFLLAIMETIYVVTGKTIYRDMTRFWGKLFGINFALGVATGLTMEFQFGTNWSFYSNYVGDIFGAPLAMEACGIEIVMCGLDVTNQAILTPDYLSTLPQLNRTGKMLHALFSHYRSGSMQSGLRMHDLCAIAWLVRPDLFTLKPCFVAVETQGEFTSGTTVVDIDGCLGKPANVQVALDLDVKGFQQWVAERIAMHDANIRVAIAGAGGRMGRQLIQAALALEGVQLGAALEREGSSLLGSDAGELAGAGKTGVTVQSSLDAVKDDFDVFIDFTRPEGTLNHLAFCRQHGKGMVIGTTGFDEAGKQAIRDAAADIAIVFAANFSVGVNVMLKLLEKAAKVMGDYTDIEIIEAHHRHKALGIQCAGYSYWHSHQVAADDKAQQRVVPSPVFYALDTFTVNLGDADRVLYIGITLRLKDEATRSRLSEYLPEVRSRLLLLFSRQDAAVLATEEGKKNLIAEIKTTLSTPLVAGQPKQDVTDVLYTAFILR

SEQ ID NO: 46174 - protein, 293 aa, Homo sapiens
  DOMAIN (37)..(83): kw TRANSCRIPTASE REVERSE II ORF2 domain identified by eMATRIX, accession number DM01354O, p-value=5.860e-20, raw score of 8.73
  DOMAIN (190)..(292): Dihydrodipicolinate reductase domain identified by PFam, accession name DapB, E-value=1e-08, PFam score of 19.7
MDKFLDTYTLPRLNQEEVESLNRPITGAEIVAIINSLPTKKSPGPDGFTAEFYQRYKEELIGWLRESVSKICLKFDHQVQVITGRLIIRFQIAFGTVVLCQLTRHIDVFVGKRLANARFAPSLGGAPDLFTLKPCFVAVETQGDLPQATTVVDIDGCLGKPANVQVALDLDVKGFQQWVAERIAMHDANIRVAIAGAGGRMGRQLIQAALALEGVQLGAALEREGSSLLGSDAGELAGAGKTGVTVQSSLDAVKDDFDVFIDFTRPEGTLNHLLPRITLKTTQQLNVGLPRIT

SEQ ID NO: 46175 - protein, 925 aa, Homo sapiens
  DOMAIN (308)..(333): 7 kw REVERSE TRANSCRIPTASE RNA POLYMERASE domain identified by eMATRIX, accession number DM00895E, p-value=7.000e-11, raw score of 15.72
  DOMAIN (281)..(766): Reverse transcriptase domain identified by PFam, accession name rvt, E-value=3.7e-47, PFam score of 170.1
MGKKQNRKTGNSKKQSTSPPPKERSSSPAMEQSWMENDFVELREEGFRRSNYSELQEDIQTKGKEVENFEKNLEECMTRITNTEKCLKELMELKTKARELHEECRSLRSRCDQLEERVSAMEDEMNEMKREGKFREKRIKRNEQSLQEIWDYVKRPNLHLMGVPESDGENGSKLENTLQDIIQENFPNLASTLSDHSGIKLEINSKRNPQNHANTWKLSNLLLNAHWVNNEIKMKVKNFFELNDNSDTIYQNFSDTAKAVLEEKFLGLNAYTKKPERAQIEKERILPKSFYEASITLIPKPRKDITKKENYKPISLMNIEAKILNKIIVNQIQQHIKKIIHHDKLSFIPGMQGWFNICKPVNVILHINIIKNKNHMIISIDTEKAFGKMQHPFMIKTFSKIGTEGTYLKVIEAIYDRPTANIILNGENLKALPLRTRPRQGCPLSPLLFNLVLAVLARAIRQEKEIKGIQVSKEEVKLSLFADDMIVYLENPKASSKKLPELNKDTIYQNLWDAFKAVCRGKFTALNAHKRKQERSKIDTLTSQLKELEKQEQTHSKAIRRQEITKIRAELKEIETQKTLQKINESRSWFFERINKIDRPLARLIKKKREKNQIDTIKNDKGDITTNPTEIQTTIREYYKHLYANKLENLEEMDKFLDTYTLPRLNQEEVESLNRPITGSEIVAIINSLPTKKSPGPDGFTAEFYQRYKEELLISNFSKVSAYKINVQKSQAFLYTNNRQTESQIMSELPFTIASKRIKYLGIQLTRDVKDFFQENYKPLLKEIKEDTNKRKNIPCSWVGRINIVKMAILPKVIFRFNAIPIKLPMPFFTELEKTTLKFIWNQKRARIAKSILSQKNKAGGITLPDFKLYYKATVTKTAWYWYQNRDIDQWNRTEPSEIMPHIYNYLIFDKPEKNKQWGKDSLFN

SEQ ID NO: 46176 - protein, 923 aa, Homo sapiens
  DOMAIN (187)..(232): kw TRANSCRIPTASE REVERSE II ORF2 domain identified by eMATRIX, accession number DM01354N, p-value=1.000e-40, raw score of 13.17
  DOMAIN (274)..(549): Reverse transcriptase domain identified by PFam, accession name rvt, E-value=2.4e-81, PFam score of 283.7
  misc_feature (1)...(923): Xaa = X or * as defined in Table 2
QTERTSTPKTHLYVTIIKDQKXIKPQRRGKNRGEKLETLKSRAPVLLQRNAVPQQQRNKAGRRMTLTSXEKKSSDNQTTPSYRRKFKPMAKKLKTLRKKLDECITRITNAEKCLMELMELKAKARELREECKSLRSQCNQLEERINKIDRPLARLIKRKREKNQIDAIKIDKGDITTDPTEIQTTIREYYKHLYANKLENLEEMDKFLDTYTLPRLNQEEVESLNRPITGAEIVAIINSLPTKKSPGPDGFTAEFYQRYKEELVPFLLKLFQSIEKEGILPNSFYEASIILIPKLGRDTTKKENFRPISLRNIDAKILNKILANRIQQHIKKLIHHDRVGFIPGMQGWFNIRKSINVIQHINRTKDKNHMIISIDAEKAFDNIQQPFMLKTLNKLGMDGTYLKIRRAIYDKPTANIILNGQKLEAFPLITGTRQGCPLSPLLYNIVLEVLARAIRQKKEIKGIQLGKEEVKLSLFADDMTVYLENPIISAQNLLQLISNFSKVSGYKINVQKSQAFLYTNNRQTESQIKRELPFTIASKRIKYLGIQLTRDVKDLFKENYKPLLNEIKEDTNKWKNIPCSWVGRINIVKMAILPKVIYRFNAIPIKLPMTFFTELEKTTLTLIWNQKRAHIVKSILSQKNKAGGITLPDFKLYYKATVTKTAWYWYQNRDIDQWNRTEPSEIMPHIYNYLIFDKPEKNEQWGKDSLFNKWCWENWLAICRKLKLDPFLTPYTKINSRWIKGLNVRPETIKTLEENLGITIQDIGMGKDFMSKTPKTMATKAKIDRWDLIKLKNFCTAKETTIRVNRQTTKWEKIFTTYSSEKGLISRIYNELKQIYKKKTNNPNKKRYSKRKHYCNRRXQRPCMLMPLKAFQWDKIWRLKMVILIILILMAAPHQLWNKAGQRRTLMNXQKXASEEXTVWRRC

SEQ ID NO: 46177 - protein, 682 aa, Homo sapiens; identical to SEQ ID NO: 40606
  DOMAIN (169)..(214): kw TRANSCRIPTASE REVERSE II ORF2 domain identified by eMATRIX, accession number DM01354N, p-value=1.000e-40, raw score of 13.17
  misc_feature (1)...(682): Xaa = X or * as defined in Table 2

SEQ ID NO: 46178 - protein, 1095 aa, Homo sapiens; identical to SEQ ID NO: 39504
  DOMAIN (122)..(162): G-protein coupled receptors proteins domain identified by eMATRIX, accession number BL00237A, p-value=7.097e-15, raw score of 27.68
  DOMAIN (328)..(603): Reverse transcriptase domain identified by PFam, accession name rvt, E-value=1.5e-85, PFam score of 297.6

SEQ ID NO: 46179 - protein, 1227 aa, Homo sapiens
  DOMAIN (354)..(379): 7 kw REVERSE TRANSCRIPTASE RNA POLYMERASE domain identified by eMATRIX, accession number DM00895E, p-value=9.069e-10, raw score of 15.72
  DOMAIN (323)..(1226): Reverse transcriptase domain identified by PFam, accession name rvt, E-value=7.7e-69, PFam score of 242.1
MGDFNTPLSTLDRSTRQKVNKDTQELNSALHQVDLIDIYRTLHPKSTEYTFFSAPHHTYSKIDHMVGSKALLSKCKRTEIITNYLSDHSAIKLELRIKNLTQSRSTTWKLNNLLLNDYWVHNEMKAEIKMFFETNENKDTTYQNLWDTFKAVCRGKFIALNAHKRKQERSKIDTLTSQLKELEKQEQTHSKASRRQEITKIRAELKEIETQKTLQKISESRSWFFERINKIDRPLARLIKKKREKNQIDTIKNDKGDITTDPTEIQTTIREYYKHLYANKLENLEEMDKFLNTYTLPRLNQEDVESLNRPITGAEIVAIINSLPTKKSPGPDGFTAEFYQRYKEELPGRDTTKKDNFRPISLRNIDAKILNKIPAKRIQQHIKKLIQHDQVGFIPGMQGWFNIHESIYVIQHINRTKDKNHMIISIDAEKAFDKIPQPFMLKTLNKLGIDGTYFKIIRAIYDKPTANIILNGQKLEAFLLKTGTRQVCPLSPLLFNIVLEVLARAIRQEKEIKGIQLGKEEVKLSLFADDMIVYLENAIVSAQNLLKLISNFSKVSGHKINVQKSQAFLYTNNRQTESQIMSELPFTIASKRIKYLGIQLTRDVKDLFKENYKPLLKEIKEDTNKWKNIPCSWVGRINIVKMAILPKVIYRFNAIPIKLPMTFFTELEKTTLKFIWNQKRARITKSILSQKNKAGGITLPDFKLYYKATVTKTAWTPNSCYITSIFSPSTEEEWKGQRAVMTPHNPSVRILPLGPTKNNKVILSGDMGWCGTNGTQELLQAIYLNEYGNMTKALTQIFTDKTGDGLKLLMAAAAHLEWLLPRCQLQWGGRCSQGCMLPVAGRSWEQVEAPTPSKLEGQESGPLGCSCSRPPSHGCRPRHLCTLSGPGKPPRPCRLGTPIGWPLPAHSAQSDFRPKLWPSPGAVKTLAGVLDSGHADKQPLLSQHENRKEAGGREIQTTIREYYKHLYANKLENLEEMDKFLDTYTLPRLNQEEVESLNRPITGAEIVAIINSLPTKKSPGPDGFTAKFYQRYKEELVPFLLKLCQSTEKEGILPNSFYETSIILIPKPGRDTMKKENFRPISWMNIHAKSSIKILANRIQQHIKKLIHHDQVGFIPGMQGWFNICKSINVIQHINRTKDKSHMIISIDAEKAFDKIKQHFMLKTVNKLGIDGMYFKIIRAIYDKPTDNIILNGQKLEAFPLKTGTRHGMPSLTTPIQHSVGSSGQCN

SEQ ID NO: 46180 - protein, 618 aa, Homo sapiens
  DOMAIN (149)..(194): kw TRANSCRIPTASE REVERSE II ORF2 domain identified by eMATRIX, accession number DM01354N, p-value=1.000e-40, raw score of 13.17
  misc_feature (1)...(618): Xaa = X or * as defined in Table 2
MKAEIKTFFETNENKDTTYQNLWDAFKAVCRGKFTALNAHKRKQERSKIDTLTSQLKELEKQEQTHSKASRRQEITKIRAELKEIETQKALQKINESRSWCFEKIHKIDRPLARLIKKKREKNQIDAIKNDKGDITTDPTEIQTTIREYYKHLYANKLENLEEMDKFLDTYTLPRLNQEEVESLNRPITGSEIVAIINSLPTKNSPGPDGFTAEFYQRYKEERENKIPRNPTYKGCEGPLQGELQTTAQGNKRGYKQMEEHSMLMGRKNQYRENGHTAQGNLQIQCHPHQATNDFLHRIGKNYFKVHMEPKKSPHRQVNPKPKEQSWRHHTTXLQTILQGYSNQNSMVLVPKQRYRSTEQNRALRNNATYLQLSDLXQTXEKQAMEKGFPIXXMVLGKLASHMXKAETGSLPYTLYKNQFKMDXRLKRXTXNHKNPRRKPRHYHSGHRHGQGLHVXNTKSNGNKSQNXQMGSNXTKELLHSKRNYHQSEQATYKMGENFRNLLIXQRANIQNLQXTQTNLQEKNKPPHQKVDEGHEQTLLKRRHLCSQKTHEKMLIITGHQRNANQNHNEIPSHTSXNGNHXKVRKQQVLERMWRNRNTFTLLVGLXTSSTIVEVSVV

SEQ ID NO: 46181 - protein, 845 aa, Homo sapiens
  DOMAIN (233)..(278): kw TRANSCRIPTASE REVERSE II ORF2 domain identified by eMATRIX, accession number DM01354N, p-value=1.000e-40, raw score of 13.17
  DOMAIN (234)..(496): Reverse transcriptase domain identified by PFam, accession name rvt, E-value=4.5e-46, PFam score of 166.5
MGDFNTPLSTLDRSMRQKVKKDTQELNSALHQADLIDIYRTLHPKSTEYTFFSAPHHTYSKIDHILGSKALLSKCKRTEIITNYLSDGSAIKLELRIKNLTQNRSTTWKLNNLLLNDYWVPNEMKAEIKMFFETNENKDTTYQNLWDAFKAVCRGKFIALNAHKRKQERSKIDTLTSQLKELEKQEQTHSKASRRQEITKIRAELKEIGDTKKPLQKINESQELEIQTTIREYYKQLYTNKLENLEEMDKFLNTYTLPRLNQEEVESLNRPITGSEIVAIINSLPTKKSPGPDGFTAKFYQRYKEELHINRAKDKNHMIISIDAEKAFDKIQQPFMLKTLNNLGIDGTYFKIIRAIYDKPTANIILNGQKLEAFPLKTGTRQGCPLSPLLFNIVLEVLARAIRQQKEIKGIQLGKEEVKLSLFADDMIVYLENPIVSAQNLLKPISNFSKVSGYKINVQKSQAFLYTNNRQTESQIMSELPFTIASKRIKYLGIQLTRDVKDLFKENYKPLLKEIKEDTNKWKNIPWSWIGRINIVKMAILPKKWKKTTLKFIWNRKRARIAKSILSQKNKAGGITLPDFKLYYKATVTKTAWYWYQNRDIDQWNRTEPSEIMTHIYNYLIFDKPEKNKQWGKDSLFNKWCWENWLAICRKLKLDPFLTSYTKINSRWIKDLNVRPKTIKTSEENLGITIQDIGMGKDFMSKTPKAMPTKAKIDKWDLIKLKSFCTAKESTIRANRQPTKWEKIFATYSSDKGLISRIYNELQQIYKKKTNNPIKKWAKDMNRHFSKEDIYAAKKHMKKCSSSLAIREMQIKTAMRYHLTPVRMAIIKKSGNNRHMDEIGNHHSQ

SEQ ID NO: 46182 - protein, 1044 aa, Homo sapiens
  DOMAIN (115)..(156): kw TRANSCRIPTASE REVERSE II ORF2 domain identified by eMATRIX, accession number DM01354I, p-value=1.000e-40, raw score of 15.55
  DOMAIN (368)..(643): Reverse transcriptase domain identified by PFam, accession name rvt, E-value=6.6e-85, PFam score of 295.5
TWKGTTSTSRCKIMPKYRSTRQKVNKDTQELNSALHQADLIDIYRTLHTKSTEYTFFSAPHHTYSKTDHIVGSKALLSKCKRTEIITNYLSDHSAIKLELRIKNPTQSRSTTWKLNNLLLNDYWVHNEMKAEIKMFFETNENKDTTYQNLWDTFKAVCRGKFIALYAHKRKQERSKIDTLTSQLKELEKQAQTHSKASRRQEITKIRAELKEIETQKTLQKINESRSWFFERINKIDRPLARLIKKKREKNQIDTIKNDKGNITTTDPTEIQTTLSRDYYKHLYANKLENLEEMDKFLDTYALPRLNQEEVESLNRPITGAEIVAIINSLPTKKSPGPDGFTAEFYQRYKEELVPFLLKLFQSIEKEGILPNSFYEASIILIPKPGRDTTKKENFRPISLMNIDAKILNKILAKRIQQHIEKLIHHDQVGFIPGMQGWFNIRKSINVIQHINRAKDKNHMIISIDAEKAFDKIQQPFMLKTLNKLGIDGTYFKIIRAIYDKPTANIILNGQKLEAFPLKTGTREGCPLSPFLFNIVLEVLARAIRQEKEIKGIQLGKEEVKLSQFADDMVVYLENPTVSAQHLLKLISNFSKVSGYKINVQKSQAFLYTNNRQTESQIMSELPFTIASKRIKYLGIQLTRDVKDLFKENYKPLLNEIKEDTNKWKNIPCSWVGRINIVKMAILPKVIYRFNAIPIKLPMTFFTELEKTTLKFIWNQKRAHIAKSILSQKNKAGGITLPDFKLYYKATVTKTAWYWYQNRDIDQWNRTEPSEITLLIYNYLIFDKPEKNKQWGKDSLFNKWCWENWLAICRKLKLDPFLTLYTKINSRWIKDLHVRPKTIKTLEENLGITIQDIGMGKDFMYKTPKAMAAKDKIDKWDLIKLKSFCTAKETTIRVNRQPTKWEKIFTTYSSDKGLISRIYNELKQIYKKKTNNPIKKWAKDMNRHFSKADIYAAKKHMKKCSSSLAIREMQIKTTIRYHLTPVRMAIIKKSGNNSDLYLMSAGTSCLMGRHWDSGQETCVQNVVLDTCSPSEQLLRAIADLVPQP

SEQ ID NO: 46183 - protein, 43 aa, Homo sapiens
SFGDSDRKRGRLSPALRLSGKVMTTYLGLYPCAIPQNGRMAHR

SEQ ID NO: 46184 - protein, 676 aa, Homo sapiens
  DOMAIN (521)..(546): Bacterial regulatory proteins deoR family proteins. domain identified by eMATRIX, accession number BL00894B, p-value=1.231e- 15, raw score of 17.92
  DOMAIN (515)..(612): Bacterial regulatory proteins, deoR fam domain identified by PFam, accession name deoR, E-value=2.2e-14, PFam score of 54.7
  misc_feature (1)...(676): Xaa = X or * as defined in Table 2
PFFGRKNYRLPSKNMPRRCRSSPLPCSMKMTIXCVLTSTATITRLPAASAQWXLDGRTLVTKNSFRYLHTLHTMGPAPEPNLTILWSEELPIAFKKYAAQVSIVTSSLQYENDDLMRTDFNSDDYAIACCVSPMVIGKQMQFFGARANLAKTLLYAINGGVDEKLKIQVGPKTAPLMDDVLDYDKVMDSLDHFMDWLAVQYISALNIIHYMHDKYSYEASLMALHDRDVYRTMACGIAGLSVATDSLSAIKYARVKPIRDENGLAKDIQGTTEPQFRNSHSRTSGTVTLYLPVSTFVGTGFFIRVDPPKKPLKIRKIEFVEIYEPFSEGQAKAQADRCLSCGNPYCEWKCPVHNYIPNWLKLANEGRIFEAAELSHQTNTLPEVCGRVCPQDRLCEGSCTLNDEFGAVTIGNIERYINDKAFEMGWRPDMSGVKQTGKKVAIIGAGPAGLACADVLTRNGVKAVVFDRHPEIGGLLTFGIPAFKLEKEVMTRRREIFTGMGIEFKLNTEVGRDPRASSFYEEKQLIARKALPFIDNKTTMAADSSSTVMELLKLLQDRSGLTLLTNSAEAIHVLAQSEIKVVSTGGELNKNTLSLQGRITKEIIRRYHVDIMWLPDELRVEKGFSPDTLKLLEAKGQKVALKEAMGSTQSIMVGPDERRTGFSYLRYQNLMIRVKF

SEQ ID NO: 46185 - protein, 615 aa, Homo sapiens
  DOMAIN (272)..(322): Sugar transport proteins domain identified by eMATRIX, accession number BL00216B, p-value=6.400e-19, raw score of 27.64
  DOMAIN (461)..(615): Bacterial regulatory proteins, deoR family domain identified by PFam, accession name deoR, E-value=1.1e-33, PFam score of 122.4
MKHSVSVTCCALLVSSISLSYAAEVPSGTVLAEKQELVRHIKDEPASLDPAKAVGLPEIQVIRDLFEGLVNQNEKGEIVPGVATQWKSNDNRIWTFTLRDNAKWADGTPVTAQDFVYSWQRLVVPKTLSPFAWFAALAGINNAQAIIDGEKPFLLPDNEGVKMNTSPVRMDDLPLNRFHCRIAALTFGAHLTDGYVLGVIGYAIIQLTPAMQLTPFMAGMIGGSALLGLFLGSLVLGWISDHIGRQKIFTFSFLLITLASFLQFFATTPEHLIGLRILIGIGLGGDYSVGHTLLAEFSPRRHCGIWLGAFSVVGTVGYVLASIPGITFSCMPAGPEHILFIASGAFQIARPSDLIPELHGRLHIRVRLQALDTRSFERVLEDSNASIDVQYKALMAIEGVNIEFTDSGIKRIAEAAWQVNESTENIGARRLHTVLERLMEEISYDASDLSGQNITIDADYVTEETIRRDLEKLEDEGFLTRTYGGAVLNTAMLTENIHFYKRASSFYEEKQLIARKALPFIDNKTTMAADSSSTVMELLKLLQDRSGLTLLTNSAEAIHVLAQSEIKVVSTGGELNKNTLSLQGRIAKEIIRRYHVDIMVMSCKGPDINSGALDS

SEQ ID NO: 46186 - protein, 48 aa, Homo sapiens
RVGNARYLPGRHWRCFYKGTGLCPYPGWCRLVLFCGVGDFNDGDVVTS

SEQ ID NO: 46187 - protein, 164 aa, Homo sapiens
  DOMAIN (3)..(130): Phospholipase/Carboxylesterase domain identified by PFam, accession name abhydrolase_2, E-value=3.7e-07, PFam score of 14.1
IRAQNGSPWLSFLVDSVCVLKACVDAVMRAGICSVSYWQYQSGVGANSSALSGFSQGAIMMLESIKAEPGLASRVIAFNGRYSSLPETASTATTIHLIHGGEDPVIDLAHAVAAQEALISAGGDVTLDIVEDLGHAIDNRSMQFALDHLRYTIPKHYFDEALSG

SEQ ID NO: 46188 - protein, 884 aa, Homo sapiens; identical to SEQ ID NO: 43688
  DOMAIN (76)..(97): O-SIALOGLYCOPROTEIN ENDOPEPTIDASE (M22) METALLO-PROTEASE FAMILY SIGNATURE domain identified by eMATRIX, accession number PR00789B, p-value=5.821e-19, raw score of 10.48
  DOMAIN (434)..(529): ParB-like nuclease domain identified by PFam, accession name ParBc, E-value=4.8e-20, PFam score of 80.0

SEQ ID NO: 46189 - protein, 497 aa, Homo sapiens; identical to SEQ ID NO: 43689
  DOMAIN (95)..(130): Phosphorylase pyridoxal-phosphate attachment site proteins domain identified by eMATRIX, accession number BL00102G, p-value= 2.333e-38, raw score of 14.65
  DOMAIN (1)..(226): Carbohydrate phosphorylases domain identified by PFam, accession name phosphorylase, E-value=1.3e-167, PFam score of 543.8

SEQ ID NO: 46190 - protein, 578 aa, Homo sapiens
  DOMAIN (460)..(556): ParB-like nuclease domain identified by PFam, accession name ParBc, E-value=1.4e-16, PFam score of 68.5
MGVGSKGTIFGSTTTQHGSFIPYLTGYLTYTHGHSPANPKPAVGGQILTAVLPAHDGYVSRIMTMNTQLTTPLTTATHTARQTASLISVIGRQLRCFRHSSQPSVLTHVRDDSTQYAQLDMANGQPTSHGYEHWAQLMYATDRRYGRHMSDAARQGCSDTGIVKFSHPEPEMSVRKFTSARSGCVRSGAWNVTVSAQTRVSQALTTLLRRVHKSPMNALTVPAVMAEAPSQAHGRRQTRRLSLHQTLRLLLTTPDWVGVIRRCVPVVWGCLEHLDTAGFPLPNSHTMPLPIGWNDTRKRLHHSAHNGQHDVAQGRRVLGRKVGLTHPKVQQQLGVDGLSLFCVYLVWYIGLHLRRPFRLAYTICPSLVYGADLRVIVRLFSDSHHFMAFGNPQPKHLDCQEYALFLLNSMPDNTAEHYRNKIAIYLHCLPEDDRIKAINEIRMAIHQVSPFREEPVDCVLWVKYSQLMPNDYNPNNVAPPEKKLLQKSIEIDGFTQPIVVTHTDKNAMEIVDGFHRHEIGKGSHASLKLRLRGYLPVTCLEGTRNQRIAATISHNRARGRHHITAMSEVTPELRLLGW

SEQ ID NO: 46191 - protein, 90 aa, Homo sapiens
MRKFYNVPDFLVKFHIQAEPGHDKIRDAVRAWASSLDNQDVVPALIINEYREHGGTAINFPGDITKYRQKLFRYVDKRFHCDQCERTIIN

SEQ ID NO: 46192 - protein, 42 aa, Homo sapiens
  misc_feature (1)...(42): Xaa = X or * as defined in Table 2
MKLQTFTVSVTDLKAVCLESFNSSRWVPGLTGFQSKASDLHX

SEQ ID NO: 46193 - protein, 277 aa, Homo sapiens
  DOMAIN (122)..(165): 1 kw MIND INHIBITOR DIVISION CONTROL domain identified by eMATRIX, accession number DM01756B, p-value=8.405e-13, raw score of 22.91
  DOMAIN (87)..(208): ParA family ATPase domain identified by PFam, accession name ParA, E-value=2.7e-08, PFam score of 41.0
  misc_feature (1)...(277): Xaa = X or * as defined in Table 2
KGGVYKTSVSVHLAQDLALKGLRCLLWKGTPPQGTPSMVSREGDPALHNXCKTQLLCLSYLGEKDDVTYAIKPTCWPGLDIIPFCLALDRIETELMGKFDEGKLPTDPHLMLRLAIETVAHDYDVIVIDSAHNRGIGTINVVCAADVLIVPTPVEMFDYTSALQFFDMLRDLLKNADLKGFEPDVRIFVTKYSNSNGSQFPWMEEPIPECLPKHGSKKNNVRNANEVGKGQIRMRTVFEQAIDQRSSTGAWRNALSIWEPVCNEIFDRLIKPRWEIR

SEQ ID NO: 46194 - protein, 226 aa, Homo sapiens
MSIGGSGNSLCTRPKQQQGGTGLKQYEVSVPGTLRCLACPQACTLRKEHWIHFAPKSNYDSCRYIEEYFAYEASFMSVQLTELVIKSLEDLASLFMIHKKNPVSIPHTVWYADDIRRGEREAADVLGLTLYELMLRAGEAAFQVCRSAYPDTRHWLVLCGHGNNGGDGYVVARLAKAVGIDDTLLAQESDKPLPEEAPLAHEAWVNAGGEIHALNIGWPESEHLIV

SEQ ID NO: 46195 - protein, 257 aa, Homo sapiens
  DOMAIN (29)..(125): Bacterial regulatory helix-turn-helix protei domain identified by PFam, accession name HTH_1, E-value=7.3e-16, PFam score of 66.1
VKCSEKCLFLPLGQFSQFIQKLRVIFLDPLFIRKGQGVTPTAFAMHLHEYISQGLESILGALDIEGSYDKQRTITIATTPSVGALVLPVIYRAIKTHYPQLLLRNPPISDAENQLSQFQTDLIIDNMFCTNRTVQHHGLFAANMVLICREGNPLLSLEDDREAIANAAHVLLLPEEQNFSGLRQRVQEMFPGRQINFTSYNILTIAALVANSDMLAIIPSRLYNLFSRCWPLEKLPHPSLNEEQIDFSIHYNKFSLR

SEQ ID NO: 46196 - protein, 247 aa, Homo sapiens
MITVLLIATQFAPYFTEMALKGGFSFAGESAQISALSVGNMFGWSISELMSLGIIGVVVAVGIVASVVLFLRVLSMSWLKEVIGTEKAVIAMCHLRALPGDPSFDAQLGMNWVIDKAWDDLMALQNGGVDAVMFSNEFSLPYLTKGLVPALVAREILVRGMYVRGRKMVAFLVCCVALAISAMYELIEWWAALAMGQGADDFLGTQGDQWDTQSGYVLRAAWRINDGDIPRSLSLPPATALWLDNRI

SEQ ID NO: 46197 - protein, 225 aa, Homo sapiens
MCHLRALPGDPSFDAQLGMNWVIDKAWDDLMALQNGGVDAVMFSNEFSLPYLTKVRPETTAAMARIIGQLMSDIRIPFGVNVLWDPVASFDLAMATGAKFIREIFTGAYASDFGVWDTNVGETIRHQHRIGAGEVKTLFNIVPEAAVYLGNRDICSIAKSTVFNNHPDALCVSGLTAGTRTDSALLKRVKETVPDTVVLANTGVCLENVEEQLSIADGCVTATTF

SEQ ID NO: 46198 - protein, 36 aa, Homo sapiens
  misc_feature (1)...(36): Xaa = X or * as defined in Table 2
TRTLRQIVDSRAIPFTXERLHSPINQPKNPYPPESV

SEQ ID NO: 46199 - protein, 643 aa, Homo sapiens
MPFALGGGDLEETPRSDPGVTFACSLAQPMRKPTGVLGNRFHDTQEPPVPGGPGLRGFHLWHAPPLDRPAQFAAIRTDSELMSSANPKSFTASPLMTFTPARSRINYRYYPAGTRAKGENEAAFAARIHSFLPYRRPVFWATTMGQAKSAIKPMSTAVTRDASVFQTEYERSRFGARPWPLRKAPEAMGRGFHEIGVQCEAPTANTLEPSRRGAVMAAGLSFQRTPWREVLGRGEGSFLGAGSDPVLRALSLASTPFPGEKHVGSWGMGRIVLRSFALASSSLRHSGERIPGTVLPCDDIFACHQRNYAEVFGIWRTTSSVLQPIEPVEPKCISQFLYIVLERRSSSSLISLSFNSASLCRSRHDARYVLQHALFCFTTNDFGQIFTTFFVSGGSGTRMSLPAEFGVIAQSDQKVLFIDADLAVVIRITCLPSTSMSWLKEVIGTEKAVIAMCHLRALPGDPSFDAQLGMNWVIDKAWDDLMALKMVRPETTAAMARIIGQLMSDIRIPFGVNVLWDPVASFDLAMATGAKFIREIFTGAYASDFGVWDTNVARSRRIRASTVFRLAQRCQPDASEYGFRMIARVFVDVRGDQNSEASLRVGSGIGPRTCAPVAWQSRRFPRLLDRSDDVKRFQADTDSLVLH

SEQ ID NO: 46200 - protein, 140 aa, Homo sapiens
KTRYSCRGETWSNPQSSQLSALIAAVRHPATSNAVCRSARSCCILRALRAIQFHTGCSAGNVAPEWCQFAPCWRKPLKEESDSVFMRVIKESLWQELADITDKTQLEWREVFQDLNHHGVYHSGEVVGLGNLVCEKCHFH

SEQ ID NO: 46201 - protein, 143 aa, Homo sapiens
SKVFAVAGCVVLMTTMPDSCNSWQKCRNKTMNKKIHSLALLVNLGIYGVAQAQEPTDTQAPGVSTITADEIRKNPVARDVSKIIRTMPGVNLTGNSTSGQRGNNRQIDIRGMGPENTLILIDGKPVSSRNSVRQGYRLECGDG

SEQ ID NO: 46202 - protein, 451 aa, Homo sapiens
MTAAASQKEGGARRNQGRRDRPRKRTQRTKTRPEQDGKPEGPDPRPRPPEKRKTEDGKTNPAEASKPDGPKARIQKTHQMKTLDLKKGAINATYLEGGMPSEQLVEHAGDDDVDHLEGYALDDHVEVLKLKKTDGWSILRICDSEWYRSLCNHAACRYQHTEADSAGCYRADRLSEQRWIGADHGKRLSMALNKSVVNNDSQRVSEPRSSAAATGIWVYERYPAVYGALPYTIDSKTGEVMWKYQVENNLMTTEAGVAAAEDEMATGTRYALLRGDQNRDSLKAAREISRRVLGLKSVLIRHITMSSLLKYRHDTEIRKTAMVQHANLATNIQRLYQHELYYRTNGRKGERLSSVDLETTCRSGCGTIRAIVMKKAKMTSWALKTFTEFLNSYANDAMQAAPKCSADLKKSLVDNNMIYGDGSSKAGMMNTELPAQLYGKTADTPDAGPFR

SEQ ID NO: 46203 - protein, 171 aa, Homo sapiens
  DOMAIN (39)..(57): MUSCARINIC M5 RECEPTOR SIGNATURE domain identified by eMATRIX, accession number PR00542G, p-value=9.538e-09, raw score of 12.27
CYCILFVSFPSNRPLCCRSAGVCQRYTPDPFCLGITSRGCRRAKITACSFLWKLHPRGALARCQPELSCWRCLSTLLEGVSPSGGTGVRDPYEEAVCPLAELKCCAGRSAVLFRAGRQGRLSLLKLFPQLPFSPCVLCLSKLVPVSPNSTRTSKLLSIPYSRGPALLEVLS

SEQ ID NO: 46204 - protein, 159 aa, Homo sapiens
  DOMAIN (131)..(145): LUTEOVIRUS GROUP 1 COAT PROTEIN SIGNATURE domain identified by eMATRIX, accession number PR00915A, p-value=9.534e-09, raw score of 6.59
FQEREAEKYANPIPSREFILEHLTKREKPASRDELAVELHIEGEEQLEGLRRRLRAMERDGQLVFTRRQCYALPERLDLVKGTVIGHRDGYGFLRVEGRKDDLYLSSEQMKTCIHGDQVLAQPLGADRKGRREARIVRVVVPTPSHIVGRPFTPPGVGF

SEQ ID NO: 46205 - protein, 101 aa, Homo sapiens
ADPFQEREAEKYANPIPSREFILEHLTKREKPASRDELAVELHIEGEEQLEGLRRRQCYALPERLDLVKGTVIGHRDGYGFLRVEGRKDDLYLSSEQMKTC

SEQ ID NO: 46206 - protein, 133 aa, Homo sapiens
FEDLPDEEVGSRELDDDTLASYQKQFNYSAEELDSVIRVLGENGQEAVGSMGDDTPFAVLSSQPRIIYDYFRQQFAQVTNPPIDPLREAHVMSLATSIGREMNVTMKEEHYRADTLDITFDVTKTTLEATVKE

SEQ ID NO: 46207 - protein, 1224 aa, Homo sapiens
  DOMAIN (265)..(297): ABC transporters family proteins domain identified by eMATRIX, accession number BL00211B, p-value=8.412e-24, raw score of 13.37
  DOMAIN (1087)..(1165): Elongation factor TS domain identified by PFam, accession name EF_TS, E-value=2.2e-34, PFam score of 121.9
MSSLYGSDALGGVVNIITKKIGQKWSGTVTVDTTIQEHRDRGDTYNGQFFTSGPLIDGVLGMKAYGSLAKREKDDPQNSTTTDTGETPRIEGFSSRDGNVEFAWTPNQNHDFTAGYGFDRQDRDPTSLDKNRLERTELLPRPAHSHTLPPHHRPVLHNSPPTTIAVTPPRQHSPRHSHAAHSPPHSPRVAATPRLRHTGPTPEWGVVHQHPLERLPAKLSAGRKYRERLMATGARHYGNIRATAQKWLEEVEIPANRIDDLPTTFSGGMQQRLQIARNLVTHPKLVFMDEPTGGLDVSVQARLLDLLRGLVVELKLAVVIVTHDVSVSSLLADRLLVMKQGQVVESALTDRVLDDPHHPYTQLLHLRAETNIQYEGRQGGTLQLFRTEQQYENATPRYRRAGRCRRTVSAAGIQRLAEVEPALAEVAHKLTGGLQLPNDETGDCQLFTQNLARMAEQAGVKFRFNTPVDQLLCDGEQIYGVKCGDEVIKADAYTCEITLIYVETHRLGSDPYQSRSHLTHFRREHLEKARPNVPVEFASSIFGTIPAITLQTKKSPQRHSDGRTYRTEERCMMRIPGINVQRRAKPEPANNAQTDDRNNDPPHGNATDLPGNARTTKVSHGTNPQHPDGRKTNLHWRQTRAEQFGAVTNRRNSNRDVSNQQDKRFRRFLFAFFDLYRQRDMVGVFADDGTHAPVIEEPVFAFTQMQGDFSTTIFLVMSATVYSPSPADSQKTPFSGFSPCRAKPRDSRNDLVPDLAIVPRWSITSSRVIPTPLSEMVRNPAPERLREKNYRPTKGTIRAKLQGCSNPFGKKPNPSSGPSSANNSPDLADKRGIVTTKAELKLRINAQGLLPKYTERLYKRPGQRGEGDFTQHAFVSGDITPAHNRQGFALQFFFNDAACGSGEFRIFIQEEHPDSQAATVAGFTIGENRATVLHAGQCVYCSTHYLVARFAFYVGDQAETTVIPLKGFIVQHIVNLPQALREPHFRTVRTGTERAWRRGEVIQATTPRIVFTDQLPVSKTFPLIAIGNIFSVIAIIKDHSAVVGKDGKGMMDSKKALTEANGDIELAIENMRKSGAFKAAKKAGNVAADGVIKTKIDGNYGIILEVNCQTDFVAKDAGFQAFADKVLDAAVAGKITDVEVLKAQFEEERVALVAKIGENINIRRVLRWKATFWVLISTVRVSAFWLLLKALTKSWLNTSLCTLLQASQNSSNRKTYPLKVVDKL

SEQ ID NO: 46208 - protein, 63 aa, Homo sapiens
  misc_feature (1)...(63): Xaa = X or * as defined in Table 2
SQIPTSEAQVMSNLMGTNGVLRPARAYRNEAVLSXALVSAMYSQTFRNASFGVPQMFSTTSGV

SEQ ID NO: 46209 - protein, 486 aa, Homo sapiens
  DOMAIN (238)..(259): FATTY ACID DESATURASE FAMILY 1 SIGNATURE domain identified by eMATRIX, accession number PR00075A, p-value=7.387e-09, raw score of 16.97
KRSTTAQIRWISPLTSLKPRSKRQSKSCATKPKKWYVAAPCCWCSPTGISLKTRLPVPAPMAVGAIQTRLVDQSLRCDANIIVETASARDPHHFAVLLGFGATAIYPYLAYETLGRLVDTHAIAKDYRTVMLNYRNGINKGLYKIMSKMGISTIASYRCSKLFEAVGLHDDVVGLCFQGAVSRIGGASFEDFQQDLLNLSKRAWWRCRLSATIGCCDCTRGYLGGARITGQISSITVWGVIIPVVGLCIIGWFWFSPTLYVDSWNPHHAPFFSAVGSSIAMTLWAFLGLESACANTDVVENPERNVPIAVLGGTLGAAVIYIVSTNVIAGIVPNMELANSTAPFGLAFAQMFTPEVGKVIMALMEMSCAGSILGGKFTIAQVFKSSSDEGYFLTIFSRVTKVDAPVQGMLTIVIIQSELALMTISPSLNSQLKEMVNLAVVTNIIPYILSMAALVIIQKVANVPPSKAKVANFVAFVGARNSFYAL

SEQ ID NO: 46210 - protein, 1222 aa, Homo sapiens
  DOMAIN (1114)..(1165): Acyl-CoA dehydrogenases proteins domain identified by eMATRIX, accession number BL00072D, p-value=3.647e-33, raw score of 30.08
  DOMAIN (1039)..(1217): Acyl-CoA dehydrogenase domain identified by PFam, accession name Acyl-CoA_dh, E-value=3.1e-98, PFam score of 337.7
MGIVNAGQLAIYDDLPAELRDAVEDVILNRRDDGTERLLELAEKYRGSKTDDTANAQQAEWRSWEVNKRLEYSLVKGITEFIEQDTEEARQQATRPIEVIEGPLMDGMNVVGDLFGEGKMFLPQVVKSARVMKQGKEQGKTNGKMVIATVKGDVHDIGKNIVGVVLQCNNYEIVDLGVMVPAEKISRSKATAEREPLPVQLTGERVRRRKAKVPQQPAGYGADQQAITGKTLRQEDNHRQYQAHHRHRERERRPSIPLKKIVVSCAPSININKTITDGVNNRARRWPNPLKPINIVSTPESAIPTARLVAISLIGVPRDASPRVIILLGFLCNLNELFATVTHFHHRRTKTVPVAQFLLSLFKHLCRFKTIFPSFHITLKNATEHYSYLNSLRLVAANSYTSVAFPAISTGVYGYPRAAAAEIAVKTVSEFITRHALPEQMSWHKTRGRGRADDFACYWYAKSDILCDMCSKAQHDQLYQLSSSGVTKVSALPDSLTTPLGSLWKLYVYAWLEDTHQPEQPYQCRGNSPEEVYCCQAGESITRDTALVRSCGLYFAPQRLHIGADVWGQYWQQRQAPAWLASLTTLKPETSVTVKSLLDSLATLPAQNKAQEVLLDVVLDEAKIGVASMLGSRVRVKTWSWFADDKQEIRQGGFAGWLTDGLVARFLGSLLIAPRVSDPSRLISALRVLALLTLLFAVAFWAGAHVAWLMLVMIGFNPLFLTTVRLWGSVAFVIGSALTGKLVTMFDYRVILALLTLGVASMLLGFLIRPTIQPQGASRQQESTGLYRQYDMFAKCAFNTITTGETNTAAGIKTHIAHRPLHIINNSNSRHWHRCKTGEFSMSELNDLLTTRELQRWRLILGEAAETTLCGLDDNARQIDHALEWLYGRDPERLQRGERSGGLGGSNLTTPEWINSIHTLFPQQVIERLESDAVLRYGIEDVVTNLDVLERMQPSESLLRAVLHTKHLMNPEVLAAARRIVCQVVEEIMARLAKEVRQAFSGVRDRRRRSFIPLARNFDFKVLCAPTCYTGTRNTRTRARDGASPDKPVYTEWCVDMSKPGIKVTKLEKLGLRMDSCCEITFDDVELDEKDMFGREGNGFNRVKEEFDHERFLVALTNYGTAMCAFEDAARYANQRVQFGEAIGRFQLIQEKFAHMAIKLNSMKNMLYEAAWKADNGTITSGDAAMCKYFCANAAFEVVDSAMQVLGGVGIAGNHRIQPLLA

SEQ ID NO: 46211 - protein, 216 aa, Homo sapiens
  DOMAIN (117)..(134): 5 TRANSMITTER DOMAIN domain identified by eMATRIX, accession number DM01767B, p-value=4.930e-10, raw score of 10.07
  misc_feature (1)...(216): Xaa = X or * as defined in Table 2
FSATITPPFIALQRVRFHPLDALLLFVISLWLQLGLPDELSRFTPFCLALPIIALAWHYGWQGALIATLMNAIALIASQTGLLLGAGIQRLRELNQSLQKELARNQHLAERLLETEESVRRDVARELHDDIGQTITAIRTQAGIVQRPGAGHPLTDAGNGAGRARYCQPSRMANRXISVKRKVVEHRCFVDFTFTNDDGAVNVDRRAVRGVFIAAS

SEQ ID NO: 46212 - protein, 222 aa, Homo sapiens
  DOMAIN (30)..(66): Bacterial regulatory proteins deoR family proteins. domain identified by eMATRIX, accession number BL00894A, p-value=3.769e- 25, raw score of 22.25
  DOMAIN (16)..(103): Bacterial regulatory proteins, deoR family domain identified by PFam, accession name deoR, E-value=1e-24, PFam score of 90.9
MSAGQRKEQKLIPVERRQIILEMVAEKGIVSIAELTDRMNVSHMTIRRDLQKLEQQGAVVLVSGGVQSPGRVAHEPSHQVKTALAMTQKAAIGKLAASLVQPGTSDSHGVTDCGPNSVMGVVSDEMSYYVNAERDHDERETSLNGSISPNLHYTQVSLAAGASGSDSRTYNDTRRSSRMSSSQRTANCTLSDNACNEEVSSRWIPRQAPSSPNNPLRVGNLP

SEQ ID NO: 46213 - protein, 378 aa, Homo sapiens
  DOMAIN (68)..(199): Fimbrial Usher proteins domain identified by PFam, accession name Usher, E-value=2.7e-25, PFam score of 92.9
MGKFGHTEIGEVDVRDWSDALQAKELQKLPGHSRKLEDPPTSLFMLLNPHSDQFSSNAHHHLHATAIDDDYTDPTKSTYALGLNWSNSILGGFNISGYKTYSYDGDNDSSNLNINWNKAFKHATVSVNWQHQLSASENNEDDGDLFYVNISIPFGRSNTATLYTRHDDHKTHYGTGVMGVVSDEMSYYVNAERDHDEPTLPAQNKAQEVLLDVVLDEAKIGVASMLGSRVRVKTWSWFADDKQEIRQGGFAGWLTDGTPLWVTGSGTSKTVLTRYATVLNRVLPVPTQVASGQCVEVELFARYPLKKITAEKSTTAVNPGVLNGRYRVTFTNGNHITFVSHGETTLLSEKGKLKLQSHLDREEYVARVLDREAKSTPP

SEQ ID NO: 46214 - protein, 124 aa, Homo sapiens
  DOMAIN (84)..(95): PROTEIN OXIDOREDUCTASE NAD INTERGENIC RE domain identified by eMATRIX, accession number PD01311B, p-value=5.091e-09, raw score of 16.61
FTGPRRSLEIEVAELKQRLDSLLAIGAGGSVCWTLQGAWSPTRAKAGELKTQLATAASLRMDKHRSNSVGPHDLYFTLLDDYLHVVDTALWLSGGKASLDGGTLLTNDAGEMLFAEHHFSAGPL

SEQ ID NO: 46215 - protein, 78 aa, Homo sapiens
QILSDKRGHQHGGGITALYQCGNADPRAKGERLFFDAPAQIRCQPALNFGNAHTFTAGIIFNLIALNLCYSVVLAVRV

SEQ ID NO: 46216 - protein, 165 aa, Homo sapiens
  DOMAIN (142)..(165): Prokaryotic molybdopterin oxidoreductas domain identified by PFam, accession name molybdopterin, E-value=1.3e-10, PFam score of 36.4
  misc_feature (1)...(165): Xaa = X or * as defined in Table 2
MSKVRLMRNLSPAPPNAVAKGESKPGIMSGWVFXAEWAYLITGXAKKKVYGSSARIHLRALRYYSNWRQYFAGYTFGRQYWQSPEDDHLPLLREFLARHEYMQKYLLGTESGIQGEELGASDGIKPEEVEWQTAAIEGKLDLLVTLDFRMSSTCLFSDIVLPTAT

SEQ ID NO: 46217 - protein, 103 aa, Homo sapiens
  misc_feature (1)...(103): Xaa = X or * as defined in Table 2
LSSCLRATQSAPAVRNWKARFLRCTVVVWQKRSSTGRNMYLPVRPTILKLRPTWHVTWXLSGASLRNWVHCCTRKKKVKCSSAVAXRKRNICPMKLHVSSTRK

SEQ ID NO: 46218 - protein, 261 aa, Homo sapiens
  misc_feature (1)...(261): Xaa = X or * as defined in Table 2
MEMSSLEFLHSICSHLKCHLLYYIASAYNYDWYTQPAKLSFISEGEIKYFTDKQMLRDFVTTRPALKELLKEAVNMERRNRWVDIGPGTELDCISQAYAQFVASTAECCGEGGIKAWDYVRMGFLSRMGVLNNWLTRRRKLLWSARSRIHLRALRYYSNWRQYFAGYTFGRQYWQSPEDDHLPLLREFLARYERPMKKLAGRSSIAILAFRGHDQRDYEFPSKSALNINXLRWALASVKXTTACATGVFPVSVTGARRFRW

SEQ ID NO: 46219 - protein, 35 aa, Homo sapiens
  misc_feature (1)...(35): Xaa = X or * as defined in Table 2
SIFARLNASRRCXTSALYALLVRLPIIQITAKGIL

SEQ ID NO: 46220 - protein, 255 aa, Homo sapiens
  misc_feature (1)...(255): Xaa = X or * as defined in Table 2
XFYHRWFRYSPCEWRDYLAELNEQGQAYAQFVASTAECCGEGGIKAWDYVRMGFLSRMGVLNNWLSEEESLWIQSRIHLRALRYYSNWRQYFAGYTFGRQYWQSPEDDHLPLLREFLAQETTDVDIIRRAYLALLPSFHTETDPQGFKQLRHAYDDALPIAQSPAKSVLQPEEYEWEALLVEMLGLLHRIAMVQLSPAALGNDMAAIELRMRELARTIPPTDIQLYYQTLLIGRKELPYRTCQLHACTSADTPLX

SEQ ID NO: 46221 - protein, 527 aa, Homo sapiens
MADRVDSKCSRSRPGAVAHNYNPSTLGGRGGRITFWLLSANPSINRGTLEKESRTVAQRLSVLHGINAPEFFDKAVFSSLVLTLRDEGYISDSGDAEPAETMKVYQLLAELITSDLMIFNISATVLYITAFIACSAAVDLTSLRGTRPYNQRAAASKEIEDLKKKLTEGEEISGCDVSGSDGDDNEEGKIGEDEEKRNTGGNKVFPERTVETPATADAERKALETKLDVEEETRLQLNSRNRKKDLKTRQEHQSLPEKFSGLQKNVLLEAVIDPALIAQLRQAYEEALRIAQAPAKSVWQPEEYEEAEHEILLAFRALLASDSERFLPSAWQRFIQQLNYCSMEEIDELRWSLCTIAMNTAHLSFECVVLLAERLRWLQEENTGEIDEEELESFLYAIAKGNVFNFQTILHLPVAVQNDTIDFYQMFARIWLPGAPGAYCDGLHTSKRTTCTTSTHQRQRKDTPPALNPHTATCTPPHTWLGAPPPASMRSGPHNAPTPPFTGSTPRHTHDHTNITNANIPHNVNSN

SEQ ID NO: 46222 - protein, 408 aa, Homo sapiens
MGVLNNWLSEEESLWIQSRIHLRALRYYSNWRQYFAGYTFGRQYWQSPEDDHLPLLREFLARYERPMKNCWKILDIEETTDVDIIRRAYLALLPSFHPETDPQDFKQLRQAYEEALRIAQSPAKSVWQPEEYEVAEHEILLAYRALLASDSERFLPSAWQRFIQQLNYCSMEEIDELRWSLCTIAMNTAHLSFECVVLLAERLRWLQEENTGEIDEEELGSFLYAIAKGNVFNFQTILHLPVARRPDICTQHNDQSRCEGYQILSDKRGHQHGGGITALYQCGNADPRAKGERLFFDAPAKDSTQTRAEDAHYAGSNNMSPPDQQGDGRKQIWESVRVHTPVRCQQRSLPVTSYLNGGEIFNLIGLICRTRRIAARWVKSHRNRARSFECLKRHRFVVAFNRRKPGLV

SEQ ID NO: 46223 - protein, 83 aa, Homo sapiens
AAGAVVSAMPKAKGKTRRQKFGYSVNRKRLNRNARRKAARGSNDLEAEASLPEKKGNTLSRDLIDYVRYMVENHGEDYKVSGS

SEQ ID NO: 46224 - protein, 188 aa, Homo sapiens
  misc_feature (1)...(188): Xaa = X or * as defined in Table 2
AAGAVVSAMPKAKGKTRRQKFGYSVNRKRMSRNAKRKAARGLECSHIRHAWDHAKSVRQNLAEMGLAVDPNRAVPSRKRKVKAMEVDIEEEAXKNLYRKPYVLNDLEAEASLSEKKGNTLSRDLHLTMYRYMVENHGEDYKAIARDEKNYYQDTPKQIRSKINVYKRFYPAEWQDFLDSLQKRKMEVE

SEQ ID NO: 46225 - protein, 168 aa, Homo sapiens
LTKKDYISPNARKAFVQRLPERNLLTRGLKRQRQPCLSCWCGGQARMPKAKGKTRRQKFGYSVNRKRLNRNARRKAAPRIECVRGLGFRVAVGLGRDGPRDDGSAMSLFAGSSHIRHAWDHAKSVRQNLAEMGLAVDPNMAVPLRKRKVLTWQGLGPCLLYSSPAILT

SEQ ID NO: 46226 - protein, 54 aa, Homo sapiens
SQDFGPPSAAPSPSGMPPGPSGCSSHRQQEDPPDGAAAPPGHGLRPGRLQELLV

SEQ ID NO: 46227 - protein, 238 aa, Homo sapiens
MHGVRKKPSYNSTKSSMDGLILHPATGLVFVLSKQCEEIHQPVVWTCEQREAESLKSIKNDNSMSPAFLAYVNTYVFLATGPVPPAHPAALTMFSAPTPPPLGRAPSRCRPAPPPPLSQHRPPPPEPDNTPCPPRAAVANARLSCWFEPQRLFNRAPPSSQTPPPRHRLPNGCLFLHTARGGGASSPNSDALSAFHQAPKPDEQKGKPMRLDASQTKANKNIAREQGRRATGKDSKIS

SEQ ID NO: 46228 - protein, 266 aa, Homo sapiens
  DOMAIN (149)..(192): kw TRANSCRIPTASE REVERSE II ORF2 domain identified by eMATRIX, accession number DM01354T, p-value=4.000e-32, raw score of 9.48
  DOMAIN (24)..(255): Reverse transcriptase domain identified by PFam, accession name rvt, E-value=4.2e-10, PFam score of 47.0
RARSRILGNPLRPLAPAPSNDVGVQRAFRPIRCRKAQPVPGSVANRRRLRQHTRPDPLGTNRSEPGWWDRSWSPDQAKSGQSCVAKIKNKNHMIISTDSEKAFDKIQHRFMIKTLSKISIQGTHFKIIKAICDKLTANIILNGEKLKAFPLRTEMRQGCPRLSLLFNIVLEVLAKAIRQEKEIKDIQIAKEEVRLSLFADDMIVYLENPKDSFRKLLELIKEFSKVSGYKIKNQYCENDHTAVSGVGSFQWICGLADVKNEAADLR

SEQ ID NO: 46229 - protein, 1066 aa, Homo sapiens
  DOMAIN (785)..(809): TROPOMYOSIN SIGNATURE domain identified by eMATRIX, accession number PR00194D, p-value=1.240e-10, raw score of 9.57
  DOMAIN (156)..(349): RhoGEF domain identified by PFam, accession name RhoGEF, E- value=2.6e-17, PFam score of 70.9
SERGFRAGDLRYPTHFLSTNSVLASVTASLKEHPRGTLLSDGSPALSRNVGMTVSQKGGPQPTPSPAGPGTQLGPITGEMDEADSAFLKFKQTADDSLSLTSPNTESIFVEDPYTASLRSEIESDGHEFEAESWSLAVDAAYAKKQKREVVKRQDVLYELMQTEVHHVRTLKIMLKVYSRALQEVLQFISTAIGRLFPCADDLLETHSHFLARLKERRQESLEEGSDRNYVIQKIGDLLVQQFSGENGDRLIEKYGVFCSGHNEAVSHYKLLLQQNKKFQNLIKKIGNFSIVRRLGVQECILLVTQRITKYPVLVERIIQNTEAGTEDYEDLTQALNLIKDIISQVDAKVSECEKGQRLREIAGKMDLKSSSKLKNGLTFRKEDMLQRQLHLEGMLCWKTTSGRLKDILAILLTDVLLLLQEKDQKYVFASVDSKPPVISLQKLIVREVANEEKAMFLISASLQGPEMYEIYTSSKEDRNAWMAHIQRAVESCPDEEEGPFSLPEEERKVVEARATRLRDFQERLSMKDQLIAQSLLEKQQIYLEMAEMGGLEDLPQPRGLFRGGDPSETLQGELILKSAMSEIEGIQSLICRRLGSANGQAEDGGSSTGPPRRAETFAGYDCTNSPTKNGSFKKKVSSTDPRPRDWRGPPNSPDLKLSDSDIPGSSEESPQVVEAPGTESDPRLPTVLESELVQRIQTLSQLLLNLQAVIAHQDSYVETQRAAIQEREKQFRLQSTRGNLLLEQERQRNFEKQREERAALEKLQSQLRHEQQRWERERQWQHQELERAGARLQEREGEARQLRERLEQERAELERQRQAYQHDLERLREAQRAVERERERLELLRRLKKQNTAPGALPPDTLAEAQPPSHPPSFNGEGLEGPRVSMLPSGVGPEYAERPEVARRDSAPTESRLAKSDVPIQLLSATNQFQRQAAVQQQIPTKLAASTKGGKDKGGKSRGSQRWESSASFDLKQQLLLNKLMGKDESTSRNRRSLSPILPGRHSPAPPPDPGFPAPSPPPADSPSEGFSLKAGGTALLPGPPAPSPLPATPLSAKEDASKEDVIFF

SEQ ID NO: 46230 - protein, 628 aa, Homo sapiens
MERDVFLDNELLTSKILSVLGRSRSGASAPGTSATRPLSQHQLCPCLCHSLAQEHPRGTLLSDGSPALSGMSKGGPQPTRARLALGRNSDPYTASLRSEIESEATSLKLSPGASPWMQPRQEAKEGADADRGAPRADAQDHAKVYSRALQEELQFSSKPLAASSHALTTCWRRTALPRSAQGAPPGVPGGGSDRNYVIQKIGDLLVQSLPDYWQHPMVHLLQLMPLHGSIITQNQMELFTAIEVLCAPPAAAFLFGHVVFHHFSGFASQPGTPTAEAGECRCLVDWPGWCHARLQSLLGAQRLPTGSPFLSLQMPALGAQGSSRQVQPMSGVPWMLLKLRQRLRSPTAPFTSPLPRGKRRAMEAQMQSEALSLLSNLADLANAVHWLPRGGCGPAASRRGYMYQAARAGGQARPLPPDTAGRAQGHSQAHGGPFPQSRSRQGRGRALMELPVVKPMGRDGPKVGNHTTPAHLQNALSPQDPVLHLGNGKQDPALTPWKRKQDPALTSRKRKARSCITSRKRTARSRINISEMTARSRINILEMEMESKTHINVLETESKIDIHTSKWKQKARSCINISEMDARSRINISETETESKIRLLRSGAGRLQDQLWINVFGAENKLQAPGSA

SEQ ID NO: 46231 - protein, 147 aa, Homo sapiens
  misc_feature (1)...(147): Xaa = X or * as defined in Table 2
SSESAVEFSEPASGSSPSWELGSEGAIRDKKTSLGAHVGLSALGRALENTIAFQGKETDVQKSYDSPQGDCLQDVKGKRPTLEXPSLENPETRRFLDASYAWRESCLSWHHHTAHDIFAGKPVDPLPGSTRGQDSAVCSQGQFLIVR

SEQ ID NO: 46232 - protein, 78 aa, Homo sapiens
  misc_feature (1)...(78): Xaa = X or * as defined in Table 2
SEGAKRDKKTSLGAHVVLSALGRALEKTIAFQGSSAPSKGRKLRSRKVMTRPKGIAWQDVKGKRPTLEXPSLENPEVR

SEQ ID NO: 46233 - protein, 153 aa, Homo sapiens
KKVGNYYTTPIYRFRMKCHLCVNYIEMQTDPANCDYVIVSGAQRKEERWDMADNEQVLTTGERHPLTCLGALDPESALGPPKPSRALIVAEHEKKQKLETDAMFRLEHGEADRSTLKKALAHTDHIQEAQSAWKDDFALNSMLRRRFREKKKA

SEQ ID NO: 46234 - protein, 207 aa, Homo sapiens
AAPKMGERKGVNKYYPPDFNPEEAWLSSTDYHNSHPFRERASGSCSQGILIIRFEMPYNIWCEGCRTNFGMGVRYNAEKKKVGNYYTTPIYRFRMKCHLCVNYIEMQTDPANFDYVIVSGAQRKEERLGHWRTMNRLLTHRGIEEEAEAWKTDAMFRAGTMGRPTAAHFKKALPKLEPHSGRPRAPWKDDFALNSMLRRRFRVPSKP

SEQ ID NO: 46235 - protein, 348 aa, Homo sapiens
  DOMAIN (3)..(299): Peptidase family M20/M25/M40 domain identified by PFam, accession name Peptidase_M20, E-value=6.8e-42, PFam score of 149.3
FVDGKLHGRGSTDDIGPVAGWINALEAYQKTGQETPVNVRFCLEGMEESGSEGLDELIFARKDTFFKDVDCVCISDNYWLGKKKPCITYGLRGICYFFIEVECSNKDLHSGVYGGSVHEAMTDLILLMGSLVDKRGNILIPGINEAVAAVTEEEHKLYDDIDFDIKEFAKDVGAQILLHSHKKDILMHRWRYPSLSLHGIEGAFSGSGAKTVIPRKVVGKFSIRLVPNMTPEVVGEQVTSYLTKKFAELRSPNEFKVYMGHGGKPWVSDFSHPHYLAGRRAMKTVFGVEPDLTREGGSIPVTLTFQEATGKNVMLLPVGSADDGAHSQNEKLNRYNYIEGTKMLAAYL

SEQ ID NO: 46236 - protein, 408 aa, Homo sapiens
  DOMAIN (27)..(365): Peptidase family M20/M25/M40 domain identified by PFam, accession name Peptidase_M20, E-value=6.2e-22, PFam score of 79.7
RLVERWRPSGTLFKYIDENQDRYIKKLAKWVAIQSVSAWPEKRGEIRRMMEVAAADVKQLGGSVELVDIGKQKLPDGSEIPLPPILLGRLGSDPQMKTVCIYGHLDVQPAALEDGWDSEPFTLVERDGLTWCSSCRGPYCRGSSDRLSWKLPSVMWGDSREPHLARLDHPSGLEPQRPGSTWGGGDDRRGGRALSRQLPYAGYAAAQCKGEVRPQVSSSRLVVECSNKDLHSGVYGGSVHEAMTDLILLMEEHKLYDDIDFDIEEFAKDVGAQILLHSHKSHLHLDLLPVVVRLLGQALFHTAHFPDNIPSSSKDILMHRWRYPSLSLHGIEGAFSGSGAKTVIPRKVVGKFSIRLVPNMTPEVVGEQACGAGTRESMSSLGYPSRAEDDSGLSALPSQPQPFILYAT

SEQ ID NO: 46237 - protein, 142 aa, Homo sapiens
FETLFSQVQLFISTCNGEHIRYATDTFAGLCIQLTNALVERKQPLRGIGILKQAIDKMQMNTNQLTSIHADLCQAITTPAMAVSHIMLESYKKYILVSLILLGKVQQLPKYTSPQLVGRFIKPLSNAYHELRHKLYSTNNPC

SEQ ID NO: 46238 - protein, 476 aa, Homo sapiens
  DOMAIN (239)..(260): PROTEIN REPEAT DOMAIN TPR NUCLEA domain identified by eMATRIX, accession number PD00126A, p-value=7.517e-09, raw score of 22.53
  DOMAIN (356)..(433): PCI domain identified by PFam, accession name PCI, E-value=7e -14, PFam score of 59.5
  misc_feature (1)...(476): Xaa = X or * as defined in Table 2
TSGSDVAAREDLRWIAAAPPPRAAAFSRACCLRRSGRPGENMASALEQFVNSVRLLLSQGCSCFPGQMTQLCELINMSGELLAKNLSHLDTVLGALDVQEHSLGVLAVLFVKFSMPSVPDFETLFSQVQLFISTCNGEHIRYATDTWQETVLLKSMVLVLVVIYYQPLRGIGILKQAIDKMQMNTNQLTSIHADLCQLCLLAKCFKAALPYLDGDMMDICKENGAYDAKHFLCYYYYGGMIYTGLKNFERALYFYGQAITTPAMAVRHIIVWESYKKYILVSLILLGKVQQLPKIFHLKLVGXIPLSLLSNAYHELAQVYSTNNPSELRNLVNKHSETFTRDNNMGLVKQCLSSLYKKNIQRLTKTFLTLSLQDMASRVQLSGPQEAEKYVLHMIEDGEIFASINQKDGMVSFHDNPEKYNNPAMLHNIDQEMLKCIELDERLKAMDQEITVNPQFVQKSMGSQEDDSGNKPSSYS

SEQ ID NO: 46239 - protein, 1136 aa, Homo sapiens; identical to SEQ ID NO: 44700

SEQ ID NO: 46240 - protein, 78 aa, Homo sapiens
LRLLSCFMRILIRIFPQKNAFMLNYTLVREPKVVKKTKICHLAMDIDQLPERMKAGDLLKLIMMMNHILLKEMKLIEL

SEQ ID NO: 46241 - protein, 80 aa, Homo sapiens
GSAPQSCASPAPVSRSAAPGTAEAAEPWAIVPGVEQKNYYVCVPLGLIGNCTVTSSGISLDCADWCLKWKSILMESLEVP

SEQ ID NO: 46242 - protein, 45 aa, Homo sapiens
NSERAGQIFLRLAGRTDWLHGFFQESVRQRGDTPIYNRAGAVRPS

SEQ ID NO: 46243 - protein, 49 aa, Homo sapiens
RKFLHHNDGQTAPARQYLSSYYWHYDGHQNQGRRYKQHSAPCKISFAWQ

SEQ ID NO: 46244 - protein, 95 aa, Homo sapiens
  misc_feature (1)...(95): Xaa = X or * as defined in Table 2
DCPLARNKSKPQTVCLKARQTFQAINFSRALRITGYLTSFPSLSRSTLPSSAGDFRASAWAXSGPTVXTLTSVPSVGINSSYIYEPVFRTLLSGE

SEQ ID NO: 46245 - protein, 460 aa, Homo sapiens
  DOMAIN (69)..(97): Granins proteins domain identified by eMATRIX, accession number BL00422C, p-value=5.235e-09, raw score of 16.18
MKDLATFIDASILLKFTWIQLDDIRQSAKPKIEYKHNVQGSNTRKPRCRSSITFSLFLILTLLPALWEEEEEQEEEEEEQEEEEEEEESTRDRWGEGGNARHLPLKLLARTGPQSTRAHTATAGQSTPTAPADTRRARAASHAGCNQDEEGLRCLRRARGCGAGRQGREQAQDCGAEIQAEAASRASRVQEGSYPRPPNGPFSTDLTGLMQFTKLLVLKVESQLTRRIRKCHNLREANIREELRFFNCTNVALRTGVQFNRRPDSPGYSRGVLSPERHVRTRLYFTSESHVHSLLSILRYGALCNRGGTLCCRAIHTLHRHTIVLNGVTVTLNLVQLTFYGNVSEIIRHQCQLTRHGNHPLPLTAIQGIALFSDNQAAYRFRADQRTLRPFGLPVARQPVRRGGFHDIVIVFDFGTARQQQERACNCEFFHHSSCMRRKEDCGIKALMSPAFQGSERNLI

SEQ ID NO: 46246 - protein, 234 aa, Homo sapiens
KTHVLSWGSPKSTWKAGWLQKQKTTQEKKAESKAPIEEEPAGAGLNKDKETEERSDGERVAEVAPEERENVAVAKLQESQPGNAVSCSGGRRKEDEREDWGKRTQRTHPPAAAQAPGQCPPGSTEVGAGGGLRWTPSPGRQPAGVAADMGITVLTVPLQRCLQNSWAKEPVLVVSFVIGSLTVILPPLSPYTKYSIMINEATPYNYPVPVHDDGNMPDMCSHPQGPQGPSLEWL

SEQ ID NO: 46247 - protein, 93 aa, Homo sapiens
  misc_feature (1)...(93): Xaa = X or * as defined in Table 2
XFSSRTLTAPAPFADETNCQCQAPHEKLTIAQARLGTPGPFTTWQLASSKPPVQKDTDRPVRVYADGIFDLFHSGHARALMQAKTLFPNSYLL

SEQ ID NO: 46248 - protein, 111 aa, Homo sapiens
GSFRLGHGRIPPFHLRGMKESLGPDFGDPCPVCPLNSGPGPPGVSAGGAGAGCGGMGRRDAWVPTGPVAESPGGHLAPISPGRQGAPWGGPCGQLGAGTLGQAVCGMTQDP

SEQ ID NO: 46249 - protein, 147 aa, Homo sapiens
MGQGLCTVLSKYEDQITIFTDYLEEYPDTDELVWILGKQHLLKTGGTGPSSDAGWGCMLRCGQMMLAQALICRHLGRAQMGVGEGKSIGEWFGPNTVAQVLNKRQGGEVRTNFLKANRVSDVSTYTCRPPYLLSLSFLTTYHWMETP

SEQ ID NO: 46250 - protein, 59 aa, Homo sapiens
EFGTRAQDDSWRMESVLSKYEDGITIFTDYLEEYPDTDELVWILGKQHLLKTDWERKTF

SEQ ID NO: 46251 - protein, 150 aa, Homo sapiens
PLEKGRQFYPQYEDQITIFTDYLEEYPDTDELVWILWKQHLLKTEKSKLLSDISARLWFTYRRKFSPILGGTGPSSDAGWGCMLRCGQMMLAQALICRHLGRDWSWEKQIEQPQEYQRILQCFLNRKDCCYSIHQMAQMGVGEGKSIGEW

SEQ ID NO: 46252 - protein, 65 aa, Homo sapiens
MPSRGRGSPTPALQLPPRSPRHLPRTRPGQQRGRNPSDSCISQAGCRAPHGQLSPNRAWPPLNQQ

SEQ ID NO: 46253 - protein, 159 aa, Homo sapiens
  DOMAIN (102)..(122): Binding-protein-dependent transport systems inner membrane co domain identified by eMATRIX, accession number BL00402B, p-value= 9.357e-12, raw score of 16.55
  DOMAIN (92)..(159): Binding-protein-dependent transport system domain identified by PFam, accession name BPD_transp, E-value=6.3e-06, PFam score of 33.1
WCWGHRVRLVLAAGPSSRGVLLLLVVLPSWASFLVRVCAWVGVLGDDGVLGGFLLWLGVVGRPLAVLRADLAVCVGVVCACVPFVVLPICAALVRVGCSLVEAALGLGARPLKTFFAVVVPLTKGGVVAGSMLVFVPAVGEFVIPELLGGPDSIVIGRV

SEQ ID NO: 46254 - protein, 1163 aa, Homo sapiens
  DOMAIN (1106)..(1146): HSF-type DNA-binding domain proteins domain identified by eMATRIX, accession number BL00434C, p-value=7.111e-09, raw score of 23.85
  DOMAIN (20)..(211): Rap/ran-GAP domain identified by PFam, accession name Rap_GAP, E-value=1.1e-101, PFam score of 351.2
  misc_feature (1)...(1163): Xaa = X or * as defined in Table 2
RKHKVGILYCKPGQSSEEEMSNNEEAGPAFEKFLSLIGEKVCLKGFTKYAAQLDVKTDSTGTHSLYTMYQDYEIMFHVSTLLPYTPNNRQQLLRKRHIGNDIVTIIFQEPGALPFTPKNIRSHFQHVFIIVRVHNPCTDNVCYSMAVTRSKDAPPFGPPIPSGTTFRKSDVFRDFLLAKVIXRLRNAAEQVPTSFTPWATRTRQEYLKDLAENCVSNTPIDSTGKFNLISLTSKKKEKTKARAGAEQHSAGAIAWRVVAQDYAQGVEIDCILGISNEFVVLLDLRTKEVVFNCYCGDVIGWTPDSSTLKIFYGRGDHIFLQATEGSVEDIREIVQRLKVMTSGWETVDMTLRRNGLGQLGFHVKYDGTVAEVEDYGFAWQAGLRQGSRLVEICKVAVVTLTHDQMIDLLRTSVTVKVVIIPPFEDGTPRRGWPETYDMNTSEPKTEQESITPGGRPPYRSNAPWQWSGPASHNSHQPPSGPLQPLPAMPSPXAGPXSRPPXSPSGSPSHCTARGLSASQKPLTQYHQPGADRVPPYRQPSGSFSTPGSATYVRYKPSPERYTAAPHPLLSLDPHFSHDGTSSGDSSSGGLTSQESTMERQKPEPLWHVPAQARLSAIAGSSGNKHPSRQDAAGKDSPNRHSKGEPQYSSHSSSNTLSSNASSSHSDDRWFDPLDPLEPEQDPLSKGGSSDSGIDTTLYTSSPSCMSLAKAPRPAKPHKPPGSMGLCGGGREAAGRSHHADRRREVSPAPAVAGQSKGYRPKLYSSGSSTPTGLAGGSRDPPRQPSDMGSRVGYPAQVYKTASAETPRPSQLAQPSPFQLSASVPKSFFSKQPVRNKHPTGWKRTEEPPPRPLPFSDPKKQVDTNTKNVFGQPRLRASLRDLRSPRKNYKSTIEDDLKKLIIMDNLGPEQERDTGQSPQKGLQRTLSDESLCSGRREPSFASPAGLEPGLPSDVLFTSTCAFPSSTLPARRQHQHPHPPVGPGATPAAGSGFPEKKSTISASELSLADGRDRPLRRLDPGLMPLPDTAAGLEWSSLVNAAKAYEVQRAVSLFSLNDPALSPDIPPAHSPVHSHLSLERGPPTPRTTPTMSEEPPLDLTGKVYQLEVMLKQLHTDLQKEKQDKVVLQSEVASLRQNNQRLQEESQAASEQLRKFAEIFCREKKEL

SEQ ID NO: 46255 - protein, 761 aa, Homo sapiens
  DOMAIN (576)..(744): Rap/ran-GAP domain identified by PFam, accession name Rap_GAP, E-value=1.5e-68, PFam score of 241.2
MTTYRAIPSDGVDLAASCGARVGDVLPGPHTGDYAPLGFWAQNGSMSQPLGESPATATATATATTRPSPTTPAMPKMGVRARVADWPPKREALREHSNPSPSQDTDGTKATKMAHSMRSIQNGQPPTSTPASSGSKAFHRLSRRRSKDVEFQDGWPRSPGRAFLPLRHRSSSEITLSECDAEDAGEPRGARHTGALPLFREYGSTSSIDVQGMPEQSFFDILNEFRSEQPDARGCQALTELLRADPGPHLMGGGGGAKGDSHNGQPAKDSLLPLQPTKEKEKARKKPARGLGGGDTVDSSIFRKLRSSKPEGEAGRSPGEADEGRSPPEASRPWVCQKSFAHFDVQSMLFDLNEAAANRATLTASRAHSLGGLDPAFTSTEDLNCKENLEQDLGDDNSNDLLLSCPHFRNEIGGEVSSSGRRVGPGSTSIEHVDLGARYYQDYFVGKEHANYFGVDEKLGPVAVSIKREKLEDHKEHGPQYQYRIIFRTRELITLRGSILEDATPTATKHGTGRGLPLKDALEYVIPELNIHCLRLALNTPKVTEQLLKLDEQGLCRKHKVGILYCKAGQSSEEEMYNNEEAGPAFEEFLSLIGEKVCLKGFTKYAAQLDVKTDSTGTHSLYTMYQDYEIMFHVSTLLPYTPNNRQQLLRKRHIGNDIVTIIFQEPGALPFTPKNIRSHFQHVFIIVRVHNPCTDNVCYRAKITSQAWALGFKDQEARVMAQRKVGGKQGLPVEAAPLWTDLTLPLPCGGSPDTALQLTIS

SEQ ID NO: 46256 - protein, 475 aa, Homo sapiens
  misc_feature (1)...(475): Xaa = X or * as defined in Table 2
AVRPGRHDPSAGLRSAAAASQXVRGHPGGLCAXGSIQGPGASAAEGPPAHSRAAXSKGGAELRTRXAGGRRPAGPHAQRPXLPXGPRVPLRPPSGTFLLPPPACTPITSRPSXKSCSRASTPPTWSSXIPASGTSPGMVRTPGEAPGEPGEPVPVPGPGAARVLPPGVEPRPCLWARKSPGVFFRPSSGGRRPPSXKTKWSKPTSTAPPRPXTXLRCTGLAFPLPPREGEPALGRGALEWTCAPLPLPAAAGPRGRRLGCGAAPPPPRGRVDQEEKPGPRVEGPPQANRNHPALPLSPPLPSPTXPPPAWVPTPALAAAPAPVPTASSSHSPSPGNAPVPTGSPRCLFFLRPYFPVGSILLPFRCPLISPCRFLRRRQFYGWSSAAYALLPHTPLSAACPSGPTTALHGQPQSSCSCCQEATFTVKSGVVQSGRPSLRQFYVHDFCKIQPQQLLVSHATTKATTDRYSTASCVAR

SEQ ID NO: 46257 - protein, 247 aa, Homo sapiens
MGIQWAAACVGVSFESAAGFGYRWVIGISIIRLHCSARVWRNLRVCPFGNWPYMRHNLLLAHVADALECGAAPPPPRGRVDQEEKTWPESRRAAPGQQRSPGLTSVPTLTFPHIPPPAWVPPQRLPLLPLLSPQPPPPILHHQGMPRFPQGPPDACFSSDHTFQSDQFYCHSDVPSSAHAGFFVEDNFMVGPQLPMPFFPTPRYQRPAPVVHRGFGRYRPRGPYTPWGQRPRPSKRRAPANPEPRPQ

SEQ ID NO: 46258 - protein, 65 aa, Homo sapiens; identical to SEQ ID NO: 35166

SEQ ID NO: 46259 - protein, 1295 aa, Homo sapiens
  DOMAIN (82)..(95): w SPAC8A404C RESISTANCE SPAC8A4.05C DAUNORUBICIN. domain identified by eMATRIX, accession number DM00191A, p-value=5.440e- 09, raw score of 8.16
RTPESLRPHEAVERRDSNVARISSHTSKPRDSYWPWASRWDCACAQRVFWIAIPTLWSSSSWPHSSSSPSMSTPLQRAVGDTKRALSASSSSSASLPFDDRDSNHTSEGNGDSLLADEDTDFEDSLNRNVKKRAAKRPPKTTPVAKHPKKGSRVVHRHSRKQSEPPANDLFNAVKAAKSDMQSLVDEWLDSYKQDQDAGFLELVNFFIQSCGCKGIVTPEMFKKMSNSEIIQHLTEQFNEDSGDYPLIAPGPSWKKFQGSFCEFVRTLVCQCQYSLLYDGFPMDDLISLLTGLSDSQVRAFRHTSTLAAMKLMTSLVKVALQLSVHQDNNQRQYEAERNDGPRQRAPERLESLLEKPKELQEHQEEIEGDMNALFRGVFVHRYTDVLPEIRAICINEIGCWMQSYSTSFLTDSYLKYIGWTLHDKHREVRVKCVKALKGLYGNRDLTARLELFTSRFKDWMVSMIMDREYSVAVEAVRLLILILKNMEGLLTDADCESVYPVVYPSNRGLASAAGEFLYWKLFYPECEIRTMGGREQRQSPGAQRTFFQLLLSFFVESELHDHAAYLVHSLWDCAGARLKDWEGLTSLLLEKDQNLGDVQESTLIEILVSSARQASEGHPPVGRVTGRKGLTSKERKTQADDRVKLTEHLIPLLPQLLAKFSADAEKVTPLLQLLSCFDLHIYCTGRLEKHLELFLQQLQEVVVKHAEPAVLEAGAHALYLLCNPEFTFFSRADFARSQLVDLLTDRFQQELEELLQSSFLDEDEVYNLAATLKRLSAFYNTHDLTRWELYEPCCQLLQKAVDTGEVPHQVILPALTLVYFSILWTLTHISKSDASQKQLSSLRDRMVAFCELCQSCLSDVDTEIQEQAFVLLSDLLLIFSPQMIVGGRDFLRPLVFFPEATLQSELASFLMDHVFIQPGDLGSGDSQEDHLQIERLHQRRRLLAGFCKLLLYGVLEMDAASDVSKHYNKFYNDYGDIIKETLTRARQIDRSHCSRILLLSFKQLYTELLQEHGPQGLNELPAFIEMRDLARRFALSFGPQQLQNRDLVVMLHKEGIQFSLSELPPAGSSNQPPNLAFLELLSEFSPRLFHQDKQLLLSYLEKCLQHVSQAPGHPWGPVTTYCHSLSPVENTAETSPQVLPSSKRKRVEGPAKPNREDVSSSQEESLQLNSIPPTPTLTSTAVKSRQPLWGLKEMEEEDGSELDFAQGQPVAGTERSRFLGPQYFQTPHNPSGPGLGNQLMRLSLMEEDEEEELEIQDESNEERQDTDMQASSYSSTSERGLDLLDSTELDIEDF

SEQ ID NO: 46260 - protein, 39 aa, Homo sapiens
  misc_feature (1)...(39): Xaa = X or * as defined in Table 2
XGKHPEKGSRVVHRHSRKQSEPPANDLFNAVKAAKSDMQ

SEQ ID NO: 46261 - protein, 52 aa, Homo sapiens
CHCYLFFIFLIFLYILDGKHPEKGSRVVHRHSRKQSEPPANDLFNAVKAGLC

SEQ ID NO: 46262 - protein, 282 aa, Homo sapiens
FEDSFNRGVKKKAAKRPLKTTPVAKYPKKGSQAVHRHSRKQSEPPANDLFNAAKAAKSDMQHREVRVKCVKALKGLYGNRDLTARLELFTGRFKDWMVSMIMDREYSVAVEAVRLLILILKNMEGVLMDVDCESVYPIVLFYPECEIRTMGGREQRQSPGAQRTFFQLLLSFFVESKLHDHAAYLVDNLWDCAGTQLKDWEGLTSLLLEKDQSTCHMEPGPGTFHLLGESPGISAIVQGAIEKSGERSSPPPKRIGSMKEGPMVLPLALDTQCWFPVEVPLD

SEQ ID NO: 46263 - protein, 168 aa, Homo sapiens
  DOMAIN (63)..(76): w SPAC8A404C RESISTANCE SPAC8A4.05C DAUNORUBICIN. domain identified by eMATRIX, accession number DM00191A, p-value=5.440e- 09, raw score of 8.16
NHSLAKKGTAHGLGMEKCCGRSPFFSFFPSWIAKPTLRSSSSWPHSSSSPSMSSPLQRAVGDTKRALSASSSSSASLPFDDRDSNHPSEACTTPGGGWEVADGNTDSLLADEGSDFEDSFNRNVKKKAAKRPPKTTPVAKQPKKGSRVVHRHSRKQSEPPANDLFNAV

SEQ ID NO: 46264 - protein, 66 aa, Homo sapiens
ALETNIGSSYNYGSEDQAEFLCVVSKELHSTPNGLSSESSRKTKCYKPEAPGCEAPDHLQGLGVPI

SEQ ID NO: 46265 - protein, 309 aa, Homo sapiens
MDVVRLQLKFTEHLFHTDAHRQLYSRLRLSCLPRAGRRLFIYCALLARVSSVRWFSLRISGSARVGAESFLTIFSDELAQHPGPLGTGHPQNLSPLPNLSRGTLVHQCAPKQCWAFAHVVSRSSRRGEFFSFDRWKKHRSEVRESAQVPTTKREPGCQSNADDHAADVYQTDQLNTKQETKTVNIISILPAKVAVDNSQNKRNAQAFGALIGAVAGGVIGHNVGSGSNSGTTAGAVGGGAVGAAAGSMVNDKTLMEGVSLTYKEGTKVYTSTQVGKEFQFTTGLAVVITKTYNETITCGQEFENTWAAW

SEQ ID NO: 46266 - protein, 203 aa, Homo sapiens
  DOMAIN (87)..(175): K+ channel tetramerisation domain identified by PFam, accession name K_tetra, E-value=0.0063, PFam score of -11.2
MVTAALGPVWAALLLFLLMCEIRMVELTFDRAVASGCQRCCDSEDPLDPAHVSSASSSGRPHALPEIRPYINITILKGKATTGDPRGGGYRLRIITVPFCYFVPAPSREELSLHSPSLPDETGAYLIDRDPTYFGPILNFLRHGKLVLDKDMAEEAAEQFTSRALWAAWFGKCHVDSRTCPGPSPLPPLPPPLLWARQTAGLR

SEQ ID NO: 46267 - protein, 290 aa, Homo sapiens
  DOMAIN (24)..(126): K+ channel tetramerisation domain identified by PFam, accession name K_tetra, E-value=6e-31, PFam score of 116.2
MRMEAGEAAPPAGAGGRAAGGWGKWVRLNVGGTVFLTTRQTLCREQKSFLSRLCQGEELQSDRDETGAYLIDRDPTYFGPILNFLRHGKLVLDKDMAEEGVLEEAEFYNIGPLIRIIKDRMEEKDYTVTQVPPKHVYRVLQCQEEELTQMVSTMSDGWRFEQLVNIGSSYNYGSEDQAEFLCVVSKELHSTPNGLSSESSRKTKSTEEQLEEQQQQEEEVEEVEVEQVQVEADAQEKGSRPHPLRPEAELAVRASPRPLARPQSCHPCCYKPEEPGCEAPDHLQGLGVPI

SEQ ID NO: 46268 - protein, 815 aa, Homo sapiens
  DOMAIN (514)..(590): K+ channel tetramerisation domain identified by PFam, accession name K_tetra, E-value=1e-16, PFam score of 69.0
MRRGETRSRRPPQCWAFAHVVSRSSRRGEFFSFDRWKKHRSEVRESAQVPTTKREPVLFQHKINIKIVIALVDILFALGLGNLVCVSPVQLFSVQTDSRATGDQRLPSWTAQRYGTRTLGPDGFTERCPYGPSPESLLCSALPWLRDLGMPVAEAPQVAGGQGDGGDGEEAEPEGMFKACEDSKRKARGYLRLVPLFVLLALLVLASAGLEMLSDPGSRSYGSGLLPAWAKCPKAPHQRSLIPPDYAPGVNHPPPQERCSMGLRTQGTLGRHRVLSAQQVAFSVSLLMAKIAFAKQKSDDIIPDFKLFMVTLVHRPNRLSARVLTMVPVLPAPCPMLLPLLEGYKAEVMVSQVYSGSLRVLNRHFSQDLTRRESSAFRSETAKAQKMLKELITSTRLGTYYNSSSVYSFGEGPLTCFFWFILQIPEHRRLMLSPEVVQALLVEELLSTVNSSAAVPYRAEYEVDPEGLVILGQYCEWKPPGRRMQTPRPAMRMEAGEAAPPAGAGGRAAGGWGKWVRLNVGGTVFLTTRQTLCREQKSFLSRLCQGEELQSDRDETGAYLIDRDPTYFGPILNFLRHGKLVLDKDMAEEGSQVWTVTSGGWGDRNAVLTGMGRALSLFLWLIQYLKFCLVRAWVLEEAEFYNIGPLIRIIKDRMEEKDYTVTQVPPKHVYRVLQCQEEELTQMVSTMSDGWRFEQLVNIGSSYNYGSEDQAEFLCVVSKELHSTPNGLSSESSRKTKSTEEQLEEQQQQEEEVEEVEVEQVQVEADAQEKAQSSQDPANLFSLPPLPPPPLPAGGSRPHPLRPEAELAVRASPRP

SEQ ID NO: 46269 - protein, 191 aa, Homo sapiens
  DOMAIN (116)..(127): C2 domain proteins domain identified by eMATRIX, accession number PF00168B, p-value=5.000e-10, raw score of 11.83
MPGLLSRPRRGSLRARPCGGGEALPEHVAIDVCPGPIRPIQQISGYFPHFPRDLPHDAPARPATASAGRRRPSDGARDHDKDGDHLFGSLTIQHRPWPAPSPDFPFTPFAVLYPGLKPMDHNGLADPCVKLHLRPGARKVPEACQLAPDLQDSSCLTAITKAHDVLTVFLPAALKIQGNKYLTFIECQKLF

SEQ ID NO: 46270 - protein, 508 aa, Homo sapiens
WTREKEPPGVETHGKASRTTLGLSLWCCLHLSEIQSSFISDCARPRCSGRLPGSGPMLLATPHVLATVVASSCSKQLWWLPPKVATDQQQMKLKGLFIAGAPPGSPRGVQPHLQPIRNMSVSRTMEDSCELDLVYVTERIIAVSFPSTANEENFRSNLREVAQMLKSKHGGNYLLFNLSERRPDITKLHAKVLEFGWPDLHTPALEKICSICKAMDTWLNADPHNVVVLHNKGNRGRIGVVIAAYMHYSNISASADQALDRFAMKRFYEDKIVPIGQPSQRRYVHYFSGLLSGSIKMNNKPLFLHHVIMHGIPNFESKGGCRPFLRIYQAMQPVYTSGIYNIPGDSQTSVCITIEPGLLLKGDILNSEILFGVDELSLTGFGLKCYHKKFRSPARDVIFRVQFHTCAIHDLGVVFGKEDLDDAFKDDRFPEYGKVEFVFSYGPEKIQGMEHLENGPSVSVDYNTSDPLIRWDSYDNFSGHRDDGMEGAQHPQIGQDTPPGPSDPPGCL

SEQ ID NO: 46271 - protein, 183 aa, Homo sapiens
LSGSSAGKVAAPCVPPSNHELVPITTENAPKNVLDKGERPSRGGNTRKSLETTASTGSPRGVQPHLQPIINMNVSRTMEDSCELGPVYRTERNIAVSFPSTANEENFRSNLREVAQMLKSKHGGNYLQRNVSLRRLSPSLRHPGPWPPSQEPGMCQGEPGPPATLWPMPCGPTVLESPGGPGP

SEQ ID NO: 46272 - protein, 275 aa, Homo sapiens
  DOMAIN (175)..(202): PMP-22 / EMP / MP20 family proteins domain identified by eMATRIX, accession number BL01221D, p-value=3.025e-09, raw score of 13.99
  DOMAIN (7)..(196): PMP-22/EMP/MP20/Claudin family domain identified by PFam, accession name PMP22_Claudin, E-value=3.5e-12, PFam score of 53.9
MSACGRKALTLLSSVFAVCGLGLLGIAVSTDYWLYLEEGVIVPQNQSTEIKMSLHSGLWRVCFLAGEERGRCFTIEYVMPMNTQLTSESTVNVLKMIRSATPFPLVSLFFMFIGFILNNIGHIRPHRTILAFVSGIFFILSGLSLVVGLVLYISSINDEMLNRTKDAETYFNYKYGWSFAFAAISFLLTESAGVMSVYLFMKRYTAEDMYRPHPGFYRPRLSNCSDYSGQFLHPDAWVRGRSPSDISSEASLQMNSNYPALLKCPDYDQMSSSPC

SEQ ID NO: 46273 - protein, 365 aa, Homo sapiens
  DOMAIN (332)..(348): Putative AMP-binding domain proteins domain identified by eMATRIX, accession number BL00455, p-value=6.684e-13, raw score of 13.31
WPVLTAAGCWLQDPAGHRGGRAGGAGRAVLFQLQAGRAELRGLRARGWARSWAPAPGCQRTGRDAAAAGRRAGRAGALLGFTCLLLAALCGHLGPSWRGGLAPGGEWIWLRASETRGPSGPRPALMGSQKIRNITRTRHGPLHWLHSGCTTATPFCLTRSCSDAACSLKGLPCLCPCGLSVLIRVRLELRRHQRAGHTIPRIFQAVVQRQPERLALVDAGTGECWTFAQLDAYSNAVANLFRQLGFAPGDVVAIFLEGRPEFVGLWLGLAKAGMEAALLNVNLRREPLAFCLGTSGAKALIFGGEMVRAPPPNAQAPPLTPVSPADRLFYIYTSGTTGLPKAAIVVHSSARPSCPSSRTLRAAHR

SEQ ID NO: 46274 - protein, 67 aa, Homo sapiens
SIKSPEIHSPSTRIRMGCSSLPTEEAHAEGVIELSRIKCVEIVKSDDRIPCHYKYPFQVSPSGGSSP

SEQ ID NO: 46275 - protein, 654 aa, Homo sapiens
  DOMAIN (543)..(591): Receptor tyrosine kinase class III proteins domain identified by eMATRIX, accession number BL00240F, p-value=7.750e-23, raw score of 17.74
  DOMAIN (398)..(647): Eukaryotic protein kinase domain identified by PFam, accession name pkinase, E-value=5.4e-70, PFam score of 245.9
EGDNKLRPRIRRKLFPLVVLRGDAQGAPPFKNWIMNNFILLEEQLIKKSQQKRRTSPSNFKVRFFVLTKASLAYFEDRHGKKRTRKGSIELSRIKCVEIVKSDISIPCHYKYPFQVVHDNYLLYVFAPDRESRQRWVLALKEETRNNNSLVPKYHPNFWMDGKWRCCSQLEKLATGCAQYDPTKNASKKPLPPTPEDNRRPLWEPEETVVIALYDYQTNDPQELALRRNEEYCLLDSSEIHWWRVQDRNGHEGYVPSSYLVEKSPNNLETYEWYNKSISRDKAEKLLLDTGKEGAFMVRDSRTAGTYTVSVFTKAVVSENNPCIKHYHIKETNDNPKRYYVAEKYVFDSIPLLINYHQHNGGGLVTRLRYPVCFGRQKAPVTAGLRYGKWVIDPSELTFVQEIGSGQFGLVHLGYWLNKDKVAIKTIREGAMSEEDFIEEAEVMMKLSHPKLVQLYGVCLEQAPICLVFEFMEHGCLSDYLRTQRGLFAAETLLGMCLDVCEGMAYLEEACVIHRDLAARNCLVGENQVIKVSDFGMTRFVLDDQYTSSTGTKFPVKWASPEVFSFSRYSSKSDVWSFGVLMWEVFSEGKIPYENRSNSEVVEDISTGFRLYKPRLASTHVYQIMNHCWKERPEDRPAFSRLLRQLAEIAESGL

SEQ ID NO: 46276 - protein, 489 aa, Homo sapiens
  misc_feature (1)...(489): Xaa = X or * as defined in Table 2
XVDAESQRGPTAVPVLLDVLHASFAERTNECLLTTTLVKSSITSRLDDCRRLLLSSLLQSVVHTQPDGPLRTQMSKTEVGERSDLPRDMWSLSTLVLISPDNFAIGLGTQPCGHPGWTAVDRLDVVGSSAKRKRELLGLCPVVGGWGSIWGIGVLSSYGTAWAGASLLQYLFSIFCLPQPMLWIQHKQPETLTITELAVRREEDSKLAKCIEQHFVLPALQGIKTDYRDTRNAVCSLCLLHVKPASTSDRGLPVVPQPPPLTFSPAHVEIFPISSEVFWCFNRQRGRPAHTLALSSFTICLVLLAITEGCSQAVLLLPHLWPALHMRAGSSGQEMQVLAARCGVGETMCSPGAAPVWTPNLSSILAGQVTDRPHSSPWPCGYDSTMNSFSQGSPCGCFQAFLHRIRQNVADSVEKGLTEENVKVLFSNIEDILEVHKDFLAALEYCLHPEPQSQHELGNVFLKFNGQVLPCTRSIAATMEKALRAAWWS

SEQ ID NO: 46277 - protein, 123 aa, Homo sapiens
GASPDLGGRVLGAGASAESPRGRPFGPSPLGGPPVPGCQCAAPSLRDPWGLWAPVLQMTGSYEFKLNQPPEDGISSVKLSPHTLPSPGLSPSWETSVRLYDVPGNFMAVKYQHTGARPGNGPF

SEQ ID NO: 46278 - protein, 922 aa, Homo sapiens
  DOMAIN (534)..(576): OXIDASE BIOSYNTHESIS OXIDOREDUCTASE PORP domain identified by eMATRIX, accession number PD01498E, p-value=2.957e-38, raw score of 28.72
WDEKWGYDYTGNADNNANFGKAVPADFNGGSFGRGDSDEWTFGAQMEIWCSYLLALRQCQADIHSAGCICHGVVLVNDQCLPPVKCWGRCGAKSPFCAITFRVRWTIRKSTKCCANRAYKRNITVGRIRRLRRIRQPLPDATLCVLSGLQTEHNRRWPNSVCHFSPDSTFYNDLSGRMKNVRLMFNGIHRDNGFSKRPTDLNYTRKPLVLAFQTAWFITVRVEIVGFRGINRLSLMLEQNNVLIGENAWGKSSLLDALTLLLSPESDLYHFERDDFWFPPGDINGREHHLHIILTFRESLPGRHRVRRYRPLEACWTPCTDGYHRIFYRLEGESAEDGSVMTLRSFLDKDGHPIDVEDINDQARHLVRLMPVLRLRDARFMRRIRNGTVPNVPNVEVTARQLDFLARGGQARYRLMRRRASNEQRSWRYLDIINRMIERPETRYTREIGFTSTNIDLIYGLPKQTPESFAFTLKRVAELNPDRLSVFNYAHLPTIFAAQRKIKDADLPSPQQKLDILQETIAFLTQSGYQFIGMDHFARPDDELAVAQREGVLHRNFQGYTTQGDTDLLGMGVSAISMIGDCYAQNQKELKQYYQQVDEQGNALWRGIALTRDDCIRRDVIKSLICNFRLDYAPIKKQGDLHFADYFAEDLKLLAPLAKDGLGDVDEKEYRPDKAFTRIRHLSMMPDAAWSRLIRPTTFSASGINNELQLNGPIIAAHSTAATAVCGMEAWAWNTKHACRCILKKTSNLVHQMLHSVGLNALATASDMNRNVLCTSNPYESQLHAESYEWANKISEHLLPRTRAYAEIWLDQEKVATTDEEPILGQTYLPRKFETTEVIPPQNDIDLHANDMNFVAIAENGKLVGFNLLVGGGLSIEHGNKKTYARAVNDFAICRGDIRWRWLKPFDTHRGGEPNRCKIPTQ

SEQ ID NO: 46279 - protein, 296 aa, Homo sapiens
  DOMAIN (203)..(217): Nitrite and sulfite reductases iron-sulfur/siroheme-binding s domain identified by eMATRIX, accession number BL00365A, p-value= 1.000e-10, raw score of 16.18
AENHPGPLVVEGKMTAPERMKHESNYLRGTIAENLNDGLTGGFKGANFLLIRFHGMYQQDDRDIRAERAEQKLEPRHAMLLRCRLPGGVITTKQWQAIDKFAGENTIYGSIRLTNRQTFQFHGILKKNVKPVHQMLHSVGLDALATANDMNRNVLCTSNPYESQLHAEAYEWAKKISKQLLPRTRAYAEIWLDQEKVATTDEEPILGQTYLPRKFKTTVVIPPQNDIDLHANDMNFVAIAENGKLVGFNLLVGGGLSIEHGNKKTYARTASEFGYLPLEHTLAVAEAVVTTQRDWG

SEQ ID NO: 46280 - protein, 53 aa, Homo sapiens
  misc_feature (1)...(53): Xaa = X or * as defined in Table 2
GLCIPVVRSPCQLWGQKGPCMLRDEGRVFTXLSTKKNCPGNMRRKYETVDCRR

SEQ ID NO: 46281 - protein, 118 aa, Homo sapiens
  DOMAIN (52)..(79): Protamine P1 proteins domain identified by eMATRIX, accession number BL00048, p-value=5.382e-10, raw score of 6.39
  misc_feature (1)...(118): Xaa = X or * as defined in Table 2
PLLIHWRFATIEEADDHRLAAGARTFQPLCGPPQAQAVWRXAQXFQFADRFPASRWRRASSGRRFSRSGRARRCQSVAKRRRQIHECGRSTPDCRCRMRQQYRCCRDARRYQNRAPRR

SEQ ID NO: 46282 - protein, 467 aa, Homo sapiens
MTNRISRLKTALFANTREISLERALLYTASHRQTEGEPVILRRAKATAYILEHVEISIRDEELIAGNRTSWINSRRVRRTALLSTKKKRRSTGKSCSRTWEKRSMKDFINGQMTDEVKAATNTQIFSINQTDKGQGHIIIDYPRLLNHGLGRWRIGIWRSSSFTDTVSLGSRVRLARSAYIYARVRLPTYTEDRLLVEIEELLNTKAQSGSHEARYATIGSAKKHIPESNLAVISVNGLFAAREARQALQNDLNVMLFSDNVSVEDELALKQLAHEKGLLMMGPDCGTAIINGAALCFGNAVRRGNIGIVGASGTGSQELSVRIHEFAVGVSQLIGSGARDLSEKTGGVYDAMRPSGMLENDPHPGIIALISAPPAPPVALKQNQTHGEGKVKQEWFCMGLTRITLLLAEDHAYGIFYWLAGGVSHARWQDVWQLLPVVVTAVPVVLLLANQLNLLNLSDSTAHTLG

SEQ ID NO: 46283 - protein, 116 aa, Homo sapiens
  misc_feature (1)...(116): Xaa = X or * as defined in Table 2
GRSRRXXPPSAVPHDPAVQRERDTQSLSVIIXMQIYNFSNTTHLTNHNTFLTFHKTFTAETFQHIGPQPTTDTPYHTAEAYCCQLVKLIRRQALRRCWQGAAILKCNSKPTNHCTS

SEQ ID NO: 46284 - protein, 556 aa, Homo sapiens
  DOMAIN (374)..(388): AIR synthase related proteins domain identified by eMATRIX, accession number PF00586C, p-value=2.800e-10, raw score of 12.13
  DOMAIN (254)..(513): AIR synthase related protein domain identified by PFam, accession name AIRS, E-value=1.6e-13, PFam score of 58.4
MTPICTVFRALSRLPDLWHRSIGTLTEALPQTDKRQEQIAVALTSYSGLYGLGYGSKEIQLTYSGTESGIWPFPYSPNATHKGCGRHRFACPIAPHFLVIEPQSALGSCPSPVEVDPGGCVFGAIRLLVLRDAPSFSRLLNTLASGESLQGGPGFVGVSKVYAFLVVRNPTGTPMFTGTFEIPKWPTFPIPPVFGRLGSFVLQLQGPRSPGQCEYDRELVSGSRSVSSCLLVLGTLHLLSYKDAGVDIDAGNALVGRIKGVVKKTRRPEVMGGLGGFGALCALPQKYREPVLVSGTDGVGTRRRLALVLKRFVFIGIDLVAMCGNDLVVQGAEPLFFLDYYATGKLDVDTASAMISGIAEEKSEILDGSKVSDGDVLIALGSSGLHSNGYSLVRQILEVHRAAADDVLSDADAVSWRAPYQTSSGLRKKINQGAVSFVDLHLSEVAQMVNYGFFGDIDVAVIEASALAPDGRVWLTSGIRNAPTWLLRAKKVIIELNHYHDPRVAELADIVIPGAASRRNNGSIFHAMDRLGNPHVQIDPEKIVAVVETNLPDAGH

SEQ ID NO: 46285 - protein, 56 aa, Homo sapiens
RSPLGLRIWFASPASAPGWSSALVIPGVHTTATVEQGNLASASSPGRRFIKHLWLG

SEQ ID NO: 46286 - protein, 135 aa, Homo sapiens
  misc_feature (1)...(135): Xaa = X or * as defined in Table 2
QCFRALGGHRRIADRGENIQVWIEPGCINDLLKWLNALDEKYRSRLVWARSSKNSLCASEANWLEMNNRLSKGDLPCIRPILIIMLIRXTCSYGFTALRXTQNAAGGGDSLAGGIGIFTLVFFTLPAYAIRWLPR

SEQ ID NO: 46287 - protein, 69 aa, Homo sapiens
MVNGCDSTNASSYANGERVRLDERSSYAIGERVRLDERILHANGERVRLDERILLRNGDRTYADPVFRH

SEQ ID NO: 46288 - protein, 763 aa, Homo sapiens
  DOMAIN (14)..(66): FAD-dependent glycerol-3-phosphate dehydrogenase proteins domain identified by eMATRIX, accession number BL00977A, p-value= 1.000e-40, raw score of 20.76
  DOMAIN (270)..(451): Xylose isomerase domain identified by PFam, accession name Xylose_isom, E-value=1.6e-83, PFam score of 290.9
ALTKVNEGSMETKDLIVIGGGINGAGIAADAAGRGLSVLMLEAQDLACATSSASSKLIHGGLRYLEHYEFRLVSEALAEREVLLKMAPHIAFPMRFRLPHRPHLRPAWMIRIGLFMYDHLGKRTSLPGSTGLRFGANSVLKPEIKRGFEYSDCWVDDARLVLANAQMVALEKCNSIVAFVVCHTSDEPCNCLPQVYGSDENASLTAYWYSGGVQGVCALLPGHHRVPGLLYAGSAAAVSGLLRQFGIRLDVQVRLIPILAQFAGISVLLGVWAFSRPWHQPGKALALAKRKADVAFEFFHKLHVPFYCFHDVDVSHESASLKEYINNFAQMVNVLAGKQEESGVKVLCGTVNCFTNPRYGAGYKTLLNTDLRQEREHLGRFMQMVVEHKHKIGFQGTLLIEPNPQDPTKHQYDCDAATVYGFLKQFGLEKEIKLNIQAIHATLAGLSFHQGTKLEPLKKGWLNCGKGRSLRSFWLLRNVAKGVCVQRRLSWQFKHAWLIKFWAPIPAVIASGILSTYYFGITGTFWTVTGEFTRWGGQLLQLFGVHAEEWGYFKIIHLEGSPLSRIDGMMILGMFGGCFAAALWANNVKLRMPRTRTRIMQAIIGGIIAGFGARLAMGCSLAAFFTGIPGYRARNSNPGKEFCQVTAHCQTRVKAGDNAANDGLHNSDTAARHSQFDIVGPQLFGKPAANHREDHHPVDAVTPLFSMDADQLQELAAPTGKFTRDSPKGASNAKIVSIENTRRYDRRDGGPEFNQPGVFEMLP

SEQ ID NO: 46289 - protein, 167 aa, Homo sapiens
  misc_feature (1)...(167): Xaa = X or * as defined in Table 2
IPCCRSTRKTSGAGLSITSEQRRAAVSRISVTSSLLASAGVRYRQHHARDRVRERPVDKLPRXXTPCSARLSLYGPSRXWWMARVLIFVTLPVRSRIVTVSPMRIGFSNRIIRPEIKLAKISCKPKPRPTPSAATSHCNFDHSIPIIEKPTSPPISISRYLVMVVMA

SEQ ID NO: 46290 - protein, 175 aa, Homo sapiens
TPGITRAEDQPGADAGDANQILKPSGDRYKTYPQIMAETRRVPTTAPLTIGVDTHDSKEDRIRRLRRIRQRCRLPDATLARLIRPTNSRTLRRPDKGVYAASGNSANCLMRRLRVLSGLQIPAPSVGRIRRLRRIRQRCRLPDATLARLIRPTNSRTLRRPDKAFTPHPAMVPTA

SEQ ID NO: 46291 - protein, 580 aa, Homo sapiens
  DOMAIN (392)..(444): FAD-dependent glycerol-3-phosphate dehydrogenase proteins domain identified by eMATRIX, accession number BL00977A, p-value= 1.000e-40, raw score of 20.76
  DOMAIN (388)..(578): FAD-dependent glycerol-3-phosphate dehyd domain identified by PFam, accession name FAD_Gly3P_dh, E-value=0.00037, PFam score of -218.7
MVNGCDSTNASSYANVNGCDSTNASSYANGERCDSTNASSYANGQRVRSTNASSYANGERVRLDNASSYAIGERVRLDERTSYANGERVRLDERILLANGDRVRHHERILERKATFNNSGTTCCRAVYSRVSAMTAPDKAFTPHRQRCRLPDATLARLIRPQIPAPSVGRIRRLRRIGNSANCLMRRLRVLSGHKFPHHPSMPNVSANGYRSFPFMASYMTPFFGYLTAWSYCLCGCRWGSLKSPPLALCPVLVPGDGAVDTRIDAVALVALANLAAVRLYAKSSSAAGIINFVVLTAALLAVTAACTVATYALRTGKNRQYRAMQSFRRSSIDNRVDTFFKGTGALGISVTVIAVTCKSRLVYPIPVYTGLSLPQRPAVVKVNEGSMETKDLIVIGAGINGAGIAADAAGRGLSVLMLEAQDLACATSSASSKLIHGGLRYLEHYESACEALAEREVLLKMAPHIAFPMRFRLPHRPHLRPAWMIRIAENISDFVEPKLCLPRMGTRESVLPGVCRNYESTITSVISVSPCERDMANYVPRHSAGYRRRFYPMTQPIKDAVEPVDQDWKAGKEMAASRS

SEQ ID NO: 46292 - protein, 1965 aa, Homo sapiens
  DOMAIN (667)..(709): 72 PYRUVATE (FLAVODOXIN) DEHYDROGENASE domain identified by eMATRIX, accession number DM01785D, p-value=8.024e-38, raw score of 16.14
  DOMAIN (1330)..(1417): Trp repressor protein domain identified by PFam, accession name Trp_repressor, E-value=8.5e-57, PFam score of 202.1
MVKVAGECRVRASAHLPGLNRSTKNTEDRGANNQEGTNTQKTRGETNERLKKNEHRDLRLARYPAKENNKQGDKNKPRTYEKLTGTVTHQEPPHHADQSPGLCLFRTSRAQVERGPTVLLLISQENQIERYDSDNHSQLNLCLRVPTVTTQRRDYDIAERYRQKGIKLPARKERLMTIAERLRQEGHQIGWQEGKLEGLHEQAIKIALRMLEQGFDRDQGIAVEHRVNANSDKVRSPRQALLRHIRSHSQKTSRFTRSTDPPNTGFNNSLHFRVPGVIRVAQRRRKIRRSNKHAINPFDVEDFVQVIQCRFTFHLHQQTKRIVTCAIEIIHRLFNMVIDRVVPWVGGFARLEISVRIGGRTADHRMFRVECPGAMSINFDLRHEIKNRVIGQRDNFIDFVGRAETIKEMNKWHAAFQRRDLRNESKVLRFLDVCCTQHRATRLAHRHNVGMIAKNRECMCGNGTCRYMQDKRVFNIRSAPLRHQVGSQIGRHEAGRRTLRSPPPDPPPNAPGVRTPRVRESTATGPMATTRWEKRHIAEEIPIWKEELCTQCNHCVAACPHSAIRAKVVPPEAMENAPASLHSLDVKSRDMRGQKYVLQVAPEDCTGCNLCVEVCPAKDRQNPEIKAINMMSRLEHVEEEKINYDFFLNLPEIDRSKLERIDIRTSQLITPLFEYSGACSGCGETPYIKLLTQLYGDRMLIANATGCSSIYGGNLPSTPYTTDANGRGPAWANSLFEDNAEFGLFPPDGRSTPCPHAASDRLVREIHKSLPHGPKCNSEYTYEDNGMYICPECAYEWNDAEPAQESDELIVKDANGNLLADGDSVTIIKDLKVKGSSSMLKIGTKVKNIRLVEGDHNIDCKIDGFGRIRRLRRIRQQCQLPDATLARLIRPTNSRTIRRPIRRYPHPQQLKSWRKCRITDDTAENRHCVQTDLDHGKEHAGIFLHIQNALGIYIAFISHQFKFDFAPDPRKGKLINLCEIHIESRFEESEPAFLSGIVLRRHMTDANSANSKMHAAALPHHVLRAGVESAVACPGGWGPWGEHGHVDLDTHSANIYEAPAVECTGRCQSVQQVIVNAKRGPLCPHGPSLVGAGRVRKTFNSSQQMPVCLIEPVFASKLIPVRAIFGSIGPIVQGKSTLFRMISAQEQPDSGTITLGETVKLASVDQFRDSMDNSKTVWEEVSGGLDIMKIGNTEMPSRAYVGRFNFKGVDQGKRVGELSGGERGRLHLAKLLQVGGNMLLLDEPTNDLDIETLRALENALLEFPGCAMVISHDRWFLDRIATHILDYQDEGKVEFFEGNFTEYEEYKKRTLGADALEPKRIKYKRIANFSTKLLFVDLLKNAYLYDLHLPLLNLMLTPDEREALGTRVRIVEELLRGEMSQRELKNELGAGIATITRGSNSLKAAPVELRQWLEENHRRQRQSSRTRLAALAGVFNHHPTESAVTIDASFNRHPKISLWKSASQPANRSVVLPSKNQSTDKTGYTLKEDAGRGYRRVVASPKPVDIIEKETVKALVDAGQVVITVGGGGIPVIREGNHLRGASAVIDKDWASARLAEMIDADMLIILTAVEKVAINFGKENEQWLDRLSLSDAERFIEEGHFAKGSMLPKVEAAASFARSRAGREALITVLSKAKEGIEGKTGTVICRIRRLRRIRQQCQLPDATLARLIRPTNSRTIRRPDKAFTPHPAILVYAVNRLAIVRTPSPVAPADHCSTGALRRRAVDMQPALLIVLNKVRQEARRRARACRIRRASGIVQFGKVRRQLAAVELRQRQTPERFVLLRGTRQQATGQRIVKTEQRVIIITQRSFRRPGEGRRINDHFRFLRTGINQTIGKHQTPFGISVHHFNFFTVAIEPAQESDELIVKDANGNLLADGDSVTIIKDLKVKGRIRRLRRIRQRCRLPDATLARLIRPTNSRNLLNSCSAAPEARTTDPIKRYNRPTNVGNSGTSDRATKRIQPEPTD

SEQ ID NO: 46293 - protein, 67 aa, Homo sapiens
AMSLTFRDYGPLHHSGRFRGYNKGVKSEGGALPEDTSLHWGKGVPSREHSTCKGPEVRLVLQLGGQE

SEQ ID NO: 46294 - protein, 87 aa, Homo sapiens
AMSLTFRDYGPLHHSGRFRGYNKGVKSEGGALPEDTSLHWGKGVPSREHSTCKGPEVRLVLQLGGQGSERVRGRRSGKGGCGLHSNS

SEQ ID NO: 46295 - protein, 87 aa, Homo sapiens
CSWQAGLGRRGSWVGVACHLHSSGAPRWPCHEEASPSALGCPCSDAPGLVGRAPWRQGGGAGSQGGLREADSASAGWAGGPLGSAVT

SEQ ID NO: 46296 - protein, 954 aa, Homo sapiens
  DOMAIN (602)..(617): ADRENODOXIN REDUCTASE FAMILY SIGNATURE domain identified by eMATRIX, accession number PR00419D, p-value=1.000e-10, raw score of 10.62
  DOMAIN (574)..(727): Pyridine nucleotide-disulphide oxidoreducta domain identified by PFam, accession name pyr_redox, E-value=6.3e-21, PFam score of 73.5
MDAAELIAELKRLHRQGKDIGQYIYLRRYERSRKHSAALMLADSFVRTTHALRRSHGGFPRLDDAAALRFANRRTSCERNDDNTCSRSLYADLKNGTAQNIRAKFVFIGAGGAALKLLQESGIPEAKDYAGFPVGGQFLVSENPDVVNHHLAKVYGKASVGAPPMSVPHIDTRVLDGKRVVLFGPFATFSTKFLKNGSLWDLMSSTTTSNVMPMMHVGLDNFDLVKYLVSQVMLSEEDRFEALKEYYPQAKKEDWRLWQAGQRVQIIKRDAEKGGVLRLGTEVVSDQQGTMPRSGGIARGRVHSTANIHAHRRRNNRPFGRDHATNGGTFTQVYIRHYRNMFENKRHLRRINKLLTRIGLYRHAFGPHFYRGIFSALAMEAWNNQQGGNKYQVIFDGKIYENAWWVSSTNCPGKAKANDATNPWRLKRTATAAEISQFGNTLSCEKSGSSSSSNSNTPASNTPANGGSATPAQGTVPSNSSVVAWNKQQGGQTWYVVFNGAPLLTVRVMRKAMMTATHGVMFVPLRQRKSQKPSNPQSVLQNQSLHGCEPQLKAENRAVLVTVGLSSGSGLPLFEHSDVEIAVDFLQRARQAQGDISIPQSALIIGGGDVAMDVASTLKVLGCQAVTCVAREELDEFPASEKEFTSARELGVSIIDGFTPVAVEGNKVTFKHVRLSGELTMAADKIILAVGQHARLDAFAELEPQRNTIKTQNYQTRDPQVFAAGDKRPLARYRIGIGNERISGTHGDNAAVFTQRDNHCSCATGNNRFHLQTQRFVFLRCGGKGKIEMRHQCLPERAVPLVGEVESGKFARSVQLWECVFRMSPDCRVHNVILRQPGVILFTQGKVGHHAFGVVAKNAIIVVQFHLSLCGNASRLYAVASAVHRHIDRITARNRFIQLRVDIDAVIADCRQGFISHPPAAARESVQRLAGIESGSYIHSHSSRKDAIARQNFG

SEQ ID NO: 46297 - protein, 521 aa, Homo sapiens
  DOMAIN (136)..(179): GLYCINE DEHYDROGENASE DECARBOXYL domain identified by eMATRIX, accession number PD00545E, p-value=1.000e-40, raw score of 16.16
  DOMAIN (299)..(502): Pyridine nucleotide-disulphide oxidoreducta domain identified by PFam, accession name pyr_redox, E-value=8.9e-18, PFam score of 62.9
MKLNKAGFNVPESYSLLKMPPVGCLISALKKAEDRQEVILRLFNPAESATCDATVAFSREVISCSETMMDEHITTEENQGSNLSGPFLRVRAGESIKFFNVLLADTPGLDIDTMDKDVAHDSRSIQLAMLRDDEILTHPVFNRYHSETEMMRYMHSLERKDLALNQAMIPLGSCTMKLNAAAEMIPITWPEFAELHPFCPPEQAEGYQQMIAQLADWLVKLTGYDAVCMQPNSGAQGEYAGLLAIRHYHESRNEGHRDICLIPASAHGTNPASAHMAGMQSRKTAGICCVHLWAGFGKVAIIGAGPAGLQASVTLTTQGYDVTIYEKEAHPGGWLRNGIPQFRLPQSVLDAEIARIEKMGVPIKCTTEVGNTLTLEQVKAENRAVLVTVGLSSGSGLPLFEHSDVEIAVDFLQRARQAQGDISIPQSALIIGGGDVAMDVASTLKVLGCQAVTCVAREELDEFPASEKEFTSARELGVSIIDGFTPVAVEGNKVTFKHGDLRTAPFLGVADKRNKSAGNHP

SEQ ID NO: 46298 - protein, 89 aa, Homo sapiens
AMSLTFRDYGPLHHSGRFRGYNKGVKSEGGALPEDTSLHWGKGVPSREHSTCKGPEVRLVLQLGGQGSERVRGRRSGKGGCGLHSNSTT

SEQ ID NO: 46299 - protein, 390 aa, Homo sapiens
MLKRDFIAFHGYWRESTMIETPSSRALVNSFSLPETHLTLHALRKLPPDAENFQRAGYVHRDITAAIINALCGMLISPCACRHVARSRRQSQRHYAQTRPPPAPSRPPTTPTPHDGPSRSGGPRPTLRCRVRAFEHGRANAEGDASCGMASVGPQGQALSSRTSPFIEWVIEAKGTAPTFWCKDCLQEVPHPQTLLLYCSPESARMMEWTIVPEGQGIAYAEPADRASHRMDASIKGECGAGVFRPTDPQADNPSVLTDQCQLAVPWGRPPAERRGHTPECCSRPQPRYGEYGPRYGPAGVHWPPTLAEHAFEGASLNQAAETPTPGEARTLTNSRKGKKERKKQTQGRGAQTASAAHKIQKQTTAQEDAHPGGDKRTTRERTAERADNG

SEQ ID NO: 46300 - protein, 997 aa, Homo sapiens
  DOMAIN (664)..(707): Hypothetical yabO/yceC/sfhB family proteins domain identified by eMATRIX, accession number BL01129C, p-value=5.950e-25, raw score of 25.56
  DOMAIN (636)..(784): RNA pseudouridylate synthase domain identified by PFam, accession name PseudoU_synth_2, E-value=2.5e-36, PFam score of 134.1
MVAFYRHAGRMWPGIALSCSLGNIAASILLFSTSSLNMTWTTINIVEAVVGAVLLRKLLPWYNPLQNLADWLRLALGSANSAGVNISTATVCRQCEDAPCANVCPNGAISRDKGFVHVMQERCIGCKTCVVACPYGAMEVVVRPVIRNSGAGLNVRADKAEANKCDLCNHREDGPACMAACPTHALICVDRNKLEQLSAEKRRRIPGNIRRIRSGRYRRPVTAGCDAVVSGRAGYAIHDGGNNSMAKNTSCGVQLRIRGKVQGVGFRPFVWQLAQQLSHGSRMRDGTCNLKYDEYSRSGSMQYNPLGKTDLRVSRLCLGCMTFGEPDRGNHAWTLPEESSRPIIKRALEGGINFFDTANSYSDGSSEEIVGRALRDFARREDVVVATKVFHRVGDLPEGLSRAQILRSIDDSLRRLGMDYVDILQIHRWDYNTPIEETLEALNDVVKAGKARYIGASSMHASQFAQALELQKQHGWAQFVKSDENDAPDRQSGSTGSQCKNCGADTEPQVAAGPGLSELNPVHCPHLHYRAHFRADRHSVACSLLDTPVTGHQVAPTYRQQVPRAGQVHDPSKHTRMPCENIDPVRTIIRRISDPPVPASATLGASKASRIRPRRSHSIPEITAKSRKPGGQPKWQVICWLDRDEKVVVMQTVRDQIGQHVFTAHRLDRPTSGVLLMGLSSEAGRLLAQQFEQHQIQKRYHAIVRGWLMEEAVLDYPLVEELDKIADKFAREDKGPQPAVTHYRGLATVEMPVATGRYPTTRYGLVELEPKTGRKHQLRRHLAHLRHPIIGDSKHGDLRQNRSGAEHFGLQRLMLHASQLSLTHPFTGEPLTIHAGLDDTWMQALSQFGWRGLLPENETVDSCASGRMRIVPNPEKRWRNGFWRPCRILVWQKDALPRANRIERKQGHRNVGIPGELIDWKKGHLMGILGSHLRDNCTAAGYYQQRGKRFNQACGVIELSIGLQRFHIIGRRMRALLGKFLPAHQQQTRRQSAERRS

SEQ ID NO: 46301 - protein, 913 aa, Homo sapiens
  DOMAIN (704)..(893): Fimbrial Usher proteins domain identified by PFam, accession name Usher, E-value=4.8e-80, PFam score of 279.3
HNHRNESWRPGLADKAVMSNQSQHVLIALPHPLLHLVSLGLVSFIFTLFSLELSQFGTQLAPLWFPTSIMMVAFYRHAGRMWPGIALSCSLGNIAASILLFSTSSLNMTWTTINIVEAVVGAVLLRKLLPWYNPLQNLADWLRLALGSAIVPPLLGGVLVVLLTPGDDPLRAFLIWVLSESIGALALVPLGLLFKPHYLLRHRNPRLLFESLLTLAITLTLSWLSMLYLPWPFTFIIVLLMWSAVRLPRMEAFLIFLTTVMMVSLMMAADPSLLATPRTYLMSHMPWLPFLLILLPANIMTMVMYAFRAERKHISESETHFRNAMEYSAIGMALVGTEGQWLQTNKALCQFLGYSQEELRGLTFQQLTWPEDLNKDLQQVEKLISGEINTYAYSCLGLCAAFYVGPLLCCSSGPPWIIPRIMPDEAQPLPDSALPRVAPLAWKTGTSYGYRDAWAIGVNARYVIGIWTGRPDGTPVVGQFGFASAVPLLNQVNNILLSRSANLPEDPRPNSVTRGVICWPGGQSLPEGDGNCRRRLATWLLDGSQPPTLLLPEQEGINGIRFPIWLDENGKRVAADCPQARQEMINVWPLPLEHWLPASERRAVRLPPASTSCPPYGHDAQLPLQLTGVRDGAIITSFVVSLVVSRCCIVRSPNKDRVKGNLQNALQRTNSGGVQNKTVKYEQRLNLNKTRWEQFNASIKGKPGNVPGSISANSDNSRQVSLSTDGGFVLHSGGLTFSNDSFSDSDTLAVVQAPGAQGARINYGNSTIDRWGYGVTSALSPYHENRIALDINDLENDVELKSTSAVAVPRQGSVVFADFETVQGQSAIMNITRSDGKNIPFAADIYDEQGNVIGNVGQGGQAFVRGIEQQGNISIKWLEQSKPVSCLAHYQQSPEAEKIAQSIILNGIRCQIQ

SEQ ID NO: 46302 - protein, 723 aa, Homo sapiens; identical to SEQ ID NO: 37277
  DOMAIN (588)..(633): kw TRANSCRIPTASE REVERSE II ORF2 domain identified by eMATRIX, accession number DM01354N, p-value=1.000e-40, raw score of 13.17
  DOMAIN (198)..(412): AP endonuclease family 1 domain identified by PFam, accession name AP_endonucleas1, E-value=7.2e-10, PFam score of 34.2

SEQ ID NO: 46303 - protein, 536 aa, Homo sapiens
  DOMAIN (25)..(41): SECRETIN RECEPTOR SIGNATURE domain identified by eMATRIX, accession number PR00490C, p-value=9.667e-09, raw score of 10.63
SSRRMFPPAIRLLLICLPARRWKSALGEEQLQNLQHISQEMGISPSLFSTQPLWQIAMVLQATQAQKLGLRAEYGIDYQLLQAAKQQHKPVIELEGAENQIAMLLQLPDKGLALLDDTLTHWHTNARLLQQMMSWWLECEGGERERIFPVSKRMGKKLDAVFGDNHTASLTETEEYRKSQVHFCICDKRERSSGNYQSIQGCRSAAFFIPSNSTRTKRGESMYRMDKLTTGAAYGASAGSILNGMLNAYSPEQWNAIGVLTTAAAGAEMNPTLRNKLVGAIVGGSGAITIAAVMLGNADGLEGRRYYAYQDVVGVWTVCDGHTGTDIRRGHRYTDKECDNLLKADLRKAIIYISGYSGTNGIRDSLLFSSLWLIPVFLFPKRIKIIAAVIGVAFSRFIASHLAVAFESDPEAEIRQLNSRRVELERALSNHENDNQQQRIQFEQAKEGVTALNRILPRLNLLADDSLADRVDEIRERLDEAQEAARFVQQFGNQLAKLEPIVSVLQSDPEQFEQLKEDYAYSQQMQRDARQPGVCP

SEQ ID NO: 46304 - protein, 257 aa, Homo sapiens
  DOMAIN (59)..(76): 5 TRANSMITTER DOMAIN domain identified by eMATRIX, accession number DM01767B, p-value=4.930e-10, raw score of 10.07
HGNAIALIASQTWRDHPVDLLLSLLVQSLTGRLRELNQSLQKELARNQHLAERLLETEESVRRDVARELHDDIGQTITAIRTQAGIVQRLAADNASVKQSGQLIEQLSLGVYDAVRRLLGRLRPRQLDDLTLEQAIRSLMREMELEGRGIVSHLEWRIDESALSENQRVTLFRVCQEGLNNIVKHADASAVTLQGWQQDERLMLVIEDDGSGLPPGSGQQGFGLTGMRERVTALGGAFHISCLHGTRVSVSLAQRHV

SEQ ID NO: 46305 - protein, 457 aa, Homo sapiens
MGKKQRGGGRHYRRRKELCVRVLASQKGSSIWNLSNRVESWHWEGEKDGEDRDNDDGDDSDGGDDNGEEDDGDNSNADVNTDNCDDGEDRDDASFHSNTPETRDVGTREQRPKVDKTTKIGKKQSRKAENSKNQSTSPPPKERSSSPATEQSWTENDFDELREEGFRRSNFSKLKEEVRTHGKEVKNLEKRLDEWLTRIINAEKSLKDLMELKTTARELRDECTSLSSRFDQREERVSVMEDQMNETKREEKFREKRIKRNEQSLQEIWDYLKRPNLRLIGVPESDGESGTKLENTLQDIIQENFPNLARQDNIQIQEIQRMPQRYSSRRATPRYIIVRFTKVEMKEKMLRAAREKGRVTHKGKPIRLTADLLAETLQARREWGPIFNILKEKNFQPRIAYPAKLSFISEGEIQYFADKQMLRDFVTTRPALKELLKEALNMERNNWYQPLQKHAKW

SEQ ID NO: 46306 - protein, 532 aa, Homo sapiens
GAFTCCATAGGCMNIRRKNRLWIACAVLAGLALTIGLVLYALRSNIDLFYTPGEILYGKRETQQMPEVGQRLRVGGMVMPGSVQRDPNSLKVTFTIYDAEGSVDVSYEGILPDLFREGQGVVVQGELEKGNHILAKEVLAKHDENYTPPEVEKAMEANHRRPARPSIMMPEIGNGLLCLALGIALLLSVYPLWGVARGDARMMASSRLFAWLLFMSVAGAFLVLVNAFVVNDFTVTYVASNSNTQLPVWYRVAATWGAHEGSLLLWVLLMSGWTFAVAIFSQRIPLDIVARVLAIMGMVSVGFLLFILFTSNPFSRTLHLAYPNRCQPINWRGRHLVWYLLLFVISLWLQLGLPDELSRFTPFCLALPIIALAWHYGWQGALIATLMNAIALIASQTWRDHPVDLLLSLLVQSLTGLLLGAGIQRLRELNQSLQKELARNQHLAERVLETEQSVRRDVARELHYDIGQTITAIRTHAGIVQRLAADNASVKQSGQLIEQLSLGVYDAVRPLLGRLRPAQLDDLTLEQAIPLT

SEQ ID NO: 46307 - protein, 87 aa, Homo sapiens
  misc_feature (1)...(87): Xaa = X or * as defined in Table 2
KIGQKAPLGEARGGERTSRTAKNFGYEEMLSELEAHRRGWLKRVXPRMKLPPEALVETFIAQLFDAPSQIMPLTSPIILLIAIEMGS

SEQ ID NO: 46308 - protein, 972 aa, Homo sapiens
  DOMAIN (75)..(107): Bacterial-type phytoene dehydrogenase proteins domain identified by eMATRIX, accession number BL00982A, p-value=7.923e- 15, raw score of 18.41
  DOMAIN (383)..(505): TonB dependent receptor C-terminal regi domain identified by PFam, accession name TonB_boxC, E-value=4.5e-34, PFam score of 126.6
MEHERYVGISNLMLKPELYLAVGISGQIQHMVGANASQTIFAINKDKNAPIFQYADYGIVGDAGALMSEDIFDAIIVGAGLAGSVAALVLAREGAQVLVIERGNSAGAKNVTGGRLYAHSLEHIIPGFADSAPVERLITHEKLAFMTEKSAMTMDYCNGDETSPSQRSYSVLRSKFDAWLMEQAEEAGAQLITGIRVDNLVQRDGKVVGVEADGNRVMKKILTTPIKAEDLQDIRVGDVIYLTGTLVTCRDVCHRRLIELKRPIPYDLNGKAIFHAGPITAYRLDAARKKITSARSLVLTDRTRNAVRQGVTVSSVLGTEVPALNGTCETFTFRGTDLYQWDNVPKAVVEGLEGSLNVPVSETVMWTNNITYMLKSENKTTGDRLSIIPEYTLNSTLSWQAREDLSMQTTFTWYGKQQPKKYNYKGQPAVGPETKEISPYSIVGLSATWDVTKNVSLTGGVDNLFDKRLWRAGNAQTTGDLAGANYIAGAGAYTYNEPGRTWYMSPNRILSDISPLQRVIIAVAVVIQAGLLIILLPRQADKLLQLMRVLFIQQVTPFIVFCVPRCCPFRADKGQRQAAMVAVVQCYNKIPWDVMKLNKAGFNVPESYSLLKMPPVGCLISALKKAEDRQEVILRLFNPAESATCDATVAFSREVISCSETMMDEHITTEENQARMDLQHWQAQFENWLKNHHQHQDAAHDVCHFRRVWATAQKLAADDDVDMLVILTACYFHDIVSLAKNHPQRQRSSILAAEETRRLLREEFEQFPAEKIEAVCHAIAAHSFSAQIAPLTTEAKIVQDADRLEALGAIGLARVFAVSGALGVALFDGLETVIVERYNTLGGVCLNVGCIPSKALLHVAKVIEEARALAEHGIVFGEPKTDIDRFTPDEIIVGLPLNMDGTEQPLTARARKFANRIHGRFGVEVKLHDERLSTVEARSGLFEQGGYRALNKGKVDSASAVIILESYFEQGY

SEQ ID NO: 46309 - protein, 954 aa, Homo sapiens; identical to SEQ ID NO: 46296
  DOMAIN (602)..(617): ADRENODOXIN REDUCTASE FAMILY SIGNATURE domain identified by eMATRIX, accession number PR00419D, p-value=1.000e-10, raw score of 10.62
  DOMAIN (574)..(727): Pyridine nucleotide-disulphide oxidoreducta domain identified by PFam, accession name pyr_redox, E-value=6.3e-21, PFam score of 73.5

SEQ ID NO: 46310 - protein, 1033 aa, Homo sapiens
  DOMAIN (476)..(508): Bacterial-type phytoene dehydrogenase proteins domain identified by eMATRIX, accession number BL00982A, p-value=2.726e- 13, raw score of 18.41
  DOMAIN (475)..(626): Pyridine nucleotide-disulphide oxidoreduc domain identified by PFam, accession name pyr_redox, E-value=5.6e-15, PFam score of 53.4
MKTGVVVEKAPGHQRGSTLPPSFAAWCVLYHVRRIQLLLRRRLYLVVRLLSSHRCAPRRRAESEKRVSKGGGILRALCKEPLRTGRILNINVPDLPLDQIKGIRVTRCGTRHPADQVIPQQDPRGNTLYWIGPPGGKCDAGPGTDFAAVDEGYVSITPLHVDLTAHSAQDVVSDWLNSVGVGTQCSLNSSSTLAACLTPVACTRNFEEQAMQTQLTEEMRQNARALEADSILRACVHCGFCTATCPTYQLLGDELDGPRGRIYLIKQEHLDRCLTCRNCETTCPSGVRYHNLLDIGRDIVEQKVKRPLPERILREGLRQVVPRPAVFRALTQLLRLRLHFGVRAIPSSPSVLAGSDNHGCSSSTASDDLLYGRNPTRIHGRNRSSLESVTSDAHPPIPWSTVPSDTLSVPGMAQRPPLTNSLRVCPTEKLCQSGCTRAGVDAPIDIGRLQRFVTDFEQQTGMEIYQPGTKTLGKVAIIGAGPAGLQASVTLTNQGYDVTIYEKEAHPGGWLRNGIPQFRLPQSVLDAEIARIEKMGVTIKCNNEVGNTLTLEQLKAENRAVLVTVGLSSGSGLPLFEHSDVEIAVDFLQRARQAQGDISIPQSALIIGGGDVAMDVASTLKVLGCQAVTCDLYSQHFGSPRRADHLSRQSDVHVNAEGTLVMSLPLITPKSRTRPPVAVCAEFRCKCTSVHRPGLSTDLSRVECGVFSVAATENTTVFTFQRDTAWRLTVRHVRTVCRRNRCLRKRITRQRIAVILFVHQQRFNLQIFRPKGIWQIVTQRVCLAARQMNTQIQTAVQFIHKLTAVTTRRVVNGDGCKRFFTTQPGVADRALFGMNGLLHCRTNKFHIGTEIPGSAHTARNCANIKIRQWRTRTGRRQRKYGEVLVCQNRFQCRLQVSASWQNNAARKLAAYPGTLPINLAQLKSVRRIREFDDLITARIHGYADAIDYYRQCSAMPMLNRIAKPTLIIHAKDDPFMDHQVIPKPESLPPQVEYQLTEHGGHVGFIGGTLLHPQMWLESRIPDWLTTYLEAKSC

SEQ ID NO: 46311 - protein, 521 aa, Homo sapiens; identical to SEQ ID NO: 46297
  DOMAIN (136)..(179): GLYCINE DEHYDROGENASE DECARBOXYL domain identified by eMATRIX, accession number PD00545E, p-value=1.000e-40, raw score of 16.16
  DOMAIN (299)..(502): Pyridine nucleotide-disulphide oxidoreducta domain identified by PFam, accession name pyr_redox, E-value=8.9e-18, PFam score of 62.9

SEQ ID NO: 46312 - protein, 161 aa, Homo sapiens
  misc_feature (1)...(161): Xaa = X or * as defined in Table 2
NNFCSTTSHHGQHHHTDHRCGEQNVCHRDAICQTLFRTTKDDSNFICLIEAQSACHKDVNYNHDSQKNAADHHDKQQXSPANFMPDTINDGFAERCINHQQNGRLVSFRNPFFIARHPVTNPRPGKMPQHKRQQQLQHNFTDLLKAAPCTVNIHHQTNQQW

SEQ ID NO: 46313 - protein, 354 aa, Homo sapiens
  DOMAIN (14)..(42): Sigma-54 interaction domain proteins ATP-binding region A proteins domain identified by eMATRIX, accession number BL00675C, p -value=3.093e-16, raw score of 13.51
  DOMAIN (8)..(93): Sigma-54 transcription factors domain identified by PFam, accession name sigma54, E-value=2.1e-28, PFam score of 105.6
MHQRPRTRNAVEQHRFSRQLYYALHAFEITIPPLRMRRGSIPALVNNKLRSLEKRFSTRLKIDDDALARLVSCAWPGNDFELYSVIENLALSSDNGRIRVSDLPEHLFTEQATDDVSATRLSTSLSFAEVEKEAIINAAQVTGAFPWWLGDVKLTIPLTLGMVAAALTDLDDRLAGRLRNLIITLFCFFIASASVELLFPWPWLFAIGLTLSTSGFILLGGLGQRYATIAFGALLNAIYTMLGTSLYEHWYQQPMYLLAGAVWYNVLTLIGHLLFPVRPLQDNLARCYEQLARYLELKSRMFDPDIEDQSQAPLYDLALANGLLMATLNQTKLSLLTRLRGDRGQRGTRRTGIL

SEQ ID NO: 46314 - protein, 317 aa, Homo sapiens; identical to SEQ ID NO: 44111
  DOMAIN (94)..(317): Periplasmic binding proteins and suga domain identified by PFam, accession name Peripla_BP_like, E-value=1.2e-19, PFam score of 78.7

SEQ ID NO: 46315 - protein, 30 aa, Homo sapiens
RAAIPDALAKPGPVGRAYQQNPHSPEFAIH

SEQ ID NO: 46316 - protein, 349 aa, Homo sapiens; identical to SEQ ID NO: 39588
  DOMAIN (38)..(59): GTP1/OBG GTP-BINDING PROTEIN FAMILY SIGNATURE domain identified by eMATRIX, accession number PR00326A, p-value=1.682e- 10, raw score of 8.75
  DOMAIN (35)..(221): ABC transporter domain identified by PFam, accession name ABC_tran, E-value=1.4e-66, PFam score of 234.6

SEQ ID NO: 46317 - protein, 141 aa, Homo sapiens
SFVSIFFADVSGYRAQGCFNLVSSVSLLGLKAINRAAELKAAPGLLENDELGTGVTELIHFFIAEYSDNQRANAGGGVEDEDIEVLELPFSQALEMIKTGEIRDDNASDKDLADLVLEMEVMNLIGRHKNIINLLGVCTQE

SEQ ID NO: 46318 - protein, 301 aa, Homo sapiens
  DOMAIN (43)..(81): Bacterial regulatory proteins lacI family proteins. domain identified by eMATRIX, accession number BL00356B, p-value=3.538e- 18, raw score of 26.17
  DOMAIN (15)..(42): Bacterial regulatory proteins, lacI f domain identified by PFam, accession name lacI, E-value=1.6e-10, PFam score of 42.4
RARRGVSVKAKKQETAATMKDVALKAKVSTATVSRALMNPDKVSQATRNRVEKAAREVGYFPQPMGRNVKRNESRTILVIVPDICDPFFSEIIRGIEVTAANHGYLVLIGDCALQIQQEKPFIDLIITKQIDGMLLLGSRLPFDASIEEQRNLPPMVMANEFAPELELPTVHIDNLTAAFDAVNYLYEQGHKRIGCIAGPEEMTLCHYRLQGYVQALRRCGIMFCRFTAEGVQEIDYKDIATLKNYITESGGVTELIHFFIAEYSDNQRANAGGGVEDEDIEVLESLRLNENHAIKERCRS

SEQ ID NO: 46319 - protein, 246 aa, Homo sapiens
  DOMAIN (181)..(227): PTR2 family proton/oligopeptide symporters proteins domain identified by eMATRIX, accession number BL01022B, p-value=6.657e- 27, raw score of 22.19
  DOMAIN (210)..(246): POT family domain identified by PFam, accession name PTR2, E- value=2.4e-06, PFam score of 23.9
IMFPLLMVVAISLRQGNFATGSLIPEQISWDHWKLALGFSVEQADGRITPPPFPVLLWLWNSVKVAGISAIGIVALSTTCAYAFARMRFPGKATLLKGMLIFQMFPAVLSLVALYALFDRLGEYTPFIGMNTPGGVISSSKDQTRGALMGQNPGRRQGWETLADSTRTEKMVRLGFSQEQAFVTLGAFAALVYGLISIGGYVGDHLLGTKRTIVLGALVLAIGYFMTGMSLLKPDLIFIALGTIAV

SEQ ID NO: 46320 - protein, 436 aa, Homo sapiens
  misc_feature (1)...(436): Xaa = X or * as defined in Table 2
FHRLWTGRFLPSPPSRRGTDNAAGRTKMPPSPVIFWFALAQFVGVKHSRSIPFAAVRSHKARIRSISRSDVATSILPQLSXRMPFXSQKALVARFPARQNCAFRLPGVXLDPGMDHAAVVARLVTGRGGIVWFGRDFYRSVDDIHFGAWGDLAKECFDIVIPQTNTARTYPHANAEIGVRTMKQINAAIGRQTNRMMAHWVIRSSRHYRRQLNSLCFITGADVCRWFPQHIVPGRDSVAHVVVQHVITYRLLRGLLHFAGDGGVNAITVFIGTFAITVIHLLAHHFAQVRRRESNLRRVIVSVNRLSACLIELLLGDIPFIQHPRQHDVTPRDGTIHRVERVEGGRRFRQPGYHRHFVQRQLVDRFSEIDLCRSTDTIGAVTKVNLVQIKLEDLVFRQQLFNANREEDFLNLTHQRAFWTEEEVSRQLLGNGTCPL

SEQ ID NO: 46321 - protein, 353 aa, Homo sapiens
MARQVIGGRGEKRHDGSTLSPVQPKSQKARLFITHLLLLLFIAAIMFPLLMVVAISLRQGNFATGSLIPEQISWDHWKLALGFSVEQADGRITPPPFPVLLWLWNSVKVAGISAIGIVALSTTCAYAFARMRFPGKATLLKGMLIFQMFPAVLSLVALYALFDRLGEYIPFIGLNTHGGVIFAYLGGIALHVWTIKGYFETIDSSLEEAAALDARTKHNIKRIDRLLGNRHLHKERLAVYRWHASFICSGNTMPIVLVDWSDIREQKRLMVLRASVALHGRSVTLYEKAFPLSEQCSKKAHDQFLADLASILPSNTTPLIVSDAGFKVPWYKSVEKLGWYWLSRVIEKYNMQT

SEQ ID NO: 46322 - protein, 81 aa, Homo sapiens
  misc_feature (1)...(81): Xaa = X or * as defined in Table 2
RSAASPWKTRKALVCCSAVVISPALKISMIVTISVQAHGXLRKGSGVKAALSWWKFQPTMKPTITSSLTGRRISCRSRVKR

SEQ ID NO: 46323 - protein, 439 aa, Homo sapiens
  DOMAIN (44)..(64): Binding-protein-dependent transport systems inner membrane co domain identified by eMATRIX, accession number BL00402B, p-value= 8.313e-11, raw score of 16.55
  DOMAIN (35)..(116): Binding-protein-dependent transport system domain identified by PFam, accession name BPD_transp, E-value=4.6e-17, PFam score of 70.1
GPRLVQRSDHRPHDANYRQYLAGLSVHDDPLHGLAETIPDDLYEASAMDGAGPFQNFFKITLPLLIKPLTPLMIASFAFNFNNFVLIQLLTNGGPDRLGTTTPAGYTDLLVNYTYRIAFEGGGGQDFGLAAAIATLIFLLRIPRRTTALQGMRSNLNMESSRWARANRRLKAINTLSLTLITQSCETYLIQNTRPELITDTFREFFDTPVETAQDVHKQLKRLRRVIAWTGERETPVTIYSWVAAATRYQLLKRGVISNTKINATEEEILQGEPEVKVESAERHHAMVNFWRTTLSCILGTLFWLWTGWTSGSGAMVMIAVVTSLAMRLPNPRMVAIDFIYGTLAALPYGGGRPVAVGVFYGGCYCTRDGLTRAPPPNAAPTAARYGPRTTPRTLRKGITDVRCEKRHHQRQARNAGYQTVFSDLDRLRHPALRLCHTT

SEQ ID NO: 46324 - protein, 859 aa, Homo sapiens
  DOMAIN (760)..(780): Binding-protein-dependent transport systems inner membrane co domain identified by eMATRIX, accession number BL00402B, p-value= 9.182e-14, raw score of 16.55
  DOMAIN (750)..(825): Binding-protein-dependent transport system domain identified by PFam, accession name BPD_transp, E-value=3.1e-10, PFam score of 47.4
MVLMGLAQNIWQFLILRALLGLLGGFVPNANALIATQVPRNKSGWALGTLSTGGVSGALLGPMAGGLLADSYGLRPVFFITASVLILCFFVTLFCIREKFQPVSKKEMLHMREVVTSLKNPKLVLSLFVTTLIIQVATGSIAPILTLYVRELAGNVSNVAFISGMIASVPGVAALLSAPRLGKLGDRIGPRKILITALIFSVLAVIPIRHFEMRSKESRPSAWVTPKGEWGKGSVELVEIPTNDETNDNIVAYWTPDQLPEPGKEMNFKYTITFSRDEDKLHAPDNAWVQQTRRSTGDVKQSNLIRQPDGTIAFVVDFTGAEMKKLPEDTPVTAQTSIGDNGEIVESTVRYNPVTKGWRLVMRVKVKDAKKTTEMRAALRVWNKPGQNHQHLGNGFYGQVYGGYLETMFGGAGAEVLYRPLDSNWAFGLDANYVKQRDWRSAKDMMKFTDYSVKTGHLTAYWTPSFAQDVLVKASVGQYLAGDKGGTLEIAKRFDSGVVVGGYATITNVSKEEYGEGDFTKGVYVSVPLDLFSSGPTRSRAAIGWTPLTRDGGQQLGPGYTDLLVNYTYRIAFEGGGGQDFGLAAAIATLIFLLVAIMFPLLMVVAISLRQGNFATGSLIPEQISWDHWKLALGFSVEQADGRITPPPFPVLLWLWNSVKVAGISAIGIVALSTTCAYAFARMRFPGKATLLKGMLIFQMFPAVLSLVALYALFDRLGEYIPFIGLNTHGGVIFAYLGGIALHVWTIKGYFETIDSSLEEAAALDGATPWHAFRLVLLPLSVPILAVVFILSFIAAITEVPVASLLLRDVNSYTLAVGMQQYLNPQNYLWGDYAAAAVMSALPITIVFLLAQRWLVNGP

SEQ ID NO: 46325 - protein, 255 aa, Homo sapiens
  DOMAIN (76)..(93): FORMYL-METHIONYL PEPTIDE RECEPTOR SIGNATURE domain identified by eMATRIX, accession number PR00526B, p-value=6.175e-09, raw score of 13.06
MTQENEIKRPIQDLEHEPIKPLDNSEKGSKVSQALETVTTTAEKVQRQPVIAHLIRATERFNDRLGNQFGAAITYFSFLSMIPILMVSFAAGGFVLASHPMLLQDIFDKILQNISDPTLAATLKNTINTAVQQRTTVGLVGLAVALYSGINWMGNLREAIRAQSRDVWERSPQDQEKFWDFGIEAGVEGQLSPTSSQNNPKETHNLMVGGTADNGFGMSTLAGSPVVQAGLRTPDLVTRPVLKAIHMFVNKLDLG

SEQ ID NO: 46326 - protein, 47 aa, Homo sapiens
  misc_feature (1)...(47): Xaa = X or * as defined in Table 2
MAISFMMSCFVTXVAANSAILLSMSWRAXSNSNGPXLANSILLSAAC

SEQ ID NO: 46327 - protein, 620 aa, Homo sapiens
MTLSCNSTDFEKTVTSVPALPDVVSDSDMSLNALSVTLADNVQLSFRRDSYSGQPSVIYTTPQRPTAGSEDAPVWPEAFTEDVRHNRPPYPVIPRATRPACLARERMAMYMRPQIKTIGKAPAEEALSNPRMQGPQLSSASTIPVTPFHWLFGSHAAGHFSQHAHRTALTGHFSHLATTLKGLALEGNAIFTITRFTRPYGHKNTTPHSPLCSAPHSPIFNSRRKVYGQHGPQWWAFIHSHRPGGSSHSSILHCFALVCPGLVVQRDTPHPIIRPALCPPIAIAFSLSLWLGNPSFPSGTQHLQGPKTFQQQASPSSKVCPKRLICTVIPQQRVASHHHFHGHNRYYQLGLPVQHCTLQGVIRATHFIPRTARNQISHVSWGAGPAHSDSQGKQDLEHEPIKPLDNSEKASKVSQALETVTTTAEKVQRQPVIAHLIRATERFNDRLGNQFGGFVLASHPMLLQDIFDKILQNISDPTLAATLKNTINTAVHSHLVPAGADGIFLLLRPFDAVCAAWIATAEYKDYPGMPGKTHLKIRLMRRERLIGIRFYSGLLPGTKAPYSRTLAFKRVLHTALSLHLGLGKTCTTGFELCSLTLLEYASNAFTYWPDWHINRIKNKN

SEQ ID NO: 46328 - protein, 159 aa, Homo sapiens
EKVKKTQRKEIENVTNITGVRQIELWRRDDLQHPRLDEVAEEVPVALVYNGISHVVMMASPKDLEYFALGFSLSEGDIIESPRDIFGMDVGVPCACNGLEERRRALDGRTVAGCGVCGVEQLLNDIGKPVQPLPFTQTFDLNKLDDALRHLNDFQPVGN

SEQ ID NO: 46329 - protein, 112 aa, Homo sapiens
RYLSTASQTNSIQIGAGLSRSRAFTTFGSKGILLSHTSVFIPRDRCTSFSMMPTCSASLTSHCPFQMTSLLSSHHPFKKKKFGTKTGHCLCPSLNCLPCCFSQIMVIKQVIL

SEQ ID NO: 46330 - protein, 79 aa, Homo sapiens
CLHVLHHLTSHCPFQMTKPYSTIHFLPRMTSLLSSHHPFKKKKFGTKTGHCLCPSLNCLPCCFSQIMVIKQVILEKKKK

SEQ ID NO: 46331 - protein, 74 aa, Homo sapiens
ARLLFMDLLDERTLVAVERPLVTSLLSSHHPFKKKKFGTKTGHCLCPSLNCLPCCFSQIMVIKQVILEKKKKTK

SEQ ID NO: 46332 - protein, 337 aa, Homo sapiens
  DOMAIN (36)..(86): Sugar transport proteins domain identified by eMATRIX, accession number BL00216B, p-value=9.850e-10, raw score of 27.64
  DOMAIN (117)..(335): alpha/beta hydrolase fold domain identified by PFam, accession name abhydrolase, E-value=1.1e-25, PFam score of 98.7
MRRTGSLNIARKTPIVMGMLLSMVMVFCNYVNVEWMIIGFMALAFFGKGIGALGWAVMADTAPKEISGLSGGLFNMFGNISGIVTPIAIGYIVGTTGSFNGALIYVGVHALIAVLSYLVLVGDIKRIELKPCSTGGDVIHRSWGRLVLIDLRSKADKAIWLGWSLGGLVASQIALTHPERVQALVTVASSPCFSARDEWPGIKPDVLAGFQQQLSDDFQRTVERFLALQTMGTETARQDARALKKTVLALPMPEVDVLNGGLEILKTVDLRQPLQNVSMPFLRLYGYLDGLVPRKVVPMLDKLWPHSESYIFAKAAHAPFISHPAEFCHLLVALKQK

SEQ ID NO: 46333 - protein, 146 aa, Homo sapiens
  DOMAIN (118)..(145): Mandelate racemase / muconate lactonizing enzyme family signa domain identified by eMATRIX, accession number BL00908A, p-value= 3.000e-12, raw score of 15.14
NLLRGNKMATQSSPVITDMKVIPVAGHDSMLLNIGGAHNAYFTRNIVVLTDNAGHTGIGETPGGDVIYQTLVDAIPMVLGQEVARLNKMVPQVHKGNQAADFDTFGKGAWTFELRVEAGAGLEARLLDLLGKALNVSGCELLGHGS

SEQ ID NO: 46334 - protein, 111 aa, Homo sapiens
  misc_feature (1)...(111): Xaa = X or * as defined in Table 2
GARQQQKFVLIAGGFPXQLLXTNAVIGREFRNVQECIGLHTAGFANAVTKHFGKCAIALHNMAFRIEDNHRSVEMVNGNNQLSGLFFLRHFYAGIPYQRQVINFPLGAHFR

SEQ ID NO: 46335 - protein, 58 aa, Homo sapiens
  misc_feature (1)...(58): Xaa = X or * as defined in Table 2
RVSTPRATGTVPQRDYPLSVVATGXPDSFHTYLFVRTYXKXVXVLAYLNTRQNDGDFP

SEQ ID NO: 46336 - protein, 528 aa, Homo sapiens
  DOMAIN (36)..(81): kw TRANSCRIPTASE REVERSE II ORF2 domain identified by eMATRIX, accession number DM01354N, p-value=1.000e-40, raw score of 13.17
  DOMAIN (219)..(368): Citrate synthase domain identified by PFam, accession name citrate_synt, E-value=8.3e-83, PFam score of 265.0
  misc_feature (1)...(528): Xaa = X or * as defined in Table 2
MQCEKAMLDVTEGYTKHIPNAFSSMKSYPSSHLEVIYKHLYANKLENLEEMDKFLDTYTLPRLNQEEVESLNRPITGAEIVAIINSLPTKKSPRPDGFTAEFYQRYKEELHINRTKDKNHMIISVDAEKAFDKIQQRFTLKTLNKLGIDGTYLKIDVELLLEGHALYNKNDPIDNFLKHTLPSDFTAPATLFSGDPLEWTADSSDRSLGSKGVFTFDPGFTSTASCESKITFIDGDEGILLHRGFPIDQLATDSNYLEVCYILLNGEKPTQEQYDEFKTTVTRHTMIHEQITRLFHAFRRDSHPMAVMCGITGALAAFYHDSLDVNNPRHREIAAFRLLSKMPTMAAMCYKYSIGQPFVYPRNDLSYAVSRHEVGMDVLTKLLNRRFLPTIFKREIAHANRTGTPLSVLIIDVDKFKEINDTWGHNTGDEILRKVSQAFYDNVRSSDYVFRYGGDEFIIVLTEASENETLRTAERIRSRVEKTKLKAANGEDIALSLSIGAAMFNGHPDYERLIQIADEALYIAKRRX

SEQ ID NO: 46337 - protein, 146 aa, Homo sapiens
  DOMAIN (1)..(146): Sodium:solute symporter family domain identified by PFam, accession name SSF, E-value=0.029, PFam score of -158.4
HASACATISMTWMILCLAVAVDCRFFGIAYFNDHPALAGAVNQNAERVFIELAQILFNPWIAGILLSAILAAVMSTLSCQLLVCSSAITEDLYKAFLRKHASQKELVWVGRVMVLVVALVAIALAANPENRVLGLVSYAWAGFGAA

SEQ ID NO: 46338 - protein, 188 aa, Homo sapiens
VQDKKFSADGQIDYQLDVMTAAVGWFGDTLLTNGAIYPQHAAPRGWLRLRLLNGCNARSLNFATSDNRPLYVIASDGGLLPEPVKVSELPVLMGERFEVLVEVNDNKPFDLVTLPVSQMGMAIAPFDKPHPVMRIQPIAISASGALPDTLSSLPALPSLEGLTVRKLQLSMDPMLDMMGMQMLMEKYG

SEQ ID NO: 46339 - protein, 354 aa, Homo sapiens
  DOMAIN (61)..(99): Bacterial regulatory proteins lacI family proteins. domain identified by eMATRIX, accession number BL00356B, p-value=1.000e- 17, raw score of 26.17
  DOMAIN (71)..(328): ABC transporter transmembrane region domain identified by PFam, accession name ABC_membrane, E-value=9.9e-36, PFam score of 132.1
LEGVQKKLTCHLVKTCHGFLKFLTVLDYNVQATSCQMEHVELAACSQEIFWLKSEISEGCKAFSNREKVEAAMAELNYIPNRVAQQLAGKQSLLIGVATSSLALHAPSQIVAAIKSRADHTGCQRGGVDDVQASELGSRQHLEFYLRHRTGDIMARATNDVDRVVFAAGEGVLTLVDSLVMGCAVLIMMSTQISWQLTLFSLLPMPVMAIMIKRNGDALHERFKLAQAAFSSLNDRTQESLTSIRMIKAFGLEDRQSALFAADAEDTGKKNMRVARIDARFDPTIYIAIGMANLLAIGGGSWMVVQGSLTLGQLTSFMMYLGLMIWPMLALAWMFNRLAGSECATSWTRREAQV

SEQ ID NO: 46340 - protein, 74 aa, Homo sapiens
  misc_feature (1)...(74): Xaa = X or * as defined in Table 2
LNNWIISWLLHMMCLMKVANCFRSXDRRELAVSAFFVLLXAMRLRRSSSGFLANLAHLQKMKLNSSTYVPPTKH

SEQ ID NO: 46341 - protein, 103 aa, Homo sapiens
  misc_feature (1)...(103): Xaa = X or * as defined in Table 2
RGVAISLGQSKSHGYIHFQVAQREPEILGDSIKAVRWCSLHGRLMXXXMXRDLKQWFSAPEAXVSLGTLCVIGQKAVGSLALMSWEPTPRPMGLLSTSRTLYS

SEQ ID NO: 46342 - protein, 121 aa, Homo sapiens
LPLWFISALRLAGIAVWCVLSTGFEQIRMIKAFGLEDRQSALFAADAEDTGKKNMRVARIDARFDPTIGWPSSLGLLFSNRTPWVPFPFFFQVPQLHTFIRGILIWKTFPFWIFPFPASSW

SEQ ID NO: 46343 - protein, 252 aa, Homo sapiens
  DOMAIN (1)..(206): 3' exoribonuclease family domain identified by PFam, accession name RNase_PH, E-value=1.8e-66, PFam score of 234.3
VRKFQYGQHTVTLETGMMARQATAAVMVSMDDTAVFVTVVGQKKAKPGQDFFPLTVNYQERTYAAGRIPGSFFRREGRPSEGETLIARLIDRPIRPLFPEGFVNEVQVIATVVSVNPQVNPDIVAMIGASAALSLSGIPFNGPIGAARVGYINDQYVLNPTQDELKESKLDLVVAGTEAAVLMVESEAQLLSEDQMLGAVVFGHEQQQVVIQNINELVKEAGKPRWDWQPEPVNEALNARVAALAEARLSDA

SEQ ID NO: 46344 - protein, 381 aa, Homo sapiens
  DOMAIN (27)..(50): ATP synthase a subunit proteins domain identified by eMATRIX, accession number BL00449C, p-value=8.875e-09, raw score of 13.17
  DOMAIN (25)..(240): 3' exoribonuclease family domain identified by PFam, accession name RNase_PH, E-value=5.8e-07, PFam score of 36.6
CLTIAVFFPAPQCPEMFSIPCHTARDGERAASMIQDYIFCFFSASFMKLKPERMHSHERAQTSDMLKDCRRHLPIGILMAGGMFAVLRKKHQGQTFIERPRISLTCMLPSWATFLWLFTRIGQVLVTCLLMSRECFVNEVQVIATVVSVNPQVNPDIVAMIGASAALSLSGIPFNGPIGAARVGYINDQYVLNPTQDELKESKLDLVVAGTEAAVLMVESEAQLLSEDQMLGAVVFGHEQQQVDSRGSPIKGNRTCDNYIVIEGLIDYVNDMIENVSEEAFCVENRIMRHSDHHSCIVVRCLSLFALDLVLVVIAVSVVNPCLLEVTRLRAASIVSQPNLNISDTWGIGAILYGAYTCSCIADPHKMMSSGPMYSHSCVEK

SEQ ID NO: 46345 - protein, 373 aa, Homo sapiens
LILFMSTALLDAVVKKNRVRLIPYMLALYVLAFLDRSNIGLAKQTYQIDTGLSNEAYALGAGIFFVVYAFLGVPANLLMRKLGARTWIGTTTLLWGFLSAAMAWADTEAKFLIVRTLLRAAEAGFFPGMIYLTSQWFPQRNRASIMGLFYMGAPLALTLGSPLSGALLEMHGFMGHPGWFWMFVIEGLLAVGAGVFTFFWLDDTPEQARFLSKQEKTLLINQLASEEQQKVTSRLSDALRNGRVWQLAIIYLTIQVAVYGLIFFLPTQVAALLGTKVGFTASVVTAIPWVAALFGTWLIPRYSDKSAAKRYTRPHRECGYFSAPYHPPKKVRNNAPHSGPGPICLIRLRVRVRPNLGIEVYKHDSPPNNAAPS

SEQ ID NO: 46346 - protein, 180 aa, Homo sapiens
  DOMAIN (77)..(101): Bacterial extracellular solute-binding proteins family 5 sig. domain identified by eMATRIX, accession number BL01040A, p-value= 9.870e-09, raw score of 17.12
  DOMAIN (87)..(120): Bacterial extracellular solute-binding prot domain identified by PFam, accession name SBP_bac_5, E-value=4.6e-07, PFam score of 28.1
FARNVGPVPRHPAGITIVADVISQRSTAIIYFHTGATVPGIALHTSWPILLPFYVKIQDSGIQGILLSDLPHLLNCFFVSKALIPFLRDDVKFSNGDPFDAEAAAENFRAVLDNRQRHAWLERGLFQAVEVDVQVGIDAIGGSGHCDAMDQEHEQHEVRQRGCDPHHLCALPFPHQSCVH

SEQ ID NO: 46347 - protein, 466 aa, Homo sapiens
  DOMAIN (151)..(171): DELTA-AMINOLEVULINIC ACID DEHYDRATASE SIGNATURE domain identified by eMATRIX, accession number PR00144B, p-value=9.757e- 20, raw score of 11.15
  DOMAIN (170)..(401): Bacterial extracellular solute-binding prot domain identified by PFam, accession name SBP_bac_5, E-value=7.7e-102, PFam score of 351.7
  misc_feature (1)...(466): Xaa = X or * as defined in Table 2
MTDLIQRPRRLRKSPALRAMFEETTLSLNDLVLPIFVEEEIDDYKAVEAMPGVMRIPEKHLAREIERIANAGIRSVMTFGISHHTDETGSDAWREDGLVARMSRICKQTVPEMIVMSDTCFCEYTSHGHCGVLCEHGVDNDATLENLGKQAVVAAAAGADFIAPSGAMDGQYDVFVRNENYWGEKPAIKKITFNVIPDPTTRAVAFETGDIDLLYGNEGLLPLDTFARFSQNPAYHTQLSQPIETVMLALNTAKAPTNELAVREALNYAVNKKSLIDNALYGTQQVADTLFAPSVPYANLGLKPSQYDPQKAKALLEKAGWTLPAGKDIREKNGQPLRIELSFIGTDALSKSMAEIIQADMRQIGADVSLIGEEESSIYARQRDGRFGMIFHRTWGAPYDQRPSQSKRVRQRXFQAQQDXMKKPTQSKWNRATRVRGGREILTKFVLTAPLKWLKRSNSRRVSFAG

SEQ ID NO: 46348 - protein, 277 aa, Homo sapiens
  DOMAIN (86)..(110): Bacterial extracellular solute-binding proteins family 5 sig. domain identified by eMATRIX, accession number BL01040A, p-value= 7.300e-22, raw score of 17.12
  DOMAIN (13)..(277): Bacterial extracellular solute-binding prot domain identified by PFam, accession name SBP_bac_5, E-value=2.4e-93, PFam score of 323.5
IPIGVTPCFSTLRRTLFALLACASFIVHAAAPDEITTAWPVNVGPLNPHLYTLNQMFAQSMVYEPLVKYQADGSVIPWLAKSWTHSEDGKTWTFTLRDDVKFSNGEPVDAEAAAENFRAVLDNRQRHAWLELANQIVDVKALSKTELQITLKSAYYPFLQELALPRPFRFIAPSQFKNHETMNGIKAPIGTQPWNLQESKLNQYHGFGRNENYWGEKPAIKKITFNVIPDPTTRAVAFETGDIDLLYGNQRLLPLDTFARFSQNPVYHTQLSQIWNQ

SEQ ID NO: 46349 - protein, 357 aa, Homo sapiens
  DOMAIN (184)..(227): Ribosomal protein S4 proteins domain identified by eMATRIX, accession number BL00632, p-value=7.840e-09, raw score of 23.79
  DOMAIN (187)..(233): S4 domain identified by PFam, accession name S4, E-value=9.2e -14, PFam score of 59.1
MVQVIRKDAPTPRTREPSLSDKGICPKPQEALKFFCEVDEEAICVVCREFRSHKQHSVVPLEEVVQEYKELLESRLRVLKKELEDCEVFRSTEKKESKELLRILLTNAHPHNLAVKLEHTGLDAHLDLLLSTHTFGYPKEDQRLWHAVAEATGLKAERTLFIDDSEAILDAAAQFGDAMKEKPAVEVRLDKWLWAARFYKTRALAREMIEGGKVHYNGQRSKPSKIVELNATLTLRQGNDERTVIVKAITEQRRPASTDRNRKPQYLEIIDIWDLSTSSVKIDVLVDRNARLISVLLKFGVHTVEIQAQSTGIIFQSRHPFMHPVTSPGTCRPSLNCLTGSPGTELECINSRVITGY

SEQ ID NO: 46350 - protein, 162 aa, Homo sapiens
  DOMAIN (28)..(71): Ribosomal protein S4 proteins domain identified by eMATRIX, accession number BL00632, p-value=7.840e-09, raw score of 23.79
  DOMAIN (31)..(78): S4 domain identified by PFam, accession name S4, E-value=3e- 10, PFam score of 47.5
RPARDVPLPIRGLQPSLRGPQQLPEKPAVEVRLDKWLWAARFYKTRALAREMIEGGKVHYNGQRSKPSKIVELNATLTLRQGNDERTVIVKAITEQRRPASEAALLYEETAESVEKREKMSPRGPPFVGAPKNPRGFLKLNALTMPHPDRRPDKKERRDLLR

SEQ ID NO: 46351 - protein, 107 aa, Homo sapiens
  misc_feature (1)...(107): Xaa = X or * as defined in Table 2
ASHTLARKSCXSPSLLYQENQAHNQMPASELKASEIPFHPSIKTQDPKAEEKSPRSKRXLXQRQVLPDPAADLSVKPPGPLMLPLCYLSGPADITVLKASQDGLIIA

SEQ ID NO: 46352 - protein, 703 aa, Homo sapiens
  DOMAIN (622)..(653): Protein kinases ATP-binding region proteins domain identified by eMATRIX, accession number BL00107A, p-value=6.586e-11, raw score of 18.39
  DOMAIN (507)..(674): Eukaryotic protein kinase domain identified by PFam, accession name pkinase, E-value=3.5e-27, PFam score of 101.9
MNTPLQSAHTHLTLVEFIAYLVSDSPFPAASTLSLPTCNFDPCPTKLGAGTMPPAAAGGQRRPHAAPPAAYPHRNKVRAAEARTSRAVRREYEAGDEASGRRGRGGRMKSVQNARADRGMWVRERRAVVRGQENTVVVFAAAASPESDFLQIVLRDIAREMVPEYKSDLQPRTQMDAKKPRKCDLTPFLVLKARKKQKFTSAKHLWVQRKGKGVEDHADWQGQIWVGVEGKSAEGQGLNLTGAFNRSPENKVSPQGPALNALEIDSSYLDPQALALPQGWQGLLFPPLLGTELVGSKLSVQIQKPPSNIKNSRMTQVFHKNTSVTSLPFVDTKGKKNTVSFPHISKKVLLKSSLLYQVSADGLDPEKAGERPGFSPKPVLERPRIVGKSTVAAEEENQAHNQMPASELKASEIPFHPSIKTQDPKAEEKSPKKQKVTLTAAEALKLFKNQLSPYEQSEILGYPELWFLGLEAKKLDTAPEKFSKTSFDDEHGFYLKVLHDHIAYRYEVLETIGKGSFGQVAKCLDHKNNELVALKIIRNKKRFHQQALMELKILEALRKKDKDNTYNVVHMKDFFYFRNHFCITFELLGINLYELMKNNNFQGFSLSIVRRFTLSVLKCLQMLSVEKIIHCDLKPENIVLYQKGQASVKVIDFGSSCYEHQKGHLPSRLRSAVTTTSMILNKVLRFSEPKLPHLQFEKVVSKY

SEQ ID NO: 46353 - protein, 432 aa, Homo sapiens
  DOMAIN (227)..(271): 3 THREONINE--TRNA LIGASE domain identified by eMATRIX, accession number DM01242A, p-value=1.000e-40, raw score of 20.32
GYKMPVITLPDGSQRHYDHAVSPMDVALDIGPGLAKKPLVIRQGAAGLMAKLVDACDLIENDAQLSIITAKDEEGLEIIRHSCAHLLGHAIKQLWPHTKMAIGPVIDNGFYYDVDLDRTLTQEDVEALEKRMHELAEKNYDVIKKKVSWHEARETFANRGESYTVSIVEENSADDDKPGLYFHEEYVDMCRGPHVPNMRFCHHFKLMKTAGAYWRGDSNNKMLQRIYGTAWPDKKALNAYLQRLEEAAKRDHRKIGKQLDLYHMQEEAPGMVFWHNDGWTIFRELEVFVRSKLKEYQYQEVKGPFMMDRVLWEKTGHWDNYKDAMFTTSSENREYCIKPMNCPGHVQIFNQGLKSYRDLPLRMAEFGSCHRNEPSGSLHGLMRVRGFTQDDAHIFCTEEQIRDEVNGCIRLVYDMYSTFGFEKIVVKLSTRP

SEQ ID NO: 46354 - protein, 27 aa, Homo sapiens
SSNRVQPNQRGRDKRQLPERMIEFFVG

SEQ ID NO: 46355 - protein, 446 aa, Homo sapiens
MASSWVNPRTRIRPCSELTARYGGSYQTRPYAAAIAIRLQPLVENLYVTRQFIGLMQYSRFSEDVVTLHLCSCPSDRFFPTGQVHHERTFNFLILVLFQLERTNTSSSRKMVQPSCARIPYPALLPAYGTGRLFTDFTVVAFRGFFQACSKLMIRFSSASTSSWVNVRSNQRRNKNRCHNRADCHLGPTKCLSTNNAFVGLMASLAKVSEPAGEGYSHPVCGFAAVLEWLLRLQLVLPVRRPMRLTCQPAQVVKQVSRCLRNNPVAQDEVSGNCRWFYRSVQAVPCLGVIAAGVEITNAHGQPIRAASALYKGPVLLFLPMVSNCTYARGSIIFKMLSAGCLSRSSDQGVTRRKINPVGLVLTPGCLHTANRWLETSGMRVGNHFRSAVLPYLRRLIAAFQPPMPLDYPASTGHDRSSCRRASRATHDWDRQLWFRIVAAMYHLKP

SEQ ID NO: 46356 - protein, 97 aa, Homo sapiens; identical to SEQ ID NO: 31615

SEQ ID NO: 46357 - protein, 20 aa, Homo sapiens
HIYFNDSTFGNNTQSCIQWG

SEQ ID NO: 46358 - protein, 199 aa, Homo sapiens
  DOMAIN (88)..(120): GTP-binding elongation factors proteins domain identified by eMATRIX, accession number BL00301B, p-value=3.793e-22, raw score of 20.09
  DOMAIN (16)..(157): Elongation factor Tu family domain identified by PFam, accession name GTP_EFTU, E-value=7.8e-70, PFam score of 238.0
EMISNPFIPSSILPLAKIRNIGIMAHIDAGKTTTTERILYYSGYTRSLGDVDDGDTVTDFMAQERERGITIQSAAATFEWKGYRVNLIDTPGHVDFTLEVERCLRVLDGAVAVFDASAGVEAQTLTVWRQADKHNIPRIVFLNKMDKTGASFKYEVITISSLQKSGITKLCFFCVLKLVSQERCQASKCNKIEGQRFNQ

SEQ ID NO: 46359 - protein, 967 aa, Homo sapiens
  DOMAIN (737)..(772): Phosphoenolpyruvate carboxylase proteins 1 domain identified by eMATRIX, accession number BL00781L, p-value=3.189e-29, raw score of 15.19
  DOMAIN (713)..(805): Phosphoenolpyruvate carboxylase domain identified by PFam, accession name PEPcase, E-value=3.4e-06, PFam score of 21.2
MPQNNAAGEIDNDVGLPCVTNKKVPTSDVKIAQKTRMPGRDLRTSENQATIIVANFAEERGKTAIRAIKAGLPRSGTVQHAQKLNGEVEKVLLRLGFTLTDVPDSHLCCGSAGTYALTHPDLARQLRDNKMNALESGKPEMIVTANIGCQTHLASAGRTSNKPLKRNNKMKTKVILSQQMASAIIAAGQEEAQKNNWSVSIAVADDGGHLLALSRMDDCAPIAAYISQEKARTAALGRRETKGYEEMVNNGRTAFVTAPLLTSLEGGVPVVVDGQIIGAVGVSGLTGAQDAQIFAERISGRSVWRTLRGLGAHSVLRLESGFRGQDRTLGQPPAEKNPHDYRHTTSNHHPGTPAVMQRSRCHHNGNECAADVMRRRTVPYCCGNRIGDSSTERIHRVHQHHGSNRFRQSWPQTMYGQKISFVVRFGLQATFISFVTISIVLTLAKSATAVNNHPRTGCIRRQTAHDTDRQHQQDTQLFHWYARNTFTDGQNNRQHGCGVRRQAGKQVVCKVEHQNQYNHRCVCFGANQVVKSTQRGFGTFASGDDDLLVRNRRTVTRCEHAFHVGFAFRINDNLAHAVTFDCAFEPVGVRQQTNLDENTGQFDVVNIAADTISIFQTNDFAAVAFHFRGLRIQNNVDVFQAAQFVLQNLVGFHFWRKFQQRYVLNDTRQRPVAVRAVGHAFGAILIFARNVHVAPFCTGRHDNAACFQYHKALWPLGKELRNLQEEDIKVVLAIANDSHLMADLPWIAESIQLRNIYTDPLNVLQAELLHRSRQAEKEGQEPDPRVEQALMVTIAGIAAEVQAKPLFSWKALGWALLYFWFFSTLLQAIIYISGYSGTNGIRDSLLFSSLWLIPVFLFPKRIKIIAAVIGVVLWAASLAALCYYVIYGQEFSQSVLFVMFETNTNEASEYLSQYFSLKIVLIASGLYGGGSSAVDTPAPGLYSKAVALCCLFCPALWLDSASDRHEY

SEQ ID NO: 46360 - protein, 182 aa, Homo sapiens
FWLKAMPTIVTASPRWFSCLREIRSAASAIASTAIQQAIARPSTVIATTLLSNSHGNSSDSTSVEMKAIINKLRILRGRSRPQRTRGPTPSSSANGTISQVNMVLKNGSPIEILPSPSCLCTNGSSVPSNTTSIAATSKTLFANSKDSRDHSALFTRERTLCPRAANSSSEPANHQHHKGED

SEQ ID NO: 46361 - protein, 117 aa, Homo sapiens
  misc_feature (1)...(117): Xaa = X or * as defined in Table 2
XIRIGDVVFDVVKPCSRCIFTTVSPEKGQKHPAGEPLKTLQSFRTAQDNGDVDFGQNLIARNSGVIRVGDEVEILATAPAKIYGAAAADDTANITQQPDANVDIDWQGQAFRGNNQQ

SEQ ID NO: 46362 - protein, 62 aa, Homo sapiens
AGGCHCWRIRGNHYCCSNAGQCGWTRRSALLRLSGCGRRLDRLRWAHWYRHSPRSPIYRQRV

SEQ ID NO: 46363 - protein, 728 aa, Homo sapiens
MKPAGILAEREMRPAGKSANAPKNIRRLCVSGWKSANWMRPGKMHDRVGGIRCLRRIRHGKRVLCYQSGASKCWPDFFLREDYDAQNAAGGSTFSDEFSCLQPLCKLTTLNMQRIILIIIGWLAVVLGTLGVVLPVLPTTPFILLAAWCFARSSPRFHAWLLYRSWFGSYLRFWQKHHAMPRGVKPRAILLILLTFAISLWFVQMPWVRIMLLLSPLFPDAEETLIGSSACRCRVISGAIGAVVSSAVFWRYVGTAPSRVAFAWNLSSSWRFGCGFELARGDVLVQAATLEGAEIYDDVSLEDAPYFSALYGPSRHAIVVPDLSQVTEHLEGLTDCPEDLYLIEGDPQSFDDSVFSVDELEKAVVVKIADRQWRYSRFPEVPLFGRAARESRIESLHAEREVLSERFATLSFDVQKTQRLHQAFSRFIGSHLAVAFESDPEAEIRQLNSRRVELERALSNHENDNQQQRIQFEQAKEGVTALNRILPRLNLLADDSLADRVDEIRERLDEAQEAARFVQQFGNQLAKLEPIVSVLQSDPEQFEQLKEDYAYYLRPGRIGEVSVIGLVFLIFAIISGGWVAESPTWAPYFDFTGAGYPDIFTAEIHYFTSRESSFHQRYRAFLPPFAPQEINCSGKGWVWLCGKRDFSADAALVGKERSDLCHVTNFNRRRSMILSVIGDQQNISRVRHHRFHHVSFVYIKLHQRAIALNRPNACYQIISTKISHKGRR

SEQ ID NO: 46364 - protein, 1513 aa, Homo sapiens
  DOMAIN (296)..(331): Carbamoyl-phosphate synthase subdomain proteins domain identified by eMATRIX, accession number BL00866C, p-value=5.500e- 25, raw score of 23.26
  DOMAIN (235)..(382): Carbamoyl-phosphate synthase (CPSase) domain identified by PFam, accession name CPSase_L_chain, E-value=4.5e-80, PFam score of 279.4
MLWHRTFLRKPSSIDLGKQHQSHVTNLNNLIKGTAFEGKSLEEIIRSSEGGVFNNAAQVWNHTFYWNCLAPNAGGEPTGKVAEAIAASFGSFADFKAQFTDAAIKNFGSGWTWLVKNSDGKLAIFSTANAAAKCVFFIRRVIQFLCNVQQLLPFFRLIKPRFCQHIFAIPDPANPGADRNTGPCAPILGTHNTQYAIVKRAFTNVADDCGNRFAIDKLLFVHHFGVVMAATCSPISHFERDCSMQRRHQKVVEEAPAPGITPELRRYIGERCAKACVDIGYRGAGTFEFLFENGEFYFIEMNTRIQVEHPVTEMITGVDLIKEQLRIAAGQPLSIKQEEVHVRGHAVECRINAEDPNTFLPSPGKITRFHAPGGFGVRWESHIYAGYTVPPYYDSMIGKLICYGENRDVAIARMKNALQELIIDGIKTNVDLQIRIMNDENFQHELCRQAIFVQIRLFIHPVKSMRGIGLTHALADVSGLAFDRIFMITEPDGTFITARQFPQMMAVAHMFVLADFGHTRRTNRSLGHNILPARIAPDAINKWLSGFFSREVQLRWVGPQMTRRVKRHNTVPLSFADGYPYLLANEASLRDLQQRCPASVKMEQFRPNLVVSGASAWEEDRWKVIRIGDVVFDVVKPCSRCIFTTVSPERSAKTSDNGGGEGEARAANTGATHRGRHRSPSAVRYRDRLNMYVLRRMDLLYRVKTLWAALRGNHYTWPAIDITLPGNRHFHLIGSIHMGSHDMAPLPTRLLKKLKNADALIVEADVSTSDTPFANLPACEALEERISEEQLQNLQHISQEMGISPSLFSTQPLWQIAMVLQATQAQKLGLRAEYGIDYQLLQAAKQQHKPVIELEGAENQIAMLLQLPDKGLALLDDTLTHWHTNARLLQQMMSWWLECEGGERERIFPVSKRMGKKLDAVFGDNHTASLTETEEYRKSQVHFCICDKRERSSGNYQSIQGCRSAAFFIPSNSTRTKRGESMYRMDKLTTGAAYGASAGSILNGMLNAYSPEQWNAIGVLTTAAAGAEMNPTLRNKLVGAIVGGSGAITIAAVMLGNADGLEGRRYYAYQDVVGVWTVCDGHTGTDIRRGHRYTDKECDNLLKADLRKAIIYISGYSGTNGIRDSLLFSSLWLIPVFLFPKRIKIIAAVIGVAFSRFIASHLAVAFESDPEAEIRQLNSRRVELERALSNHENDNQQQRIQFEQAKEGVTALNRILPRLNLLADDSLADRVDEIRERLDEAQEAARFVQQFGNQLAKLEPIVSVLQSDPEQFEQLKEDYAYSQQMQRDARQPGVCPDGSGAASYSDSAEMLSGNSDLNEKLRERLEQAEAERTRAREALRGHAAQLSQYNQVLASLKSSYDTKKELLNDLQRELQDIGVRADSGAEERARIRRDELHAQLSNNRSRRNQLEKALTFCEAEMDNLTRKLRKLERDYFEMREQVVTAKAGWCAVMRMVKRYGVERRLHRRELAYLFADDLRFMSDKAVSALRLAGRDTNIAPSAWHVGRFEDVAL

SEQ ID NO: 46365 - protein, 107 aa, Homo sapiens
QCAHRHPRHRHPGCCRHRLGYAGTAGPLAGYRPFRQHRQSLWRAASAICVDAISMRTRSRSTVRPLWPPPSPARFATWSHYRLRDHGDHTRPVDLPTTALRCYGKRH

SEQ ID NO: 46366 - protein, 122 aa, Homo sapiens
RLFIGYGFNPDAHFFTEVRYKGTKTVAVTPDYAEIAKLCDLWLAPKQGTDAAMALAMGHVMLREFHLDNPSQYFTDYVRRYTDMPMLVMLEERDGYYAAGRMLRAADLVDALFPDPDEMTVS

SEQ ID NO: 46367 - protein, 403 aa, Homo sapiens
  DOMAIN (127)..(143): Putative AMP-binding domain proteins domain identified by eMATRIX, accession number BL00455, p-value=8.500e-11, raw score of 13.31
  DOMAIN (48)..(388): AMP-binding enzyme domain identified by PFam, accession name AMP-binding, E-value=3e-05, PFam score of -182.2
  misc_feature (1)...(403): Xaa = X or * as defined in Table 2
SGARRLAGXKPGNAVSAAPFYPYARPVSMISPMLIPCXCWKCDPAAKRQFRERTAVRCVAQFVDVGKLIPFWGLCVGIYATNSAETFLHRVVQLLNDSVEHTLQDAITIRDEDFTATPSPADEVAYIQLSGGTTGTPKLIPRTHNDYYYSVRRSVEICQFTQQTRYLCAIPAAHNYAMSSPGSLGVFLAGGTVVLAADPSATLCFPLIEKHQVNVTALVPPAVSLWLQALIEGESRAQLASLKLLQVGGARLSATLAARIPAEIGCQLQQVFGMAEGLVNYTRLDDSAEKIIHTQGYPMCPDDEVWVADAEGNPLPQGEVGRLMTRGPYTFRGYYKRSSVLGKGSDCSFGVFLPGLLPSASSVRRDSNVSIRNVVSLINSSRWKSGFTWHDNVLQLDGSFPLT

SEQ ID NO: 46368 - protein, 359 aa, Homo sapiens
  DOMAIN (2)..(18): Prokaryotic molybdopterin oxidoreductases proteins domain identified by eMATRIX, accession number BL00551A, p-value=9.379e- 11, raw score of 17.41
YPMMRKRLMKLWREAKALHSDPFEPWASIIEDADKAKSSKQARGRGGFVRSSWQEVNELIAASNVYTIKNYGPDRVAGFSPIPAMSMVSYASGARYLSLIGGTCLSFYDWYCDLPPASPQTWGEQTDVPESADWYNSSYIIAWGSNVPQTRTPDAHFFTEVRYKGTKTVAVTPDYAEIAKLCDLWLAPKQGTDAAMALAMGHPPERESGRYRLIPVPASGYPPDPAPEWDQFPHVHELCDTANGCPLPELASPAGYTSSINRVSTCVSTLAKSSYRSRVRVKRLRRRFNGGVHFRRVVAVVIDQHCRTAFTIHWLQREFTEEIKTATSPLEAFKRPQNSLVVNALFRSNRNAAAAFSAL

SEQ ID NO: 46369 - protein, 70 aa, Homo sapiens
VSFMIIAALMMMGIDTGWLLVAAGFVGAIVIASARPGRNSKRLIALISAIGMSIFLQNYVSLTEGSRDVA

SEQ ID NO: 46370 - protein, 156 aa, Homo sapiens
CLDHLRAVQSLRLPLSVPAAMRPGAAIGYTMVYGIIGMINFAHGEVYMIGSYVSFMIIAALMMMGIDTGWLLVAAGFVGAIVIASAYGWSIERVAYRPVRNSKRLIALISAIGMSIFLQNYVSLTEGSRGLATEMFLEKGDNGTEDGRAREISEII

SEQ ID NO: 46371 - protein, 1101 aa, Homo sapiens
  DOMAIN (110)..(137): PEP-utilizing enzymes phosphorylation site proteins proteins domain identified by eMATRIX, accession number BL00370B, p-value= 5.605e-20, raw score of 18.75
  DOMAIN (89)..(221): PEP-utilizing enzymes domain identified by PFam, accession name PEP-utilizers, E-value=7.4e-57, PFam score of 199.3
MTHPNWTHVTPVTIIPTGKRPDAGVSAGLSCAEAIVASANHFCEEFSRSSSSYLQERALDVRDVCFQLLQQIYGEQRFPAPGKLTQPAICMADELTPSQFLELDKNHLKGLLLKSGGTTSHTVILARSFNIPTLVGVDIDALTPWQQQTIYIDGNAGAIVVEPGEAVARYYQQEARVQDALREQQRVWLTQQARTADGIRIEIAANIAHSVEAQAAFGNGFHDLVRVFYHVSGWSALSISFPKSGGLVVATDTTPGFQAPEPAWPPFISGLNSRSAVPGSDGNHHHLKFTAPVLCRRNRISAHLADFKCYQWNLLPLKVVKPWNSPCARRKAHINSLSCPRDKVSSTGAPSARMRKPDLQEGIRAVPREDPQWNYQANSPVHSLPAELRFPRQSEAIKPYIIGNSRTADQGTNIQTPAQMAKYHQFSGCINCGLCYAACPQFGLNPEFIGPAAITLAHRYNEDSRDHGKKERMAQLNSQNGVWSCTFVVDEFGSVEGIVTLSDVTETIADWCFHNLQVMVVIEQLTQLFHSIVQFFRIGKNRLRITFVQRMNKAQQYLLHHVLGKSSPYPPQKADREDFFQVAVRTRDNVYRYQLADTLCRCGTCIGRGFTGCNITTNHGSTQAAANLLNTNQLDARSFHHRRQLDNFLHATTTREIVHRRGKSLYQWPDGTISAESLCDFVTNISGFQRLDNVAAKAANLIRRDRPLTREELFRVVPSVFSEDKHESRSERYTYIPTISCSTAYSEKLPPFFACQTRVLTDLTLLFVLLTSLLVQLDTRREKRKEQKSQPGPANYISLTEGSRDVALPSLFNGQWVVGHSENFSASMTTMQAVIWIVTFLAMLALTIFIRYSRMGRACRACAEDLKMASLLGINTDRVIALTFVIGAAMAAVAGVLLGQFYGVINPYIGFMAGMKAFTAAVLGGIGSIPGAMIGGLILGIAEALSSAYLSTEYKDVVSFALLILVLLVMPTGRESMKPMHIAMALLSAAMFFVLAGVFMGVQLELDGTKLVVDTASDVRWQWVFIGTAVVFFFQLLRPAFQKGLKSVSGPKFILPAIDGSTVKQKLFLVALLVLAVAWRLWFTREVDLHLTMIYLSSVSG

SEQ ID NO: 46372 - protein, 1689 aa, Homo sapiens
  DOMAIN (113)..(129): LEU/ILE/VAL-BINDING PROTEIN FAMILY SIGNATURE domain identified by eMATRIX, accession number PR00337G, p-value=2.607e- 18, raw score of 12.20
  DOMAIN (405)..(833): Sulfatase domain identified by PFam, accession name Sulfatase, E-value=1.5e-105, PFam score of 364.1
ISFAVLIFILLITRYAKGFMSNVAVLLGIVFGFLLSWMMNEVNLSGLHDASWFAIVTPMSFGSGKPGIVDALKADKKDPSGPYVWITYAAVQSLATALERTGSDEPLALVKDLKANGANTVIGPLNWDEKGDLKGFDFGVFQWHADGSSTAANTYALIAIGYTMVYGIIGMINFAHGEVYMIGSYVSFMIIAALMMMGIDTGWLLVAAGFVGAIVIASAYGWSIERVAYRPVRNSKRLIALISAIAINPRNPHMRIEEDLKLGFKDVLIRPKRSTLKSRSDVELERQFTFKHSGQSWSGVPIIAANMDTVGTFSMASALASFDILTAVHKHYSVEEWQAFINNSSADVLKHVMVSTGTSDADFEKTKQILDLNPALNFVCIDVANGYSEHFVQFVAKAREAWPTKTIVLATNMVGCYSGKPLNTQNIDSLAAEGIRFNSAYTCSPVCTPARAGLFTGIYANQSGPWTNNVAPGKNISTMGRYFKDAGYHTCYIGKWHLDGHDYFGTGECPPEWDADYWFDGANYLSELTEKEISLWRNGLNSVEDLQANHIDETFTWAHRISNRAVDFLQQPARADEPFLMVVSYDEPHHPFTCPVEYLEKYADFYYELGEKAQDDLANKPEHHRLWAQAMPSPVGDDGLYHHPLYFACNDFVDDQIGRVINALTPEQRENTWVIYTSDHGEMMGAHKLISKGAAMYDDITRIPLIIRSPQGERRQVDTPVSHIDLLPTMMALADIEKPEILPGENILAVKEPRGVMVEFNRYEIEHDSFGGFIPVQLNKQPLAEEYDIYWYAGEDDVSKSYACLTPELVAQFGLKEDVAKNLQWSHDGKCLKPGQLEGVEIKADLSQSALVISLPQAYLEYTWPDWDPPSRWDDGISGIIADYSITAQTRHEENGGDDSNEISGNGTVGVNLGPWRMRADWQTNYQHTRSNDDDDEFGGDDTQKKWEWSRYYAIYGTSHLKARLPGAYQRTDIRMVQRLMIGQRYTFFRLYATHLQRGKKARRMPNPRHRHYMFKLSNVTTRTGCCARMAFTASERTGEMFIGFDYGTANCSVAVMRDGKPHLLKMENDSTLLPSMLCAPTREAVSEWLYRHHDVPADDDETQALLRRAIRYNREEDIDVTAKSVQFGLSSLAQYIDDPEEVWFVKSPKSFLGASGLKPQQVALFEDLVCAMMLHIRQQAQAQLPEAITQAVIGRPINFQGLGGDEANTQAQGILERAAKRAGFTDVVFQYEPVAAGLDYEATLHEEKRVLVVDIGGGTTDCSLLLMGPQWRSRLDREASLLGHSGCRIGGNDLDIALAFKNLMPLLGMGGETEKGIALPILPWWNAVAINDVPAQSDFYSSANGRLLNDLVRDAREPEKVALLQKVWRQRLSYRLVRSAEECKIALSSVAETRASLPFISNELATLISQRGLESALSQPLTRILEQAQLAWITPRKNRTYLPDRRFNDNCEGVSFQRSTTNRRAVDIRLSKQFCSVRRVYRAAVLNDHLFSDVSVNFSDVVTDEFVNSLCLSRSCRFASTDCPYRFVSDNRTFECRSTLSFQYRVDLTCANFFSFARFIFSFGFTDAQNRSQALLFQHREFFRDQFVRFFVVSTTFRVTDDDVLCADVFQHSSRGFTGECAGQVQVHVLRTQHDVAAFSFALRHIDIHFRWCDCNRTASNTCQLFTQVRNQLVNHVAAAVQFPVTHH

SEQ ID NO: 46373 - protein, 126 aa, Homo sapiens
QMFNGVTLGSTYALIAIGYTMVYGIIGMINFAHGRVYMIGSYVSFMIIAALMMMGIDTGWLLVAAGFVGAIVIASAYGWSIERVAYRPAVIWIVTFLAMLALTIFIRYSRMGRACRACAEDLKMAS

SEQ ID NO: 46374 - protein, 105 aa, Homo sapiens
  DOMAIN (7)..(23): Bacterial-type phytoene dehydrogenase proteins domain identified by eMATRIX, accession number BL00982E, p-value=6.108e- 09, raw score of 9.88
  misc_feature (1)...(105): Xaa = X or * as defined in Table 2
IPVSISGCHLAGAGTQTASGVPVHPHGHLAHQRQSFIGNTKTECWPISSVPPHHWXAXXTDIGAGSGDDQRVLDVWWNWRTKEXPXWWXPTNGLCRKVANRQAAR

SEQ ID NO: 46375 - protein, 92 aa, Homo sapiens
MRHFPGRATSGLAGSPLIQNRFSAHVSLAGQRQLLDTLRLRQASMESNNLTMVFGSALGSLAASALYRDRGIKLRNDIDCGLSIAAIESVIK

SEQ ID NO: 46376 - protein, 90 aa, Homo sapiens
MFTVQGAALSRSVKLCCNCCCRLCWGIFPGRGLVTGCRAIKNGLRKLTRRPFCWWFIQRSAKPSLMVSGIKLAGDHCCLSWWSAAFFWLS

SEQ ID NO: 46377 - protein, 535 aa, Homo sapiens
  DOMAIN (79)..(99): w LOW TRANSPOSASE SAPA 12K domain identified by eMATRIX, accession number DM00475B, p-value=1.300e-15, raw score of 12.12
  DOMAIN (12)..(105): Transposase domain identified by PFam, accession name Transposase_8, E-value=3.2e-38, PFam score of 140.4
MIDVLGPEKRRRRTTQEKIAIVQQSFEPGMTVSLVARQHGVAASQLFLWRKQYQEGSLTAVAAGEQVVPASELAAAMKQIKELQRLLGKKTMENELLKEAVEYGRAKKWIAHAPLLPGDGERTDDWMDGRRSRHTDDTDVLLRIHHVIGELPTYGYRRVWALLRRQAELDGMPAINAKRVYRIMRQNALLLERKPAVPPSKRAHTGRVAVKESNQRWCSDGFEFCCDNGERLRVTFALDCCDREALHWAVTTGGFNSETVQDVMLGAVERRFGNDLPSSPVEWLTDNGSCYRANETRQFARMLGLEPKNTAVRSPESNGIAESFVKTIKRDYISIMPKPDGLTAAKNLAEAFEHYNEWHPHRLTPPELWPRHHGHGPAGVKLVEQLCQRLRVPNEIRDLARLVAEFHDLIHTFPMLNPKTIVKLFDSIDAWRKPQRVEQLALTSEADVRGRTGFESADYPQGRWLRERWEVAQSVPTKAVVEAGFKGVEIREELTRRRIAAVAAGRNNVAQSLNEYWAFCRMRRKRFIRPTFVLP

SEQ ID NO: 46378 - protein, 111 aa, Homo sapiens
  misc_feature (1)...(111): Xaa = X or * as defined in Table 2
SADSKPVLPRTSASLVSASCSTRCGLRQASMESNNLTMVFGFSIGKVWMRSXNSATSLAKSRISFGTRRRWHSCSTNSNTRRAMTMMTRPEFWRRQPCGLSIAAIESVIKV

SEQ ID NO: 46379 - protein, 272 aa, Homo sapiens
  DOMAIN (92)..(189): HD domain identified by PFam, accession name HD, E-value=1.9e -16, PFam score of 68.1
MEHGSARVLLAEIGQQTSSSCHKHKSQPPRVPALHFATAKRINARPHVRVTAVAIPLLFVPSWLSLTLMFRSFLGICSVPVDPGTCMPLFPIRASVPMSRLLSPQLDVRFATLCHDLGKGLTPPELWPRHHGHGPAGVKLVEQLCQRLRVPNEIRDLARLVAEFHDLIHTFPMLNPKTIVKLFDSIDAWRKPQRVEQLALTSEADVRGRTGFESADYPQGRWLREAWEVAQSVPTKAVVEAGFKGVEIREELTRRRIAAVASWKEQRCPKPE

SEQ ID NO: 46380 - protein, 147 aa, Homo sapiens
  misc_feature (1)...(147): Xaa = X or * as defined in Table 2
PAFIECSKAQENNHKGNCYQSGSLVSRXAFLIRHTRPVITNARRXFXRKVFHQRHGIAGTGSWRGFPLNLHXRQTVVAFQSRRAIHPMXSGKGREWHHFAVGAADIKFIDIFWQHTEFGIRLNTRRAMTMMTRPEFWRRQPFTEIVA

SEQ ID NO: 46381 - protein, 112 aa, Homo sapiens
KRYGMAASFHSGEITTHRTPAPWRMVVMSPARSMAHDLAQTAWRGAPRPLPDTLATMTPQAYNSIQYDAEKSLWHNVENRQLDAQFFHMGMGFRRRTLWAGITNAQVCGWTA

SEQ ID NO: 46382 - protein, 800 aa, Homo sapiens
  DOMAIN (685)..(726): SYNTHETASE BETA CHAIN LIGASE PHENYLALANYL-TRNA domain identified by eMATRIX, accession number PD02410B, p-value=1.947e- 39, raw score of 25.05
  DOMAIN (20)..(123): HD domain identified by PFam, accession name HD, E-value=4.5e -20, PFam score of 80.1
  misc_feature (1)...(800): Xaa = X or * as defined in Table 2
MLTLWSSPTTTRRWRWAASSVANTLAXMTLSMAAMLSPQVDVRFATLCHDLGKGLTPPELWPRHHGHGPAGVKLVEQLCQRLRVPNEIRDLARLVAEFHDLIHTFPMLNPKTIVKLFDSIDAWRKPQRVEQLALTSEADVRGRTGFESADYPQGRWLREAWEVAQSVPTKAVVEAGFKGVEIREELTRRRIAAASDTIPQLNEHDIHRRRHNKAINGERDQRNALNQLQEGFNRYQRHHKSGDQPNGKHRDIAACQEAPALVEIERRCAHHHRHRQQERKSEQHAARFGIANGDLVRVWNKRGQILTGAVVTDGIKKGVVCVHEGAWPDLENGLCKNGSANVLTADIPSSQLANACAGNSALVYIEKYTGNAPKLTAFDQPAVQANTRPLRLARNQHRAFRCRITFHRFTRIMWVEEIGQRFGNHPFGRVRIQDSLCVCGALRYISATFNVWRKRAVTCVRSFGSDFTGSPPLRAPKGESIRRLLALREAGIIHILALGEDYKMEINESRTVLKTEDNSYSFDVFIDARGQRPLKVKDIPFPGLREQLQKTGDEIPDVGEDYTLQQPEDIRGRVAFGALPWLMHDQPFVQGLTACAEIAAACGPFDKDRIEGGIVVRMAKEGETLVLLDGTEAKLNADTLVIADHNKALAMGGIFGGEHSGVNDETQNVLLECAFFSPLSITGRARRHGLHTDASHRYERGVDPALQHKAMERATRLLIDICGGEAGPVIDITNEATLPKRATITLRRSKLDRLIGHHIADEQVTDILRRLGCEVTEGKDEWQAVAPSWRFDMEIEEEDV

SEQ ID NO: 46383 - protein, 81 aa, Homo sapiens
  misc_feature (1)...(81): Xaa = X or * as defined in Table 2
KFLSFRPDRVCVACAEEARAGLCLRQCITGHPEACLAIPVLVCVECWGGTDADQPVAVFPSRFSQVSPDRGTXQWLCWKFL

SEQ ID NO: 46384 - protein, 174 aa, Homo sapiens
  misc_feature (1)...(174): Xaa = X or * as defined in Table 2
MNRPTLFFTDLAFHVDRFTQYVHDTAQSRFTYRDFNRVFEVFYIQTATQTVGGTHCDGTYDTAAELLLNFQHQTLITYVEKYILTNDRQCHHRRIFYTFLESLAYLTSKAIEICQVTSLDIPTVSVRKSHWGNALTATLQTEKRPLCLSLARQAGAAKNATLPSGMQQLNIVPX

SEQ ID NO: 46385 - protein, 34 aa, Homo sapiens
RAAVGIQQSSSGQHYSGTHRDRLGGPPRFKQVIS

SEQ ID NO: 46386 - protein, 214 aa, Homo sapiens
  DOMAIN (16)..(35): Phosphoribulokinase proteins domain identified by eMATRIX, accession number BL00567A, p-value=1.964e-12, raw score of 10.66
  DOMAIN (14)..(192): ABC transporter domain identified by PFam, accession name ABC_tran, E-value=3.1e-05, PFam score of -1.5
MQRLKGVSLQANAGDVISIIGSSGSGKSTFLRCISFQENQRGGSMVVTVQTINLVRDKDGQLKVADKNQLRLLRTRLTMVFQHFNLWSHMTVLENVMEAPIQVLGLSKQEARERAVKYLAKVGIDEEPAETRVRSPTPANTEPRRRPSEEPIAMVRTIPAAELLLNFQHQTLITILHLKSIVHARYGILREFDVNYGADYLDNLSSSHLKSSTK

SEQ ID NO: 46387 - protein, 231 aa, Homo sapiens
MYLRLNEVATNLVVLGYIEQEQSKWLSQDNAMLVTHNGRLLKTVKLNNNLLEVTNSGQDPLRNALAIKDGSRWTRDILWSEDNHFRSATLSSTFSFAGLETLNIAGRNVLCNVWQEEVTSTRPEKQWQNTFWVDSATGQSYFIASVLYVMTPHAFAQGTVTIYLPGEQQTLSVGPVENVVQLVTQPHRTGKLACCCHSRGSRGISMLTYAHQEFARQSTLPYHRFRLCQLV

SEQ ID NO: 46388 - protein, 64 aa, Homo sapiens
TRTMNKLQSYFIASVLYVMTPHAFAQGTVTIYLPGEQQTLSVGPVENVVQLVTQPQLRDRLWWP

SEQ ID NO: 46389 - protein, 300 aa, Homo sapiens
STCSSRSHLHLIQASPILPNYVATAVAARIIADVQGISDTCVIAQPSPPHPGALRTLVFTTDEPETPQPPGAAGFQLVQKKQVQLHNVLYVMTPHAFAQGTVTIYLPGEQQTLSVAPLKNVVQLVTQQHLRDRLWWPGAFLTDFAAKVKALKDYPNHVMAQRASGEAEADDDVAATIKSVRQQLLNLNITGRLPVKLDPDFVRVDENSNPPLVGDYTLYTVQRPGTEQGSFKVKRARARVRQTRAPLFGPKSPAPEHMESELEFELIGPSKSTSGNPRGLRSERPVLFCLYPEMPTAAAR

SEQ ID NO: 46390 - protein, 166 aa, Homo sapiens
NALLGTCPGTARFPGTGSAPTLHPDASRSGRGRAACPRSAQWSPRPWQSVAGLAWLGAHWGSRSTSRTAETTASKRGHPRSPAAQLPPGPRPPRAPQLQRALQSVHPLSPRPAPLAEPKLTAACWAEAVKITTVRYSDSCSRLLTDLGKPVQSMLLKDIRKVYNWQ

SEQ ID NO: 46391 - protein, 196 aa, Homo sapiens
THQLFLPPHHQEISQTTWLSAAWPRHTCAHSLSPLQPPVPFSRPHVPLPGPSKTWSDGPRLQSLPGRPSERTPRRCRSASGQPPHLGGEERLCLAAPSGRICHCEGDDESPLITPCHCTGSLHFVHQACLQQWIKSSDTRCCELCKYEFIMETKLKPLRKWEKLQMTSSERRKIMCFSDIPRHCRPMCGLVLVCAH

SEQ ID NO: 46392 - protein, 398 aa, Homo sapiens
  DOMAIN (313)..(338): Peptidyl-tRNA hydrolase proteins domain identified by eMATRIX, accession number BL01195A, p-value=8.846e-22, raw score of 16.52
  DOMAIN (313)..(398): Peptidyl-tRNA hydrolase domain identified by PFam, accession name Pept_tRNA_hydro, E-value=5.4e-10, PFam score of 10.9
MGQKGLVKIFAWMHTYYSYPHLTTFQHPLSEVLSKCWIYFNLYLAPFRMPVFFFISGYLIRRYIDSVPWGNCLDKRIWNIFWVLALWGVVQWLALSALNQWLAPERDLSNASNAAYADSTGEFLHGMITASTSLWYLYALIVYFVVCKIFSRLALPLFALFVLLSVAVNFVPTPWWGMNSVIRNLPYYSLGAWFGATIMTCVKEVPLRRHLLMASLLTVLAVGAWLFTISLLLSLVSIVVIMKLFYQYEQRFGMRSTSLLNVIGSNTIAIYTVSKNHAMIVIEDLKVSNMSKSAADCILPPWLKSDKLGVLFNIVGLANPGAEYAATRHNAGAWFVDLLAERLRAPLREEAKFFGYTSRVTLGGEDVRLLVPTTFMNLSGKAVAAMASFFRINPDEIL

SEQ ID NO: 46393 - protein, 107 aa, Homo sapiens
TGYARQKPVPALGWWTNVSASTAPPIILPSITGSRLAVIKWLTVSAGKLSALLCASCQKGGVGEMANGNGERNHKQIGDTVLTPPQHYRKIYQPIAARSCIRCVCGS

SEQ ID NO: 46394 - protein, 593 aa, Homo sapiens
  DOMAIN (378)..(417): DEAD-box subfamily ATP-dependent helicases proteins domain identified by eMATRIX, accession number BL00039A, p-value=6.464e- 13, raw score of 18.44
  DOMAIN (373)..(444): DEAD/DEAH box helicase domain identified by PFam, accession name DEAD, E-value=2.6e-22, PFam score of 73.5
MAGIRSTLIKEKNMITNYEATVVTTDDIVHEVNLEGKRIGYVIKTENKETPFTVVDIDGPSGNVKTLDEGLSLLLSLVSIVVIMKLFYQYEQRFGMRSTSLLNVIGSNTIAIYTTHRILVEIFSLTLLAQMNAARWSPQVELTLLLVYPFVSLFICTVAGLLNLTTVMPEQYRYTLPVKAGEQRLLGELTGAPCATLVAEIAERHAGPVVLIAPDMQNALRLHDEISKFTDQMVMNLADWETLPYDSFSLHQDNYLLVAFQPFYQLTDDAAVGVLIVPVNTLMQRVCPHSFLHGHALVMKKGQRLSRDALRTQLDSAGYRHVDQVMEHGEYATRGALLDLFPMGSELPYRLAIGVNVAQAEVLNLESGAKQVLQETFGYQQFRPGQEEIIDTVLSGRDCLVVMPTGGGKSLCYQIPALLLNGLTVVVSPLISLMKDQVDQLQANGVAAACLNSTQTREQQLEVMTRPRIGDGTGALRKRVAQLAFKNQPMMVGNWAQSILHGGVIASALDVAAGLVCVGSTLTRHETISEDELRQRYRGWGPLIFALIICAQAGASVLLLLVACCVQAIKSPSPALNYTMKNSFILPVPPPPI

SEQ ID NO: 46395 - protein, 350 aa, Homo sapiens
  DOMAIN (1)..(284): Domain of unknown function DUF20 domain identified by PFam, accession name UPF0118, E-value=0.0016, PFam score of -17.8
TALLIRDMPPYVEAYPNENLTTVMPEQYRYTLPVKAGEQRLLGELTGAACATLVAEIAERHAGPVVLIAPDMQNALRLHDEISQFTDQMVMNLADWETLPYDSFSPHQDIISSRLSTLYQLPTIQGGVLIVPVNTLMQRVCPHSFLHGHALVMKKGQRLSRDALRTQLDRARYRHVDQPAHAGGKVLEMIVVGIATWLGFLLFGLNYSLLLAVLVGFSVLIPYIGAFVVTIPVVGVALFQFGAGTEFWSCFAVYLIIQALDGNLLVPVLFSEAVNLHPLHHREQIGGNKMADRQCRKIVCATVRQLPEGGRGEMANGNGERNHKQIGDTVLKATGSKQGDGQNHGDDFVA

SEQ ID NO: 46396 - protein, 313 aa, Homo sapiens
  DOMAIN (21)..(62): Tropomyosins proteins domain identified by eMATRIX, accession number BL00326D, p-value=2.400e-35, raw score of 8.76
  DOMAIN (1)..(67): Tropomyosins domain identified by PFam, accession name Tropomyosin, E-value=7.6e-33, PFam score of 104.9
MDQTVKSLMASEEEYSTKEEKYEKEMKLLEEKLKEAETRAEFVERSVAKLEKTTDDLEETLASAKEETWRFIRPGTRPYWNSATCFLLPGHKMAAEVHKLNPNVSEHDQERWHDAFGNGGADNHSKLQASTRRGGPLSQELLQSLAASLAAGGLTALSAEFTIGKGELMAHDVLWGCAPDEYDDLISGTCSHLPKGKTHDVLTGSDDGRHSNTSLAWGAGVQFNPTESVAIDIAYEGPGSGDWRTDGFIVGGLFCGVNMAVKISGVLKDGTGKPVQNCTIQLKAKRNSTTVVVNTLASENPDEAGRYSMDVEY

SEQ ID NO: 46397 - protein, 422 aa, Homo sapiens
  DOMAIN (66)..(90): ENTEROBACTERIAL VIRULENCE OUTER MEMBRANE PROTEIN SIGNATURE domain identified by eMATRIX, accession number PR00316B, p-value= 4.600e-21, raw score of 13.96
NRVHCRRCSGGDTGVSHLKGINVKYRYELTDSVGVMASLGFAASKKSSTVMTGEDTFHYESLRGRYVSVMAGPVLQISKQVSAYAMAGVAHSRWSGSTMDYRKTEITPGYMKETTTARDESAMRHTSVAWSAGIQINPAASVVVDIAYEGSGSGDWRTDGFIVGISGVLKDGTGKPVQNCTIQLKARRNSTTVVVNTVGSENPDEAGRYSMDVEYGQYSVILQVDGFPPSHAGTITVYEDSQPGTLNDFLCAMTEDDARPEVLRRLELMVEEVARNASVVAQSTADAKKSAGDASASAAQVAALVTDATDSARAASTSAGQAASSAQEASSGAEAASAKATEAEKSAAAAESSKNAAATSAGAAKTSETNAAASQQSAATSASTAATKASEAATSARDAVASKEAAKSSETNASSSADYAAS

SEQ ID NO: 46398 - protein, 44 aa, Homo sapiens
  misc_feature (1)...(44): Xaa = X or * as defined in Table 2
GILPISEPPSNRIFACWGKPAWTACCNSLRARRXRAISCCPSHW

SEQ ID NO: 46399 - protein, 185 aa, Homo sapiens
  misc_feature (1)...(185): Xaa = X or * as defined in Table 2
MGSKSWVTQKGPAKAQSSQVGRVKQATATDTGRTRDSHMERPKCSKGYLCLPYMALQQHHLLSDVTVRGFVAGATNILFRQQKHLSDAIVEVRLCGSDLVLYGTSTPKNLIWVMVHVVGHRPDRRXCCCNASVRQTQISLRAFGSFHMAVSGSSSVSGCSLFHSAHLTALCFSWPLLCYPTLGPH

SEQ ID NO: 46400 - protein, 95 aa, Homo sapiens
SRSWESPGSMSWHFQACGGWRNFLGHQGCRDAWVHSCSWVTVAVPSPLQQMSLQLLLQMGCCFHQKDLFNQDNNESNAVLEFSIECIYSYLIFTH

SEQ ID NO: 46401 - protein, 129 aa, Homo sapiens
GASEAIRQHQSSATKPRRSGKESVREPRARVPGALAVAVRLSNLTPVICQGLLGHQPQTEGCTFGFPTFEILGLGMTSLLFSMKTAYCGTLPYDHGSDLVLYGTSTPKNLIWVMVHVVGLRPDRRFFAL

SEQ ID NO: 46402 - protein, 536 aa, Homo sapiens
  DOMAIN (387)..(442): Beta-lactamase class-A proteins domain identified by eMATRIX, accession number BL00146C, p-value=1.000e-40, raw score of 25.08
  DOMAIN (272)..(494): Beta-lactamase domain identified by PFam, accession name beta -lactamase, E-value=4.1e-110, PFam score of 379.2
MHASCSGAGSSRRRHRHWLSARLRLDQVYYRWLPLWAPGNAVAPRSLKMPGTTEPQEGVTSLAWGAPRSGIPEGLQLFSPSLFSSCHLQRERGGAPTCPGSCRLHGAGSPSGTSHTAAGVMAAAPDRPPLPSLPKRHASLALAVVLQRRDWENPGVTQLNRLAAHPPFASWRNSEEARTDRPSQQLRSLNGEWRLMRGALSAAGVVVTRSVTATLASALAPAPFAFFPSFLATFAGFPRQALNRGLPLGFRFSALRHLDPKKLDLGDGSQTLVKVKDAEDQLGARVGYIELDLNSGKILESFRPEERFPMMSTFKVLLCGAVLSRIDAGQEQLGRRIHYSQNDLVEYSPVTEKHLTDGMTVRELCSAAITMSDNTAANLLLTTIGGPKELTAFLHNMGDHVTRLDRWEPELNEAIPNDERDTTMPVAMATTLRKLLTGELLTLASRQQLIDWMEADKVAGPLLRSALPAGWFIADKSGAGERGSRGIIAALGPDVAISRVLPGWTQDDSYRIRRSGRAERGVRAHSPAWSERPTPN

SEQ ID NO: 46403 - protein, 27 aa, Homo sapiens
PHCCLWLAAPRLYTLCFRLVCCPNWSG

SEQ ID NO: 46404 - protein, 46 aa, Homo sapiens
  misc_feature (1)...(46): Xaa = X or * as defined in Table 2
YPGSQLLASKGTKLDGEXVXRSRLQKVGNNKLLQAKGACSNPTQES

SEQ ID NO: 46405 - protein, 612 aa, Homo sapiens
  DOMAIN (338)..(573): Cation efflux family domain identified by PFam, accession name Cation_efflux, E-value=0.0008, PFam score of 0.2
FRPRQLVAAKPSVFADVQSMESVGTGGGAEAEGGVRSRGLCPTRMLPGLAAAAAHRCSWSSLCRLRLRCRAAACNPSDRQEWQNLVTFGSFSNVVPCTHPYIGTLSQEKLYSTNVHKEGQGSHTLREEKVPSFVTAEGVGAKLISPLKQEPLQVRVKAVLKKREYGSKYTQNNFITGVRAINEFCLKSSDLEQLRKIRRRSPHQDTESFTVYLRSDVDAKSLEVWGSPEALAREKKLRKDAEIEYRERLFRNQKILREYRDFLGNTKPRSRTASVFFKGPGKVVMVAICINGLNCFFKFLAWIYTGSASMFSEAIHSLSDTCNQGLLALGISKSVQTPDPSHPYGFSNMRYISSLISGVGIFMMGAGLSWYHGVMGLLHPQPIESLLWAYCILAGSLVSEGATLLVAVNELRRNARAKGMSFYKYVMESRDPSTNVILLEDTAAVLGVIIAATCMGLTSITGNPLYDSLGSLGVGTLLGMVSAFLIYTNTEALLGRSIQPEQVQRLTELLENDPSVRAIHDVKATDLGLGKVRFKAEVDFDGRVVTRSYLEKQDFDQMLQEIQEVKTPEELETFMLKHGENIIDTLGAEVDRLEKELKKRNPEVRHVDLEIL

SEQ ID NO: 46406 - protein, 354 aa, Homo sapiens
MPPDGEIPPSRDQQTPHTGELQLTSGRCSSGMKLPEEGTGSNVCCSAAPAVDTQVESRSKYGITSGIKILVPVTCQTLRPNRREKDPFQLAKALEKLQHLMAALKSPKEELTHIMWVELTNNRRDTICHPKATRKVVRERFTRPLNPSRVVNSTPRSEVPAGQPRGARKPLFVQTVRLLRSQRLARDTPPWRSLGLQAAALHRRRSRHREDQLHLWAAAAAKPGNILTGHQRTPMASPPQAAWVTRKRQRHLATPAVEGLLALGISKSVQTPDPSHPNSSLSDVPEQFFPTAILIGFPAGHGISRSAAAAVPSKRLSRSSFNRGLPLGFRFSALRHLDPKKLDLGNGSRSGPSP

SEQ ID NO: 46407 - protein, 137 aa, Homo sapiens
PLALPEFISKSWKERLTDTTVLFLKARRQSLCLQIGGDPLESILQAFCVLSVAKESQLYTYLHAIMRTLKSSIARGARTFQSTSDGTVKSRPSKIIFLPRLHDRFRFSALRHLDPKKLDLGDGSRSAHRPDRRFFAL

SEQ ID NO: 46408 - protein, 20 aa, Homo sapiens
  misc_feature (1)...(20): Xaa = X or * as defined in Table 2
MLKISWVHEWVTIELDLNSX

SEQ ID NO: 46409 - protein, 30 aa, Homo sapiens
  misc_feature (1)...(30): Xaa = X or * as defined in Table 2
RYMVLSEFRSMQTGITKWKERILXNCRKRE

SEQ ID NO: 46410 - protein, 147 aa, Homo sapiens
  misc_feature (1)...(147): Xaa = X or * as defined in Table 2
HTWNSDRTMYLQRRHIFFKNCFWLQAGYSLGAPSWRSLVTVWQIIFSDFYRKTLCNSNSPLFXSLCQRQSTLLGTLLIFCSYASSPEAINSAAPRVRSPRTDPRKARSPRGVGGAEGNGSRDTEPKGGRPLATPSQGERLMAGTVTK

SEQ ID NO: 46411 - protein, 426 aa, Homo sapiens
  DOMAIN (54)..(65): BETA PROTEIN CLATHRIN ASSEMBLY L domain identified by eMATRIX, accession number PD02710A, p-value=8.667e-09, raw score of 10.13
  DOMAIN (64)..(171): PH domain identified by PFam, accession name PH, E-value=1.8e -11, PFam score of 46.0
MASLLQDRECRGPAGEEALVYSSGKGRRLDPCSRALPGPATLSAGYLTPAFPDLELTTDQDLLLMQEGMPMRKVRSKSWKKLRYFRLQNDGMTVWHARQARGSAKPSFSISDVETIRNGHDSELLRSLAEELPLEQGFTIVFHGRRSNLDLMANSVEEAQIWMRGLQLLVDLVTSMDHQERLDQYRQDGVRVGRDYSRSCVENGLAPGRETGRKERGEMSVDEGAHTTAHTNRYISAFALTHTWMAERLVSTWRQKSGWVLILHLKRYSFNVALSLNNKIGQQVIIPRYLTLSSHCTENTKPPFTLGWSAHMAMKFTFKSKSSLALCLDSDSEDELKRSVALSQRLCEMLGNEQQQEDLEKPVPTTLAQVDREKIYQWINELSSPETRENALLELSKKRESVPEHCTHAVAFIWYYCSTFTARSNF

SEQ ID NO: 46412 - protein, 51 aa, Homo sapiens; identical to SEQ ID NO: 34614
  DOMAIN (5)..(20): RIBOSOMAL PROTEIN L7A/RS6 FAMILY SIGNATURE domain identified by eMATRIX, accession number PR00881D, p-value=8.500e-16, raw score of 11.60

SEQ ID NO: 46413 - protein, 203 aa, Homo sapiens
  DOMAIN (157)..(197): Ribosomal protein L7Ae proteins domain identified by eMATRIX, accession number BL01082, p-value=4.971e-30, raw score of 20.37
  DOMAIN (126)..(203): Ribosomal protein L7Ae domain identified by PFam, accession name Ribosomal_L7Ae, E-value=9.8e-23, PFam score of 89.0
MIPVSEKSKIGQLNLMLKGKKTKGKKVALVPAAVKKQEAKKVVNLLFEKRPKNVGIGQDIQPKRDLHRFVKWPRYIRLQQQTAILDQFIQALDQQTATQLLKLAHKYRPETKQKNKQRLLARAEKKAASKGDIPNKRPPVLQAGVKTVTNLVENKKAQLVVIAHDVDPVELVVFLPVLHCKMGVPYCIIKGKARLGHLVHRKT

SEQ ID NO: 46414 - protein, 272 aa, Homo sapiens
  DOMAIN (158)..(198): Ribosomal protein L7Ae proteins domain identified by eMATRIX, accession number BL01082, p-value=5.286e-37, raw score of 20.37
  DOMAIN (129)..(229): Ribosomal protein L7Ae domain identified by PFam, accession name Ribosomal_L7Ae, E-value=3.6e-40, PFam score of 146.9
GTRPKMPKGKKAKGKKVAPAPAVVKKQEAKKVVNPLFEKRPKNFGIGQDIQPKRDLTRFVKWPRYIRLQRQRAILYKRLKVPPAINQFTQALDRQTATQLLKLAHKYRPETKQEKKQRLLARAEKKAAWPKGTFPTKRPPVLRAGVNTVTTLVENKKAQLVVIAHDVDPIELVVFLPALCRKMGVPYCIIKGKASLGRIVHRKTCTTVAFTQVNSEDKGALAKLVEAIRSNYNARYDEIRRHWGGNVLGPKSVARIAKLEKAKAKDLATKLG

SEQ ID NO: 46415 - protein, 266 aa, Homo sapiens
  DOMAIN (74)..(234): SUA5/yciO/yrdC family domain identified by PFam, accession name Sua5_yciO_yrdC, E-value=1.2e-27, PFam score of 105.2
ALISVCAAACAPVSAISMPRTEIPVLTQLRNASPTSSQPLPAYCTGILCKPPSGTRCAPYSSDSVFLISGRTWSSSAFFPIHVRFLHSRPVPRLLRFQVTFRGSPLTSRHWQHDRQRFRRAMFARQLLTTPAAPIVLVDKKYVPELCDDIAPDLNEVGVMLPANPLQHLLLQELQCPLVMTSGNLSGKPPAISNEQALADLQGIADGFLIHNRDIVQRMDDSVVRESGEMLRRSRGDPHSDDTDGLHYFHRETDLETCEDKVTHPS

SEQ ID NO: 46416 - protein, 329 aa, Homo sapiens
  DOMAIN (268)..(315): Acylphosphatase proteins domain identified by eMATRIX, accession number BL00150, p-value=2.846e-30, raw score of 25.33
  misc_feature (1)...(329): Xaa = X or * as defined in Table 2
MHQTTAKTPHTSYPNNYEEHNRRANRSKNYDRIRHTTIILKRTNPAQTITNLLKSRFNRYNYVQPRSCRSIFIHIPGERDLNLCIAPNPPAIFPTSIGYLGPDLNNLPTYAPFITTNLTGPAPTTTHPVGNLGTTGNPEPGGCGILIVWCCVNWACLWDSVVAAPREPYMPAGLLRHRRHYRHRREDLIAVPAARQTDENRRPALCHEYAVGHRKIKTNVEHTEPYILPLITHSQPLNRGAFFCPGVRFLVVSVLDFEKRLAFASXSCGVQLRIRGKVQGVGFRPFVWQLAQQLNLHGDVCNDGDGVEVRLAYRVLVGQPQHYPRGRPS

SEQ ID NO: 46417 - protein, 440 aa, Homo sapiens
  DOMAIN (164)..(211): Acylphosphatase proteins domain identified by eMATRIX, accession number BL00150, p-value=6.906e-34, raw score of 25.33
  DOMAIN (284)..(421): AcrB/AcrD/AcrF family domain identified by PFam, accession name ACR_tran, E-value=7.1e-78, PFam score of 272.1
MHIITPSASENGSHLFVPCKQARILPIQNWGVPARRKHEKQSHSWVEDVGGIDASEAPPLFRYWLREPERGLPMVVLDFGGSKCTGSGTGDPCGKGLYASSECIYPDKKNCSAIKGIPGIIRRIRAGRYRRPVTAGCDAVVSGRAGYAIHDGGNNSMAKNTSCGVQLRIRGKVQGVGFRPFVWQLAQQLNLHGDVCNDGDGVEVRLREDPETFLVQLYQHCPPLARIDSVEQHRRHHEYANCSRCRYLPCLPCRNEYPRRTALSLSVYQLYPLRPAFHQTLEEESWSIPFSVMLVVPLGIIDALLAATFRGLTNDVYFQVGLLTPIGLSAKNAILIVEFAKDLMDKEGKGLIEATLDAVRMRLRPILMTSLAFILGVMPLVISTGAGSGAQNAVGTGVMGGMVTATVLAIFFVPVFFVVNRRRFSRKNEDIEHSHTVDHH

SEQ ID NO: 46418 - protein, 452 aa, Homo sapiens; identical to SEQ ID NO: 46135
  DOMAIN (237)..(273): PROTEIN TRANSCRIPTION REGULATION domain identified by eMATRIX, accession number PD02985A, p-value=9.182e-35, raw score of 17.54
  DOMAIN (231)..(393): SUA5/yciO/yrdC family domain identified by PFam, accession name Sua5_yciO_yrdC, E-value=4.2e-72, PFam score of 253.0

SEQ ID NO: 46419 - protein, 508 aa, Homo sapiens
  DOMAIN (63)..(220): SUA5/yciO/yrdC family domain identified by PFam, accession name Sua5_yciO_yrdC, E-value=0.00014, PFam score of -0.9
MVNLALWLKKHRFRLDQVQNFYPSPLANSTTMYYTGKNPLAKIGYKSEDVFVPKGDKQRRLHKALLRYHDPANWPLIRQALEAMGKKHLIGSRRDCLVPAPTIEEMREARRQNRNTRPALTKHTPMATQRQTPATAKKASSTQSRPVNAGAKKRPKAAELQCPLVMTSGNLSGKPPAISNEQALADLQGIADGFLIHNRDIVQRMDDSVVRESGEMLRRSRGFLPTGRGLRIDYKQKMRGTRRAGCNFNQSGQGRPSLKRGIEQTDIKKAKKQATGLAGESMLQDDAFYAVITHAAGPQGALPLTPQMLMESPSGNLFGMTQNAGMGWDANKLTGKEVLIIGTQDHVIRLYAVLLAQALAEARPALGRLPPFKVLAHRLAGHAAEKGQAWVANAITEEYLRQGGGELPLVPGKDWNNQQNIYHRWLKGETKTQREKIQKLIPAILAILPRELRHRLCIFDTPGTPVHYLAAQEALSTAIDAHDDAVQAVYRKAHFSGGGSSDDSVIVH

SEQ ID NO: 46420 - protein, 712 aa, Homo sapiens
  DOMAIN (443)..(479): PROTEIN TRANSCRIPTION REGULATION domain identified by eMATRIX, accession number PD02985A, p-value=9.182e-35, raw score of 17.54
  DOMAIN (437)..(606): SUA5/yciO/yrdC family domain identified by PFam, accession name Sua5_yciO_yrdC, E-value=1.1e-76, PFam score of 268.2
QQWASRTRRWRSLITTLCVDARSQHDYIALSRLFHTVMLFDVPVMTRLMESEARRFIALVDEFYERHVKLVVSAEVPLYEIYQGDRLKFEFQRCLSRLQEMQSEEYLKREHLAAKPETVKRDWYVVDATGKTLGRLATELARRLRGKHKAEYTPHVDTGDYIIVLNADKVAVTGNKRTDKVYYHHTGHIGGIKQATFEEMIARRPERVIDNRRGSLRQAGYAIHDGGNNSMAKNTSCGVQLRIRGKVQGVGFRPFVWQLAQQLNLHGDVCNDGDGVEVRLREDPETFLVQLYQHCPPLARIDSVEREPFIWSQLPTEFTIRQSTGGTMNTQIVPDAATCPACLAEMNTPGERRYRYPFINCTHCGPRFTIIRAMPYDRPFTVMAAFPLCPACDKEYRDPLDRRFHAQPVACPECGPHLEWVSHGEHAEQEAALQAAIAQLKMGKIVAIKGIGGFHLACDARNSNAVATLRARKHRPAKPLAVMLPVADGLPDAARQLLTTPAAPIVLVDKKYVPELCDDIAPDLNEVGVMLPANPLQHLLLQELQCPLVMTSGNLSGKPPAISNEQALADLQGIADGFLIHNRDIVQRMDDSVVRESGEMLRRSRGYVPDALALPPGFKNVPPVLCLGADLKNTFCLVRGEQAVLSQHLGELSDDGVQMQWGQRLCRMGTQVLPPTFNIEKKVQSARYRHGINSKLSHNMPACVSEHVYLQC

SEQ ID NO: 46421 - protein, 61 aa, Homo sapiens
MGRGEDSVLQDPAQCGRGLAVSSTEEPQELAFLGFQATLTGHTESDGPLCAHTLSGEVHMA

SEQ ID NO: 46422 - protein, 110 aa, Homo sapiens
QPAPCHAELGPAGQSPLLVPPLGPQNPGAGAAWDPPENLRVMVSQANRTVLENLGNGTSLPVLEGQSLRLVCVTHSSPPARLSWTRWGQTVGPSQPSDPGVLELPPIHME

SEQ ID NO: 46423 - protein, 158 aa, Homo sapiens
PRWWADWTGSTPSYGYWFKAVTETTKGAPVATNHQSREVEMSTRGRFQLTGDPAKGNCSLVIRDAQMQDESQYFFRVERGSYVRYNFMNDGFFLKVTALTQKPDVYIPETLEPGQPVTGICAFNCAFEECPPPSFSWTGAALSSQGTKPTTSHFSGLS

SEQ ID NO: 46424 - protein, 563 aa, Homo sapiens
  DOMAIN (306)..(316): w KINASE ALPHA ADHESION T-CELL domain identified by eMATRIX, accession number DM00179, p-value=1.947e-10, raw score of 13.97
  DOMAIN (33)..(417): Immunoglobulin domain identified by PFam, accession name ig, E-value=2.7e-17, PFam score of 60.8
  misc_feature (1)...(563): Xaa = X or * as defined in Table 2
CCCCPCCCPCWGRVSGSVAGGPRQGLGLPLSLCISPGSLNKDPSYSLQVQRQVPVPEGLCVIVSCNLSYPRDGWDESTAAYGYWFKGWTSPKTGAPVATNNQSREVEMSTRDRFQLTGDPGKGSCSLVIRDAQREDEAWYFFRVERGSPLTQKPDVYIPETLEPGQPVTVICVFNWAFKKCPAPSFSWTGAALSPRRTRPSTSHFSVLSFTPSPQDHDTDLTCHVDFSRKGVSAQRTVRLRVASLELQGNVIYLEVQKGQFLRLLCAADSQPPATLSWVLQDRVLSSSHPWGPRTLGLELRGVRAGDSGRYTCRAENRLGSQQQALDLSVQYPPENLRVMVSQANRTVLENLGNGTSLPVLEGQSLRLVCVTHSSPPARLSWTRWGQTVGPSQPSDPGVLELPPIQMEHEGEFTCHAQHPLGSQHVSLSLSVHSPSTAAGPLLLLGGXGSALQLLLSRPARPPLCAGGLGRSCWRGTAVRAPSRSPPAQPGPGPTAPXASMEGSAPASGSAVRPGTSTGPRVALSSSCYQGSWSMGEDLAWGLPWELASLPCSLSVPALSSSG

SEQ ID NO: 46425 - protein, 525 aa, Homo sapiens
  DOMAIN (314)..(324): w KINASE ALPHA ADHESION T-CELL domain identified by eMATRIX, accession number DM00179, p-value=1.947e-10, raw score of 13.97
  DOMAIN (155)..(324): Immunoglobulin domain identified by PFam, accession name ig, E-value=3e-11, PFam score of 41.3
VTQLLCTSNGRRALEFALFPGRRFRPVATNHQSREVEMSTRGRFQLTGDPAKGNCSLVIRDAQMQDESQYFFRVERGSYVRYNFMNDGFFLKVTGMEWGGNPCLSHWGGTLGTAYGLSREGSQGPLQHKNHPTTVSVPALTQKPDVYIPETLEPGQPVTVICVFNWAFEECPPPSFSWTGAALSSQGTKPTTSHFSVLSFTPRPQDHNTDLTCHVDFSRKGVSVQRTVRLRVAYAPRDLVISISRDNTPALEPQPQGNVPYLASPKGQFLRLLCAADSQPPATLSWVLQNRVLSSSHPWGPRPLGLELPGVKAGDSGRYTCRAENRLGSQQRALDLSVQNPPENLRVMVSQANRTVLENLGNGTSLPVLEGQSLCLVCVTHRQPPSQAELDPEGTGSEPLPALRPRGSWSWLVGSSGARRRVHLPRSAPTGAPRRTLLPSPCTTPRSCWAPPAPGRLRVCTAAAPPRPARPPLCAGGLGRSCWRGTAAQGLLRGSPPAQPGPWAQTASPEPSMEGLNSGPQASRC

SEQ ID NO: 46426 - protein, 312 aa, Homo sapiens
  DOMAIN (160)..(312): Immunoglobulin domain identified by PFam, accession name ig, E-value=0.015, PFam score of 13.2
MLLPLLLSSLLGGSQAMDGRFWIRVQESVMVPEGLCISVPCSFSYPRQDWTGSTPAYGYWFKAVTETTKGASVAPNPPSREVEMSTRGRFQLTGDPAKGNCSLVIRDVQMQDESQYFFRVERGSYVRYNFMNDRVLLKVTALTQKPDVYIPETLEPGQPVTVICVFNWAFEECPPPSFSWTGAALSSQGTKPTTSHFSVLSFTPRPQDHNTDLTCHVDFSRKGVSAQRTVRLRVAYPPETFGISIFTVTNTPDPPENLRVMVSQANRTVLENLGNGTSLPVLEGQSLCLVCVTHSSPPARLSWTQRGQVLSP

SEQ ID NO: 46427 - protein, 244 aa, Homo sapiens
  misc_feature (1)...(244): Xaa = X or * as defined in Table 2
CCCTVYRAFIRKRLKRSSDSVYRRKNPSASYDRDAEASLAAVKSGEVDLHQLASTWAKAYAETTLEHARPEEPSWDEDFADVYHDLIHSPASETLLNLEHNYFVSISELIGERDVELKKLRERQGIEMEKVMQELGKSLTDQDVNSLAAQHFESQQDLENKWSNELKQSTAIQKQEYQEWVIKLHQDLKNPNNSSLSEEIKVQPSQFRESVEAIGRIYEEQRKLEESFTIHLXAQLKTMHNLRL

SEQ ID NO: 46428 - protein, 196 aa, Homo sapiens
  misc_feature (1)...(196): Xaa = X or * as defined in Table 2
LAMSLSHLYRDGEGRIDDDDDERENFEITDWDLQNEFNPNRQRHWQTKEEKGSLQRKEFFTDLVGLCFCAYRARDYSAPVNFISAGLKKGAAEEAELEDSDGFLRFFFILFFHXLSFDFSFLQGGNFKPSQKGFAGGTKSFMDFGSWERHTKGIXFTYMNCCDRKTLFFFCXNSSGIINPIEAKQRKGKGAVGAYG

SEQ ID NO: 46429 - protein, 71 aa, Homo sapiens
LAMSLSHLYRDGEGRIDDDDDEREENFEITDWDLQNEFNPNRQRHWQTKEESTYGVWAERDSDDERPSFGG

SEQ ID NO: 46430 - protein, 91 aa, Homo sapiens
  misc_feature (1)...(91): Xaa = X or * as defined in Table 2
VSFLSMGSGHCIRSTRGSKMVSWSVIAKIQEIWCEEDERKMAREFLAEFMSTYVMMNIHMIVEKNTXSPFCPWARATVSGPPVAPKWSPGP

SEQ ID NO: 46431 - protein, 144 aa, Homo sapiens
  DOMAIN (47)..(58): MIP family proteins domain identified by eMATRIX, accession number BL00221A, p-value=5.935e-09, raw score of 6.39
VSFLSLGSGHCLRSTRGSKMVSWSVIAKIQEIWCEEDERKMVREFLAEFMSTYVMMVSGWAARSGWGSTRAVHEPPPHADPMGHIVHSLPLSWEPGEAVRKVRSGGFLIKSFWTERAHNMWGSNETMHWGIRGTAGNGEKGNPE

SEQ ID NO: 46432 - protein, 76 aa, Homo sapiens
VSFLSMGSGHCIRSTRGSKMVSWSVIAKIQEIWCEEDERKMAREFLAEFMSTYVMMNIHMIVEKDTYSDHEEINTS

SEQ ID NO: 46433 - protein, 78 aa, Homo sapiens
  DOMAIN (46)..(57): MIP family proteins domain identified by eMATRIX, accession number BL00221A, p-value=5.935e-09, raw score of 6.39
  misc_feature (1)...(78): Xaa = X or * as defined in Table 2
VSFLSMSSGHCIRSTRGSKMVSWSVIAKIQEIXCEEDERKMAREFLAEFMSTYVMMVSGRAARSGWALPGPSMTPSPF

SEQ ID NO: 46434 - protein, 57 aa, Homo sapiens
  DOMAIN (22)..(57): Ribosomal protein S10p/S20e domain identified by PFam, accession name Ribosomal_S10, E-value=3e-08, PFam score of 38.0
  misc_feature (1)...(57): Xaa = X or * as defined in Table 2
ASSSREGLTKFAKFTKFTKIHQIXITLTSYSIKSLEKVCADLIRGTKEKNLKVKGPV

SEQ ID NO: 46435 - protein, 218 aa, Homo sapiens
  misc_feature (1)...(218): Xaa = X or * as defined in Table 2
MMFWPELQPRVCWMGLSWVNHQNGRRRRKNQKHHXQKVPLLIMASKXKLLEFLNRETKASANLSETVTKPPLPQKNTAQVGASSQTRKPNKLAPHPAVPAFVKNTCPSRPRERQTHFLRPRPEDRMVALKPIKIVLPPVFMPFSSPQGIRSRMPTQHLYCRWVAPKALVPTCLPTHSLSRKEEKPKRMDTPFLPYSRPPSGEWLLIVLWFFNRSQRSR

SEQ ID NO: 46436 - protein, 47 aa, Homo sapiens
EQQQDLLQRAKEQSFHSVAGRPSGLPLLAGAACFYSLIWPDWCVYNP

SEQ ID NO: 46437 - protein, 63 aa, Homo sapiens
  misc_feature (1)...(63): Xaa = X or * as defined in Table 2
KQAAQPAVATLSGPLPHCGSFVLSLFAINLVAAHSLGPHCLYELXHSPRRSTASLREGPRLHS

SEQ ID NO: 46438 - protein, 28 aa, Homo sapiens
MLNWLKILLTNKGAGLISLKAVREYISM

SEQ ID NO: 46439 - protein, 61 aa, Homo sapiens
  misc_feature (1)...(61): Xaa = X or * as defined in Table 2
EFLDTFCYIPKVVDQXDXTHKQQHNVAIIPHVSSAQMSTFCXRTMPTISDDPWHMASMRAV

SEQ ID NO: 46440 - protein, 183 aa, Homo sapiens
SLLSQRDHEPHQKEETPNTSEHQKEKTPDTPPLRTVTLTVRVHGFILEVSETKNPPIPDTKLRGGGCKGSVSLALGVKLQTFAVSVTAHKGSVDPKSEQQQDLLQRAKDQSFRSVEGDPSGPWVVDGTGCCGVGAALVGEARATQEPTEQRGGSGMAGCRSRALPHAKAAKAWREIEHSSCWP

SEQ ID NO: 46441 - protein, 112 aa, Homo sapiens
MVPGPLAICLSSHSRAHMAQVLTVCLTPLAWGKPLPEYPVSMSVPWRAIPLRPPVPPICLRDSAHRKEGERCSCNLKILRLGFDAREEKGLGEREGMAGPEAFVHSLSLEVG

SEQ ID NO: 46442 - protein, 115 aa, Homo sapiens
  misc_feature (1)...(115): Xaa = X or * as defined in Table 2
HSPRGSAASFLKSVRPRTHQFRTQEDRLSPGIQDQPGQPSNTPSLQKLXNXLGVMGRICSPSYLSXPWREDHLSPGGXGCSEPXLHHCTPAGVTKSDRVSKNKXINKNKINNDNQ

SEQ ID NO: 46443 - protein, 18 aa, Homo sapiens
AGRCAQHGQPPAAPACRE

SEQ ID NO: 46444 - protein, 41 aa, Homo sapiens
QPKMKYSGMPGLLPSVRSVQAILDGSLRPPKKTCHLKNFGA

SEQ ID NO: 46445 - protein, 46 aa, Homo sapiens
AGLLQNTAGFLGMPGLLPSVRSVQAHIGMGSLRPPKKTCHLKNFGA

SEQ ID NO: 46446 - protein, 157 aa, Homo sapiens
  misc_feature (1)...(157): Xaa = X or * as defined in Table 2
CLVFWLLYYPGLQLPFHLLPHSLGSGQQSSEESAATPSLAEGRREAAFRCGPAGLARQAWRPHARLPGPAAPLAAPSLAPLPTGRSGRWLPMLCAASCXSPSPAMSVYPQRRLGQGGAEDSEGGPVSRGCRAPGPQRPLAAPGEQTAARTQAICLIW

SEQ ID NO: 46447 - protein, 187 aa, Homo sapiens
  misc_feature (1)...(187): Xaa = X or * as defined in Table 2
CRQTGVKIYDVWFFWLLYYPGLQLPFHLLPHSLGSGQQSSEESAATPSLAEGRREAAFRCGPAGLARQAWRPHARLPGPAAPLAAPSLAPLPTGRSGRWLPMLCAASCXSPSPAMSVYPQRRLGQGGAEDSEGGSVSRGCRAPGPQRPLAAPGEQTAARTQASVYLLLPHSPPLLSALHIHHLLPPS

SEQ ID NO: 46448 - protein, 117 aa, Homo sapiens
  misc_feature (1)...(117): Xaa = X or * as defined in Table 2
RSLFRHHRPSAAFPRTPCSDCPRCSAGTMEDCWLVLGSPELRXKSLHERPFHWLPSPSRARCCLPRSETPAGPVPPRPGPRRARRPRGTSRPPPASSRGRGALGSLPASEPLPARAT

SEQ ID NO: 46449 - protein, 133 aa, Homo sapiens
  misc_feature (1)...(133): Xaa = X or * as defined in Table 2
VVKNSLIFLVNQVLNSRDFHVFFKTTXNCPAQAHTAALYQGLGPACSQRASHWMSSSSKRSSKSLKKSAXTAFSLAAKSIKSPGAASRLGNGKARLCQVRFPKEQVISALQGHYPHKKRRWVRGNRLKLESTF

SEQ ID NO: 46450 - protein, 111 aa, Homo sapiens
MRAKKKKKKKKKLKDVLNENLQRKREGLHSLAFKSYKPEIQNKLLIIKKKAKHKKHKSGKKSVSKKAITKKRKTVIKSPTVPEFQLICTNLDELRELITKIENELKDLEKK

SEQ ID NO: 46451 - protein, 58 aa, Homo sapiens
  misc_feature (1)...(58): Xaa = X or * as defined in Table 2
RSCMTLMWPRSTPXFGLMERRRHMFDWLLITMLWMLPTKLGSSKLSPAAXFXSSCLIL

SEQ ID NO: 46452 - protein, 85 aa, Homo sapiens
  misc_feature (1)...(85): Xaa = X or * as defined in Table 2
STSKGEKPAIRAMAHFLEPHPINFLGARARKADLSPTXYHFFKHLDNFLQGKCFHNQQDAENAFQQFFKSQSTNFYAGSSFVTEV

SEQ ID NO: 46453 - protein, 110 aa, Homo sapiens
  misc_feature (1)...(110): Xaa = X or * as defined in Table 2
SPVLQRAFKNGPGTANERTVQWWFKKLCKGDESLEDEEHSGXPSEIYNNQLRAIFKADPLTITREEVFPHPLYSPDLSPTSYHFFQHLDNFLQGKCFHYQQDAEHAFQEF

SEQ ID NO: 46454 - protein, 273 aa, Homo sapiens
  misc_feature (1)...(273): Xaa = X or * as defined in Table 2
MHRSCGSDAYALLGERSVSLRRCAVRHAGGIRSANADISNDKAGEKPARRKTKGSCPTLIGAGLVQSLSPIQSAADAGELGSNGILPDVESLRIPVQYLANLLTAGDTKPVLRALKRMLAMRHYKRAETVDGKVDTRALEEVGLTEAQAQEMYRYLAIANYEDRFVVPSSHRELAREAFPEKNGCGFTFGDGCHGSDTKFNLFNSRRIDAIDXPCPDXRWTGTLGLPASGLFTRFIVTYVSIRTSDTSSMPHSTPSQATERSPNNAXASLQTC

SEQ ID NO: 46455 - protein, 413 aa, Homo sapiens
  DOMAIN (320)..(347): GLUTAMATE-ASPARTATE SYMPORTER SIGNATURE domain identified by eMATRIX, accession number PR00173G, p-value=8.000e-20, raw score of 12.22
  DOMAIN (212)..(388): Sodium:dicarboxylate symporter family domain identified by PFam, accession name SDF, E-value=7.3e-88, PFam score of 305.3
SASASRSLEHITVTPSTGILTCFPSTTPFGLALGGTLGLPASGLFTRFIVTKSSIFSVTPLVQPKPSCNGYSPPPPPVPHRREFQRRVIAEKIFCQHHRAKLNRLEERQYLTVNFRAIAQRVNIGITGLQITIDANAAINRQPGASCQGRFPGAVRCGGNYRIHFDIALAVQRWPECQNPFFPAPVTEISTADERPSPLTGCLQRLVTFGSVIFGIINMIMRLAPIGRFGAMAFTIGKYGVGTLVQLGQLIICFYITCILFVVLVLGSIAKATGFSIFKFIRYIREELLIVLGTSSSESALRRMLDKMEKLGCRKSVVGLVIPTGYSFNLDGTSIYLTMAAVFIAQATNSQMDIVHPITLLIVLLLSSKGAAGVTGSGFSVLAATLSAGGPIAGSGSGADPRYSTALCQKLVR

SEQ ID NO: 46456 - protein, 93 aa, Homo sapiens
  misc_feature (1)...(93): Xaa = X or * as defined in Table 2
FLDPSPEPNVTVTPSTGILTCFPSTTPFGLALGVDSPCPDXRWTGTLGLPASGLFTRFIVTYGVTPALDTGLMXLRSCGPPRSMLXHRTQQKC

SEQ ID NO: 46457 - protein, 104 aa, Homo sapiens
MVYGTSEAIGQRQSSAAKLRRSQSESLRPEFQGLWEWLPVRDRHRSFGSTDKTCLLCLYQKMKGTEIKRRERLKCGAKIERRKRLRVREVGEESKKRPLTGFEI

SEQ ID NO: 46458 - protein, 37 aa, Homo sapiens
  misc_feature (1)...(37): Xaa = X or * as defined in Table 2
LLLGLASENXHCPIASEAPXTTTDTELWVTLTVEGKS

SEQ ID NO: 46459 - protein, 83 aa, Homo sapiens
MVYGASEVIRQHQSSAATPRRSQSESLGPEFQGLWEWLPGNLLVIVFVSYFGSKLHRPKLIGIGCLLMGTGSILTSLPHFFMG

SEQ ID NO: 46460 - protein, 335 aa, Homo sapiens
MCFDNQGTDLTSTVRVTRSSASVMVYGASEAIGQRQSSAAKPRRSQSDSLGPEFQGLWERLPGPRAVKRLRVIFDEKEPKRYLIWDKEKGALTLTMPLAPATFLRVNCWAAVEVYDGNGVDFLGEGAPGCFSGQVHVDAASQQLVWQALQEGAAVRLDVGLSVSMHTRYHDIESSIAYYKGNWIPGFLKVLMQEQGTDGGGAGGLCSCQCSDYSGTVVGEEVVGCTHASRSGTAWYISTLAPVGKASTHAHMLQQSNVGGAVGQVFADRVPGEGCSGGRAQAGLCGSTGPSLLEHSASHVQSTNAGAIYGPPGSIGDYTSRRPNLIGNPGEPIRP

SEQ ID NO: 46461 - protein, 82 aa, Homo sapiens
MVYGASEAIGQHQSSAAKPRRSQSESLGPEFQGLWEWLPAKSANVESVFSHRTDSPEGSLPCFSLVLVHRIPPGNFSLTFAL

SEQ ID NO: 46462 - protein, 37 aa, Homo sapiens
  misc_feature (1)...(37): Xaa = X or * as defined in Table 2
LLLGLAAEDXRCPIASEAPQTITDTELWVTLTVEGKS

SEQ ID NO: 46463 - protein, 136 aa, Homo sapiens
  misc_feature (1)...(136): Xaa = X or * as defined in Table 2
DPQVGKLLQHCPARIKMTVTFNNHRKPQLSKFHQLYSEDTQQQIIRETFHLVFKRDENVCKFLGTIWSLTTGKLNRGQAPLFGIFHTVELHLEIRSSCQGIVHFXLTCFSSCPCSGPFVNSPFYLPLESGHSKWPH

SEQ ID NO: 46464 - protein, 81 aa, Homo sapiens
  misc_feature (1)...(81): Xaa = X or * as defined in Table 2
LQLGPKEKQSRVLGSFFQVPSCGKMGCGSSGSRHIGFPPPQLSGGPLDPRQGSGISEMKXTEXGGYPKGSPQHYSRKHQGS

SEQ ID NO: 46465 - protein, 103 aa, Homo sapiens
  misc_feature (1)...(103): Xaa = X or * as defined in Table 2
KEQCLQALSSVKNREKRPSSFHPICWSAVSFSVGREGDMWPLAPFPDSENVAGAGALLLRLAALPGLSWALRPPPPAPVRSWATSGWXGGQGREPGRGIPPRW

SEQ ID NO: 46466 - protein, 157 aa, Homo sapiens
  DOMAIN (30)..(59): Zn-finger in Ran binding protein and others domain identified by PFam, accession name zf-RanBP, E-value=4.9e-08, PFam score of 40.1
VGGGGVQPSMTMGDKKSPTRPKRQAKPAADEGFWDCSVCTFRNSAEAFKCSICDVRKGTSTRKPRINSQLVAQQVAQQYATPPPPKKEKKEKVEKAGQKRKPEKRPRKFSPSVVTKKNTNKKTKPKSDILKDPPSEANSIQSANATTKTSETNHTSR

SEQ ID NO: 46467 - protein, 138 aa, Homo sapiens
  DOMAIN (64)..(93): Zn-finger in Ran binding protein and others domain identified by PFam, accession name zf-RanBP, E-value=2.1e-06, PFam score of 34.7
  misc_feature (1)...(138): Xaa = X or * as defined in Table 2
DSGRSWKRLLSPPRPMCDTWALGSYPRLCFAVSPPFSCSLPLPSLFPHSPLLGRPKRQAKPAADEGFWDCSVCTFRNSAEAFKCSICDVRKGTSTRYLKICVTWVVVVIXQVFIEHTAICALGVQWYKDRPGPCSYGA

SEQ ID NO: 46468 - protein, 113 aa, Homo sapiens
GDLLETCHFQAFWQALDENMDLLEGITGFEDSVRKFICHVVGITYQHIDRWLLAEMLGDLSDSQLKVWMSKYGWSADESGQIFICSQEESIKPKNIVEKIDFDSVSSIMASSQ

SEQ ID NO: 46469 - protein, 51 aa, Homo sapiens
  misc_feature (1)...(51): Xaa = X or * as defined in Table 2
KTSLFQHWLWKVTIVIVMFXXLRVNVGKLLNNIHRYNSENLASLGSQWKFP

SEQ ID NO: 46470 - protein, 117 aa, Homo sapiens
  misc_feature (1)...(117): Xaa = X or * as defined in Table 2
KTSLFQHWLWKVTIVIVMFXXLRVNVGKLLNNIHRYNSENLASLGSTQIPLKAFTNPCHTSFTLCKHMVIQAHQEKQLIQQILYLGDLLETXHFQAFWQALDENMTLLESITGFEGF

SEQ ID NO: 46471 - protein, 65 aa, Homo sapiens
  DOMAIN (7)..(52): Ribosomal protein S24e proteins domain identified by eMATRIX, accession number BL00529A, p-value=9.113e-18, raw score of 22.06
  misc_feature (1)...(65): Xaa = X or * as defined in Table 2
TAIMNDMVTIXTRKFMTNQRLQRKQMVIDVLHPGKATVPYLILIEQLRFARHCAWYGGDSDETSH

SEQ ID NO: 46472 - protein, 156 aa, Homo sapiens
  misc_feature (1)...(156): Xaa = X or * as defined in Table 2
PIPHLEKFHAPTRRTFRGNQMVIDVLSPPGKADQCPXAQEIPGKTXPKMYQDPHPDVIFVFWIPELHFGSRGKTKLAFGNDFMTSLGFIAKEKWNPKHRTLQGHGPGMEERKKTSKGKPTERERQGTGLEGKFQGGLAKGPFFGAWAKRRNEVSSS

SEQ ID NO: 46473 - protein, 75 aa, Homo sapiens
  misc_feature (1)...(75): Xaa = X or * as defined in Table 2
YPETPESPTQLSSGQPHREQPPEMPESPTQPSSGQSCQEQPPETPELPMXPCLAQPSQKHMIKGXQNNKHHENKM

SEQ ID NO: 46474 - protein, 149 aa, Homo sapiens
  misc_feature (1)...(149): Xaa = X or * as defined in Table 2
PRPSLPACSPWRIVDDCGSLKSWKRVCQWLQPCPNALPSCLGSPLRCEFSGFPRNXLGLGSTTGSFAVWGGLFSTIDCGLVRRPGPSPFHPVLPALTSVSLPPTPPGGPLAMVGSAMMGGWSGEWEILHLASSTHPYPSLPSPAPPFLE

SEQ ID NO: 46475 - protein, 99 aa, Homo sapiens
  DOMAIN (75)..(90): WILM'S TUMOUR PROTEIN SIGNATURE domain identified by eMATRIX, accession number PR00049D, p-value=5.271e-09, raw score of 0.00
  misc_feature (1)...(99): Xaa = X or * as defined in Table 2
HFGRVEVGRSQGQEFQTRLANKAKHHLYSFMNESQISPIGCXPMPPKLIRKVHREKNCAGRNLTRQRSGFKTGPPGPPARPSSPTLPPPPPLPRLPRRP

SEQ ID NO: 46476 - protein, 124 aa, Homo sapiens
DGGVFTPNFEEIISNFLVWGLFLDHEAGDGVLKPEGGMLSEELKWASRPVKLCRKELRQISALELSLRRSSLGVGIGSMAADSIEVSFPFVLSSVAVDLIISHRTQTVTLCSKTQGFLSLIASP

SEQ ID NO: 46477 - protein, 81 aa, Homo sapiens
  misc_feature (1)...(81): Xaa = X or * as defined in Table 2
NTSVKNNFSFMNESQISPIGCXPMAPKLIRKVHRERNCAGRNLTRAEKRLQTPGLPVPPARPSSPSSPPTPPLPAATPGGR

SEQ ID NO: 46478 - protein, 143 aa, Homo sapiens; identical to SEQ ID NO: 36173
  DOMAIN (93)..(143): Ribosomal protein L30 proteins domain identified by eMATRIX, accession number BL00634, p-value=2.636e-23, raw score of 34.38
  DOMAIN (88)..(134): Ribosomal protein L30p/L7e domain identified by PFam, accession name Ribosomal_L30, E-value=2.3e-20, PFam score of 72.0
  misc_feature (1)...(143): Xaa = X or * as defined in Table 2

SEQ ID NO: 46479 - protein, 102 aa, Homo sapiens
  misc_feature (1)...(102): Xaa = X or * as defined in Table 2
NSSNSFSIQFCSFAGEELCSFGGEEAFWFLEFSAFLRCFFLIFRDLSTFGLXCAPLEEKRHSGFWNFQPFCAAFSSSSGIYLPLVFDAGDLQMGFLCGCPFC

SEQ ID NO: 46480 - protein, 268 aa, Homo sapiens
  misc_feature (1)...(268): Xaa = X or * as defined in Table 2
EKAKEFRRAEEKKKEVPAVPETLKKKRRNFAELKIKRLRKKFAQKMLRKARRKLIYEKAKHYHKEYRQMYRTEIRMARMARKAGNFYVPAEPKLAFVIRIQRVSMGVSPKGSERCCKLLRPFVKIFNGNLLXKLNKGFRLTMLRIVEPYIGMGGTPILKSVNELIYKRGYGKIHRKRIALTDYALIARSLGKYGIVCMEELNHEIYTVGKRFKEANNFLWPFKLSSPQGGMKKKTTHFVEGGDAGNREDQINRLHRRNELTRLTWIFF

SEQ ID NO: 46481 - protein, 42 aa, Homo sapiens
  misc_feature (1)...(42): Xaa = X or * as defined in Table 2
PPSAPAPGXLRPPALSSGSPXPPSAPAPGXHAPPPSAGTPPP

SEQ ID NO: 46482 - protein, 493 aa, Homo sapiens
  DOMAIN (387)..(428): kw TRANSCRIPTASE REVERSE II ORF2 domain identified by eMATRIX, accession number DM01354I, p-value=6.400e-32, raw score of 15.55
  DOMAIN (165)..(373): AP endonuclease family 1 domain identified by PFam, accession name AP_endonucleas1, E-value=2.2e-41, PFam score of 150.9
  misc_feature (1)...(493): Xaa = X or * as defined in Table 2
MNECRGVEITTVCSEDWIQRHLPGAVVPLKGEGNVGVATEDHYQEDSFGFGLRGTGKPLKLEKSRPGAVTHTSPSDGLTQYVPDSLTAMPAAAVVIWVIRPGCGVQQQIGFLRHSNIDDIRPRTIIRAVAPVKLHGIRIKMASFTSATRLTDEQVITAPADSGIVIPRFSDNWVAGGKTHLTHKDSHKLKVKGWKKAFHANGHQKQAGVAILTSDKTNFKATAVKKDKEGHYIMVKGLDQQENITILNIYAPNTGAPKFMKQLLIDVRNEIDSNTIIAGDFNTPLTALDRSSIQKVNKETMDLNYTLEQMDLKDIYRTLHPTTAEYTIYSTVHGTFSKIDYMTGHKTSLNKFKKSEIISSSLSDHSGIKLEIDSKRNHQNHANTWKLNNLFLNNRWVNNEIKMEIIQLFELNNNNDTTYQNLWDTAKVVLRGKFIALNAYIKKTERAKKTIYSHTSGIXKQEQTKPKPSRRKEIIKIRAELNEITTKKTIQKK

SEQ ID NO: 46483 - protein, 122 aa, Homo sapiens
  misc_feature (1)...(122): Xaa = X or * as defined in Table 2
ASERLGGPGSPGXPVNPRTDGSGAAWLSQRAQCTQSDPRVXEVPEHLSPSTPSQEYRGLPALPHTSRPSHCLPACPLPSRTQPWVPVKPGPTACRGFLQHSPTPGSPSPXSFQGSSWWDTDL

SEQ ID NO: 46484 - protein, 227 aa, Homo sapiens
  misc_feature (1)...(227): Xaa = X or * as defined in Table 2
AEPWDEGGDGVPCRVPSSGSVXVXTLYLDSSVQLCGTEAPQHPVDGPPGGKLCHEGSLHLRQGQIPGPRLVLQFVQQAGVCGPGGNAVYSTPRDSASLVSGRTSMLFLRKFGKTWRKGKLHQRGPPASPVLGRECNWGXVIGRHPAQSSSGPACAKDAAELGAAMPGLVSGPLGAALQPRGAGVQLGAATGPGSCSKRGSPKADARPRHSQEPGQVPPHAPQGPGLS

SEQ ID NO: 46485 - protein, 301 aa, Homo sapiens
  DOMAIN (46)..(70): PROSTAGLANDIN D RECEPTOR SIGNATURE domain identified by eMATRIX, accession number PR00854E, p-value=2.906e-09, raw score of 10.50
  misc_feature (1)...(301): Xaa = X or * as defined in Table 2
VQWSARPDATPLSTEPSLADYPEAQSHIPRRGPRRPEKQGRGGKPPRALGRERAGGGSRGPPASPDPLSRPCSQAPPPGASAGAXDAPACRREAGSDGVPCRVPSSGSVXVXTLYLDSSVQLCGTEAPQHPVDGPPGGKLCHEGSLHLRQGQIPGPRLVLQFVQQAGVCGPGGTDGSGAAWLSQRAQCTQSDPRVXEVPEHLPQVDTHKGELYQXPGGRDGPGWEEPPQCGMGVSEAHGGAGGPGEAGKGRLQRKFGKTWRKGKLHQRGPPASPVLGRPRPEXVLLRCDXEGXPPSAGQLL

SEQ ID NO: 46486 - protein, 39 aa, Homo sapiens
  misc_feature (1)...(39): Xaa = X or * as defined in Table 2
GTACLQIPQTQGVXQRGFLAEYIQWQLRMRSGSIPVRTG

SEQ ID NO: 46487 - protein, 291 aa, Homo sapiens
  misc_feature (1)...(291): Xaa = X or * as defined in Table 2
SVGSLCCLQETPGLRAFGVPWRSAQRRWPRRSAASLLSLVLPGRAHSPRPTLAPGPLEAQQPPPGGSALAQHSRTAPAGTSAACLWPVSEQGAAPMCQVTRPPGSQAPCSQPSAHAHKHLTTGSSSPAEASALPRAXTGSRWETKSSERVSSFSAXGTACLQIPQTLRRRTGXRQVGRRLPGSGGFDGCSIFSXSXPVTYSLRSVSATSSNEATQLGTTXSNSIIFEFCSAQSTAVRCRLFSTXTDAPWSRSSSTTKTCFSITASCSAVLPLLLEALMEAPCPCLACSSAS

SEQ ID NO: 46488 - protein, 81 aa, Homo sapiens
PGPGRLIQKLGLRYCFSFLLALCFASCWAASPGSPCLACSSASLCLLSASSSSSAMARRQRWSSRGHSRSPSSQSFLLFFL

SEQ ID NO: 46489 - protein, 177 aa, Homo sapiens
  misc_feature (1)...(177): Xaa = X or * as defined in Table 2
XWKAAGVLPVPGLPEREERGAGQPGLLDSGVQARGERAVSDGCGGGRRWASARDPSLWTTGPLLCLSRTEVRGLHSAEQRGPCPAQREPSECPGWIAAAVREKSEEGVTGDQFEIQLTQQLWSLIPNEDVRRFMSHVIWTLKMECSETHVQGTCAKLMSRTGLLMKLLSEQQEAICX

SEQ ID NO: 46490 - protein, 234 aa, Homo sapiens
  misc_feature (1)...(234): Xaa = X or * as defined in Table 2
LSRKKPNWPSSMPWYQFSLIWLMSVKTSPSWKPSSPWFSGWKSYSTLQLGWSRGGMLLLGVQMDLLEDWKGDEAAILGTVVQGKPPLDCSGSPRSKAPRTWAYTPAWGVRKLPASCAXASLPARPGSAWPASGRSAAPPPAARSXLICSMSVSRRLCMLVSATSLESSNFSSAWRSSSSGILPCRFSMSRESFTSARCFMDSPASSSASLKLDSLPSSFWWRIRHSLRSPSDCG

SEQ ID NO: 46491 - protein, 32 aa, Homo sapiens
IRPRAVAHACNPSTLGGRGGRIMRSGDRDHPG

SEQ ID NO: 46492 - protein, 47 aa, Homo sapiens
KITTIWPGVVVHACNPSTLGGRGRRITRSGDRDHPGQHGETLSLLKI

SEQ ID NO: 46493 - protein, 81 aa, Homo sapiens
VSLQAIKKKRELFWSVLQRSLNKKDCLGFCFLEISIVLPALVAHACNPSTLGGRGGRIMRSGDRDHGQHSETPSLLKTQKN

SEQ ID NO: 46494 - protein, 394 aa, Homo sapiens
MVSIPDLMIRLPRPPKVLGLRREPSSALLFRSPRCGSECGAYFFHELAKEKRKLGPGVATLCGERVVHKKTEPLLFENVYSGQGEASQRTTAGGAVPTAALQRSVPEKLPPPLHPALFRHEAESMGSSRFKPVPLPSSHGDHRSQLRMENVDVKEEWQDEDFPGPLAAPCKCSARNGIFPRVAKEPVPWVKLGQHGLRLQEVIWAGDTPVATAKNMPGDSADHLGTARRRTAAPPTGAWADSDHRGARAPYRPAHIRPYMKVVTHGGGSQCPSLMHGDVKPSTRFGGRTVGKACMGTTAKAQRHHRLRSLLPSRQQPPDYHYIMENLFLPPGQQTTPGPVGLTSQRQEWRQAGSAPQVSYPGPLHVGSLPSVPREQYVISSLELLVAEDYMICT

SEQ ID NO: 46495 - protein, 170 aa, Homo sapiens
  misc_feature (1)...(170): Xaa = X or * as defined in Table 2
AMPSCTRAGLAFVCHVRRRGCLSCRGVIPASSQCLFPAPMGTTEATLRMENVDVKEEWQDXDLPRPLPEETGVELLGSPVEDTSSTSNTLNFNGAHRKRKTLVAPEINISLDHSEGSLLFDDFLDTLDDLDINVDDIETPDETDSLEFLGNGNELEWEDDTPVATAKNMP

SEQ ID NO: 46496 - protein, 55 aa, Homo sapiens
  misc_feature (1)...(55): Xaa = X or * as defined in Table 2
TAGDERHGPSRVRMFRIKGRRLGWMGPLGRGKRXVTRGMWPGKGPAYPGSSASSF

SEQ ID NO: 46497 - protein, 224 aa, Homo sapiens
  DOMAIN (36)..(47): PROTEIN GLYCOPROTEIN PRECURSOR RE domain identified by eMATRIX, accession number PD00306B, p-value=1.000e-08, raw score of 5.57
  misc_feature (1)...(224): Xaa = X or * as defined in Table 2
WGASRLREPPSPRTLHSPRPGPASAPPLRPLPQNRTPSPSAASTTAPPQPSEASRLPAXKAKPKPHPPSAPRRGGSPPRHSAQPACGRRRPRSVGGAAPYAAERRNSAPQGPPQRLRRTAEGGKRPSNPRQRSHPRQRGDSLPXLGPWSRDRRAGRDGRDGSAGGTRRSPSPRYASPEPLGPAAPASPAGASWTGGPGRRADDSWRASVFGAQSSACFPRARVL

SEQ ID NO: 46498 - protein, 103 aa, Homo sapiens
  misc_feature (1)...(103): Xaa = X or * as defined in Table 2
LVLEFTFTKPVLSVRMRHDKIVIVLKNRIYVYSFPDNPRKLFEFDTRDNPKGLCDLCPSLEKQLLVFPGHKCGSLQLVDLASTKPGTSSAPFTINAHQSDIAX

SEQ ID NO: 46499 - protein, 74 aa, Homo sapiens
  misc_feature (1)...(74): Xaa = X or * as defined in Table 2
GGQHWAKAWRQTLGPEMPERTGACGCGSLXPFTTPPPPAICVDGTFHKYVFTPDGNCNREAFDVYLDICDDDDF

SEQ ID NO: 46500 - protein, 300 aa, Homo sapiens
  misc_feature (1)...(300): Xaa = X or * as defined in Table 2
HPGPCPDHEQVGSMGLVEDPVSPGLPLTLNLGPDNPPTCPAVLIWDDAREGKDXEGXSSLGIPPPPHGHPVLCDTHRIVIVLKNRQLCPFXDAASSSAAHPTPHLHTLGLCELPCGLLAPSLHTTPTSDSSLLPQDLASTKPGTSSAPFTINAHQSDIACVSLNQPGTVVASASQKGTLIRRVCMVGWXPHTTXHVGITADLSSSINFSHDSSFLFPTLPCPCPPAHLPYLGLASAACRLARVGKVGPMIGQYVDSQWSLASFTEMPERTGACGCGSLXPFTTPPPPAICVDGTFHKYVF

SEQ ID NO: 46501 - protein, 105 aa, Homo sapiens
  misc_feature (1)...(105): Xaa = X or * as defined in Table 2
GVHCHGFSAGQAAGQEPTSVHETLLPHQLQDQSALRGGVQNRQRHQAAEGPGERAGAAVSVGLGEPQCHXVGAGRAARGPPILEVPAGGADAAAECPAGPHGCGG

SEQ ID NO: 46502 - protein, 164 aa, Homo sapiens
  misc_feature (1)...(164): Xaa = X or * as defined in Table 2
WENARPEPSQGDLRAASVVSPRLPPRKGQGGLGYFGRGAGHAHGTAGQGASESETLLPHQLQDQCALRGGVQNRQRHQAAEGPGERAGAAVSVGLGEPQCHXVGAGRAARGPPILEVPAGGGDAAAECPAGPHGQNARGQQSGISQLRHEREFLLRPFPQAPQL

SEQ ID NO: 46503 - protein, 133 aa, Homo sapiens
  misc_feature (1)...(133): Xaa = X or * as defined in Table 2
VVFAEAAEASLMTSGVGGGAAQSPRSRRGGWWPLGEMPYANQPTVRITELTDENVKFIIENTDLAXGYRGKRLAALGRGRPKPGPRGRGRGCSGWGGGDVLPELPPCTRALALGACGAGPACRGCSAFTPLGF

SEQ ID NO: 46504 - protein, 149 aa, Homo sapiens
  misc_feature (1)...(149): Xaa = X or * as defined in Table 2
SGGKEAQGQSGTDQTVVVLSNPTYYMSNDIPYTFHQDNNFLYLCGFQEPDSILVLQSLPGKQLPSHKAILFVPRRDPSRELWDGPRSGTDGAIALTGVDEAYTLEEFQHLLPKMKGNKWEQKSHYKPDWDXNLSCLFRQVLNFVIVAPP

SEQ ID NO: 46505 - protein, 148 aa, Homo sapiens
  misc_feature (1)...(148): Xaa = X or * as defined in Table 2
NQSIVRVNVDNSLSIPVIAAELGVRKPSEKGMQQKKKTKDLGFRAGKESKTEWRKXGLQDMASQMFASPLKXPVTAAFHDSSMPSSLLQIEMEQLFLEARLQLDSKSEARRNQCDSMLLRNQQLCSTCQEMKMVQPRTMKIPDDPKAS

SEQ ID NO: 46506 - protein, 139 aa, Homo sapiens
  misc_feature (1)...(139): Xaa = X or * as defined in Table 2
SFLLSSSYTRTKSILRWPSLKKRESGFPLNSSNSGVRKSCXLSSDPKSGTIVCPRFSNTISPSSSSSSSSICSKTFLPSFSCLPQKAAPNLARSWGLPGSRTARLSQGPDRGPRGVCRLGSGAAEPSQRRGKPSRDEIV

SEQ ID NO: 46507 - protein, 255 aa, Homo sapiens
  misc_feature (1)...(255): Xaa = X or * as defined in Table 2
INSIRILSTCKMGHPRFAPQAPGPLRTSEKGPAVLPAWGNSSSDHSSEPSVGFYFNEDSDGSHPVLQMRACSPDPAQGARPSAEAPGQPXHSASRGSDPKVASEWRLPHAEASPQLPGFSGAASPAPKHSCSSFSCLPQKAAPNLARSWGLPGSRTARLSQGPDRGPRGVCRLGSGAAEPSQRRGKPSRGTHRPEPRAGGRLSPAERSPETEHAQCGRRGSLRNDXTSPVLRGAQKEVGRRDCRGSSAILRAGEL

SEQ ID NO: 46508 - protein, 209 aa, Homo sapiens
  DOMAIN (35)..(78): kw TRANSCRIPTASE REVERSE II ORF2 domain identified by eMATRIX, accession number DM01354T, p-value=9.471e-39, raw score of 9.48
  DOMAIN (1)..(158): Reverse transcriptase domain identified by PFam, accession name rvt, E-value=0.01, PFam score of -30.9
  misc_feature (1)...(209): Xaa = X or * as defined in Table 2
YDKTRLFNTVPLPPPHKKIIKKIIQDIKGEILRAFPLRTGTKHRCPLSPLLFNILLEVLARAIRQEKEIKSIQIGKEEVKLSLFADDIIIYLESPKYSSRKLQELIKEFSKVSRYEINVHKSVALLYTNSNQAENQIKKSTPFTIAAKNKIKYLGIYLTKDAKDGYKENYKTLMKEIIDDKNKQKYIPXSWKGRINIVKTTILSTAIYK

SEQ ID NO: 46509 - protein, 129 aa, Homo sapiens
  misc_feature (1)...(129): Xaa = X or * as defined in Table 2
ICESRRGRVCSALVRRYVGEGFGKAGSICMPQAPDKSSRWTILIRPPRFPPSPSCSPGKEAPGGSELSPLPHAWPSDPVSPLGDRVTANPAEIRXEPGPQSAAPGFREQRRRGQMGXIWYLTPTPPGGQ

SEQ ID NO: 46510 - protein, 145 aa, Homo sapiens
  misc_feature (1)...(145): Xaa = X or * as defined in Table 2
KGKSLLCTSPKVCRGRLRKSRKPETKVTHICMPQAPDKTSRWTILIRPPRFPPSPSCSPGKEAPGGSELSPLPHAWPSDPVSPLGDRVTANPAEIRXEPGPQSAAPGFREQRRRGQMGXIWYLTPTPPGGQRPSSAASPRGFPLV

SEQ ID NO: 46511 - protein, 208 aa, Homo sapiens
  misc_feature (1)...(208): Xaa = X or * as defined in Table 2
MKGTAPWRCGSRRGRVCSALVPKVCRGRLRKSRKPETKVTHICMPQAPDKTSRWTILIRPPRFPPSSILQSWEGGTGWLRTLPLPHAWPSDPVSPLGDRVTANPAEIRILGEDPESPEETLNLILRTPIPPKPRGNAKSHPGGHRSHRXEPGPQSAAPGFREQRRRGQMGXIWYLTPTPPGGQRPSSAASPRGFPPTNNSSRLPAEPE

SEQ ID NO: 46512 - protein, 88 aa, Homo sapiens
MQALSEEDRRLWMEAMDGRNLDDFLIPPQHPMYRSGLQTEESLDTLVEVIGCVTWYYLCLKFFPLSRIAFCTCSGSQSANVLELGISL

SEQ ID NO: 46513 - protein, 54 aa, Homo sapiens
  misc_feature (1)...(54): Xaa = X or * as defined in Table 2
CCPVLPGPWAAGHPGDXPDGPGXXAQPHKECRGGFAPLQVTLGPKQPSGKRVNK

SEQ ID NO: 46514 - protein, 281 aa, Homo sapiens
  misc_feature (1)...(281): Xaa = X or * as defined in Table 2
NIYLLLQVFDCWGLQGILGVSNPSYSIRRCYTAGQSPRGLPDPGRFXGXEESTGEQADCPXGSHRRSRSAAGAADGGLDPGAHTITCGCLSHRGRLVPAQKSSAALXAPSGAKPAPTVAPVHDPARQGXGGQARGQGARQPHSHREGLCECXAVTTLXEPHLRNSSAPAXERGPQGIRVPEGQSGDQESSAEEHHGGDPGGGKPRCGQHQEPLGAGWPSPAGVEPLLGGLQKGSDGAPXXEPQRGCVDEAQQSSPGAVPEAKAIAVQPPAPDVFAAVARCD

SEQ ID NO: 46515 - protein, 144 aa, Homo sapiens
  DOMAIN (60)..(71): RNase H domain identified by eMATRIX, accession number PF00075F, p-value=8.159e-09, raw score of 12.87
  DOMAIN (10)..(135): RNase H domain identified by PFam, accession name rnaseH, E- value=9.8e-08, PFam score of 33.0
IPAETTCEPAKHFHCFTDGSSNGKASYSGSKGKVFQTPYISAQKVELVAVIEVLTAFDMPINVISDSSYMVHSTQLIENAQLRFHTDEQLIIKTKKGGNRDYGTAQTQLNLALLTFHFSSLPKGQMLPAAEQHLQKPAAKTQAE

SEQ ID NO: 46516 - protein, 191 aa, Homo sapiens
  DOMAIN (25)..(33): Reverse transcriptase (RNA-dependent DNA polymerase) domain identified by eMATRIX, accession number PF00078A, p-value=4.938e- 09, raw score of 8.82
MVAIVKPPEPIPLKWLTDKPIWIEQWPLNKEKLEALEKLVSEQLENGHIAPTFSLWNSPVFVIKKKSGFQFNPAGILLKLVLFTMKLNMHLAQVSGKLKEEVAGAGVAVGSPTWQVSRCMHQPTSIILQKFRPQPHKAPPPNANTALDSRAAAVLLCFSAGAGVWPYVQSLKKVRNGEEDAFTFTLPSLEH

SEQ ID NO: 46517 - protein, 563 aa, Homo sapiens; identical to SEQ ID NO: 35205
  DOMAIN (330)..(383): ANTIGEN MELANOMA-ASSOCIATED MULTIGENE FAMILY TUM domain identified by eMATRIX, accession number PD01876C, p-value=2.017e- 09, raw score of 21.73
  DOMAIN (243)..(462): MAGE family domain identified by PFam, accession name MAGE, E -value=5.6e-74, PFam score of 259.2

SEQ ID NO: 46518 - protein, 472 aa, Homo sapiens
  DOMAIN (134)..(260): RNase H domain identified by PFam, accession name rnaseH, E- value=5.5e-29, PFam score of 109.7
MSHTGVSNTPSGDCSLGIHFWNRHTQQQTELRTEGSPRRKGQKNIFQRTTVPSARLVFPELDTFEEYRPILICLMFSKYQIEVQNYFQRNNEVMKLESHNPKKTGSAAVDLCCRKAASLLPGEPPQKVPTGACGPLPADGSSNGKASYSGSKSKVFQTPYTSAQKAELVAVIEVLTAFDMSINVISDSSYMVHSAQLIENAQLRFHTDEQLMTLFTQLQTAVRSRMHPFYITHIRAHVPLPGPLTEGNQMADHLVANAISNARHFHNLTHVNASGLKRRYSTTWKEAKNIIQRCPTCQMVYSSSFTGGVNPQGLEPNSSLANGCHTCSLVWETSLCTCQMLSAPEQYLQKPDAKTEAEQPIWWRDPITKRWEIGKITWGKGYACASPGPNQQPIWMPSRHLKPYHEPDAEEEILGGSRGPPSCSHVETDAEEVPNCHEQHPSNTATHMGTDQEAVTDGRRKPEESSTTSHNE

SEQ ID NO: 46519 - protein, 250 aa, Homo sapiens
  DOMAIN (82)..(99): RNase H domain identified by eMATRIX, accession number PF00075A, p-value=9.143e-14, raw score of 14.44
  DOMAIN (63)..(226): Reverse transcriptase domain identified by PFam, accession name rvt, E-value=1.1e-14, PFam score of 62.3
  misc_feature (1)...(250): Xaa = X or * as defined in Table 2
KNHFNWKDKFPPRLRISFLMVATVKPPEPTPLKRLTEKPIWIEKWPLSKXKLEALEKLVTEQLENGHIAPTFSPWNSPVFIIKKKSGKWRMLTDLIAINSVIQPMGALQPPGLPSPAIIPKNWPLIVTDLKDCFFTITLAKQDCEWFTFIIPAVNNLQPAKHFHCFTDGSSNGKASYSGSKVKVFQTPYTSALTAELVAVIEVLTAFNMSINMISDSSYVVHSTQLVENAQLQFQTDDTNDFIYPVANSS

SEQ ID NO: 46520 - protein, 131 aa, Homo sapiens
  DOMAIN (113)..(125): AMP-BINDING SIGNATURE domain identified by eMATRIX, accession number PR00154A, p-value=4.857e-11, raw score of 8.88
SESLCERILDSSCSLLITTDAFYRGEKLVNLKELADEALQKCQEKGFPVRCCIVVKHLGRAELGMGDSTSQSPPIKRSCPDVQISWNQGIDLWWHELMQKAGDECEPEWCDAEDPLFILYTSGSTGKPKAS

SEQ ID NO: 46521 - protein, 353 aa, Homo sapiens
  misc_feature (1)...(353): Xaa = X or * as defined in Table 2
ELDVMGLPEERVRSGSGSRGQEEAGAGGRARSWSPPPEVRLVSLLRLNMSQKINDIWASISVAEFWGDIAKEFYWKTPCPGPFLRYNFDVTKGKIFIEWMKGATLXLCLFLVWGRSYTPNHWFFLVCLREGNEPGGQLDGREQVAARRVHGSYSVLLPAGIQKGDRVAILSNPFLHSLNPWGFLLSLRLSSLPXGPMDIVPTRQHGAYXGLECLLLPKDMDMGGSCQVPFEPTRLPLXAFLFSRGFPVRCCIVVKHLALTLSSHSLYTWTLQGQGTGVSCPHLELFTVLPCPSLQISWNQGIDLWWHELMQEAGDECEPLPSLHLVVSRGGHKTLTCSPFFPQGVVHTVGGYM

SEQ ID NO: 46522 - protein, 60 aa, Homo sapiens
ALGVHFVLGPVGDGSRAVDCGQQLPTSSACTTSGLSISRRCSGIWRMNQKKQVRGPSPKE

SEQ ID NO: 46523 - protein, 426 aa, Homo sapiens
  DOMAIN (391)..(415): Serine proteases trypsin family, histidine proteins. domain identified by eMATRIX, accession number BL00134B, p-value=6.029e- 13, raw score of 15.99
  DOMAIN (213)..(426): Trypsin domain identified by PFam, accession name trypsin, E- value=3.2e-32, PFam score of 104.1
  misc_feature (1)...(426): Xaa = X or * as defined in Table 2
WPAPPSQVPSLDYGLALWFDAYVSVHGTQETSQCSPESSLTPPRLCGLRILQPYAERIPVVATAGITINFTLRGYAWPNGALPASTVPCGFAACPGEFLCSVNGRQAPAGSSGFLPPVPSLCPHTVCRATFQCKEDSTCISLGRFPWGSETHLLCPAPIPSVPGVPCGTFTFQCEDRSCVKSLSASPLPLLLCPPHHLPPSPDCGLQGPSSRIVGGAVSSEGEWPWQASLQVRGRHILGRGSFLPPHLTPPHPTPPHPSMASTVLWTVFLGKVWQNSRWPGEVSFKVSRLLLHPYHEEDSHDYDVALLQLDHPVVRSAAVRPVCLPARGRIENRGSRLLRSHFCPXPRTGPISNALQKVDVQLIPQDLCSEVYRSSPGKGGALTLLQSFLLSPFQGDSGGPLVCKALSGRWFLAGLVSWGLGCGRP

SEQ ID NO: 46524 - protein, 188 aa, Homo sapiens
  DOMAIN (27)..(82): Domain present in ZO-1 and Unc5-like netrin receptors domain identified by eMATRIX, accession number PF00791B, p-value=6.091e- 11, raw score of 28.49
  DOMAIN (23)..(121): Ank repeat domain identified by PFam, accession name ank, E- value=2.3e-14, PFam score of 61.2
  misc_feature (1)...(188): Xaa = X or * as defined in Table 2
CCWNMALIQTFQMSMEIPLCTTLSXTALHLASANGNSGVVKLLLDRRCQLNVLDNKKRTALTKAVQCQEDECALMLLEHGTDPNIPDEYGNTTLHYAIYNEDKLMAKALLLYGADIESKNKVEEEMKKHESNNVGLLENLSNGVTAGNGDDGLIPQRKSRTPENQQFPDNESEEYHSHTEFLPSRIYP

SEQ ID NO: 46525 - protein, 100 aa, Homo sapiens
  misc_feature (1)...(100): Xaa = X or * as defined in Table 2
CDPQMCCCFRPEAATPGXREAASAGPWDSAPPSPARTSLPSAHSSDYPLPRSRSSSASAASRSPPRPLSTIARRLNPRRSGRSLPSGQPAGPSDPRGFCL

SEQ ID NO: 46526 - protein, 841 aa, Homo sapiens
  DOMAIN (793)..(806): PROTEIN ZINC-FINGER METAL-BINDI domain identified by eMATRIX, accession number PD00066, p-value=9.100e-16, raw score of 13.92
  DOMAIN (367)..(836): Zinc finger, C2H2 type domain identified by PFam, accession name zf-C2H2, E-value=6.7e-126, PFam score of 431.7
  misc_feature (1)...(841): Xaa = X or * as defined in Table 2
SSQSGAAAGAFCGLCVDLELTASCDLEADSEDRTEHLATLQLRPDFSGSRCPAPQKHLQTHRPHSKPWPIYXPTXRSYLAISPHSWXAPPPSRRRAPPAFHPHTQACPSTCYCHTLASRRGPSNGRYHRPGYPHPTAVQRDPPAGPRGCQSPCXHQPPACRRPCGRHYRXHGQHDPPPWQXHCXSRSPCHPPSQRDAVTWPFIHIPAEDSHTQPQKSPPAFRPHTKTCPFTCYCHTFAGRRGPSDGRHHHLGYHHPSAVQWDPPACXRGCWRPCQREPQTCPCFCGRPPPGTSLAXPPHPRVPLKEKLCQYDEFSEGLRHSAHLNRHQRVPTGEKSVKSLERGRGVRQNTHIRNHPRAPVGDMPYRCDVCGKGFRYKSVLLIHQGVHTGRRPYKCEECGKAFGRSSNLLVHQRVHTGEKPYKCSECGKGFSYSSVLQVHQRLHTGEKPYTCSECGKGFCAKSALHKHQHIHPGEKPYSCGECGKGFSCSSHLSSHQKTHTGERPYQCDKCGKGFSHNSYLQAHQRVHMGQHLYKCNVCGKSFSYSSGLLMHQRLHTGEKPYKCECGKSFGRSSDLHIHQRVHTGEKPYKCSECGKGFRRNSDLHSHQRVHTGERPYVCDVCGKGFIYSSDLLIHQRVHTGEKPYKCAECGKGFSYSSGLLIHQRVHTGEKPYRCQECGKGFRCTSSLHKHQRVHTGKKPYTCDQCGKGFSYGSNLRTHQRLHTGEKPYTCCECGKGFRYGSGLLSHKRVHTGEKPYRCHVCGKGYSQSSHLQGHQRVHTGEKPYKCEECGKGFGRNSCLHVHQRVHTGEKPYTCGVCGKGFSYTSGLRNHQRVHLGENPYK

SEQ ID NO: 46527 - protein, 241 aa, Homo sapiens
  misc_feature (1)...(241): Xaa = X or * as defined in Table 2
ISVFRSPGQSTSQHDAATWPFLHISGEGPTPSRRKAPPAFHPHTQACPSTCYCHTLASRRGPCNGRYHRPVYPHPTAMQRDPPAGPRGCQSPCWHYTPACRHPCGRHYRXHGQHDPPPWQXHCXFGSPGQSTSQHDAVTWPFLHIPGERPTASRRKAPPAFHPHTQACPSACYCHTLASRRGPSNGRYHRPGYPHPTAVQRDPPAGPRGCQSPCXHEPPACRHPCGRHYRXHGQHDPPPWQ

SEQ ID NO: 46528 - protein, 143 aa, Homo sapiens
  misc_feature (1)...(143): Xaa = X or * as defined in Table 2
SCNMSLCRCNVCIRAAFKEGTPALLVYSAILSFTPVSLAKSCSISIAIVSNILSWLDPFKRGVVSELSRLPSRVLLXLXLVHSLLKETSFRSSSFSSCRACFLRSSQSTAGPCRHLCRPTSAGIGEQRRCRPESHHEIVDRGI

SEQ ID NO: 46529 - protein, 107 aa, Homo sapiens
  misc_feature (1)...(107): Xaa = X or * as defined in Table 2
SCNMSLCRCNVCIRAAFKEGTPALLVYSAILSFTPVSXDPEAFSPHLPSNCWSLPPSLSSNVSRDRGAEAMQAGKSPWCVFPPXEPGPTGCEPPRTLPPAPFKLCSL

SEQ ID NO: 46530 - protein, 131 aa, Homo sapiens
  misc_feature (1)...(131): Xaa = X or * as defined in Table 2
SQRRGSVCRLVHGRHGQPGKGTSPHSSLWDWQPGPQPSGPPWPEGGASPGTPSLIPRSXSASCCFPWHPGCSCXGAPASQCXVALSPQPWFPLPCLSVPSPVGAQATGPKHVRTPPGSDSAPPQLQPQSRI

SEQ ID NO: 46531 - protein, 66 aa, Homo sapiens
  DOMAIN (19)..(38): Src homology 3 (SH3) domain proteins profile domain identified by eMATRIX, accession number BL50002A, p-value=7.231e- 10, raw score of 14.19
PTRPRTRGPASRYSMEAVAKFDFTAWGEDELSFHTGDVLKVGDLGPQGSSREFQLLSNLTVPAFVS

SEQ ID NO: 46532 - protein, 113 aa, Homo sapiens
  DOMAIN (95)..(113): Src homology domain 2 domain identified by PFam, accession name SH2, E-value=0.00023, PFam score of 16.2
  misc_feature (1)...(113): Xaa = X or * as defined in Table 2
IGSPDGRNVIRERTVTNETQTEGEREKEEERESFHTGDVLKVGDLGPQGSSREFQLLSNLTVPNFIDIQFPKXVSAACXDGPSHTHSSYISSSLFIIRASQSSPGDFSISVRY

SEQ ID NO: 46533 - protein, 52 aa, Homo sapiens
CHIHKQEITHGGWDVERATGLVNEIHRQGCGRFLLQYWRECQTLCLAVEKSM

SEQ ID NO: 46534 - protein, 170 aa, Homo sapiens
MSSLVLEPNPGPRPPYLHCPYLLLGEVLGHSALGAQPVQAAEGDADELLELPPSAARSMRAAAAQERSPGCWRLGKEPLIRESWTRSAPWRCLSQDASRAGSQVCGSSPQTRGGGGKKLQRWAQKAGAVGAKGQGDGGNKPWRRGQKAAVAEAKSCGGGAKSYGDGHKKP

SEQ ID NO: 46535 - protein, 135 aa, Homo sapiens
  misc_feature (1)...(135): Xaa = X or * as defined in Table 2
NRTIQADLLYPDDAGNPLPARNTRQASASADPPGARAGERRRGAAGPSPGRXQQAPGPPPPGEGAGARPGXEGDAAGGATRFVGEDARLLRAGCHRGGRGEAEEPLQALRHPGLQGLLXEGAPHGELALVAFAHL

SEQ ID NO: 46536 - protein, 31 aa, Homo sapiens
CRTCAEPPSDSLHSGRPGAPWPGESPPSRLW

SEQ ID NO: 46537 - protein, 44 aa, Homo sapiens
SAFLDWVVIPDEFSHLPEFSSRQIPPAYQYLQARFRLTTCKKRC

SEQ ID NO: 46538 - protein, 653 aa, Homo sapiens
  DOMAIN (170)..(190): Early Protein (E6) domain identified by eMATRIX, accession number PF00518B, p-value=9.557e-09, raw score of 14.72
MRRLHSHGRHPPKRFPSTSLLNKRLLEKPVHKGEIIKRGRISEREGTPELTLCTITPTSPRSFRVNRSPGSDLEAVQLLWLLRRGGDRATCAVASPAVAAAAAAAVAAVAAESPEPDVPAASGWRLESARVMSAQGDCEFLVQRARELVPQDLWAAKAWLITARSLYPADFNIQVRSRLCMRPLCVEEGQRAMLDELGAFWAGYEMYTIERNAERTATAGRLLYDMFVNFPDQPVVWREISIITSALRNDSQDKQTQFLRSLFETLPGRVQCEMLLKVTEQCFNTLERSEMLLLLLRRFPETVVQHGVGLGEALLEAETIEEQESPVNCFRKLFGKENCILYYFYGKLICWVCDVLPLIINNHDVRLPANLLYKYLNKAAEFYINYVTRSTQIENQHQGAQDTSDLMSPSKRSSQKYIIEGLTEKSSQIVDPWERLFKILNVVGMRCEWQMDKGRRSYGDILHRMKDLCRYMNNFDSEAHAKYKNQVVYSTMLVFFKNAFQYVNSIQPSLFQGWFTNFRVSKKPVHTVGMLGVKKNSAVAYRLMTLSLSVLHQDNIEVMSLVKEVPASPSSMIVNFLRPHQPCGTWSGHLLLQRVANPISCESPSLSTKYLITLSLSGLRCCEDFGILHSWPCLVYGHIDTREFQGPVQYAQV

SEQ ID NO: 46539 - protein, 60 aa, Homo sapiens
  misc_feature (1)...(60): Xaa = X or * as defined in Table 2
SATPWLPTGLAAPTPGLAAPGTRSPPGQTXPERSPAASPKRPERPALDFQPPRQPPPPPP

SEQ ID NO: 46540 - protein, 245 aa, Homo sapiens
  misc_feature (1)...(245): Xaa = X or * as defined in Table 2
WNCFVCSADTMAQIMAEQEVENLSGLSTNPEKDIFVVRENGTTRRPLQPPPRGRASXGGAGRLCSQLITEQADIALTRGAEVKGRCGWRPLGLRTQTLRGRLKRTSPAQQESHNMSKGPEATCQLSGTLGXEQXGFXLLLWALAVAGKHTANSHHLSALVTPAGKSYECQAQQTISLASSDPQKTVFCRTYDSGCFDQSSLLFFFPIAEHKCPVDEREQLEETLPLILGLILGLVIMVTLAIYHV

SEQ ID NO: 46541 - protein, 106 aa, Homo sapiens
  misc_feature (1)...(106): Xaa = X or * as defined in Table 2
PAWPPWPGITGFCPQQDSPSNTFVVPAAHTVXCSHPCSYYKGIRQMVGLPQPLFHPDCPVTPQAHTDSLNTLGVLGGPPVCSDATLPQIINALEEDPAAQKMQLAF

SEQ ID NO: 46542 - protein, 68 aa, Homo sapiens
RGKLLEQGLDAWALLKPPASGQRPLRMQEDAGELQNERVGWLVVRFLQRVCCCGPCALVLPRLPISAA

SEQ ID NO: 46543 - protein, 83 aa, Homo sapiens
TDNHSSCRGNRTVILPSGGNSGTHCPALRCAGQIVAILQSGLLTPLSRFRYEREGARPGVPEGHLQEAVGSGRSGAGAPGCSV

SEQ ID NO: 46544 - protein, 85 aa, Homo sapiens
  misc_feature (1)...(85): Xaa = X or * as defined in Table 2
DRVSLLPRLRQENRLNPGGRGCSELRSHHCTPAWATEXGSVSKKKKKKKNQKKNQFDFISLALPPSPHCPPLSQSLLLQPSSSAN

SEQ ID NO: 46545 - protein, 113 aa, Homo sapiens
  DOMAIN (26)..(43): GLUCOSE/RIBITOL DEHYDROGENASE FAMILY SIGNATURE domain identified by eMATRIX, accession number PR00081C, p-value=2.241e- 10, raw score of 15.13
DIHHVRKSMEVNFLSYVVLTVAALPMLKQSNGSIVVVSSLAETAMKAVSGIVHMQAAPKEECALEIIKGGALRQEEVYYDSSLWTTLLIRNPCRKILEFLYSTSYNMDRFINK

SEQ ID NO: 46546 - protein, 119 aa, Homo sapiens
  DOMAIN (24)..(62): Short-chain dehydrogenases/reductases family proteins domain identified by eMATRIX, accession number BL00061B, p-value=1.529e- 21, raw score of 25.79
MEVNFLSYVVLTVAALPMLKQSNGSIVVVSSLAGKVAYPMVAAYSASKFALDGLFSSIRKEYSVSRVNVSITLCVLGLIDTETAMKAVSGIVHMQAAPKEECALEIIKGGALRPRRSVL

SEQ ID NO: 46547 - protein, 203 aa, Homo sapiens
  DOMAIN (155)..(172): GLUCOSE/RIBITOL DEHYDROGENASE FAMILY SIGNATURE domain identified by eMATRIX, accession number PR00081C, p-value=9.609e- 12, raw score of 15.13
  DOMAIN (47)..(202): short chain dehydrogenase domain identified by PFam, accession name adh_short, E-value=0.0012, PFam score of -29.4
  misc_feature (1)...(203): Xaa = X or * as defined in Table 2
DLTGFIKFSLLLGLFMAYYYYSANEEFRPGKYPCVSFWRNRFKKHRGAXVAYHLAKMGAHVVVTARSKETLQKVRVLCSQICVPSHAQMCSYIXDMTFAEQFVAQAGKLMGEAVSLTSSSELCPWGHQELLDIHHVRKSMEVNFLSYVVLTVAALPMLKQSNGSIVVVSSLAGKWDRDICGRXKKKKNARDDAVQTPGSKSAI

SEQ ID NO: 46548 - protein, 58 aa, Homo sapiens
LLYPANCVYMRCPQMLHFQGIQRPILLHVSSGGAIHLQTGVETEEMRSAIAPDPIPLT

SEQ ID NO: 46549 - protein, 707 aa, Homo sapiens
  misc_feature (1)...(707): Xaa = X or * as defined in Table 2
SDEWIISAGSVSGDYNSSAAVSKNDILLGIEHISVFSETNHSSEEAFIKTAKSQLVEIEPATQNPKTSFSYERLQALQETCKENKGVPKQGDTFLSFSAACETDVSSVTPEKEFEETSATGSSMQSGSELLLKEREILTAGKQPSSDSEFSASLAGSGKSVAKTGPESNQCLPHHEEQAYAQTQSSLFYSPSSPMSSDDESEIEDEDLKVELQRLRFRHIQEVVNLQTQQNKELQELYERLRSIKDSKTQSTEIPLPPASPRRPRSFKSKLRSRPQSLTHVDNGIVVIDPLCVESNAASCQQSPASKKGMFTDDLHKLVDDWTKEAVGNSLIKPSLNQLKQSQHKLETENWNKVLQLESVYHREDEATWLPQLRAQIVAYPACAAAIASAHRRSMGVQGFQEFLEKRCPGAVVPVDLLKLARTVSRQQQQQHLHRQLPPTAALAPGAPRAARGSVPLQPPLPPAALGAYSGGAGPIRHHHPAHHFHHHGQAQPGLHPPLPPPPPPQLPGARVLVDAGSALPRLYGGYQTDWVCGGQWNAMLGYLSALCQACAYPGGDGLELVVMFPGGLGKDRLAEWGRRCQAERQTAQLIVGHVGNKGTPPPRAWFLPPACLSHCVRLALIRFRFXVFQSLEDHHLEVVAFFRENGFHGLLAHDSEYALYNIPSYYSSHALKLSWNGKNLTTNQFLMQEVAKQLGLKRMNFPIFAA

SEQ ID NO: 46550 - protein, 181 aa, Homo sapiens
  misc_feature (1)...(181): Xaa = X or * as defined in Table 2
MRAPPKSGQLQHCRPSRGALRSGDLPWEINPLSSCSLLHEKDPPMTSGPQTNQPKEHLTNFKSGVRPLQGRLPWSFTLSGKSRFSGEGASTPTPYISGAPIPYFRTPTSYLCAPIPYVRTPTSYLCALTPFPLFWRHIRTSKRLNLQQPGIPPEPPPPGCLLQVPEIXPPGQGMPAAQDSS

SEQ ID NO: 46551 - protein, 117 aa, Homo sapiens
  misc_feature (1)...(117): Xaa = X or * as defined in Table 2
VRPRRDACLGPSPLAASPAFLGKGQVPQPLISLCPDPLFPHPNLISLRPNPLCPHPDLGISVPXPLSRFSGGTXELPNAXTAAAAAFLPEPPPPGCLLQVPEIXPPGQGMPAAQDSS

SEQ ID NO: 46552 - protein, 171 aa, Homo sapiens; identical to SEQ ID NO: 31009

SEQ ID NO: 46553 - protein, 77 aa, Homo sapiens
  misc_feature (1)...(77): Xaa = X or * as defined in Table 2
ARSVTSSSELCGSWCLQASRHTHVPWCQLXKLPVVHLVQPQPCRGPAPGAALPAGSLEMPGTTEPERGCHSPGLGIS

SEQ ID NO: 46554 - protein, 190 aa, Homo sapiens
  DOMAIN (128)..(145): Zinc finger, CCHC class domain identified by PFam, accession name zf-CCHC, E-value=4.6e-05, PFam score of 30.3
  misc_feature (1)...(190): Xaa = X or * as defined in Table 2
LLLGLAAEDXCCLIASEAPXTQSLFGGLFTRTHMKFGAVTQIRGPPLGDKSPVLLLFALERQRRHVLSMDPKLRCWSRTGKAAFPWCLIIAEMPDYSPTFQRCQTTQGRLPWSFTLSSKSRFSGEGARACYKCQKSDHQAKECPQPGIPPKPCPICAGPHWKSDCSTHLAATPRAPGTLAQGSLTDSFLA

SEQ ID NO: 46555 - protein, 112 aa, Homo sapiens
  misc_feature (1)...(112): Xaa = X or * as defined in Table 2
RARSEGAGLWSVVAPSAVSVFFVSDPRCAPFHRSPSCCSPVDRVCRCLRRVALAPAALVLVCSGSHSQSPWNSGLKLSDRLLLGLAAEDXRCPIASEAPXTTTDAELTIPGL

SEQ ID NO: 46556 - protein, 583 aa, Homo sapiens
  DOMAIN (98)..(207): Alpha-2-macroglobulin family N-terminal regi domain identified by PFam, accession name A2M_N, E-value=5.5e-09, PFam score of 32.2
MIFVLQIRVRGHDDSFLKNHLVFLVIYGTNGTFNQTLVTDNNGLAPFTLETSGWNGTDVSLEGKFQMEDLVYNPEQVPRYYQNAYLHLRPFYSTTRSFLGIHRLNGPLKCGQPQEVLVDYYIDPADASPDQEISFSYYLIGKGSLVMEGQKHLNSKKKGLKASFSLSLTFTSRLAPDPSLVIYAIFPSGGVVADKIQFSVEMCFDNQGTDLTSTVRVTRSSASVMVYGASEAIGQRQSSAAKPRRSQSDSLGPEFQGLWERLPGLRINGELITAYPQVVVVRVPTPWVQSDSDITVLRHLEKMGCRLMNRPQAILNCVNKFWTFQELAGHGVPLPDTFSYGGHENFAKMIDEAEVLEFPMVVKNTRGHRGMYELLVSTMGCSNSGMVTTPIKWLSMISVQCLANGTFLSPSLTKCPKGIRASVPLSGGPRSLKARTFSAFSGPVRSDEQAEALPEAYEPIEVNEFGEIDLLAMVEDEIILALPVVPVHDSEHCEVSEADMVFGELPEEAQKPNPFAVLASLKRVRSMAVQQNKPTRSKRGMRRSHDALTAVTSLSVDKTSGEKHLRHHITADGYYRGRKVIAK

SEQ ID NO: 46557 - protein, 76 aa, Homo sapiens
MTSGPQTNQPKKHLINFKSGPHWKSDCSTHLAATPRAPGTLAQGSLTDSFSAYRLKTDTARSPRKPRRPSRTPSFS

SEQ ID NO: 46558 - protein, 139 aa, Homo sapiens
  misc_feature (1)...(139): Xaa = X or * as defined in Table 2
ARTPLAAASRGSGGTRGGAAWVAGDDLRGPAPGPAEPGPARRRRGKGTPSSRPRTQRRPRSAAMHGHRCPQPARRSREHPNTYPAGRRPPELRRGRSGVPPPRPXRRPGEAPRAPRPRAAELXARLPRPSVRPAPARRV

SEQ ID NO: 46559 - protein, 255 aa, Homo sapiens
  misc_feature (1)...(255): Xaa = X or * as defined in Table 2
FDELREEGFRQSVITNFSELKKDVXTHRKEAKNLEKKLDEWLTRINSVEETLNDPMELKTMAQELRDACTTXFREKRVKRNEQSLQEIWDYVKRPNLRLIGVPESDGENGTKLENTLLDMIQENFPKLARQANIQIQEIQQIPQRYSSRRATPRHIIVRFTKVEMKEKMLRAAREKGWVTHKGKPIRLTADLSAETLQARREWGPIFNILKEKNFQPRISYPAKLSFISEGEIKYLTDKQMLRDFVTTRPALKEL

SEQ ID NO: 46560 - protein, 183 aa, Homo sapiens
  misc_feature (1)...(183): Xaa = X or * as defined in Table 2
EQRHNIPESLGHIXSTSAGDTPADRVWSGPPANSSRPAAEGPDCXKENXQRARTSNQNPICTSPSSKTKEAKNLEKRLDEWLTRINSIENTLKDLMELKTRARELRDACRSFSSQFDQVEERVSVIEDQMNEMKKEEKFREKRVKRNEQSLQEIWDSVKRPNLHLIGVPESDGENGIKLENTL

SEQ ID NO: 46561 - protein, 402 aa, Homo sapiens
MTGAAGEEAAGAGVGAEVDARAEARMGIEAEARMVTEAGVETEARMGVGAGAEAGAEEEVIAAAEVEAGTEAETEAEAETGAKGEAGTGAEVEARTGAKVEAGTGAEVEAGTGVKVAGSGAEVEAGTEAEVEGGSGAEARASAGDTQAVDLQQIPTDLQLRDLAVRRKTNKQKGIASTSTKRTSTPKPHLLVITNFSELKEDVQTHHKETKNLEKRLDEWLTRINSVEKTLNDLMELKTMARELRDTCPSFSSRFDQVEESVSVTEDQINEMKREEKFREKRVKRNEQSLQEIWDYVKRPNLHLISVPESDGENGTKLENILPDIIQENFPNLARQANIQIQETRRTPQRYSSRRVTPRHIIVRFTKVEMKEKILSAAREKGQVTLKGKPIRLTADLSAETL

SEQ ID NO: 46562 - protein, 293 aa, Homo sapiens
MAPVSASEDFWQCPETSLISQLESAPGIQLMEARDADKSLIMHEIAPTSNRELPVHKISIAKPCSMLMISWFFVNTGQSFQRKDQAAIFAVLQPLLVIHRQTGSGVDLQQTPTDLQLRDLTVRRKNNKQKGIASTSRKRTSTPKPHLQDHSSSPAMEQSWMQKDFDKLAEVGFRRSVITNFSELKEDVQTHHKEAKNLEKRLDEWLTRINSVENTLNDLMELKTMAQELHDACTSFSRQFDQVEERVSVIEDKISEIKQEEKFREKRVKRNEQSLQTIWDYVKRPNLHLIGVS

SEQ ID NO: 46563 - protein, 336 aa, Homo sapiens; identical to SEQ ID NO: 36010
  DOMAIN (74)..(104): SODIUM CHANNEL SIGNATURE domain identified by eMATRIX, accession number PR00170A, p-value=7.851e-11, raw score of 13.20
  DOMAIN (91)..(297): Ion transport protein domain identified by PFam, accession name ion_trans, E-value=1.5e-08, PFam score of -15.0
  misc_feature (1)...(336): Xaa = X or * as defined in Table 2

SEQ ID NO: 46564 - protein, 418 aa, Homo sapiens
MVMLEGTGEEEWGAAENIPKSVERLWNRVTGRGWNRLEGSEEDRKMWERLELPRDLLNGFDQNADNNMDNKIKVQAEVASAGDEELVGNWSKGEKLQEFVDHKVWWLTHDWKNVKERGCNTCCDDRWMAVKPAARLWKGTIFPLGCYRNHRRYAHPLLVIPRQTGSGVDLQQAPTDLQLRDLTVRRKTNKQKGIAPTSTKRTSTPKPHLSPSSKTKVDKTTKMGRNQSRKAENSKNQSTPSPPKDRISSPAKEQRRMENDFDEFTEVGFRKSEAKNLEKRLDKWLTRINSVEKTLNDLMELKTMAREICDACISFSSRFDQVEIRVSVIEDPINEMKREEKFREKRVKRNEQSLQEICDYVKRPNLRLIGVPESDGENGTKLENTLQDIIQENVPNLTRQANIQIQEIQRREHHKDTP

SEQ ID NO: 46565 - protein, 155 aa, Homo sapiens
  misc_feature (1)...(155): Xaa = X or * as defined in Table 2
KTPFVGYQHQRPKVDKTTKMGRNQSRKAENSKNQSTSSPPKDPGSLPATEQSWTENDFDELTEVGFRRSAITNFSELKEHVLTRRKEAKNLEKRLDEWLTRINSVEKTLNDLMELKTMAQELRDARTSFNSXFNQVEKRISVIEDQIDEIKXEDK

SEQ ID NO: 46566 - protein, 127 aa, Homo sapiens
MVFSSITSFKVFSMLFILVSHSSNLFSRLLASLRWVQTSSFSSEKFVIANHLKPTSVNSSKSFRGRSFGGRRDLGRVFCFVFVREGCWPGAVAHAYNPSTLGGQCRPIMRLGDLRPSWANMVKCRLY

SEQ ID NO: 46567 - protein, 484 aa, Homo sapiens
  DOMAIN (338)..(374): kw TRANSCRIPTASE REVERSE II ORF2 domain identified by eMATRIX, accession number DM01354F, p-value=4.649e-36, raw score of 14.56
  DOMAIN (224)..(435): AP endonuclease family 1 domain identified by PFam, accession name AP_endonucleas1, E-value=2.2e-28, PFam score of 107.7
  misc_feature (1)...(484): Xaa = X or * as defined in Table 2
TERDSININKKDIYTKTQSVGRQHQRPKVDKTTKMGRNQNRKAENSKNQSASSPPKDCSSSPAMEQSWMENNFDELTEIGFRRSVITNFSELKEDVQTHCKEAKNLEKKLDEWLTRINSIEKNLNDLMELKTMAQELRDACTSFSSQFDQVEERVSVIEDQMNEMKQEEKFREKRVKRNEQSLQEIWDCVKRPNLHLIGIPESDGENGTKLDNTLQDIIXENFPHLARXANIQIQEIQEIQRTPQRYSPRRATPRHIIVRFTKVDMKEKMLRAVREKGFKPTKIRRDKEGHYIMVKGSIQQEELTILNIYAPNTGGPRFIKQVLSDLQRDLDSHTIIMGDFNTPLSTLDRSMRQKINKDIQELNSALHQVDLIDIYRTLQPKSTEYTFFSAPHRTYSKIDHVVGSKTLLSKCKRPETTTNCLSNRSAIKLELRIKKLTQNRSAAWKLNNLLLNDYWVHNEMKAEIKMFFETRTKIQHARISGIL

SEQ ID NO: 46568 - protein, 87 aa, Homo sapiens
FQLQRPASCSSPIQHRKHIPRKPASQSSLPHTGKSARQPQEPQNRENCLLRILIRVASEATRRWTRPSEFSSRSENPRAHHPRRALR

SEQ ID NO: 46569 - protein, 151 aa, Homo sapiens
  misc_feature (1)...(151): Xaa = X or * as defined in Table 2
RRKVSELEHRRPVWKCPRRPPEVRKPESARVSFSPRGGARRSRPGATRSPQPRVPAAASASFGFGGLGRGGRGERARRGRGPKLEGPESSAVLAXRNFPSRPRRRRPGRAGVEIARLGGTGSSPRPCPKPDPTASLSELFMIPSDIPRRRN

SEQ ID NO: 46570 - protein, 48 aa, Homo sapiens
  misc_feature (1)...(48): Xaa = X or * as defined in Table 2
THGMLEKRCCLQENMPIIPGKDFMTKTLKAIATKVKIGKXDLIKSFCT

SEQ ID NO: 46571 - protein, 175 aa, Homo sapiens
  misc_feature (1)...(175): Xaa = X or * as defined in Table 2
MNGDDTFARRPTVGAQIPEKIQKAFDDIAKYFSKEEWEKMKVSEKIVYVYMKRKYEAMTKLGFKAILPSFMRNKRVTDFQGNDFDNDPNRGNQVQRPQMTFGRLQGIFPKIMPKKPAEEGNVSKEVPEASGPQNDGKQLCPPGKPTTSEKINMISGPKRGEHAWTHRLRERKQLX

SEQ ID NO: 46572 - protein, 81 aa, Homo sapiens
  misc_feature (1)...(81): Xaa = X or * as defined in Table 2
VTWIRNNNACFTLNWFYHERSHIWILKSTLQCGQIIIGNDVESRHKCPKPSXLVGSVELEIADNVLPQKFPAAKTIFALYF

SEQ ID NO: 46573 - protein, 145 aa, Homo sapiens
  misc_feature (1)...(145): Xaa = X or * as defined in Table 2
LSPCHNSFFFFFQAFDDIAKYFSKKEWEKMKXATVPGPSLPLKKXTFCSFLGFKVTLPPFMRSVSLEFGNLYQQRKILMXLXSTVEMSLILFICDLHIVKIMPKKPAEEENGLKEVPEASGPQNDGKQLCPPGNPSTLEKINKTS

SEQ ID NO: 46574 - protein, 175 aa, Homo sapiens; identical to SEQ ID NO: 46571
  misc_feature (1)...(175): Xaa = X or * as defined in Table 2

SEQ ID NO: 46575 - protein, 81 aa, Homo sapiens; identical to SEQ ID NO: 46572
  misc_feature (1)...(81): Xaa = X or * as defined in Table 2

SEQ ID NO: 46576 - protein, 143 aa, Homo sapiens
  misc_feature (1)...(143): Xaa = X or * as defined in Table 2
LSPCHNSFFFFFQAFDDIAKYFSKKEWEKMKSATVPGPSLPLKKXTFCSFLGFKVTLPPFMRSNSLEFGNLYQQRKILMYFXSTVEMSLILFICDLHIVKIMPKKPAEEENGLKEVPEASGPQNDGKQLCPPGNPSTLEKINK

SEQ ID NO: 46577 - protein, 149 aa, Homo sapiens
MIVKPPQPYVTRVHSQIYPGCPSNGSPNPTKASSYEVIDICLSGQASSKQKALLPRQCSGSAKAQAEQAQISVSYKQQRMDNQFSSFTIPSYTPLECIRNQWDCFDPQNLEEKHLIALCTKVSVTGMALETAAHAGFAPLVTIKAGITT

SEQ ID NO: 46578 - protein, 163 aa, Homo sapiens
  misc_feature (1)...(163): Xaa = X or * as defined in Table 2
LLFSGFSLLHGYLPHWYLCHLPRSRSLGLRDKRWKVKGDTDFLSPSHPEYLLKEENDGHLCSLSFRMGNQFSSPLPAYTPLECILNHWDGFYPXNLEEKHLIALRTKGWPNYDLQEGLSWPQEGTIHFNTTWQLELFCRHEDRWSEATYMQAFYILQGNRDLG

SEQ ID NO: 46579 - protein, 540 aa, Homo sapiens
  DOMAIN (472)..(508): PROTEIN TRANSCRIPTION REGULATION domain identified by eMATRIX, accession number PD02985A, p-value=9.182e-35, raw score of 17.54
  DOMAIN (152)..(268): Ribosomal protein L13 domain identified by PFam, accession name Ribosomal_L13, E-value=5e-47, PFam score of 169.6
MECPANPGGVPTLDSRGSLTLLEINHRPLATMGVENQTLAVSYYYAVRRRPHQHDYIALSRLFHTVMLFDVPVMTRLMESEARRFIALVDEFYERHVKLVVSAEVPLYEIYQGDRLKFEFQRCLSRLQEMQSEEYLKREHLAAKPETVKRDWYVVDATGKTLGRLATELARRLRGKHKAEYTPHVDTGDYIIVLNADKVAVTGNKRTDKVYYHHTGHIGGIKQATFEEMIARRPERVIDNRRGSLRQAGYAIHDGGNNSMAKNTSCGVQLRIRGKVQGVGFRPFVWQLAQQLNLHGDVCNDGDGVEVRLREDPETFLVQLYQHCPPLARIDSVEREPFIWSQLPTEFTIRQSTGGTMNTQIVPDAATCPACLAEMNTPGERRYRYPFINCTHCGPRFTIIRAMPYDRPFTVMAAFPLCPACDKEYRDPLDRRFHAQPVACPECGPHLEWVSHGEHAEQEAALQAAIAQLKMGKIVAIKGIGGFHLACDARNSNAVATLRARKHRPAKPLAVMLPVADGLPDAARQLLTTPAGAGLWLGWK

SEQ ID NO: 46580 - protein, 31 aa, Homo sapiens
EINVRDRFSLWKSVVFKCLNWLPGFRAALHV

SEQ ID NO: 46581 - protein, 526 aa, Homo sapiens
  DOMAIN (303)..(350): Acylphosphatase proteins domain identified by eMATRIX, accession number BL00150, p-value=6.211e-21, raw score of 25.33
MGRWPMPRQASRPHSIDSINGHHHHPEWNFNVVKTGDTLDIGNGKQLIFVETPMLHWPDSMMTYLTGDAVLFSNDAFGQHYCDEHLFNDEVDQTELFEQCQRYYANILTPFSRLVTPKITEILGFNLPVDMIATSHGVVWRDNPTQIVELYLKWAADYQEDRITIFYDTMVNNTPMMADAIAQGIAGNRPTPCGGKFQRRPETINTKILTYCLSAQKGELDWPPSRGSPAACPTHALICVDRNKLEQLSAEKRRRIPGNIRRIRSGRYRRPVTAGCDAVVSGRAGYAIHDGGNNSMAKNTSCGVQLRIRGKVQGVSFHPFVWQLAQQLNLHGDVCNDGDGWATADSSVSSCSQTDLSFDSQVSLPISVHTQTFLPSSKVTSSIAAQTDAFMDTCFQSGGVSRETQTSGIESPTDDHVQMDQAGMCGDIFESVHSSYNVATGLRQPGLTGPHLLRPTGGKNGLVRTLRQGPEKEQRNAFGTAWTPKTHLISGHTGRIEAAVAGGDARPEGRLLGSRQLNRLPDAETQ

SEQ ID NO: 46582 - protein, 294 aa, Homo sapiens
  misc_feature (1)...(294): Xaa = X or * as defined in Table 2
MIDSMAVLDIFILAAKAAAIHHKEYRNEEDCQYRCGHHPAHYTGTYCVLRAGTSTSTDNQRHNAEDKRQRVFGEFDDKDRVLRRQPNGGEQAYLEVNVIGQATEVGTVDKRITITPFAWGIHFGKASRASSGIGNNLRIHGAACAARRYQYAPAAGSADTIEQETFPGLPAAGLIRHRRHYRHRREDLIAVPAARQTDENRRPALCHEYAVGHRKMCFLPLSYSRHHELRNPPCRTRQRRIRQSQVGDTAPLRILRIFPGIPLMPEQFSKIFRTSAPYGGVFLRSVVQVYTIPX

SEQ ID NO: 46583 - protein, 329 aa, Homo sapiens; identical to SEQ ID NO: 46416
  DOMAIN (268)..(315): Acylphosphatase proteins domain identified by eMATRIX, accession number BL00150, p-value=2.846e-30, raw score of 25.33
  misc_feature (1)...(329): Xaa = X or * as defined in Table 2

SEQ ID NO: 46584 - protein, 50 aa, Homo sapiens
  misc_feature (1)...(50): Xaa = X or * as defined in Table 2
DGIVLSTYYHFYWHHFXILEGPLPANTGDLCLPLQVQPDREQVRWALFKK

SEQ ID NO: 46585 - protein, 217 aa, Homo sapiens
  DOMAIN (35)..(61): G-protein coupled receptors family 2 proteins domain identified by eMATRIX, accession number BL00649C, p-value=5.500e- 10, raw score of 17.82
  DOMAIN (2)..(214): 7 transmembrane receptor (Secretin family) domain identified by PFam, accession name 7tm_2, E-value=6.1e-07, PFam score of -10.1
  misc_feature (1)...(217): Xaa = X or * as defined in Table 2
HLDRSGLFNIQVIPVCRKLGKEGNDEKQCVTTSRSNAAFFLLHFFLLATFTWMGLEAIHMYIALVKVFNTYIRRYILKFCIIGWGKPLKIFLVLFFPHENCQVYGKESYGKEKGDELXVIKTFCDEXISFVSXSGVMFFLNIAMFIVVMVQICGRNGKRSNRTLREEVLRNLRSVVSLTFLLGMTWGFAFFAWGPLNIPFMYLFSIFNSLQGKINCT

SEQ ID NO: 46586 - protein, 81 aa, Homo sapiens
  misc_feature (1)...(81): Xaa = X or * as defined in Table 2
QIGLWTPNFRARTFCVWTGGLVLCFXGFCFQEAAGARDTSSFAMGVSPWEFRHGXLWPEMRSMEQILELLVLEEFLTITGQ

SEQ ID NO: 46587 - protein, 390 aa, Homo sapiens
WEEKENKEYLKSLFEILILMGKQNIPLDGHEADEIPEGLFTPDNFQALLECRINSGEEVLRKRFETTAVNTLFCSKTQQRQMLEICESCIREETLREVRDSHFFSIITDDVVDIAGEEHLPVLVRFVDESHNLREEFIGFLPYEADAEILAVKFHTMITEKWGLNMEYCRGQAYIVSSGFSSKMKVVASRLLEKYPQAIYTLCSSCALNMWLAKSVPVMGVSVALGTIEEVCSFFHRSPQLLLELDNVISVLFQNSKERGKELKEICHSQWTGRHDAFEILVELLQALVLCLDGINSDTNIRWNNYIAGRAFVLCSAVSDFDFIVTIVVLKNVLSFTRAFGKNLQGQTSDVFFAAGSLTAVLHSLNEVMENIEVYHEFWFEEATNLAHQT

SEQ ID NO: 46588 - protein, 61 aa, Homo sapiens
  misc_feature (1)...(61): Xaa = X or * as defined in Table 2
GALQSWPCYLPRQCGATVQNFCGVPTCMRKSTWSNLVVFRFPQDPSRCANXXLDCCTACTQ

SEQ ID NO: 46589 - protein, 124 aa, Homo sapiens
EHSEPPIGVQIVDYLLRQEKVTDRMDHSKVETETVLSFVDDIISGAKSPCAMPSQVPDKQAQEIADKIYNLFNGYTSGKEQQTAYNTLLDLGSPTLHRVLYHYNQHYESFGEFTWRCEDELGPR

SEQ ID NO: 46590 - protein, 430 aa, Homo sapiens
EESCSIWYPNKQVQRRLWLEYEDISKGNSPSDESEERERDPKVLTFPEYITSLSDSGTKRMAAGVRMECQSKGRCPSSCPLCHMTSSPDTPAEPVLLEVTKAAPIYELVTNNQTQRLLQEATMSSLWCSGTGDVIEDWCRCDSTAFGADGLPTCAPLPQPVLRLSTVHEPSSTLVVLEWEHSEPPIGVQIVDYLLRQEKVTDRMDHSKVETETVLSFVDDIISGAKSPCAMPSQVPDKQLTTISLIIRCLEPDTIYMFTLWGVDNTGRRSRPSDVIVKTPCPVVDDVKAQEIADKIYNLFNGYTSGKEQQTAYNTLLDLGSPTLHRVLYHYNQHYESFGEFTWRCEDELGPRKAGLILSQLGDLSSWCNGLLQEPKISLRRSSLKYLGCRYSEIKPYGLDWAELSRDLRKTCEEQTLSIPYNDYGDSKEI

SEQ ID NO: 46591 - protein, 564 aa, Homo sapiens
  misc_feature (1)...(564): Xaa = X or * as defined in Table 2
PHPTRTRSAQSVQYIEKDWGPGEGLEEGGVLGQLVAFDSFTVSFHFVSAGNSPSDESEERERDPKVLTFPEYITSLSDSGTKHMAAGVRMECHSKGRCPSSCPLCHVTSSPDTPAEPVLLEVTKAALLNTQSFPCSLMQLLQEATMSSLWCSGTGDVIEDWCRCDSTAFGGCVPVSCSFLSAHRLRLSTVHEPSSTLVVLEWEHSEPPIGVQIVDYLLRQEKVTDRMDHSKVETGEHLLLHGLVLIQGDKTKTKKNALPHGFAPGPQYPRAMQEEQGEEEAVLLLQEAAVLLPLRVRDIRSCCFRHRELLFLMLFPFLLLWAETVLSFVDDIISGAKSPCAMPSQVPDKQLTTIYFQPLIARFSFSSRKGLLRIMSSHCHGDCDVSTLDSYTVSANHALPLPARFTLWGVDNTGRRSRPSDVIVYMXITYFPFPPSSEIADKIYNLFNGYTSGKEQQTAYNTLLDLGSPTLHRVLYHYNQHYESFASFXLKYPLCLIHRKAGLILSQLGDLSSWCNGLLQEPKISLRRSSLKYLGCRYSEIKPYGLDWAELSRDLRKTCEEQTL

SEQ ID NO: 46592 - protein, 677 aa, Homo sapiens
MEYYAAIKKNEIMPCRNMDGDGDYYPQQTNAGIENQIPHVVTYVFKPVHSGFSCYDRSLSMPYIEPTQEAIPFLMLLSLAFAGPAITIMVGEGILYCCLSKRRNGVGLEPNINAGGCNFNSFLRRAVRFVENNVPEPASATGLESPLSKGKSVHVFGLCSTALITDIIQLSTGYQAPYFLTVCKPNYTSLNVSCKENSYIVEDICSGSDLTVINSGRKSFPSQHATLAAFAAVYVSGLYAVGNFLPSDESMFQHRDALRSLTDLNQDPNRLLSAKNGSSSDGIAHTEGILNRNHRDASSLTNLKRANADVEIITPRSPMGKENMVTFSNTLPRANTPSVEDPVRRNASIHASMDSARSKQLLTQWKNKNESRKLSLQVIEPEPGQSPPRSIEMRSSSEPSRVGVNGDHHGPGNQYLKIQPGAVPGCNNSMPGGPRVSIQSRPGSSQLVHIPEETQENISTSPKSSSARAKWLKAAEKTVACNRSNSQPRIMQVIAMSKQQGVLQSSPKNTEGSTVSCTGSIRYKTLTDHEPSGIVRVEAHPENNRPIIQIPSTEGEGSGSWKWKAPEKGSLRQTYELNDLNRDSESCESLKDSFGSGDRKRSNIDSNEHHHHGITTIRVTPVEGSEIGSETLSISSSRDSTLRRKGNIILIPERSNSPENTRNIFYKGTSPTRAYKD

SEQ ID NO: 46593 - protein, 246 aa, Homo sapiens
  misc_feature (1)...(246): Xaa = X or * as defined in Table 2
MKRAGSSGGRGECDISGAGRLGLEEAARLSCAVHTSPGGGRRPGQAAGMSAKERPKGKVIKDSVTLLPCFYFVELPILASSVVSLYFLELTDVFKPVHSGFSCYDRSLSMPYIEPTQEAIPFLMLLSLAFAGPAITIMVGEGILYCCLSKRRNGVGLEPNINAGGCNFNSFLRRAVRFVGVHVFGLCSTALITDIIQLYTGHQAPYFLTVRTPNYTSLNVSCTXNSYLAEDIRSRSDLTLTHSGGM

SEQ ID NO: 46594 - protein, 428 aa, Homo sapiens
  DOMAIN (35)..(55): CORONAVIRUS NUCLEOCAPSID PROTEIN domain identified by eMATRIX, accession number DM01206B, p-value=4.082e-10, raw score of 10.69
  misc_feature (1)...(428): Xaa = X or * as defined in Table 2
GDKNQNPRNWPLGEGKGNSLGRKETGRSNSRSHSSRSKSRXQSSSRSRSRSHSRKKRHSSRSRSRTYSRSWSRDRMYSRDDRHXYEVIVDCSRHGREYKGREPRHGSGSLERPTEQETSQPKIRKEIVETKGTARGNCGTTGLLRPKTMMVERSYGPQDRVAVGTWPHPGTERWASSWDVSSSVRHQSEGVVQGWEHRCTHKSQQEVGACVNFRTPKVILIYNLYLPVSHQFSKTFMSIVIVQKNLYLHNDFRALNVTHIYRLTIPNTTTCFTATQDEDKQIFHTAAQHRSHTSSYQYLSLTRSHRYEIVFYTRGLGAPFPAGDGHGKFQRLGKPYSHSVHFVIPQDKTQHISINTPHKNSETTKQHTCSFAYGLYYYQQKEDNPYAWPQVPAAAEMVSRLAQSRHSQQSILIHFSHQSYHTDHISTV

SEQ ID NO: 46595 - protein, 930 aa, Homo sapiens
  DOMAIN (21)..(41): CORONAVIRUS NUCLEOCAPSID PROTEIN domain identified by eMATRIX, accession number DM01206B, p-value=7.474e-13, raw score of 10.69
SCIKPRRKEMGRSNSRSHSSRSKSRSQSSSRSRSRSHSRKKRYSSRSRSRTYSRSRSRDRMYSRDYRRDYRNNRGMRRPYGYRGRGRGVYYQGGGGRYHRGGYRPVWNRRHSRSPRRGRSRSRSPKRRSVSSQRSRSRSRRSYRSSRSPRSSSSRSSSPYSKSPVSKRRGSQEKQTKKAEGEPQEESPLKSKSQEEPKDTFEHDPSESIDEFNKSSATSGDIWPGLSAYDNSPRSPHSPSPIATPPSQSSSCSDAPMLSTVHSAKNTPSQHSHSIQHSPERSGSGSVGNGSSRYSPSQNSPIHHIPSRRSPAKTIAPQNAPRDESRGRSSFYPDGGDQETAKTGKFLKRFTDEESRVFLLDRGNTRDKEASKEKGSEKGRAEGEWEDQEALDYFSDKESGKQKFNDSEGDDTEETEDYRQFRKSVLADQGKSFATASHRNTEEEGLKYKSKVSLKGNRESDGFREEKNYKLKETGYVVERPSTTKDKHKEEDKNSERITVKKETQSPEQVKSEKLKDLFDYSPPLHKNLDAREKSTFREESPLRIKMIASDSHRPEVKLKMAPVPLDDSNRPASLTKDRLLASTLVHSVKKEQEFRSIFDHIKLPQASKSTSESFIQHIVSLVHHVKEQYFKSAAMTLNERFTSYQKATEEHSTRQKSPEIHRRIDISPSTLRKHTRLAGEERVFKEENQKGDKKLRCDSADLRHDIDRRRKERSKERGDSKGSRESSGSRKQEKTPKDYKEYKSYKDDSKHKREQDHSRSSSSSASPSSPSSREEKESKKEREEEFKTHHEMKEYSGFAGVSRPRGTFFRIRGRGRARGVFAGTNTGPNNSNTTFQKRPKEEEWDPEYTPKSKKYFLHDDRDDGVDYWAKRGRGRGTFQRGRGRFNFKKSGSSPKWTHDKYQGDGIVEDEEETMENNEEKKDRRKEEKE

SEQ ID NO: 46596 - protein, 674 aa, Homo sapiens
  DOMAIN (10)..(65): kw TRANSCRIPTASE REVERSE II ORF2 domain identified by eMATRIX, accession number DM01354Q, p-value=1.000e-40, raw score of 9.23
  DOMAIN (1)..(238): Reverse transcriptase domain identified by PFam, accession name rvt, E-value=4.4e-54, PFam score of 193.1
MNIDAKILNKILANRIQQHIKKLIHHDQVGFIPGMQGWFNIRKSINVIQHINRTKDKNHMIISIDAEKAFDKIQQPFMLKTLNKLGIDGTYFKIIRAIYDKPIANIILNGQKLEAFPLKTGTRQGCPLSPLLFNIVLEVLARAIRQEKEIKGIQLGKEEVKLSLFADDMIVYLENPIVSAQNLLKLISNFSKVSGYKINVQKSQAFLYTNNRQTESQIMSELPFTIASKRIKYLGIQLTRDVKDLFKENYKPLLKEIKEDTNKWKNIPCSWVGRINIVKMAILPKVIYRFNAIPIKLPMTFFTELEKTTLKFIWNQKRAHIAKSILSQKNKAGGITLPDFKLYYKATITKTAWYWYQNRDIDQWNRTEPSEITPHTYNCLIFDKPEKNKKWGKDSLFNKWCWENWLAICRKLKLDPFLTPYTKINSRWIKDLNVRPKTIKTLEENLGITIQNIGMGKDFMSKTPKAMATKDKIDKWDLIKLKSFCTAKETTIRVNRQPTKWEKIFATYSSDKGLISRIYNELNQIYKKKTNNPIKKWAKDMNRHFSKEDIYAAKKHMKKCSSSLAIREMQIKTTMRYHLTPVRMAIIKKSGNNSIMGSMMPPPVGMVAQPGASGMVAPMAMPAGYMGGMQASMMGVPNGMMTTQQAGYMAGMAAMPQTVYGVQPAQQLQWNLTQ

SEQ ID NO: 46597 - protein, 145 aa, Homo sapiens
MPGRHHIFLSICHVSGTVISTRNDDDDDDSNGDGFVNAPIDTLYLATLVGTWRTFVSTLYLANLVGTWRTFVSSSGIVNAPISTLSKQTTRLSVKWTNQQDVCSFTPEPARPRTHQKEETTNTSEHQKEQTPHTRPLRTVTLTAM

SEQ ID NO: 46598 - protein, 65 aa, Homo sapiens
  misc_feature (1)...(65): Xaa = X or * as defined in Table 2
ASSDNPPXSEPRVSLTIEGQEIDFFLDTGTAFSVLSSCPGWLSSRSVTIRGILGQPVTRYFSHLL

SEQ ID NO: 46599 - protein, 97 aa, Homo sapiens
  misc_feature (1)...(97): Xaa = X or * as defined in Table 2
IHQSALCIXLKVCKHTNQQPVSSSGFVNAPIDTLYLATLVGPWRTLCVHTLYLVNLVGMWRTFVSSSGIVNAPISALSKQTTWLYQSAGCGWGQIRE

SEQ ID NO: 46600 - protein, 279 aa, Homo sapiens
  DOMAIN (57)..(69): LYSR BACTERIAL REGULATORY PROTEIN HTH SIGNATURE domain identified by eMATRIX, accession number PR00039C, p-value=9.308e- 09, raw score of 10.66
  DOMAIN (50)..(162): Bacterial regulatory helix-turn-helix protei domain identified by PFam, accession name HTH_1, E-value=3.4e-19, PFam score of 77.2
  misc_feature (1)...(279): Xaa = X or * as defined in Table 2
APAVATEVLPGAGLTAGVLLWSDPKEPSNPGSSHRVGASDLDNPAHPTLLSYTMQKLEEELDVVLFDRSGHRTKFTNVGRMLLERGRVLLQAADKLTTDAEALARGWETHLTIVTEALVPTPAFFPLIDKLAAKANTQLAIITXVLAGAWERLEQGRADIVIAPDMHFRSSSEINSRKLYTLMNVYVAAPDHPIHQEPEPLSEVTRVKYRGIAVADTARERPVLTVQLLDKQPRLTVSTIEDKRQALLAGLGVATMPYPMVEKDIAEGRLRVVSPESTS

SEQ ID NO: 46601 - protein, 306 aa, Homo sapiens
  DOMAIN (41)..(164): WD domain, G-beta repeat domain identified by PFam, accession name WD40, E-value=0.048, PFam score of 20.2
  misc_feature (1)...(306): Xaa = X or * as defined in Table 2
RFLSDGTIISVDSAGKVQFWDSATGTLVKSHLIANADVQSIAVADFFPGHESRATEALCWAEGQRLFSAGLNGEIMEYDLQALNIKYAMDAFGGPIWSMAASPSGSQLLVGCEDGSVKLFQITPDKIQFERNFDRQKSRILSLSWHPSGTHIAAGSIDYISVFDVKSGSAVHKMIVDRQYMGVSKRKCIVWGVAFLSDGTIISVDSAGKVQFWDSATGTLVKSHLIANADVQSIAVADQRRQFRGGHSRGNSLPFSAGPCASNSSXEAVGADKTVPASHSXRAHCGPTAQQRXYLGGTDTHLVFRP

SEQ ID NO: 46602 - protein, 352 aa, Homo sapiens
GGGPMGPGSGPNLRAGVLLTSGNGPPNPRPVGLGPGPNPNLRSGFLGTNPAPRSGVFPGPGLGPNPRPSGLGPGPNLDARAGGLLGTGSGLNLRMAGPQGLDLAPILRAAGLLGANSASFSQASGNMGTSPSSMARVPGPMGPNSGPSSRGIGLPGPNPSPMSRAPGPIGPNSAHFSRPVGPMGVNANPFPRGAGSSAIFSSLLARLASNPATFQRSAGLQGSNPTIFPRASGPLGPNPANFPRATGLQGPSPTTFPRSTGPLGPGQVTFPRPAAGHLGPSPAGPVGINPAPFTRPTGTLGLNPASFPRMNGPAGKSFVPFPRVGSLPGTNPAAFPRPGGPMAAMYPNGMLP

SEQ ID NO: 46603 - protein, 319 aa, Homo sapiens
QHFIQRTRSFFKTRPKPIYSPASPRKYERARIFLGVNSDPFLMAAGFLGGNLAPFPRNSSPFPASSGSLASNPAPFPAGARDPSMASFPRGMNPTGTGAVSFPRPGGFLGPGPGRGPTLNPRTGALPGLGPLSNPRLGGLPGPGPISNLRAGSLLGAGPDPRSGGPMGPGSGPNLRAGVLLTSGNGPPNPWPVGLGPGPNPNLRSGFLGTNPAPTLGVFPRPSGLGLGRNLDARAGGLLGTGPGLKNSWTSRPRSFPHSKSGRSFRSKFSLSQASGNMGTSPSSMARVPGPMGPNLGPGPREIGLPGPNPSPMSRAPGP

SEQ ID NO: 46604 - protein, 240 aa, Homo sapiens
MLLEKICPQQQNGKAEGHRVVTGILAYSFIIIVIHFVFARFRYQDNAGFIDCIQKYNYPTSKQISRHSEHMLARTSSLTHPTLPVQRSCLGSKFTSDKKLLGTETELDDRPNNIYNLFSVAGQRGLDPDPEIGFFDLAQEGMQGKSQSSGIPTDLQLRVLSVRRKTNRKDIHTRNPSVHHHHQRPKVDKTTKMGKKQNRKTGNSKTQSASPPPKEHSSSPATEQSWMENDFDELREEGFR

SEQ ID NO: 46605 - protein, 159 aa, Homo sapiens [sequence omitted]

SEQ ID NO: 46606 - protein, 180 aa, Homo sapiens
  DOMAIN (5)..(78): Cell division protein domain identified by PFam, accession name GTP_CDC, E-value=7.9e-10, PFam score of 38.3
MASQIYQFPTDDDTIAKVNAAMNGQLPFAVVGSMDEIKVGNKMVKARQYLWGVVQTHTRHYELYRRCKLEEMGFTDVGPENKPVSLQETYEAKRHEFHGERQRKEEEMKQMFVQPVKEKEAILKEAERKLQAKFEDLKRLHQEERMKLEEQRRLWDSLERKAGCNLTIFVLQENKVLPEN

SEQ ID NO: 46607 - protein, 87 aa, Homo sapiens
  DOMAIN (22)..(66): GTP-binding nuclear protein ran proteins domain identified by eMATRIX, accession number BL01115A, p-value=6.434e-11, raw score of 10.22
  DOMAIN (23)..(87): Ras family domain identified by PFam, accession name ras, E- value=0.033, PFam score of -111.8
MNCKEGTDSSCGCRGNDEKKMLKCVVVGDGAVGKTCLLMSYANDAFPEEYVPTVFDHYAGMTQRVPTTFRAFTAYHGRIAFLPPSYL

SEQ ID NO: 46608 - protein, 203 aa, Homo sapiens
LRWCCGSQLFRGYWGGVTGRYLTVLPPHLAVGCMAPWGPFSVRIAAVVFIQIFAGEVFWCPVMCVRGLCTPVLTGVPGHGNSHIPAIVFTCSLQTLVGGTRRWWRCCAAGDVTKFPALVGVGGETPRPQLPIGVTTVILLQVLVWKFGRNVSMSVWALRVPGLAFQSRHASWKFCRHSFLHCNAYIPLHTQECRSSHISFLDQ

SEQ ID NO: 46609 - protein, 27 aa, Homo sapiens
HEWPTHIPGPGKSVSEQGLESTSVEAP

SEQ ID NO: 46610 - protein, 466 aa, Homo sapiens
  DOMAIN (70)..(92): Kringle domain proteins domain identified by eMATRIX, accession number BL00021C, p-value=4.900e-15, raw score of 22.21
  DOMAIN (59)..(168): Trypsin domain identified by PFam, accession name trypsin, E- value=2.7e-08, PFam score of 28.8
MQGRQGGSRSGPVAARRTLILLERRRGSKAGPDQGSLRSAEARARPRSVQTLAPGLILSPAVITDKVIPACLPSPNYVVADQTECYITDWGETQEMTSLCRPLDGSTYSQTTSTFLATCGTFGAGFLKEAQLPVIENEVCNRYEFLNGRVKSTELCAGHLAGGIDSCKKQILSHKSAKIALNESFNSCRERVEIVKKQRQAVIMRVADLQQEVHAQPCQVFTVKVRALTGKKWDPGTWSGDVWENPDEAEDTEFVNSDETFLPEETVSPSPVVRTDGSWKMMVDYFKLNQVVTPIAAALPVVVLLLEQINTSPGAWYAAIGLASGFFSIPVHKTHQKQFAFSWQGQQYTFTVLPQGYISSLALCHNLIRRDLDGFLLLQNITLLVHYVDDIMLIGSSEQEVANALDLLVFSDHLAIKWVMHSSIASSSGSGICVIRLKKVLKAQPAPMASWGVLYDQLTEEEKIRA

SEQ ID NO: 46611 - protein, 203 aa, Homo sapiens
LRWCCGSQLFRGYWGGVTGRYLTVLPPHLAVGCMAPWGPFSVRIAAVVFIQIFAGEVFWCPVMCVRGLCTPVLTGVPGNGNSHIPAIVFTCSLQTLVGGTRRWWRCCAAGDVAKFPALVGVGGETPRPQLPIGVTTVILLQVLVWKFGRNVSMSVWALRVPGLAFQSRHASWKFCRHSFLHCNAYIPLHTQECRSSHISFLDQ

SEQ ID NO: 46612 - protein, 55 aa, Homo sapiens
  misc_feature (1)...(55): Xaa = X or * as defined in Table 2
XTCYTCWKSGNWTKECPQPGIPKPHPICVGPHGKSDCSTHLAATPRAPGTLPKAL

SEQ ID NO: 46613 - protein, 100 aa, Homo sapiens
MADRDDLVTRSMTRVIFGAVTRIGGPTLEINPLSSCSLLHEKDPPMTLGPQTNQPKEHLTNFKLDNSNAQLPFRNSIPITHDPSALLALPFANEKTFFFS

SEQ ID NO: 46614 - protein, 300 aa, Homo sapiens
  DOMAIN (230)..(247): Zinc finger, CCHC class domain identified by PFam, accession name zf-CCHC, E-value=0.038, PFam score of 17.3
MLTEGFLAFLGSSLTATSLSAVSIGESSWIQCHTSLWGCKGGQERAPGEVEEPWWAKAKAGITFGCHLAKQEMGQTPVAQTAPKDVSPQSTDDPYSQSGDLPREINPLSSCYLLHEKDPPTTSNPQTNQPKEHLTNFKSVRLIPNLSSFPPTCPHSPNPKRCFQSSFSTDPSDLSLHPKIAPPQVYNNREELQLLASSLRESLATSPAHKNFKMPKPQWPGVPSGLHPSGSCFTCWKSGHWAKECLWPGIPPKLYPIYEGLHWKSDCPTHLATTPRAPGTLAQDSLTDSFPDLLSLAAED

SEQ ID NO: 46615 - protein, 256 aa, Homo sapiens
  DOMAIN (195)..(212): Zinc finger, CCHC class domain identified by PFam, accession name zf-CCHC, E-value=0.0026, PFam score of 24.4
RQHILESHSRPILCTTWLPLLIIQDPRTLQSAAMLLTQSLFGGIFTRTRMKFGAVTWIGGPPLGDQSPSSCSLLREKDPPTTSGPQTHQPKEHLTNFKSGVRPRRDACLGPSPLAASPAFLGKGQVPQPLISLCPDPLFPHPNLISLRPNPLCPHPDLVSLCPDPFPAFLEAHKNFQTPEPQQPGIPPEPPPPGACYKCQKSDHQAKECLQPRIPPKPCPICAGPHWKSDCSTHLAATPRAPGTLAEGSLTDSFSA

SEQ ID NO: 46616 - protein, 166 aa, Homo sapiens
  DOMAIN (33)..(74): Inositol monophosphatase family proteins domain identified by eMATRIX, accession number BL00629C, p-value=4.033e-09, raw score of 29.21
  DOMAIN (48)..(83): Inositol monophosphatase family domain identified by PFam, accession name inositol_P, E-value=7.9e-07, PFam score of 27.9
MGGKKEKKKEKRFNPKKSLEKSKTMMCAWNSEMVMEREALEVAGAEIEFGVVYSCVEDKRYTVRKGKGAFYNGQKLQVSQEELKEAGLLGASEGRKLHKDAARNARTSYRDGLRKTGRSLCGKGPLRAGQGGHAYPKEWLWWARLLSMAAGEVANSAAYGFAPATL

SEQ ID NO: 46617 - protein, 299 aa, Homo sapiens
  DOMAIN (104)..(124): INOSITOL PHOSPHATASE SIGNATURE domain identified by eMATRIX, accession number PR00378B, p-value=8.313e-23, raw score of 13.80
  DOMAIN (89)..(259): Inositol monophosphatase family domain identified by PFam, accession name inositol_P, E-value=6e-92, PFam score of 318.9
TVSISLISNSLRLKIFVKYFQKMADPWQECMDYAVTLARQAGEVVCEAIKNEMNVMLKSSPVDLVTATDQKVEKMLISSIKEKYPSHSFIGEESVAAGEKSILTDNPTWIIDPIDGTTNFVHRFPFVAVSIGFAVNKKIEFGVVYSCVEGKMYTARKGKGAFCNGQKLQVSQQEDITKSLLVTELGSSRTPETVRMVLSNMEKLFCIPVHGIRSVGTAAVNMCLVATGGADAYYEMGIHCWDVAGAGIIVTEAGGVLMDVTGGPFDLMSRRVIAANNRILAERIAKEIQVIPLQRDDED

SEQ ID NO: 46618 - protein, 228 aa, Homo sapiens
MLLDATNSMQLHCPVSGTRVWLRENGQHFPSTVNSCAEGIVVFRTDYGQDPFWDIGCNRHAPSLIALTVLRNAGQEASHLLRTNGTFTNWLTNHEHLFNIARGPPTPVNCQRSILSSNILDRCSPSVCAYIQCYQACCFASNTNASSGFGIHIHYLLSEALAGLLGAPPPSVSLLHVPLSPAHKVVPSKEGRKEDFQQPKNLVNFSINSTHLETLPEERICLLPALPY

SEQ ID NO: 46619 - protein, 342 aa, Homo sapiens
  DOMAIN (203)..(249): Integrase core domain identified by PFam, accession name rve, E-value=0.0097, PFam score of 13.5
PYDPPYPMVIEVSVADRHAVWSLWQAPIGESHQRPLGFWNKALPSSADNYSPFERQLLACYWALVEIERLIIPNGLAGWSGTWKKHDWKIGDKEIWGRGVWMKLSEWSTTVKIFVFHVSAHQWVTSAEEDFNNQVDRMTCSVDTIQPLSPATPVIAQWAHEQRGHSGTDGGYGWAQQHGLPLTKADLAMATAKCPICQHLWGNGLLKSQLQRKQGNNSLQGWGKVLQTAVNALNQHAIYGTLSPIARIHGSRHQGLDVEVAPLTIIPSDPLAKFLLPVPATLRSVDLEVLVPETGMLPPGDTTMIPLNWKLRLLPGHFGLLLPLTQQAKKGVTVLAGVIDPD

SEQ ID NO: 46620 - protein, 112 aa, Homo sapiens; identical to SEQ ID NO: 34863

SEQ ID NO: 46621 - protein, 130 aa, Homo sapiens
GTVYWGKGNDQTFQGLLDTGSELTLIPGDPKHHCGPPGPKVRAYGDQVINGVLAQVQLIVGPVGPWTHPVVISPVPECVIGIAILNSWQNPHIGSLTGRVRAADLSQFIDSEPFEWSGSRVFLRKDLVRY

SEQ ID NO: 46622 - protein, 465 aa, Homo sapiens
  DOMAIN (143)..(160): RNase H domain identified by eMATRIX, accession number PF00075A, p-value=4.000e-09, raw score of 14.44
IKVINHTLPEATVMASLEAVARQDNADSPQELPPTPLFASRPTTRLKSRWAPRGPECIIGIDILSSGQNPHIGSLTGRVRAIMVGKAKRKPLELPLPRKILNQKQYRIAGGIEEISATIKDLKDAGVVIPTTSLFDSPIWPVQKTDGSWRMTVDYRQINQVATPIAAAIPDVASLLKQINTSPDTWPYDPPYPMVIEVSVADRHAVWSLWQAPIGESHQRPLGFWNKALPSSADNYSPFERQLLACYWALVEIERLIMGHQVTMQSELPIMNWVISDPSSYKKWPDVQLYTDSWAVANGLAGWSGTWKKHDWKIGDKEIWGRGMWMELSEWSKTVKVFVSHVSAHQRVTSAEEDFNNQVDPVTHSVDTTQPLSPATSVIAQWIHEQSGHGGRDGGYSWAQQHGLPFTKADLAMATAECPICQQKRPTLSPPYGTIPWGDQPATWWQIDYIGPLLSWKEQRFFLPG

SEQ ID NO: 46623 - protein, 39 aa, Homo sapiens
RITGWHFRIPSHHHHHHCHYHHHCLHYHHHYDHHSSHVL

SEQ ID NO: 46624 - protein, 46 aa, Homo sapiens
EPHCREALGNSGQWISFRWAPSCCCLFGLHSCLPSPLVSRVWNSES

SEQ ID NO: 46625 - protein, 90 aa, Homo sapiens
  DOMAIN (56)..(90): CORE POLYPROTEIN PROTEIN GAG CONTAINS: P domain identified by eMATRIX, accession number PD02059B, p-value=6.958e-09, raw score of 24.48
KWAQCLSVPAPLPLPPPGVPAPLPVPPPGVPAPLPVPPPGVPAPLPVPPPGVPAPLPVPPPGVPAPLPVPPPAVPTWLPSEGMGKKPLLP

SEQ ID NO: 46626 - protein, 255 aa, Homo sapiens
  DOMAIN (1)..(72): ParB-like nuclease domain identified by PFam, accession name ParBc, E-value=0.0013, PFam score of 21.3
  misc_feature (1)...(255): Xaa = X or * as defined in Table 2
LLTEDALDDLIPSFLLTGQQTPAFGRRVSGVIEIADGSRRRKAAALTESNYRVLVGELDDEQMAALSRLGNDYRPTSAYERGQRYASRLQNEFAGNISALADAENISRKIITRCINTAKLPKSVVALFSHPGELSARSGDALQKAFTDKEELLKQQASNLHEQKKAGVIFEAEEVITLLTSVLKTSSASRTSLSSRHQFAPGATVLYKGDKMVLNLDRSRXRGITXAAGIXPSXAEKSWGDIXSXRSYHSFNFCA

SEQ ID NO: 46627 - protein, 113 aa, Homo sapiens
  misc_feature (1)...(113): Xaa = X or * as defined in Table 2
MKRAPVIPKHTLNTQPVEDTSLSTPAAPMVDSLIARVGVMARGNAITLPVCGRDVKFTLEVSGVIVLRRPLGYGQVMNVTRSCLLRTHWMISSLLFYXLVNRHRRSVEEYLVS

SEQ ID NO: 46628 - protein, 194 aa, Homo sapiens
  misc_feature (1)...(194): Xaa = X or * as defined in Table 2
MLRDLLKNVDLKGFEPDVRILLTKYSNSNGSQSPWMEEQIRDAWGSMVLKNVVRETDEVGKGQIRMRTVFEQAIDQRSSTDNEGAPVIPKHTLNTQPVEDTSLSTPAAPMVDSLIARVGVMARGNAITLPVCGRDVKFTLEVSGVIVLRRPLGYGQVMNVTRSCLLRTHWMISSLLFYXLVNRHRRSVEEYLVS

SEQ ID NO: 46629 - protein, 96 aa, Homo sapiens
  misc_feature (1)...(96): Xaa = X or * as defined in Table 2
SLPNLDNAAICSSSSSPTRTRXSLSVSAAALRRRLPSAISDHTREVFSTLSPRSTSRVNFTSRPHTGKVMALPRAITPTRAINESTIGAAGVDNEV

SEQ ID NO: 46630 - protein, 70 aa, Homo sapiens
  misc_feature (1)...(70): Xaa = X or * as defined in Table 2
RLFEVHHHVHKHLLGDNRYPIWIMQPSAHHPRSPTRTRXSLSVSAAALRRRLPSAISMTPDTLRPNAGVC

SEQ ID NO: 46631 - protein, 126 aa, Homo sapiens
MKRESAIPKHTLNTGAVEDTSLSTPAAPMVDSLIARVGVMARDRKAGECLLHEYEDLVPIRDTLRLFPGGRYLPRAKHVAPSEPDPEQDEQKLRFCKRHLYGQQPRSPVEIRFQHVAIAYPTHSRI

SEQ ID NO: 46632 - protein, 91 aa, Homo sapiens
  misc_feature (1)...(91): Xaa = X or * as defined in Table 2
SYVKYFPHQPAQKYFQQIHSAIGLHNADHVHKHLLGDNRYPIWIMQPSAHHPRSPTRTRXSLSVSAAALRRRLPSAISMTPDTLRPNAGVC

SEQ ID NO: 46633 - protein, 207 aa, Homo sapiens
MKRAPVIPKHTLNTQPVEDTSLSTPAAPMVDSLIARVGVMARGNAITLPVCGRDVKFTLEVLRGDSVEKTSRVWSGNERDQELLTEDALDDLIPSFLLAGQQTPAFGRRVSGVLEIADGVPVVKLLPSPKVINPVLVGELGEEQMVALSKWSGTTGPLVSAVLILVRDHGPTRIGGLIIRLGPRTHSCLRSENRSGTKIPLYLSIKL

SEQ ID NO: 46634 - protein, 99 aa, Homo sapiens
FEPDVRILLTKYSNSNGSQSPWMEEQIRDAWGSMVLKNVVRETDEVGKDPRPLPYLGHDEPYTFDINLSVNLKSMVVGGTDMGQEPLKQMGAWGPLSLK

SEQ ID NO: 46635 - protein, 179 aa, Homo sapiens
PADAPSLAAFPGDPQYDPPYCYPGTQCWVPGEGMLLLSQTLCLGEQVLLGAWLVWGPSRDPRPLPYLCHDEPYTFDINLSVNLKGPGNRLGEPIPISKAHEHIFGMVLMNDWSGNYWSSVPVKMTGKELGTWGNFIKAEDWCRSKGAVMALPRAVTPTRAINESTIGAAGVDNEVSSTG

SEQ ID NO: 46636 - protein, 61 aa, Homo sapiens
NWLHLPKVIIVFWLASWMMSRWLHYPDWVTIMGPTIAYERGQRFCKPDCRMNLLGNISCAG

SEQ ID NO: 46637 - protein, 23 aa, Homo sapiens
MCEGTCHPPWPPLSHREFSSSAL

SEQ ID NO: 46638 - protein, 286 aa, Homo sapiens
RVSGHHGPNHHQEFLTSSLERGWHVHEQGSMVTEEHENASRDQIMQVLRQKKHHSEAKRLQGKICTLCLALRPGSSEKAESAPCEETRACLDRALIMSNQLRAVAAAILKKMSPPSGFALECGGGIMLVCDGYRGKTSPHTPNEKFEGATVLKALKDLTMFVKRHKLESELIKSAAEGLGFSYTEPRGPPARRESGPRQERGGKKRTTGGPTPRGPRDRRAAAARRDGRGGKRGSGREPRTSARPGNKEGTVGIGPGGTEPSNPGGIRGLTSKVGDFGIRLTLARS

SEQ ID NO: 46639 - protein, 381 aa, Homo sapiens
  DOMAIN (34)..(56): Iron dependant repressor domain identified by eMATRIX, accession number PF01325B, p-value=5.680e-09, raw score of 20.91
MVVCNWYTLSFSLLFVSVTPDYVPPLGNFDVETLDITPHTVTAISAKIRKKGKIERKQKTDGSKTSSSDTLSEEKNSECDPTPSHRGQLNKEFTGKEEKTSLLLHNSHAFFRELDIEVFSILHCGLVTKFILDTEMHTECLAAENHGVVDGPGVKVQEYHIMSSCYQRLLQIFHGLFAWSGFSQPENQNLLYSALHVLSSRLKQGEHSQPLEELLSIYLEHTESILKAIEEIAGVGVPELINSPKDASSSTFPTLTRHTFVVFFRVMMAELEKTVKKIEPGTAADSQQIHEEKLLYWNMAVRDFSILINLIKVFDSHPVLHVCLKGEEIKSQNSQESTADESEDDMSSQASKSKATEDGEEDEVSAGEKEQDSDESYDDSD

SEQ ID NO: 46640 - protein, 90 aa, Homo sapiens
ILSLLLLPLPVNHEANPLPLHQFPYSGMPRVASSSLGPVGVGLSGIIRKACEKSKVPQSQLSDWEKYLVTGCPRTPWIVTDLEDSCPRQE

SEQ ID NO: 46641 - protein, 163 aa, Homo sapiens
  DOMAIN (78)..(91): PROTEIN ZINC-FINGER METAL-BINDI domain identified by eMATRIX, accession number PD00066, p-value=8.200e-14, raw score of 13.92
  DOMAIN (32)..(138): Zinc finger, C2H2 type domain identified by PFam, accession name zf-C2H2, E-value=4.4e-32, PFam score of 120.0
MSKRRWLTGNGSDRENIRLDLGFLVSDEEKRYKCEDCGKAFNRSSNLTTHKKIHTGEKPYKCEECGKAFKRSSILTTHKRIHTGEKPYKCEECGKVFKYLSSLSTHKIIHTGEKPYKCEECGKAFNWSSHLTTHKRIHMERNPTNVKNVAKALSTPLPLLNIK

SEQ ID NO: 46642 - protein, 233 aa, Homo sapiens
  DOMAIN (73)..(158): Retroviral aspartyl protease domain identified by PFam, accession name rvp, E-value=0.015, PFam score of 14.1
SVVALHSLMLMPHLMKSTGMMVSAVFFSSTSNVFRHRNPHTGFSSSSVMLGLGFCKHFSPLPSVFLLSSSGRRNLTEPRVCLTIEGQEVNCLWDTGVAFSVLLSCPRQLSSRSVTIRGVLGQPVTRYFSQPLSCEWGALLFSHAFLIMPESPTPLLGRHIPPSLATTTATCLACFGASLVSRKEMPVGSCRPLIRVQNWNCKVLIPIRKLFKFAKLFLCIEPIKSILSRAQLL

SEQ ID NO: 46643 - protein, 59 aa, Homo sapiens
NYKSFFKWSSQMQSMTKIYRGPLDHPDSPCSNVNDIEGTPPEEISTAQPLLHPRPAGSS

SEQ ID NO: 46644 - protein, 41 aa, Homo sapiens
  misc_feature (1)...(41): Xaa = X or * as defined in Table 2
WPLLLLGCLSLTKEWGFQAXLEKHVKRVKFPSHNLVPGRSI

SEQ ID NO: 46645 - protein, 493 aa, Homo sapiens
  DOMAIN (219)..(258): PROTEIN ZINC FINGER ZINC-FINGER METAL-BINDING NU domain identified by eMATRIX, accession number PD01066, p-value=6.333e-39, raw score of 19.43
  DOMAIN (217)..(279): KRAB box domain identified by PFam, accession name KRAB, E- value=3.7e-41, PFam score of 150.2
KVAVAGLRPPRSQLHSLLPQFSLLSSASVLFSHKMAAALTARPPEVLPLHCAVTVPWPGAHFGQLCTCSMASLPDCAGTRGRSAAQRLITSTVTQGLRGRGLKHYPIRDGGLETIQSGTQLERRGRFPGLVRPLSLAAVRAPGLVLLLKAQAVWPRVLQVLGDPQLRHRDLLEAKNGFSLESHGQFAEIPCVLRTASVYCSGWKHPWSPLCDSKGPLQFRDVAIEFSLEEWHCLDTAQRNLYRNVMLENYSNLVFLGITVSKPDLITCLEQGRKPLTMKRNEMIAKPSEERSGSSICGSAKSAVLQPPLLIPRQTVSGVDLQQTSTDLQLRVLSVRRKTNKEKGHPHQKPICTSPSSKTKEKFLKDLMELKTKARELCDECRSLCSRCDQLEERVSAMENEMNEMKREEKFREKRIKRNEQSLQEIWDYVKRPNLHLIGVSKSDGENGTKLESILQDIIQENFPNLARQTNIQIRKYRERHKDTPREEEFQDT

SEQ ID NO: 46646 - protein, 290 aa, Homo sapiens
  DOMAIN (88)..(111): DELTA CRYSTALLIN SIGNATURE domain identified by eMATRIX, accession number PR00145A, p-value=8.670e-09, raw score of 12.59
MEAVESWNYDSHTWICLTVEFFSSEEARIEVAADLYPYGFTTSNRCIMAPAFARMSLPKKRVGLSGIIRKACEKSKVPQSQLSGWKKYLVTGCPRNPQIVTDLEDSCLGQETRVQNWTEDEMDELTKVGFRRWVINSAELKEHVLNQLKEAKNLDKRQDEALRPLHNLRLLGSSDSPASAAVAPGTTAQRLITSTVTQGLRGRGLKHYPIRDGGLETIQSGTQLERRGRFPGLVRPLSLAAVRAPGLVLTSPKGPGCVAPCPAGIGRSTAKTPGPPGSQKWDHCNLEMWP

SEQ ID NO: 46647 - protein, 292 aa, Homo sapiens
  DOMAIN (117)..(141): Aminotransferases class-III pyridoxal-phosphate attachment si domain identified by eMATRIX, accession number BL00600A, p-value= 7.750e-20, raw score of 17.98
  DOMAIN (114)..(290): Aminotransferases class-III pyridoxal-pho domain identified by PFam, accession name aminotran_3, E-value=1.9e-77, PFam score of 224.2
YGPCPQVRLTPVPSSCSPGSTSAPSLIFILPSMWLSEAGDSRGCRLAHFPPPQGCQAWIMALIPTPTPWEDKKNPKKTVQGPPTSDYIFERESKCGAHNYHPLPVALERGKCIYLWDVEGRKYFDFLSSYSAVNQGHCHPKIVNALKSQGKKLTLTSRAFYNNVLGEYEEYITKLFNYHKVLPMNTGMEAGETACKLAHKWGYTVKGIQKYKAKVISAAGNFWGRTFSAISSSTDLTSYDGFGPFMPGFDVIPCNDLPALESAFQNPNVAAFMVEPIQGEAGVVPDPGYLMG

SEQ ID NO: 46648 - protein, 452 aa, Homo sapiens
  DOMAIN (257)..(286): Aminotransferases class-III pyridoxal-phosphate attachment si domain identified by eMATRIX, accession number BL00600E, p-value= 5.500e-24, raw score of 16.43
  DOMAIN (78)..(439): Aminotransferases class-III pyridoxal-pho domain identified by PFam, accession name aminotran_3, E-value=8.9e-163, PFam score of 469.6
  misc_feature (1)...(452): Xaa = X or * as defined in Table 2
QDLRLFYLKDTMFSKLAHLQRFAVLSRGVHSSVASATSVATKKTVQGPPTSDDIFEREYKYGAHNYHPLPVALERGKGIYLWDVEGRKYFDFLSSYSAVNQGHCHPKIVNALKSQVGQNXPLTSRAFYNNVLGEYEEYITKLFNYHKVLPMNTGVEAGETACKLARKWGLYTVKGIQKYKAKIVFAAGNFWGRTLSAISSSTDPTSYDGFGPFMPGFDIIPYNDLPALERALQDPNVAAFMVEPIQGEAGVVVPDPGYLMGVRELCTRHQVLFIADEIQTGLARTGRWLAVDYENVRPDIVLLGKALSGGLYPVSAVLCDDDIMLTIKPGEHGSTYGGNPLGCRVAIAALEVLEEENLAENADKLGIILRNELMKLPSDVVTAVRGKGLLNAIVIKETKDWDAWKVCLRLRDNGLLAKPTHGDIIRFAPPLVIKEDELRESIEIINKTILSF

SEQ ID NO: 46649 - protein, 68 aa, Homo sapiens
PAGQGLSLVFCPQLAVETACGTWERRRKGLGTQWGCRTGLKGIAMWGPSKILVWEPADLAAQNGSLTL

SEQ ID NO: 46650 - protein, 751 aa, Homo sapiens
  DOMAIN (263)..(307): Sigma-54 interaction domain proteins ATP-binding region A proteins domain identified by eMATRIX, accession number BL00675A, p -value=8.800e-10, raw score of 24.86
  DOMAIN (263)..(462): ATPases associated with various cellular act domain identified by PFam, accession name AAA, E-value=1.3e-77, PFam score of 271.3
EPDVCAKMAGRSMQAARCPTDELSLTNCSVVNEKDFQSGQHVIVRTSPNHRYTFTLKTHPSVVPGSIAFSLPQRKWAGLSIGQEIEVSLYTFDKAKQCIGTMTIEIDFLQKKSNDSNPYDTDKMAAEFIQQFNNQAYSVGQQLVFSFNEKLFGLLVKDIESMDPSILKGEPATGKRQKIEVGLVVGNSQVAFEKAENSSLNLIGKAKTKENRQSIINPDWNFEKMGIGGLDKGFSDIFRRAFASRVFPPQIVEQMGCKHVKGILLYGPPGCGKTLLARQIGKMLNAREPKVVNGPEILNKYVGESEANIRKLFADAEEEQRRLGANSGLHIIIFDEIDAICKQRGSMAGSTGVHDTVVNQLLSKIDGVEQLNNILVIGMTNRPDLIDEALLRPGRLEVKMEIGLPDEKGRLQILHIHTARMRGHQLLSADVDIKELAVETKNFSGAELEGLVRAAQSTAMNRHIKASTKVEVDMEKAESLQVTRGDFLASLENDIKPAFGTNQEDYASYIMNGIIKWGDPVTRVLDDGELLVQQTKNSDRTPLVSVLLEGPPHSGKTALAAKIAEESNFPFIKICSPDKMIGFSETAKCQAMKKIFDDAYKSQLSCVVVDDIERLLDYVPIGPRFSNLVLQALLVLLKKAPPQGRKLLIIGTTSRKDVLQEMEMLNAFSTTIHVPNIATGEQLLEALELLGNLKDKERTTIAQQVKGKKVWIGIKKLLMLIEMSLQMDPEYRVRKFLALLREEGASPLDFD

SEQ ID NO: 46651 - protein, 726 aa, Homo sapiens
  DOMAIN (662)..(684): AAA-protein family proteins domain identified by eMATRIX, accession number BL00674B, p-value=7.750e-21, raw score of 4.46
MGQGLGTLKLNWRLSPGPAAEPTGGALREHKAHYTDEKQRPTMPVCVALTDLPSQLNDSSGAVSHFCTFAHAEPSARSTSPLPGPRQPFYTILRNLIPRCCRPPSDGQSPADGGLTVLPGTPTVLPAPTPLSDPLGSRSRSGLADVRTGSLASSGACVHTVGLGLVGSDAPNYTHSDEAITAVDEGGHRPGLEPLTWLLGRELVTKPEKPSSGFQLPLFLALLEHMCTLRLLKVPFQGHEGPSEEVAQLSCQGPPESPGGPWFWAAVGRRKGKPRTVPDQLATGVRDAGYTLRQITWGGFEKYRHPGSNTSVAGSEPLERSPGNWIIKSLHQKCDSRMLHLQAAFLIVTEWLLQLQANPWQAEWVPVIDLDQSGFTSEQGNIYVFGPLMNDCPQQMASSLQAKTWAAFAHQCSAAKGQLHTELLHEDALKKWTSPAMGWERSRSHDKPRRLSRPLVPPRPFPRAPCAGSSRVRRGLADQKGQQFPTQRSLLPTGSASFTPDRGCAESWCLRPRALIGCSLTSSNPAAPRWAREGGGCGWRCASDKPESHFQSQVDFVPTIGGVAPPLHGRGQTSSSAPLLMEPHLLGLLLGLLLGGTRVLAGYPIWWCWAQGCVAVNIFADIYLWWVRGLTDFKNEATYLCAWPLPPCTRSSPNPNMGCKHVKGILLYGPPGCGKTLLARQIGKMLNAREPKVVNGPEILNKYVGESEANIRKLFADAEEEQRRVM

SEQ ID NO: 46652 - protein, 147 aa, Homo sapiens; identical to SEQ ID NO: 34617
  DOMAIN (31)..(50): Eukaryotic  RNA-binding region RNP-1 proteins domain identified by eMATRIX, accession number BL00030A, p-value=1.000e- 12, raw score of 14.39
  DOMAIN (31)..(101): RNA recognition motif. domain identified by PFam, accession name rrm, E-value=7.4e-22, PFam score of 86.0

SEQ ID NO: 46653 - protein, 146 aa, Homo sapiens; identical to SEQ ID NO: 34618
  DOMAIN (16)..(35): Eukaryotic  RNA-binding region RNP-1 proteins domain identified by eMATRIX, accession number BL00030A, p-value=1.000e- 12, raw score of 14.39
  DOMAIN (58)..(128): RNA recognition motif. domain identified by PFam, accession name rrm, E-value=6.4e-24, PFam score of 92.9
  misc_feature (1)...(146): Xaa = X or * as defined in Table 2

SEQ ID NO: 46654 - protein, 212 aa, Homo sapiens; identical to SEQ ID NO: 35426
  DOMAIN (173)..(193): kw ALLERGEN POLLEN CIM1 HOL-LI domain identified by eMATRIX, accession number DM01724, p-value=5.737e-09, raw score of 8.14
  DOMAIN (53)..(117): RNA recognition motif. domain identified by PFam, accession name rrm, E-value=1.7e-13, PFam score of 58.3

SEQ ID NO: 46655 - protein, 254 aa, Homo sapiens; identical to SEQ ID NO: 34619
  DOMAIN (16)..(35): Eukaryotic  RNA-binding region RNP-1 proteins domain identified by eMATRIX, accession number BL00030A, p-value=6.824e- 11, raw score of 14.39
  DOMAIN (16)..(86): RNA recognition motif. domain identified by PFam, accession name rrm, E-value=2.4e-17, PFam score of 71.0

SEQ ID NO: 46656 - protein, 327 aa, Homo sapiens
  DOMAIN (304)..(323): Eukaryotic  RNA-binding region RNP-1 proteins domain identified by eMATRIX, accession number BL00030A, p-value=5.286e- 09, raw score of 14.39
  DOMAIN (18)..(180): RNA recognition motif. domain identified by PFam, accession name rrm, E-value=3.7e-14, PFam score of 60.5
MPKRKLWGVCEPRGGWFALVQKLSFIEKLTPALYKMSYLAAILKDYVVRRDPKTKCSRGFGFVTYATVEEVDAAMNTRPHKVDGRVVEPKRAVSREDSQRPGARLTVKKIFVGGIKEDTEEHHLRNYSEQYRKIEVIEITTDRGSVKKRGFALVTFDDHDSVDKIVIQKYHSVNGHNYEVRKALPNKRWLVFHPDKEVEMVLETLVVVVEVFMVGMTTLVVEETSVALVAVGMAIMDSVMMEAVLEVVEATMILGIITISFSNFGTDEGKNFGASISAPLCGGGNTSPTRGSPSSKEPEELQKLFIGWLGFETTDESLRDHLSHGEY

SEQ ID NO: 46657 - protein, 67 aa, Homo sapiens
  misc_feature (1)...(67): Xaa = X or * as defined in Table 2
XHPHCQPYPPPTTAATKGHHGPTEVSSTDRSCHSHRNPPPRPTTKSFPEPLRTSFGLDESTSHLLGF

SEQ ID NO: 46658 - protein, 73 aa, Homo sapiens; identical to SEQ ID NO: 41576

SEQ ID NO: 46659 - protein, 115 aa, Homo sapiens
  misc_feature (1)...(115): Xaa = X or * as defined in Table 2
VGSLRRPGPPREETRRLRERRRSLEPWAFLLKEAKVGXQPSSLFQWEGPMGLCSTPLVMNMGDSLITKHLFQVPPLTITSPGPRTRRPHSXYPSPSLATGVWAAVWCKQPHFPAK

SEQ ID NO: 46660 - protein, 50 aa, Homo sapiens
  misc_feature (1)...(50): Xaa = X or * as defined in Table 2
XHNEALLEEAKMMNRLRHSRVVKLLGVHHRGREVLPGDGVHGEGQPDARA

SEQ ID NO: 46661 - protein, 671 aa, Homo sapiens
  DOMAIN (128)..(159): Protein kinases ATP-binding region proteins domain identified by eMATRIX, accession number BL00107A, p-value=3.400e-23, raw score of 18.39
  DOMAIN (17)..(279): Eukaryotic protein kinase domain identified by PFam, accession name pkinase, E-value=6.7e-63, PFam score of 222.4
MQPDMSLNVIKMKSSDFLESAELDSGGFGKVSLCFHRTQGLMIMKTVYKGPNCIEHNEALLEEAKMMNRLRHSRVVKLLGVIIEEGKYSLVMEYMEKGNLMHVLKAEMSTPLSVKGRIILEIIEGMCYLHGKGVIHKDLKPENILVDNDFHIKIADLGLASFKMWSKLNNEEHNELREVDGTAKKNGGTLYYMAPEHLNDVNAKPTEKSDVYSFAVVLWAIFANKEPYENAICEQQLIMCIKSGNRPDVDDITEYCPREIISLMKLCWEANPEARPTFPGIEEKFRPFYLSQLEESVEEDVKSLKKEYSNENAVVKRMQSLQLDCVAVPSSRSNSATEQPGSLHSSQGLGMGPVEESWFAPSLEHPQEENEPSLQSKLQDEANYHLYGSRMDRQTKQQPRQNVAYNREEERRRRVSHDPFAQQRPYENFQNTEGKGTVYSSAASHGNAVHQPSGLTSQPQVLYQNNGLYSSHGFGTRPLDPGTAGPRVWYRPIPSHMPSLHNIPVPETNYLGNTPTMPFSSLPPTDESIKYTIYNSTGIQIGAYNYMEIGGTSSSLLDSTNTNFKEEPAAKYQAIFDNTTSLTDKHLDPIRENLGKHWKNCARKLGFTQSQIDEIDHDYERDGLKEKVYQMLQKWVMREGIKGATVGKLAQALHQCSRIDLLSSLIYVSQN

SEQ ID NO: 46662 - protein, 153 aa, Homo sapiens
  misc_feature (1)...(153): Xaa = X or * as defined in Table 2
IFGFVVAMHGAPGQAVLELLQLTGDQSLGLSQRHMAALDALVHLLHGGLAVLTTAGAAPEHETRGIAGLREEQCRNPRCVKRGWAQEKQAXPGQRGGRKSSPFWSFTLDSASAGPRAAHLHLPDVLSLQTLHHGLHRLLHPELLQLSHGPTRP

SEQ ID NO: 46663 - protein, 948 aa, Homo sapiens
  DOMAIN (585)..(616): Protein kinases ATP-binding region proteins domain identified by eMATRIX, accession number BL00107A, p-value=7.000e-16, raw score of 18.39
  DOMAIN (428)..(726): Eukaryotic protein kinase domain identified by PFam, accession name pkinase, E-value=1.8e-65, PFam score of 230.9
MVELQQLRVQEVVDSMVKSLERENIWKTQGLMFWCSASCCEDSQAFTQQVHQCIECCPVPLAQVQALVTSELEKFQDHLARCTMHCNDKAKDSIDAGSKELQVKQQLDGCVTNPEKGSGKKCAKLGQRYYGRVLELILPVASACPGSKDLLCNKPEPSNIPDSSYYTGGLISGQVLGPQDRYEWNFVLFGDGTGGGQETINKPAKKAPQNSRWRYPGYRMRVCSATKRMSHWYSTPISLLDLPGSYADQTSHRTPFSQSRIQSKAPTLFNPMQDERSEEIAEEKLEASRDALFLRAEALDAAGSQPTSLGCQVLNPVLKRPWRRGAGAGGGGSANSPRPPAGRARRGRRASCRSAATPGDPQLGRQSAAIRAGPTERGRTWLDGAATEKGAGTALPGGEKVVPFWAFLSFRMQPDMSLNVIKMKSSDFLESAELDSGGFGKVSLCFHRTQGLMIMKTVYKGPNCIEHNEALLEEAKMMNRLRHSRVVKLLGVIIEEGKYSLVMEYMEKGNLMHVLKAEMSTPLSVKGRIILEIIEGMCYLHGKGVIHKDLKPENILVDNDFHIKMSTPLSVKGRIILEIIEGMCYLHGKGVIHKDLKPENILVDNDFHIKMWSKLNNEEHNELREVDGTAKKNGGTLYYMAPEHLNDVNAKPTEKSDVYSFAVVLWAIFANKEPYENAICEQQLIMCIKSGNRPDVDDITEYCPREIISLMKLCWEANPEARPTFPVGTIQKQPNGRDVQGIEEKFRPFYLSQLEESVEEDVKSLKRAYLPHLVTAERLPAAPRNRRAPTCRTSEPQSAYLPHLGTAERLPAAPRNRRAPTCRTSEPQSAYLPHLGTAERLPAAPRNRRAPTCRTSEPQSAYLPHLGTAERLPAAPRNRRAPTCRTSEPQRAYLPHLGTAARLPAAPRNRSAPTCRTSEPQRAYLPHLGTAARLPAAPSNRSAPTCRT

SEQ ID NO: 46664 - protein, 454 aa, Homo sapiens
  DOMAIN (393)..(410): Zinc finger C2H2 type, domain proteins. domain identified by eMATRIX, accession number BL00028, p-value=8.269e-11, raw score of 16.07
  DOMAIN (264)..(441): Zinc finger, C2H2 type domain identified by PFam, accession name zf-C2H2, E-value=2.8e-23, PFam score of 90.8
PAAAVELVLSAICSILGLISPALTLEHTARAKGSVPPHITPRVGLSKDSLFHTPPLPQDSSSDETNPSHVLDPVNHFHFVSGDTSFIQIGKPLLLPPTTLGWISGHSPGGLLSVEQTLGQLSAVGSIYSGPYIRMQMSMAFTEYQRGFPQESQILVNSMGQPTLLYVLLPIALLLIDGVESVSPVIGATDPPIQVCQSATLAAKQALTNTSLGYIAAGILRILALLVLCHFVGLVLATLLTESPVGFRDIRHVCVSAVSMESDTKCGKAFKWSSYLSRHKVIHIGIHTEEKFYKCEECGKGLYWSSSLTKECGKAFKRYLNLTTHKIIPAGEKPYKCEECGKAFNKSSSITKHKIIHTGEKTYKCEECGKAFNLSPQLTAHKITYTGEKPYKCEKCGKHFNQSSTLTTHMLIHAGEKPYKYEECGKAFNQSSKLTKHKITHTGEKSYKCEECGQ

SEQ ID NO: 46665 - protein, 51 aa, Homo sapiens
GSPVTGPKYPLRLTLVLQPLNSNRAAHLSRGSEGQDVAQAHVGVTASNPLS

SEQ ID NO: 46666 - protein, 289 aa, Homo sapiens
RPSRRLLRIIMDHYDSQQTNDYMQPEEDWDRDLLLDPAWEKQQRKAPGGSGSAPAPEPGNAGPERGEVAPLAGRSPWGSVVQATLRLLQPSPRGGESAGEIGGRLRICLEKDQLECGWGRENWGAYAGSPAGPWVGSCNPDMGLRYVLPLRPPGKVGSSVRVEGLQNEGVCVYPVKLEELNQYLLSEWMLKQRGSVGKCIEVVVNKAHIPILQTGGYLAGKSGYLGMKPLVRKQAQHRPTLLALGLFWEYGAEHPCVPLPCPQQQPALPTQCGDNQDENFHDDPLPLTE

SEQ ID NO: 46667 - protein, 482 aa, Homo sapiens
MDRILGLVPVTLWIRRAIWACTAVVAFMVRRRHAVRRREELAQRDSAQGEVHGKARAKMQPAPQAGGGLTSPMPEVSPRLLQTLCSRVQKEMSRSSHQGPDELLKTSVTKQPPEHPGMTDAKYTPHGSQHEDHQGQTVDDLNDSTDRQQPAELPGQEITRRKQRLQAKEEKKERPEQAGAGVERAANVGVKCRPSWPTPLRACARGQCKELTAEVQSLPAGLPAGHEGTAGEGASKTAAEGSRCLHCTENSRDGVSRESTEENAYCLDLDQRLRKVHENTCNHYKKMTQDLAQESKKDTSNFQREIFFREKMAQEGRMAAVSTETALQPLREENDHSRQKPADFEAKFQLLRGGALAPGVLPAAHRGPEVSGGPWDDRAPRREAGHNQSEDVGESYSQEYLVDSQFEESPPWAHGLQEARGPGKAIAGVPVRSEEGVTAAEAADWQEVPLKDAKEYAESIGAIVVETSAKNAINIEELFQGI

SEQ ID NO: 46668 - protein, 206 aa, Homo sapiens
  DOMAIN (16)..(38): TRANSFORMING PROTEIN P21 RAS SIGNATURE domain identified by eMATRIX, accession number PR00449A, p-value=5.500e-16, raw score of 13.20
  DOMAIN (17)..(206): Ras family domain identified by PFam, accession name ras, E- value=5.2e-34, PFam score of 126.4
APALPGCEHMMAIRELKVCLLGDTGVGKSSIVCRFVQDHFDHNISPTIGASFMTKTVPCGNELHKFLIWDTAGQERFHSLLPLYLRGSAAAVIVYDFTEAGFHFHPLKKWVKRLKELGPENIVMAIAGNKCDLSDIREVPPEGMLKEYAESIGAIVVETSAKNAINIEELFQGISRQIPPLDPHENGNNGTIKVEKPTMQASRRCC

SEQ ID NO: 46669 - protein, 394 aa, Homo sapiens; identical to SEQ ID NO: 31417

SEQ ID NO: 46670 - protein, 171 aa, Homo sapiens
MQLFCKISNPTGPPDGYKFLIPSTATEREQKPLIPDVASPFSSQSTPKAQETTGSHATPNPAQSSPEKHRPLSLHTTPKHFHRPNTLPGWDLSLPTNIRSQDCEASEPNPMRTDSRLCDCATYKFRWPVPAFSDEFPSTRSREKGLFLPSLMTSSRELPSTWLILAQKLPY

SEQ ID NO: 46671 - protein, 94 aa, Homo sapiens
  misc_feature (1)...(94): Xaa = X or * as defined in Table 2
TFYTCFSPSVIPFSFSIHTKPYPGHHQSFYMTNVSSNNPTISPLTTRPPFSLISPALGSHAAPNPAXSSPEKHRPFSLHTTPQKFHRPNTSTLF

SEQ ID NO: 46672 - protein, 145 aa, Homo sapiens
  DOMAIN (51)..(62): Ribosomal protein L44e proteins domain identified by eMATRIX, accession number BL01172A, p-value=4.825e-11, raw score of 7.78
MANYSCPWRGFKGVTIEADSKVQARAAGGKGLRCRFLFSSCRQNSPAAKMVNVPKTGRTFCKKCGKHQPHKVTQYKKELWNSHYIEDMENENENSVPTLKTVQSCKNVKNLTGHADATGGLPQPLGISSPMALQSTVPLLAAFTG

SEQ ID NO: 46673 - protein, 138 aa, Homo sapiens
  DOMAIN (47)..(89): Ribosomal protein L44e proteins domain identified by eMATRIX, accession number BL01172B, p-value=4.600e-40, raw score of 14.10
  DOMAIN (51)..(133): Ribosomal protein L44 domain identified by PFam, accession name Ribosomal_L44, E-value=3.9e-34, PFam score of 126.8
ARAAKGESCEGPGVGRCFSFSSYRQTPPCCQRLVNVPKTRRTFCKKCGKHRPHKVTQYKKGKDSFYAQGRRRYDRKQSGYGGQTKPIFRKKAKTTKKMGLRLECVEPNCRSKRMLAIKRCKHFELGGDKKRKGQVIQF

SEQ ID NO: 46674 - protein, 63 aa, Homo sapiens
  misc_feature (1)...(63): Xaa = X or * as defined in Table 2
IHGSSENPTPERETLFWHAENGSALASCXKSGGQAPKRKVRTTLILKAEILILGMLVLRSHGM

SEQ ID NO: 46675 - protein, 592 aa, Homo sapiens
  misc_feature (1)...(592): Xaa = X or * as defined in Table 2
MPFKCKKQHTFNKTSPKEGAIIFTHGCLCTSPFNSELSEHLGNLKLSSWEHLHHRSQQTLSVRLHVPTPQPVEHEFIQLIYIHTGAKLQASKVIIATKDGKRRKSPLWQLKYPKLILREASSVSEELHKEVQEAFLTLHKHGCLFRDLVRIQGKDLLTPVSRILIGNPGCTYKYLNTRLFTVPWPVKGSNIKHTEAEIAAACETFLKLNDYLQIETIQALEELAAKEKANEDAVPLCMSADFPRVGMGSSYNGQDEVDIKSRAAYNVTLLNFMDPQKMPYLKEEPYFGMGKMAVSWHHDENLVDRIQLQLWDPVDGTTASSAVPKQGRDKRREVPNTLSQPNSQEGLISAFHSRCVHAVFYKLTSAPKTTSLPDVPSDLLAEGLAASRAGQALWRCDKKSLLTLVRKINLQGKRDGGRSATNQQSQPHLDNTGLERQLEQKVGRCRSPWRGLGHLEGNAQKGHLLHGVNKNGQHLLXMPPSPLPGGQKGRLVGMLSWVLTXVYKIQHGTPAAVEGXDEAFLAVWLGEGVGDFSPLVPSLLWHSXRGCCSIHGIPELELNPVHQIFIMSASSLPFSPCQNKVPLSGMAFSEDP

SEQ ID NO: 46676 - protein, 153 aa, Homo sapiens
MDPPKIPHLKEKPYFGMRKMAVRWHHAENLVDRPQRGKTLTQASTHGGSSVPGDEISSWETCCVRTEYVPKTPKEFSTGLGVHCDTARTAAARLGLRHQEQLKVMFIGGPNTRKDYHIEEGEEVGLTGLPGSRPAGKEPGPSGRGRFPLEAQR

SEQ ID NO: 46677 - protein, 675 aa, Homo sapiens [sequence omitted]

SEQ ID NO: 46678 - protein, 272 aa, Homo sapiens; identical to SEQ ID NO: 30476
  DOMAIN (66)..(77): RNase H domain identified by eMATRIX, accession number PF00075F, p-value=8.500e-11, raw score of 12.87
  DOMAIN (16)..(145): RNase H domain identified by PFam, accession name rnaseH, E- value=1.9e-38, PFam score of 141.2

SEQ ID NO: 46679 - protein, 72 aa, Homo sapiens
HLQFRIWWSQEAHLQAQLNRTNSILITQAQLTGSDSFSDTYAQLNFDALTTEQVTKPNYKMPLKNLSDEHAQ

SEQ ID NO: 46680 - protein, 44 aa, Homo sapiens
  DOMAIN (5)..(20): WILM'S TUMOUR PROTEIN SIGNATURE domain identified by eMATRIX, accession number PR00049D, p-value=4.750e-12, raw score of 0.00
ILLPPPPLPPPPPPPPPPPLLLLLLLLLLLLPLLLFLLQVCSCT

SEQ ID NO: 46681 - protein, 66 aa, Homo sapiens
  DOMAIN (5)..(26): GLUTELIN SIGNATURE domain identified by eMATRIX, accession number PR00211B, p-value=7.158e-12, raw score of 0.86
LFPPPPPPFLPPPPLPPSPPLLPPPPPPSSSSSSSSSSSSSSSSSSSSSSSSSSSSSLALPPQFLP

SEQ ID NO: 46682 - protein, 1118 aa, Homo sapiens
  DOMAIN (286)..(320): 3 RETROVIRAL PROTEINASE domain identified by eMATRIX, accession number DM00892C, p-value=3.342e-11, raw score of 23.55
  DOMAIN (715)..(872): Integrase core domain identified by PFam, accession name rve, E-value=2.8e-38, PFam score of 136.4
  misc_feature (1)...(1118): Xaa = X or * as defined in Table 2
LNYKMLLKNLSPMSMLKAFSFAIPMQPPAQTNLPTAKPNGFQPLLLSQYNACPPPQXEAGQVDLCSTIPLNLLPDSLPLTVPTGPLPQGSVGLVLGRASSSAKGITIHTGLINSDSVDEIKLITSAKVPVSILAGESIAQLLLLPNIILNKGDKTRGPGMGSRGEKAAYWINVISKQRPTCTIHIQGRKFEGLVDTGADVSVISSSLWPSSWLKHPTNMGLVGVGKAEEVYGSTFILPCTGLDGQKGTIQPYIMTIPINIWGRDLLAQWGAEINIPHNSYSAPSQHMMENRGFVPGLGLSPKHEGITKLLPVTIKENRLSFLVVAAATPPDPIPLQWKSDTPVWIQQWPLSKEKLEALTHLVSEQLLLGNVEPSLSPWNYPVFLVKKKSGTWQMDCEKFAFTVPSINNQEPAARYQWKVLPQGMLNSPTICQLYVGQVLSPVRAQFPEAYILHYIDDILIAAPTDKELIDCYQILNRCVTEAGLHIAQDKIQQTTPVQYLVMVVDKQCIQPQKVQIRRDSLKTLNDFQKLLGNINYLRPTLGIPTYALSNLFSTLRGASDLHSPRTLTPEALLELEFIEERIQTAQLSRVKPFQPFQLLVFASLHSPTGLIIQHNDLVEWLQQVACQCRHPFYITHIRSHTTLPGSMSAGNHKVDCLVSFTTQEAQEFHNLTHVNAAGLKDKFSLIWKQAKFIVHSCPQCQVFVLPNQETGINPRGLTPNALWQMDVTHVSSFGRLSYVHVSVDTFSGFIWATCQTGEGTAHVKKHLYSCFAVMGLPYQIKTDNAPAYVSKAFDTFMQQWGISHITGIPCNPQGQAVVEWANRTLKTQLSKQSEQPKHDLTTPHFQLHLALFTLNFLNVPKDNILTAAECHYTGKKFFLNEGKPVLWKNSQTNTWEPGTIITWGRGYACVSPGDHQSPVWVPTRRLKLRVNTDNENHRGKTSVSETALRHVSSHTDLPATHDYSYWAYVPFPPLIRPLTWIDAPAEIYTNHSERNVGFVSLHGGLAIMWDQNNVLRQLNASGHDYTLGLGYLTFWLPLATLEGEEEEEKEEEGGGGGGEEEEEEEEEEEEEEEEEEGGGGGGGGGGEGGGGGGTFLGYTKYTNTKIADLKKNHKKHTV

SEQ ID NO: 46683 - protein, 261 aa, Homo sapiens
MACQLWMQLREPRKTGFQALTLKFPHGLSRSVIHCEKVTNKSPFLEHTEVRKTVYKSLSKAPSCLGKRVRTCLKKKRKVGYSRYLCILAVSGLVTVIPDLFPVQMVPIPAGVFTMGTDDPQIKQDGEAPARRVTIDAFYMDAYEVSNTEFEKFVNSTGYLTEPPVDAVLATDHSLKTQKQQQFNLGRIPDLIQDQQGGTCISLQKPVLLHLGPKSLRIPGKPSQEGEAHTSPDCGDYNKYLTLQCLDTSEYLHVSTPSRKT

SEQ ID NO: 46684 - protein, 637 aa, Homo sapiens
  DOMAIN (500)..(543): kw TRANSCRIPTASE REVERSE II ORF2 domain identified by eMATRIX, accession number DM01354T, p-value=9.816e-40, raw score of 9.48
  DOMAIN (383)..(618): Reverse transcriptase domain identified by PFam, accession name rvt, E-value=8.2e-14, PFam score of 59.3
MGRKQSRKAENSKNQSASSSKDCSSLPATEQSWTENDFDELTEVGFRRSVITNFSELKMYVRTHCKEAKNLEKRSTQFIKQVLRDLQRDLDSHTIIMGDFNTPLSILERSTTQKVNNDTQELNSALHQVDLIDIYRTLHPKSTEYTFFLAPHHTYSKIDHIVRSKALFSKCKRTEITTNCLSDHSAIKLELRIKKLTQNHTTTWKLNNLLLNDYWVNNEMRAEIKMFFETNENKDTMYQNLWDTFKAVCRGKFIALNAHKRKQERSKIDNLTSQLKELEMQEQTHSKASRRQETTKIRAELKEIETQKTLQKITESRSWCFEKINKIDRLLARLIMKKREKNQIDTIKNDKGDITTDPTEIQTTISGYYKHLSTNKLENLEEMDKLLDTYTLPRLYQEQVESLNTPITGPEIEAIVNSPPTKKIPVSDEFTAEFYQRTNDKNHMIISIDAEKAFDESQQHFMLKTLNKLGIHGTHLKILRAVYDKPTANIILNGQKLEAFPLKTRTREGCPPSPLLFNIVLEVLTRAIRQEKEIKGIQLGKEEVKLSLFADDVIVYLENPIVSAQKLLKLISNFSKVSGLRVLANVYGSFQDMETQGLRFFGQNSVPQQLRPYNGASLQTLESGEKASAPAKDHCLV

SEQ ID NO: 46685 - protein, 459 aa, Homo sapiens
  misc_feature (1)...(459): Xaa = X or * as defined in Table 2
KTPFVGYQHQRPKVDKTTKMGRNQSRKAENSKNQSTSSPPKDRSSLPATEQSWTENDFDELTEVGFRRSAITNFSELKEHVLTRRKEAKNLEKRLDEWLTRINSVEKTLNDLMELKTMAQELRDARTSFNSXFNQVEKRISVIEDQIDEIKQDDKAAETCNWRWVSESLRQLRASVDAFHARASHYNAGECLHQLAALNSRLNCAQEMARRDSIGEVPPVPWRTVVGSGIAGEAKLDHLRLVSLIGREVNKENSPAATRWLFSFQAGALAGGQIVLQAAKPNAHGQPVVATRNLLNPAGIVAVLKQRPRLVAAAVQAFYLRDPIDLRACRVFKTFLPETRIMTSYYAIEWSLWTLVDVLHAENSESAHMSHNSYDPPSDVARHLTHLPMSPIPDYIIARFRYRHRSRVRLTARKLSPAFMRCSSEIQRYSTMLERGFNGGYCRSTTVRVVTEATRMLSF

SEQ ID NO: 46686 - protein, 397 aa, Homo sapiens
MAHACNPSTLGGQGKKVNVSNLETLLNNIEIEVGKEEYEDLLNHLPVDENEMVDVNVVMDEAKAFTGEKVNVSNLGNELRKMGLVLTDEEHEKLLKTLPIRRPRVNTKKVEIFLENMGTKIKDEELEELITQLPTEERNSVNINEKVIYTKTPSVGHQHQRPKVDKTTKMGRNQSRKAENSKNQSTSSPPKDCSSSPATEQSWTENDFDKLTEVGFRRSVITNFSELKEHVRTHLKEAKSLEKRLDEWLTRINSVEKTINDLMELKTMARELHDACTSFNSRFDQVEEKVKRATDTYNLGIALEHRKEMLNLWQKIRGDLIGMDSRNESFYDTFSTYTWSWNVCQELLSPKDLRLYDAYVNRNSSHNSRSSSSSDTSECYTDSGRKRKRKGLKGFQQ

SEQ ID NO: 46687 - protein, 636 aa, Homo sapiens
  DOMAIN (182)..(227): kw TRANSCRIPTASE REVERSE II ORF2 domain identified by eMATRIX, accession number DM01354N, p-value=1.000e-40, raw score of 13.17
MRESLELPRDLLTGCDQHDDNDMDNEVQAEEVSDRNEELIGNWSKAAPAQTLDQRGLGTSQSTASEGATRKPWQLPCDVKPEGARSARVEAWVPPPRFQRMYGKTWMSREKPNAGAEPHGEPVLRQCRREMRSTGRTHPAGLEGHCCKGANPLLQSEMILELADGSGRGNEAREIQTTIREYYKHLYANKLENLEEMDKFLDTCTLPRLNQEEAESLNRPITGSEIEAIINSLSTKKVQDQMDSQPNSTRENKIPRNPTYKRCEGLPQGEIQTTAQRNKRGYKQMEEHSMLMDRKNQSCENGHTAQAICRKLKLDPFLTTYTKINSRWIKDLHVRPKTTKTLEENLGNTIQDIGMGKDFMSKTPKAMATEAKIDKWDLIKRKSFCAAKETTTRVNRQPTDWEKMFAIYSSDKGLISRIYEELKQIYKKKTNNPINKWAKDMNRHFSKEDIYAANRHMKKCSSSLAIREMQIKTTVSPFAAQWVSQRYGKWQEAHPSNNDGKGYRGKPRFQSLSDVHGPQDQKKIIKESALPPTPTFINILMNAKTIENGQFPYLLNALKQQQPHDAENLFTWGKENAAIVSPCIEVSAALSQWKVPAWPQRSGIPNRILRSPIPGLGSWVAFLDLVWVRGDPTALK

SEQ ID NO: 46688 - protein, 596 aa, Homo sapiens
  DOMAIN (37)..(83): kw TRANSCRIPTASE REVERSE II ORF2 domain identified by eMATRIX, accession number DM01354O, p-value=1.000e-40, raw score of 8.73
  DOMAIN (70)..(295): Reverse transcriptase domain identified by PFam, accession name rvt, E-value=1.4e-48, PFam score of 174.8
MDKFLDTYTLPRLNQEEVESLNRPITGSEIEAIINSLPTKESPGPDGFTAEFYQRYKEELVPFLLKLLQSIEKEGILSNSFYEASIILIPKPRRDTTKKENFRPISLMNIDAKILNKILANRIQQHIEKLIHHDQVGFIPGMQGWFNIRKSINVIQHINRTKDKNHMIISIDAEKAFDKIQQPFMLKILNKLVLEVLARAVRQEKEIKGIQLGKGEVKLSLFADDMIVYLENPIVSAQNLLKLISNFSKVSGYKISVQKSQAFLYTNNRQTESQIMSELPFTIASKRIKYLGIHLTRDVKDLFKENYKPLLNEIKEDTNKWKNIPCSWVGRINIVKMAILPKVIYRFNAIPIKLPMTFFTELEKTTLKFIWNQKRARIAKSILSQKNKAGGITLPDFKLYYKATVTKTAWYWYQNRVIDQWNRTEPSEIMPHIYNYLIFDKPEKKKQWGKDSLFNKRCWANWLAICRKLKLDPFLTPYTKINSRWIKDLKVRPKTIKTLEENLGITIQDIGMGKDFMSKTPKAMATKAKIDKWDLIKLKTFCTAKETTIRVNRQPTEWEKIFATYSSDKGLISRIYNELKQIYRKKTTPSKSGQRI

SEQ ID NO: 46689 - protein, 606 aa, Homo sapiens
  DOMAIN (127)..(170): kw TRANSCRIPTASE REVERSE II ORF2 domain identified by eMATRIX, accession number DM01354T, p-value=1.000e-40, raw score of 9.48
  DOMAIN (1)..(249): Reverse transcriptase domain identified by PFam, accession name rvt, E-value=6.9e-46, PFam score of 165.9
MDKFLDTYALPRLNQEEVESLNRPITGSEIVAIINSLPTKKSPRPDGFTAEFYQRYKEELHINRTKDKNHMIISIDAEKAFDKIQQHFMLKTLNKLGIDGTYFKIIRAICDKPKANIILNGQKLEAFPLKTGTRQGCPLSPLLFNIVLEVLARAIRQEKEIKGIQLGKEEVKLSLFADDMIVCAENPIVSAQNLLKLISNFSKVSGYKINVQKSQVFLYTNNRQTESQIMSELPFTIASKRIKYLGIQLTRDVKDLFKEKYKPLLNEIKEDTNKWKNIPCSWVGRLNIVKMAILPKVIYRFNAIPIKLPMTFFTELEKTTLKFIWNQKTARIAKSILSQKNKAGGITLPDFKLYYKATVTKTAWYWYQNRDIDQWNRTEPSEIMPHIYNYLIFDKPEKNKQWGKDSLFNKWCWENWLAICRKLKLDPFLTPYTKINSRWIKELNVRPKTIKTLEENLGNTIQDIGMGKDFMSKTPKAMATKAKIDKWDLIQLNSFCTAKETTIRVNRQPTKWEKIFATYSSDKGLISRIYNELKQIYKKKTNNPIKKWAKDMNRHFSKEDIYAAKKHMKKCSSSLAIREMQIKTTLRYHLTPVRMAIIKKSGNNRC

SEQ ID NO: 46690 - protein, 348 aa, Homo sapiens; identical to SEQ ID NO: 41985
  DOMAIN (195)..(235): kw TRANSCRIPTASE REVERSE II ORF2 domain identified by eMATRIX, accession number DM01354Y, p-value=1.000e-40, raw score of 10.69

SEQ ID NO: 46691 - protein, 379 aa, Homo sapiens
  DOMAIN (22)..(69): kw TRANSCRIPTASE REVERSE II ORF2 domain identified by eMATRIX, accession number DM01354V, p-value=1.000e-40, raw score of 12.97
MIISIDAEKAFNKIQQPFMLKTLNKLGIKYLGIQLTRDVKDLFKENYKPLLNGIKEDTNKWKNIPCSWIGRINIVKVAILPKVIYRFNAIPIKLPMTFFTELEKTTLKFIWNQKRARNSKTILSQKNKAGGIMLPDLKLYYKPTVTNTAWYWYQNRDKDQWNRIEPSEIIPHIYNHLICDKPDKNKKWGKDSLFNEWCWENWLAICRKLKLDPFLTPYTKINSRWIKDLNVRPKTIKTLEENLGSSIQDIGMGKDFMTKIPKAMATEAKIDKWDLIKLKSFCTAKETTIRVNRKLTEQEKIFTIYPSDKGLIPRIYTQLKQIYKKKIKQPHQKVDKGYEQAFLKRTHLCSQQTHEKMLIITGHQRNANQNHNEIPSHTS

SEQ ID NO: 46692 - protein, 354 aa, Homo sapiens
  DOMAIN (13)..(52): kw TRANSCRIPTASE REVERSE II ORF2 domain identified by eMATRIX, accession number DM01354X, p-value=1.000e-40, raw score of 13.86
MAILPKVIYRFNAIPIKLPLTFFTELEKTTLKFIWNQKRAHIAKSILSQKNKAGGIMLPDFKLYYKGTVTKTAWYWYQNRDIDQWNRTEPSEILPHIYNYLIFDKPEKNKKWGKDSLFNKWCWENWLDICRKLKLDPFLTPYTKINSRWIKDLNVRPKTIKTLEENPGNTIQDRGMGKDFMSKTPKAMATEAKIDKWDLIKLKSFCTAKETTIRVNRQPTEWEKIFTIYSSDKGLISRIYKELKQIYKKKTNNPIKKWAKDMNRHFSKEEIYAANRHMKKCSSSLAIREMQIKTTMRYHLTPVRMAIIKKSGNNRWELNNENTWTQEGEHHTPGPVVGWGDRGGIALGDIPNAK

SEQ ID NO: 46693 - protein, 323 aa, Homo sapiens
  DOMAIN (7)..(54): kw TRANSCRIPTASE REVERSE II ORF2 domain identified by eMATRIX, accession number DM01354V, p-value=1.000e-40, raw score of 12.97
MSELPFTIASKRIKYLGIQLTMDVKDLFRENYKPLLNEIKEDTKKWKNIPCSWVGRINIVKMAILPKNWKKTTLKFIWNQKRARIVKSILSQKNKAGGITLPDFKLYYKATVTKTAWYWYQNRDIDQWNRTEPSEITPHIYNYLIFDKPEKNKQWGKDSLFNKWCWENWLAICRKLKLDPFLTPYTKINSRWIKDLNVRPKTIKTLEENLGNTIQDIGMGKDFMSKTPKAMATEAKIDKWDLIKLKSFCTAKETTIRVNRQPTKWEKIFATYSSDKGLISRIYNEFKQIYKKKTNNPIKKWAKDMNRHFSQEDIYAAKKHMKK

SEQ ID NO: 46694 - protein, 608 aa, Homo sapiens
MDTFLQAERKDYMEAYELIEQEEQGVKELNRPLTAPSALHPRDEAHLIMVDKLFDVLLDSVCQYFIEDFCIDVHHINSRWIAVCQYFIEDFCIDVHHINSRWIKDLNVRPKTIKTLEENLGNTIQDIGMGKDFLSKTPKAMATKAKIDKWDLIKLNNFCTAKETTIRLPVPNPCGPVAETPLSRVFVLREARKTLKPHQSTCLSKGRDNSIDSWKTAARVLKTAISSTPTIPILKDQTQEWSVSATFTSDGKIRLFYTDYSGKHYGKQSLTTAQVNVSKSDDTLKINGVEDHKTIFDGDGKTYQNVQQFIDEGNYTSGDNHTLRDPHYVEDKGHKYLVFEANTGTENGYQGEESLFNKAYYGGGTNFFRKESQKLQQSAKKRDAELANGALGIIELNNDYTLKKVMKPLITSNTVTDEIERANVFKMNGKWYLGELGWRREWSSGDRKSLARLSKTGTLGLAALTYKCTRDQWTVYCRVIREKNLCQDMRWYQRCCQTCRDFYANKMSPATAELVTRSPKGRSKLRLRYQLVFISLKGKPARKGKASSGSKLSLLSSSKTVALAGMGRGDEFQMELESEDLTSERDGILTPTSSNQKKSKAYGSLIRT

SEQ ID NO: 46695 - protein, 1483 aa, Homo sapiens
  DOMAIN (76)..(121): kw TRANSCRIPTASE REVERSE II ORF2 domain identified by eMATRIX, accession number DM01354N, p-value=1.000e-40, raw score of 13.17
  DOMAIN (783)..(1314): Immunoglobulin domain identified by PFam, accession name ig, E-value=1.9e-38, PFam score of 128.9
MGDFNTPLSTLDRSTRQKVNKDIQKWNSALHQVDLIDIYRTLHPKSTEYTFFSTLHHTYSKIDHIVGKIQIPIREYYKHLYASKLENLEETDKFLDTYTLPRLNQEEVESLNRPIAGSEIEAIINSLPTKKSPGPDGFTAEFYQSVGSSGQGNQAGERNKGYSIRKKEVKLSMFADDITAYLENPIVSAPNLLKLISNFSKSQDTKSMCKNHKHSSTPIRDKQSQIMSELPFTVASKRIKYLGIKLRRDVKDLFKENYKPLLNEIKEDTNKWKNIPCSWIGRINIVKMTILPKVIYRFNAIPIKLPMTFFAELEKTTLKFIWNQKRAHIAKTILSQKNKAGGIMLPDFKLYYKATVTKTAWYWYQNRDIDQWNRIEPSEIIPHICKHLIFDKPDKNKKWGKDSLFNKWCWENWLAICRKLHLDPFLTPYTKINSRWIKDLNVRHKTIKTLEENLGNTIQDIGMGKDFMTKTPKAMATKAKIDKWDLIKLKSFCTAKETIIRLSPRNAEPPAAWVWVFVDPCATVRLEQVPDLQAWATPVFIDVAHTYQTVTGMLLGEGYLQIVAFGTLVTGSCTLHPASQVVGSRTLHPAFQVMGSCILHSASQVVGSCTLYPASQVVGSRTLHPVSQVVGSCTLHPRDLRFNRIREIQPGAFRRLRNLNTLLLNNNQIKRIPSGAFEDLENLKYLYLYKNEIQSIDRQAFKGLASLEQLRLDSNTLHCDCEILWLADLLKTYAESGNAQAAAICEYPRRIQGRSVATITPEELNCERPRITSEPQDADVTSGNTVYFTCRAEGNPKPEIIWLRNKSLERHAAADTGSLSSRVDLTCLPNKGSLLLCPQTCCGPVKAKTALAAAVRVTEGSPTADHYMRPGSEPHLSSLTCRLALPNIQSHLQATLTCWLAVFLTGISVASNVTSLLFTCFCIKGTKVKLQVGNELSMKTDSRLNLLDDGTLMIQNTQETDQGIYQCMAKNVAGEVKTQEVTLRYFGSPGSFLGNRVCTSSVSVCTATSLQPQNTEVLVGESVTLECSATGHPPPRISWTRGDRTPLPVDPRVNITPSGGLYIQNVVQGDSGEYACSATNNIDSVHATAFIIVQALPQFTVTPQDRVVIEGQTVDFQCEAKGNPPPVIAWTKGGSQLSVDRRHLVLSSGTLRISGVALHDQGQYECQAVNIIGSQKVVAHLTVQPREEEAPLCFLLRESGSPQSLLSSVGPAAQHMPETAPPSFFDVIDSFSWILYICLPVTPVFASIPSDTTVEVGANVQLPCSSQGEPEPAITWNKDGVQVTESGKFHISPEGFLTINDVGPADAGRYECVARNTIGSASSGVSTCCKKMVQKGPRVGPVITNSRRHLVVRSANAFVGWTLSSVLSQTYRDAMRKFPAEEHLPDVSRNGDPFVATSIVEAIATVDRAINSTRTHLFDRYRGAVNTLTLKSLSFRVKGTPSMPVIVLGQGLQSQTEEIKTSALKDQTFQRNADGKPERGPCT

SEQ ID NO: 46696 - protein, 1285 aa, Homo sapiens
  DOMAIN (887)..(934): kw TRANSCRIPTASE REVERSE II ORF2 domain identified by eMATRIX, accession number DM01354V, p-value=1.000e-40, raw score of 12.97
  DOMAIN (512)..(603): IPT/TIG domain identified by PFam, accession name TIG, E- value=1.2e-08, PFam score of 42.1
QFLPNLDSTVLGENYFDGTYQMLYLLVKGTIPVEIHTATVIFVSFQLSVATEDDFYTSHNLVKNLALFLKIPSDKIRISKIRGKSLRRKRSMGFIIEIEIGDPPIQFISNGTTGQMQLSELQEIAGSLGQAVILGNISSILGFNISSMSITNPLPSPSDSGWIKVTAQPVERSAFPVHHVAFVSSLLVITQPVAAQPGQPFPQQPSVKATDSDGNCVSVGITALTLRAILKDSNNNQVNGLSGNTTIPFSSCWANYTDLTPLRTGKNYKIEFILDNVVGVESRTFSLLAESVSSSGSSSSSNSKASTVGDFDLLGYEVVEGNNVTLDITEQTKGKPNLETFTLNWDGIASKPLTLWSSEAEEHINRGQKTAETDAYCGRYSLKNPAVLFDSADVKPNRRPYGDILLFPYNQCFAMTDGAVQQPVPHFITAYHPDPGFHTIAGFPHSWEHLQMCEESPGCHSNWERFILQEHMEEEVVLPAFVLSSGFPYFFNARITNVALIPVTTKAWSSWNVTMIFPSQGSIRGGTTLTISGRFFDQTDFPVRVLVGGEPCDILNVTENSICCKTPPKPHILKTVYPGGRGLKLEVWNNSRPIRLEEILEYNEKTPGYMGASWVDSASYIWLMEQDTFVARFSGFLVAPDSDVYRFYIKGDDRYAIYFSQTGLPEDKVRIAYHSANANSYFSSPTQRSDDIHLQKGKEYYIEILLQEYRLSAFVDVGLYQYRNVYTEQQTGDAVNEEQVIKSQSTILQEVQVITLENWETTNAINEVQKIKVTSPCVEANSCSLYQYRLIYNMEKTVLEVLARAIRQEKEIKGIQLRKEEVKLSLFADDMIVYLENPIVSAQNLLKLISNFSKVSGYKINVQKSQAFLYTNNRQTESQIMSELPFIIASKKIKYLGIQLTRDVKDLFKENYKPLLKEIKEDTNKWKNIPCSWVGRINIMKMAILPKVIYRFNAIPIKLPMTFFTELEKTTLKFIWNKKRARNAKSILSQKNKAGGIMLPDFKLYYKATVTKTAWYWYQNRDIDQWNRTEPSEIMPHIYNYLIFGKPEKNKQWGKDSLFNKWCWENWLAICRKLKLDPFLTPYTKINSRWIKDLNVRPKTIKTLEENLGITIQDIDMGKDFMSKTPKAMATKAKIDKWDLIKLKSFCTTKETTIRVNRQPTKWEKIFATYSSDKGLISRIYNELKQIYKKKTNNPIKKWAKDMNRHFSKEDIYAAKKRMKKCSPSLAIREMQIKTTMRYHLTPVRMAIIKKSGNSRCWRGCGEIGTLLHCWWDCKLVQPLWKSVW

SEQ ID NO: 46697 - protein, 613 aa, Homo sapiens
  DOMAIN (186)..(233): kw TRANSCRIPTASE REVERSE II ORF2 domain identified by eMATRIX, accession number DM01354V, p-value=1.000e-40, raw score of 12.97
  DOMAIN (1)..(199): Reverse transcriptase domain identified by PFam, accession name rvt, E-value=9.2e-06, PFam score of 12.2
  misc_feature (1)...(613): Xaa = X or * as defined in Table 2
RTSSRKTTNHCSEIKEDTNNWKNIPCSWIGRINIVKMAKLPKPPLVIPRQTGSGVDLQQTPTDLHLRVLTVRRKTNKQKGHPHQNPICTSPSSKTKVLEVLARAFRQEKEIKGIQVGKEEVKLSLFADDMIVYLENPIVSAQNLLKLISNFSKVSGYKINVQKSQAFLYTNNRQTESQIMTELPFTTASKRIKYLGIQLTRDVKDLFKENYKPLLNEIKEDTNKWKNIPCSWVGRINIVKMAILPKVIYRFNAIPIKLPMTFFIELEKTTLKFIWNQKRARIAKSILSQKNKAGGITLPDFKLYYKATVTKTAWYWYQNRDIDQWNRTEPSEIMLHIYNYLIFDKPEKNKQWGKDSLFNIWCWENWLAICRKLKLDPFLTPYTKINSRWIKDLNVRSKTIKTLEENLGNTIQDIGMGKDFMSKTPKAMATKAKIDKWDLIKLKSFCTAKETTISVNRQPTEWEKIFAIYSSDKGLISRIYNELKQIYKKKTNNPIKKWVKDTNRHFSKEDIYAAKRHMTKCSSSLAVREMQIKTTMRYHLTPVEEVRAGEMAKTRRCQNVKGASEEGIRAHCFVSHXPHCPLWRATTLMETLKFKPIEVPCKPLEKSVSLLLL

SEQ ID NO: 46698 - protein, 721 aa, Homo sapiens
  DOMAIN (259)..(304): kw TRANSCRIPTASE REVERSE II ORF2 domain identified by eMATRIX, accession number DM01354N, p-value=1.000e-40, raw score of 13.17
  DOMAIN (345)..(621): Reverse transcriptase domain identified by PFam, accession name rvt, E-value=2.8e-75, PFam score of 263.5
MGPHSSALGWSMGLGAVEQGVAFVGEARAAHEPMEGVGGSGMASCRSRALPRGKAAKTRPKTEDAWVFAKPNAIQAVGVMSFAFICHHNSFLVYSSLEEPTVAKWSRLIHMSIVISVFICIFFATCGYLTFTGFTQGDLFENYCRNDDLVTFGRFCYGVTVILTYPMECFVTREDMATTMKMTFGQRTGFRNPESFWETLPVLFLQVMITTYFVAKQLLFLHSKIIILARKKRSNMCKKEEEEGRGEEGGEIQTTIREYYKPLYANKLENLEEMDKFLDIYTLPRLNQEEVESLNRPITGSEIVAIINSLPTKKSPGPDGFTAEFYQRYKEELVPFLLKLFESTEKEGILPNSFYEAGTILIPKPGRDTTKKENFRPIFLMNIDAKLLNKILANQIQQHIKKLIHHDQVGFIPGMQGWFNICKPINVIQHINRTKDKNHMIISIDAEKAFDKIQQPSMLKTLNKLSTDGTYLKIIRAIYDKPTANIILNGQKLEAFPLKTGTRQGCPLSPLLFNIVLEVLARAIRQEKEIKGIQLGKEEVKLSLFADDMIVYLENPIVSAQNLLKLISNFSKVSGYKIYKIDVQKSQAFLYTNNRQTESQIMSELPFTIASKRIKYPGIQLTRNVKDLFKENYKPLLNEIKEDTNKWKNIPCSWIGRINIVKMAILPKVIYRFNAIPIKLPMTSFTELEKNYFKVHMEPKKSPHCQVNPKPKEQSWRHHAT

SEQ ID NO: 46699 - protein, 220 aa, Homo sapiens
  DOMAIN (8)..(33): ACRIFLAVIN RESISTANCE PROTEIN FAMILY SIGNATURE domain identified by eMATRIX, accession number PR00702A, p-value=2.421e- 25, raw score of 14.92
  DOMAIN (1)..(188): AcrB/AcrD/AcrF family domain identified by PFam, accession name ACR_tran, E-value=1.3e-99, PFam score of 344.4
MPNFFIDRPIFAWVIAIIIMLAGGLAILKLPVAQYPTIAPPAVTISASYPGADAKTVQDTVTQVIEQNMNGIDNLMYMSSNSDSTGTVQITLTFESGQVQNKLQLAMPLLPQEVQQQGVSVEKSSSSFLMVVGVINTDGTMTQEDISDYVAANMKDAISRTSGVGDVQLFGSQYAMRIWMNPNELNKVERNSRRQDVGERDISSGSRKVNKESREDEEVT

SEQ ID NO: 46700 - protein, 325 aa, Homo sapiens
  DOMAIN (280)..(305): ACRIFLAVIN RESISTANCE PROTEIN FAMILY SIGNATURE domain identified by eMATRIX, accession number PR00702E, p-value=6.538e- 30, raw score of 7.83
  DOMAIN (71)..(319): AcrB/AcrD/AcrF family domain identified by PFam, accession name ACR_tran, E-value=3.4e-150, PFam score of 512.4
MGAKAERGGFVIYTWLPTIAQTIGLEDALTASLMLNALLIVGALLGLVLTHLLAHRKFLLGSFLLLAATLYAMRIWMNPNELNKFQLTPVDVITAIKAQNAQVAAGQLGGTPPVKGQQLNASIIAQTRLTSTEEFGKILLKVNQDGSRVLLRDVAKIELGGENYDIIAEFNGQPASGLGIKLATGANALDTAAAIRAELAKMEPFFPSGLKIVYPYDTTPFVKISIHEVVKTLVEAIILVFLVMYLFLQNFRATLIPTIAVPVVLLGTFAVLAAFGFSINTLTMFGMVLAIGLLVDDAIVVVENVERVMAEEGLPPKEASPAMRP

SEQ ID NO: 46701 - protein, 279 aa, Homo sapiens
  misc_feature (1)...(279): Xaa = X or * as defined in Table 2
AVDIVQGLVRGWGRQGWLLSGRGIPEGPLLLWGATVGSWRRLLPLTGVCGLPLGAVPVLISXLLGGAQVQLLREEEAGHELVQQLVDGALVLLLDGRLPLHVVADERCCVLQDLPVLVHKDEVRLARGGTAALRVLLLVLVVDALDLVEQALGAQGLGVVLLEVHSLVVKGLEVRLLILLPPDLVEALLGLPPLLFLGLQSFQDNGDSGDRVLLEALDDLRGLVAIDAINGTALDHLRRASQGVVQPELLLVFRRHPRQLLLHTFQHTDCGQVRLQDIV

SEQ ID NO: 46702 - protein, 255 aa, Homo sapiens
MENQVLVIRIKIPNSGAVDWTVHSGPQLLFRDVLNPLLKNVDFNVKGRKTVYQGDGPLREPSPKSSFWGSSGIQRVCTGRQLDPQTGSRLAVKLCDDVVVLTTQGYRARIRNHGHSCFLCEIVIRSSWDNIRAGSIKCKAWVPQAKGNNVVITSYMTNRGFFEDKKATFAPSFLMNIKGNKTSVVKNSILEQGQLTWLQVAKRAGLGGGQSGRTVLRERVRIEIASTHIALAARHSDWRCCRNGRYPARSPAVPA

SEQ ID NO: 46703 - protein, 851 aa, Homo sapiens
  DOMAIN (179)..(198): ACRIFLAVIN RESISTANCE PROTEIN FAMILY SIGNATURE domain identified by eMATRIX, accession number PR00702B, p-value=9.690e- 18, raw score of 12.77
  DOMAIN (166)..(319): AcrB/AcrD/AcrF family domain identified by PFam, accession name ACR_tran, E-value=3.3e-77, PFam score of 269.9
MGGMVEQQLSDAITAMHNQDSDLAKRVIEGDKNVNMMEVAIDEACVRIIAKRQPTASDLRLVMVISKTIAELERIGDVADKICRTALEKFSQQHQPLLMLHDVLDGYRMRSRDPRQHRALQQRNTKNEFKTDRRTNKFRQLPYTTSESRRSRSNKWAAESASWCPGGLAILKLPVAQYPTIAPPAVTISASYPGADAKTVQDTVTQVIEQNMNGIDNLMYMSSNSDSTGTVQITLTFESGTDADIAQVQVQNKLQLAMPLLPQEVQQQGVSVEKSSSSFLMVVGVINTDGTMTQEDISDYVAANMKDAISRTSGVGDVQWYRDRVVSCRNDDLNAAQEALEERARNELSMTSPGETFYRLVPDASKRAHPGINMATTHLDVCAVVPAAGFGRRMQTECPKQYLSIGNQTILEHSVHALLAHPRVKRVVIAISPGDSRFAQLPLANHPQITVVDGGDERADSVLAGLKAAGDAQWVLVHDAARPCLHQDDLARLLALSETSRTGGILAAPVRDTMKRAEPGKNAIAHTVDRNGLWHALTPQFFPRELLHDCLTRALNEGATITDEASALEYCGFQFDIGRMPAQMLLSKIKNNDHNHNTVDLGQETGGYLMSEPLLIARTPDTELFLLPGMANRHGLITGATGTGKTVTLQKLAESLSEIGVPVFMADVKGDLTGVAQAGTVSEKLLARLKNIGVNDWQPHANPVVVWDIFGEKGHPVRATVSDLGPLLLARLLNLNDVQSGVLNIIFRIADDQGLLLLDFKDLRAITQYIGDNAKPSAHSYSMRSIKPSGRCGFSGPTFTGQAVVISSGAAAWTIFTGVRGYLARISCGVCLAVISLRSAIGSQCGTAGKA

SEQ ID NO: 46704 - protein, 190 aa, Homo sapiens
  misc_feature (1)...(190): Xaa = X or * as defined in Table 2
CEMHSVQKNEHDKTPEHSRKRSRPSLLRPVSAPAKKKMKLRGTKDLSIAAVGKYGTLPGIFFLXQGPPGAEEPGGVXKLPPLHRTLQPGAGVWLXAPAARQPISGVSSXLPRAPXGGSVPVNSIYLVFSYCFXAMIVLFXNPVYXLTXLIXLLIPMHLXGAIHHLGTLQLVPLPVTSVVSILTRIQWVLE

SEQ ID NO: 46705 - protein, 413 aa, Homo sapiens
  DOMAIN (365)..(389): ACRIFLAVIN RESISTANCE PROTEIN FAMILY SIGNATURE domain identified by eMATRIX, accession number PR00702C, p-value=7.947e- 13, raw score of 12.34
  DOMAIN (108)..(400): AcrB/AcrD/AcrF family domain identified by PFam, accession name ACR_tran, E-value=1.9e-141, PFam score of 483.3
LTTATGMELSMGSTTWTSLCKAENAACQQEKPHIWLCSISSFLRLKRRRTTTKNTGTKKIASTVAVTIPPITPLPTAFCAPEPAPVLLTSGIPPRLNASENPQLLSGSSSSDSTGTVQITLTFESGTDADIAQVQVQNKLQLAMPLLPQEVQQQGVSVEKSSSSFLMVVGVINTDGTMTQEDISDYVAANMKDAISRTSGVGDVQLFGSQYAMRIWMNPNELNKFQLTPVDVITAIKAQNAQVAAGQLGGTPPVKGQQLNASIIAQTRLTSTEEFGKILLKVNQDGSRVLLRDVAKIELGGENYDIIAEFNGQPASGLGIKLATGANALDTAAAIRAELAKMEPFFPSGLKIGYPYDTTPVVNISIHEVGKTLVEANNLVFLAMNLVLQEFPADVISTIAGPPSLRSSRVPGL

SEQ ID NO: 46706 - protein, 849 aa, Homo sapiens
  DOMAIN (60)..(78): PARANEOPLASTIC ENCEPHALOMYELITIS ANTIGEN FAMILY SIGNATURE domain identified by eMATRIX, accession number PR00961C, p-value= 6.111e-09, raw score of 11.35
  DOMAIN (227)..(368): AcrB/AcrD/AcrF family domain identified by PFam, accession name ACR_tran, E-value=4e-57, PFam score of 203.2
MTVSLRVRRVLKSQEVYENFLRCIALFNQELVSGSELLQLVSPFLGACTSSSCLSPALHVSYARLGSCVIRTHTLVILLCITPGLSAHYRKHPDAALHTSLSRCSRDRAPVHVRSVLCGVVVTTASSPYGAVRSGCGPSFFCSNLPTRTVEDALTYLDQVKIRFGSDPATYNGFLEIMKDLHAVIRTVCPVRGDPRALSRRSLRSVLLRALRCLYPATLSPASRVSEDISDYVAANMKDAISRTSGVGDVQLFGSQYAMRIWMNPNELNKFHVTPVDVITAIKAQNAQTRLTSTEEFGKILLKVNQDGSRVLLRDVAKIELGGENYDIIAEFNGQPASGLGIKLATGANALDTAAAIRAELAKMEPRFYSAAGTHARSCHAYVCTHLSRCDASVPDDLPQQRHSGKILLHVNQDGCPCLVRGAANQRACRVGLGCLLWRASVLCAACGVASLPVLCVFVSLFVRVCLLGPRVHEEPSSAPVYLHRIRCALWSRVCYHWTVERFVVSRGVPQFLRVLFQTYGPLVLDVSSYSSRIDTPRMGLYGLAGNLHSQLSVGSPVPIGLSPHALVSCSVPCPRHHQFSELPKLSLPASLEEPHVWGQTASGDDRRDGNPSPVVSCILVLAGFLYCSAIVACECVFCVVVLACSRRMCTPYIGDTLATRSDSPCRGDLLYLLVSIIVCSSSSVRATARRRYCVVSDLSQYDMLSGSSFPTCSTLSRRASIVTSRYPTRMAYSSARLGRLALCMPIRYVSISPHAIVLYHIALNDTCIPSGYCTSSLDPALSPLRLTYSTTPSLGGPACVLVSGPVSMQRQRVTLSSCLCSVSICVLRAPNAFDAPVMSTDSTAAVCQ

SEQ ID NO: 46707 - protein, 209 aa, Homo sapiens; identical to SEQ ID NO: 36781

SEQ ID NO: 46708 - protein, 61 aa, Homo sapiens
SLISFGPPVKPSPVKIMSISLIPEVSLSSLVIPPSFVSLCPHPIPRKPLIFSGHYGLVCIF

SEQ ID NO: 46709 - protein, 106 aa, Homo sapiens
GALQPPPCTVGAPFWAGQGWSPLPQLAGRCGGRGTRGTGAACGACGPAGVPGGLGLGGPRTRSSRPALLAPGNGGLSTRASGCGGCTESPSSGWPTSAALDFLPGP

SEQ ID NO: 46710 - protein, 137 aa, Homo sapiens
SAATTMFGRKRSVSFGGFGWIDKTMLASLKVKKQELANSSDATLPDRPLSPPLTAPPTMKSSEFFEMLEKMQDDYIPYPSIDEVVEKGGPYPQVILPQFGGYWIEDPENVGTPTSLGSSICEEEEEDNLSPNTFGYK

SEQ ID NO: 46711 - protein, 159 aa, Homo sapiens
RLDLGAATPTIDKTMLASLKVKKQGLANSSDATLPDRPLSPPLTAPPTMKSSEFFEMLEKMQGIKLEEQKPGPQKNKDDYIPYPSIDEVVEKGGPYPQVILPQFGGYWIEDPENVGTPTSLGSSICEEEEEDNLSPNTFGYKLECKGEARAYRRHFLGK

SEQ ID NO: 46712 - protein, 179 aa, Homo sapiens
TLEEELFGNNEESPAFKEFLDLLGDTITLQDFKGPPTTYPPCKTWKQWSDFTGTAGTNGGIIWFVLQDDYIPYPSIDEVVEKGGPYPQVILPQFGGYWIEDPENVGTPTSLGSSICEEEEEDNLSPNTFGYKLECKGEARAYRRHFLGKGICISLIMVVIATIAIVTVHHGAPAYQMLH

SEQ ID NO: 46713 - protein, 31 aa, Homo sapiens
LSGSCGFHSRCRPMVRSALGPRMEGWCSSDR

SEQ ID NO: 46714 - protein, 54 aa, Homo sapiens
  misc_feature (1)...(54): Xaa = X or * as defined in Table 2
EEMTSKMYKVIIRKTMKASVCTQVKHPAIASICKAVLXVGPWSGHFKYAGLPTL

SEQ ID NO: 46715 - protein, 183 aa, Homo sapiens
  DOMAIN (116)..(157): Inositol monophosphatase family proteins domain identified by eMATRIX, accession number BL00629C, p-value=6.069e-10, raw score of 29.21
  DOMAIN (128)..(163): Inositol monophosphatase family domain identified by PFam, accession name inositol_P, E-value=7e-07, PFam score of 28.1
MNLKLTGLKESAGYHAAPEGNLLTTSTWELCRHPHPAIFQCNWPEVKTTASDGEQTTREPVLKAMFLADTHLLGEFLGHWLDKLRRAKNIVNGTILLVLRRSNLPKEEHLRRNDIKDVQSYHQKNNEGQLEFGVIYHCTEERLYTGRRGRGAFCNGQRLRVSGETDGLRGSERSYGHGPSLLL

SEQ ID NO: 46716 - protein, 163 aa, Homo sapiens
  misc_feature (1)...(163): Xaa = X or * as defined in Table 2
MPVLKAMFLADTHLLGEYLGHWLDKLRMVWRMERALQTALWLLQPEDPLILRDILHEGDRSTPEAWADDVRRFQKMFRHPSHVQLKVVAGNHDIGFHYEMNTYKVERFEKVFSSERLFSWKGINFVMVNSVALNGDGCGICSETEAELIEVSHRLNCSREHAX

SEQ ID NO: 46717 - protein, 533 aa, Homo sapiens
  DOMAIN (235)..(276): Inositol monophosphatase family proteins domain identified by eMATRIX, accession number BL00629C, p-value=4.064e-22, raw score of 29.21
  DOMAIN (234)..(283): Inositol monophosphatase family domain identified by PFam, accession name inositol_P, E-value=1.2e-10, PFam score of 41.3
TNVSTTIATVVLNALARATKLLPPGHRRSPNPATAAASSPPTTLAHCSLRSHHQPLRGEQQPQAIRTTAGRCKALSSCPSFFECGSRSSGAPPGACGQIFRVSNAKLEPQARPSSPVTGGPLDLMACRVVAASTREMAMLIAQALQTINYGRDDENGHTHSACEVHHGGRVPELSVPSFSWRNRNNPSFIMGSITPTDYTLSKCYLPREDVVLIIYCGVSTNEQPDEEVPRTRFPTVAVSIGFAVRQELEFGVIYHCLEYRLYTGRRGRGAFCNGQRLRVSGETASGMLPGIQQIHIQQEQNLQVGASTELPCNLHTTRIRVASAPSSAPEDGTESKTCNFRVTSSKGYCLALPRVPFPLTTGYKHLHKPPTGTHSTYHSMCLLNQPGWLRTISIILFLNNKICWQKKSGREIKIEDYFPEYANYTVPEDGHLSAHLYILSGLCMWLQHSGQDSILYTDYRRGGENSFVMVNSVALNGDGCGICSETEAELIEVSHRLNCSREVGEHLNATGELGEERAHGRQQAACGFTIAA

SEQ ID NO: 46718 - protein, 216 aa, Homo sapiens
MPLLFLGVSVRVLPERLTFESVAWERQTHPLCAWAPSSRLPVQLEQSGWKKVGLSWLAESSGFHLSPVLDDSCPWTSDSRFFSFWTLGLIPVVCQGPSGLWPLTGDGTVGFPAFEAWTRTEPLLASLLLSLQTAYRGTSPCACIGAGEEKQKEGGKKKNKEGSGDGGRAEVKVIITEGSVIRGHLAMSESSFGHDNWEKSAIDIQWVEVKDPAKHL

SEQ ID NO: 46719 - protein, 722 aa, Homo sapiens
  DOMAIN (296)..(340): 3 THREONINE--TRNA LIGASE domain identified by eMATRIX, accession number DM01242A, p-value=1.000e-40, raw score of 20.32
  DOMAIN (320)..(699): tRNA synthetase class II domain identified by PFam, accession name tRNA-synt_2b, E-value=1.2e-145, PFam score of 497.2
GEGQAVLQGKMGGEEKPIGAGEEKQKEGGKKKNKEGSGDGSRAELNPWPEYIYTRLEMYNILKAEHDSILAEKAEKDSKPIKVTLPDGKQVDAESWKTTPYQIACGISQGLADNTVIAKVNNVVWDLDRPLEEDCTLELLKFEDEEAQAVYWHSSAHIMGEGMERVYGGCLCYGPPIENGFYYDMYLEEGGVSSNDFSSLEALCKKIIKEKQAFERLEVKKETLLAMFKYNKFKCRILNEKVNTPTTTVYRCGPLIDLCRGPHVRHTGKIKALKIHKNSSTYWEGKADMETLQRIYGISFPDPKMLKEWEKFQEEAKNRDHRKIGRDQELYFFHELSPGSCFFLPKGVYIYNALIEFIRSEYRKRGFQEVVTPNIFNSRLWMTSGHWQHYSENMFSFEVEKELFALKPMNCPGHSLMFDHRPRSWRELPLRLADFGGLHRNELSGALTGLTRVRRFQQDDAHIFCAMEQIEDEIKGCLDFLRTVYSVFGFSFKLNLSTRPEKFLGDIEVWDQAEKQLENSLNEFGEKWELNSGDGAFYGPKIDIQIKDAIGRYHQCATIQLDFQLPIRFNLTYVSHDGEDKKRPVIVHRAILGSVERMIAILTENYGGKLAPFWLSPRQVMVVPVGPTCDEYAQNVRQQFHDAKFMADIDLDPGCTLNKKIRNAQLAQYNFILVVGEKEKITGTVNIRTRDNKVHGERTISETIERLQQLKEFRSKQAEEEF

SEQ ID NO: 46720 - protein, 89 aa, Homo sapiens
MLRCYGSRRHILQVWSEPSDLLEIPVSGAADNLSPSQNKSDSGTASHLQDYAVENLIRMGMAGLILAGLGILIFQDWHSQRSPQAAAGR

SEQ ID NO: 46721 - protein, 470 aa, Homo sapiens
  DOMAIN (238)..(290): RECEPTOR CELL NK GLYCOPROTEIN IMMUNOGLOB domain identified by eMATRIX, accession number PD01652B, p-value=7.207e-27, raw score of 8.50
  DOMAIN (171)..(319): Immunoglobulin domain identified by PFam, accession name ig, E-value=9.1e-07, PFam score of 26.9
PSRGPSPPPIGSFSIPDSQQHPSGQSQALFPVGPKTLSHRWMFRCHGNNRNTLQVWSELNDSLKLLFSDGICVSRICVSLMICTSSSMVLVLHRYKQRVQHVRSRNLSRRTSHETTTTHTILILAPWSHPSAQLQPVGGDAVSPALMVLLCLGNLSKATLWAEPGSVISRGNSVTIRCQGTLEAQEYRLVKEGSPEPWDTQNPLEPKNKARFSIPSMTEHHAGRYRCYYYSPAGWSEPSDPLELVVTGFYNKPTLSALPSPVVTSGENVTLQCGSRLRFDRFILTEEGDHKLSWTLDSQLTPSGQFQALFPVGPVTPSHRWMLRCYGSRRHILQVWSEPSDLLEIPVSGVSRKPSLLTPQGPVVVPGENLTLQYHSDVGYDRFALYKEDRRAADNLSPSQNKSDSGTASHLQDYAVENLIRMGMAGLILVVLGILIFQDWHSQRSPQAAAGRFLGNVVFGYLQKFFSDDF

SEQ ID NO: 46722 - protein, 66 aa, Homo sapiens
PCCPAGSSRMPGPSNAPPSLQAAAALLESRQPGQTQRRALSASEPPAFPELLANGQPTPLHSASQR

SEQ ID NO: 46723 - protein, 378 aa, Homo sapiens
  misc_feature (1)...(378): Xaa = X or * as defined in Table 2
MKKRPGHSLFQFQFLMFRLFSEARQPLSEEDVASLSWRPLHLPSADWQRAALSLWTHRTFREVLKEEDVHLTYQDWLHLELEIQPEAMLFQILNGRTSTSGRSMSTFSLSPRLQGAVTETCRLRVPFLSTHXWISTKAQGVMTTQKILIWSLVAAQEMRILFPDCRRWXLTWSCSKTSXCLSATPLPRSTSSLRFSADGSRLXQAGGAWLPAFRDRGSCXCTNGSSSACLRLSSAAAASRQNSPSLPDASSSSTWSTLRXETSAPTEVPXHRTSLPTSQGPPERLSAEQRPLPDGRRSYWPSARRNARLILTFCSGVVAEPGACAALPVEETLPEPAAPGTAEATRRPAVCQRVRVGAIGFPFLLLLDGPAVVTSDLK

SEQ ID NO: 46724 - protein, 48 aa, Homo sapiens
  misc_feature (1)...(48): Xaa = X or * as defined in Table 2
HRPRTRPCPWRRNHHLGHRAPLXPQRARRXSPNPPEDGSEDEHLXQLC

SEQ ID NO: 46725 - protein, 54 aa, Homo sapiens
  misc_feature (1)...(54): Xaa = X or * as defined in Table 2
KVILGLWTEEAQVGGQGLRAPTPRLLHHVLKXDIKRXAHRPDAVAHACNPNTLG

SEQ ID NO: 46726 - protein, 589 aa, Homo sapiens
RPPPEERVLVRDFQRLLGVAVRQDPTLSPFVCKSCHAQFYQCHSLLKSFLQRVNASPAGRRKPCAKHGQEALAGIVRAGPHLVCPQEEESPCGEVTLKRDRSFSEHDLAQLRSVVAEPGACAALPVEETLPEPAAPGTAEATRRPAVCQRVRVGARRAEPNAGSSRNLGPGSTRGILLASSAAMKRDRLGRFLSPGSSRQCGASDGGGGVSRTRGRPSLSDWVARLMAQAFESCQLDSMVTAFLVVRQAALEGPSAFLSYADWFKNLPEATKARATLDRRPQGRAQQRARAQDTAGSGVNTAEGEGAGYSRVRANTAEGEGAGYSRVRANTAEGEGTAEDEGAGYSRVGLNTAEGEGAGYSGRNYENPLRHGTQHCAAESVRVIVHRPPVSDCAASACLSQQTWPPGDHLGLWAWKSVQTMVTRMLQKLREDEPHLETPRAELDSLGHTDWARLWVQLMRELRRGVKLKKVQEQEFNPLPTEFQLTPFEMLMQDIRARNYKLRKVMSASQDIFLFSKHSRIAAQTWKAFGRSVVLCKPQETNPENGRPGAPMGRRKVILGLWTEEAQVAGQGLRAPTPRLLHHVLKGDL

SEQ ID NO: 46727 - protein, 190 aa, Homo sapiens
  DOMAIN (91)..(111): POTASSIUM CHANNEL SIGNATURE domain identified by eMATRIX, accession number PR00169A, p-value=5.382e-09, raw score of 16.77
  DOMAIN (48)..(142): K+ channel tetramerisation domain identified by PFam, accession name K_tetra, E-value=4.8e-19, PFam score of 76.7
RGGQPGALPLAQVICMWQGCAVERPVGSMTSQTPLPQSPRPRRPTMSTVVELNVGGEFHTTTLGTLRKFPGSKLAEMFSSLAKASTDAEGRFFIDRPSTYFRPILDYLRTGQVPTQHIPEVYREAQFYEIKPLVKLLEDMPQIFGEQVSRKQFLLQVPGYSENLELMVRLARAEAITARKSSVLVCLVET

SEQ ID NO: 46728 - protein, 242 aa, Homo sapiens
  DOMAIN (97)..(117): PHOSPHATIDYLINOSITOL TRANSFER PROTEIN SIGNATURE domain identified by eMATRIX, accession number PR00391A, p-value=9.576e- 10, raw score of 7.83
  DOMAIN (98)..(141): Phosphatidylinositol transfer protein domain identified by PFam, accession name IP_trans, E-value=7.2e-13, PFam score of 47.3
MHNLPLNVIPGRSLIALAVLEALHTAKKHESDYVTSGFRTLSGSHCKKDISQTPSQAPNAFHALSGLASLGLAQLNSFLALTARRQENYRKQKRENHYKIGQLYMISKHSHEQSDRGEGVEVVQNEPFEDPHHGNGQFTEKRVYLNRTYTRGSPGSKPSDLDSATLLAPQGLQLAVEYPKATQVLGTELILGKIWENRKQKWERETQAMTTRFYQQAVSSKLQFPNMIQHQVFADNAFDQFG

SEQ ID NO: 46729 - protein, 391 aa, Homo sapiens
  DOMAIN (270)..(290): PHOSPHATIDYLINOSITOL TRANSFER PROTEIN SIGNATURE domain identified by eMATRIX, accession number PR00391E, p-value=7.785e- 15, raw score of 12.50
  DOMAIN (60)..(310): Phosphatidylinositol transfer protein domain identified by PFam, accession name IP_trans, E-value=2.5e-84, PFam score of 293.5
HALGRRGGSQELSAAAGAASPSGSERRAPGALPCAWAAALLVLGAPPASRPGGFAAGKTMLLKEYRICMPLTVDEYKIGQLYMISKHSHEQSDRGEGVEVVQKEPFEDPHHGNGQFTEKRVYLNSKLPSWARAVVPKIFYVTEKAWNYYPYTITEYTCSFLPKFSIHIETKYEDNKGSNDTIFDNEAKDVEREVCFIDIACDEIPERYYKESEDPKHFKSEKTGRGQLREGWRDSHQPIMCSYKLVTVKSEVWGLQTRVEQFVHKVVRDILLIGHRQAFAWVDEWYDMTMDEVREFERATQEATNKKIGIFPPAISISSIPLLPSSVRSAPSSAPSTPLSTDAPEFLSVPKDRPRKKSAPETLTLPDPEKKATLNLPGMHSSDKPCRPKSE

SEQ ID NO: 46730 - protein, 109 aa, Homo sapiens; identical to SEQ ID NO: 36503
  DOMAIN (69)..(87): Eukaryotic initiation factor 4E proteins domain identified by eMATRIX, accession number BL00813A, p-value=4.736e-11, raw score of 15.06

SEQ ID NO: 46731 - protein, 134 aa, Homo sapiens
  DOMAIN (88)..(132): Eukaryotic initiation factor 4E proteins domain identified by eMATRIX, accession number BL00813B, p-value=6.143e-29, raw score of 24.44
  DOMAIN (18)..(134): Eukaryotic initiation factor 4E domain identified by PFam, accession name IF4E, E-value=5e-16, PFam score of 66.7
SLEDAMSLKDDDSGDHDQNEENSTQKDGEKEKTERDKNQSSSKRKAVVPGPAEHPLQYNYTFWYSRRTPGRPTSSQSYEQNIKQIGTFASVEQFWRFYSHMVRPGDLTGHSDFHLFKEGIKPMWEDDANKNGGK

SEQ ID NO: 46732 - protein, 66 aa, Homo sapiens
MVGKLTGKPCPQYYQPQRPPEHIELDSLCKILPPPSLVGMNVVMELKKDLNICGTLHSVDQYLNIK

SEQ ID NO: 46733 - protein, 121 aa, Homo sapiens
  DOMAIN (30)..(75): Heme-binding domain in cytochrome b5 and oxi domain identified by PFam, accession name heme_1, E-value=5.7e-07, PFam score of 35.3
RSAPPDGRVCAGPGSRRTEMAEQSDEAVKYYTLEEIQKHNHSKSTWLILHHKVYDLTKFLEMSKTFIIGELHPDDRPKLNKPPETLITTIDSSSSWWTNWVIPAISAVAVALMYRLYMAED

SEQ ID NO: 46734 - protein, 163 aa, Homo sapiens
  DOMAIN (37)..(89): Cytochrome b5 family heme-binding domain proteins. domain identified by eMATRIX, accession number BL00191H, p-value=1.240e- 18, raw score of 15.64
  DOMAIN (32)..(113): Heme-binding domain in cytochrome b5 and oxi domain identified by PFam, accession name heme_1, E-value=8.3e-34, PFam score of 125.7
  misc_feature (1)...(163): Xaa = X or * as defined in Table 2
VARSAPPDGAVCAGPGSRRTEMAEQSDEAVKYYTLEEIQKHNHSKSTWLILHHKGYDLTKFLEEHPGGEEVLREQAGGDATENFEDVGHSTDAREMSKTFIIGELHPDDRPKLNKPPEPXRRCFKETLITTIDSSSSWWTNWVIPAISAVAVALMYRLYMAED

SEQ ID NO: 46735 - protein, 101 aa, Homo sapiens
RQPVKRDAIPSVHRYRVNFRPRYVTRYKTVTQLEWRCCPGFRGGDCQEGPKDPVKTLRPTPARPRNSLKKATGNFLFVLLCMATFNISGAPSNNRICALQW

SEQ ID NO: 46736 - protein, 70 aa, Homo sapiens
GQKLTSSVLIQNEFKQASQAPCHETPVISATRGAEAGESLEARRWRLQPAETMPPPWRQKETPFTLTIPS

SEQ ID NO: 46737 - protein, 148 aa, Homo sapiens
AAQLTCPRCIFKLSCATGCLLTQSQSMQRHVWRTVSVKLGRRGCVFGLKKTSTHGLGFPVMGCPAIWDSGASLVSQSWQSRALLGEAVAVLPCPRAVWGCPGWSNSMPQLLRLGPRSTRTYWAWRWWLGMPFPAQWQASAGLMHLPSP

SEQ ID NO: 46738 - protein, 34 aa, Homo sapiens
NHHHDHDDHHHDHDDHHHDHHHHRKHSPSLLYSP

SEQ ID NO: 46739 - protein, 52 aa, Homo sapiens
  misc_feature (1)...(52): Xaa = X or * as defined in Table 2
FGGNQKGERTGQKGKGERGAKRKDFPGAVCISALGLLAKGCGXSWRPSSSAN

SEQ ID NO: 46740 - protein, 98 aa, Homo sapiens
  misc_feature (1)...(98): Xaa = X or * as defined in Table 2
SCGLSLIKMTTSQKHRDFVAEPMGEKPVGSLAGIGEVLGKKLEERGFDKAYVVLGQFLVLKKDEDLFREWLKDTCGAPNAKQSRDCFXCLREWCDAFL

SEQ ID NO: 46741 - protein, 277 aa, Homo sapiens
MAENQETRLSAYDTRALGLKHKTEWPFGQTPSSLKREADLPAQHSSSAKRQTASLSGSLTPVPPHWEALPSRGRQIPHTGELWLASDRWPSEKKLPEKKQAAIFAVLQPPLVITRKTGYGVDPQQTPADLQQTGLTVRRTVRNRKEHSININKKDDHAKTTFEGHQQQRPKVDKSTSMRKNQYKKAKNSKNQNASSPLKDHNCLPAREQNLMENEFDEFTEEGLKRWVRTNFPKPKEHVLNQCKEPKNLEKWVEELLTKITSLEKNTNDLMELKNTA

SEQ ID NO: 46742 - protein, 104 aa, Homo sapiens; identical to SEQ ID NO: 45747
  misc_feature (1)...(104): Xaa = X or * as defined in Table 2

SEQ ID NO: 46743 - protein, 60 aa, Homo sapiens
FPSCLRKSGWFDTRFFQKQEFTFEVQQAGVIPSDLGTRVSSTSLGTNCSRWESIWDRNYD

SEQ ID NO: 46744 - protein, 544 aa, Homo sapiens
MAHLRSCCSSLYQPGHLLPPHNPIQDHPLTAPSLTHLTRRAYFTDEKTKGGQSAYAVSLLRECVKLRPSDPTVPLMAAKVCIGSLRWMAAKHLAGVLLHSLSEECYWSPLSHPLPEFMGKEESSFATQALRKPHLYEGDNLYCPKDNIEEALLLLLISESMLANKLLLLEMERVQSPGVESGVDRQLSPYSDTNVNAQNAQIVPVAAKSAQNEVPGYPEETEKSRVQSNLLTQFQDLRLLLAAPECLPPRMSPPSAHGEGLESGGPSRTGLSLERLPNSIASRFRLTEREEEVITCFERASWIAQVFLQELEKTTNNSTSRHLKGCHPLDYELTYFLEAALQSAYVKNLKKGWMAECTGWPLMVPYLVARWPKGTESCQCTEERGQQGGDQLGDGASILRDDFGKLLLAEALLEQCLKENHAKIKDSMPLLEKNEPKMSEAKNYLSSILNHGRLSPQYMCEAMLILGKLHYVEGSYRDAISMYARAGIDDMSMENKPLYQMRLLSEAFVIKDSSPLVVPMPWHWCLRWMPVATGHVDIAWCLGR

SEQ ID NO: 46745 - protein, 217 aa, Homo sapiens
  DOMAIN (120)..(154): Tropomyosins proteins domain identified by eMATRIX, accession number BL00326A, p-value=3.813e-35, raw score of 14.01
MAEALAVAVPVPAGAWVSIQGLHVNGAGLAAPRQFLFPQAEVIVNKEDDFTRSQPRGHLAVSRNSFDCGDGMGYYWHVTDSTSGSSLCKKPYQGQGSSLQGHEARRYLLREESLSERPAMEAIKKKMQMLKLDKENAIDRAEQAEADKKAAEDKCKQVRCPPLGRSGLLGVLSVRKAGVWSPVGGRRHLREDRRLMLWRRKSEGTIAFLDGPGLEEG

SEQ ID NO: 46746 - protein, 298 aa, Homo sapiens
  DOMAIN (144)..(156): ALCOHOL DEHYDROGENASE SUPERFAMILY SIGNATURE domain identified by eMATRIX, accession number PR00080A, p-value=3.368e-13, raw score of 9.32
  DOMAIN (64)..(259): short chain dehydrogenase domain identified by PFam, accession name adh_short, E-value=1.7e-43, PFam score of 157.9
GGGGRMKLIDYGLSGYQEESAEVKAMDFITSTAILPLLFGCLGVFGLFRLLQWVRGKAYLRNAVVVITGATSGLGKECAKVFYAAGAKLVLCGRNGGALEELIRELTASHATKVQTHKPYLVTFDLTDSGAIVAAAAEILQCFGYVDILVNNAGISYRGTIMDTTVDVDKRVMETNYFGPVALTKALLPSMIKRRQGHIVAISSIQGKMSIPFRSGICQPSKHATQAFFDCLAVPEMEQFEIEVTVISPGYIHTNLSVNAITADGSRCGVMDTTTAQAEALWRWPRMFLLLWGRRRKM

SEQ ID NO: 46747 - protein, 245 aa, Homo sapiens
SFCEGARTPGAVLVRAFLKKLSSRRSQPGSHRRPPTVGTVRYGDLLPSLGQCDAWMSYSSAVQEWATISSVPTEDGLHSFPMESYALAHLGGMRSDCCRLLQRPHLNTSAQLRPIHAHNTRFLTNESCRVSRFIGLSRVVGTLIHRGRWSMFSPIQPYRYCACPKRYASIQALLPSMIKRRQGHIVAISSIQGKMSIPFRSAYTYAARQDATCLRAERCFSIDRPRQPRLSLRRCDCMLLSATPA

SEQ ID NO: 46748 - protein, 302 aa, Homo sapiens
  DOMAIN (244)..(283): Domain present in ZO-1 and Unc5-like netrin receptors domain identified by eMATRIX, accession number PF00791C, p-value=3.598e- 10, raw score of 20.98
  DOMAIN (212)..(299): PDZ domain (Also known as DHR or GLGF) domain identified by PFam, accession name PDZ, E-value=1.6e-05, PFam score of 31.7
MTLRRLRKLQQKEEAAATPDPAARTPDSEVAPAAPVPTPGPPAAAATPGPPADELYAALEDYHPAELYRALAVSGGTLPRRKEPLARGTETAPGKLKVREPPVGEAGRWLRRVRSHSEEVRGEPLTPDSTPFRGDSPIPGLGACRLAPRLTGGDHFRIMISPPAASVETSKGLEVHGSGTQEDGCVPAVPGMKGSGFRWKNLSQSPEQQRKVLTLEKEDNQTFGFEIQTYGLHHREEQRVEMVTFVCRVHESSPAQLAGLTPGDTIASVNGLNVEGIRHREIVDIIRPDIIIIIIIITTTNH

SEQ ID NO: 46749 - protein, 123 aa, Homo sapiens
  DOMAIN (44)..(82): Ribosomal protein S8e proteins domain identified by eMATRIX, accession number BL01193B, p-value=1.000e-37, raw score of 17.23
  DOMAIN (5)..(104): Ribosomal protein S8e domain identified by PFam, accession name Ribosomal_S8e, E-value=9.3e-53, PFam score of 188.7
RAMGICRDNWHKRRKTGGKRKPYHKKRKYELGRPAANTKIGPRRIHTVRVRGGNKKYRALRLDVGNFSWGSKCCTRKTRIIDVVYNASNNESHYALPLGRKKGAKLTPWEEEILNAKRSIKIQ

SEQ ID NO: 46750 - protein, 82 aa, Homo sapiens
  DOMAIN (47)..(66): Ribosomal protein S8e proteins domain identified by eMATRIX, accession number BL01193C, p-value=1.491e-15, raw score of 14.13
TSNQNLAKLTPEEEEILNKKRSKKIQKKYDERKKNAKISSLQETADFGIASRPGQCGRADGYVLEGKELEFYLRKIKARKGK

SEQ ID NO: 46751 - protein, 139 aa, Homo sapiens
  DOMAIN (11)..(42): Ribosomal protein S8e proteins domain identified by eMATRIX, accession number BL01193A, p-value=8.579e-35, raw score of 13.21
  DOMAIN (5)..(110): Ribosomal protein S8e domain identified by PFam, accession name Ribosomal_S8e, E-value=1.7e-55, PFam score of 197.8
RAMGISRDNWHKRRKTGGKRKPYHKKRKYELGRPAANTKIGPRRIHTVRLWGECCTGKTRIVHVVYNTSNNELVRTKTLVKNCIVLINSTPYRQWYESHYALPLGRKKGAKLTPEEEEILNKKRSKKIQKKYDERKKNA

SEQ ID NO: 46752 - protein, 838 aa, Homo sapiens
  DOMAIN (667)..(698): Ribosomal protein S8e proteins domain identified by eMATRIX, accession number BL01193A, p-value=2.800e-27, raw score of 13.21
  DOMAIN (661)..(782): Ribosomal protein S8e domain identified by PFam, accession name Ribosomal_S8e, E-value=2.1e-15, PFam score of 64.6
MIISIDAEKAFDKIQQPFMLKTLNKLGIDGTYFKIIRAIYDKPTANIILNGQKLEAFPLKTGTRQGCPLSLLLFNIVLEVLARAIRQEKEIKGIQLGKEEVKLSLFADDMIVYLENPIVSAQNLLKLISNFSKVSGYKINVQKSQAFLYTNNRQTESQIMSELPFTIASKRIKYLGIQVTRDVKHLFKENYKPLLKKIKEDTNKWKNIPCSWVGRINIVKMAILPKVIYRFNAIPIKLPMTFFTELGKTTLKFIWNQKRARIAKSILSQKNKAGGITLPDFKLYYKATVTKIAWYWYQNRDIDQWNRTEPSEITPHTYNYQIFDKPEKNKQWGKDSLFNKWCWENWLAICRKLKLDPFLTPYTKINSRWIKDLNFRPKTIKTLEENLGITIQDIGMGKDFISKTPKAMATKAKIDKWDLIKLKSFCTAKETTIRVNRQPTTWEKIFTTYSSDKGLISRIYNELKQIYKKKTNNPIKKWVKDMNRHFSKEDIYAAKKHMIKCSASLAIREMQIKTTMRYHLTPVRMAIIKKSGNNSVLKREGQRIDISTVSFPICLSVVHSLKNRYSLYNITEAALANVPREGRGFRCIGDKSPYYIYLSPRDHTVAKPLEHKYLPRGGNCTISSDLRTRGTISRTRIMYTVHCIYSTTYRSRLTQRRAMGISRDNWHQRRKTGGKRKPYHKKRKYELERPAANTKIGPRRIHTVRVQGSNKKYRALSGKMSHYVLPLGRKKGAKLTPEEEEILNKKRFKQIQKKYDERKKNAKISSLLEEQFQQELELPKTDSPELVKSKVGFSSALVDHRLNGIGDKYQFVIHGNRRTQQNTRVRLNILSGPDSSGR

SEQ ID NO: 46753 - protein, 187 aa, Homo sapiens
  DOMAIN (1)..(58): Ribosomal protein S8e domain identified by PFam, accession name Ribosomal_S8e, E-value=4.1e-05, PFam score of 27.3
  misc_feature (1)...(187): Xaa = X or * as defined in Table 2
AGCTRKTRIIDVVYNASNNELVRTKTLVKNCIVLIDSTPYRQWYESHYALALGRKKGAKLVRVTSLXGLWGGQPDSSLLVMKTLSSSATEGREMRAFXAEEGQHWGVQGSRKLPGPAFLPXAHIFVSPFQTPEEEEILNKKRSKKIQKKYDERKKNAKISSLLEEQFQQGKLLGEKADELEVGSRRD

SEQ ID NO: 46754 - protein, 265 aa, Homo sapiens
  misc_feature (1)...(265): Xaa = X or * as defined in Table 2
SQWLKLPSPLPHAGISRYNWDQAPXKTGGPRESPYHKKREVMKLGRPSCPNNPKIGPPAGIQHSPVCRGGXQVNTRAPEVWTVGNFSWGLICRCTPXNKDPSIVVLQCHLNNGAWFRTQGPWVEEFCIVASSDQQQPYRQWVRSPNLCACPLGPAKKGEPKLDSLRKEEIFKQKNDLKKLRKEIXLKRKKNCQIPAVLPGREQFPARGKLSCRASRFQGPGQLWAEQDGFCAXEGQKSLEFLSFRKNPRPRKGQIKFLVFVFHPC

SEQ ID NO: 46755 - protein, 227 aa, Homo sapiens
GAMAVRALKLLTTLLAVVAAASQAEVESEAGWGMVTPDLLFAEGTAAYARGDWPGVVLIMERALRSRAALRALRLRCRTQCAADFPWELDPDWSPSPAQASGAAALRDLSFFGGLLRRAACLRRCLGPPAAHSLSEEMELEFRKRSPYNYLQVAYFKVQTCLEPGGRGPSGERSVAGDLRSLGDRGSVRREGKVASWLGSSPRSRGELLPGRRPSSPSSHGQMLTPK

SEQ ID NO: 46756 - protein, 136 aa, Homo sapiens
  misc_feature (1)...(136): Xaa = X or * as defined in Table 2
HSSRPAPASAPRRWGLSWSWQRCWCXXTPSPSPRPRPAEGCLRGRGRGAGGGLPFRPHGSLVHSGAQPPHFPHLPGGARQTCGAPPGSWSCVLCRPAETGAAAAGSPAAAGSTRKRLGRAQGRGCRVAALRLSPTH

SEQ ID NO: 46757 - protein, 64 aa, Homo sapiens
  misc_feature (1)...(64): Xaa = X or * as defined in Table 2
QGAGSVGRTGQQLLKPGPFFLEKLLSLGCTLSGXALRARACCSPCCRPGAGCQPQAPVAQAGHP

SEQ ID NO: 46758 - protein, 793 aa, Homo sapiens
  DOMAIN (139)..(180): Integrins beta chain cysteine-rich domain proteins domain identified by eMATRIX, accession number BL00243B, p-value=1.000e- 40, raw score of 17.54
  DOMAIN (56)..(476): Integrins, beta chain domain identified by PFam, accession name integrin_B, E-value=0, PFam score of 1010.5
QGRLVAKPPRPARSTAADSSTPRDMLGLRPPLLALVGLLSLGCVLSQECTKFKVSSCRECIESGPGCTWCQKLNFTGPGDPDSIRCDTRPQLLMRGCAADDIMDPTSLAETQEDHNGGQKQLSPQKVTLYLRPGQAAAFNVTFRRAKGYPIDLYYLMDLSYSMLDDLRNVKKLGGDLLRALNEITESGRIGFGSFVDKTVLPFVNTHPDKLRNPCPNKEKECQPPFAFRHVLKLTNNSNQFQTEVGKQLISGNLDAPEGGLDAMMQVAACPEEIGWRNVTRLLVFATDDGFHFAGDGKLGAILTPNDGRCHLEDNLYKRSNEFDYPSVGQLAHKLAENNIQPIFAVTSRMVKTYEKLTEIIPKSAVGELSEDSSNVVHLIKNAYNKLSSRVFLDHNALPDTLKVTYDSFCSNGVTHRNQPRGDCDGVQINVPITFQVKVTATECIQEQSFVIRALGFTDIVTVQVLPQCECRCRDQSRDRSLCHGKGFLECGICRCDTGYIGKNCECQTQGRSSQELEGSCRKDNNSIICSGLGDCVCGQCLCHTSDVPGKLIYGQYCECDTINCERYNGQVCGGPGRGLCFCGKCRCHPGFEGSACQCERTTEGCLNPRRVECSGRGRCRCNVCECHSGYQLPLCQECPGCPSPCGKYISCAECLKFEKGPFGKNCSAACPGLQLSNNPVKGRTCKERDSEGCWVAYTLEQQDGMDRYLIYVDESRECVAGPNIAAIVGGTVAGIVLIGILLLVIWKALIHLSDLREYRRFEKEKLKSQWNNDNPLFKSATTTVMNPKFAES

SEQ ID NO: 46759 - protein, 284 aa, Homo sapiens
  DOMAIN (221)..(263): Integrins beta chain cysteine-rich domain proteins domain identified by eMATRIX, accession number BL00243G, p-value=3.613e- 15, raw score of 21.38
  DOMAIN (210)..(243): Integrins, beta chain domain identified by PFam, accession name integrin_B, E-value=2.1e-19, PFam score of 57.7
GPGLVALPAAGLAPAASLEPQQLGQGIPERVQVPHHHRGPPPPLLPVLLLSQFYGFDFLQPLLTPQLHFLLLGQNGLGLCTSPDGRDAPCTRACLTSPDGSDTPHVQLQLLHQGAGVYLGPGKDVGVDERPVLMSPTKTDEKKSRESNKPRPSELSRMSAAQRQQLLQPHARELPCGTQKVAWVPSQAQKPRGQLPDGLCRSCQEALSLKLTEIIPKSAVGELSEDSSNVVHLIKNAYNGLISQCKQKHPAPAFVQHLPGLATMLLDTLGPGFPFLFPHRKESS

SEQ ID NO: 46760 - protein, 143 aa, Homo sapiens
  misc_feature (1)...(143): Xaa = X or * as defined in Table 2
FRALTEGDTQLNWNIVSFPVAEELSHHENLVSFLETVNQPHHQNVSVPSNNVHAPYSSDKEHMCTVVYFDDCMSIHQCKISCESMGSHPNIRWVSLMACCECIGPECIDYGSKTVKCMNCMFXRRQMQTKATXXNNRYKKLKK

SEQ ID NO: 46761 - protein, 430 aa, Homo sapiens
KRKQTGEFGFNSFEWCDSDLCEMNAGMPKGNLNEQDPKHCPESEKCLLSIEDEESQQSILSSLENHSQQSTQPEMHKYGQLVKVELEENAEDDKTENQIPQRMTRNKANTMANQSKQILASCTLLSEKDSESSSPRGRIRLTEDDDPQIHHPRKRKVSRVPQPVQVSPSLLQAKEKTQQSLAAIVDSLKLDEIQPYSSERANPYFEYLHIRKKIEEKRKLLCSVIPQAPQYYDEYVTFNGSYLLDGNPLSKICIPTITPPPSLSDPLKELFRQQEVVRMKLRLQHSIEREKLIVSNEQEVLRVHYRAARTLANQTLPFSACTVLLDAEVYNVPLDSQSDDSKTSVRDRFNARQFMSWLQDVDDKFDKLKTCLLMRQQHEAAALNAVQRLEWQLKLQELDPATYKSISIYEIQEFYVPLVDVNDDFELTPI

SEQ ID NO: 46762 - protein, 233 aa, Homo sapiens
MLGLNTFPKALLPYKTTYSQEKLIVSNEQEVLRVHYRAARTLANQTLPFSACTVLLDAEVYNVPLDSQELCQCRPGEGNCSCCKECMLCLGALWDECCDCVEFRYSKTDWEYLIHGQGMECSLPHEKLWKKRQGPEGITTPQNRLASATLAPPAPESPQGSVGCMACVKTAQSEHMCTVVYFDDCMSIHQCKISCESMGASKYRWFHNACCECIGPECIDYGSKTVKCMNCMF

SEQ ID NO: 46763 - protein, 1982 aa, Homo sapiens [sequence omitted]

SEQ ID NO: 46764 - protein, 188 aa, Homo sapiens
ERIWLLLTPRPARTHVLARVRQSFHPRLTQFSLGTRGESPHPMRAVSEARESRHLTGGERSPPQGKLQKTKRDIRWLQGVTGEWFEEIQRKKFCNETDVSQMLKQPLTYRLSKEMAKNDPVALKRQRMVSLNTSPRKTESTEASWSRALSSQRAKLDGEQVFTEHPRSLGQAQSEELGTGVAEDQALP

SEQ ID NO: 46765 - protein, 279 aa, Homo sapiens
  DOMAIN (205)..(245): Ribosomal protein L7Ae proteins domain identified by eMATRIX, accession number BL01082, p-value=1.519e-21, raw score of 20.37
  DOMAIN (172)..(270): Ribosomal protein L7Ae domain identified by PFam, accession name Ribosomal_L7Ae, E-value=4.1e-25, PFam score of 96.9
MALSGCTPPFLDALPFSLLEHVSWSIHSSSKKNHMVKKKLFKVGYTELKDPLEEAVCPFSKLERCAGRSAALFRAARQGRLSLLKLCPQPSFPPDCCASSENFKPVDLSLLGSMGMRPAKPDYLDPWLQPPFQGSEWFHLTGVPAAQLLKLAHEYRPVTKQEKKQELLAHADRNAASNGDIPTKSSPVLQAGVNTVTNSMVNKKSQLVLTAQDMDPIKLVVFLPALCCKMGVPYCVIKEKARPGSLVHRRTCIIVTFTQVKWKKQGALAKLWELQDQLQ

SEQ ID NO: 46766 - protein, 474 aa, Homo sapiens
  DOMAIN (400)..(440): Ribosomal protein L7Ae proteins domain identified by eMATRIX, accession number BL01082, p-value=1.519e-21, raw score of 20.37
  DOMAIN (367)..(465): Ribosomal protein L7Ae domain identified by PFam, accession name Ribosomal_L7Ae, E-value=4.1e-25, PFam score of 96.9
MFAFCLKQKLPEASPEADAVMLPVKSENDYRRPRVASCSLRRTQDRKYSLTADQHPATLFSGSNPSSSPPELSVAAAPGQGLTPALGLRTSQTFPCVRDSFAHPFLFMPGVGRKIPNQLQLTDADADAEIVTQREEVTCPKSHDGQDPLLQVCWSLLEVHSRPYLSGYYQWRLQNNKDCCLFLPLEALSQRDTRQMPARALPYEVSVSPYWEFELPGGFVYTVRVKPPTQASAMVGAPPPTKLKHLWATSDCCASSENFKPVDLSLLGSMGMRPAKPDYLDPWLQPPFQEVNGSISLVFQPPKMLKQNKTKGKKMAGAPAVMKKQEAKKVFTQALDLLTAAQLLKLAHEYRPVTKQEKKQELLAHADRNAASNGDIPTKSSPVLQAGVNTVTNSMVNKKSQLVLTAQDMDPIKLVVFLPALCCKMGVPYCVIKEKARPGSLVHRRTCIIVTFTQVKWKKQGALAKLWELQDQLQ

SEQ ID NO: 46767 - protein, 59 aa, Homo sapiens
NLMCFPQNSWWKEEFFLLFLVFLGRYCEDGICPVSIYPNNPEQGQVGPGFSCKCNKSLR

SEQ ID NO: 46768 - protein, 57 aa, Homo sapiens
  misc_feature (1)...(57): Xaa = X or * as defined in Table 2
GRPGIFKSFCRWWXCXFHMEFIWKSSAXWSGVWHAGNICLSISNPEDLRASQFCSSG

SEQ ID NO: 46769 - protein, 296 aa, Homo sapiens
  DOMAIN (219)..(244): L-LACTATE DEHYDROGENASE SIGNATURE domain identified by eMATRIX, accession number PR00086B, p-value=2.385e-25, raw score of 13.67
  DOMAIN (216)..(253): lactate/malate dehydrogenase domain identified by PFam, accession name ldh, E-value=1.8e-12, PFam score of 46.7
MKTQVEQCEPVNDAVRRAVDAMNKHGCQVKELTLHLAILSKLMGKKTVTNMNSQEKTIHLLKENFQVCEKDDELAFKWIEFETPCENRGGRIIGLEFSRRYRNSWWKEEFFLLFLVFLGRYCEDGICPVSIYPNNPELSTEKSSDSGHRYLCRERQSFVQKDLKRNQGNFSSSHIPEHSPLMFVLKAQIDEMRAVESVVPRRRLAASPLDLGLTSLADELALVDVLEDKLKGEMMDLQHGSLFLQTPKIVADKVSARACIGSEIRDSKPDAWSQPDGQPAQAAHLPPAGDHQLAAI

SEQ ID NO: 46770 - protein, 173 aa, Homo sapiens
  DOMAIN (72)..(110): L-lactate dehydrogenase proteins domain identified by eMATRIX, accession number BL00064A, p-value=3.520e-27, raw score of 21.16
  DOMAIN (75)..(173): lactate/malate dehydrogenase domain identified by PFam, accession name ldh, E-value=2.1e-11, PFam score of 43.0
  misc_feature (1)...(173): Xaa = X or * as defined in Table 2
DAWADAWADAWADAWALQSRRRRRRTQLTLSSPHDCYRGLQSLLLILCKMATLKEKLIAPVAEEEATVPNNRITVLGDGQVGMACAISILGKSLADELALVDVLEDKLKGGNDGSFQHGSLFLQTPKIVGRIKDYSGTAQFXRIVVGNWQGVRSARRGKVRSNLVQRNVNVFK

SEQ ID NO: 46771 - protein, 134 aa, Homo sapiens; identical to SEQ ID NO: 42419
  DOMAIN (92)..(134): Histone H2B proteins domain identified by eMATRIX, accession number BL00357, p-value=1.000e-40, raw score of 7.74
  DOMAIN (18)..(134): Core histone H2A/H2B/H3/H4 domain identified by PFam, accession name histone, E-value=8.6e-55, PFam score of 195.4

SEQ ID NO: 46772 - protein, 130 aa, Homo sapiens
  DOMAIN (88)..(130): Histone H2B proteins domain identified by eMATRIX, accession number BL00357, p-value=1.000e-40, raw score of 7.74
  DOMAIN (14)..(130): Core histone H2A/H2B/H3/H4 domain identified by PFam, accession name histone, E-value=4.1e-53, PFam score of 189.9
FSDRGPEPAKSAPAPKKGSKKAVTKAQKKDGKKRKRSRKESYSVYVYKVLKQVHPDTGISSKAMGIMNSFVNDIFERIAGEASRLAHYNKRSTITSREIQTAVRLLLPGELAKHAVSEGTKAVTKYPSSQ

SEQ ID NO: 46773 - protein, 133 aa, Homo sapiens; identical to SEQ ID NO: 42421
  DOMAIN (91)..(133): Histone H2B proteins domain identified by eMATRIX, accession number BL00357, p-value=1.000e-40, raw score of 7.74
  DOMAIN (17)..(133): Core histone H2A/H2B/H3/H4 domain identified by PFam, accession name histone, E-value=8e-55, PFam score of 195.6

SEQ ID NO: 46774 - protein, 129 aa, Homo sapiens
  DOMAIN (61)..(82): HISTONE H2B SIGNATURE domain identified by eMATRIX, accession number PR00621B, p-value=7.750e-26, raw score of 4.91
  DOMAIN (14)..(129): Core histone H2A/H2B/H3/H4 domain identified by PFam, accession name histone, E-value=1.3e-45, PFam score of 165.0
FAFNMPEPAKSAPAPKKGSKKAVTKAQKKDGKKRKRSRKESYSVYVYKVLKQVHPDTGISSKAMGIMNSFVNDIFERIAGEASRLAHYNKRSTITSREIQTAVRLLLPGELAKHAVSEGTKAVTKYHQR

SEQ ID NO: 46775 - protein, 88 aa, Homo sapiens
  DOMAIN (46)..(88): Histone H2B proteins domain identified by eMATRIX, accession number BL00357, p-value=1.000e-40, raw score of 7.74
  DOMAIN (10)..(88): Core histone H2A/H2B/H3/H4 domain identified by PFam, accession name histone, E-value=1.1e-12, PFam score of 55.6
MPEPSKSAPAPKKGSKKAVTKAQKKDGKKRKRSRKESYSVYVYKVLKQRSTITSREIQTAVRLLLPGELAKHAVSEGTKAVTKYTSSK

SEQ ID NO: 46776 - protein, 107 aa, Homo sapiens
MAHSQNSLELPININATQITTAYGHRALPKLKEELQSEDLQTRQKALMALCDLMHDPECIYKAMNIGCMENLKALLKDSNSMVRIKTTEVLHITASHSVGSSDRKGE

SEQ ID NO: 46777 - protein, 268 aa, Homo sapiens
MEGFMQVVAGSGLLLRTATLASSVLGPLQRLTFVITRRNPVNDCSRFAAGRSLGLFAPAQWVLIMSTAAPRTLLESPGNDVAWQLNRLASGAGYWKQKGLRRQITTAYGHRALPKLKEELQSEDLQTRQKALMALCDLMHDPECIYKAMNIGCMENLKALLKDSNSMVRIKTTEVLHITASHSVGRYAFLEHDIVLALSFLLNDPSPVCRGNLYKAYMQLVQVPREWNQASWPPMSVPPSEQSLRRAGIIVTTVVDPLHHQGDHVGYR

SEQ ID NO: 46778 - protein, 204 aa, Homo sapiens; identical to SEQ ID NO: 34954
  DOMAIN (89)..(106): RNase H domain identified by eMATRIX, accession number PF00075A, p-value=4.000e-09, raw score of 14.44
  misc_feature (1)...(204): Xaa = X or * as defined in Table 2

SEQ ID NO: 46779 - protein, 42 aa, Homo sapiens
MFWVPWNQRQLRASVQLSLKCLIISLSPVHSYPGKRPEVSLP

SEQ ID NO: 46780 - protein, 439 aa, Homo sapiens
MKNDGWWKEKQIYSDSQLTEKMVDHHSKKLKHASLSLKGVGERKQESSIRKSTVPDTVMPVVEPGVKTQVPAGSRCKVQSVTNEEVRYTPKEQSFLTYKAEIWRTVPECIIGIDILSSWQNPYIGSLTGRVRPIMVEKAKWKALELPLPRKINERTRRTRERPPRDRRYLHSGYSLGKAWLLRGFVEIPYSGHLISTRRDSKEAVVPSPTYFRFKPPTSGFSAGSGPALHFRSLSVSQRPVSASAAAGSTALQKSRIEVWEPVRRFQKIYGNSWTPWQKFAAGVGPSWGTSARTVWKGIVGSEPPYRVPTGALPSGAERRGPPPSRPQNGRSDNSLYCVPGKSTDTQCQPVKAAGREGLPCKATGVELSKTIGTHLLHQCDLDVRSGVKGDHFGALTFDCPAGFRTCMGPVTPLFWPISPIWNGYIYSIPVPPLYLGSK

SEQ ID NO: 46781 - protein, 436 aa, Homo sapiens
  DOMAIN (368)..(382): Phage integrase family domain identified by eMATRIX, accession number PF00589B, p-value=1.621e-11, raw score of 16.17
  DOMAIN (235)..(416): "Phage" integrase family domain identified by PFam, accession name Phage_integrase, E-value=2.3e-09, PFam score of 44.6
  misc_feature (1)...(436): Xaa = X or * as defined in Table 2
QVPGCIIGIDILSSWQNPHIGSLTGRVRAIMVGKAKWKPLELPLPRKIVNQKQYHILGGTVEISATIKDLKDTEAVTPTTSPFNSPIWPVQKTDGSWRMTVDYCKLNQVVTPIAAAVPDVVSLLEQINTSPGTWFEWSPKKALQQVQAAVQAALPFGPYDPADPMVLEVSVADRDAIWSLWNAAIGESQRRPLGFWSKALLSSADNYSPFERQLLASYWALVETERLTVGHQVTLRPELPIMNWVLSDPSSHKVSGAQQHWKCAVHTIIKWKWYIRDWAQAGLEGTSXLYWPRASRYQQGHQDLFILRSDLPSQVFIRDKLMERRNRRTGRTEKARIWEVTDRTVRTWIGEAVAAAAADGVTFSVPVTPHTFRHSYAMHMLYAGIPLKVLQSLMGHKSISSTEVYTKVFALDVAARHRVQFAMPESDAVAMLKQLS

SEQ ID NO: 46782 - protein, 129 aa, Homo sapiens
RSWGLNMIRPQNTKDSNSNCLEKTDSPWCELFKELYKINAFDTPDSLLMRGNEFSDPIHHTFDHMWRTKEHNEAGWLLLSSVDKVMKENDELGDSISQLQKQILSLKSAKIALSESLISCRERTEIVEK

SEQ ID NO: 46783 - protein, 342 aa, Homo sapiens
MDHMWRTNEHNEADQLLLRSVDKVMKENDKLRDSVSQLQKQILSLKSAKIAMSESLISHRERAEIVEKLTQALIMGTVYWGKGNDQTFQGLLDTGSELTLIPGDPKHHCGPPGPKVRAYGDQVINGVLAQVQLIVGPVGPWTHPVVISPVPECVIGIAILNSWQNPHIGSLTGRAHQKQFAFSWQGQQYTFTVLPQRYINFPALCHKTAKRHTARRKLASICNARIQTSPCRPRNYNCHNMRPNPDSRPDSVFSESRRQRVQDCPNRPRIQAHPSRPKYQASSPCTEDPVPSLKTHAQGSSQYLASPFRLRLKGHPKSKPAPMDPGFRLAPVNTDSRPNPTQ

SEQ ID NO: 46784 - protein, 413 aa, Homo sapiens
  misc_feature (1)...(413): Xaa = X or * as defined in Table 2
LDPEVAWAKWQHSTVKGPQKQFAFSWQGQQYTFTGLPQGYINSLSLCYNLIPRDLDRFSLPQDITLVHYIDDIMLTGSSEQELAYTLDLLVRRLCAKGWEINLTEIQEASTSVKFLRVQWCGACQDIPSKMKDKLLHLFPPTTKKKASLFGFRRQCIPHLECGPEQEKALQQAQAAVQAAVPLERYDPADPMVLVELTWLWPLLSAQFASSGDQHXALHMAPFLGVVSQLPGGKLIILDIFHHGKGRVLFSLEXTLTPDMGLPILHIMLLPRLPSVNSQNALSTVMPGFTGPGIKGWKWHHSPSPLVIHXQNFCFLFPXHYVLLAXRSXFQRKEPCHQETXQXFHXTGSXGCQLDTLGSCYFXVNKLRRELQCWLGXLTQTIKMKSVYYSITENCWMKRSPVKRRKILELEEA

SEQ ID NO: 46785 - protein, 134 aa, Homo sapiens; identical to SEQ ID NO: 32516

SEQ ID NO: 46786 - protein, 131 aa, Homo sapiens
PTRPGERSVHVEIPRRVGSGAGHAQWAGPVRVARPQLNAQLEGWLSQVQSTKRPARAIIAPHAGYTYCGSCAAHAYKQVDPSITQRFRYSYYDESQGEIYRSIEHLDKMGMSIIEQLDPVSFSNYLKKYHN

SEQ ID NO: 46787 - protein, 119 aa, Homo sapiens
ARGTIGGTGTKMSNRVVCREASHAGSWYTASGPQLNAQLEGWLSQVQSTKRPARAIIAPRRIFILGPSHHVPLSRCALSSVDIYRTPLYDLRIDQKIYGELWKTGMFERMSLQTDEDEH

SEQ ID NO: 46788 - protein, 256 aa, Homo sapiens
  DOMAIN (46)..(256): Protein of unknown function DUF52 domain identified by PFam, accession name DUF52, E-value=4e-27, PFam score of 103.5
SSWAGPAVSRPLAEPLLPPPPPPPHSSSCTIGGTGTKMSNRVVCREASHAGSWYTASGPQLNAQLEGWLSQVQSTKRPARAIIAPHAGYTYCGSCAAHAYKQVDPSITRRIFILGPSHHVPLSRCALSSVDIYRTPLYDLRIDQKIYGELWKTGMFERMSLQTDEDEHSIEMHLPYTAKAMESHKDEFTIIPVLVGALSESKEQEFGKLFSKYLADPSNPLVGSSDFCHWGQRVPYSYYDESQGENYRSIEHLDKM

SEQ ID NO: 46789 - protein, 339 aa, Homo sapiens
  DOMAIN (127)..(323): Protein of unknown function DUF52 domain identified by PFam, accession name DUF52, E-value=0.0015, PFam score of -112.5
TRIRDALGVGTQKGCHTDSSLSCSALKPSVDGKAKRALFVTHAFWGSRGRGQLLDAAVGWLVFKFLLELYTGMSADEMICYSGKSTELSGKLVLNYVLTVMEGERSRGVRPQQGNDCDDGFLSLRLGPQLNAQLEGWLSQVQSTKRPARAIIAPVGWTSATHIQRTEYGKRKIATLQQTNLANTYYLNQTIKMQILPKKPLHCRGTGDLYDLFISQLTGHKDEFTIIPVLVGALSESKEQEFGKLFSKYLADPSNLFVVSSDFCHWVYGELWKTGMFERMSLQTDEDEHSIEMHLPYTAKAMERCPVDVVSRGPQLVRGLLGTGLCNRMRTVGQRALPT

SEQ ID NO: 46790 - protein, 80 aa, Homo sapiens
MPNSKAIGLSRMCSKVCLTAEPPPSLSSVCEGVRNRGGLHPGPVFGACCSQLAAEIAGPGQCPHGQSTCGPQAQGRAVVP

SEQ ID NO: 46791 - protein, 28 aa, Homo sapiens
  misc_feature (1)...(28): Xaa = X or * as defined in Table 2
GISVSCSMYLXPDRSAGYYGLFKDRKEK

SEQ ID NO: 46792 - protein, 409 aa, Homo sapiens
  DOMAIN (206)..(291): C2 domain identified by PFam, accession name C2, E-value=6.5e -07, PFam score of 36.4
MVRPCLRQAAQETGEKPVLVSPEFVDEALCACEEYLSNLAHMDIDKDLEAPLYLTPEGWSLFLQRYYQVVHPTPHRFHSFPRYNVDSKTNISKPVSKRFLEGWRSAQEALRCVQRLSSNTGQEPHLQQLSDGLGSTDSSRDWREHGTKQPSNWMVAELNNASEVTCPHPSGSDLCLGGGVPGKKCGTILLTAEELSNCRDIATMQLCANKLDKKDFFGKSDPFLVFYRSNEDGTFTICHKTEVVKNTLNPVWQPFSIPVRALCNGDYDRTVKIDVYDWDRDGSHDFIGEFTTSYRELSKAQNQFTVYEVLNPRKKCKKKKYVNSGTVTLLSFSVDSEFTFVDYIKGGTQLNFTVAIDFTASNGETRMSEKVGALNPVADERFNNVQKCTNQKLLQQQQLTMIKNHWACQ

SEQ ID NO: 46793 - protein, 899 aa, Homo sapiens
  DOMAIN (293)..(310): Zinc finger C2H2 type, domain proteins. domain identified by eMATRIX, accession number BL00028, p-value=4.343e-09, raw score of 16.07
  DOMAIN (275)..(323): PHD-finger domain identified by PFam, accession name PHD, E- value=1.1e-12, PFam score of 55.6
MGVDFDVKTFCHNLRATKPPYECPVETCRKVYKSYSGIEYHLYHYDHDNPPPPQQTPLRKHKKKGRQSRPANKQSPSPSEVSQSPGREVMSYAQAQRMVEVDLHGRVHRISIFDNLDVVSEDEEAPEEAPENGSNKENTETPAATPKSGKHKNKEKRKDSNHHHHHNVSASTTPKLPEVVYRELEQDTPDAPPRPTSYYRYIEKSAEELDEEVEYDMDEEDYIWLDIMNERRKTEGVSPIPQEIFEYLMDRLEKESYFESHNKGDPNALVDEDAVCCICNDGECQNSNVILFCDMCNLAVHQECYGVPYIPEGQWLCRRCLQSPSRAVDCALCPNKGGAFKQTDDGRWAHVVCALWIPEVCFANTVFLEPIDSIEHIPPARWKLTCYICKQRGSGACIQCHKANCYTAFHVTCAQQAGLYMKMEPVRETGANGTSFSVRKTAYCDIHTPPGSARRLPALSHSEGEEDEDEEEDEGKGWSSEKVKKAKAKSRIKMKKARKILAEKRAAAPVVSVPCIPPHRLSKITNRLTIQRKSQFMQRLHSYWTLKRQSRNGVPLLRRLQTHLQSQRNCDQVGRDSEDKNWALKEQLKSWQRLRHDLERARLLVELIRKREKLKRETDIATMQLCANKLDKKDFFGKSDPFLVFYRSNEDGTFTICHKTEVVKNTLNPVWQPFSIPVRALCNGDYDRTVKIDVYDWDRDGSHDFIGEFTTSYRELSKAQNQFTVYEVLNPRKKCKKKKYVNSGTVTLLSFSVDSEFTFVDYIKGGTQLNFTVAIDFTASNGETRMSEKVGGNPLQPTSLHYMSPYQLSAYAMALKAVGEIIQDYDSDKLFPAYGFGAKLPPEGRISHQFPLNNNDEDPNCAGIEGVLESYFQSLRTVQLYGPTYFAPVINQVASLPSS

SEQ ID NO: 46794 - protein, 165 aa, Homo sapiens
YGIVTGPSLCAGDKQPKKQEKNPVLVSPEFVDEALCACEEYLSNLAHMDIDIGPGGPAVPQPPRAGPSSSSVTPSGPVSPLQLGLWAVGRCLGIDPFCLVQPLPLPQASRSFTPLFCSGTLEDSHCLRDRVWATFLGSWHSIVTKSMDCATKWTAHYPKCVLCGC

SEQ ID NO: 46795 - protein, 319 aa, Homo sapiens
MQLCANKLDKKDFFGKSDPFLVFYRSNEDGTFTICHKTEVVKNTLNPVWQPFSIPVRALCNGDYDRTQLNFTVAIDFTASNGETRMSEKVGGNPLQPTSLHYMSPYQLSAYAMALKAVGEIIQDYDSDKLFPAYGFGAKLPPEGRISHQFPLNNNDEDPNCAGIEGVLESYFQSLRTVQLYGPTYFAPVINQVARCWRNSGKQDKASGFGELMSGALAVVGGQWAMLGAVEGPRWKQAEDIRDIYDFRDVLGTAPFKRLVPGTYSQGASDTHPLGPPHTPVLDPFPQDGFPVLWRGSSKASHMNRLRNAKIYVERAVKV

SEQ ID NO: 46796 - protein, 675 aa, Homo sapiens
  DOMAIN (105)..(122): Zinc finger C2H2 type, domain proteins. domain identified by eMATRIX, accession number BL00028, p-value=4.343e-09, raw score of 16.07
  DOMAIN (87)..(135): PHD-finger domain identified by PFam, accession name PHD, E- value=1.1e-12, PFam score of 55.6
MRTTRTLTLWLWYIEKSAEELDEEVEYDMDEEDYIWLDIMNERRKTEGVSPIPQEIFEYLMDRLEKESYFESHNKGDPNALVDEDAVCCICNDGECQNSNVILFCDMCNLAVHQECYGVPYIPEGQWLCRRCLQSPSRAVDCALCPNKGGAFKQTDDGRWAHVVCFANTVFLEPIDSIEHIPPARWKLTCYICKQRGSGACIQCHKANCYTAFHVTCAQQAGLYMKMEPVRETGANGTSFSVRKTAYCDIHTPPGSARRLPALSHSEGEEDEDEEEDEGKGWSSEKVKKAKAKSRIKMKKARKILAEKRAAAPVVSVPCIPPHRLSKITNRLTIQRKSQFMQRLHSYWTLKRQSRNGVPLLRRLQTHLQSQRNCDQVGRDSEDKNWALKEQLKSWQRLRHDLERARLLVELIRKREKLKRETGRNGFLSNGRNGCQKINEQVTSGKPGELTLFSVLPELSQSLGLREQELQVVRASGKESSGLVLLSSCPQTASRLQKYFTHARRAQRPTATYCAVTDGIPAASEGKIQAALKLEHIDGVNLTVPVKAPSRKDILEGVKKTLSHFRVVATGSGCALVQLQPLTVFSSQLQVHMVLQLCPVLGDHMYSARVGTVLDEALLRRLHLTPSQAAQLPLHLHLHRLLLPGTRARDTPVELLAPLPPYFSRTLQCLGLRLQ

SEQ ID NO: 46797 - protein, 513 aa, Homo sapiens
  DOMAIN (283)..(368): C2 domain identified by PFam, accession name C2, E-value=6.5e -07, PFam score of 36.4
SLSVRARSTLTTWPTWTSTRTWRPRCTSPPRAGPSSSSATTKWSSIRGNPAAPANGRGPSGTSPSRGCCQKNLSREELVDALRAAVVDRKGKPGELTLFSVLPELSQSLGLREQELQVVRASGKESSGLVLLSSCPQTASRLQKYFTHARRAQRPTATYCAVTDGIPAASEGKIQAALKLEHIDGVNLTVPVKAPSRKDILEGVKKTLSHFRVVATGSGCALVQLQPLTVFSSQLQVHMVLQLCPVLGDHMYSARVGTVLGQRFLLPAENNKPQRQDIATMQLCANKLDKKDFFGKSDPFLVFYRSNEDGTFTICHKTEVVKNTLNPVWQPFSIPVRALCNGDYDRTVKIDVYDWDRDGSHDFIGEFTTSYRELSKAQNQFTVYEVLNPRKKCKKKKYVNSGTVTLLSFSVDSEFTFVDYIKGGTQLNFTVAIDFTASNGNPLQPTSLHYMSPYQLSAYAMALKAVGEIIQDYDSDKLFPAYGFGAKLPPEGRISHQFPLNNNDEDPNCAGIE

SEQ ID NO: 46798 - protein, 43 aa, Homo sapiens
  misc_feature (1)...(43): Xaa = X or * as defined in Table 2
YNSGCLYGSQCSVCRCLXGVRNQVRSQQQAMMAMAILVNKKGG

SEQ ID NO: 46799 - protein, 678 aa, Homo sapiens
MNDSRIGQPPESQQIQRDSSTGTWWEIYGQQKESEPPCRPAAQNQLQPADVAQQAADLAANSRSVLISCFSAVQKAVAAAGLVIAPEKIQTSSPYHYLGMQLEDKDRPWWNEPIKHSKINFENRTLKQRDAATPHAQLNLAPFTLNFLNLARNQPFTVAEQHFTGSKFDPQKGMRMKRSQKQKAKTPQKPRRKFRLLTHKLHDLDIETKSRCVTYNTTRSTPPTWGQIKVLSHHTENLLKEKGIPKTTSNIILAVFMVVSAAVSIPPVGATQNYTYWAYVPFPPLIWSVSWMDSSVEVYTNNSAFMPVPNDDRFPAQPEEEVCRCLQGVRKQVQSQRQAMMVMAILVNKKGADVGGKPIRIATLVYLPSKLGKRAPRGTKVDLLSSVHGYGVPPNITLNQRHTQETKELAHGRTSRQEKESPSWLGNADHGFDPDHQEDVEGDRPTDTYDRGRKEYAGTALTLSHGRVPECEGEQASAQAQSSAVKVQKWFVSSHRKEKQQTVVNTLFQSLVPEPATSGCSGLYIVQDRKKTLHFAHKLQVCWALQGCGTETQLSQQPLLCTWERDGVAIVSLSIELSAALSQWKAERGCTQLMPARGANIPGRPSPEGNCHPSSQSLNSKTLRFQAKRNCNSTPHASLNPKGTPSVAGDAVTLKCSKKATCTSASSDEGGRGVMYIL

SEQ ID NO: 46800 - protein, 284 aa, Homo sapiens
MDPLHMCLPWHEDCQHLAGLERLVKHQTPAPRPRSRPAPPSEPCPAPEAAGSSAGLTVTGTYSITLPVTSQQLQHQALQAAPWRSLQTAYCGTSPFDPVGQFSLINSFSYRHVSYISVPLENPDLYSGQPQISEKEKKMLVADVCVVMTASRKALGAWGVLIILTTPGGGYTAVLHAIGTELGYAGHGEQAHSTNLCRTVQGSLLLPGAIPGVQHVEVAGPLLALGLDQQHCSPSPIMRKISDSLNRGIRYEMLDQPSSKLSRSSKQGNKGNCHSHQELRRPDK

SEQ ID NO: 46801 - protein, 278 aa, Homo sapiens
  DOMAIN (222)..(254): kw TRANSCRIPTASE REVERSE II ORF2 domain identified by eMATRIX, accession number DM01354K, p-value=1.000e-08, raw score of 9.35
RLESQGGRRKRQMVSTHEERERVRYFHDDDNLSLNDLVKNEKMGTAENQNKLFMRMASKVTAATGSKTTDAQTGTSHKSGLPELLTTQLQVGVHMTPPLRVRLICWNSSQNSGKHLNYIYWFIIKVIIKDIGEETRRARIGSFRWVLGLTDFKNEAVDPRDVQMCLEFLPSSGFMVLLTSGVKMQTFAVSVTALKGGASGVVCSSRWVRGLADFRNEATDPREKEKQMKCIVSRRKETKLRAGINETENRKAIEKTIETKSILLENSDKINELLASLS

SEQ ID NO: 46802 - protein, 35 aa, Homo sapiens
PSRAWWLTPVIPALWEAKAGRSPEVRSSRVAWPTW

SEQ ID NO: 46803 - protein, 36 aa, Homo sapiens
EYGSWRRKYFPSRAWWLPPVIPALWEAKAGGSLEVR

SEQ ID NO: 46804 - protein, 62 aa, Homo sapiens
LYWKCKTSSRRNFPLTQVCIESPKKRPLKNARLGWAWWLTPVIPALWEAEAGGSLEVRSFRV

SEQ ID NO: 46805 - protein, 91 aa, Homo sapiens [sequence omitted]

SEQ ID NO: 46806 - protein, 143 aa, Homo sapiens
SKKARAGVGASWAGDMEPLNQQTHKQVHEIHSHMGHLETADKQSVHLVEGEIQASTDQIFSHLEHREILSSKEPPNKRQNAKLRVDQFKYDVQHLQTALRNFQHWCYAREQQEGQQEELLSRTFTTNNSQSQSSDNYWRLLSV

SEQ ID NO: 46807 - protein, 161 aa, Homo sapiens
ARGSEEARPGAVACRAGDMDPLFQQTHKQVHEIQSCMGRLETADKQSVHIVENEIQASIDQIFSRLERLEILSSKEPPNKRQNAKLRVDQLKYDVQHLQTALRNFQHRRHAREQQERQREELLSRTFTTNVSQARGEGRPALDRSWGLEFRSLSAICFGGV

SEQ ID NO: 46808 - protein, 57 aa, Homo sapiens
  misc_feature (1)...(57): Xaa = X or * as defined in Table 2
QQGYTPFQGSGRESFLASSSFWWLPGLPWLAAAXLQALTPSSHSLLSYLCSLLFCHP

SEQ ID NO: 46809 - protein, 193 aa, Homo sapiens
  DOMAIN (70)..(80): Eukaryotic  RNA-binding region RNP-1 proteins domain identified by eMATRIX, accession number BL00030B, p-value=2.200e- 10, raw score of 7.03
  DOMAIN (31)..(183): RNA recognition motif. domain identified by PFam, accession name rrm, E-value=6e-20, PFam score of 79.7
PVPTFGLPARHTGAEKRRKNSGGEQLSKNNLYIRGLPPGGTDQDLIKLCQPYGKIVSTRAFLDKTTIRCKGYGFVDFDSPAAAQKAVASLKANGVQAQMAKLQERDPAGLSVSSLLLSMYEQELENMLKPFGHVISTRILRDANGVSRGVGFARMESTEKCEVVIQHFNGKYLKTPPGIPAPSEPLLCKIADG

SEQ ID NO: 46810 - protein, 253 aa, Homo sapiens
  DOMAIN (169)..(179): Eukaryotic  RNA-binding region RNP-1 proteins domain identified by eMATRIX, accession number BL00030B, p-value=1.474e- 09, raw score of 7.03
MDNKVQTEVVLDADEELVGKWSKGDSCYALAKRLLAFCPCCRDLWNFELERDDLGYLAEEISKQQNSQEVTEHESSENKQSDNAIGKKNPFFEGKFKLAAEICISDEKPNVNHQENKKYVSRAHQRPGGIGGKKWFPELGPGLPCSVQPRDMVPCIPSASAPALAKRVQGYGFVDFDSPAAAQKAVASLKANGVQAQMAKVTQRKDRDSICLGESKGKGEESLPGNPENSSRSYPRPPRWYLYESAKTTEILG

SEQ ID NO: 46811 - protein, 93 aa, Homo sapiens
RALRAVTAPPATAARVAAPALTTQLAPVRAADRARRAAPESRTRGSGTRGAVSSFLPGTLGVLRLPCSVRLRLARSEQLLLLHQGCSHSPGNS

SEQ ID NO: 46812 - protein, 248 aa, Homo sapiens
  DOMAIN (167)..(248): DENN (AEX-3) domain identified by PFam, accession name DENN, E-value=3.5e-25, PFam score of 94.3
GSAVYLCYKKSVAKTNTVSYKAGLICRYPQEDYESFSLPESVPLFCLPMGATIECWPSNSKYPLPVFSTFVLTGASAEKVYGAAIQFYEPYSEENLTEKQRLLLGLTSADGKSDSSKTIHTNKCICLLSHWPFFDAFRKFLTFLYRYSISGAHVLPIEKHISHFMHKVPFPSPQRPRILVQLSPHDNLILSQPVSSPLPLSGGKFSTLLQNLGPENAVTLLVFAVTEHKILIHSLRPSVLTSVTEALV

SEQ ID NO: 46813 - protein, 217 aa, Homo sapiens
WKMIEDKGPRVADYFVVAGLTDVSKPLEEEIHFNDACHKVAKPKEPITDVSVIIKSLGEEVPQDYICIDVTPTGLSADLNNGSLVGPQIYLCYRRGRDKPPLTDLGGDQQYTCVIKNRWQRRTLYLTKLVYGAAIQFYEPYSEENLTEKQRLLLGLTSADGKSDSSKTIHTNKCICLLSHWPFFDAFRKFLTFLYRYSISGPHVLPIEKYFQDSYKC

SEQ ID NO: 46814 - protein, 70 aa, Homo sapiens
  misc_feature (1)...(70): Xaa = X or * as defined in Table 2
NSDMGLNLGSALTGXPWVAIEFCCFGFFQIIIVFSCLLGWLXVAPHPNLPSSPAEYMDFREAQEGTDVIY

SEQ ID NO: 46815 - protein, 362 aa, Homo sapiens
  DOMAIN (163)..(206): 1 kw MIND INHIBITOR DIVISION CONTROL domain identified by eMATRIX, accession number DM01756B, p-value=4.822e-15, raw score of 22.91
  DOMAIN (128)..(242): ParA family ATPase domain identified by PFam, accession name ParA, E-value=2.7e-28, PFam score of 107.5
MDDIPQEARQYRHNQAYAYSIQGDGAEDDDERIWDRGPDRYQTDTPVDRGPDYYQTTIDWDRGQTYIDGHPVGPGFDFYRPHSMNRLGCNPLRLKDPLLSSWGKDDVTYAIKPTCWPGLDIIPSCLALHRIETELMGKFDEGKLPTDPHLMLRLAIETVAHDYDVIVIDSAPNLGIGTINVVCAADVLIVPTPAELFDYTSALQFFDMLRDLLKNVDLKGFEPDVRILLTKYSNSNGSQSPWMEEQIRDAWGSMVLKNVVRETDEVGKASRRRGSSGQGAPPPPPPPPLPRLQPFGRCVTRRFLPTWRPGQVGGDGGQFAAAAGKKTKNMFLTRALEKILGDKEVKKAHHSQLRKACKVALG

SEQ ID NO: 46816 - protein, 97 aa, Homo sapiens
YHRIYKARWNAMALLTAVTSQHIEIHEGTVLQAVRTCYNIYLASKNLINQTTAKATLTQMLNVIFARMENQANIWISERHKKELMSFIEKLHNNLIL

SEQ ID NO: 46817 - protein, 198 aa, Homo sapiens
AKYLLPEVTGLDYGKKCVVIDLDETLVHSSFRPISNADFIVPVEIDGTIHQGLALTYSLRDRERGGGRAQNGVVDDEAKAPDLMQIMEAVLGRRVGSLRAATPSKDINQLQKANVRLYQAEVMACAFSLPQCRALATPSKADFPKRLTGEDDIARVPQKSSPSPDTGDLSCKHPGYSTTRPQALNALLIHKLNRMFVS

SEQ ID NO: 46818 - protein, 125 aa, Homo sapiens
TRFACSKAQVVGWRARATEGLCPPQRRVPLLPALCSPPGSSLSPAAARPAGPARGHLSPQERATSRDLWASSRWPPGCWPPEGAIRPPHPTHWQCGQLVHAVGLPCGESASGWAGPFPTPPHLPS

SEQ ID NO: 46819 - protein, 466 aa, Homo sapiens
KETGLGHGARSRADRPAPGRAHGTEERACGAARSNLVPLYGNRESVVKRAAADQSPSRLESEAIFLGVYLLGSGMYDRGVAHLLNCLALKPLMRGGARRWQVQEPGRALMGSVPMATSRVLDTKCGTYFQQTQELVLIETITLQTPDFEISIEHPQSDVVKHTKLGAALVAPVTTGLELSAFSFSRLRMQAAGAGSFSGLKGSDPLPTASLGSALKTTLFAAHGYVLHMITTAAEWSMSFSFFGFFLTYIRDFQVCQVSWPPPDNTMCSKHHGPLRLHIKRLRFQKMYGNAWMPRQKFAVGVGSSWRTSARAMQKGNVGWEIPHRVPTGAPPSGAVRRGPPSSRPQNGRSTDSLHCVPGKAADTQHQPMKAAGREAVPCKATGLELPKTMETYLLHQCDLDVRHGVKGDHFGALRFDCPAGFQTCMGPVVPLFWPISPIWNGCIYPIPVSPLYLKSKQLAFDFTGS

SEQ ID NO: 46820 - protein, 35 aa, Homo sapiens
GQIHREGYSASFFKITLECGKYSCPSISVRNWFHN

SEQ ID NO: 46821 - protein, 473 aa, Homo sapiens
PSAACIEPGVNAESSDGGLGGSHGSSSASKLSWTGHFTAGTPVPDQSPSMLAASTVGNYETPPPAVAAGTDSSTQAPNKADKQNLLMPTRGQADMPQTLSASDMVTPGSLSPPPTEPTDGEQAGQPLLDGAPSSASLETLIQHLVPTADYYPEKAYIFTFLLSSRLFIEPRELLARVCHLCIEQQQLDKPVLDKARVRKFGPKLLQLLAEWTETFPRDFQEESTIGHLKDVVGRIAPCDEAYRKRMHQLLQALHQKLAALRQGPEGLVGADKPISYRTKPPASIHRELLGVCSDPYTLAQQLTHVELERLRHIGPEEFVQAFVNKDPLASTKLGGAPRQPSPESPESLDVRDVGVTHPAREEEWARNQAVGRAARVTDGRYRQPLQSWKVRAFYGSTSQEIHLPTGLRSLTDLLRGFRASPLSPAHVQWRWPGRWSVLSDLLQLRAAASPGFSTCLSCASGLLKVDRKIGKWL

SEQ ID NO: 46822 - protein, 737 aa, Homo sapiens
  DOMAIN (574)..(612): Receptor tyrosine kinase class III proteins domain identified by eMATRIX, accession number BL00240E, p-value=7.508e-23, raw score of 11.56
  DOMAIN (151)..(727): Eukaryotic protein kinase domain identified by PFam, accession name pkinase, E-value=2.1e-143, PFam score of 489.8
SLAGMRLTGTVSGGEVRVTAKAGARVGPPELVGRPLEGECWYFSGVSRTQAQQLLLSPPNEPGAFLIRPSESSLGGYSLSVRAQAKVCHYRVSMAADGSLYLQKGRLFPGLEELLTYYKANWKLIQNPLLQPCMPQKAPRQDVWERPHSEFALGRKLGEGYFGEVWEGLWLGSLPVAIKVIKSANMKLTDLAKEIQTLKGLRHERLIRLHAVCSGGEPVYIVTELMRKGNLQAFLGTPEGRALRLPPLLGFACQVAEGMSYLEEQRVVHRDLAARNVLVDDGLACKVADFGLARLLKDDIYSPSSSSKIPVKWTAPEAANYRVFSQKSDVWSFGVLLHEVFTYGQCPYEGMTNHETLQQIMRGWFFGCISRSEAVRRLQAEGNATGAFLIRVSEKPSADYVLSVRDTQAVRHYKIWRRAGGRLHLNEAVSFLSLPELVNYHRAQSLSHGLRLAAPCRKHEPEPLPHWDDWERPREEFTLCRKLGSGYFGEVFEGLWKDRVQVAIKVISRDNLLHQQMLQSEIQAMKKLRHKHILALYAVVSVGDPVYIITELMAKGSLLELLRDSDEKVLPVSELLDIAWQVAEGMCYLESQNYIHRDLAARNILVGENTLCKVGDFGLARLIKEDVYLSHDHNIPYKWTAPEALSRGHYSTKSDVWSFGILLHEMFSRGQVPYPGMSNHEAFLRVDAGYRMPCPLECPPSVHKLMLTCWCRDPEQRPCFKALRERLSSFTSYENPT

SEQ ID NO: 46823 - protein, 330 aa, Homo sapiens
  DOMAIN (283)..(330): Receptor tyrosine kinase class II proteins domain identified by eMATRIX, accession number BL00239B, p-value=1.136e-17, raw score of 25.15
  DOMAIN (240)..(324): Eukaryotic protein kinase domain identified by PFam, accession name pkinase, E-value=4.9e-21, PFam score of 79.8
MEDSKAIKNEHTANTLTRAECDTTGQSSTYTQHTANNTLTRAECETTGQSSTYTQHTANNTLTRAECETTGESSTSSSPSVPASGFHGPPVPACRLLPSAVCHHLNPAGKRTHCPQRHEADPITSSTQGVSFWLRHPPVHSSPIPSSPRLKTAPMRITRRLNKQTVERLYDTTLLRQNQNRTRPTHTEAWRNLRNSSVKEAKHRRVLNVRFRFYEAQEQTNSKNQKAPRQDVWERPHSEFALGRKLGEGYFGEVWEGLWLGSLPVAIKVIKSANMKLTDLAKEIQTLKGLRHERLIRLHAVCSGGEPVYIVTELMRKGNLQAFLGTFYKV

SEQ ID NO: 46824 - protein, 949 aa, Homo sapiens
  misc_feature (1)...(949): Xaa = X or * as defined in Table 2
MTAREHSPRHGARARAMQRASTIDVAADMLGLSLAGEPHRACTGLQTTGYPGLDPSGXTRKXGRGMSALFLXTASAGAXLHXFSSLVAGAPPGXCGNVQVFWLAHAQAMGTNNPIFLSSIAFFQDSLINQMTQVKLSVYDVKDRSQGTVKSAESDRVGNITVIGWQMEEKSDQRPPVTRSVDTVNGRLHPPAPTVMHSLSHRHSKKNSNFRALALMVLPVDESLTEALGIRSKYASLRKDTLLKSVFGGAICRMYRFPTTDGNHLRILEQMAESVLSLHVPRQFVKLLLEEDAARVCELEELGELSPCWESLRRQIVTQYQTIILTYQENLTDLHQYRGPSFKASSLKADKKLEFVPTNLHIQRMRVQDDGGSDQNYDIVTIGAPAAHCQGFKSGGLRKKLHKFEETKKQVTVAQQLPAVPGQGHKTPPLRSHGIFSLAHDPSSGTSSGCQSIIYIPQDVVRAKEIIAQINTLKTQTRQLVTVCDCKLLANSIHGLNAARPDYIASKASPTSTEEEQVMLRNDQDTLMARWTGRNSRSSLQVDWHEEEWEKVWLNVDKSLECIIQRVDKLLQKERLHGEGCEDVFPCAGSCTSKKGEWSEALYPLLTTLTDCVAMMSDKAKKAMVFLLMQDSAPTIATYLSLQYRRDVVFCQTLTALICGFIIKLRNCLHDDGFLRQLYTIGLLAQFESLLSTYGEELAMLEDMSLGIMDLRNVTFKVTQATSSASADMLPVITGNRDGFNVRVPLPGPLFDALPREIQSGMLLRVQPVLFNVGINEQQTLAERFGDTSLQEVINVESLVRLNSYFEQFKEVLPEDCLPRSRSQTCLPELLRFLGQNVHARKNKNVDILWQAAEICRRLNGVRFTSCKSAKDRTAMSVTLEQCLILQHEHGMAPQVFTQALECMRSEGCRRENTMKNVGSRKYAFNSLQLKAFPKHYRPPEGTYGKVET

SEQ ID NO: 46825 - protein, 109 aa, Homo sapiens
MTAREHSPRHGARARAMQRASTIDVAADMLGLSLAGEPHRACTGLQTTGYPGLASFWLNQEIGKGDVSPLPVNRFCWSLTTLVFQFGGRGTTRVVWECPSVLLAHAQAM

SEQ ID NO: 46826 - protein, 950 aa, Homo sapiens
PRIKKHIITNDIMTAREHSPRHGARARAMQRASTIDVAADMLGLSLAGNIQDPDEPILEFSLACSELHTPSLDRKPNSFVAVSVTTPPQAFWTKHAQTEIIEGTNNPIFLSSIAFFQDSLINQMTQVKLSVYDVKDRSQGTMYLLGSGTFIVKDLLQDRHHRLHLTLRSAESDRVGNITVIGWQMEEKSDQRPPVTRSVDTVNGRMVLPVDESLTEALGIRSKYASLRKDTLLKSVFGGAICRMYRFPTTDGNHLRILEQMAESVLSLHVPRQFVKLLLEEDAARVCELEELGELSPCWESLRRQIVTQYQTIILTYQENLTDLHQYRGPSFKASSLKADKKLEFVPTNLHIQRMRVQDDGGSDQNYDIVTIGAPAAHCQGFKSGGLRKKLHKFEETKKHFEECCTSSGCQSIIYIPQDVVRAKEIIAQINTLKTQVSYYAERLSRAAKDRSATGLERTLAILADKTRQLVTVCDCKLLANSIHGLNAARPDYIASKASPTSTEEEQVMLRNDQDTLMARWTGRNSRSSLQVDWHEEEWEKVWLNVDKSLECIIQRVDKLLQKERLHGEGCEDVFPCAGSCTSKKDCSPPPEESSPGEWSEALYPLLTTLTDCVAMMSDKAKKAMVFLLMQDSAPTIATYLSLQYRRDVVFCQTLTALICGFIIKLRNCLHDDGFLRQLYTIGLLAQFESLLSTYGEELAMLEDMSLGIMDLRNVTFKVTQATSSASADMLPVITGNRDGFNVRVPLPGPLFDALPREIQSGMLLRVQPVLFNVGINEQQTLAERFGDTSLQEVINVESLVRLNSYFEQFKEVLPEDCLPRSRSQTCLPELLRFLGQNVHARKNKNVDILWQAAEICRRLNGVRFTSCKSAKDRTAMSVTLEQCLILQHEHGMAPQVFTQALECMRSEGCRRENTMKNVGSRKYAFNSLQLKAFPKHYRPPEGTYGKVET

SEQ ID NO: 46827 - protein, 966 aa, Homo sapiens
PRIKKHIITNDIMTAREHSPRHGARARAMQRASTIDVAADMLGLSLAGNIQDPDEPILEFSLACSELHTPSLDRKPNSFVAVSVTTPPQAFWTKHAQTEIIEGTNNPIFLSSIAFFQDSLINQMTQVKLSVYDVKDRSQGTMYLLGSGTFIVKDLLQDRHHRLHLTLRSAESDRVGNITVIGWQMEEKSDQRPPVTRSVDTVNGRMVLPVDESLTEALGIRSKYASLRKDTLLKSVFGGAICRMYRFPTTDGNHLRILEQMAESVLSLHVPRQFVKLLLEEDAARVCELEELGELSPCWESLRRQIVTQYQTIILTYQENLTDLHQYRGPSFKASSLKADKKLEFVPTNLHIQRMRVQDDGGSDQNYDIVTIGAPAAHCQGFKSGGLRKKLHKFEETKKHFEECCTSSGCQSIIYIPQDVVRAKEIIAQINTLKTQVSYYAERLSRAAKDRSATGLERTLAILADKTRQLVTVCDCKLLANSIHGLNAARPDYIASKASPTSTEEEQVMLRNDQDTLMARWTGRNSRSSLQVDWHEEEWEKVWLNVDKSLECIIQRVDKLLQKERLHGEGCEDVFPCAGSCTSKKDCSPPPEESSPGEWSEALYPLLTTLTDCVAMMSDKAKKAMVFLLMQDSAPTIATYLSLQYRRDVVFCQTLTALICGFIIKLRNCLHDDGFLRQLYTIGLLAQFESLLSTYGEELAMLEDMSLGIMDLRNVTFKVTQATSSASADMLPVITGNRDGFNVRVPLPGPLFDALPREIQSGMLLRVQPVLFNVGINEQQTLAERFGDTSLQEVINVESLVRLNSYFEQFKEVLPEDCLPRSRSQTCLPELLRFLGQNVHARKNKNVDILWQAAEICRRLNGVRFTSCKSAKDRTAMSVTLEQCLILQHEHGMAPQVFTQALECMRSIGTREVVTQKNLSGLVPIRDLRLDPSLLCSIPLLALSPNLLIVWLFLSIAYLVTKLRCK

SEQ ID NO: 46828 - protein, 466 aa, Homo sapiens
MTQRKEDLRKSLDVVHGEEESQQMAKVTQACMCRHESVFHIPGAMLRARCVPLLTVSLAHKEFCVPLSICMLAFCQAVLQILQPVLSGCLLASFQPVLHTNTRGDAKLPTGSTPAPSHSLTQQVVFRHKGIDLWSWPWGLSVGEQEVVATCGGLTGMCLRDCLQAPVRDLGQTRAMSVHGQVKGQSSQFPCQNSAPASLLTVARPVAERSTCAVFLQDDGFGHASMKKCHMVREQTCPVLRDLPTEEHNKENKKISKAIFYNYMKTIIHCGISLLKRTGHPQGIPWTPCVGEWGGRSDQKGQGAVDSPPRFLTCWGTLSLYLAPAREHSPRHGARARAMQRASTIDVAADMLGLSLAGEPHRACTGLQACTATANEEKIMGQSHSDTDTTSAHLISLTSTVAGGDNGWEDVHSSAQPFPYAGKPLQALAKMFLEFSSLIISLSLYTTVTRTRFLSSDSVRKDMDCA

SEQ ID NO: 46829 - protein, 90 aa, Homo sapiens
KESVLNYRFDPLGIVDGFTAEVGASGAFCPTHLTLPVEVSFYSVSDDNAPSPYMGVITLESLGKRGYRVPPSGTIQVTLFNPNKTVVKMF

SEQ ID NO: 46830 - protein, 59 aa, Homo sapiens
LYGFCFAFKMPFVQKRLWKQRHLRRVGMEILPPGAWAQPTLPVACASRALRPRRRASPE

SEQ ID NO: 46831 - protein, 177 aa, Homo sapiens
RKHNFHSLDGTSTRAFHPQTGLPLLSSPVPQRKTQSGCFDLDSSLLHLKSFSSRSPRPCLNIEDDPDIHEKPFLSSSAPPITSLSLLGNFEESVLNYRFDPLGIVDGFTAEVGASGAFCPTHLTLPVEVSFYSVSDDNAPSPYMGVITLESLGKRGYRSTSFRNNTSGMCFIAYNCN

SEQ ID NO: 46832 - protein, 142 aa, Homo sapiens
KHNFHSLDGTSTRAFHPQTGLPLLSSPESVLNYRFDPLGIVDGFTAETLFNPNKTVVKMFVVIYDLRDMPANHQTFLRQRTFSVPVKQEVKRSVNKENIRHTEEGLLRYLIHLRFQSSKSGKIYLHRDVRLLFSRKSMEVDS

SEQ ID NO: 46833 - protein, 60 aa, Homo sapiens
  DOMAIN (7)..(46): PROTEIN ZINC FINGER ZINC-FINGER METAL-BINDING NU domain identified by eMATRIX, accession number PD01066, p-value=7.000e-33, raw score of 19.43
  DOMAIN (5)..(57): KRAB box domain identified by PFam, accession name KRAB, E- value=2.4e-18, PFam score of 74.4
LRIQVTFDDVAVEFTPEEWALLDTTQKYLYRDVMLENYMNLASVGKSNITLLGMVACTCS

SEQ ID NO: 46834 - protein, 97 aa, Homo sapiens
  DOMAIN (52)..(91): PROTEIN ZINC FINGER ZINC-FINGER METAL-BINDING NU domain identified by eMATRIX, accession number PD01066, p-value=8.929e-32, raw score of 19.43
  DOMAIN (50)..(97): KRAB box domain identified by PFam, accession name KRAB, E- value=1.6e-16, PFam score of 68.4
GTSHHQLQRMSAFDMSHGFFPREPICPFEEKTKIGTMVEDHRSNSYQDSMTFDDVAVEFTPEEWALLDTTQKYLYRDVMLENYMNLASVVKRHTEFE

SEQ ID NO: 46835 - protein, 108 aa, Homo sapiens
  DOMAIN (46)..(61): WW DOMAIN SIGNATURE domain identified by eMATRIX, accession number PR00403B, p-value=9.027e-14, raw score of 12.19
  DOMAIN (34)..(103): WW domain identified by PFam, accession name WW, E-value=1.4e -24, PFam score of 95.1
  misc_feature (1)...(108): Xaa = X or * as defined in Table 2
KXTMKXEMGKFKXFYIYLEQEDYANANALLSPAPALPKEKRTDSNGRVYFVNHNTRITQWEDPRSQGQLNEKPLPEGWEMRFTVDGIPYFVDHNRRTTTYIDPWSTRP

SEQ ID NO: 46836 - protein, 739 aa, Homo sapiens
  DOMAIN (701)..(733): HECT-domain (ubiquitin-transferase) domain identified by eMATRIX, accession number PF00632C, p-value=3.432e-25, raw score of 20.66
  DOMAIN (434)..(739): HECT-domain (ubiquitin-transferase) domain identified by PFam, accession name HECT, E-value=5.5e-130, PFam score of 445.2
GDKEPTETIGDLSICLDGLQLESEVVTNGETTCSESASQNDDGSRSKDETRVSTNGSDDPEDAGAGENRRVSGNNSPSLSNGGFKPSRPPRPSRPPPPTPRRPASVNGSPSATSESDGSSTGSLPPTNTNTNTSEGATSGLIIPLTISGGSGPRPLNPVTQAPLPPGWEQRVDQHGRVYYVDHVEKRTTWDRPEPLPPGWERRVDNMGRIYYVDHFTRTTTWQRPTLESVRNYEQWQLQRSQLQGAMQQFNQRFIYGNQDLFATSQSKEFDPLGPLPPGWEKRTDSNGRVYFVNHNTRITQWEDPRSQGQLNEKPLPEGWEMRFTVDGIPYFVDHNRRTTTYIDPRTGKSALDNGPQIAYVRDFKAKVQYFRFWCQQLAMPQHIKITVTRKTLFEDSFQQIMSFSPQDLRRRLWVIFPGEEGLDYGGVAREWFFLLSHEVLNPMYCLFEYAGKDNYCLQINPASYINPDHLKYFRFIGRFIAMALFHGKFIDTGFSLPFYKRILNKPVGLKDLESIDPEFYNSLIWVKENNIEECDLEMYFSVDKEILGEIKSHDLKPNGGNILVTEENKEEYIRMVAEWRLSRGVEEQTQAFFEGFNEILPQQYLQYFDAKELEVLLCGMQEIDLNDWQRHAIYRHYARTSKQIMWFWQFVKEIDNEKRMRLLQFVTGTCRLPVGGFADLMGSNGPQKFCIEKVGKENWLPRSHTCFNRLDLPPYKSYEQLKEKLLFAIEETEGFGQE

SEQ ID NO: 46837 - protein, 153 aa, Homo sapiens
  DOMAIN (78)..(93): WW DOMAIN SIGNATURE domain identified by eMATRIX, accession number PR00403B, p-value=3.833e-10, raw score of 12.19
  DOMAIN (63)..(92): WW domain identified by PFam, accession name WW, E-value=4.4e -12, PFam score of 53.6
DSEEDRKMWESLELPRDLLNGFDQKPDSNMDNKVQAEVFSDGNEKLFGKCSKGDSFQLNEKPLPEGWEMRFTVDGIPYFVDHNRRTTTYIDPRTGKSALIKIYLLHHKVKNLILLVHCHLDGPDVEVIIFKHQWYCSNYSFKKYGIECKGKRG

SEQ ID NO: 46838 - protein, 78 aa, Homo sapiens
KRMCFCTSLSSARSSGSMYMSCRICCSMMPPFSSVFRSISSRYSRAAFWAWTETRLCWQAAMPRQQPPGLLHQWTTSP

SEQ ID NO: 46839 - protein, 200 aa, Homo sapiens
  DOMAIN (39)..(63): TRANSMEMBRANE FOUR FAMILY SIGNATURE domain identified by eMATRIX, accession number PR00259A, p-value=8.676e-20, raw score of 9.27
  DOMAIN (38)..(184): Transmembrane 4 family domain identified by PFam, accession name transmembrane4, E-value=1.7e-34, PFam score of 113.3
LPRPSRAAPSLSPPRADSASQKMRYDRYSNAKVSCWYKYLLFSYNIIFWLAGVVFLGVGLWAWSEKGVLSDLTKVTRMHGIDPVVLVLMVGVVMFTLGFAGCVGALRENICLLNFFCGTIVLIFFLELAVAELAFLFQDWVRDRFREFFESNIKSYRDDIDLQNLIDSLQKANQCCGAYGPEDWDLNVYFNCSGASYSRE

SEQ ID NO: 46840 - protein, 248 aa, Homo sapiens
  DOMAIN (153)..(192): Transmembrane 4 family proteins domain identified by eMATRIX, accession number BL00421B, p-value=6.186e-17, raw score of 17.62
  DOMAIN (122)..(241): Transmembrane 4 family domain identified by PFam, accession name transmembrane4, E-value=2.5e-21, PFam score of 71.1
RISSLISKEKSSWMKRKSSMVHKGGRMMFMGFIRLGSVVQLLPEPGTGGFSGKPGRKKGFILGGVFVVGSGKQTRNLELKRDEQLHKEHSSSVALLGLNSDSASQKMHYYRYSNAKVSCWYKYLLFSYNIIFWGVLSDLTKVTRMHGIDPVVLVLMVGVVMFTLGFAGCVGALRENICLLNFFCGTIVLIFFLELAVAVLAFLFQDWVRDRFREFFESNIKSYRDDIDLQNLIDSLQKAVSTSPAGPR

SEQ ID NO: 46841 - protein, 121 aa, Homo sapiens
  misc_feature (1)...(121): Xaa = X or * as defined in Table 2
EGCFQKIKLDHILSPPPMPFWKCSNPDVAFGPGKSLKYKRQLSXDGRQLRRGSLGGALTGRYLLPNPVAGQAWPASAETSNLVGMRSQALGQSAPSLTASLPCVSKCWENIPPWMNCPPIK

SEQ ID NO: 46842 - protein, 62 aa, Homo sapiens
MLAHSIVTMTHTPCQRPGDDREPNRTSLKDWTNTLSRGRGRLQVWVLPPLAVIKRCQLLSSG

SEQ ID NO: 46843 - protein, 83 aa, Homo sapiens
  misc_feature (1)...(83): Xaa = X or * as defined in Table 2
QSLQHDVTLXVPVLLSYPEPAPSGHGLLRGSAQIALXTIPADPAGTYLKTREPTLGCQTVPLPAPHLSVDTVCRCLSSSVWPQ

SEQ ID NO: 46844 - protein, 452 aa, Homo sapiens; identical to SEQ ID NO: 43340

SEQ ID NO: 46845 - protein, 334 aa, Homo sapiens
MVVCLAALLWLLLLIQQKVTGPVSRLRVSGFYNCSLSHPFRPRGGNGSLSLLAPDFFPIASQSLQMNIDRVILPCNDPTIEFQNCSEQSEQPCPESFHLKGKRIKELPSMDLPMGLNPTRHQRPDVWQLRRAVRYAYAIFSTSVEHAYHVWPETRCFPYVLAGRSEVIRQLSVGGPVSLKMLEAPFAEQKLDHILSPPPMPFRKCSNPDVASGPGKSLKYKRQLSEDGRQLRRGSLGGALTGKYLLPNPVAGQAWPASAETSNLVRMRSQALGQSAPSLTASLKELSLPRRGSLIDSQKWNCLVKRLTPRSLSPTPSSPGSPCSPLLAFHFWRE

SEQ ID NO: 46846 - protein, 175 aa, Homo sapiens
  misc_feature (1)...(175): Xaa = X or * as defined in Table 2
QPRGKKFSKNKPRKQNFPTPKHMRVVLPPFPPLKFFIFPKGLKFLEGGCPNISPPQKKGSLPKIPRXVLIRPPIRKKLFPCTARVKLGPPQGSFKTAAPSSSSPXSADPVYLAGKPRQSSSPGGTGGLNPPPRRLQPQPHPGPSWHSSSSRGPGGHPRRESAERSRCASGNPGGQ

SEQ ID NO: 46847 - protein, 43 aa, Homo sapiens
  misc_feature (1)...(43): Xaa = X or * as defined in Table 2
RQLFENTQSDETKQEQNKQNKKXSTATESRKVPQTGKSKSYWP

SEQ ID NO: 46848 - protein, 118 aa, Homo sapiens
  DOMAIN (16)..(37): GLUTELIN SIGNATURE domain identified by eMATRIX, accession number PR00211B, p-value=8.096e-10, raw score of 0.86
KCRRASLSLVPPPLPPPPLPPAPPLPPPPPLHLGHPGAGSGYHPGGYGGTPGGPAFPRKTQDPLYDYFAAVAGHDGQIDADELQRCLTQSGIANYPYKPHPEFFGRLTSVIIKFWSPV

SEQ ID NO: 46849 - protein, 156 aa, Homo sapiens
  DOMAIN (105)..(118): EF-hand calcium-binding domain proteins domain identified by eMATRIX, accession number BL00018, p-value=8.650e-10, raw score of 7.41
MAYPGHPGAGGGYYPGGPSVVKEENLIRQNDVYVFPVSQYGGAPGGPAFPGQTQDPLYGYFAAVAGQDGQIDADELQRCLTQSGIAGGYKPFNLETCRLMVSMLDRDMSGTMGFNEFKELWAVLNGWRQHFISLDTDRSGTSRPTRIAEGPDNNGI

SEQ ID NO: 46850 - protein, 98 aa, Homo sapiens
MMLRASVFKGKKWAKGEKRKEQSFSRELGCETTMVKDILAEEGLHFDELNKLWVLDSEVTQQTTELKEECKNFADKTGQFQKTVGGLIELVDKLAKKA

SEQ ID NO: 46851 - protein, 38 aa, Homo sapiens
  misc_feature (1)...(38): Xaa = X or * as defined in Table 2
GLQYLKGKSGLKVKRGKVWXSACCKKKGAALGTVASPL

SEQ ID NO: 46852 - protein, 137 aa, Homo sapiens
LNVSDPSDFIRTNPDCHSDGGYLDYLEGIFCHFPPSLLPLAVTLYVSWLLYLFLILGVTAAKFFCPNLSAISTTLKLSHNVAGVTFLAFGNGAPDIFSALVAFSDPHTAGLALGRLFGYLGLYVFYVVTGDSLHLDL

SEQ ID NO: 46853 - protein, 156 aa, Homo sapiens
  misc_feature (1)...(156): Xaa = X or * as defined in Table 2
WGVPGLPGRHLLPLPSQPPPSWLSILYVSWAALTCFLNSGESTAAKFFCPNLSAISYHTEAIPTTWQGVHLSWAFGNGAPDIFSGPGGLLXPAPQPDLALGALFGAGVLVTTVVAGGITTLLLFIQHHTTQEIHXQIVQWIKTTLXILATVSYVIG

SEQ ID NO: 46854 - protein, 218 aa, Homo sapiens
MVCRKVCGLNVSDRCDFIRTNPDCHSDGGYLDYLEGIFCHFPPSLLPLAVTLYVRPCPGGLVSWLLYLFLILGVTAAKFALVAFSDPHTAGLALGALFGESSPSAGVLVTTVVAGGITILHPFMAASRPFFRDIVFYMVAVFLTFLMLFRGRVTLAWALGYLGLYVFYVVTVILCTWIYQRQRRGSLFCPMPVTPEILSDSEEDRVSSKYQTAKDYGE

SEQ ID NO: 46855 - protein, 86 aa, Homo sapiens
RVSLEIHVIQKRRPHHLSLLSFWTRMKTFRRRKWGEAEESATDTTSETNKVGTGVFVLSLWVPVLVRNLAGPGVVLGNICKHFPVC

SEQ ID NO: 46856 - protein, 510 aa, Homo sapiens
MGPAGSLLGSGQMQITLWGSLAAVAIFFVITFLIFLCSSCDREKKPRQHSGDHENLMNVSRGSSAVWPGPPPTAAAAPGSSLEMRIFLGVRPSKRLASTPGDPVVCSSVRATGLELGFPLFYSRSAAALGEIGREWQPSDKEMFSRSVTSLATDAPASSEQNGALTNGDILSEDSTLTCMQHYEEVQTSASDLLDSQDSTGKPKCHQSRELPRIPPESAVDTMLTARSVDGDQGLGMEGPYEVLKDSSSQENMVEDCLYETVKEIKEVAAAAHLEKGHSGKAKSTSASKELPGPQTEGKAEFAEYASVDRNKKCRQSVNVESILGNSCDPEEEAPPPVPVKLLDENENLQEKEGGEAEESATDTTSETNKRFSSLSYKSREEDPTLTEEEISAMYSSVNKPGQLVNKSGQSLTVPESTYTSIQGDPQRSPSSCNDLYATVKDFEKTPNSTLPPAGRPSEEPEPDYEAIQTLNREEEKATLGTNGHHGLVPKENDYESISDLQQGRDITRL

SEQ ID NO: 46857 - protein, 86 aa, Homo sapiens
  misc_feature (1)...(86): Xaa = X or * as defined in Table 2
FVFLWSLMMVMYRWGFGVAVLSVCXFSFXQSGPSAAGLLEFAGGPFQTPFAWVSVVEAAEQRIMLNSKRCCVIVPLVVSSQRGTRP

SEQ ID NO: 46858 - protein, 112 aa, Homo sapiens
  DOMAIN (38)..(56): RNA polymerases N / 8 Kd subunits proteins domain identified by eMATRIX, accession number BL01112A, p-value=3.250e-09, raw score of 12.29
  misc_feature (1)...(112): Xaa = X or * as defined in Table 2
PCKLFPCCNTCYSRVXDFFRVAGKRSLLNNYTSWVNTSMLVPRVAFACGFPLQQAAVLCVHLLGSPILGAADSSVTPPFCWMANAHICGLQLQNTLSFAEPIYLGQEHAQLS

SEQ ID NO: 46859 - protein, 88 aa, Homo sapiens
  misc_feature (1)...(88): Xaa = X or * as defined in Table 2
PYLSVIFFFDYGINEEQCQRPIQGDGQNFHRHNGWIKINPSCISFAIFFPFGAEKNMWSTPVTEAFNLLSTXAFXLFGYKCTLVISSS

SEQ ID NO: 46860 - protein, 448 aa, Homo sapiens
  DOMAIN (21)..(48): STREPTOMYCES SUBTILISIN INHIBITOR SIGNATURE domain identified by eMATRIX, accession number PR00294A, p-value=8.778e-10, raw score of 10.44
MGKLVSVELTVKGGSAASFLKSARPRTHQKEETTSDAPPLRAVTLTVKICSFSPEVSETTNPPEGRNSGHISTSEGTNSRHTIFKSCNTHREGLSHQKRTLEHSHRALQSENPLPFERIRQVGNVANSDGLIASLWKEYGKADARWVYFDPTIVSVEILAVALDVSLALFLIYAIVKEKYYRHFLQITLCVCEMYGCWMTFLPEWLTRSPNLNTSNWLAVLLALPVFFLTCFLGDPMNTERPKLPAIKGDIMGVTSGKGVKYPQYVLPVCCQYVILKSQSDVKGVYMGSASDARELQGSVGNFDVVGVRRLKVGVNAHGFFTSAQTVVNTDRPSAQALHALQVWRKKNVLNNLWAAPLLVLYRIITECFFGYEIQAAATIGRRFTIHHGYAVVINKNSVKGLLDLEQQLARVQAHHRCPLQPGTQLGTTPAIQRPTTPRTTPKRDRRQ

SEQ ID NO: 46861 - protein, 85 aa, Homo sapiens
RKPEAWALSGSWGPRLAVRCCCAPRCWRRAAPWACAWAAGRGRRTAGRSSGSATTRMVHFALGKNMAKLMQDGFILIQPLCLWKF

SEQ ID NO: 46862 - protein, 100 aa, Homo sapiens
  misc_feature (1)...(100): Xaa = X or * as defined in Table 2
ESETEHKRPGKHSPKRSCNMCGQWAFHASLTVSYCLLTWCNETCSGDGCEGGMRIDIDPPVSQTRFFITLLXLCFPGAGPQPAYFCTQTQCHVETPRVSQ

SEQ ID NO: 46863 - protein, 222 aa, Homo sapiens
MEDSASASLSSAAATGTSTSTPAAPTARKQLDKEQVYLRALVRNLFNEGNDVYREHDWNNSISQYTEALNIADYAKSEEILIPKEIIEKLYINRIACYSNMIPPSARKALCNWIWSRVVTLTLQSSENQRQNIKGLENILQKEAATCVDHGLFMPLLLSVDLVAEHALIIMEEQGFKQKEDVAEVLLTPVSQYLGSHSWGYEEFETSVANMAKPHVYGKHKN

SEQ ID NO: 46864 - protein, 582 aa, Homo sapiens
  DOMAIN (435)..(470): Prion protein domain identified by eMATRIX, accession number BL00291A, p-value=7.289e-10, raw score of 4.49
  DOMAIN (111)..(215): WH1 domain identified by PFam, accession name WH1, E-value= 2.1e-28, PFam score of 107.8
PGRAGAGSFPFSARREGGSPSAPASLDLVLLPAPEELRDVAPLTPLLPAPVTERGNRALAHSPEETAPGLPTPRGETMSSVQQQPPPPRRITNVESLLLTPQENESLFTFLGKKCVTMSSAVLQLYAADRNCMWSKKCSGVACLVKDNPQRSYSLRIFDIKDGKLLWEQELYNNFVYNSPRGYFHTFAGDTCQVALNFANEEEAKKFRKAVTDLLGRRQRKSEKRRDPPNGPNLPMATVDIKNPEITTNRFYGPQVNNISHTKEKKKGKAKKKRLTKGDIGTPSNFQHIGHVGWDPNTGSDLNNLDPELKNLFDMCGILEAQLKERETLKVIYDFIEKTGGVEAVKNELRRQAPPPPPPSRGGPPPPPPPPHSSGPPPPPARGRGAPPPPPSRAPTAAPPPPPPSRPSVEVPPPPPNRMYPPPPPALPSSAPSGPPPPPPSVLGVGPVAPPPPPPPPPPPGPPPPPGLPSDGDHQVPTTAGNKAALLDQIREGAQLKKVEQNSRPVSCSGRDALLDQIRQGIQLKSVADGQESTPPTPAPTSGIVGALMEVMQKRSKAIHSSDEDEDEDDEEDFEDDDEWED

SEQ ID NO: 46865 - protein, 95 aa, Homo sapiens
ENGSLRPKPTGIPLSSARGNELSPTRRRRRPWTPNPAGETMSSVQQQPPPPRRVTNVGSLLLTPQENESLFTFLGKKCVGAGRGGRAPPSRAAGE

SEQ ID NO: 46866 - protein, 149 aa, Homo sapiens
  DOMAIN (102)..(119): Regulator of G protein signalling domain proteins domain identified by eMATRIX, accession number PF00615B, p-value=5.333e- 15, raw score of 16.25
  DOMAIN (8)..(115): Regulator of G protein signaling domain identified by PFam, accession name RGS, E-value=1.5e-38, PFam score of 140.9
SRLDPRVRLLFRQFCETRPGLECYIQFLDSVAEYEVTPDEKLGEKGKEIMTKYLTPKSPVFIAQVGQDLVSQTEEKLLQKPCKELFSACAQSVHEYLRGEPFHEYLDSMFFDRFLQWKWLERVCACQVRATGKMYACSRLEKKRIQKRK

SEQ ID NO: 46867 - protein, 197 aa, Homo sapiens
  DOMAIN (58)..(94): Regulator of G protein signaling domain identified by PFam, accession name RGS, E-value=6e-12, PFam score of 46.7
MESTLEYGNEQTMQAGGEAESRTGLTLAKLSANRGYVNQQRAQQAKGPLSSPPSPDRDYCSLCDKQPIGRLLFRQFCETRPGLECYIQFLDSVAGQQNPTKQLHLEKTPSKPPFNATCDDHNPRHHQPQNRSINARTSDTDNCEYLTDRLWQRPPRAPSFPPPAWQPQQQKSSPFGTKNPIPIPEAKQRIKALHSQG

SEQ ID NO: 46868 - protein, 640 aa, Homo sapiens
  DOMAIN (275)..(294): GPCR KINASE SIGNATURE domain identified by eMATRIX, accession number PR00717B, p-value=2.200e-21, raw score of 13.50
  DOMAIN (239)..(501): Eukaryotic protein kinase domain identified by PFam, accession name pkinase, E-value=2.6e-70, PFam score of 247.0
EQEQRGRQGGLLAPPAPAAAAAARAAAAAAAAPQALTAPPAGSVADRRLSMELENIVANTVLLKAREGGGGKRKGKSKKWKEILKFPHISQCESLRRTIDRDYCRVCDKQPIGRLLFRQFCETRPGLECYIQFLDSVAEYEVTPDEKLGEKGKEIMTKYLTPKSPVFIAQVGQDLVSQTEEKLLQKPCKELFSACAQSVHEYLRGEPFHEYLDSMFFDRFLQWKWLERQPVTKNTFRQYRVLGKGGFGEVCACQVRATGKMYACKRLEKKRIKKRKGESMALNEKQILEKVNSQFVVNLAYAYETKDALCLVLTIMNGGDLKFHIYNMGNPGFEEERALFYAAEILCGLEDLHRENTVYRDLKPENILLDDYGHIRISDLGLAVKIPEGDLIRGRVGTVGYMAPEVLNNQRYGLSPDYWGLGCLIYEMIEGQSPFRGRKEKVKREEVDRRVLETEEVYSHKFSEEAKSICKMLLTKDAKQRLGCQEEGAAEVKRHPFFRNMNFKRLEAGMLDPPFVPDPRAVYCKDVLDIEQFSTVKGVNLDHTDDDFYSKFSTGSVSIPWQNEMIETECFKELNVFGPNGTLPPDLNRNHPPEPPKKGLLQRLFKRQHQNNSKSSPSSKTSFNHHINSNHVSSNSTGSS

SEQ ID NO: 46869 - protein, 321 aa, Homo sapiens
MKEQMWQKVNNGSIYVKSTLQISSSKRAETVLLFASPDLIPGIQYAGRRFRSHGEKEIAHTSRQHTTSDIGHNRANYPEIGATGRTQAQLAISIIQDTNNTPSQSSRPPTDSHETGSHQTDDISNPSRETQAPPPPVPTSLRTEPPTPHTTPNRARTPGQTSAPRTPSCVANGTQAEANQENRTRGARCTLTRLPILNVFINKQNDRKICLHCKCPQEEHMVTVMPLEMEKTISKLMFDFQRNSTSDDDSGCALEEYAWVPPGLKPEQAFCCGIVIKIQVRPSGVLWLCGACGSYSGPQMEPLDSESSNAPSRLWDYLLKY

SEQ ID NO: 46870 - protein, 139 aa, Homo sapiens
  misc_feature (1)...(139): Xaa = X or * as defined in Table 2
RPKGARELRLHPGPRYGRTSPQNCPWARPGCLHEALXGWKICLHCKCPQEEHMVTVMPLEMEKTISKLMFDFQRNSTSDDDSGCALEEYAWVPPGLKPEQVHQYYSCLPEEKVPYVNSPGEKLRIKQLLHQLPPHDNEV

SEQ ID NO: 46871 - protein, 305 aa, Homo sapiens
  DOMAIN (282)..(298): PROTEIN ANTIOXIDANT PEROXIDASE RED domain identified by eMATRIX, accession number PD00210, p-value=1.692e-11, raw score of 15.25
MLTQNSRVNLQEEAIVGGSLIAPFFLVLVFELLYVFELLYLHEGRHVVCLNDCRVPSILVQCLTHSSCSVNVGGKICLHCKCPQEEHMVTVMPLEMEKTISKLMFDFQRNSTSDDDSGCALEEYAWVPPGLKPEQCPCGLFLLHPFLMHSEEHAHCSTQGIRSKKADLVCPSCDELSREDAASPPPPSRALCAPFKGRGMWCLTDESEAATSPCGTPATYCPSPNYTHTTQISVMETPLWNSPLAQFPHTMHLLSPYFKGTAFVNAEFKDLSLDDNEGKCLVLFSYPLDFTFVCRQQFLAVSDKE

SEQ ID NO: 46872 - protein, 197 aa, Homo sapiens
MAAAVRRVAPSVGCPDIVSAIPWGISATAALRPAACGRTSLTNLLCSGSSQAKLFSTSSSCHAPAVTQHAPYFKEIVAFSGQSLTNFHDVELWKLSQSSVGFPTLAHLAWINTPKEKNGRVLVLALRRSLHNLTPMGVIKHLSVNDLPVGRSVEETLRLVKAFQYVETHGEVCPANWTPDSPTIKPSPAASKEYFQK

SEQ ID NO: 46873 - protein, 49 aa, Homo sapiens
  misc_feature (1)...(49): Xaa = X or * as defined in Table 2
RLEKHINCSRVIXSWAASPGLTAAAYRVTLNPPGTFLEGVAKVGQYTFT

SEQ ID NO: 46874 - protein, 239 aa, Homo sapiens
MADGRPAGALQEPVLVRLEKVAKEGLAGSGEGSLTAAAYRVTLNPPGTFLEGVAKVGQYTFTAVLAIRRKWGVPLSGIHVGWGGPGEQLQDWGQEAAMHSEQPTRGISLHPDTGTAVGAVFGLTTCISAHVREKPDDPLNYFLGGCAGGLTLGARTTRASSLLLPHARLRMQRWKAAALASVLCSSVLSIWMCREGLLLSHRLGPALVPLHRLPRTLDARIARLAQCKLLLCVGSDTPN

SEQ ID NO: 46875 - protein, 95 aa, Homo sapiens
TAACLQSHHFKSSGQLSFERKWPKVGTITRSIASLLSGPVFGLHHLAFSAHVPREGPTTPWNYFPRVAAPRRWTPGEHARTTTGLGAAPCVLLWA

SEQ ID NO: 46876 - protein, 68 aa, Homo sapiens
  misc_feature (1)...(68): Xaa = X or * as defined in Table 2
MYIKIKPRSFGIIHNLPSKPGPLFLPHSLIGWFDFTASFLYPMNCSAMHHXVRKSSSATAITKIGKTG

SEQ ID NO: 46877 - protein, 33 aa, Homo sapiens
INPSTSHLPHSGAPEPWTMIHPFELFLVLKCVV

SEQ ID NO: 46878 - protein, 118 aa, Homo sapiens
QTIGLWLTVWLYFALLGGIYVKLISSSHGIFIEAGRLARPTESWITAGNRMHHFLEPLVARPLGASRGFPAAGNLVLAPLPPQPAASARCGERAKTEWQASEGGGEAGAGSHALRRGR

SEQ ID NO: 46879 - protein, 88 aa, Homo sapiens
TAQWEWSLIWMLPPSMFRPRTVAMVCGLLVSLDWLGDLGQYLQSCCFCFICKNYDPHTPAAAQGTVIFYTCVDVFVHSSWFITPITLC

SEQ ID NO: 46880 - protein, 51 aa, Homo sapiens
STVILQDPSVFCTGQMGESNRDVVGITTPASFRSLMVALISSIPPAMRYCF

SEQ ID NO: 46881 - protein, 697 aa, Homo sapiens
  DOMAIN (592)..(603): dUTPase domain identified by eMATRIX, accession number PF00692B, p-value=5.304e-09, raw score of 8.14
  DOMAIN (535)..(655): dUTPase domain identified by PFam, accession name dUTPase, E- value=0.053, PFam score of -13.5
MTSNSIHVVENDKILEMGMFGEDRLLEAARVCLSHGEEREGSGPPTTPYWGYGANNSSATPWTELPVGGVLVAWVRKWDLPICGLQSYVEKAQFSQQGGWGVVFPLPRVALRARKTTPAHTDTCQQSELSWAMGKLQFVEEVYWLDPATWNGDVWEHPDEAGDTEFLNSDEPFLPEEKTFPSPVVATSPPQPMLPSAFQPLSEEINPTLPEATMMASLVAVARQDNVDSPQAPPPTSLFASRPITRLSPHREKNSKSKQYHIRGGIAEISATIKDSKDTGVVIPTTSPFNSPIWPVWKTDGSWTITVDYHKLDQVVTPIAAAVPDVVSLLEQINTSPGTCYAAINLENAFFSIPVHKANQSNLPSAGKASNIPLLSYHRVKFLGIHCFVACQDIPSKIKDKLLHLAPPTNKKEAQCLVGLFGFWRQHIPHLRVLLQPIYQVTLKAAIFEWGPEQEKALQQVQAAVQAALPLGPYDPTDPMVLEVTLAEEDFNNQVDRMTHSVDSTQPLSPSTPVITQWTLEESGHGGRDGGYAWAQQHGLPLTKADLSTATAECPIFQLQRLTPSTRYGTIPWGDHPATWWQAKNGVTVLAGVIDPDYQDEISLLLHNGGKEEYAWNTRDPLGHRLVLPCPVIKVNGKLQQPNPDRTTNGPDPSGMKAWVTLPRIKPGPVEVFAECKGNTEWVVEEGGHQYQLQPRD

SEQ ID NO: 46882 - protein, 61 aa, Homo sapiens
  misc_feature (1)...(61): Xaa = X or * as defined in Table 2
QHPLPNPCCHQPFHLCLRRXTLHCLRQQXWPPLRQLPGKIMLILLRSHPQHPCLLLDLQLD

SEQ ID NO: 46883 - protein, 206 aa, Homo sapiens
  misc_feature (1)...(206): Xaa = X or * as defined in Table 2
MGKLQFVEEVYWLDPATWNGDVWEHPDEAGDTEFLNSDEPFLPEEKTFPSPVVATSPPQPMLPSAFQPLSEEINPTLPEATMMASLVAVARQDNVDSPQAPPPTSLFASRPITRLSPHREKNSKSKQYHIRGGIAEISATIKDSKDTGVVIPTTSPFNSPIWPVWKTDGSWTITVDYHKLDQVVTPIAAAVPDVVSLLEQINTSPX

SEQ ID NO: 46884 - protein, 909 aa, Homo sapiens
  DOMAIN (524)..(569): kw TRANSCRIPTASE REVERSE II ORF2 domain identified by eMATRIX, accession number DM01354N, p-value=1.000e-40, raw score of 13.17
  DOMAIN (608)..(883): Reverse transcriptase domain identified by PFam, accession name rvt, E-value=3.7e-87, PFam score of 303.0
  misc_feature (1)...(909): Xaa = X or * as defined in Table 2
XPTTRLKSRWAPRGEVECVTHEEETSGLLPGTLHWGKGNDQIFGGLLDSGSELMLIPGDPKCHCGPPVKVGTYEGSPEAICLQLAKPAIIFTVLPQGYMNSLTLCHNLIWRELDCFLFLQDITLVHYIDDIMLIGFSEQKVANMLDLLPALMASWGIPYDKLTEEEKTRPWFTEGSARYAGTTRKWTAAVLQPFSRTPLKDSCEGKSPHHPVIAQWAHEQSGHGGRDGGYLWAQQHGFPLTKADLAMATAECPICQQQKRTLNPQYGIILWGDQPVIWWQVDYIGLLPSWKRQRFVLTEINTYSRYGFSYPAPNASAKTTIRGLTECLIHHHGIPHSTASDRGTHFTAKEVQQWAHAHGIHWPYHVPHHPEAAGLMEWWNGLLKSQLQCQLARIHGSRNQVVEAEVAPLTMTPSNPLAKFFLPVPTTLHSAGLEVLAPEGGTMPPGDTTLNPFNWKLRLPPGHFGLLLSLSQQDKKGVTVLVGVTDPDYQDEISLLLHNGDAIKNDKGDITTNPTEIQTTIREYYKHLYANKLENLEEMDKFLDTCTFPRLNQEEVEYLKRPITGSEIVAIISSLPTKKSPGPDGFTAEFYQRYKEELVPFLLKLFQSIEKEGILPNSFYEASIILIPKPGRDTTKKENFRPISLMNIDAKILNKILANRIQQHIKKLIHHEQVGFNPGMQGWFNIRKSTNVIQHINRTKDKNHMIISIDAEEAFDKIQQPFMLKTLNKLGIDGTYFKIIRAIYDKPTANIILNGQKLEAFPLKTGTRQGCPLSPLLFNIVLEVLARAIRQEKEIKGIQLGKEEVKLSLFADDMTVYLENPIVSAQNLLKLISNFSKVSGYKINVQKSQAFLYTNNRQTESQIMSELPFTIASKRIKYLGIQLTRDVKDLFKENYKPLLEEIKEDPNKX

SEQ ID NO: 46885 - protein, 58 aa, Homo sapiens
RCRRRLIPHPRRLSPVVIRRIQVPQVQPGAGPSRPGHTRDPIGAAAAHCPCPGDSGAH

SEQ ID NO: 46886 - protein, 369 aa, Homo sapiens
  misc_feature (1)...(369): Xaa = X or * as defined in Table 2
MTEEPLQALVLSAVLLYQEAYVRRSLTALGLDTFANFAHFSEMQPLSDAPCGLVTGVTRPLVAYSVEVGGFTIICGLSLASGNISGWCQLYLLLTQCRRGAATLWDSGMGGGRQSSRQTSVPRWTLDSKCIPGPKLTTRPQMDTKALGGQQAHVEHQTHEDIRPQVDTQAPGGHKALGEQQDPVGHQASVGYSPQVPQDSLGQALAGQATPEIPLGLQLHTVLVQEIQELIEAQTRAPGPCAEVRALPAPAAEPEPAWEEAPPERALELEGAPAKDQTNEELPEITAPYCEPLALTLELKAWLERKVGGRGDQHSPSQQLPCCPXSWARWQTCRQRAGHLAWPPVPRCREASLIHXNHSPAAAGPFILL

SEQ ID NO: 46887 - protein, 264 aa, Homo sapiens
MTLQITNWTHDQSSHRSLWSRGCCPPTDQAYVTCHLRNGGSESLFRRCRRRLIPHPRRLSPVVIRRIQVPQDSLGQALAGQATPEIPLGLQLHTVLVQEIQELIEAQTLAPGPCAEVRALPAPAAEPEPAWEEAPPERALELEGAPAKDQTNEELPEITAPPGAASTLWALRKYTVVIKMCHFEPEQVFTTVRLSPYRVRAYGQTSPVTEMEPGTKDPESQIKGHKSQDHGEADVEKPPARLHKGSPESGACGDSSEKQTFLPY

SEQ ID NO: 46888 - protein, 321 aa, Homo sapiens
MSTTTCQVVAFLLSILGLAGCIAATGMDMWSTQDLYDNPVTSVFQYEGLWRSCVRQSSGFTECRPYFTILGLPGTPITPARGSGTDPDLPGTEPLWGKGGHNLCRPADLAFPPGSSEESEQPRRVGFPSKNKQAESNNNSIINNNKKAPTKTPSKFQQPQRQKLDKLMKMRKNQWKNAENPKGQSASSPQNDHNVSPSRAQNSMEDQMDKLTEVGFKRWVIKKPIELKEHVLNQCKEAENFDKRLEELLTRKTSLERNITDLMDLKNTAQELCEAYTSINSQIDQVEERISEFEDHLAEIRHEDKTRENRMKRNEQSLQEI

SEQ ID NO: 46889 - protein, 126 aa, Homo sapiens
MVCPEFIPSDVQMCPEFIPSGGFVVSLASGMKLQTFLVSVTALKGGASGVVPSSRPELFIPPGGFVVSLASGVKLQTFTVSVTAHKGGADPKQTQSFHKEQGFHSLEGNPNTLPPLARAASFYSLI

SEQ ID NO: 46890 - protein, 164 aa, Homo sapiens
  misc_feature (1)...(164): Xaa = X or * as defined in Table 2
MKPRTLAVSVTVLKGGVSRVCSFWCSDVFRVSSFWWVRGLADSGVKLRTFAVSVTPLKAARLELFVPPGGFVVSLASGVKLQPFEVSVTAHKGSVDPKSEKQQDLLQRGKEQSYHTGEGHPSRLPPAGSGSLLLFSYLAPPTSCXLVQPSGLFXQGADWCIYNP

SEQ ID NO: 46891 - protein, 41 aa, Homo sapiens
SCRPSRSVLQLRKAVRTQRVSSSKIYCKEQKNKAPTTWKGT

SEQ ID NO: 46892 - protein, 928 aa, Homo sapiens
  DOMAIN (671)..(702): Protein kinases ATP-binding region proteins domain identified by eMATRIX, accession number BL00107A, p-value=4.000e-16, raw score of 18.39
  DOMAIN (194)..(507): Ank repeat domain identified by PFam, accession name ank, E- value=1.5e-60, PFam score of 214.6
EVSLREATQRKLRRFSELRGKLVARGEFWDIVAITAADEKQELAYNQQLSEKLKRKELPLGVQYHVFVDPAGAKIGNGGSTLCALQCLEKLYGDKWNSFTILLIHSDEWKKKVSESYVITIERLEDDLPIKEKELTELRNIFGSDEAFSKVNLNYRTENGLSLLHLCCICGGKKSHIRTLMLKGLRPSRLTRNGFTALHLAVYKDNAELITSLLHSGADIQQVGYGGLTALHIATIAGHLEAADVLLQHGANVNIQDAVFFTPLHIAAYYGHEQVTRLLLKFGADVNVSGEVGDRPLHLASAKGFLNIAKLLMEEGSKADVNAQDNEDHVPLHFCSRFGHHDIVKYLLQSDLEVQPHVVNIYGDTPLHLACYNGKFEVAKEIIQISGTESLTKENIFSETAFHSACTYGKSIDLVKFLLDQNVININHQGRDGHTGLHSACYHGHIRLVQFLLDNGADMNLVACDPSRSSGEKDEQTCLMWAYEKGHDAIVTLLKHYKRPQDELPCNEYSQPGGDGSYVSVPSPLGKIKSMTKEKADILLLRAGLPSHFHLQLSEIEFHEIIGSGSFGKVYKGRCRNKIVAIKRYRANTYCSKSDVDMFCREVSILCQLNHPCVIQFVGACLNDPSQFAIVTQYISGGSLFSLLHEQKRILDLQSKLIIAVDVAKGMEYLHNLTQPIIHRDLNSHNILLYEDGHAVVADFGESRFLQSLDEDNMTKQPGNLRWMAPEVFTQCTRYTIKADVFSYALCLWEILTGEIPFAHLKPAAAAADMAYHHIRPPIGYSIPKPISSLLIRGWNACPEGRPEFSEVVMKLEECLCNIELMSPASSNSSGSLSPSSSSDCLVNRGGPGRSHVAALRSRFELEYALNARSYAALSQSAGQYSSQGLSLEEMKRSLQYTPIDKYGYVSDPMSSMHFHSCRNSSSFEDSS

SEQ ID NO: 46893 - protein, 182 aa, Homo sapiens
EVTACWQPLQPSLALGASSASAPTLAALEKPFSPPLHCGSPFLGWPRLEPAPSACRDVWRERDGQEPGVSAALAGQPEFRVGVGLAGPHSERPAGPAGPGSEWLSTRASSAEGAPGPPAVPAHLALGSISRRALAASLWSRARDLQPAMPEPLPSSTNRLSVKQTNRLSVKWTNQQDVGGAR

SEQ ID NO: 46894 - protein, 518 aa, Homo sapiens
KAIQYGLQDKEEEIKQEGPWTKQRLSKLRKWGSQKCLEKAGGTEDVWFSNKENVECMDQDEWKKKVSESYVITIERLEDDLQIKEKELTELRNIFGGFVILLASGVKLQAFMVSVTAHKGSADPKSEKQQDLLQKAKEQSSHGKKSHIRTLMLKGLRPSRLTRNGFTALHLAVYKAEGASSSLGHPRKGLPQCSSGLKGSSSAARVGAKAEKAPRASEGCKSCQHAVTSHHVLSAADRPPPEPLAVCDDAEPLWETKDEGEENALPKTSVLKFSAAVVCIHLGLAASGPPGDPVEMHTSGAHSRLAASEAMAQPTLQVTEANTSLRTTALALAFSAGTDVLHRRHRTLCGAVDPGTFPGVTEPSVGPWNPAPSQASPNPLWGRGTTQLRERGPAEKPFREAEQQLPARERAGLGLWEPPKDRVGLGASEQFQTAAGVGEAAVSQEEREGLDHSLRFLFWRKATAQRCWLIILQPLSLEPAAEAGSFEQPWELLEAQPATLRDKLHLQKERVDEVRAQQ

SEQ ID NO: 46895 - protein, 281 aa, Homo sapiens
MAVGPRRGRRQRDQGLPQDTSMVWLTWPSPSLLSEWVQACGRLPSTELALVRDAVRERARRVMLAEGTVDRDRMGLRTGGQGQVPLVGKVGCKQSGQRTVPRRHKGLLLSQEAGDSCRAGGMQGRRHVICESGTLVFLQVGRQLFLRIGTRAICSKTVQSQSSKMGDSGSEMLIFPDLLEGLVLVNIDPNGKGWIDWAATKLSGLTSTLPDTVLSHLFSQEELVNNTELVQSYRQQIGNVVNQANLQLFWNMYNSRRDLDINRPGTVPNAKTLRLLRTLDG

SEQ ID NO: 46896 - protein, 247 aa, Homo sapiens
ECWDGEHDIETPYGLLHVVIRGSPKGNRPAILTYHDVGLNHKLCFNTFFNFEDMQEITKHFVVCHVDAPGQQVGASQFPQGYQFPSMEQLAAMLPSVVQHFGFKYVIGIGVGAGAYVLAKFALIFPDLVEGLVLVNIDPNGKGWIDWAATKLSGLTSTLPDTVLSHLFSQEELVNNTELVQSYRQQIGNVVNQANLQLFWNMYNSRRDLDINRPGTVPNAKTLRCPVMLVVGDNAPAEDGVVECNSK

SEQ ID NO: 46897 - protein, 315 aa, Homo sapiens
MSRPRLCKSSVSTLINRARYRALGSSKTRAKLQVHIGDQGARAQIQMGPSGNQKELSNLKRSETITRRKTRSLAASCADAGNTAVDHRRTAGHEQRERGINTTEKTTNRKQMSIPSFVPFLFLCSYRKDEVARQRHVARTFGQADVVLQEDGHTDCRDECNQALRVTHRAVLEAYGMIQGIGLNIYHRYSPWWEARGYQWHYTADMSNLFRRYQFNVATWLIFPDLVEGLVLVNIDPNGKGWIDWAATKLSGLTSTLPDTVLSHLFSQVPGPTTDPPGDGTSHIPSKTLFLHVGPSEETSLSVQGATVVSGMSVK

SEQ ID NO: 46898 - protein, 211 aa, Homo sapiens
MGSTVPQTSASHNIPRVKQHGCSQPSPHGSRASQAHPGFLGIVLIIWAHCHHDLVVLCPACRIIFACDSSSLWAVESFQRPHGDDNTGRHISQEARKRANQSVAKHINQIFSAPAQAEVMLVWESPARLEWGQGLSTVASPLAVKMNKLIEYYQQLAQKEKVERDRKKLARRRNYMPLAFSSRCWYPQLRDLKTDCITGLFADTPQYQLGD

SEQ ID NO: 46899 - protein, 441 aa, Homo sapiens
LCHVRCSYFHFRHDCKFPEDSPEAEVAMLPVQPAELEFLVGLVGPLYGNEDLDPLLGNLLDLSMAVQKFSQSLQDFQFECIGDAETDDEISIDSQESLEQYELWTQEIKHLPRRRVTLLVNIFGGDFIPLDTPKQKIPVVVTGIHYHLSTKSKRSKDRLNQLNLTFQDKKTLYTPSMGRLMHFQASNISCILSRRGRPSPIKEDQSRSRNNCGPMPRHNARTYCGSPDIHETPSPSTYQRGHSRLNRSPNTKCVRVLDLLPIYSHFPNAEVMMRSKKPSRLRLHKRQRDMDANPGITTYCHVFQSKYLAPLNHNSSFYDAATVPASQGKNYSDNKNHHSQTVRIPKGWHQVQAAEEETQSQHTKHRALLVGNLHTEWSSDSGMEQKNHQPTCKKHAAVQVPITMFPVFIYIEIACDINIPTQSLKEFARLLIAVEEERRRL

SEQ ID NO: 46900 - protein, 197 aa, Homo sapiens
  DOMAIN (143)..(177): Ribosomal protein L11 proteins domain identified by eMATRIX, accession number BL00359C, p-value=6.586e-22, raw score of 22.18
  DOMAIN (69)..(176): Ribosomal protein L11 domain identified by PFam, accession name Ribosomal_L11, E-value=2.6e-41, PFam score of 150.7
MTPRGTGGDSEVPFQAAKPLSVKQGVSFRLWARRRPRCDFLRSSRIRVHPTPAASTMPPKFDPNEIKVVYLRCTGGEVGATSALAPKIGPLCLSPKKNRQAQIEVVPSASALIIKALKEPPRDRKKQKNIKHSGNITFDEIVNIARQMRHRSLARELSGTIKEILGTAQSVGCNVDGRHPHDIIDDINSGAVECPAS

SEQ ID NO: 46901 - protein, 231 aa, Homo sapiens
  DOMAIN (164)..(205): Ribosomal protein L11 proteins domain identified by eMATRIX, accession number BL00359B, p-value=9.647e-19, raw score of 23.07
  DOMAIN (121)..(231): Ribosomal protein L11 domain identified by PFam, accession name Ribosomal_L11, E-value=5e-35, PFam score of 129.8
VAQSLPPECHELQRPSLSLQEGQTCRDITSSSRNMGYKEWLRSADHQLTPLQPPQSSGSPKPCSGPLAPILGPTPSSRPWAFDLGRVPVSSMSRPGPEEVHLTPAASTMPLKFDPNEIKVICLRCTGGEVGATSALAPKISPLGLSPKKVGNDIDKAIGDWKGRRITVKLNIQNRQAHIEVAPSASALIIKALKEPPRDRKKQKNIKRSRNITFHEVVDIARQMRHQSLAR

SEQ ID NO: 46902 - protein, 176 aa, Homo sapiens
  DOMAIN (67)..(108): Ribosomal protein L11 proteins domain identified by eMATRIX, accession number BL00359B, p-value=4.231e-24, raw score of 23.07
  DOMAIN (24)..(157): Ribosomal protein L11 domain identified by PFam, accession name Ribosomal_L11, E-value=1e-58, PFam score of 208.5
IFVHPTPAASTMPSKFDPNEIKVVYLRCTGGEVGATSALAPKIGPLGLSPKKVGDDIAKATGDWKGLRITVKLTIQNRQAQIEVVPSASALIIKALKEPPRDRKKQKNIKHSGNITFDEIVNIARQMRHRSLARELSGTIKEILGTAQSVGCNVDGRHPHDIIDDINSGAVECPAS

SEQ ID NO: 46903 - protein, 245 aa, Homo sapiens
MASHAYDKNQNANVLVHLCFYNRIPKTGAYYLDSRSVSISYLIGHHIDMGLETATSKNEFIFDSANRYENASSSYKGAAVVAAPLGEHSGMDSDQLHQLIPVLAITGEKGGPWWQKLQVFAAVHGSPFCSLGPHSLVRLKVAPMPEGLRLLLDKHRESNTHSLFWTGKETSSSSHIQESAALNAHISNTGPRACSSQDQLQVGKGPKMRESGGFGEVLLLEEKKLQRRGAVVAVKEEGEIENTAQ

SEQ ID NO: 46904 - protein, 114 aa, Homo sapiens
MAGGGSDLSTRGLNGGVSQVANEMNHLPAHSQSLQRLFTEDQDVDEGLVYDTVFKHFKRHKLEISNAIKKTFPFLEGLRDRELITNKMFEEKCQKARKQGRKVTKHVAKWILWI

SEQ ID NO: 46905 - protein, 197 aa, Homo sapiens
GPRRAYGGRMAGGGGDLSTRRLNECISPVANEMNHLPAHSHDLQRMFTEDQGVDDRLLYDIVFKHFQRNKVEISNAIKKTFPFLEGLRDRDLITNKMFEDSQDSCRNLVPVQRVVYNVLSELEKTFNLPVLEALFSDVNMQEYPDLIHIYKGFENVIHDKLPLQESEEKEREERSGLQLSLEQGTGENSFRSLTWPP

SEQ ID NO: 46906 - protein, 555 aa, Homo sapiens
MHHAPLVYGESVGLCEESKVSLIQKTMSDTLGLGKGRDHIKKTYPCPLVTDGQHRVLVAHGRHLMPPFRGHLAGEARHGHTVSTRNEQGSVIAIPRVRLPRSRSRGRPALLRAPPPPGRRPVSRQRVALQPLQGWAETETENPPLIGILAHQTLRIVWEQVDILWGPSPLTQDDRLVRPGHEVALGTRFCWISCVLPWDKALRGRWAIKLPAQDNGETVTCSCVPKELGIPQQFHLSDWPGIAPIPPLDSSGLGCECPRLFTEDQDVDEGLVYDTVFKHFKRHKLEISNAIKKTFPFLEGLRDRELITNKMFEDSEDSCRNLVPVQRVVYNVLSELEKTFNLSVLEALFSEVNMQEYPDLIHIYKSFKNAIQDKLSFQESDRKEREERPDIKLSLKQGKNDRIKTVSHPLRGKGDKGGEVPESPEARKESDQACGKMDTVDIANNSTLGKPKRKRNNSKADGQLVSSEKKANMNLKDLSKIRGLAACQASPPTVCHISEKLRTPWSEKGGETRMRTVPLSSVSTMWTPPVHESLSSHPGNQIGCHGISVLVFREP

SEQ ID NO: 46907 - protein, 395 aa, Homo sapiens
ATKSTSLDKVYTHPKWTTQTKARSYSYPHCTGISQQDPESDSQGQGNGLFYSSGPQSWYPKANNQDFIPFTKKRVGVDRAFPLKPMVHRKSCSTGEAGTDGDHNVYPRPPEPREFSSRNFGVRNQGNFSVVGTVLAATQAEKAVANFDRTEWVQIRRLEAAGESLEEEIRRKQILLRGKLKKTEEELRRIQTQKEQAKENENGELQKIILPRSRVKGNKSNTMYKPIFSPEFEFEEEFSRDRREDETWGRSQQNSGPFQFSDYRIQRLKRERLVASNNKIRDPVSEPSVEKFSPPSETPVGALQGSARNSSLSMAPDSSGSSGSIEEPQLGECSHCGRKFLSFRLERHSNICSRMRGSKRKVFDSSRARAKGTELEQYLNWKGPASAKVTRALWM

SEQ ID NO: 46908 - protein, 209 aa, Homo sapiens
  DOMAIN (124)..(171): Intermediate filaments proteins domain identified by eMATRIX, accession number BL00226D, p-value=3.250e-25, raw score of 19.10
  DOMAIN (1)..(170): Intermediate filament proteins domain identified by PFam, accession name filament, E-value=2.6e-38, PFam score of 140.7
LETEIEALEELLFMKKNHEEEVKDLQAQITSSGLTMELPQKSREEPDKYCSQQMEESTTVVTMQSAKVGAAEMMLMKLRRTVQSLEIDLDSMRNLKVSLGNSLREVEAHYTLQMEQLNGILLHLESELAQTQAEGQCQAQEYKALLNIKLKLEAEITTYHCLLEDGKDFNLGDALDSSNSMQIIQKNTTHWIVDGKVVSENNDTKVLRH

SEQ ID NO: 46909 - protein, 447 aa, Homo sapiens
  DOMAIN (362)..(409): Intermediate filaments proteins domain identified by eMATRIX, accession number BL00226D, p-value=9.710e-33, raw score of 19.10
  DOMAIN (96)..(408): Intermediate filament proteins domain identified by PFam, accession name filament, E-value=4.4e-157, PFam score of 535.3
RGRPQSLSPVLSLSPDSMSFTTRSTFSTNYRSLGSVQAPSYGARPVSSAASVYAGAGGSGSRISVSRSTSFRGGMGSGGLATGIAGGLAGMGGIQNEKETMQSLNDRLASYLDRVRSLETENRRLESKIREHLEKKGPQVRDWSHYFKIIEDLRAQIFANTVDNARIVLQIDNARLAADDFRVKYETELAMRQSVENDIHGLRKVIDDTNITRLQLETEIEALKEELLFMKKNHEEEVKGLQAQIASSGLTVEVDAPKSQDLAKIMADIRAQYDELARKNREELDKYWSQQIEESTTVVTTQSAEVGAAETTLTELRRTVQSLEIDLDSMRNLKASLENSLREVEARYALQMEQLNGILLHLESELAQTRAEGQRQAQEYEALLNIKVKLEAEIATYRRLLEDGEDFNLGDALDSSNSMQTIQKTTTRRIVDGKVVSETNDTKVLRH

SEQ ID NO: 46910 - protein, 135 aa, Homo sapiens
  misc_feature (1)...(135): Xaa = X or * as defined in Table 2
IRAVSRSRERPGSRSRYLQACXGGGAFPGPXSAEISRLVRSHNLGGYSCTEGGGGCRKGSCLLQHSCLLWHSCLLPASKNTVCSKDLGGCSCTQESRAPACSWSPRTQGGSASSHDLGSCRNAWETPSRQLGRSW

SEQ ID NO: 46911 - protein, 182 aa, Homo sapiens
  DOMAIN (65)..(160): SCAN domain identified by PFam, accession name SCAN, E-value= 8.5e-63, PFam score of 222.0
QSLEGAEAAEEWPVSTASSMRTTGWAATAPWLGPNLAPRSEQSPGAGRGQAAEADTSKPAEENPWSQEVFRQKFRQFSYSDSTGPREALSRLRELCCQWLRPEVHSKEQILELLMLEQFLAILPEELQAWLREHRPENGEEAVTMLEELEKELEEPRQQVLDPGLVGEGTATAHWMEMPLQC

SEQ ID NO: 46912 - protein, 100 aa, Homo sapiens
MGSFPASSVPGQLPMGSFLAPPECGSLSEFCPAQHCSGISHPVGLWLCPLQQGPGSKTLAGKGKLWHPPANLFLPLMFCLSPRDTLYLLLLYSFEFHFLL

SEQ ID NO: 46913 - protein, 329 aa, Homo sapiens
  DOMAIN (188)..(206): RIBOSOMAL PROTEIN S2 SIGNATURE domain identified by eMATRIX, accession number PR00395D, p-value=7.000e-17, raw score of 13.04
  DOMAIN (87)..(255): Ribosomal protein S2 domain identified by PFam, accession name Ribosomal_S2, E-value=7e-91, PFam score of 315.3
MLEAVLEESPREEAAFSWVMKGNLAAGKTIQAQDRDAVGILSSRTGESMENLQKNLLPKQRRRTRETFTMSGALDVLQMKEEDVLKFLVAGTHLGGTNLDFQMEQYIYKRKSDGIYIINLKRTWEKLLLAARAIIAIENPADVSVISSRNTGQRAVLKFAAATEATPIAGHFTPGTFTNQIQADFWEPRLLVVTDPRADHQPLTEASYVNLPTIALCNTDSPLRYVDIAIPCNNQGARSVGLMWWTLAREVLRMRGTISREHLWEVMPDLYFYRDPEEIEKEEQAATEKAVTKEEFQGEWTAPAPEFTATKPEVADWSEGVQVPSVPIQ

SEQ ID NO: 46914 - protein, 164 aa, Homo sapiens
  DOMAIN (59)..(81): OLFACTORY RECEPTOR SIGNATURE domain identified by eMATRIX, accession number PR00245A, p-value=4.966e-13, raw score of 18.03
  DOMAIN (41)..(144): 7 transmembrane receptor (rhodopsin family) domain identified by PFam, accession name 7tm_1, E-value=2e-25, PFam score of 82.9
MVEENHTMKNEFILTGFTDHPELKTLLFVVFFAIYLITVVGNISLVALIFTHCRLHTPMYIFLGNLALVDSCCACAITPKMLENFFSEGKRISLYECAVQFYFLCTVETADCFLLAAVAYDRYVAICNPLQYHIMMSKKLCIQMTTGAFIAGNLHSMIHVGLVF

SEQ ID NO: 46915 - protein, 383 aa, Homo sapiens
  DOMAIN (279)..(327): Cadherins extracellular repeat proteins domain proteins domain identified by eMATRIX, accession number BL00232B, p-value= 8.971e-16, raw score of 32.79
TWKSHRHSMPARESSQEEGCTLQSHRGGAAQGFGNPPLASAPCTSPCCCHVKKDVFASSSAMIVHVGWQQISISLGWSFQRKDLAVIFAVSWPSLVILSGFLNLTCFHLNTCKHALLNYLYKYGRILNSHSDYKQKKKTVRISQRESVVRVNTTNCHKCLLSGTYIFAVLLVCVVFHSGAQEKNYTIREEIPENVLIGNLLKDLNLSLIPNKSLTTTMQFKLVYKTGDVPLIRIEEDTGEIFTTGARIDREKLCAGIPRDEHCFYEVEVAILPDEIFRLVKIRFLIEDINDNAPLFPATVINISIPENSAINSKYTLPAAVDPDVGINGVQNYELIKEAFKSFNFAVRKVIPKGSVTDSYITPIKCIIFLDSKPYVEISKLKK

SEQ ID NO: 46916 - protein, 604 aa, Homo sapiens
  DOMAIN (60)..(112): Ubiquitin domain proteins domain identified by eMATRIX, accession number BL00299, p-value=4.814e-15, raw score of 28.84
  DOMAIN (556)..(596): UBA domain identified by PFam, accession name UBA, E-value= 3.8e-09, PFam score of 43.8
VTAAAAATAMAESGESGGPPGSQDSAAGAEGAGAPAAAASAEPKIMKVTVKTPKEKEEFAVPENSSVQQFKEEISKRFKSHTDQLVLIFAGKILKDQDTLSQHGIHDGLTVHLVIKTQNRPQDHSAQQTNTAGSNVTTSSTPNSNSTSGSATSNPFGLGGLGGLAGLSSLGLNTTNFSELQSQMQRQLLSNPEMMVQIMENPFVQSMLSNPDLMRQLIMANPQMQQLIQRNPEISHMLNNPDIMRQTLELARNPAMMQEMMRNQDRALSNLESIPGGYNALRRMYTDIQEPMLSAAQEQFGGNPFASLVSNTSSGEGSQPSRTENRDPLPNPWAPQTSQSSSASSGTASTVGGTTGSTASGTSGQSTTAPNLVPGVGASMFNTPGMQSLLQQITENPQLMQNMLSAPYMRSMMQSLSQNPDLAAQMMLNNPLFAGNPQLQEQMRQQLPTFLQQMQNPDTLSAMSNPRAMQALLQIQQGLQTLATEAPGLIPGFTPGLGALGSTGGSSGTNGSNATPSENTSPTAGTTEPGHQQFIQQMLQALAGVNPQLQNPEVRFQQQLEQLSAMGFLNREANLQALIATGGDINAAIERLLGSQHHSSISVS

SEQ ID NO: 46917 - protein, 57 aa, Homo sapiens
VTAAAAATAMAESGESGGPPGSQDSAAGAEGAGGPAAAASAEPKIMKVTVLLLPDPF

SEQ ID NO: 46918 - protein, 92 aa, Homo sapiens
  DOMAIN (11)..(32): SODIUM/NEUROTRANSMITTER SYMPORTER SIGNATURE domain identified by eMATRIX, accession number PR00176G, p-value=9.224e-09, raw score of 12.48
  misc_feature (1)...(92): Xaa = X or * as defined in Table 2
RLNLPGPLCAGTSILFAVLMEAIGVSCIRQAGGGHVASHIYXGLMPALALXDTEPRNPSALPETCLCGSGPQSQMGHQTSHLLSSPGTGLSF

SEQ ID NO: 46919 - protein, 342 aa, Homo sapiens
  DOMAIN (175)..(221): Thiolases acyl-enzyme intermediate proteins domain identified by eMATRIX, accession number BL00098C, p-value=6.870e-25, raw score of 21.65
  DOMAIN (4)..(107): Carboxylesterases domain identified by PFam, accession name COesterase, E-value=1e-22, PFam score of 80.3
MPVISESDVALTPALVEKGDVKPLAEQIAITAGCKTTTSAVMVHCLRQKTEEELLETTLKMSYPHTPTVIDGVVLPKTPEELQAERKFHTVPYIVGFNRKEFGCFFLEKNMFVFFLNILRQKSGRYVCVQLLQTLNILFENISHETSLCKDIPWYLPLCCCACSRMKALYGVESMPQTAENVALKFGINRQDQDAFALRSQQRTAAAQESGFFADQLIEVSIAQKKGDPLRFCQDEHPRATTLEALAKLKPVVDPQGTVTAGNASGLNDGACALLLASELGVTRHGLQPMARIVASAVTGIEPSIMGFAPADAVRKVLKIAGLSLDQMDVIELNEVPCRELG

SEQ ID NO: 46920 - protein, 62 aa, Homo sapiens
  DOMAIN (4)..(28): kw ANNEXIN ANTIGEN PROLINE TUMOR domain identified by eMATRIX, accession number DM00250B, p-value=7.203e-09, raw score of 13.84
TQPGELGSPGPGGCPALGPGQHCQLWREPRLCDHLWRVSGRRKCLCSCFVSIGQEPLPPGHF

SEQ ID NO: 46921 - protein, 656 aa, Homo sapiens
  DOMAIN (546)..(581): 2-oxo acid dehydrogenases acyltransferase component lipoyl bi domain identified by eMATRIX, accession number BL00189A, p-value= 8.744e-18, raw score of 19.58
  DOMAIN (524)..(598): Biotin-requiring enzymes domain identified by PFam, accession name biotin_lipoyl, E-value=2.9e-14, PFam score of 60.8
MSELPITIATKRIKYLGIQLTRDVKDLFMENYKPLPREIKEDTNKWKNIPCSWIGRINIMKMATLPKSSPTVSSTCTKVLYFTDRSLTPFMVNIPKRAPQTALSLQRTAISFLRAQGHPPTRNHLGDNSHPRRRKKTGKRKCWVNRKSRGGAHPSRMRKHSCRKVASLRRTMAELGEADEAELQRLVAAEQQKAQFTAQDALQQRLTQQDTSVLQLKQELLRANMDKDELHNQNVDLQRKLDERNRLLGEYKKELGQKDRLLQQHQAKLEEALRKLSDVSYHQNFLPHPTTNPEPSRLLPKAFLRGELTLGQIRSSTMSNPDHFPQLLLPKDQVSGKAVCLIEEISSTEIQVEMKMPAYELKIVHDHSPSGTLLPRSAPRPRSVEKERACRAFLAWGAGGVNLREPFYDNVRLCGVADGNAAALGEVPLPSLSPTMQAGTIARWEKKEGDKINEGDLIAERGIWQGHRTIVEGRPEDIEAFKNYTLDSSAAPTPQAAPAPTPAATASPPTPSAQAPGSSYPPHMQVLLPALSPTMTMGTVQRWEKKVGEKLSEGDLLAEIETDKATIGFEVQEEGYLAKILVPEGTRDVPLGTPLCIIVEKEADISAFADYRPTEVTDLKPQVPPPTPPPIFHDDDAIPGWEGKIVAWVEEDHGEN

SEQ ID NO: 46922 - protein, 13 aa, Homo sapiens
SLCRTCDKISGMG

SEQ ID NO: 46923 - protein, 23 aa, Homo sapiens
RGFFFDKFCWGHFSINKFWKIQM

SEQ ID NO: 46924 - protein, 514 aa, Homo sapiens
  DOMAIN (482)..(513): Cyclophilin type peptidyl-prolyl cis-tr domain identified by PFam, accession name pro_isomerase, E-value=4.9e-09, PFam score of 34.9
MAEGKEEQVTFYMDGSRQKERQSLCRETLPHKPSDIVRHCAKVSAYRHINNGHKVIAATREKRLKKKAIYAEKEQQDGRLEESGKGQQGRRHLAGSLRMSANCREDKGRDAYTVIDVAYNPDVLHAAEKDQVKKNQLIQMAMKCIEEKFQFTLSHSYHITKFRIKGSIQRMKQNLMGIQTDSIDLREKMRRELTSLDQIRSSTMSNPDHFPQLLLPKDQVSGKAVCLIEEISSTEIQVEMKMPAYELKIVHDHSEKPLKIELKVELPGINSVSLCDLSVSEQQLQAYVAWVNAQLKKRPAVKPVQDLRQDLRDGVILAYLIEIVGPSGTLLPRSAPRPRSVEKERACRAFLAWGAGGVNLREPFYDNVRLCGVADGNAAALGENEVMHSEATQMSPSDLTIFGLQKELLKCKQEARNLQGIKITTCQKNTNWGLSFNRQHLTPMIQLGCLSPPNLMLKYDPPDFRFRVRAMVVATSSPANPMVFFDVSNGSQEVGRTKIELSADVVPKTTENFG

SEQ ID NO: 46925 - protein, 151 aa, Homo sapiens
  DOMAIN (59)..(81): RECOVERIN FAMILY SIGNATURE domain identified by eMATRIX, accession number PR00450C, p-value=2.773e-12, raw score of 12.22
  DOMAIN (55)..(150): EF hand domain identified by PFam, accession name efhand, E- value=8.2e-05, PFam score of 29.4
FEATGGKRLAFMMAGTARHYREMAIQAKKKVTTATDPIERLRLQCLARGSAGIKGLGRVFKIMDDDNNRTLDFKEFMKGLNDYAVVMEKEEVEELFQRLDKHGNGTIDFNEFLLTLRPPMSRARKEVIMQALRKLDKTGDGVITIEDLRED

SEQ ID NO: 46926 - protein, 162 aa, Homo sapiens
TEWRRHFLVSEPGAEAMGSQEVLGHAARLASSGLLLQVLFRLITFVLNAFILRFLSKEIVGVVNVRLTLLYSTTLFLAREAFRRACLSGGTQRDWSQTLNLLWLTVPLGVFWSLFLGWIWLQLLEVPDPNVVPHYATGVVLFGLSAVVELLGEPFWVLAQAH

SEQ ID NO: 46927 - protein, 528 aa, Homo sapiens
  misc_feature (1)...(528): Xaa = X or * as defined in Table 2
MEDAEGTVTLLAVTLVARDLNCIQPQTGPSGGIPEESIVIIGDVSSMHVIAPEDLPVGQDVEVEDSDIDDPDPVRALPLQIHACGRVGFEAHDDWSEGGDPAADTLIDPSQDARYLKCEGMQAPHNSNPVAQKTEISYHIWIARIPREKSGKVTGTLCDLLKDLTVIHSLIPKQGCSDGLGVLVQGTFQPQGNTDTCTCQVSAVEGKGEGLMQLASLSRRVTIWAYGDSQERDLKTQLEKITAIKDMKEMQEKEYRIMEKAHSRQRKQHHKGPERKEQAAIFAVLQPPLVITRQTGSGVDPQKTPADLQKRCRTVRRKTSQQKAVASTLTKRITTQKLNAKDHNSSPTREQNCTENEFDELTEVGFRRWVITNSSELKEHVLTQCKEAKNFDKRLEELLIQITSLEKNISDLMELXSFALSFCVVILFVNVDATAFCWLVFLLTVRHLFCRSAGVFWGSTPDPVCLVITSGGCRTAKIAACSFLSGPLWCCFLCLEWAFSIILYSFSCISFMSLIAVIFSNWVLRSLS

SEQ ID NO: 46928 - protein, 266 aa, Homo sapiens
  DOMAIN (15)..(48): Chloramphenicol acetyltransferase proteins domain identified by eMATRIX, accession number BL00100E, p-value=2.929e-33, raw score of 15.41
  DOMAIN (1)..(47): Chloramphenicol acetyltransferase domain identified by PFam, accession name CAT, E-value=1e-34, PFam score of 128.7
MDNFFAPVFTMGKYYTQGDKVLMPLAIQVHHAVCDGFHVGRMLNELQQYCDEWQGGAFPNCKSSTRQHALTPQGCWACLADGSLSEVSVPTHLVGVYDIVNNLGSLVARLIFQPIEESFYIFFAKVLERGKDATLQKQEDVAVAAAVLESLLKLALLAGLTITVFGFAYSQLALDIYGGTMLSSGSGKDSAGWCAGGPAPRATHAPSQQLGADGPEAVAQDTRRRLGPPTALWPRAERPGRGDASPGTQCSALAQPRSSLRLHLGL

SEQ ID NO: 46929 - protein, 322 aa, Homo sapiens
  DOMAIN (176)..(201): RHODOPSIN-LIKE GPCR SUPERFAMILY SIGNATURE domain identified by eMATRIX, accession number PR00237F, p-value=5.263e-09, raw score of 13.57
MHVIAPEDLPVGQDVEVEDNDIDDPGQAKKTMEEQWTLVSLLSTSQQQGPVPPGSTASSATDKLSRWELTLLYSTTLFLAREAFRRACLSGGTQRDWSQTLNLLWLTVPLGVFWSLFLGWIWLQLLEVPDPNVVPHYATGVVLFGLSAVVELLGEPFWVLAQAHMFVKLKVIAESLSVILKSVLTAFLVLWLPHWGLYIFSLAQLFYTTVLGLCYVIYFTKLLGSPESTKLQTLPVSRITDLLPNITRNGAFINWEEAKLAWGFFKQFFLKQILTEGGRYVGGHFLNVLNFGDQGVYDIMNNLGSLVARLIFQPIEESFIYS

SEQ ID NO: 46930 - protein, 555 aa, Homo sapiens
  DOMAIN (7)..(45): Lysyl oxidase  copper-binding region proteins domain identified by eMATRIX, accession number BL00926B, p-value=1.255e- 09, raw score of 13.84
MARTQGACARAPPPPAPRSSRQPAPLAPRPWSSRARLPRSRPSAIPPGWGRAGGKDSAGWCAGGPAPRATHAPSQQLGADGPEAVAQDTRRRLGPPTALWPRAERPGRGDASPGTQCPPWPSPDPACASPRVVDRAGGDPQRGSRGRTWDSGPAKRARCRPHVTGSDNSARGHRTAANWDERAQSPGKDQNLEGGFKSAPQPEVTVGGYVARARPLLLSAGVFPRHRDPGSSRSDSQPVKGVIGQGPEAPPQQEESLGFSPCASFPNCKSSTRQHALTPQGCWACLADGSLSEVSVPTHLVGAVSLCRQTAHQHLWVRREPGLGLDTKGALPLDTPTCAASGGGGETGRRESERYVMTFLNVLNFGDQGVYDIVNNLGSLVARLIFQPIEESFYIFFAKVLERGKDATLQKQEDVAVAAAVLESLLKLALLAGLTITVFGFAYSQLALDIYGGTMLSSGSGPVLLRSYCLYVLLLAINGVTECFTFAAMSKEEVDRYNFVMLALSSSFLGLSYLLTRWCGSVGFILANWFNMGIRITQSLCFIHRYYRRSPHRPL

SEQ ID NO: 46931 - protein, 507 aa, Homo sapiens
  DOMAIN (132)..(173): kw TRANSCRIPTASE REVERSE II ORF2 domain identified by eMATRIX, accession number DM01354I, p-value=1.409e-36, raw score of 15.55
  DOMAIN (236)..(468): Reverse transcriptase domain identified by PFam, accession name rvt, E-value=1e-05, PFam score of 11.6
MDVSSPPCVDGVSILPPLLIPRQTGSGVDLQQNPTDLQLRVLTVKRKTNKQKGHPHQNSICTSPSSKTKEYTFFSVQHHTYSKIDHIVGSKAVLSKRKTIEIITNCLPDHSAIKLELRIKKLTQNHKTTWKQNNLLLNDYWVHNKMKAEIKMFFETNKNKDTTYKNLWDTVKAVCRGKFIALNAHKRKQERSKIDTLTSQLKELEKQEQTHSKASRRQEITKIRAELKEIETQKTVQKIHESRSWFFEKINKIDRPLAGLIKKKREKSQKDAIKNDKLDITTDPTETQTTIRDYHKHLYAIKLENLEEMDKFLDTYTLPRLNQESLNRPITGSEIEAIINSLPTKKKYRTRRIHSRILSEVQGGAVLEVLARAIRQEKEIKCIQLGKEEVKLSLFADDMIVYLENPTVSAQNLLKLISNFSKVSRYKINVQKSQAFLYTNNRQTESQIMSELPFTIASKRIKYLGIQLTRDVKDLFKENYKPLLNEIKEDNKWKSIPCPRIGRINIM

SEQ ID NO: 46932 - protein, 771 aa, Homo sapiens; identical to SEQ ID NO: 36626
  DOMAIN (553)..(598): kw TRANSCRIPTASE REVERSE II ORF2 domain identified by eMATRIX, accession number DM01354N, p-value=1.000e-40, raw score of 13.17
  DOMAIN (146)..(379): AP endonuclease family 1 domain identified by PFam, accession name AP_endonucleas1, E-value=2.8e-05, PFam score of -36.5

SEQ ID NO: 46933 - protein, 304 aa, Homo sapiens
  DOMAIN (167)..(197): kw TRANSCRIPTASE REVERSE II ORF2 domain identified by eMATRIX, accession number DM01354R, p-value=7.047e-22, raw score of 8.50
  DOMAIN (89)..(301): Reverse transcriptase domain identified by PFam, accession name rvt, E-value=0.0018, PFam score of -20.2
MKVQKLLAATFSITVQPALGGRLTPHTAGYSSETKLPEERSGSSICCSPIFAVLQPQLLISRQTGSGVDLWQTPTDLQLRVLSVRRKTNKQKGHPPQKPICTSPSSKNKVAKLTAPYENSKGTPYVPSNKDLRPNRFVSIQEIEFFLLRGARIEVVADPYRSEFATDAEKAVDKIHHLFMIKTLSKMDIKGTYLKVIKIIYDKPTANIILNGEKFKAFPQRTGAKQGCPLSRLLNIVLEVLATAVRQVKEIKGTEIAKEEAKLLLFADNMIVYLENPKDSSKNFLELVNEFSKVLGYKIKIHSQ

SEQ ID NO: 46934 - protein, 304 aa, Homo sapiens
MQIRQQWRKDLDHNTQVLQKPSQEGWLQTNPDCEDYNRYLILQCLDNNEHTDGLTPHTAGYSSETKLPEEQSGSSICGSPISTVLQPPLLIPRQTGSGVDLQQTPTDLLLRVLTVRRKTNKQKGHQYQKPICTSPSSKTKDGGKNRAEKPETKNQSTSPPPKEHSSSPAMEQSWMENDFDELREEGFRRSNYSELKEEVRTNAKEVKNFEKKLDEWITRITNAEKSLKDLMELKTTARELRDECTSPSSQCNQLEERISAMEDKMNEMKREEKFREKRIKRKETKPPRNMGLCEKTKSMSDWCT

SEQ ID NO: 46935 - protein, 140 aa, Homo sapiens
  misc_feature (1)...(140): Xaa = X or * as defined in Table 2
XLCCWIARQIGSGVDLQQTPTDLQLRVLTVRRKTNKQKGHPHQNPICTSPSSKTKEQSWMENDFDDLREEDFRQSNYSKLQEEVRNHGKEVKNLEKRLDKWLTRITNAEKSLKDLMELKTMARELRDECRSLSSRFDQLE

SEQ ID NO: 46936 - protein, 503 aa, Homo sapiens
  DOMAIN (106)..(123): BAND 41 PROTEIN FAMILY SIGNATURE domain identified by eMATRIX, accession number PR00935D, p-value=2.800e-17, raw score of 10.20
  DOMAIN (128)..(503): Ezrin/radixin/moesin family domain identified by PFam, accession name ERM, E-value=5.7e-241, PFam score of 813.9
MPKPIIGRDTTRDAELEFDIQPNTTGKQLFDQAEKTVGLQTAVLLASYAVQAKYGDYNKEIHKPGYLANDRLLPQRVLEQHKLTKEQWEERIQNWHEEHRGMLREDSMMEYLKIAQDLEMYGVNYFEIKNKKGTELWLGVDALGLNIYEHDDKLTPKIGFPWSEIRNISFNDKKFVIKPIDKKAPDFVFYAPRLRINKRILALCMGNHELYMRRRKPDTIEVQQMKAQAREEKHQKQLERAQLENEKKKREIAEKEKERIEREKEELMERLKQIEEQTIKAQKELEEQTRKALELDQERKRAKEEAERLEKERRAAEEAKSAIAKQAADQMKNQEQLAAELAEFTAKIALLEEAKKKKEEEATEWQHKAFAAQEDLEKTKEELKTVMSAPPPPPPPPVIPPTENEHDEHDENNAEASAELSNEGVMNHRSEEERVTETQKNERVKKQLQALSSELAQARDETKKTQNDVLHAENVKAGRDKYKTLRQIRQGNTKQRIDEFEAM

SEQ ID NO: 46937 - protein, 79 aa, Homo sapiens
  DOMAIN (24)..(44): ERM FAMILY SIGNATURE domain identified by eMATRIX, accession number PR00661A, p-value=6.677e-15, raw score of 12.48
  DOMAIN (14)..(39): FERM domain (Band 4.1 family) domain identified by PFam, accession name Band_41, E-value=1.2e-10, PFam score of 35.6
MKLKTYIKGHKINVRVTTMDAELEFAIQPNTTGKQLFDQGYIGEWQVGTQTVCIVPDALLPKQHKANVTLRKKAPSLTR

SEQ ID NO: 46938 - protein, 89 aa, Homo sapiens
  misc_feature (1)...(89): Xaa = X or * as defined in Table 2
FREDGKTACGHEPSPVLLGLRLGLQPWGXGWGCSHGAGSAPDLVAGSAHSCGLWLPGSLHHHPAQCLPALLCGHLCLSVQDQQNGLLGR

SEQ ID NO: 46939 - protein, 149 aa, Homo sapiens
  DOMAIN (12)..(39): Protamine P1 proteins domain identified by eMATRIX, accession number BL00048, p-value=1.113e-09, raw score of 6.39
  misc_feature (1)...(149): Xaa = X or * as defined in Table 2
ASSRTRPSCTLARGRRWFPQPLSGRQRQRGGRRGSRVGYGTAQNSTTLTSPAASASEATVSGHWPSTAPCCVPAGAGSATMWRSPAXAACGSAAWTSTWSRRSPGPGAAAGYGGVRTFCQPAGLTRLANRSTAGLCGWGLTLSCRETEL

SEQ ID NO: 46940 - protein, 903 aa, Homo sapiens
  DOMAIN (95)..(129): !!!! PROTEIN ALU SUBFAMILY WARNING ENTRY NUCLEAR PHOSPHO domain identified by eMATRIX, accession number PD02454A, p-value= 8.200e-37, raw score of 20.81
  DOMAIN (40)..(344): Rel homology domain (RHD) domain identified by PFam, accession name RHD, E-value=2.2e-181, PFam score of 522.1
PRDMESCYNPGLDGIIEYDDFKLNSSIVEPKEPAPETADGPYLVIVEQPKQRGFRFRYGCEGPSHGGLPGASSEKGRKTYPTVKICNYEGPAKIEVDLVTHSDPPRAHAHSLVGKQCSELGICAVSVGPKDMTAQFNNLGVLHVTKENMMGTMIQKLQRQRLRSRPQGLTEAEQRELEQEAKELKKVMDLSIVRLRFSAFLRASDGSFSLPLKPVISQPIHDSKSPGASNLKISRMDKTAGSVRGGDEVYLLCDKVQKDDIEVRFYEDDENGWQAFGDFSPTDVHKQYAIVFRTPPYHKMKIERPVTVFLQLKRKRGGDVSDSKQFTYYPLVEDKEEVQRKRRKALPTFSQPFGGGSHMGGGSGGAAGGYGGAGGGGSLGFFPSSLAYSPYQSGAGPMGCYPGGGGGAQMAATVPSRDSGEEAAEPSAPSRTPQCDAQAPEMLQRAREYNARLFGLAQRSARALLDYGVTADRRALLAGQRHLLTAQDENGDTPLHLAIIHGQTSVIEQIVYVIHHAQDLGVVNLTNHLHQTPLHLAVITGQTSVVSFLLRVGADPALLDRHGDSAMHLALRAGAGAPELLRALLQSGAPAVPQLLHMPDFEGLYPVHLAVRARSPECLDLLVDSGAEVEATERQGGRTALHLATEMEELGLVTHLVTKLRANVNARTFAGNTPLHLAAGLGYPTLTRLLLKAGADIHAENEEPLCPLPSPPTSDSDSDSEGPEKDTRSSFRGHTPLDLTCSTKVKTLLLNAAQNTMEPPLTPPSPAGPGLSLGDTALQNLEQLLDGPEAQGSWAELAERLGLRSLVDTYRQTTSPSGSLLRSYELAGGDLAGLLEALSDMGLEEGVRLLRGPETRDKLPSTTEVKEDSAYGSQSVEQKAEKLGPPPEPPGGLCHGHPQPQVH

SEQ ID NO: 46941 - protein, 604 aa, Homo sapiens
MAFWVGETVFLLWNSLNDPLFGWLSDRQFLSSQPRSGAGLSSRAVVLARVQALGWHGPLLALSFLAFWVPWAPAGLQFLLCLCLYDGFLTLVDLHHHALLADLALSAHDRTHLNFLARHRNFLWFVSMDLVQVFHCHFNSNFFPLFLEHLLSDHISLSTGSILLGLSYVAPHLNNLYFLSLCRRWGVYAVVRGLFLLKLGLSLLMLLAGPDHLSLLCLFIASNRVFTEGTCKLLTLVVTDLVDQDLVLNHRKQAASALLFGMDALVTKPGHTFAPLLGTWLLCFYTGGCHMTCYMPHALPPPRARGRAKHTAKEAGLVRPLQGQSEKILLRTRNRQPMEPPMEPSGGEQEPGAVRFLDLPWEDVLLPHVLNRVPLRQLLPAAARGSADPAGRIGPAAAGCRGAAGAGTGAVSRMAVRRGPGAGAGAESEACEMWRWAGCGQLSRRALGALAEGCPRLQRLSLAHCDWVDGLALRGLADRCPALEELDLTACRQLKDEAIVYLAQRRGAGLRSLSLAVNANVGDAAVQELARNCPELHHLDLTGREEGSHLASAGADIHAENEEPLCPLPSPPTSDSDSDSEGPEKDTRSSFRGHTPLDLTCSTK

SEQ ID NO: 46942 - protein, 118 aa, Homo sapiens
RVGAGAACYPAVRAGGGAQFRGRRRSKSRTGMDRGVGLTADQKLELVQKEVADMKDDLRHTRANAERDLQHHEAIIEEAEIRWSEVSREVHEFEKDILKAISKKKGSILATQKVMKYI

SEQ ID NO: 46943 - protein, 75 aa, Homo sapiens
SWRSLIPGLQFSVIFLKHLSLSFESRVYIAELLHQPAQLDNRQLQLRPFMGVGEDALGLIISHHSAEAAPANACA

SEQ ID NO: 46944 - protein, 212 aa, Homo sapiens
  DOMAIN (32)..(68): Ribosomal protein L11 proteins domain identified by eMATRIX, accession number BL00359A, p-value=4.000e-21, raw score of 20.66
  DOMAIN (26)..(157): Ribosomal protein L11 domain identified by PFam, accession name Ribosomal_L11, E-value=4.5e-47, PFam score of 169.8
RIRVHPTPAAFTMPPKFDPNEIKVGYLRCTGGEVGATSALAPKIGPLGLSPKKVGDDIAKATGDWKGLRITVKLTIHNRQAQIEVAPSASALIIKALKEPPRDRKKLKILKLSGNITFDENGNICSTDMRHRSLSRELSGTTKEILGTAQSVGCNVDGRHPHDIIDDINSENDKQPRKSKMRTSFSPQIPGHEHFHYLLLLQHVHCQLALTL

SEQ ID NO: 46945 - protein, 210 aa, Homo sapiens
  misc_feature (1)...(210): Xaa = X or * as defined in Table 2
VYLEVAPGGESRLPLSALGPQRIGPPGSCLPKKSWVNDICQRQPGDWKGPXGLQVKLTHSRTGQAPDCTRVPVLPSCPXFIQSPSREPPKRPEKKPEKTFKHQLGIFTFLNEICSTLLRQMRHRSLSPEKLSGTPLKEIPGGLPQSSWAGNVXWAAIPHDIIDDIQQWVLWKCPAVSDIFIVTVGVKGGPPSVFTEISWEVLEMVTGGVG

SEQ ID NO: 46946 - protein, 237 aa, Homo sapiens
FINNRDYCSQIWRLESPRLKGQDIWCLVKVKHSDTCNDYSDSSSLQESYVRDKHSEASWSVLESYVRDKHSDPSSSVVESYVRDKLSNPCSSVLESYVRDKNSEPCSSVLESYGYSDTSHSVLESYVTDKLSDHSMNILESYVMDKRSDHSSSVLQSNVRDKHLEPSRSVLESYVTDKHSDHSRRVLESYVRYKLSDHSRRVLESYVRDKHSDPRSSVLKSYVKCKHSHPRVNVLES

SEQ ID NO: 46947 - protein, 60 aa, Homo sapiens
PVMFLWIRNRSYPNVKRKMVASLRLCAARGAHSILATCTDARPRRETCFASVLKPLKVMF

SEQ ID NO: 46948 - protein, 121 aa, Homo sapiens
  DOMAIN (63)..(78): WILM'S TUMOUR PROTEIN SIGNATURE domain identified by eMATRIX, accession number PR00049D, p-value=8.639e-11, raw score of 0.00
VSTPRSTKSQGRNHFPFHVWIASVPYPQKHYRKHSEAGCSWCPPGWPPSSASRPAAAGSRSTGTPAASPPQPPPPPPAAPSPCRPPTRLRSWSSTCSPTSATAGGGSSLRRVSCPTARSRC

SEQ ID NO: 46949 - protein, 14 aa, Homo sapiens
KLNSSLCPPFCPRP

SEQ ID NO: 46950 - protein, 152 aa, Homo sapiens
  DOMAIN (62)..(77): WILM'S TUMOUR PROTEIN SIGNATURE domain identified by eMATRIX, accession number PR00049D, p-value=8.639e-11, raw score of 0.00
APRRSTKSQGRNHFPFHVWIASVPYPQKHYRKHSEAGCSWCPPGWPPSSASRPAAAGSRSTGTPAASPPQPPPPPPAAPSPCRPPTRLRSWSSTCSPTSATAGGGSSLRRVSCPTARSRCICPCRRTHSRQRILCYTSVTERLPLPTNRPRP

SEQ ID NO: 46951 - protein, 139 aa, Homo sapiens
  DOMAIN (59)..(98): Ribosomal protein S7e proteins domain identified by eMATRIX, accession number BL00948C, p-value=1.000e-40, raw score of 11.15
  DOMAIN (1)..(139): Ribosomal protein S7e domain identified by PFam, accession name Ribosomal_S7e, E-value=8.4e-83, PFam score of 288.5
AAKEIEVGGGRKAIKSFQKIQVRLVRELEKKFSGKHVVFIAQRRILPKPTRKSRTKNKQKRPRSRTLTAVHDAILEDLVFPSEIVGKRIRVKLDGSRLIKVHLDKAQQNNVEHKVETFSGVYKKLTGKDVNFEFPEFQL

SEQ ID NO: 46952 - protein, 293 aa, Homo sapiens
  DOMAIN (194)..(217): Ribosomal protein S7e proteins domain identified by eMATRIX, accession number BL00948A, p-value=6.073e-12, raw score of 14.13
  DOMAIN (192)..(293): Ribosomal protein S7e domain identified by PFam, accession name Ribosomal_S7e, E-value=6e-14, PFam score of 59.8
MPMDGPLSMAPGSKVAPRQSYPYPQERALDLLKNLLISTVPHAIRNDDGTDDHHNCPEQKAGNYRYSRQKFLCLVILTTWAESASSALTTAAFKWPPQTFDTIRSSVFRENFTDLGIHLQTGGLSGKSVNADEGVWKIADTFRSDCPQLCPDLLQRQPSAHMESLMSYAGDRGKQPLHPGPALSKEKATFSLNTRITKPNGKKPDKFKFGISQALLEPKMNVDLKAQLRELNITAAKETEVGGSQKAIIIFVPVSRLKSSQKIQVWLVCELEKKFSEKHVVFIAQRRILPKPT

SEQ ID NO: 46953 - protein, 228 aa, Homo sapiens
  DOMAIN (11)..(34): Ribosomal protein S7e proteins domain identified by eMATRIX, accession number BL00948A, p-value=8.855e-12, raw score of 14.13
  DOMAIN (9)..(228): Ribosomal protein S7e domain identified by PFam, accession name Ribosomal_S7e, E-value=0.00019, PFam score of -16.5
  misc_feature (1)...(228): Xaa = X or * as defined in Table 2
HEEKAMFSSSAKIVKPNGEKPDEFESGHLPGLFLELEMNSDLKASAQGTXIITASXRKLKVGGCSESLFHXSFVPRSLKLKTFPQKNPKVRAXLRRIGKKKVPVGKAMSVLYPPSEGEFLPLSPTSEKARTKKXAKSRPPGARTLDKLVHDAHPLRDFGPFPSGNFWAKRIPRSNLDGQPGSIKVPFWTKAQQNQCWNTRVETFFLVSYKKLTGQGCXFLEFPRVFNC

SEQ ID NO: 46954 - protein, 265 aa, Homo sapiens
  misc_feature (1)...(265): Xaa = X or * as defined in Table 2
TLLVIPRKMRSAVELQQTSTDLQLRDLTVRKKTNKRKATASTSQKGHLHQNPICRSPTSKTKEVGFRRSVITNFSELKEDVRTYHKEAKNLENRLDEWLTRINSVEKTLNDLKELKTMARDLHDACTSFNRRFDQVEERVTVTEDQINXQTESNSINFTKRSSTPKPHLRSPTSKTKEVGFRRSVITNFSELKEDVRTYHKEAKNLENRLDEWLTRINSVEKTLNDLKELKTMARDLHDACTSFNRRFDQVEERVTVTEDQINEI

SEQ ID NO: 46955 - protein, 206 aa, Homo sapiens
MWEILELPRDLLNGFAQNADSNMDNKVQAEVALDGNGELVGYYSKASAGDTQANRVWSGPPANSNRPAAEGPERNTININKKDINTKTPSVGHRHQRPKVDKTTKTRRNKSRKAENSKNQSASYLPKDCSSSSAMKQSWMENDFDELTEGAFRRSVITNFSELKEDVQTHHKEAKNLEKRLDKWLTRINSVEKTLNDLMENGMGNT

SEQ ID NO: 46956 - protein, 24 aa, Homo sapiens
  misc_feature (1)...(24): Xaa = X or * as defined in Table 2
SCNSIFARSVRACCSXVASSSFCC

SEQ ID NO: 46957 - protein, 263 aa, Homo sapiens
  misc_feature (1)...(263): Xaa = X or * as defined in Table 2
IKYSSPMKSTFVDPVDPVAVAVIYCLAAGLVIIRIPFFQLVPLKEEKMVLLNMDYYEMASLSLVTHRNEAPFSGRVRSSLPATEQSWMENDFDKLTEVGFRRSVITNFSELKEHVLTHHKEAKNLEKRLDKWQTRINSVEKTLNDLMELKTMAXEEKMVLLNMDYYEMASLSLVTHRNEAPFSGRVRSSLPATEQSWMENDFDKLTEVGFRRSVITNFSELKEHVLTHHKEAKNLEKRLDKWQTRINSVEKTLNDLMELKTMA

SEQ ID NO: 46958 - protein, 194 aa, Homo sapiens
  misc_feature (1)...(194): Xaa = X or * as defined in Table 2
LALSGEMTLVLFMLLAGGWVTHDKPEPMPRAATSGGTRKGKTKAALKDLIATWKEVCVSSPATEQSWMENDFDELTEVGFRRSVITNFFKLKEYVLTHHKEAKNLEKMLDEWLTRINSVEKTLNDLMELKNMAXELTEVGFRRSVITNFFKLKEYVLTHHKEAKNLEKMLDEWLTRINSVEKTLNDLMELKNMA

SEQ ID NO: 46959 - protein, 225 aa, Homo sapiens
MDIYTKAPSVGHQYQRQKVDKTTKVGRNQNRKVENSKTQSATSPLKDHSSSPAMEQSWTENDFDELTEVGFRRSVITNFSELKEHVLTHRKEAKNLEKRLDEWLTRINSVEKNLNDLMELKTMARELCDTCTSFNSRCNQVEEKVSVIEHQINEIKQEDKVREKRVKRNEQSLQEIWDCVKRPNLCLIGVPESDGENGTKLENTLQDIIQENFPNLARQANIQIQ

SEQ ID NO: 46960 - protein, 655 aa, Homo sapiens
MVEGKEEQVTSYMDGSRQRESLCREPPPYKTVRSHETYSLSREQPHDSITFHWVPPQHVGIQDEICVGTQPNHIMGSGLGVSELRLSLGEAYRGCSGEWGVVLRPMELCSQVDYGSLCCIMQVTREFFGCLQRPVAAIHSLQRVCGLSLLPWYIPAVVLGAKVYDVSLHTLLCSSKWELQQEKQVYWKLCRGAQLVPDIPLAFTGWRPLSGDQRLEYESSEDPGILSPKQLLYAGVSLVTPPLKAFSGPALPPHSPGSVQPNWTHPASLSPLALGTKGAYGDSCWRQSAKEEQLPRQWKDRAIEVRAPEGRAAWSPSPPDGSLPSTLGILLGEDHLGPEGSEAHVVGTSRPSFRVAVTATHAVNGQPQPTLRRCNGGTTKEAETRKAYDIDYLGLCRKKLLLLDSEQPSSCPHRGVGEVGLKFWGTSANGHQGSRPGQSTGQCPRLPAQQLDTVHTVLAPGVKLPAQAAVQAVNHSSLPVMEQSWTKNDFDELTEVGFRRSVITNFSELKEHVLTHYKEDKNLEKRLDEWLTRINSVEKILNDLTELKTMAGELHDACTSFNRRCNQVQERISVIEDQINEIKLYMYLSVVAKTEQEVYFISYSFCMEEWVGKAGGCTEEEGWNRDHEDSDLIEKKRQSGEAITSGDQAASFNTV

SEQ ID NO: 46961 - protein, 1024 aa, Homo sapiens
  DOMAIN (402)..(457): kw TRANSCRIPTASE REVERSE II ORF2 domain identified by eMATRIX, accession number DM01354Q, p-value=1.000e-40, raw score of 9.23
  DOMAIN (355)..(630): Reverse transcriptase domain identified by PFam, accession name rvt, E-value=3.3e-85, PFam score of 296.5
MVKGSIQQEELTILNIYAPNTGAPRFTKQVVSDLKRDLDSHTLIMGDFNTPLSTLDRSTRQKVNKDTQELNSALHQVDLIDIYRTLHSKSTEYTFFSAPHHTYSKTDHKLGSKALLSKCKRTEIITNCLSDHSAIKLELRIKNLTQNRSTTWKLNNLLLDDFWVHNEMKTEIKMFFETNKNKDTIYQNLWDTFKAVCRWKFIALNAHKRKQERSKIDTLTSKLKELEKQEQTHSKASRRQEITKIRAKLKEIETQKTLQKINESRRWFFERISKIDRPLARLIKKKREKNQIDAIKNDKGDITTDPTEIQTTIREYYKHLYANKLENLEEMDKFLDTYTLPRLNQEEVESLNRPIKKNEGILPNSFYEASIILIPKPGRDTTKKENFRPISLMNIDAKILNKILANRIQQHIKKLIHHDQVGFIPGMQGWFNIRKSINVIQYINRTKDKNHMIISIDAEKAFDKIQQRFMLKTLNKLGIDGTYFKIIRAIYDKPTANIILNGQKLEAFPLKTSTRQGCPLSPLLFNRVLEVLARAIRQEKEIKGIQLGKEEVKLSLFADDMIVYLENPIVSAQNLLKLISNFSKVSGYKINVQKSQAFLYTNNRQTESQIMSELPFTIASKRIKYLGIQLTRDVKDLFKENYKPVLKEIKEDTNKWKNIPCSWVGRINIVKMATLPKVIYGFNAIPIKLSMTFFTELEKTTLKFIWNQKRASIAKSILSQKNKAGGITLPDFKLYYKATVAKTAWYWYQHRDTDQWNRTEASQITPHIYNYLIFDKPKKNKQWGKDSLFNKWCWENWLAICRKLKLDPFLTPYTKINSKWIKDLNVRPKTIKTLEENLDITIQDIGMGKDFMSKTPKAMATKAKIDKWELIKLKSFCTAKETTIRVNRQPTKWEKIFATCSSDKGLISRIYNELKQIYKKKTNNPIKKWVKDMNRHFSKEDIYAAKKHMKKCSPSLAIREMQIKTTMRYHLTPVRMAIIKKSGNNRKLLKDVLYPNRRVNQERDRYEIQETGSNIGEKQRKFPG

SEQ ID NO: 46962 - protein, 24 aa, Homo sapiens
  misc_feature (1)...(24): Xaa = X or * as defined in Table 2
CAAGFGLPVFYXGFLHRCSLGILV

SEQ ID NO: 46963 - protein, 302 aa, Homo sapiens
  DOMAIN (182)..(227): kw TRANSCRIPTASE REVERSE II ORF2 domain identified by eMATRIX, accession number DM01354N, p-value=1.000e-40, raw score of 13.17
  misc_feature (1)...(302): Xaa = X or * as defined in Table 2
MAVPGEALLFHDPLRQTGAILEEAENAESETEGDDNEARWNLAVNPSGPGLFLVGKDTFKAVCRGKFIALNAHKRKQERSKIDTLTSQLKEQEKQEQTHSKASRRQEITKIGAELKEIETQKTLQKINESRSWCFGKINKIDRPLARLIKKKREKNQIDAIKNDKGDITTDPTEIQTTIREYYKHLYANKLENLEEMDKFLDTHTLPRLNQEEVESLNRPITGSEIVAIVWFFKKYIVVGRKKYTRRQFCHESTLNKGDKVIYNLTHPPYCCVRFSLAGMGPHILYLSQLARNLELLKRGKX

SEQ ID NO: 46964 - protein, 674 aa, Homo sapiens
  DOMAIN (46)..(75): MYOSIN HEAVY CHAIN SIGNATURE domain identified by eMATRIX, accession number PR00193D, p-value=5.154e-36, raw score of 14.36
  DOMAIN (2)..(350): Myosin head (motor domain) domain identified by PFam, accession name myosin_head, E-value=8.9e-153, PFam score of 521.0
EQEASYGRDAFAKAIYERLFCWIVTRINDIIEVKNYDTTIHGKNTVIGVLDIYGFEIFDNNSFEQFCINYCNEKLQQLFIQLVLKQEQEEYQREGIPWKHIDYFNNQIIVDLVEQQHKGIIAILDDACMNVGKVTDEMFLEALNSKLGKHAHFSSRKLCASDKILEFDRDFRIRHYAGDVVYSVIGFIDKNKDTLFQDFKRLMYNSSNPVLKNMWPEGKLSITEVTKRPLTAATLFKNSMIALVDNLASKEPYYVRCIKPNDKKSPQIFDDERCRHQVEYLGLLENVRVRRAGFAFRQTYEKFLHRYKMISEFTWPNHDLPSDKEAVKKLIERCGFQDDVAYGKTKIFIRTPRTLFTLEELRAQMLIRIVLFLQKVWRGTLARMRYKRTKAALTIIRYYRRYKVKSYIHEVARRFHGVKTMRDYGKHVKWPSPPKVLRRFEEALQTIFNRWRASQLIKSIPASDLPQVRAKVAAVEMLKGQRADLGLQRAWEGNYLASKPDTPQTSGTFVPVANELKRKDKYMNVLFSCHVRKVNRFSKVEDRAIFVTDRHLYKMDPTKQYKVMKTIPLLQLTCLNVSNGKDQLVVFHTKDNKDLIVCLFSKQPTHESRIGELVGVLVNHFKSEKRHLQVNVTNPVQCSLHGKKCTVSVETRLNQPQPDFTKNRSGFILSVPGN

SEQ ID NO: 46965 - protein, 555 aa, Homo sapiens
  DOMAIN (306)..(334): MYOSIN HEAVY CHAIN SIGNATURE domain identified by eMATRIX, accession number PR00193C, p-value=1.692e-30, raw score of 12.60
  DOMAIN (195)..(351): Myosin head (motor domain) domain identified by PFam, accession name myosin_head, E-value=5.6e-89, PFam score of 309.0
METQKTLQKINESRSWFVEKINKIDRPLARLIKKKREKNQIDTIKNDKGDITTDPTEIQTTIREYHKHLYANKLKNLEEMDKFLDTYTLPRLNQEEGIQLTRVVKDLFKENKPLLNEIKEDKNKWKNIPCSWIGRINIVKMAILPKVNRFSKVEDRAIFVTDRHLYKMDPTKQYKVMKTIPLYNLRLPFLLLLYRFEKGRIYTFIGEVVVSVNPYKLLNIYGRDTIEQYKGRELYERPPHLFAIADAAYKAMKRRSKDTCIVISGESGAGKTEASKYIMQYIAAITNPSQRAEVERVKNMLLKSNCVLEAFGNAKTNRNDNSSRFGKYMDINFDFKGDPIGGHINNYLLEKEMSICVLGFPLSYASLISIGPVTCHACTHARTHHMPCPTCLRDWMNMTVPPSWQELSQPDDCLGKEVFSYIQSHWKNRNEQVHMIPVLMELAVKVKVSTPLPHNQNQTVPVAKVIYPNQTKLCAISKMLLALELSLKVSYIPSPHSHSECASTFYALRLQNLTNFNIQENRRDGNKGGKNGLQIQLKPNGRKGSGFHQDPTDKV

SEQ ID NO: 46966 - protein, 60 aa, Homo sapiens
  misc_feature (1)...(60): Xaa = X or * as defined in Table 2
FLFFYICXRELYFQLCGQFWNKCNVLLRRMYILLIWGGEFCRYQLGLLGAELNSVPGYHC

SEQ ID NO: 46967 - protein, 128 aa, Homo sapiens
  DOMAIN (75)..(95): Eukaryotic protein kinase domain identified by PFam, accession name pkinase, E-value=0.0035, PFam score of 15.4
MACRVLQGLPFACLSSPICSHSALTLDHSLLCLNFFFNPYALLPNFYLFGKFQLRIPSSGKPFLTSEDQDPAGIFELVEVVGNGTYGQVYKVRRMVWKYDLHICRAVLGGVEGSRFLVCRSEGGYGRC

SEQ ID NO: 46968 - protein, 212 aa, Homo sapiens
MAGKSTSEWPLRAQKPENEINEPQVADAAKNTEVCDELMSRHNIYVQAINYPTVPRGEELLRIAPTPHHTPQMMNYFLAVINHKKRKNSPRIVQSNDLTEAAYSLSRDQKRMLYLFVDQIRKSDGTLQEHDGICEIHVAKYAEIFGLTSAEASEPGNPRQHRYPQSPRSGPLCPAPPARRGLRGAPAQKKAAPKAHAQRSLPLYIKAPAIAA

SEQ ID NO: 46969 - protein, 180 aa, Homo sapiens
  DOMAIN (82)..(99): PWWP domain proteins domain identified by eMATRIX, accession number PF00855, p-value=8.116e-18, raw score of 13.75
  DOMAIN (77)..(153): PWWP domain identified by PFam, accession name PWWP, E-value= 1.1e-10, PFam score of 49.0
LFPVVSVCSIDSTDDLKSSNSECSSSESFDFPPGSMHAPSTSSTSSSSKEEKKLSNSLKMKVFSKNVSKCVTPDGRTICVGDIVWAKIYGFPWWPARILTITVSRKDNGLLVRQEARISWFGSPTTSFLALSQLSPFLENFQSRFNKKRKGLYRKAITEAAKAAKQLTPEVRALLTQFET

SEQ ID NO: 46970 - protein, 58 aa, Homo sapiens
GLTDTSNRQVSLWTKLPEEGSGSNICCSVASAGDTQANRVCSGPPANSNRPAAEGRDH

SEQ ID NO: 46971 - protein, 47 aa, Homo sapiens
  misc_feature (1)...(47): Xaa = X or * as defined in Table 2
MKISDMATLITTVPAASPARVTGTXQPPLRVQKKSEGYTYVPPSWTC

SEQ ID NO: 46972 - protein, 418 aa, Homo sapiens; identical to SEQ ID NO: 46564

SEQ ID NO: 46973 - protein, 359 aa, Homo sapiens
MEGLINPTLLTKAWIITLKEGDCKWETLVNGLHGTPGALECLGALAAAAGLTHPTWPLGVASACCEHNQVPQLGGEKENSGHVNELNDSKYEDFIANESDSQLERRWSGKWSLGFLWIQHGGQGGTWVVFEKATIGAGKQEYMSSICATVLGLSVGFARLCFQWSGALVEKSEGFRSKMAKQEQLRSAAPSVINTEDRWFLHFQLRYLVHLIGTERNSINIDKKDIHTKTPSVGHHHQRPKVDKTIKMGRKQSRKAENSKHQSTHSPPKDCSSLPEMEQSRKENNFEVLREEAFRKSVTTNFSELKEDVQTHRKEAKNLEKRLDKWLTRINSVEKTLNDLMELKTMARELHDACTSFSS

SEQ ID NO: 46974 - protein, 293 aa, Homo sapiens
  DOMAIN (166)..(211): kw TRANSCRIPTASE REVERSE II ORF2 domain identified by eMATRIX, accession number DM01354N, p-value=1.000e-40, raw score of 13.17
  misc_feature (1)...(293): Xaa = X or * as defined in Table 2
AQNXQTQRTSTPKPHLSSPSTKTKENDFDELREEGFRRSVITNFSKLKEDVRTHRKEAKNLEKRLDEWLTRINSVEKTLNDLMELKTMAQELRDTYTSFSSRFDQVEERVSVIEDQMNDMKREEKFRELKRVQRNEQSLQEIWDYVKRTNLRLIGVPEKIQTTIREYYKHLYANKLENLEEMDKFLDTYTCPRLNQEEVESLNRPVTGSEIEAIINSLPTKKVQDQADSQPNSTRVFKTVCISSLGHTTASADTQDVCQLPVTSLLEQGLSSKSAGFLDYAVQRLWLLGTEPL

SEQ ID NO: 46975 - protein, 76 aa, Homo sapiens
HESLLSHDYSGGDMKRSRMGKGCKEWASAAGSKGCGPRSMSPQDKLGLLKEPLFPQSGSSSQQSDAGTPGAEAPRH

SEQ ID NO: 46976 - protein, 517 aa, Homo sapiens
QWEQPTVMRWPRRPHSTPTSDVHIHQEFCPGQAPAHLLLCAAAPGHPGQGQQPACWLASWVMQIVLGILSAVLRKDFSTSATTPSSSPRELPSGKGAVAVLAGAAAFIYEKRGGTYWALLRTLLTLAAFSTAIAALKLWNEDFRYGYSYYNSACRISSSSDWNTPAPTQSPEEVRRLHLCTSFMDMLKVGGQGEGAAAGLVQNPSGHALGCLDSAASGISDPSVAVLLENVPNQRGESLRCVPVYLGQWNCSKETGMDSGQFGEEKGAHDPSPTYYHACLSTQWWPSPESPYPQPSGPQVKEPRNPGKSISMLCLWIRYHAADSGSSRAKLPLEERLRPFSPTHDCLAFPLPLEKRPEGNVGSRCPSGTKLPEEGSGSNICCSAIFPVLQPPLVIPRQTRSGVDLQQTPTDLQLRDLTDRSSLPAMEQSWIENDFDEMTDRLQKEDVRIHRKEAKNLEKRLDKWLTRINSVEKSLNDIMELKTMARELREACTSFSSRFDQVEERVSVIEDQINEIK

SEQ ID NO: 46977 - protein, 90 aa, Homo sapiens
  misc_feature (1)...(90): Xaa = X or * as defined in Table 2
TMRTHGHRKGNIXQRRXXPESTKNSNKFTRKNQTTPSKREWMKLETIILSKLSQGQKSKHRMFSLISGNXTMRTHGHRKGNITHWGLLWG

SEQ ID NO: 46978 - protein, 293 aa, Homo sapiens
  DOMAIN (213)..(252): Ribosomal protein S7e proteins domain identified by eMATRIX, accession number BL00948C, p-value=1.000e-35, raw score of 11.15
  DOMAIN (121)..(293): Ribosomal protein S7e domain identified by PFam, accession name Ribosomal_S7e, E-value=6.7e-102, PFam score of 351.9
MARTWEAELAVSPDGATALQPGRQSETLSQKKKKKEEEEEEEEEEEEEEEEEEEEEEEEEEEEEEEEEEEEEEEEEEEEEEEEGEEEEGEEEEDQLDTMLWDSSTNLTNTALSKEKTMFSSRAKIVKPNGEKPDEFESGISQALLELEMNLDLKAQLWELNITAAKEIEVGGGRKAIIIFVPVPQLKSFQKTQVQLRRILPKPTQKSCTNNKQKLPRSCTLTAVHDAILEDLVFPSEIVGKRIHVKLDGSHLIKIHLDEAQQNNVEHKVEPFSGVYKKLMGKDVNFEFPEFQL

SEQ ID NO: 46979 - protein, 67 aa, Homo sapiens
  misc_feature (1)...(67): Xaa = X or * as defined in Table 2
KNAHHQWPSKKCKSKLQXDTISHQLEWQSLKSQETTGTRMKMETITLSKLSQGQKSKHCMFSLIGGN

SEQ ID NO: 46980 - protein, 415 aa, Homo sapiens
  DOMAIN (48)..(97): KINASE DEHYDROGENASE TRANSFERASE domain identified by eMATRIX, accession number PD01976B, p-value=1.000e-40, raw score of 15.19
  misc_feature (1)...(415): Xaa = X or * as defined in Table 2
AGLCAARARMRLFRWLLKQPVPKQIERYSRFSPSPLSIKQFLDFGRDNACEKTSYMFLRKELPVRLANTMREVNLLPDNLLNRPSVGLVQSWDMQSFLELLXYENKSPEDPQVLDNFLQVLIKVRDRHNDVVPTMAQGVIEYKEKFGFDPFISTNIQYFLDRFYTNRISFRMLINQHTLLFGGDTNPVHPKHIGSIDPTCNVADVVKDAYETAKMLCEQYYLVAPELEVEEFNAKAPDKPIQVVYVPSHLFHMLFELFKNSMRATVELYEDRKEGYPAVKTLVTLGKEDLSIKISDLGGGVPLRKIDRLFNYMYSTAPRPSLEPTRAAPLAGFGYGLPISRLYARYFQGDLKLYSMEGVGTDAVIYLKALSSESFERLPVFNKSAWRHYKTTPEADDWSNPSSEPRDASKYKAKQ

SEQ ID NO: 46981 - protein, 97 aa, Homo sapiens
  DOMAIN (33)..(46): KINASE DEHYDROGENASE TRANSFERASE domain identified by eMATRIX, accession number PD01976A, p-value=2.588e-16, raw score of 8.95
AGLCAARARMRLFRWLLKQPVPKQIERYSRFSPSPLSIKQFLDFGEYGAKGPHGPGAAAIRAATPDLRSFGVKSGDTETASHCRTLIAGETPQTCGR

SEQ ID NO: 46982 - protein, 47 aa, Homo sapiens
  misc_feature (1)...(47): Xaa = X or * as defined in Table 2
FFLSFPPLCQSSXNQNLLPWICAKVCSFTPEVSKTTNPLEGRNSGHI

SEQ ID NO: 46983 - protein, 419 aa, Homo sapiens
  DOMAIN (74)..(95): Carboxylesterases type-B serine proteins domain identified by eMATRIX, accession number BL00122A, p-value=1.857e-16, raw score of 12.04
  DOMAIN (26)..(155): Carboxylesterases domain identified by PFam, accession name COesterase, E-value=3e-24, PFam score of 85.6
TMLRPQGLLWLPLLFTSVCVMLNSNVLLWITALAIKFTLIDSQAQYPVVNTNYGKIQGLRTPLPSEILGPVEQYLGVPYASPPTGERRFQPPESPSSWTGIRNATQFSAVCPQHLDERFLLHDMLPIWFTTSLDTLMTYVQDQNEDCLYLNIYVPMEDGVSGIGGFLVSLTSRMKLPTLAVSVTTLKDGVSRVCSFRYSDVSGISSFWWVRGLADFRNEAADLRVVIIVVRGDGTLKEDVTGVLQRTDEATFSKIPIGFIPLGRTSSLSHTLFAERGNKVQHITDATFAIVKGKTVPLDVLQMQEEYYKVLHPTGHNRSMPFPKIYTALLLHNDDYDGDDEDGDEEDGDDGDDDDGYDDGDGDNMVDEDGKSVGDFDDVGVEDDYLLVSSLAETKGQPEGKSELTYLPSTVQNSGDEKE

SEQ ID NO: 46984 - protein, 126 aa, Homo sapiens [sequence omitted]

SEQ ID NO: 46985 - protein, 93 aa, Homo sapiens
IQLPGHRSQGQAGASHTDARQQDPGNSHSDFVRHSHSLPCLERQDRRSAGHNGSATVPGTEACGRAYKAPAGHYHSGAGQSLPAASHRSFSSP

SEQ ID NO: 46986 - protein, 684 aa, Homo sapiens
  DOMAIN (506)..(554): TRANSCRIPTION PROTEIN DNA-BINDIN domain identified by eMATRIX, accession number PD02448B, p-value=1.802e-18, raw score of 10.17
  DOMAIN (489)..(530): HMG (high mobility group) box domain identified by PFam, accession name HMG_box, E-value=0.021, PFam score of -3.2
MSGKGRIRPCHAAAGLTPVPSTLGGKEGGREPTRTPERQGQPVVPPGVSRLQSEWKQPCPSRIPSRPLGTELLVFLPGGPPWRIPELVSGWLCNARKPTASFGPWHGARLGADESAPQEPAELSGWRKVSREKMAVGVTATQTSNQCGIKPAQTGSREGSGRGDEAPGRERRTARCPARKSPGPGLACVLVINREGEPHRGESTVSVLKNLLPGLNNSLEPLEAPGTPGLWTYHSGPCRFASSPLVCLRVPGPAATRGRQRRQCPHSRVKTPVDPQPIRPGHKPRATLLPTLSSLKPPGPRSLSVPGPSLMALPSSPVWSRPPTAHICAFGHSLVPIRNSHSDFVRHSHSLPCLERQDRRSAGPNGSATVPGTEACWSRIQSTRRPLSFRSRPEPPGCISSVIQQKNMETMNRRKHAEPHALTVHPEPDKQKGHRMARGGNNTTNSTTVRQAPGGHCWGKVLISPSSPELQGHSHRAGRSHGALWTAGPCSPKSCRTGGWSLLSESEKRPFVEEAERLRVQHKKDHPDYKYQPRRRKSAKAGHSDSDSGAELGPHPGGGAVYKAEAGLGDGHHHGDHTVFRVIVKMACGSPLLRDQHGNPTRHVCGSLWLPVEHAFRKDSGLETARGLRGSPGARCARVSPEATGDPDGPSLPTAPLPASPPHDGDHSGAGIHWALNDCSHKLP

SEQ ID NO: 46987 - protein, 201 aa, Homo sapiens
  DOMAIN (158)..(201): ubiE/COQ5 methyltransferase family proteins domain identified by eMATRIX, accession number BL01183D, p-value=8.535e-27, raw score of 27.71
  DOMAIN (1)..(200): ubiE/COQ5 methyltransferase family domain identified by PFam, accession name Ubie_methyltran, E-value=3e-10, PFam score of -23.6
MGVGDELGSLVLSVVRLQVHIQHADCHPGERDEEGRPSCGRDRPSSRETEDTPTTAIFDLDCRSAGSGSGKLALGAVLQPPKEVTIGRRPPTGINLSTIIRDDGVLVKILGISGKREHALCTSLQALPFPSLYDLYSFQVIPVLGEVIAGDWKSYQYLVESIRRFPSQEEFKDMIEDAGFHKVTYESLTSGIVAIHSGFKL

SEQ ID NO: 46988 - protein, 267 aa, Homo sapiens
  DOMAIN (74)..(119): ubiE/COQ5 methyltransferase family proteins domain identified by eMATRIX, accession number BL01183B, p-value=1.429e-37, raw score of 21.31
  DOMAIN (7)..(202): ubiE/COQ5 methyltransferase family domain identified by PFam, accession name Ubie_methyltran, E-value=5.5e-52, PFam score of 186.1
  misc_feature (1)...(267): Xaa = X or * as defined in Table 2
QHQRKQKRQLRAQQNLSWEEIAKEYQNEEDSLGGSRVVVCDINKEMLKVGKQKALAQGYRAGLAWVLGDAEELPFDDDKFDIYTIAFGIRNVTHIDQALQEAHRVLKPGGRFLCLEFSQVNNPLISRLYDLYSFRVIPVLGEVIAGDWKSYQYLVESIRRFPSQEKFKDMIEDAGFHKVTYESLTSGIVAIHSGFKLXFLCLEFSQVNNPLISRLYDLYSFQGHPCPGRGHRWRLEVLSVPCREVSEGFRLRKEFKDHDRRCRLSTR

SEQ ID NO: 46989 - protein, 136 aa, Homo sapiens
  DOMAIN (108)..(120): ubiE/COQ5 methyltransferase family proteins domain identified by eMATRIX, accession number BL01183C, p-value=5.295e-09, raw score of 10.77
GRPSWWGGERPSKPRNRRTPPTTAIFDLDCRSAGSGSGKLALGAVLQPPKEVTIGRRPPTGINLSTIIRDDGVLVKILGISGKREHALCTSLQALPFPSLYDLYSFQVIPVLGEVIAGDWKSYQYLVESIRRFPSQ

SEQ ID NO: 46990 - protein, 92 aa, Homo sapiens
  DOMAIN (41)..(90): Eukaryotic RNA polymerase II heptapeptide repeat proteins domain identified by eMATRIX, accession number BL00115Z, p-value= 2.456e-09, raw score of 3.12
EGRGLGTPFGVCCWNLCRDLGSLFLLALLSSLLTLCLGRHPVVALMAASSSRLSSSHSASQSSSSSSPESDSGSTGTSSSSPMVPIKPRSAS

SEQ ID NO: 46991 - protein, 225 aa, Homo sapiens
  misc_feature (1)...(225): Xaa = X or * as defined in Table 2
GKVHVLERRGFHRTEMHLQKILLLPVLSSSSSSDPSTLSVSALVRMFSSADEXSVSEASSSEPSSSFSRRSSCSFGSEPSFASFSFSSFPDLASLSSVFLLFRAFSSSHVMXWLPSSSXVGSSTSARAQLPSYVPSFSVKTKSGLKSALRFFPKAFCRLPSTMGPSSSSSPESDSALHRHLVILDVWLQIKPRVRKPCCRRSHFRKRAQPAVRPLTFRSLLVVLR

SEQ ID NO: 46992 - protein, 52 aa, Homo sapiens
LSLKRPFVQSGCWLSCEFLGAHGWYYFQPSCLCWSHCDSWEVSLPGSLLMML

SEQ ID NO: 46993 - protein, 244 aa, Homo sapiens
TWQTYLPAITMRPTQTRRLEIIPSMCTEKFTRNIALACPVVCNVSDMIWQDSESKLPKTVCCADIQGRCEHPVVNIKEPAPSAHLNSCMQGHSGFTKEPHFYSSAQVVMVLVRDEKVLMVWIEDQISHNVSLSRSQSKALTLFNSLKAETGEGAAAKKLEASRGWFMRFKKRSYLRNIKVLDEAASADVEAAVSYPEDLAGIIDKASYTKQHIFTVNQIAIYWKKMLSRTFLAREYEASPFLKA

SEQ ID NO: 46994 - protein, 126 aa, Homo sapiens
MNLTDTTLSERSQTQKDEQTGKTVVTTRVDTSSVRNSKALAGYNLNLGMALEVMNFTRNIGTFGLSLSQFSSLKIVTGIRSWDTNLIECNLDQELKLFVSRHSARFSPEVPDMNCELNSLVHILIP

SEQ ID NO: 46995 - protein, 2519 aa, Homo sapiens
  DOMAIN (1040)..(1091): Neuromodulin (GAP-43) proteins domain identified by eMATRIX, accession number BL00412D, p-value=2.432e-11, raw score of 16.54
  DOMAIN (1919)..(2122): Neuraxin and MAP1B proteins domain identified by PFam, accession name MAP1B_neuraxin, E-value=1.9e-59, PFam score of 190.9
  misc_feature (1)...(2519): Xaa = X or * as defined in Table 2
GGGGARRQRRGDAGGGAETAPSEIILSPAAEERSGRSETLRRGTAAGRMATVVVEATEPEPSGSIANPAASTSPSLSHRFLDSKFYLLVVVGEIVTEEHLRRAIGSIELGIRSWDTNLIECNLDQELKLFVSRHSARFSPEVPGQKILHHRSERFXETVVLIQPFLMEGSSGTEVRLMITDAARHKLLVLTGQCFENTGELILQSGSFSFQNFIEIFTDQEIGELLSTTHPANKASLTLFCPEEGDWKNSNLDRHNLQDFINIKLNSASILPEMEGLSEFTEYLSESVEVPSPFDILEPPTSGGFLKLSKPCCYIFPGGRGDSALFAVNGFNMLINGGSERKSCFWKLIRHLDRVDSILLTHIGDDNLPGINSMLQRKIAELEEEQSQGSTTNSDWMKNLISPDLGVVFLNVPENLKNPEPNIKMKRSIEEACFTLQYLNKLSMKPEPLFRSVGNTIDPVILFQKMGVGKLEMYVLNPVKSSKEMQYFMQQWTGTNKDKAEFILPNGQEVDLPISYLTSVSSLIVWHPANPAEKIIRVLFPGNSTQYNILEGLEKLKHLDFLKQPLATQKDLTGQVPTPVVKQTKLKQRADSRESLKPAAKPLPSKSVRKESKEETPEVTKVNHVEKPPKVESKEKVMVKKDKPVKTETKPSVTEKEVPSKEEPSPVKAEVAEKQATDVKPKAAKEKTVKKETKVKPEDKKEEKEKPKKEVAKKEDKTPIKKEEKPKKEEVKKEVKKEIKKEEKKEPKKEVKKETPPKEVKKEVKKEEKKEVKKEEKEPKKEIKKLPKDAKKSSTPLSEAKKPAALKPKVPKKEESVKKDSVAAGKPKEKGKIKVIKKEGKAAEAVAAAVGTGATTAAVMAAAGIAAIGPAKELEAERSLMSSPEDLTKDFEELKAEEVDVTKDIKPQLELIEDEEKLKETEPVEAYVIQKEREVTKGPAESPDEGITTTEGEGECEQTPEELEPVEKQGVDDIEKFEDEGAGFEESSETGDYEEKAETEEAEEPEEDGEEHVCVSASKHSPTEDEESAKAEADAYIREKRESVASGDDRAEEDMDEAIEKGEAEQSEEEADEEDKAEDAREEEYEPEKMEAEDYVMAVVDKAAEAGGAEEQYGFLTTPTKQLGAQSPGREPASSIHDETLPGGSESEATASDEENREDQPEEFTATSGYTQSTIEISSEPTPMDEMSTPRDVMSDETNNEETESPSQEFVNITKYESSLYSQEYSKPADVTPLNGFSEGSKTDATDGKDYNASASTISPPSSMEEDKFSRSALRDAYCSEVKASTTLDIKDSISAVSSEKVSPSKSPSLSPSPPSPLEKTPLGERSVNFSLTPNEIKVSAEAEVAPVSPEVTQEVVEEHCASPEDKTLEVVSPSQSVTGSAGHTPYYQSPTDEKSSHLPTEVIEKPPAVPVSFEFSDAKDENERASVSPMDEPVPDSESPIEKVLSPLRSPPLIGSESAYESFLSADDKASGRGAESPFEEKSGKQGSPDQVSPVSEMTSTSLYQDKQEGKSTDFAPIKEDFGQEKKTDDVEAMSSQPALALDERKLGDVSPTQIDVSQFGSFKEDTKMSISEGTVSDKSATPVDEGVAEDTYSHMEGVASVSTASVATSSFPEPTTDDVSPSLHAEVGSPHSTEVDDSLSVSVVQTPTTFQETEMSPSKEECPRPMSISPPDFSPKTAKSRTPVQDHRSEQSSMSIEFGQESPEQSLAMDFSRQSPDHPTVGAGVLHITENGPTEVDYSPSDMQDSSLSHKIPPMEEPSYTQDNDLSELISVSQVEASPSTSSAHTPSQIASPLQEDTLSDVAPPRDMSLYASLTSEKVQSLEGEKLSPKSDISPLTPRESSPLYSPTFSDSTSAVKEKTATCHSSSSPPIDAASAEPYGFRASVLFDTMQHHLALNRDLSTPGLEKDSGGKTPGDFSYAYQKPEETTRSPDEEDYDYESYEKTTRTSDVGGYYYEKIERTTKSPSDSGYSYETIGKTTKTPEDGDYSYEIIEKTTRTPEEGGYSYDISEKTTSPPEVSGYSYEKTERSRRLLDDISNGYDDSEDGGHTLGDPSYSYETTEKITSFPESEGYSYETSTKTTRTPDTSTYCYETAEKITRTPQASTYSYETSDLCYTAEKKSPSEARQDVDLCLVSSCEYKHPKTELSPSFINPNPLEWFASEEPTEESEKPLTQSGGAPPPPGGKQQGRQCDETPPTSVSESAPSQTDSDVPPETEECPSITADANIDSEDESETIPTDKTVTYKHMDPPPAPVQDRSPSPRHPDVSMVDPEALAIEQNLGKALKKDLKEKTKTKKPGTKTKSSSPVKKSDGKSKPLAASPKPAGLKESSDKVSRVASPKKKESVEKAAKPTTTPEVKAARGEEKDKETKNAANASASKSAKTATAGPGTTKTTKSSAVPPGLPVYLDLCYIPNHSNSKNVDVEFFKRVRSSYYVVSGNDPAAEEPSRAVLDALLEGKAQWGSNMQVTLIPTHDSEVMREWYQETHEKQQDLNIMVLASSSTVVMQDESFPACKIEL

SEQ ID NO: 46996 - protein, 88 aa, Homo sapiens
VITGQPNPTNPNLQATPDIQGTLARLGPALHPRGIIPFIGHQSARPHAPAPANPNKRTLFRPPPLSPPSPEPPGSGQGAGLGARPALP

SEQ ID NO: 46997 - protein, 960 aa, Homo sapiens
  DOMAIN (473)..(516): kw TRANSCRIPTASE REVERSE II ORF2 domain identified by eMATRIX, accession number DM01354T, p-value=1.000e-40, raw score of 9.48
  DOMAIN (314)..(597): Reverse transcriptase domain identified by PFam, accession name rvt, E-value=2e-37, PFam score of 137.7
  misc_feature (1)...(960): Xaa = X or * as defined in Table 2
VASCXENACKQNQRQKPCDYLNRCRKGLWQNSTTLHAKNSQXTVLYKTIKFQLEKTTLKFIWNQKRAHIAKSILSQKNKAVGITLPDFKLYYKATVTKTAWYWYQNRDIDQWNRTEPSEIMPHIYNHLIFDKPDKNKKWGKDSLFNKWCWQNWLAICRKLKLDPFLTPYTKINSRWIKDLHVRPKTIKTLEENLGNTIQDIGTGKDFMSKTPKAMATKDKIDKWDLIKLKSFCTAKETTIRVNRQPTKWEKIFTTYSSDKGLISRIYNELKQIYKKKTNNPIKKWAKDLNRHFSKEDIYAAKRHMKKCSSSLAIREMQIKTTMRYHLTPVRMAIIKNSGNNRWDTTVMGCLSCPKPEADHMRAVASSWIQREVMEGLSDVASFATKLKNTLIQYHSIEEDKWRVAKKTHVNRTNDKNHVIISIDAEKASGKIQQPFMLKTLNKLGIDRTYLKIIRAIYDKPTDNIILNGQKLEAFPLKPGTRQGCPLSPLLFNIVLEVLARVIRQEKEIKGVQLGKEEVKLSLFADDMIVYLENPIVSPQNLLKLIGNFSKVSGYKINVQKSQAFLYTNKRQTESQIMSELPFTIASKRIKYLGIQLTRDVKDLFKENYKPLLKEIKEDTNKWKNIPCSWVGRINIMKMAILPKVIYRFNAIPIKLPMTFFTELDKTTLKFIWNQKRAHNSKSILSQKNKAGGITLPDFKLYYKATVTKTVWYWYQNRDIDQWNRTEPSEIMLLIYNYLIFDKPDKNKKWGKDSLFNKWCWENWLAICRKLKLDPFLTSYAKINSRWIKDLNVRPKTIKTLEENLGNTIQDIGMGKDFMSKTRKAMATKAKIDKWNLIKLKSFFTAKETTIRVNRQPTEWENIFAIYSSDKGLISRIYNELKQIYKKKTNNPIKKWEKDMNRHFSKEDIYAAKRHMKKCPSSLTIREMQIKTTMRYHLTPVRMAIIKSQETTGAGEDVEK

SEQ ID NO: 46998 - protein, 152 aa, Homo sapiens
LTSWLLSPAHRRAGRLSSTVESGVRCLVARRSCFHVLASPQVKREVMEGLSDVASFATKLKNTLIQYHIIEEDKWRVAKKTKDVTVWRKPSQEFNGYLYKAQGVIDDLVYSIIDHIRPGPCRLDWDSLMTSLDILENFEENSCVMRYTTAGQ

SEQ ID NO: 46999 - protein, 180 aa, Homo sapiens
KPFFIAHSIGEINKFSWGNYIPKLTSSSVTHHTAIRFLSNSPLIFFNAMVLDESVFKFSCKRSNIRQAFHYFSNINNAFGLRTANECTVQWWFKKFCQGDESLEDEERSGWPLESDNDHLRVVIEADPLTSTREVAQELSVNHSLPTNYYFLKHLNNFLQGKCFHNQQDAENAFQEFIES

SEQ ID NO: 47000 - protein, 112 aa, Homo sapiens
  DOMAIN (73)..(112): KRAB box domain identified by PFam, accession name KRAB, E- value=1.1e-09, PFam score of 45.6
PEKAGVLNVIQSGTLSWELSNQTHSWREQGGFRYLVGPLPLASVVPPGVVLIPLCLLLLEAQPLWPCDLQGLLTFRDVAIEFSLEEWQYLDTAQKNLYRKMMLENYINLAFL

SEQ ID NO: 47001 - protein, 46 aa, Homo sapiens
  DOMAIN (11)..(46): KRAB box domain identified by PFam, accession name KRAB, E- value=4.6e-11, PFam score of 50.2
RWRTYNVEGLLTFRDVAIEFSPEEWQCLDTAQQNLYRNVMLENYRN

SEQ ID NO: 47002 - protein, 782 aa, Homo sapiens
  DOMAIN (190)..(229): PROTEIN ZINC FINGER ZINC-FINGER METAL-BINDING NU domain identified by eMATRIX, accession number PD01066, p-value=3.700e-38, raw score of 19.43
  DOMAIN (263)..(782): Zinc finger, C2H2 type domain identified by PFam, accession name zf-C2H2, E-value=3e-111, PFam score of 383.0
MQWFWVLLWLLCLWLMEWFCWSCDPGFLKHILTFCLSVPWDENSSSVLSTTKEKHHVTKTSGTEIADWAKIVHFLKDDLHGKAANNFRKIQEKLPLMGTYTVVQLDLFWPEKAGVLNVIQSGTLSWELSNQTHSWREQGGFRYLVGPLPLASVVPPGVVLIPLCLLLLEAQPLWPCDLPPGSLEMGLLTFRDVAIEFSLEEWQCLDTAQKNLYRNVMLENYRNLAFLGIAVSKPDLIICLEKEKEPWNMKRDEMVDETPEKSYKCKERGKIFNWSSTLTNHKKIHTEEKPYKCEEYRKAFSLSSNLTTHKIIHIGEKPYKCEECGKTFNKSLTLTIYKRMHTEEKLYKCKECGKAYVWSSNLTKHKRMHAGEKPYKCEECGKAFSQSSTLTTHKIIRTGEKRYKCEECGKAYVWSSTLTKHKRMHTAEKPYKCEVCGKTFHRFSNLSAHKIIHTGEKPYKCEECGKAFIWSSTLTEYKKIHTREKPYKCEECGKAFSRSSTLTIHKRMHTREKLYKCEEYGKAFRQSSTLTAHKMIHTGEKPYKCEECGKAFNSSSTLTKHKIIHTEEKPYKCEECGKAFSQSSTLTTHKIIRTGEKRYKCEECGKAYVWSSTLTKHKRMHTAEKPYKCEVCGKTFHRFSNLSAHKIIHTGEKPYKCEECGKAFIWSSTLTEYKKIHTREKPYKCEECGKAFSRSSTLTIHKRMHTREKLYKCEEYGKAFRQSSTLTAHKMIHTGEKPYKCEECGKAFNSSSTLTKHKIIHTEEKPYKCEECGKAFSQSSTL

SEQ ID NO: 47003 - protein, 470 aa, Homo sapiens
DPDLHPVAAGVRGAASPRASLRLASGPAVPALAGFFKPHSIDRMKKFKRRLSLTLRGSQTIDESLSELAEQMTIEENSSKDNEPIVKNGRPPTSHSMHSFLHQYTGSFKKPPLRRPHSVIGGSLGSFMAMPRNGSRLDIVHENLKMGSDGESDQASGTSSDEVQSPTGVCLRNRIHRRISMEDLNKRLSLPADIRIPDGYLEKLQINSPPFDQPMSRRSRRASLGPLCFSECARDARLPRDRRQATACTHTPGGPGRVNMAAQGSPSSSPSDDSTTSGSLPELPPTSTATSRSPPESKGSSRSSLLQWTCPEDSLPLAVFYGPLDAKNPLLASCEKEIQELLGFMRKKKALATTEEEKHEFRRRCSWGNAFQLLLIQYDIGCDFVIDGSYYLEEYKLALLQCYGRYLQQFNTNFDENKVDVTQFKATFFPKGFKDKTAGLTFHALSGKNMCNYQLVCDSDENLKNKESVV

SEQ ID NO: 47004 - protein, 136 aa, Homo sapiens; identical to SEQ ID NO: 35752
  DOMAIN (58)..(103): Ribosomal protein S24e proteins domain identified by eMATRIX, accession number BL00529B, p-value=1.000e-40, raw score of 20.08
  DOMAIN (26)..(108): Ribosomal protein S24e domain identified by PFam, accession name Ribosomal_S24e, E-value=2.2e-48, PFam score of 174.2
  misc_feature (1)...(136): Xaa = X or * as defined in Table 2

SEQ ID NO: 47005 - protein, 169 aa, Homo sapiens
  DOMAIN (48)..(93): Ribosomal protein S24e proteins domain identified by eMATRIX, accession number BL00529B, p-value=9.239e-18, raw score of 20.08
  DOMAIN (24)..(107): Ribosomal protein S24e domain identified by PFam, accession name Ribosomal_S24e, E-value=5.8e-11, PFam score of 49.8
  misc_feature (1)...(169): Xaa = X or * as defined in Table 2
EKFMTNRLTSGETKWVIXCPFTPGRRTVPXAQKIREKLAQNVQRPHPDVIFVFGFRTHFGGGKTTGFGMIYDSLDYAKEKMNPKHRLARHGPGMEEGKRPSKKGNGKERKNQNXRKVQGGLAKGPLLGAGQKEEMKCLGSELEIGSQPKELKVLPMMLAVATVDFSQEH

SEQ ID NO: 47006 - protein, 347 aa, Homo sapiens
MGLLLLVLILTPSLAAYRHPDFPLLEKAQQLLQSTGSPYSTNCWLCTSSSTETPGTAYPASPREWTSIEAELHISYRWDPNLKGLMRPANSLLSTVKQDFPDIRQKPPIFGPIFTNINLMGIAPICVMAKRKNGTNVGTLPSTVCNVTFTVDSNQQTYQTYTHNQFRHQPRFPKPPNITFPQGTLLDKSSRFCQGRPSSCSTRNFWFRPADYNQCLQISNLSSTAEWVLLDQTRNSLFWENKTKGANQSQTPCVQVLAGMTIATSYLGISAVSEFFGTSLTPLFHFHISTCLKTQGAFYICGQSIHQCLPSNWTGTCTIGYVTPDIFIAPGNLSLPIPIYGNSPLPR

SEQ ID NO: 47007 - protein, 148 aa, Homo sapiens
  misc_feature (1)...(148): Xaa = X or * as defined in Table 2
VSVPFIFIWLTCKSFLKFDLKSNTNVLQSLGKFQSEVSKRQKLATVFSSFTSTGLCQGSVAFISRCPPLASGSDSVWRGGSVFFSFRPXRLMISLLGSCVSHQFPEKLEFXXKKMPYKIPTAHHQQQDDQQRGHEHKQSQPDAVPHLG

SEQ ID NO: 47008 - protein, 795 aa, Homo sapiens
  DOMAIN (679)..(729): ENV polyprotein (coat polyprotein) domain identified by eMATRIX, accession number PF00429, p-value=8.015e-16, raw score of 31.08
  DOMAIN (551)..(719): ENV polyprotein (coat polyprotein) domain identified by PFam, accession name ENV_polyprotein, E-value=1.1e-36, PFam score of 126.4
MIRSGCGAATRAGGDALSRHILPTIFNDRMAKICEALEIKHLDRNLTSTYYVIHKWTGSQIRGFGEGQPTVVRLRRLEQDQRQSRPRMKAAKPEWRCILGVVVPARQRRPDSTRLCTPSPSRPRAAEEASLVMSCPSGRGPGAEKPLQPRPGDADIWHPWGLRDTGGQRRGPCGRHVAQRRADSACVRGHAADRPAADGVRFKYLVVCVDTFTGWVEACLTRTEKAQEVAKFLLKELIPQFSQPRSLQNDNGPSFISQLTQQVTMGLLLLVLILTPSLAAYRHPDFPLLEKAQQLLQSTGSPYSTNCWLCTSSSTETPGTAYPASPREWTSIEAELHISYRWDPNLKGLMRPANSLLSTVKQDFPDIRQKPPIFGPIFTNINLMGIAPICVMAKRKNGTNVGTLPSTVCNVTFTVDSNQQTYQTYTHNQFRHQPRFPKPPNITFPQGTLLDKSSRFCQGRPSSCSTRNFWFRPADYNQCLQISNLSSTAEWVLLDQTRNSLFWENKTKGANQSQTPCVQVLAGMTIATSYLGISAVSEFFGTSLTPLFHFHISTCLKTQGAFYICGQSIHQCLPSNWTGTCTIGYVTPDIFIAPGNLSLPIPIYGNSPLPRVRRAIHFIPLLAGLGILAGTGTGIAGITKASLTYSQLSKEIANNIDTMAKALTTMQEQIDSLAAVVLQNRRGLDMLTAAQGGICLALDEKCCFWVNQSGKVQDNIRQLLNQASSLRERATQGHKAPDESQCRTPSSQYSRVTLLRRTPRLLASGTRQRRNPAPSPVDLAGYGFCQSTEPSCPDS

SEQ ID NO: 47009 - protein, 213 aa, Homo sapiens
MTPWTGKQLVTAYAALQTHKSMAEQATVIMQMTYPIAGWLLRSWVATLPDWDSTDWDSTLSKLACSNCIVDWAHTYAEVTNVSNCWICTTLPAAAVDGLPWHMHPASVKNWTRLETCGSTDNLWDATRQALDTITIPGAGVVTIEMQVTALAEHTARALNYTRVALLLLTDEVDQIRKVVLQNRMALNIVTVAQGGTCALGGTQFCTFIPDIH

SEQ ID NO: 47010 - protein, 331 aa, Homo sapiens
  DOMAIN (132)..(177): kw TRANSCRIPTASE REVERSE II ORF2 domain identified by eMATRIX, accession number DM01354N, p-value=1.000e-40, raw score of 13.17
  DOMAIN (193)..(316): Ribosomal protein S8e domain identified by PFam, accession name Ribosomal_S8e, E-value=6.7e-50, PFam score of 179.2
MLIDFFVERKIISFDGCIAQLFFLHFAGASEMFLLTVMAFDLYTAICRPLHYATIMNQRLCCILVALSWRGGFIHSIIQVALIVRLPFCGPNELDSYFCDITQVVRIACANTFPEELVMICSSEIQTTIRDYYKHLYANKLENLEEMDKFLDTYTLPRLKQEEVESLNRPITGAEIVAISNSLPTKKSPGPDGFTAEFYQRYKEELRKPYHKKRKYELGHPAANTKTGPRRIHTVRVWGGNKKYCALRLDVRNFSWGSECCAHKTTIIDVVYNASNNELVRPKTLVKNCIVLIDSTLYRQWPPWHLVKKVPHCDCSKREDEGSEEAKVTVK

SEQ ID NO: 47011 - protein, 99 aa, Homo sapiens
  misc_feature (1)...(99): Xaa = X or * as defined in Table 2
CTDKITLVFGVXMLTPKPDKCDDSAVXELLWLTNQLSACVVHPGLYHLHVRSIWIPYRCLFSTMCGVCQTCTVAMQLDCLADSFNAVFKLTEAAGHMAR

SEQ ID NO: 47012 - protein, 123 aa, Homo sapiens
  misc_feature (1)...(123): Xaa = X or * as defined in Table 2
SLRLQFYYKISFQTQDQANKLSDSDASHLHPLAPCSEPTRTNVHTKLPRERPQSQIASPYPLPPCPERLKKQTNKKKNWXEPSPHILPPRNAAAHTGQSRASKSLPAPPPTVSPRPRPGAPGT

SEQ ID NO: 47013 - protein, 79 aa, Homo sapiens
GISWKLNFLSIPSLGQMMPVNYFECGLGISGRIRRTRLSAVGASCSSPPKLQPCPTNSSPCSKEGGSAGPPQPSGTPVL

SEQ ID NO: 47014 - protein, 142 aa, Homo sapiens
  misc_feature (1)...(142): Xaa = X or * as defined in Table 2
TFHAVLHIENAGYFNSIPFFRILNHNPLTTVEDPYLFKLPALKYLXVLXYSHESRDDLYSFXIFHQRLSILHLGXNVIIKFXLSYXKKVIGEEKNXEDVXWSRQPAGEREQCXRTHIDLEPCRHMEEYYLTKKAKGKRCSLF

SEQ ID NO: 47015 - protein, 120 aa, Homo sapiens
  misc_feature (1)...(120): Xaa = X or * as defined in Table 2
GTSQTLLRSLASACIFQPKVRLLSREEIPLNLNYXSVSPNSNPNHLYSRHTILTAMLTLQLGTCVLLPIGLLVPYPNCPSPTGLQVTPFLPSPCGSGWPASFTYSSNRFTTNLLFCVFIL

SEQ ID NO: 47016 - protein, 197 aa, Homo sapiens
  DOMAIN (48)..(62): LEUCINE-RICH REPEAT SIGNATURE domain identified by eMATRIX, accession number PR00019B, p-value=1.450e-10, raw score of 11.36
  DOMAIN (26)..(124): Leucine Rich Repeat domain identified by PFam, accession name LRR, E-value=1.4e-12, PFam score of 55.2
TVFLHRNFQGNYISYIDGNVWKAYSWTEKLILRENNLTELHKDSFEGLLSLQYLDLSCNKIQSIERHTFEPLPFLKFINLSCNVITELSFGTFQAWHGMQFLHKLILNHNPLTTVEDPYLFKLPALKYLDMGTTLVPLTTLKNILMMTVELEKLILPSHMACCLCQFKNSIEAVCKTDKLNCNSACLTNTIHCPEEA

SEQ ID NO: 47017 - protein, 37 aa, Homo sapiens
  misc_feature (1)...(37): Xaa = X or * as defined in Table 2
LGNTWGXQPCKRLKIWLSLEFTKINVIRHMWKKFKRL

SEQ ID NO: 47018 - protein, 168 aa, Homo sapiens
  DOMAIN (56)..(168): Protein of unknown function DUF101 domain identified by PFam, accession name DUF101, E-value=9.1e-15, PFam score of 62.5
  misc_feature (1)...(168): Xaa = X or * as defined in Table 2
LKNRRRSRPSIRQSIGSTSVSRWLTSLFTYLDHTADVQXVXREFIPLKPRQXEDXMFQSWLHAWGDTLEEAFEQCAMAMFGYMTDTGTVEPLQTVEVETQGDDLQSLLFHFLDEWLYKFSADEFFIPGWGEEFSLSKHPQGTEVKAITYSAMQVYNEENPEVFVIIDI

SEQ ID NO: 47019 - protein, 146 aa, Homo sapiens
  DOMAIN (3)..(141): Protein of unknown function DUF101 domain identified by PFam, accession name DUF101, E-value=4.8e-08, PFam score of 38.7
IYFFRLHAWGDTLEEAFEQCAMAMFGYMTDTGTVEPLQTSRSKTQGDDLQSLLFHFLDEWLYKFSADEFFIPREVKVLSIDQRNFKLRFNGWGEEFSLSKHPQGTEVKAITYSAMQVYNEENPGSFCDHWTFKTTQKIKRLPTGKK

SEQ ID NO: 47020 - protein, 313 aa, Homo sapiens
  DOMAIN (254)..(309): Ferritin iron-binding regions proteins domain identified by eMATRIX, accession number BL00540B, p-value=1.000e-40, raw score of 18.82
  DOMAIN (171)..(313): Ferritins domain identified by PFam, accession name ferritin, E-value=1.1e-82, PFam score of 280.7
SKTPSHTQKNERLECHPFPSMQNIWQDPALLSPVAGCPVFPLRKKSQFLSSWCFRLEVHLLVPDPLCLVMHMSLLIPPPLPAPTGLRIRGDRQFGGPVGLSLASTVFGRNRSGDGLPASDRPPISSPLATSGTIFSAISCFWDLPAPFLSLAPSWRPTMSSQIRQNYSTDVEAAVNSLVNLYLQASYTYLSLGFYFDRDDAALEGVSHFFRELTEEKREGYERLLKMQNQRGGRALFQDIKKPAEDEWGKTPDAMKAAMALEKKLNQALLDLHALDSAHMDPHLCDFLETHFLDEEVKLIKKMGDHLTNLHRL

SEQ ID NO: 47021 - protein, 138 aa, Homo sapiens
  DOMAIN (50)..(97): CYCLIN CELL CYCLE DIVISION PROTE domain identified by eMATRIX, accession number PD02331A, p-value=9.075e-09, raw score of 19.76
SLYHNSSQKRHWTFSSEEQLARLRADANRKFRCKAVANGKVLPNDPVFLEPHEEMTLCKYYEKRLLEFCSVFKPAMPRSVVLTCAFLACKVDEFNVSNPQFVGNLRESPLGQEKALEQILEYELLLIQQLNFHLIVHN

SEQ ID NO: 47022 - protein, 74 aa, Homo sapiens
SAPEMQRVRAGRVIVTTARQRRLPDALGFREIFSSEEQLARLRADANRKFRCKAVANGKVRFSQRLPSCPVTKF

SEQ ID NO: 47023 - protein, 53 aa, Homo sapiens
  misc_feature (1)...(53): Xaa = X or * as defined in Table 2
XPSGPGHDSIMYHNSSQKRHWTFSSEEQLARLRADANRKIQMQSRGQREGSSE

SEQ ID NO: 47024 - protein, 309 aa, Homo sapiens
  DOMAIN (152)..(210): SH3 domain identified by PFam, accession name SH3, E-value= 0.00014, PFam score of 25.7
MQTPSCWCAGKESRRSPDEAQHFTDRQWSRGIQLTLWLNFRKPPMRSCKGDGENMAECQQEHLLFDHKYWLNCILVEDTEIQVSVDDKHLETIYLGLLIQEGHFFCRALCSVTPPAEKEGECLTLCKNELISVKMAEAGSELEGVSLVTGRGRCKALTGYEPGEKDELNFYQGESIEIIGFVIPGLQWFIGKSTSSGQVGFVPTRNIDPDSYSPIFAVELRGCPGDMEPEKHMLTPRLIQRVIERRECVSSVYFNRWSLRTSSVQGGKQNSKTKGMLLGTEGVVLVLGSCYPPCLTTGPLQRKGTHREK

SEQ ID NO: 47025 - protein, 1329 aa, Homo sapiens
  DOMAIN (499)..(1170): TPR Domain domain identified by PFam, accession name TPR, E- value=1.6e-06, PFam score of 35.1
MGGCFCIPRERSLTRGPGKETPSKDPTVSSECIASSEYKEKCFLPQNINPDLTLSFCVKSRSRRCVNGPLQEAARRRLWALENEDQEVRMLFKDLSARLVSIQSQRAQFLITFKTMEEIWKFSTYLNLGMVQGKQKSCWLDFLGYVSMCLEHLLFDHKYWLNCILVEDTEIQVSVDDKHLETIYLGLLIQEGHFFCRALCSVTPPAEKEGECLTLCKNELISVKMAEAGSELEGVSLVTGRGRCKALTGYEPGEKDELNFYQGESIEIIGFVIPGLQWFIGKSTSSGQVGFVPTRNIDPDSYSPMSRNSAFLSDEERCSLLALGSDKQTECSSFLHTLARTDITSVYRLSGFESIQNPPNDLSASQPEGFKEVRPGRAWEEHQAVGSRQSSSSEDSSLEEELLSATSDSYRLPEPDDLDDPELLMDLSTGQEEEAENFAPILAFLDHEGYADHFKSLYDFSFSFLTSSFYSFSEEDEFVAYLEASRKWAKKSHMTWAHARLCFLLGRLSIRKVKLSQARVYFEEAIHILNGAFEDLSLVATLYINLAAIYLKQRLRHKGSALLEKAGALLACLPDRESSAKHELDVVAYVLRQGIVVGSSPLEARACFLAIRLLLSLGRHEEVLPFAERLQLLSGHPPASEAVASVLSFLYDKKYLPHLAVASVQQHGIQSAQGMSLPIWQVHLVLQNTTKLLGFPSPGWGEVSALACPMLRQALAACEELADRSTQRALCLILSKVYLEHRSPDGAIHYLSQALVLGQLLGEQESFESSLCLAWAYLLASQAKKALDVLEPLLCSLKETESLTQRGVIYNLLGLALQGEGRVNRAAKSYLRALNRAQEVGDVHNQAVAMANLGHLSLKSWAQHPARNYLLQAVRLYCELQASKETDMELVQVFLWLAQVLVSGHQLTHGLLCYEMALLFGLRHRHLKSQLQATKSLCHFYSSVSPNPEACITYHEHWLALAQQLRDREMEGRLLESLGQLYRNLNTARSLRRSLTCIKESLRIFIDLGETDKAAEAWLGAGRLHYLMQEDELVELCLQAAIQTALKSEEPLLALKLYEEAGDVFFNGTRHRHHAVEYYRAGAVPLARRLKAVRTELRIFNKLTELQISLEGYEKALEFATLAARLSTVTGDQRQELVAFLRLATVYYSLHMYEMAEDCYLKTLSLCPPWLQSPKEALYYAKVYYRLGRLTFCQLKDVTGTAGKGFYPDRVTGIRKGFLEDVISKLSSERDTYLILTADQQGCLLPREAETSDCLGGGDSPQLPWCRIKNNLRGQDCTVGLLGLASQYRLRGRWDTEAQEREHLDISINVNANVNVRAGPETNIFYLQT

SEQ ID NO: 47026 - protein, 57 aa, Homo sapiens
CAFRTCSSLITYTPLPFDDGMLLCTTHFMAGVVLICSSNETTSGTAAAIGVTTWLSL

SEQ ID NO: 47027 - protein, 102 aa, Homo sapiens
  DOMAIN (4)..(31): Mrp family proteins domain identified by eMATRIX, accession number BL01215A, p-value=3.557e-10, raw score of 9.75
ALIFPPVIGVAAHKGGVYKTSVSVHLAQDMALKGLRVLLAPGNDPQGTASMRHGWVPDLHIHAEDTLLPFYLGEKDDVTYAIKPTCWPGLDISPSCLALHRY

SEQ ID NO: 47028 - protein, 372 aa, Homo sapiens
  DOMAIN (196)..(219): ALPHA-2A ADRENERGIC RECEPTOR SIGNATURE domain identified by eMATRIX, accession number PR00558A, p-value=4.618e-09, raw score of 9.72
NLVSTLGPQRPPRSSSLSQDSEFIDNYNVSLASCVTPTPTETKRLWAEDTAIHAPCQEKLQLTQAPTASAGHVREEGPPSGWRPVSVPPIGVGPARKTRARPGWEGVARDLSITESTSGSTYHTAVPWRGGAGAGSRQPPWEPEDGGGSSGRPRGGGAEIGGAERGSRERADMGAKQSGPAAANGRTRAYSGSDLPSSSSGGANGTAGGGGGARAAAAGRFPAQVPSAHQPSASGGAAAAAAAPAAPAAPRSRSLGGAVGSVASGARAAQSPFSIPNSSSGPYGSQDSVHSSPEDGGGGRDRPCTEKNCDETWTGACCCLFREGGCFTVATGVVNQFCPLHSLVFARQFSESETLEEFENTDTLTSQKTEVC

SEQ ID NO: 47029 - protein, 393 aa, Homo sapiens
  DOMAIN (232)..(259): C1q domain proteins domain identified by eMATRIX, accession number BL01113A, p-value=6.114e-11, raw score of 17.99
  DOMAIN (59)..(264): Collagen triple helix repeat (20 copies) domain identified by PFam, accession name Collagen, E-value=1.4e-29, PFam score of 111.7
LLGPNKKKPAMLLLLLSALVLLTQPLGYLEAEMKTYSHRTMPSACTLVMCSSLESGLPGRDGRDGREGPPGEKGDPGLPGAAWQAGMPGQAGPVGPKGDNGSVGEPGPKGDTGPSGEQLGVDFRCFQVVVQLQGYASGHAQSPSQEEGPPGPPGVPGPAGREGPLGKQGNIGPQGKPGPKGEAGPKGEVGAPGMQGSAGARGLAGPKGERGVPGERGVPGNAGAAGSAGAMGPQGSPGARGPPGLKGDKGIPGDKGAKGESGLPDVASLRQQVEALQGQVQHLQAAFSQYKKEGPGMGVPSDAAAHPKAAQKPDTVLGTRTGVLLWGYKAGGGLTLGCSGCHPEPMENLKDDESGCSLHSEQPNKARGTAFSGASSVLCGRFPCMGPRATKTD

SEQ ID NO: 47030 - protein, 531 aa, Homo sapiens
MAASHPRNSQQGPNVGKRRGKDGKRRWIQGMFRSCIKLWLIGYMSASYKTESSMKVWLGSLKFVLFKTVIKMSVMDELLLDLFHKLTSGRQLAAGNGLCGISHKEQEVWKPGHNILVKMRKEDKSLVWLIHSTLARYTQVTNFLGTSRSSVTRCKPGANCPSSHSGISRQLSPLSVTEDSSAPILELQNQGSSGVCGHRVERQNRSADDGTQTHSENSSQENRIKARCLSCTSMVLKGIWGLLIILSVSSSWVGTTQIVKITYKNFYCPFFMTWFSTNWNIMFFPVYYSGHLATAQEKQSPMKKFRLINTICQEVTPEVTPEALMTEQGKNRVSVECSRIFGEDGLTLKLFLKRTAPFSILWTLTNYLYLLALKKLTATDVSALFCCNKAFVFLLSWIVLKDRFMGVRIVAAIMAITGIVMMAYADNFHADSIIGVAFAVGSASTSALYKVLFKMFLGSANFGEAAHFVSTLGFFNLIFISFTPVILYFTKVGALVLFCCSAMGAVSVGMGRGCGLGLQHPGGNVGGWCWT

SEQ ID NO: 47031 - protein, 198 aa, Homo sapiens
  DOMAIN (60)..(103): Alkaline phosphatase proteins domain identified by eMATRIX, accession number BL00123B, p-value=4.663e-09, raw score of 19.31
MMKSLSNHHGNLEQIQGESDPQHSNQQWVGLAGQQAGPSVFGLFRDSCLLLLLLLLFLLLLRKPPCSLTPDRDIEGQVIATAGVAAAAAAALKALYKTCSVLPVRQLGHRSAGEAADGLGSIAIDTTQLNMSVTDPTAWATAMNNLGMVPVGLPGQQLVSDTLDPTWAKFSCIVVYSSFVFDKYTKQVQKDDAEDSSP

SEQ ID NO: 47032 - protein, 343 aa, Homo sapiens
MCTCVSPAAQKAFQPPRRCGTKYDTPIEKRDVNSPQMTPFKKFNEISLLESNSIADEELALINTQALVCGSTGETLFISVSESSRSAPTSSEDYLSMKRRCTTSVIKEQESSQASTEECIQNLLLHPRGLRAITIAVFGKQNTYIRLEPFKINVLEQITKHIEKLHVRAANWYHREWGTAVKIPKDVKATLELGNRQRLEIMEGLRRQEYVAALAGQAKRGQCTVQTIASGGTSPKRWQLPHGVAPVCAQKSITEVWEPPLRFQKMYGNAWISRQRCAAGVVPSWRISASAVQMGNVGSEPPHRGSTGALHSGAVRRGPLPTRPQNGRSTDSLQLVPGKAADT

SEQ ID NO: 47033 - protein, 64 aa, Homo sapiens
HCVAARKAMRNGISPIIIDNTNLHAWEMKPYAVMVGRSIILNFQLWTFCEKVEASVLSSFSDVP

SEQ ID NO: 47034 - protein, 45 aa, Homo sapiens
RPVGRGGSRSDRGARAGRCAPDTLSALRCCWRSPAGAPGTQDPDP

SEQ ID NO: 47035 - protein, 122 aa, Homo sapiens
  DOMAIN (99)..(109): TYPE I ANTIFREEZE PROTEIN SIGNATURE domain identified by eMATRIX, accession number PR00308C, p-value=8.714e-09, raw score of 3.83
RPVGRGGSRSDRGARAGRCAPDTLSALRCCWRSPAGAPGTQDPDPAGPGAATEAPALHPAGGTGTSPPPPATAAPTGGRGRPCADCCRRGARPGPAPTTAAAPAAATAATNTSAARLSGPAP

SEQ ID NO: 47036 - protein, 133 aa, Homo sapiens
PDFRAGVGSEFPFWVLGGSSQRRNMALLGSRAELEADEDVFEDALETISISSHSDMATSSLHFASCDTQQAPRQRGASTVSSSSSTKVDLKSGLEECAVALNLFLSNKFTDALELLRPWAKESMYHALGYSTI

SEQ ID NO: 47037 - protein, 93 aa, Homo sapiens
  misc_feature (1)...(93): Xaa = X or * as defined in Table 2
EAKLHLNLCDMSWLCCPTKGKRKQALEVLNILGPFLAPFWIAKSYFFTSPKTQVSSLXFLRYKRIKLQCRPKTCTNPSRTRSCALPGRFIPPF

SEQ ID NO: 47038 - protein, 255 aa, Homo sapiens; identical to SEQ ID NO: 43906

SEQ ID NO: 47039 - protein, 364 aa, Homo sapiens
MEREKPYHMLSASWRAAEAGSVAQSKHRGLKTMEADGITQSEDEGFRTWGTTGKKGRSETFMSDCGDHGVHLRVSLLAADNRLLFLKCKSIFALPLKICAQLLIAFKVTCKYLSMTYDKNFSRIKFKGVQLSNERFVNQSISGARAGSETAVQPCGGRRFMDRERKVTCRKRKAKESMYHALGYSTIVVLQAVLTFEQQDIQNGISAMKDALQTCQKSKQSPSTYSPGGWCVRGLSGTSDRDPRLPSGHTICEMRWPPGEGKGLAPDQRPGGCFHGPQQPEEEYGALRQPSGAGSGRGTIRWGLRARPLKPWTGVRERRRRLGFTKSDPEVLALALWVFVESSLDLGISPSMEVSWWQNRKAYD

SEQ ID NO: 47040 - protein, 76 aa, Homo sapiens
KANSDVPFGFGVNLEHLMEACNSGTNLLNSKRLNNDCICLASHTDVSIIARKCCLVVSCLLLLRGLSILRSKESHC

SEQ ID NO: 47041 - protein, 227 aa, Homo sapiens
  DOMAIN (63)..(73): TYPE I ANTIFREEZE PROTEIN SIGNATURE domain identified by eMATRIX, accession number PR00308C, p-value=2.169e-09, raw score of 3.83
RPPWPSQSAFRRHPAVPAHAGRHRLRAWLAGALSSQAVRAAPWSSAERGSQGRRRREEPGATAAAAAAAAGAMTVEQNVLQQSAAQKHQQTFLNQLREITGINDTQILQQALKDSNGNLELAVAFLTAKNAKTPQQEETTYYQTALPGNDRYISVGSQADTNVIDLTGDDKDDLQRAIALSLAESNRAFRETGITDEEQAISRVLEASIAENKACLKRTPTEVWRDS

SEQ ID NO: 47042 - protein, 901 aa, Homo sapiens
  DOMAIN (494)..(512): Ubiquitin carboxyl-terminal hydrolases family 2 proteins domain identified by eMATRIX, accession number BL00972A, p-value= 1.587e-13, raw score of 11.93
  DOMAIN (493)..(524): Ubiquitin carboxyl-terminal hydrolases famil domain identified by PFam, accession name UCH-1, E-value=5.2e-10, PFam score of 46.7
MAPASASGEGLRKLPIMVEGEGEPVCIDYMARDKQEGGPTFNIGDQISTRDLVRAKETVSKPYQLVCSVGGASSRLVKFLERRGERTRDTERGRSSGPYAVLGRYGHGGKCLLWRLWSAFRRLPAVPAHAGRHRLRAWLAGALSSQAVRAAPWSSAERGSQGRRRREEPGATAAAAAAAAGAMTVEQNVLQQSAAQKLQEPARCVLQPFFVPTVWRVLGFCPVTKNNEVRGHQRRKKIHTRSISEPRRGALDMEVDWMGTTLDLELLVRERTIFRTFPVEDQGVSQVRSFINGKHQQTFLNQLREITGINDTQILQQALKDSNGNLELAVAFLTAKNAKTPQQEETTYYQTALPGNDRYISVGSQADTRLTSQGSDQSGKRLLLSQLGKRPLGLLSSRTYFYSCSPGNRKPGLDVIDLTGDDKDDLQRAIALSLAESNRAFRETGITDEEQAISRVLEASIAENKACLKRTPTEVWRDSRNPYDRKRQDKAPVGLKNVGNTCWFSAVIQSLFNLLEFRRLVLNYKPPSNAQDLPRNQKEHRNLPFMRELRYLFALLVGTKRKYVDPSRAVEILKDAFKSNDSQQQDVSEFTHKLLDWLEDAFQMKAEEETDEEKPKNPMVELFYGRFLAVGVLEGTSSMAATRENEVEVKVETQDKPLRFIWGFHFYFYLISSCCCHPRNLVPCVSAAPAFARRGQGVARPIVSEGASPKPWHLPRGVEPAGAQKSRSEVWAPPPRFQKMYRNAWMSRQKFATELGSSWTTSARAVRKRNVGLEPTQRVPTGAPPSGTVRRRPLSSRPQNVRSTDSLHCVPGKAADTQHQPVKAARREAVPCKATGAELPRTMGTYLLHQCDLDVRAGIQGEHFRALKFDCPVGFQTVTPLFWPVSPMWNGCIYPVPVLQL

SEQ ID NO: 47043 - protein, 185 aa, Homo sapiens
DHNSSPAREQSSMENKFHELTEVGFRKITSLEKNINDLMELKNTARELREAYTSIKSRIDQAKESISEIEDQLNEIKCEDKVREKRMKSNKQNFQEIWDYVKRPNLRLTGVPESDRENGTKLENTLQEIIQENFPNLARQANIQIQEIQRTAQRQSSSRATPIHIIVRFAKFEIKEKMLRAAREK

SEQ ID NO: 47044 - protein, 279 aa, Homo sapiens
DHNSSPAREQNWMENEFDELTEVGFRRWVITNSSELKEHVLTQCKEAKNLDKRLDKLLPRITSVEKNINDLMELKNTAQELHEAYTSINTQIDQAEEKISEIEDQLNEIKPNLRLIGVPESDGENGTKLENTLQDIIQENFSNLAKQANIQIQEIQRTPQRYSSRRTTPRHIIIRFTKVGMKEKMLRAAREKSRVTHKGKPIRLTVDLSAETRKEWGPIFSICKEKNFQPRISYPAKLSFISEGEIKSFTNKQMLRDFVTTRPALQELLKEALNMEKNN

SEQ ID NO: 47045 - protein, 168 aa, Homo sapiens
MIGADPESQSLNSNQCWKLRAGIHYHHMKHGRNGKSYTAVSDLTGGHLPVGTDRHLIQESSSWHLACAPLGPSFQRKDRAAIVAVLQLLLDHNPSPAREQNWTENEFGELTEVGFRRWVITNSSELKENVLTQCKEAKNLEKGLDELLTRISSVEKNINDLMELKHAA

SEQ ID NO: 47046 - protein, 789 aa, Homo sapiens; identical to SEQ ID NO: 45736

SEQ ID NO: 47047 - protein, 522 aa, Homo sapiens
MCDANSLLFNAQQARSKGQVPLQFLRPEWRVAVALMFAQCKVEKESTRRRQKYQESQEPLNEVNSFPQKISYTQFPNSFYEPHQDFTSPDIFKKSRSPSWYKYTSTVSTGITDLESSTGLWPTISQFTLSEETNADVYYYRIIIPVLLIARGERGGCGHSFSRLKCSCLLALKRAADLPPQHSSSAKGQTASSSRGQKTTHTGELQLASGGWPSGTKLPEKGTGSKIFAVLQPPLVIPRQTRSGVDLQQNPADLQQRESNSININKKDIHTKTPYESQQYQRPNVDKSTTMRKNSHKKEENSKNQNTFSPTDHNSSPAREQNWTENEFDKLTEVGFRKWVITNSSELKEHVLTQCKEAKNLEKKLEELLTKITSDGESGTKLKNTLQDVIQDSFSNIPIQEIQRTPQRYSSRTATTRHIMVRFIKVEMKEKMLRAARDKGWVTHKGKPIRLTADLSAETLQARREWGPIFNILKEKNFQTRISYPAKLTFRSEGEIKSFTDKQILIDLVTTRPALQELLKDA

SEQ ID NO: 47048 - protein, 106 aa, Homo sapiens
  misc_feature (1)...(106): Xaa = X or * as defined in Table 2
VTGWTNYEGNGRWRERSRQLCGCCSRKSSSSWGISLMKGSGAPLRPGRMMWSGFRKCSDTQVMYSXRXLLETMTLASIMRXTHTKXNALRKCSALKDCFLGKALTL

SEQ ID NO: 47049 - protein, 594 aa, Homo sapiens
MAVIMNLDSGDPGSRVKLQTFTVSVTALKVERLELFVPPFGLVVSLASGVKLQTFAGGKAWLLQTHSDLGEQKLTTFIPISLSLKVIFWCNWPEAKTAAYDGEQATCEPVLKAMFLADTHLLREFLGHWLDKLRREWQVERAFQTALWLLQPEVVFILEDVFDEGKWSTSEAWVDDVEQFRKMFRHPSHVQLKVVAGNHDTGFHYETNTYEVERWRNRNNPSFIMGSITPTDYALSKCHLPPEDVVLIIYCGVKLPDRIVDSKAGLLKLPVLKNVISTQLQFPSIMDQLLVYNLFNETSPLVMCLDVMAMSNRGNHHLAATRLRKVLDHNSLPAREQNWTENEFDELTEVVFRRWVITSSSELKEPVLTQCKEAKNLEKRLEKLLTGITSLEKNINDLMELKNTAQELHEAYTSINSQIDQVEERISEIEDQLNEIKCEDKIREKRMKRNKQTLQETWDYVKRPNPCWIGVPESDGENGTKLENTLQDIIQENFPNLARQANIQIQEIQRTPQRYSSRRATPRHIIVRFTKVEMKEKMLRAAGEKEDETDNNEFFLWSQKGKRAGTLNDHVEESCPPTKNACLGTPIHCYVGKK

SEQ ID NO: 47050 - protein, 149 aa, Homo sapiens
MPSSPSKGITTARQQGNQNWTENKFDELTEVGFRRRVITNSSELKEHVLTQCKEAKNLEKRLDELLTRITSVEKNINDLMELKNTVRELPEAFTSFNSQIDQVEERISVIKDQLNEIKRAGKIREKKNKKEQTKPPRNMGLCEKTKIYV

SEQ ID NO: 47051 - protein, 209 aa, Homo sapiens; identical to SEQ ID NO: 46908
  DOMAIN (124)..(171): Intermediate filaments proteins domain identified by eMATRIX, accession number BL00226D, p-value=3.250e-25, raw score of 19.10
  DOMAIN (1)..(170): Intermediate filament proteins domain identified by PFam, accession name filament, E-value=2.6e-38, PFam score of 140.7

SEQ ID NO: 47052 - protein, 513 aa, Homo sapiens
  DOMAIN (421)..(469): Intermediate filaments proteins domain identified by eMATRIX, accession number BL00226B, p-value=1.947e-25, raw score of 23.86
  DOMAIN (322)..(513): Intermediate filament proteins domain identified by PFam, accession name filament, E-value=1.5e-77, PFam score of 271.0
MAMIIDDDDDDDDDNDGDDDVDGDDDGLEAQACVLGDEYRTPVMLRADGIDPDFAAMKSPQESPTSGVLSLQTVIRDILVWETAALHPDFTAGETGPGEETHLVRKLKLKKATAHTGSEGSRKIGNQLCSQCLCPLCSNTAFQSSYAVKFSAHHIGQRALARVEASADHFPDNLAGRDGTVCSTGKSGGNNSGNSQSCGEDSTSECTLPGHSEILLGKKVARMSGGATSSVLCGSLQPLCHDSTRFTTRFTFSTNYQSLGSVQPPSYGVQLVSSAASVYAGAGGSGSRISMSRSTNFQGCLGSGGLAAGLAGGLERMGGIHKEKETMQSLNDCLASYLDRVRSQETENQKLENKIWEHLEKKGPQVRDWGHYFKTIEELRTQIFANTVDNARIVLQINNARLAADDFRVKYETGLAMRQSVESEIHGLCKVTDDTNVTRLQLETEIEALKEELLFMKKNHKEEVKGLQAQIASSGLTMEVDAPKSQNLTKIMADIRAQYKELARKNQEELDKY

SEQ ID NO: 47053 - protein, 433 aa, Homo sapiens
  DOMAIN (168)..(216): Intermediate filaments proteins domain identified by eMATRIX, accession number BL00226B, p-value=8.393e-31, raw score of 23.86
  DOMAIN (69)..(412): Intermediate filament proteins domain identified by PFam, accession name filament, E-value=2.1e-69, PFam score of 244.0
  misc_feature (1)...(433): Xaa = X or * as defined in Table 2
LSPVLSLSPDSMSFTTRSTFSTNYRSLGSVQAPSYGARPVSSAASVYAGAGGLATGIAGGLAGMGGIQNEKETMQSLNDRLASYLDRVRSLETENRRLESKIREHLEKKGPQVRDWSHYFKIIEDLRAQIFANTVDNARIVLQIDNARLAADDFRVKYETELAMRQSVENDIHGLRKVIDDTNITRLQLETEIEALKEELLFMKKNHEEEVKGLQAQIASSGLTVEVDAPKFQDLRQDSWADIRAQYDELARKEPRGAXTKYWFSADLRESTTVVTTQFAEVGAAXDDASQSWRTYSPSSLGDPTWGFPWRKSXRASLENSLREGXRPAYALTQMEQASTGILACTFESELGTDPGAEGQRQAQEYEALLNIKVKLEAEIATYRRLLEDGEDFNLGDALDSSNSMQTIQKTTTRRIVDGKVVSETNDTKVLRH

SEQ ID NO: 47054 - protein, 84 aa, Homo sapiens
  DOMAIN (1)..(41): kw TRANSCRIPTASE REVERSE II ORF2 domain identified by eMATRIX, accession number DM01354Y, p-value=9.091e-09, raw score of 10.69
  misc_feature (1)...(84): Xaa = X or * as defined in Table 2
RVRTLKTSTSTCLYWFENKDSDHPERSSPXYMSPSHRYGSLVKASITKPAFLKTSGRLFTCSSQFCPLISKISDGFSHLPPFST

SEQ ID NO: 47055 - protein, 92 aa, Homo sapiens
  misc_feature (1)...(92): Xaa = X or * as defined in Table 2
AAAAGPPGPLVMFTYRERVSGLRSVHILRASHTDARLRQEEPTERLQFHSSGLLIRFSRETEPIGVYIKEDXEEWAYKMMVFAKSHDLPFAN

SEQ ID NO: 47056 - protein, 67 aa, Homo sapiens
  misc_feature (1)...(67): Xaa = X or * as defined in Table 2
LLHTSTKNELWQXGKRDPLIVFYTQYLFXEKTTRKXNQRQAGSLALGPKPGLRLPGLNPVVENQFIT

SEQ ID NO: 47057 - protein, 118 aa, Homo sapiens
  misc_feature (1)...(118): Xaa = X or * as defined in Table 2
RGLDGQGGRDGSSSGGGGGGRRRRCLLLLAPAPAVIRASGRGPRXDCWRAGCAXAWRPCRLARRMWTLRSPLTRSLYVNMTSGPGGPAAAAGGRKENHQVARKRLNVCVFTRSVSETA

SEQ ID NO: 47058 - protein, 134 aa, Homo sapiens
  misc_feature (1)...(134): Xaa = X or * as defined in Table 2
VQLFRSAGSRDHHRFLGRGRNKQTKTLYPTPIPCSLKYQRKQNGSLLWTSRMPSSVFPCTLTPSFSLPLRISQTTHPNLRGPSCPKGLGIALISLVRHWLKIXATSQVQALWSFSMWMIYFWLPVQKPHASRLL

SEQ ID NO: 47059 - protein, 224 aa, Homo sapiens
MALMGQFWFVCFPHCRPRTCNSPWTLLIRIVALTDAAAERLVFLLDHKEDRGRSDLVAITDSSSKTCTFACPPRPQRGCLAIVPWSSPKCVWNLFLPVGLWSRLTSGVKPQTIAMNVAALKGGVKLQTFTWVRGLADFRSKAADLHGHPTAIENLADDRSSYFLLDRSEEGALQLWCPSEGNSLGQGKCQRTPSCRRKGFIQLGALASYCLKIRAPRVHNFCPF

SEQ ID NO: 47060 - protein, 111 aa, Homo sapiens
WWISLKLKNFFSLKNPVKLGAVVHACNPSTLGRLSWEEINSLRPGVQDHPGAAKSYTLEGRERPSHIVLYCFNTSVPCFKGKKTRKVKIKDRQPRHPGLKPSPWACPGPKP

SEQ ID NO: 47061 - protein, 608 aa, Homo sapiens
  DOMAIN (450)..(495): kw TRANSCRIPTASE REVERSE II ORF2 domain identified by eMATRIX, accession number DM01354N, p-value=1.000e-40, raw score of 13.17
NYGYGQLQKKKYRVLGYKMNGQNTGFQYDGHQLPGTCLDRCDQPLTLVKRYQKWSWSQLEAGATLPLVLPFHPYVENAWALRQPSGSLSPDQAQQALAGGAKCGACRACAHPEPTLAPACTSPFTPPCEQREPALASASPREEAPTVQPWAEGLLEHSQSRRRGRGGAESERGLLARCHLSIPRLNRIPPTAVGNLADDHSSYFLLDRWDCLVAGKQAQGSHGFYIMKETSKEISKGPQKPPGYQLCPLQAVGGGEFGPTWIHVPFSLSDLKQIKADLGKFSDDPDRDQEEEAQKEKQDQRKAAALVMALRQTNLGDSERTENGAGQSLAVEGQEIDFLLDNGAAFSVLISCPRQLSSRSVTIRGILGQPVTRYFSHLLSCNWETFLQISSPLEDTTTAGPFFTPIQEEVARVVIIQFPTAIGVSCLEGGLTGEANRASESETQTTIREYYKHLYANKLENLEEMDKFLNTYTLPRLNQEEVESLNRPITGSEIESIINSLPTKKSPGPDGFTAKFYQRYKEELVPFLLKLFQSIEKEGILPNSFYEASIILIPKTGRDTTKKENFRPISLMNIDAKILNKILANRIQQHIKKLIYHDQVGFIPGMQG

SEQ ID NO: 47062 - protein, 134 aa, Homo sapiens; identical to SEQ ID NO: 42419
  DOMAIN (92)..(134): Histone H2B proteins domain identified by eMATRIX, accession number BL00357, p-value=1.000e-40, raw score of 7.74
  DOMAIN (18)..(134): Core histone H2A/H2B/H3/H4 domain identified by PFam, accession name histone, E-value=8.6e-55, PFam score of 195.4

SEQ ID NO: 47063 - protein, 130 aa, Homo sapiens
  DOMAIN (88)..(130): Histone H2B proteins domain identified by eMATRIX, accession number BL00357, p-value=1.000e-40, raw score of 7.74
  DOMAIN (14)..(130): Core histone H2A/H2B/H3/H4 domain identified by PFam, accession name histone, E-value=3.7e-54, PFam score of 193.3
FAFNMPEPAKSAPAPKKGSKKAVTKAQKKDGKKRKRSRKESYSVYVYKVLKQVHPDTGISSKAMGIMNSFVNDIFERIAGEASRLAHYNKRSTITSREIQTAVRLLLPGELAKHAVSEGTKAVTKYTSAK

SEQ ID NO: 47064 - protein, 150 aa, Homo sapiens
  DOMAIN (108)..(150): Histone H2B proteins domain identified by eMATRIX, accession number BL00357, p-value=1.000e-40, raw score of 7.74
  DOMAIN (34)..(150): Core histone H2A/H2B/H3/H4 domain identified by PFam, accession name histone, E-value=8.6e-55, PFam score of 195.4
ISGRLTELPSSCFFPPIFRQLLPVMPEPSKSAPAPKKGSKKAVTKAQKKDGKKRKRSRKESYSVYVYKVLKQVHPDTGISSKAMGIMNSFVNDIFERIAGEASRLAHYNKRSTITSREIQTAVRLLLPGELAKHAVSEGTKAVTKYTSSK

SEQ ID NO: 47065 - protein, 91 aa, Homo sapiens
MAGESQIAIGFPSNNFCRGFRGMVVGEGKRLLVAFIAHGILSVRECYILDLEGQRLMKLVKKQKQLTQDDDTDAVEIAIDNTAFMDEFFSE

SEQ ID NO: 47066 - protein, 181 aa, Homo sapiens
MINWPDNTSFPSLPLLSHSPNDISWDRLQNKSNPCFWGCVWGNNLNQGNGFSEYFTRTLTEAAGKILFRRSHIRDVAVKRLKPIDEYCRALVRLPPHISQCDEVFRFFEARPEDVNPPKEQGPSPPDAVLPYGVNKGKQELKAGPNWPGRTHHVVNCVTQKCLFVFHFKFSSSGNKESKSL

SEQ ID NO: 47067 - protein, 290 aa, Homo sapiens
MVFRQQGQWDGFGFAIKITAGSVSTARFWKMQLLDKFPIEGGQKDPKQRIIPFLPEELPSQWASPRAQTGPGPAQVRTTVISQTLARSRACTLLTPGTLPAHSQCLLADLKTDVGAPPSESGSSLKGVSPAFLHPQKQRKMTKWAWLKYLLQGCCEDEGREFSEKLLVCTRASRGSSHRAQASDEHTAVPVEKGPVSGSHSQPVAQGDGPALWLQRKDDEGELEQESRRGTRMTQQALIEHLLNAKPSAPCSVGADRRGKILFRRSHIRDVAVKRLKPIDEYCRAFTVSG

SEQ ID NO: 47068 - protein, 186 aa, Homo sapiens
LRAIKLIRKVHSSILEVSKTTNPPEGTNSGHSVPLAILSCPSTSRQNTPRDRPWDMSQIHNGGAGLGDKGPSSLGPLLPLQREPLYNWQATKASLKERFAFLFNSELLSDVRFVLGKGRGAAAAGGPQRIPAHRFVLAAGSAVFDAMFNGGMATTSAEIELPDVEPAAFLALLSLCVGDTADDSQD

SEQ ID NO: 47069 - protein, 36 aa, Homo sapiens
LYIWWFELSMLCSIRNNAIKGLIKLPQENSSLAVYK

SEQ ID NO: 47070 - protein, 91 aa, Homo sapiens
AASGGGPERPRRPRRSSWVKASLNRSARRHREPTGPAARSCRRRAASWPRSWACSSAKAVSCAARRIGRDSDRRSTSCGLCSRAASSRRST

SEQ ID NO: 47071 - protein, 138 aa, Homo sapiens
PLHIDATVEPGRKSKAASAPHSPGLNVCARAPLATLVVAPIALAPPRRSSWLKASLNRSARRHREPTGTAARSCRRRAASWPRTLGLHAVRTAVSCAARRIGRDSDRRSTSCGLCTQGGQQPPQHHLLQAPGTRPRLV

SEQ ID NO: 47072 - protein, 77 aa, Homo sapiens
  misc_feature (1)...(77): Xaa = X or * as defined in Table 2
PKIIQPRRATTRFTSIHGWRICPSIPCFPEATINRRRCVKVDSVTCHLLTQRXYKSSKVQERCXSCRIQGQKISDCY

SEQ ID NO: 47073 - protein, 311 aa, Homo sapiens
  DOMAIN (244)..(287): Enolase proteins domain identified by eMATRIX, accession number BL00164B, p-value=1.643e-16, raw score of 16.22
  DOMAIN (204)..(311): Enol-ase domain identified by PFam, accession name enolase, E -value=4.4e-29, PFam score of 105.0
KIEDIITGLSQLLLGTAVWYSLAPTGISQPVGKVFVEKSRRFQAADRSELIKTTENIDVSMDVKPSWTTRDVALTVHRAFRMIGLFSHGFLAGCAVWNIGVIYVLAGDQLSNLSNLLQQYKTLAYPFQSLLYLLLALSTISAFDRIDFAKISVAIRNFLALDPTALASFYGSCTGKDLFRTISNGTSAVVYETLKLKLRRRLAMGKNVSKAVEHINKTIEPALISKHLNVIEQKRIDKLMIETVDPDNRSKFGVNIILGISFAVCKAGAAEKGFSLLSQNCEFAGNSEGILLVPAFTVTSNGSQSGNKLAV

SEQ ID NO: 47074 - protein, 281 aa, Homo sapiens
MAEETRQSKLAIAKEKIPLMTRPVPESIPLLRHTGLGPATLVPLDSSTKVSSVSPTPSASSPVPALANLPRVTLGGVECSDITIGLGTVITAILAFDLTTQSPKHCHPISGSSGHSTNFQLEEEWRLWDLGARGFRLPYSLNIDIDSGKSLHFPHELKTLTISLGGNERMGLLKEYWQRNSLGVPAGVKRNRKTSGSSPETATSGGCHSPEDSPCQELAVVLDPRSIKISQLNNTIKSLTPLERGINTFVLSTQSAIDLKTPLFEKCWKSYVLELIKYTRM

SEQ ID NO: 47075 - protein, 70 aa, Homo sapiens
MSGFPSQRSRRGDGTRSFRVKRFFFFLPETTVSFSSSGSKVTQLRSPAFSSAHGAFRAIFVHYNASHCKV

SEQ ID NO: 47076 - protein, 550 aa, Homo sapiens
  DOMAIN (222)..(233): dUTPase domain identified by eMATRIX, accession number PF00692B, p-value=9.325e-10, raw score of 8.14
  DOMAIN (132)..(279): dUTPase domain identified by PFam, accession name dUTPase, E- value=0.00033, PFam score of 11.1
MRAKWTSALSEKAFTLSLCKAKTQKYWSSGYGAGMIQSFSVPHVGSTRVAGTGYLQSWTVGPQSCPLETDLEMTPADGEPWKPGGSSCSFSVPLDTWVANSGAQPVTAHSGGESSIVWYGATRKHYDFHWGETDSMASEQDKQAVQLALDLWSIQDGPGELQVTVLDQQANWSLRNKMGRGLLNQQEEQQAKISTITVNMNADEWITTCSSLAMRGIIMYGAIIDSDYQGELKVILYTPDSFALKPQMWVAQLLVVPCQQPLRKSLPQQRLHTELGDSDPLVQGCCSLLGGHFRLYSSGLLLYLEMSLKEVGEQQRMVPAPSSEITDVKRHQPESKLAERKAKSAGPQKLQPPLPLGVQAQGDHSSVPEPLAGAVGVLGGRPCPSFDSNGLRHPHDLVLGLITPTPHVTSTHGRKQKGSRYVQKDYIARARVQNWTEDEMDEVTEVGFRRCVTAHSAELKKHVLTQCKEVKNLDKRLEELLNRVTSLKRNINDLMELKNTTQKLREAYESINSQIDQAEERISEFEDHLAEMRHADKFTEKRIKRSKQSL

SEQ ID NO: 47077 - protein, 134 aa, Homo sapiens
  DOMAIN (40)..(115): Immunoglobulin domain identified by PFam, accession name ig, E-value=1.1e-07, PFam score of 29.8
SSECLTMAWIPLLLPLLILCTVSVASYELAQPSSVSVSPGQTAKITCSGDVLAKKKYARWLQQRPGQAPVVVIYKDIERPSGIPERFSGSTSGTTVTLTISGAQVEDEADYYCYSATDNNLGVFGGGTKLTVLG

SEQ ID NO: 47078 - protein, 49 aa, Homo sapiens
VFCICALLCGGTGSSLCCLAASTGDTEANRVWSGPPANSSRPAAEGPDY

SEQ ID NO: 47079 - protein, 168 aa, Homo sapiens
SCGREARATMADRMSAAPAGDVGPGARGRELQVQLLSKVLEVLDPDRKLEDTWAYCQDTRKGMKEPTKLLKKHSTQVYLGPSKKTSASNAGQWLYEEKPHKMDLLHENGPRPGLHENVCKAVSDFCKWVTTFGISDIDEEFILKQFDIDYETKPSHDALHTMKLNQVP

SEQ ID NO: 47080 - protein, 376 aa, Homo sapiens
MQVESGERGGSPRKNPDIHARESRQWAVKNHRNPLEALHSVGHLGTGLLSKVLEVLDPDRKLEDTWAYCQDTRKGMKEPTKLLKKHSTQVYLGPQIGSGVDLQQTPADLQQRDLTVRRKTNKQKAVTPTSTKRTPTQETSFKGHQPQRSNIDKSMKIRKKQCKKAENSKNQNASSSPNDRNSSPASAQNWTENEVDELTEVGFRRNNARGSFRATEQVIQVCSLVIFDNKAGEETRTVLEENFAPKADLFEVVDELGKLQVVILGQQEGLQSLAQKFNELSIVARADVCIIGNWHNGDLSMDMNFPELQQPGVPARPGAVIVQCRTQDVWKHYGTVHTLYHQGDESWQLILAQRVAEGTSPEHIIDGCVAVWVSWM

SEQ ID NO: 47081 - protein, 188 aa, Homo sapiens
MVSTAQDKSRQRNVEEPDWLSFPGFIFLPCWMLPALEHWTTSSSAFGLLDLYQWFDRDSRAIGHRQKATLSASLLLRFGDSDWPPCSSACRRPIVELRLRPPATAAMEAMEMRLFGVELFCWICTLSSTQAPTPTDRPSVQLHVAGQEYSQAARFHCTFTVINVKWVLNVARQTYHASVAYSLSRYPT

SEQ ID NO: 47082 - protein, 399 aa, Homo sapiens
  DOMAIN (27)..(46): Eukaryotic  RNA-binding region RNP-1 proteins domain identified by eMATRIX, accession number BL00030A, p-value=3.000e- 10, raw score of 14.39
  DOMAIN (27)..(293): RNA recognition motif. domain identified by PFam, accession name rrm, E-value=1.3e-66, PFam score of 234.8
GSEGQGAGPGGAAATAAAMEDEMPKTLYVGNLSRDVTEALILQLFSQIGPCKNCKMIMDTAGNDPYCFVEFHEHRHAAAALAAMNGRKIMGKEVKVNWATTPSSQKKDTSNHFHVFVGDLSPQITTEDIKAAFAPFGRISDARVVKDMATGKSKGYGFVSFFNKWDAENAIQQMGGQWLGGRQIRTNWATRKPPAPKSTYESNTKQLSYDEVVNQSSPSNCTVYCGGVTSGLTEQLMRQTFSPFGQIMEIRVFPDKGYSFVRFNSHMESGRHMAIVSVNGTTIEGHVVKCYWGKETLDMINPVQQQNQIGYPQPYGQWGQWYGNAQQIGQYMPNGWQVPAYGMYGQAWESSQGFNSDTVFLAPWDGDPNFGSCNRLQGQNGSLLPNRPSGYRVAGYETQ

SEQ ID NO: 47083 - protein, 46 aa, Homo sapiens
VYCLLSQRRGRKGMEVSEQLMRQTFSPFGQIMEIRVFPDKGYSFVR

SEQ ID NO: 47084 - protein, 62 aa, Homo sapiens
  misc_feature (1)...(62): Xaa = X or * as defined in Table 2
MSTFPIHISPKLRGDDVRGRXLXWRWPLRGFCATVRWCPPGAAGWCAXPVRAESAFXRPAKS

SEQ ID NO: 47085 - protein, 102 aa, Homo sapiens
  misc_feature (1)...(102): Xaa = X or * as defined in Table 2
FCDCHHFILMFKSPHIWPVGIFSSWLLCFFWACLHHSLSIALLSCTKRYSGLILYFLCSSFEITVSSKSSVSFXRRMVFRNQVLGSRCACCCXGVAAPRPFP

SEQ ID NO: 47086 - protein, 265 aa, Homo sapiens
  misc_feature (1)...(265): Xaa = X or * as defined in Table 2
MGPHWLWLHLALVLLPPSALLLPSCEKGVLRVRFYHEKWIYVHKESTKERHGYCTLGEAFNRLDFSSAIQDIRRFNYVVKPLLPRYKFQRLNAITKDRQRSSSGVQLPHAGQPQGADPTQDERRQVAGDTPGDPRALAGGGVVDRTYPGSYEASGRPGLQLALAIEDLLRDSAIGCTFCDRCRPVGAQRLLAHSLALAAPGAEKREVVKLLLVAYVRRRPGKNLTTQNCQPAAGYIPPGHQXAASAHARSWKNQQPPPRVLIGSA

SEQ ID NO: 47087 - protein, 136 aa, Homo sapiens
  DOMAIN (36)..(48): ABC transporters family proteins domain identified by eMATRIX, accession number BL00211A, p-value=3.118e-10, raw score of 12.23
  DOMAIN (28)..(136): Cell division protein domain identified by PFam, accession name GTP_CDC, E-value=7.9e-62, PFam score of 218.8
MVAQQKNLEGYVGFANLPNQVYRKSVKRGFEFTLMVVGESGLGKSTLINSLFLTDLYSPEYPGPSHRIKKTVQVEQSKVLIKEGGVQLLLTIVDTPGFGDAVDNSNCWQPVIDYIDSKFEDYLNAESRVNRRQMPD

SEQ ID NO: 47088 - protein, 142 aa, Homo sapiens
  DOMAIN (3)..(141): Cell division protein domain identified by PFam, accession name GTP_CDC, E-value=8.2e-53, PFam score of 188.9
  misc_feature (1)...(142): Xaa = X or * as defined in Table 2
AWVEQSKVLIKEGGIQLLLTIVDTPGFGDAVDNSNCWQPGINYIDSKFEDYLNAESQVNRCQMPGNRVHCCLYFIAPSGHGPLHNXRLPPSGRIGXYMFVTTWHCLLLRLKPLDIEFTKHLHEKVNIIPLIAKADTLMPEEC

SEQ ID NO: 47089 - protein, 48 aa, Homo sapiens
MASASCSPGRPLASSEPGRIWIGKVDINQLIIPHRFVFSRVSRSFSEN

SEQ ID NO: 47090 - protein, 104 aa, Homo sapiens
  DOMAIN (33)..(102): Cell division protein domain identified by PFam, accession name GTP_CDC, E-value=2.1e-24, PFam score of 89.9
  misc_feature (1)...(104): Xaa = X or * as defined in Table 2
AWELEKSHLRRGLDPSHNINIRVEPKFXSKYGGVQLLLTIVDTPRFGDAVDNSNCWQPVINYIDIKFEDYLNAESRVNRCQMPGNRVQXXLYFIAPSGHGPLHN

SEQ ID NO: 47091 - protein, 117 aa, Homo sapiens
  DOMAIN (65)..(112): Cell division protein domain identified by PFam, accession name GTP_CDC, E-value=2.4e-15, PFam score of 57.8
GALRLPGLRGRAHEGPDSALAGAARQPGRHLSQKVQPIALSRRSSSMASASCSPGRPLASSEPGWQPAINYIDSKFEDYLNAESRVNRCQMPGNRVQCCLYFIAPSGHGLPPSGRIG

SEQ ID NO: 47092 - protein, 197 aa, Homo sapiens
DRPRITGGGKSGTEYPENLPTLKATIENKNSVLNTATKMKDVQTSTPAEQDLEMASEGEQKRLEEYENNQPQVKNQIHSRDDLDDIIQSSQTVSEDGDSLCCNCKNVILLIDQHEMKCKDCVHLLKIKNTFCLWKRLIKLKDNHCEQLRVKIRKLKNKASVLQKRISEKEEIKSQLKHEILELEKELCSLRFAIQQE

SEQ ID NO: 47093 - protein, 276 aa, Homo sapiens
MEQVKNQIHSRDDLDDIIQSSQTVSEDGDSLCCNCKNVILLIDQHEMKCKVSSQKQPAEKATSDEKDSVSNIATEIKEGQQSGTVSSQKQPASKTASDKTDSALNTATEIKDGLQCGTVSSQKQQALKATTDEEGSVSNIATEIKDGEKSGTVSSQKKPALKATSDEKDSFSNITREKKDGEISRTVSSQKPPALKATSVKEDSVLNIAREKKDGEKSRTVSSHKQPSLKATSDKEDSVPNMATETKDEQISGTGNFANTFNMMFVQDRRDLLFTK

SEQ ID NO: 47094 - protein, 180 aa, Homo sapiens
MLKNPKVQHASSPPNDRNVSLSRAQSWTEDLMNELTEIGFRRWVIKNYNELKEHVLTQGKEAKKLDKRAPGESSGCGHSFSRLKRPCLAALKRAADLPTQRSSSDKGADRHLIQESSGWHLAGASLGRSFQRKELAAIFAVLQLPWLIPGQTWSGVDRQQTPADLQQRALTVRRKTNRKE

SEQ ID NO: 47095 - protein, 55 aa, Homo sapiens
LLHRGSRSAFPRPRARKPPLALLQPLPPPPPQARRSLARDAATASSSRAARSVTD

SEQ ID NO: 47096 - protein, 451 aa, Homo sapiens
KQSFLNICKEATSNHKHFQEDTVHGRVQEGSGDDDNQSSIQEHCSYSFISGHFRGLPFTVLGWKIHSLKVAQSDGQAGSRTANCLPTGCCLEDSAAPMGLNTWEASKQTAFRWKLEGLAASPVLGNREHVWERVRTCPRNNTRLNRLQSRDAAAHMSICKLGAFDSLDGVILPVANEQLRNANEGLPLVVSCESANELCNLESQKLISALEEQAAKLKAEKIRVALEKIKEAQVKKLVIRVHMSDDSSKTMMVDERQTVRQVLDNLMDKSHCGYSLDWSLVETVSELQMECDVPCTFSQQNMTGMFLQLGLCQAGYDKDVPVPCGQMVRHAVSQAPNTIGMFHFCQGHPVQFYSMNRPASRHTPPTIGGSLPYRRPPSITSQTSLQNQMNGGPFYSQNPGLFQTSDLQNCKIINEWFLNNRNLFLTVLGSGKSTIKVLAELVSDEGLFLDS

SEQ ID NO: 47097 - protein, 178 aa, Homo sapiens
LISTEEPQSAGTVSDAEVHSISNSSHSSITSAASSMDSLDIDKVTRPQELDLTHQGQPITEVSRDLVCFLQLDHVNVYYGQDYRNKYKAPTDYCLVLKEEQAAKLRAEKIRVALEKIKEAQVKKLVIRVHMSDDSSKTMMVDERQTVRQVLDNLMDKSHCGYSLDWSLVETVSELQMG

SEQ ID NO: 47098 - protein, 547 aa, Homo sapiens
  DOMAIN (172)..(189): BROMODOMAIN SIGNATURE domain identified by eMATRIX, accession number PR00503B, p-value=8.667e-10, raw score of 9.96
  DOMAIN (164)..(221): Bromo domain identified by PFam, accession name bromodomain, E-value=0.0016, PFam score of 17.1
  misc_feature (1)...(547): Xaa = X or * as defined in Table 2
AVDIIKEIKHPQKHKKLPAFQLRPFPLREETIPCNGVSFPRCEPPCLAEVYMCLNEMLKDEKKGCMNKSGAGENPQERTAQKRKFPSPPHSSNGHSPQDTSTSPIKKKKKPGLLNSNNKEQVKQPLECIETQSKAMTMLTIEQLSYLLKFAIQKMKQPGVRRKLKPVPLEQHPDYAEYIFHPMDLCTLEKVGLRQMYGCTEAFLADAKWILHNCIIYNGGEWLRTQIAKVVIKICEHEVCVSQVCPECYLAACQKRDNWFCEPCVSWIYDSACQPVXWKLVIQMFLPMWKADILRGEEGXYTSELIGWLXSLSCDCSAGTSISHPSDSDXRWLTEHEGRRVSWPVNNCYLMSKEIPFSVKKTKSIFNSAMQEMEVYVENIRRKFGVFNYSPFRTPYTPNSQYQMLLDPTNPSAGTAKIDKQEKVKLNFDMTASPKILMSKPVLSGGTGRRISLSDMPRSPMSTNSSVHTGSDVEQDAEKKATSSHFSASEESMDFLDKSTGQLRAGERGGGPLDTGVSHGCTLGGPKQVSIKQQASVLQDTMNVPKS

SEQ ID NO: 47099 - protein, 54 aa, Homo sapiens
  misc_feature (1)...(54): Xaa = X or * as defined in Table 2
PSTLRAEAWPPXNGSPVPLASSQASSSRSGPTSCIPRYPVASPSERLPLPTAAA

SEQ ID NO: 47100 - protein, 149 aa, Homo sapiens
  DOMAIN (100)..(116): Phorbol esters / diacylglycerol binding domain proteins domain identified by eMATRIX, accession number BL00479B, p-value= 9.460e-10, raw score of 12.57
  DOMAIN (91)..(134): PHD-finger domain identified by PFam, accession name PHD, E- value=3e-10, PFam score of 47.5
HYTVLTMHPQSLAEEEIKTEQEVVEGMDISTRSKDPGSAERTAQKRKFPSPPHSSNGHSPQDTSTSPIKKKKKPGLLNSNNKEQDGRNDFYCWVCHREGQVLCCELCPRVYHAKCLRLTSEPEGDWFCPECEKITVAECIETQSKAMTM

SEQ ID NO: 47101 - protein, 177 aa, Homo sapiens
MFQCPVSLKKPFSCDFPASDQAQFTELKTKMLIVAYKFLRDLACSQFSAQIADNGGSGAKHLCRMELRRRSRQWKALRSLAEEEIKTEQEVVEGMDISTRSKACDAFGFLPVNPLSDSGPGWEKLGLEIAAKACGKIPAAALPADAERERESRCLSAFASQGGVYLVNPGHRQCLSG

SEQ ID NO: 47102 - protein, 33 aa, Homo sapiens
  misc_feature (1)...(33): Xaa = X or * as defined in Table 2
MILLVFLPXHQVFLERXQESEILHHLNTLADVL

SEQ ID NO: 47103 - protein, 43 aa, Homo sapiens
  misc_feature (1)...(43): Xaa = X or * as defined in Table 2
SGRLAPHTSRRTSANCSDDAKSSDSCSPSRKTXWSGRNTNRIH

SEQ ID NO: 47104 - protein, 278 aa, Homo sapiens
  DOMAIN (63)..(74): Nuclesosome assembly protein (NAP) domain identified by eMATRIX, accession number PF00956A, p-value=1.000e-13, raw score of 11.88
  DOMAIN (17)..(83): Nucleosome assembly protein (NAP) domain identified by PFam, accession name NAP_family, E-value=1.2e-36, PFam score of 134.5
MKVCDKEKGAGLPRVVKRRVNALKNLQVKCAQIEAKFYEEVHDLERKYAVIYQPLFDKRFEIINAIYEPTEEECEWKPDEEDEISVSTNFILLLKDTMSSVPEDQQRKTTWPHMIMTPSGWSRKRSGNVSQVVNAKEMFLKKIKSAIPENAQMIRKGNSLLVGMEKEQTSHNSPLNQSLIQSKALTLFLSMKAERGEEDAEEKCEASRDWFMRFKERGHLYNIKVQDETASTDLEATASYPEVLAKIICEDSYTKQQVFNVDKTALYWKKMPSRTSIA

SEQ ID NO: 47105 - protein, 95 aa, Homo sapiens
  DOMAIN (59)..(77): Nucleosome assembly protein (NAP) domain identified by PFam, accession name NAP_family, E-value=9.4e-06, PFam score of 24.1
  misc_feature (1)...(95): Xaa = X or * as defined in Table 2
CQNPQILASPSTKDLMGLGRNTNKDTLKACLARVVKRRSECSQKPASXMCTERNPTSMREVHDLERKYAVLYQPLFDXAVLKLLMQFMNLRKEGM

SEQ ID NO: 47106 - protein, 137 aa, Homo sapiens
HDFVETEIERCRFECQWERIPELVKQLSAKLIANDDMAELLLGESKLEQYLKEHPLRQGASPRGPKPQLTEVRKHLTAALDRGNLKSEFLQESNLIMAKLNYVEGDYKEALNIYARVGLDDLPLTAVPPYRLRVIAD

SEQ ID NO: 47107 - protein, 454 aa, Homo sapiens
MKVKLPALGTPLPSQVGTPPPSQVPREHRRSDRPQHQLLMAHTSWGCKACPWLWQRDDRAVAPAGVAVAAARVARAMDEGQDMESRGRNEPRGHRAQLSGSHGVSHRAWHAGTVLCALPVFPHFLLNELQGEVSQPRNGGLGMLNAMAQAASVLMKPPYQPGLPLRRGAGSRSPSPRRRREAARGRRGGGGGACGAGGRARPGRDGDQEGRLAAGDGDRACRSECQWERIPELVKQLSAKLIANGTGTGTLDFPAKGSLNPHRCLRTGPAPCKPFPSKPSVHPAAPRPAVCHTLPDDMAELLLGESKLEQYLKEHPLRQGASPRGPKPQLTEVRKHLTAALDRGNLKSEFLQESNLIMAKLNYVEGDYKEALNIYARVGLDDLPLTAVPPYRLRVIAEAYATKATAFWKHSKASSGNFHLPNCPGAAHIAVFSEAPWEESMIFDVVVAQYIRIM

SEQ ID NO: 47108 - protein, 249 aa, Homo sapiens
MAPVLSWFIVVDAVAAYKLANEPALARDTPDGPEPRSSPALNTHLHLLGRETQPVPQSTLRDGETEARKGTKDVMWPSPISRCPGYPMCLHILSCAILGVLFSLVYQGCRLGWSDNTALTRCLELEKLGLGDSVDLHVYEIPVEYQTVQRLIPALWEKHSPQLVVHVGVSGMATTVTLEKCGHNKGYKGLDNCRFCPGSQCCVEDGPESIDSIIDMDAVCKRVTTLGLDVSVTISQDAGSWWLLAILGL

SEQ ID NO: 47109 - protein, 55 aa, Homo sapiens
  DOMAIN (12)..(47): Prion protein domain identified by eMATRIX, accession number BL00291A, p-value=5.880e-10, raw score of 4.49
ASAAQARFPARPPPPPWAPARHGQHRTPPQGTGAPGPAPPGPPPSPTPAGPVRPP

SEQ ID NO: 47110 - protein, 250 aa, Homo sapiens
  DOMAIN (86)..(229): Immunoglobulin domain identified by PFam, accession name ig, E-value=1.5e-06, PFam score of 26.1
QSQLCAGNSGPALGVGGPGCPKSAETHARSSPVATGSRVGGRRAPCGPGMTSQRSPLAPLLLLSLHGVAASLEVSESPGSIQVARGQTSSLACTFTTSAALINLNVIWMVTPLSNANQPEQVILYQGGQMFDGAPRFHGRVGFTGTMPATNVSIFINNTQLSDTGTYQCLVNNLPDIGGRNIGVTGLTVLVPPSAPHCQIQGSQDIGSDVILLCSSEEGIPRPTYLWEKLDNTLKLPPTATQDLGDDLEQ

SEQ ID NO: 47111 - protein, 128 aa, Homo sapiens
  DOMAIN (55)..(128): SCAN domain identified by PFam, accession name SCAN, E-value= 2.8e-21, PFam score of 84.1
TVTFSQCRFGKMLPLEKAFASPQELPSPAGSAHAGVSSRSSSRKNPRPSLRGPLLTLEFSRLRFREFVYPEAAGPHHTLARLDELCRQWLMPEARSKEQMLELLVLEQFLSILPDKVRPWVVAQYPES

SEQ ID NO: 47112 - protein, 131 aa, Homo sapiens
  DOMAIN (30)..(128): SCAN domain identified by PFam, accession name SCAN, E-value= 2.6e-25, PFam score of 97.5
MGLYLETGPLQAWLSPDPLFLEQRRVREAKTEEDGPANTEQVGGHEQVGGCGPHQTLARLHELCRQWLMPEARSKEQMLELLVLEQFLGILPDKVRPWVVAQYPESCKKAASLVEGLADVLEEPDVRKPEE

SEQ ID NO: 47113 - protein, 159 aa, Homo sapiens
PVSSAALGRCCPGRDPMFVARGPPRCFCDQACGAARRGTAAQTIRGSAQEGRRHSGPKGEALAVELRAEKDAQVMNLGAFISGDLKERDSWRVEGCFGGGAQGLLTGLEGRQEGGGFGPGAGRRRWKGNEHKRRRQEGERLVRERKERTQDCHNAEFDI

SEQ ID NO: 47114 - protein, 151 aa, Homo sapiens
LAFRRRLRVSSYPLERCPWVHGWWGTPGLKGIPSCQRMEGGAGGPQASEHALAQACSGCTRQLAHGPVRLPSLHPKPRPRAPKRLGGALSVNIVVHPLPIPSPRGFRLASAQPGSRPGSAMGAPAASLLLLLLLFACCWAPGGANLSQDGE

SEQ ID NO: 47115 - protein, 322 aa, Homo sapiens
  DOMAIN (258)..(285): Protamine P1 proteins domain identified by eMATRIX, accession number BL00048, p-value=7.525e-09, raw score of 6.39
GNGPKKHSLYVVELESMSLTTIHSKGLWEDGLCRGKVGFWWKGAGLLMGRAAFLREKRDFLGDLQGEWLVKTIDVPNGRGSSPYFPESTWRLSGMSVSQIPHLYPILGKEGTGVSLHGQLEASGIPPERAATDEEAGTTHLNGAIALAKEVRGKEVVCDRMRKTRGRLRSGRAQGMTGKQEWTPTHQATTQTRHDEIFKIVQGEAPSPDGEAAASYPGDLAKIIDEGGCTKPARWISARPGTRPALEGCYARAEARLARVRRAARRGLHPQRRHRRRLRPRAARPGLPGQGLPVLHGRALRTDAGRQRLRGWPSPYMSLQGK

SEQ ID NO: 47116 - protein, 182 aa, Homo sapiens
MALVMAVEVVGTSWDLPVAYMGTVVAAVDLEGQFPGLQVAHEALAYSNASAFRRLNLYYWFASALSFVDWPFKTISLSEEIWKRGKRVCEAGKFKIKAPLDSMSDEGLLVHRCCILAVSSHSARGKETCVWHSGNNEVEGYGLMDDENEMFGGQERGKDFMMKTQKVVATKAKIGKWDLIKL

SEQ ID NO: 47117 - protein, 78 aa, Homo sapiens
  misc_feature (1)...(78): Xaa = X or * as defined in Table 2
LGESSQXGSPPPPTGGCGPATGQXPLGQSFQRKELAAIFAVSQYSLVVPPGMGETEATGIWSRPPANGNSPTVEWHIK

SEQ ID NO: 47118 - protein, 550 aa, Homo sapiens
IFADFGTTIKQDFRLLGQTSVDRLLQLSQGQAVKGNQLLPVSLAHVCQDAFIDFAKRRSDTASGTSTGNTSTLTSCVVQLPSCQKSVNPRDSVQEAQGTGHGKQGLVTEPQLQGWTESSGGEVGQEDAWKPRGDTVPEEVAGDPYWEDSPSQEEQDQGSGCFLVEPMCCTGDGGPSLIRTACVLQSWQAEAEHFKGLIMFHGTDIGKRQSGTPAMAISHMLPLIKWGCSGTSERLAPQATVQVNGLNDFIRSSKVGLLRNQREASTAGNGAGEWTERFHPFFQGTSERLAPQATVQVNGLNDFIRSSKVGLLRNQREASTAGNGAGEWTERFHPFFQGTSERLAPQATVQVNGLNDFIRSSKVGLLRNQREASTAGNSASKWTERFHRFSVFRGRDTKGTKLDRENEFHELTELGFRRWVITNSSELKEHVLTQCKEAKNLDKHLQELLTGITSSEKNINNPMELKNTARELREAHTSINSQINQVLERISQIEDQHIEIRHDDKIREKRMKRNEQSLQEIWDYVKRPNLRWTGVPERDGENGTRLENTL

SEQ ID NO: 47119 - protein, 100 aa, Homo sapiens
SLGCLMSELTHINCVALTARFPVGKPVVPAALMNRPTRGERRFAYWAPGWFFFSPSETGNSCIALHRLALRELQQSGPRWFCPKQAKILFDGWLKRGDIT

SEQ ID NO: 47120 - protein, 186 aa, Homo sapiens
MGPHPLHGSHSHEASFDDKRQEKRHVLHLVCNVKSPSKMPEINAKGREQKERAALSRLPCFVLVDTSVNITLSTACPGHHVMRLLACGLRVRYQHIIPLAKNVLKMCQPLQCQSNGHQSFTLECGEADAAILEARGLNVTIMKLDPYINVDPGTMSPIQHGEVFVTEDGAETDLDLGHYGYRRILS

SEQ ID NO: 47121 - protein, 109 aa, Homo sapiens
  misc_feature (1)...(109): Xaa = X or * as defined in Table 2
RNNLLLLTHHFVLIIQFLIPRKETKYYLVITPYSLSINVLSNFFYYSPESLNDTNCYHHEEADTPWRXFLAIFEGLFNIAHQMQNMPFFLLWKQVPETLVIQQQLPRIN

SEQ ID NO: 47122 - protein, 182 aa, Homo sapiens
AETFQNGKRLLDHQVSMDKKQTKKATKATPSITYTTKDEGPPSDHKGKIPDMHPEKLSEDELIDIKEEGGCDKKDVDVPEEETPFEKLTGELTEVSFRRSVITNYSELKEDARTHRKEAKNLEKILDEWLTRINSVEKTLNDLMELKTMARELGDACTSFNSQFNQVEERVSVIEDQINEIK

SEQ ID NO: 47123 - protein, 154 aa, Homo sapiens
  DOMAIN (43)..(76): Ribosomal protein L23 proteins domain identified by eMATRIX, accession number BL00050A, p-value=7.261e-17, raw score of 23.71
  DOMAIN (46)..(79): Ribosomal protein L23 domain identified by PFam, accession name Ribosomal_L23, E-value=2.5e-07, PFam score of 29.1
MKVSEESYHLPRSQIIPIVPNTFLKITVSADHGVCHEEDIKQQHTVFIVDVKANKHQITRAVKKLYDIDMPKVNTLIRDCSSLPATEQSWTKIDELTEVGFRRSVITNFSELKEDVRTHRKEAKNLEKRLDKWLTTINSVEKMLNDLMELKTMA

SEQ ID NO: 47124 - protein, 936 aa, Homo sapiens
  DOMAIN (400)..(443): kw TRANSCRIPTASE REVERSE II ORF2 domain identified by eMATRIX, accession number DM01354T, p-value=1.000e-40, raw score of 9.48
  DOMAIN (277)..(522): Reverse transcriptase domain identified by PFam, accession name rvt, E-value=2.1e-35, PFam score of 131.0
MVMLEGTGEEEWGAAENIPKSVERLWNRVTGRGWNRLEGSEEDRKMWERLELPRDLLNGFDQNADNNMDNKIKVQAEVASAGDEELVGNWSKGEKLQEFVDHKVWWLTHDWKNVKERGCNTCCDDRWMAVKPAARLWKGTIFPLGCYRNHRRYAHPLLVIPRQTGSGVDLQQAPTDLQLRDLTVRRKTNKQKGIAPTSTKRTSTPKPHLSPSSKTKVDKTTKMGRNQSRKAENSKNQSTPSPPKDRISSPAKEQRRMENDFDEFTEVGFRKSEAKNLEKRLDKWLTRINSVEKTLNDLMELKTMAREICDACISFSSRFDQVEIRVSVIEDPINEIKTKDKNHMIILIDAEKTFDKIQQPFMLRTLNELGIDGTYLNIIRTIYDRPAANIILNVQKLEAFPLKTGTRQGCPLLPLLFNIMLEVLARAIRQEKEMKGIQLGKEEIKFSLFADDIIVYLENPIFSAPNFLKLISNLSKFSGYKINVQKSQAFLYIINRQTESQIMSELRFTIATKRIKYLGIHLTRDVKDLFNENYKPLLNEIKEDTNKWKNIPCSWTGSINIVKTAILPKVIYRFNAIPIKLQLTFFTELEKTALKFMWIQGYSNQNSMVLTLLVIPRKMRSAVELQQTSTDLQLRDLTVRKKTNKRKATASTSQKGHLHQNPICRSPTSKTKEVGFRRSVITNFSELKEDVRTYHKEAKNLENRLDEWLTRINSVEKTLNDLKELKTMARDLHDACTSFNRRFDQVEERVTVTEDQINEINDGENGTKLENTPQDIIQENFPNLARQANIQIQEIQRTLQRYSSRRATPRHIIIRFTKVEMKEKVLKAAREKGRVTYKGKPIRLTADISAEILQARREWGPIFNILKEKNFQPRISYPAKLSFISEREIKSFTDKQMLRDFVTTRPALQELLKEALNMERNNRCQHCKNLPNCKDH

SEQ ID NO: 47125 - protein, 170 aa, Homo sapiens
  DOMAIN (108)..(141): Ribosomal protein L23 proteins domain identified by eMATRIX, accession number BL00050A, p-value=9.250e-27, raw score of 23.71
  DOMAIN (88)..(167): Ribosomal protein L23 domain identified by PFam, accession name Ribosomal_L23, E-value=7.8e-32, PFam score of 111.2
ASGTAPEIQARPTRPRRKRRRKLLPLTKAEAKAKALKAKKAVLKGVHSHKKKKIRTSPTFRRPKTLRLRRQPKYPRKSAPRRNKLDHYAIIKFPLTTESAMKKIEDNNTLVFIVDVKANKHQIKQAVKKLYDIDVAKVNTLIRPDGEKKAYVRLAPDYDALDVANKIGII

SEQ ID NO: 47126 - protein, 107 aa, Homo sapiens
FFQFSPKKNCSVWWNCAEVLLKYKTGETNDFELLKNQLLDPDIKRLPWLNRSQTVVEEYLAFLGNLVSAQTVFLRPCLSMIASHFVPPRVIIKEGDVDVSDSDDEDD

SEQ ID NO: 47127 - protein, 74 aa, Homo sapiens
  misc_feature (1)...(74): Xaa = X or * as defined in Table 2
YVSKFAGRLSSSSSESETSTSPSLMITRGGTKWGSNHAETRSEENSLCXYKITKKSQILFHYCFDFYSTKAISI

SEQ ID NO: 47128 - protein, 72 aa, Homo sapiens
MFQILMMKMIVSIKRFKPWARWLTPIIPAFWEAEMGGSLEAQEFETSLGNMVRPCLCKKTFFFKYFLKKGLK

SEQ ID NO: 47129 - protein, 33 aa, Homo sapiens
  misc_feature (1)...(33): Xaa = X or * as defined in Table 2
QRDIKSCVQILQWEGSTRPFTNEXXYMANVRNS

SEQ ID NO: 47130 - protein, 57 aa, Homo sapiens
FFFFKISDCLLKSFKNRAWKTFSNVPRTSSSEITLSLDSSGTYRRVPNPKPTIPTCF

SEQ ID NO: 47131 - protein, 65 aa, Homo sapiens
VLELPQKSQSRVYFHSSYKYFTWLKKPIPAVRIACSSSRVKNGQNATQKHVGMVGFGLGYSISEV

SEQ ID NO: 47132 - protein, 578 aa, Homo sapiens
LCFQNLLNQNIKTYWQLEHQGVELLENRHQQQSTFKPEEILYKTLGFSVAQATSSLISAGKGVFVTKGLVPKGAVVSMYPGTVYQKYEPIFFQSIGNPFIFRCLDGVLIDGNDKGISKVVYRSCNGRDRLGPLEMSDSTWLTSEIHNPLAVGQYVNNCSNDRAANVCYQEFDVPAVFPIELKQYLPNIAYSYDKQRANEQRRAQSPDGAPEPIAAAAATAAATKPPCKFLSPGSFLHVYRDLAWCSTSHFPKKPPDASPTHSGRGPALSVIRCRNGGSESQNGGHVAEEEIQARKETQKMQTQRKRPCEEAVRGQLPASQGERPQRNPALLTPSSWTSTLQSYTTQEERPKRKRQKEHTKKRRPPPTHPTTTTHENTQGQQQPQDKEQKKTEHRNREKSNARQARQTRHNTSNKRDTTKKSIERTQQNTHQSRENKTATNTQKKKKTKRGKKKEGTRNAETTKTNQADAGSDEHAEQTTERGRNERREQEREDRSTKSERAHKEPKGKHAKKNNTKDQTKESKPEQIRDNKKKERSESRSQNRHDTGTREQAKPGKENRKKAKRKTDTRSNTRDRANN

SEQ ID NO: 47133 - protein, 72 aa, Homo sapiens
NCRRSSRATTCRRCCATSLTARCPAAMGQSSRDLGTKRVRRRTIEVVTRASLKIRSQKLIESHKKHRRSRSP

SEQ ID NO: 47134 - protein, 235 aa, Homo sapiens
MEVAALEHLDHRLREKVKQQNALRHQVVLRQRRLEELQLQHSLRLLEMAEAQNRHTEVAKTMRNLENRLEKAQMKAQEAEHITSVYLQLKAYLMDESLNLENRLDSMEAEVVRTKHELEALHVVNQEALNARDIAKNQLQYLEETLVRERKKRERYISECKKRAEEKKLENELHGAQADPGSDLNPRADPPRAPAATVRRHHPGQPACQGGGAAAALEHVPDGGDLWQGQGRHWH

SEQ ID NO: 47135 - protein, 442 aa, Homo sapiens
MRCPPLTLALTSTHEQTHREHCCYSPTTPSRTACMPRRGAAAALEHVPDGGDLCKVKDATGTDETHEYTYGVIWGTEAQPLSRCGPCERMAPKTGGISCGIGRDSRAEIDGTLILERSYARLSSAPEATPSRSGDAQERERADVGEAEAEKQQLQRELEDLKYSGEPRCQQKLKPRRRSVSRRRSGGTPGQGPAGARLAGDASGQDSLEHLASKLIHITVVGDKPSPYCSDALLQAPTRTQNLGNYNKTTQTKTHNTYEQDAKSARRKNTKTTRKNHPERQQKEEREQNKPRPTNPTRHNQENNTATKNNPHTKKHTRAKQKHQNKNNYNRKFSGQRNNQCQNPERPRPDCRIAVVVLKPHALATPPQCVLVPRPDVNMHRRPRTKGALGAGRRRGARLLARKPAQEGGQVVLPKAKVELRDRGPGSHIAPCYPPTPLRRRE

SEQ ID NO: 47136 - protein, 592 aa, Homo sapiens
  DOMAIN (448)..(470): Methionine aminopeptidase subfamily 1 proteins domain identified by eMATRIX, accession number BL00680, p-value=4.130e-17, raw score of 14.37
  DOMAIN (369)..(592): metallopeptidase family M24 domain identified by PFam, accession name Peptidase_M24, E-value=3.5e-39, PFam score of 143.6
MSATGDRHPTQGDQEAPVSQEGAQAEAAGAGNQEGGDSGPDSSDMVPAAEVVGVAGPVEGLGEEEGEQAAGLAAVPQGGSAEEDSDIGPATEEEEEEEEGNEAANFDLAVATRRYPAAGIGFVFLYLVHSLLRRLYHNDHIQIANRHLSRLMVGPHAAVPNLWDNPPLLLLSQRLGAGAAAPEGEGLGLIQEAASVQEAASVPEPAVPADLAEMAREPAEEAADEKPPEEAAEEKLTEEATEEPAAEEPTSEEAVAPEGKGASGSSGEAGIHVSKGSGQGCGAGTAGEAGELEIISRFGWEIYWKKGKYSVPVEMIKQQQQVTKSQPEKWDEEAQDAAGEEEKEQEKEKDVENKVFKRKTSSMALLPHTKYQCAPESHQLEASSSGVLVLSLCEKDDAMIMEEIGKIFKKKIEMRKGIAFPTSISVNNCICHFSPLKSNQDYILKEGDLVKIDLGVHVDGFIANVAHTFVVDVAQGTQVTGRKADVIKAIHLCDEAVLRLVKPGNQNTQVTEALNKAAHSLNCTPIEGMLSHQLKQHVIDGEKTIIQNLTDQKKKDHEKAELAVHEVYAVDVLVSSGEGKSKDAGQRTTIYK

SEQ ID NO: 47137 - protein, 132 aa, Homo sapiens
RLVASAEQLLKELPWPPTFEKDKFLTPDFTSLDVLTFAGSGIPAGINIPNYDDLRQTEGFKNVSLGNVLAVAYATQREKLTFLEEDDKDLYILWKGPSFDVQVGLHELLGHGSGKLFVQDEKGAFNFDQEMY

SEQ ID NO: 47138 - protein, 658 aa, Homo sapiens
MPEVDSRGSLVLSRSRNHCHSCTYCEIVIVINLTEDTSRRLKVYRLWSQRSEQTNVKSHGISDRNPAATACAIALQARTLRAIPYSPPEEYLLLPASSAYELEFVIMVIAVSLRRVTAHCPSTPGPERVNQAVNAGLRSRRKSCFMLGSDIATCLVDLNHGSAVACECGHVTLSRAIFLLAHRAGKSAPAETTTRLPQYQTANNGRTAAQATTSIGVPVIPHAETRMPHAGHLPLRPHSPIASHPRPPRTTTRSTIASRPTSPPVNPRRPPPLQPARSKLRTHHASSHVWCLPPSRLAALRSHSALPPSNHVSPVTAGSLRPPFIAAIWPRALRPSAKLACLQARLSEDPLLPPGRQYALFACVVGLRLAPPSTRATITNVDATSRAQPPSAGWAIPARRPHPFYAHHVRQPHMHPPRDPTQRSAADSCCKELPWPQVFEKDKFLTPDFTSQDVLDFAGSGIPAGINIPNYDDLRWIIYTQYIAPTRHSTENSIRPSCRRWLITGTYGSHTRHIFLIYSYCIPSASFMYPLLHVASVTVYVISLYIPVDRDAHHDLSYMIIDAITCIATSLPLPTPTHHRRAQLPQISDRSSSLARSPTPDPIPDPAELLEFNRPLSSSSDSPRSPQSQRATTDRPSQGCRRSRHTHALHRPPRHPDS

SEQ ID NO: 47139 - protein, 112 aa, Homo sapiens
  DOMAIN (71)..(102): Dihydrofolate reductase proteins domain identified by eMATRIX, accession number BL00075A, p-value=4.900e-16, raw score of 27.70
  DOMAIN (69)..(96): Dihydrofolate reductase domain identified by PFam, accession name DiHfolate_red, E-value=6.9e-10, PFam score of 37.8
MATLCRDSMSKACVAEWHRPSSHLTHLVTGSPIPLKTLWKIDAGWCPVKKCVRAGLEELTAAVMVRLLNCIVAVSQNMGIGKNGDLPWPPLRNEFRSYQKSSIEVRRNGTEK

SEQ ID NO: 47140 - protein, 218 aa, Homo sapiens
  DOMAIN (79)..(91): DIHYDROFOLATE REDUCTASE SIGNATURE domain identified by eMATRIX, accession number PR00070C, p-value=9.500e-15, raw score of 13.09
  DOMAIN (34)..(185): Dihydrofolate reductase domain identified by PFam, accession name DiHfolate_red, E-value=2.3e-38, PFam score of 135.3
  misc_feature (1)...(218): Xaa = X or * as defined in Table 2
GRGGHNFAPNLTARSAVTSGLGGPPAAVMVGSLNCIVAVSQNMGIGKNGDLPWPPLRNEFRYFQRMTTTSSVEGKQNLVIMGKKTWFSIPERRNRPFKGXEFNLVLSRELQGNLPQGAHFLSRSLDDALKLTEQPELANKVGMVWIVGGSSIYKESMNHSSSLKLFVTRIIQDFESDTFFPEIDLEKYKFLPEYPGVFFDVQEEKGIKYKFEVHEKND

SEQ ID NO: 47141 - protein, 239 aa, Homo sapiens
  DOMAIN (125)..(165): G-protein coupled receptors proteins domain identified by eMATRIX, accession number BL00237A, p-value=9.200e-10, raw score of 27.68
  DOMAIN (90)..(176): Sodium:neurotransmitter symporter family domain identified by PFam, accession name SNF, E-value=9.1e-10, PFam score of 38.3
ALKTCSVNQPDAKDNIAGSSGHLRTLSPVVSRSCLKEEERRRRRRMKRRQRSRRRRSRRRRMRRRRRSRSRRRRMKRRKRRRRMKRRSSFILMYFFMLLLSGIPLLYMEVIMGQWLHVDNIRVWKQLVPWLCSMSYSSQSVCASVSLYNSTIISWNFFYSFAHPLPWDHCPLVKNISVTDWAHQYFLYHTTLHASDHSEEAAEALVPNRSLGCLLGRDHRDLDFKPEIRRGAHTGGARV

SEQ ID NO: 47142 - protein, 610 aa, Homo sapiens
  DOMAIN (117)..(167): Sodium:neurotransmitter symporter family proteins domain identified by eMATRIX, accession number BL00610A, p-value=8.857e- 29, raw score of 17.73
  DOMAIN (125)..(559): Sodium:neurotransmitter symporter family domain identified by PFam, accession name SNF, E-value=9.9e-26, PFam score of 96.4
MGTIITFTSYKAGGDDYVKVAAIAALVNLITSTRTTSLVFLVQGFWATTNGHACVEKFSQDLPGLKEEPQSPLRNYLTEKESSKKFQTPNSLSWRLKTKEIQATKTQNYFVQPKNTESILIQIAFSVGLGSVWRSPYLCHRNGGGSFILMYFFMLLLFGIPLLYMEVIMGQWLHVDNIRVWKQLVPWLCSMSYAHSLVSAHRVQPQVCASVSLYNSTIISWNFFYSFAHPLPWDHCPLVKNISVTGEERGQQGQGRQGHQGEEVNRSRHRARRGPTSTSCTTLPSMPRTTVKKRLKPSSRTAAWVVFSVVITGIWISTPGSEEDSVLSSDKLSRPGLSTENCCPIDSVKKCLTINQIPTSLQADTCSSDSYEGTQDRRQCATPLVVCLLNRKTRPKTNMKSQGTLNSQNNLEKEEKRWSPQEDEPSLAEAGAAPESLCEMKTEAQPSTSLLANTSWTGTVISDSVPGSQTWEDKGSLTRSATSWTSEAQVSAARVAEAQARTSQPKQISVLEALTASALNQKPTHEKVQMTEKKESEVLLARPFWSSKTEYILAQVGFSMKPSCLWRFAYLWLNSGGCKSGDQETWVHKGQSGQSPVQALTMNVSEICRD

SEQ ID NO: 47143 - protein, 380 aa, Homo sapiens
  DOMAIN (167)..(206): WD domain, G-beta repeat domain identified by PFam, accession name WD40, E-value=0.0082, PFam score of 22.8
ILYLHLQGPQEPYHITGSAQSPESHYLNWVQVWKKCLRYNLNEKQIWIKGDQCFLQLEDVKRNLFSFSLALHPDKTLVATGQVGKEPYICIWDSYNVQTVSLLKDVHTHGVACLAFDSDGQISRKEEKEFALKTCAKGSTEGYSGKQQMIPDGRPEIQEGIKVNKTGAKFRKYVGHSAHVTNVRWSHDFQWVLSTGGADHSVFQWRFIPEGVSNGMLETAPQEQWLAAGPLIKDGSACAQSPNQNVVPTEWNQPQNLAEFLVDFKGLGENSLDGISFRPSLNSVVCSKTLPTVEQQGNELDIVLPVYTWMPAALCICEIQKCASKSTNPGLDSCLLTEAHDAGVHTFLNTRHRVWHREVVEFGVYLNVGTRRSKALSSLP

SEQ ID NO: 47144 - protein, 145 aa, Homo sapiens
MVAEGGRCCAFSPDGKALAVGLNDGSFLVVNADTVEDMVSFHHRKEMISDIKFSKDTGKYLAVASHDNFVDIYNVLTSKRVGICKGASSYITHIDWDSRACCSLMTNGASDSGDIDNPSPDARTEEKQGARHQPEKSCFSIAEVL

SEQ ID NO: 47145 - protein, 321 aa, Homo sapiens
  DOMAIN (255)..(266): Trp-Asp (WD) repeat proteins proteins domain identified by eMATRIX, accession number BL00678, p-value=5.200e-10, raw score of 9.67
  DOMAIN (97)..(266): WD domain, G-beta repeat domain identified by PFam, accession name WD40, E-value=8.6e-05, PFam score of 29.4
MFAESNGNNSCHLFLEQGKYFGTEQGPATFWTLCGNALTAKRGIFGKTGDLQTILCLACAKEDITYSGALNGDIYVWKGLNLVRTIQGAHSVSITLWKSVGDLPNKAGIFSMYACEEGFATGGRDGCIRLWDTDFKPITKIDLRETEQGYKGVVLITSAPQPTPIYRVRTVSDALRYTSVSDSRPILTKIKAHLAGLSIRSVCWKADRLLAGTQDSEIFEVIVRERDKPMLILQGHCEGELWALALHPKKPLAVTGSDDRSVRLWSLADHALIARCNMEEAVRSVAFSPDGSQLALGMKDGSFIVLRVRHIAAPAPTGDVT

SEQ ID NO: 47146 - protein, 281 aa, Homo sapiens
  DOMAIN (8)..(23): G-PROTEIN BETA WD-40 REPEAT SIGNATURE domain identified by eMATRIX, accession number PR00320B, p-value=2.742e-11, raw score of 12.19
MYACEEGFATGGRDGCIRLWDTDFKPITKIDLRETEQGYKGVVLITSAPQPTPIYRVRTVSDALRYTSVSDSRPILTKIKAHLAGGGFTSKRGTFGSVGKLETMMCVSYGRMEDLVFSGAATGDIFIWKDILLLKTVKAHDGPVFAMYALDKGFVTGGKDGIVELWDDMFERCLKTYAIKRSALSTSSKGLLLEDNPSIRAITLGHGHILVGTKNGEILEIDKSGPMTLLVQPAKCVCDKIQIHGIGPVLIKHLSVFDVHCWHMDRPICEQTQNLGYTEDA

SEQ ID NO: 47147 - protein, 551 aa, Homo sapiens
  DOMAIN (461)..(472): Trp-Asp (WD) repeat proteins proteins domain identified by eMATRIX, accession number BL00678, p-value=5.200e-10, raw score of 9.67
  DOMAIN (83)..(472): WD domain, G-beta repeat domain identified by PFam, accession name WD40, E-value=3e-14, PFam score of 60.8
MGDLLSTAICWLSVPSIGPSSTFLITSGTGYGVQMWTPHLCGETPSVHSVKSLSIRSVCWKADRLLAGTQDSEIFEVIVRERDKPMLILQGHCEGELWALALHPKKPLAVTGSDDRSVRDMTEVVHIKDRKEVIHEMKFSPDGSYLAVGSNDGPVDVYAVAQRYKKIGECSKSLSFITHIDWSLDSKYLQTNDGAGERLFYRMPSGKPLTSKEEIKGIPWASWTCVKGPEVSGIWPKYTEVTDINSVDANYNSSVLVSGDDFGLVKLFKFPCLKRGAKFRKYVGHSAHVTNVRWSHDFQWVLSTGGADHSVFQWRFIPEGVSNGMLETAPQDNLNEKQIWIKGDQCFLQLEDVKRNLFSFSLALHPDKTLVATGQVGKEPYICIWDSYNVQTVSLLKDVHTHGVACLAFDSDGQRRAGTQDSEIFEVIVRERDKPMLILQGHCEGELWALALHPKKPLAVTGSDDRSVRLWSLADHALIARCNMEEAVRSVAFSPDGSQLALGMKDGSFIVLRVRHSVSSCVCEIQLVTSPCGADSPLTDRAPSEMFDRTF

SEQ ID NO: 47148 - protein, 756 aa, Homo sapiens
  DOMAIN (114)..(129): G-PROTEIN BETA WD-40 REPEAT SIGNATURE domain identified by eMATRIX, accession number PR00320B, p-value=2.742e-11, raw score of 12.19
  DOMAIN (92)..(653): WD domain, G-beta repeat domain identified by PFam, accession name WD40, E-value=8.3e-19, PFam score of 75.9
MQRRNGTGAPGGTWRASESPIGVGFWTLCGNALTAKRGIFGKTGDLQTILCLACAKEDITYSGALNGDIYVWKGLNLVRTIQGAHSVSITLWKSVGDLPNKAGIFSMYACEEGFATGGRDGCIRLWDTDFKPITKIDLRETEQGYKGVVLITSAPQPTPIYRVRTVSDALRYTSVSDSRPILTKIKAHLAGLSIRSVCWKADRLLAGTQDSEIFEVIVRERDKPMLILQGHCEGELWALALHPKKPLAVTGSDDRSVSLALHPDKTLVATGQVGKEPYICIWDSYNVQTVSLLKDVHTHGVACLAFDSDGQRLASVGLDAKNTVCIWDWRKGKLLASATGHSDRGHKNDGTDGDDHPVYLSLLKVLIGSNNLAYANSPYNLRGGYIKGSGGFTSKRGTFGSVGKLETMMCVSYGRMEDLVFSGAATGDIFIWKDILLLKTVKAHDGPVFAMYALDKGFVTGGKDGIVELWDDMFERCLKTYAIKRSALSTSSKGLLLEDNPSIRAITLGHGHILVGTKNGEILEIDKSGPMTLLVQGHMEGEVWGLAAHPLLPICATVSDDKTLRIWELSAQHRMLAVRKLKKGGRCCAFSPDGKALAVGLNDGSFLVVNADTVEDMVSFHHRKEMISDIKFSKDTGKYLAVASHDNFVDIYNVLTSKRVGICKGASSYITHIDWDSRAPPLGEPPKKAQANFLLQQSSLGSSLQANITVIVFTQSHGEKNKRDTGVALFKNPLTGTRSGDKLINFRVYIAGELQQ

SEQ ID NO: 47149 - protein, 85 aa, Homo sapiens
ECLCFLAAVGFLTMSRVISMSAPFFLGKIIDVIYTNPTVDYSDNLTRLCLGLSAVFLCGAAANAIRVYLMQTSGNSLSSQGCESS

SEQ ID NO: 47150 - protein, 210 aa, Homo sapiens
MRQRAPRDTLADNHSFWRNEGTRGHAGRGNPHVPAASATALLALGTYRMMRTAQLELVSHVRGLVQAKPWQEAAVGFLTMSSVISMSAPFFLGKIIDVIYTNPTVDYSDNLTRLCLRLSAVFLCGAAAIAIRVTSGNFSYSSLLGMWAETADCDCPCSAKVTFSKFAELVAHKVQFQNISVTLKRSLVPTCSQSFLVSGPRMPRIYFLSV

SEQ ID NO: 47151 - protein, 34 aa, Homo sapiens
  DOMAIN (3)..(19): PRION PROTEIN SIGNATURE domain identified by eMATRIX, accession number PR00341D, p-value=7.037e-09, raw score of 0.26
HVRGQSRGGEGGRGGGGGRGGGQRGGGGGGERTF

SEQ ID NO: 47152 - protein, 759 aa, Homo sapiens [sequence omitted]

SEQ ID NO: 47153 - protein, 800 aa, Homo sapiens
  DOMAIN (431)..(448): GTPase-activator protein for Rho-like GTPases domain identified by eMATRIX, accession number PF00620B, p-value=4.250e- 10, raw score of 14.20
  DOMAIN (377)..(529): RhoGAP domain identified by PFam, accession name RhoGAP, E- value=6.2e-34, PFam score of 126.2
SALPRDAQVARSRAGQDQQIHQGAQSQDGKSLISALKNLSSAKRKFADSLNEFKFQCIGDAETDDEMCIARSLQEFATVLRNLEDERIRMIENASEVLITPLEKFRKEQIGAAKEAKKKYDKETEKYCGILEKHLNLSSKKKESQLQEADSQVDLVRQHFYEVSLEYVFKVQEVQERKMFEFVEPLLAFLQGLFTFYHHGYELAKDFGDFKTQLTISIQNTRNRFEGTRSEVESLMKKMKENPLEHKTISPYTMEGYLYVQEKRHFGTSWVKHYCTYQRDSKQITMVPFDQKSGGKGGEDESVILKSCTRRKTDSIEKRFCFDVEAVDRPGVITMQALSEEDRRLWMEAMDGREPVYNSNKDSQSEGTAQLDSIGFSIIRKCIHAVETRGINEQGLYRIVGVNSRVQKLLSVLMDPKTASETETDICAEWEIKTITSALKTYLRMLPGPLMMYQFQRSFIKAAKLENQESRVSEIHSLVHRLPEKNRQMLQLLMNHLANVANNHKQNLMTVANLGVVFGPTLLRPQEETVAAIMDIKFQNIVIEILIENHEKIFNTVPDMPLTNAQLHLSRKKSSDSKPPSCSERPLTLFHTVQSTEKQEQRNSIINSSLESVSSNPNSILNSSSSLQPNMNSSDPDLAVVKPTRPNSLPPNPSPTSPLSPSWPMFSAPSSPMPTSSTSSDSSPVRSVAGFVWFSVAAVVLSLARSSLHAVFSLLVNFVPCHPNLHLLFDRPEEAVHEDSSTPFRKAKALYACKAEHDSELSFTAGTVFDNVHPSQEPGWLEGTLNGKTGLIPENYVEFL

SEQ ID NO: 47154 - protein, 24 aa, Homo sapiens
IENASEVLITPLEKFRKEQIGAAK

SEQ ID NO: 47155 - protein, 92 aa, Homo sapiens
  misc_feature (1)...(92): Xaa = X or * as defined in Table 2
WPGGGYSLLCFWCPLSFAGAAGWXPPPGHHXPYSPKQEHYRTNSDTLIFLSSRTLVLQGSXGIKVAGSEGPKYNEXPRNPVLPSLCLHLFGC

SEQ ID NO: 47156 - protein, 196 aa, Homo sapiens
MTFRCRQLALGGPVLITGLGPSNSGKWKNGLEMGPVDCVSSEHILPGAQEGPSCLQNQNWKPRTSRQHYRIHMGLLLDTKGSPRRMMLTQASAHSTVTRAQDALSTHGTGCPSLLTPIMEGAFVTARRYRALVLRENLRGDDWIMGTGSPHAVLVIPQAGALPNKSDTLIFLSSRHWFFKVLGDKVAGSEGPKYNE

SEQ ID NO: 47157 - protein, 75 aa, Homo sapiens
WLFISPGCRGLPRRSGSVSLQPLIREDLGRSQSESLGPEFQGLWEWLPEKRDLPLRVKEKGLGYLTLSQKSGTCR

SEQ ID NO: 47158 - protein, 207 aa, Homo sapiens
MGSWLQGLRAMVFALNYMVTRVRNKKDPPTTSGPQTHQPKKHLTNFKSETKETRFICGPKTPAPLMDWEGSLPLMFNHCRDTSLIIHPCFQGVRPCRDACLSPSPLAASPAFLGKGQVPLNPFFTLSGKSRFSGGGASTPTPSFHVSTPSLLFWGRGKYPSTPSSPLVASPAFLGEEQVPQPLLSMSLRLLCFSGEGASTPQPLLHP

SEQ ID NO: 47159 - protein, 20 aa, Homo sapiens
RCFFHYSPAPLVPASLCFHL

SEQ ID NO: 47160 - protein, 97 aa, Homo sapiens
SLEGRLSDYTPTFQGCQTTQGRLPWSFTLSGKSRFSGEGARACYKCQKSDHQGKERLQPRIPLKPYPICAGPHWKSDCSTHLAATPRAPGTLAQGSL

SEQ ID NO: 47161 - protein, 331 aa, Homo sapiens
MGTPFSCHNWYRTGSCTSQVHWLQDQCSMSVCPKTPVIVAYHSNLFWTSGHLNQLVGNTEFQCKDPHSLHSPFLSILILFPCCSASGWWRGGVENRTGGFVVVTKSCGFQEHYGAPRPHFGAMWKPSSTNRGGKSRRRGEHHTGMAEKERKEGASEQGVWLGTEIEKIGCWMTVLQPVWWSLHMDAHEIWCRDLDQGTSLGRSVPSSCSLLHEKDPPMTSGPQTDQPKKHLTNFKSEIKETCFIRGPKTLAPVMDWEGSLSLVFNHCKDAFLIIHPRFKGETQQIASSGEYVVKPLLLEKSREKSRGDFVLHLRYQHEYRAVEHQVGSWGQ

SEQ ID NO: 47162 - protein, 69 aa, Homo sapiens
  DOMAIN (30)..(51): NEUROHYPOPHYSIAL HORMONE SIGNATURE domain identified by eMATRIX, accession number PR00831E, p-value=8.099e-09, raw score of 11.64
LNTKGRLPSQSVTGAGVLGPRIKDVPFVFGRPVAPGGCCCTASCVSPSLIITIKCFESSFTLMELPGGF

SEQ ID NO: 47163 - protein, 499 aa, Homo sapiens
  misc_feature (1)...(499): Xaa = X or * as defined in Table 2
XTKETCFIRGPKTPVPVTDWEGSLPLVFNHCRDTSVIIHPRFKGVRPRRDACLGPSPLAASPAFLGKGQAELGPNSSSASAPPPYNLFIASPPHTWSGLQFRSVTSPPPPAQQFTLKKVAGAKGIVKRLKTDTARSPWKTPRPSRTPSFRKAERTKGLLKIHLTKLSHQLKKDWTILLPLSLLRIQACPRNATRLATGQLGYPFISQSYVLVNGFQTVEDLCEAADLRVSVADLRVSVTALKVARLELFVPPGGLVVSLASAVKLQTFAVLQLIKAKRWDWGTLEQGAALIGEARDAQEPTEGVGGSGMAGCRSRDLPRGKAAKARREIERSAGLTIKKERCIRNGYSKEKMKLIVVSHGLHVNDLQHKLTLFTKETYTYLARDSEKQKQGYLAGLEGAHANRVNQQISDNLAIVFGQKIQGHLSTTGQLLMAGQEGKLGQLLFLGISGWTIQLNDVYCLQTQSTIVHIRSEAGNSNPREWLPLLQGISSKDETQPFMP

SEQ ID NO: 47164 - protein, 87 aa, Homo sapiens
MRKTHLRPQVLRPTSPRNISPISNPVSGLFLLSSPTSLTITQPLSPFNLGTTLQSLPSLNFNSFHFLVETKETRFIRGSKTPAPVTD

SEQ ID NO: 47165 - protein, 132 aa, Homo sapiens
MLFSSTECIQCGLRACWIAVSTREASGVTGSMLTLESEAILVAVGEALVPGRQDQPNGNRGPHRMSVPQLVQSRDKIRTKPLQVTCEKFVHQEMSVGLHFSIYIDVDVDIDIDTDTDTDTDTDTDIDIDIDG

SEQ ID NO: 47166 - protein, 195 aa, Homo sapiens
  DOMAIN (72)..(100): kw ALLANTOICASE SPAC1F709C. domain identified by eMATRIX, accession number DM01595B, p-value=2.625e-15, raw score of 10.54
MAALLASCSSVIPSVEMRTLVRGETNTGTFKVDNSQRRSIARWLFAFDRGGALRHRKSDSPCFKEHEYTEFGKWMDGWETRRKRIPGHDWCVLRLGIQGVIRGFDVDVSYFTGDYAPRVSIQAANLEEAPQTLQDPRGQQHLQDWWTWGSQGGFVGSGCRRAGWEKQAGPMGSMGIAPRQVADEEGRQCDGFFWG

SEQ ID NO: 47167 - protein, 254 aa, Homo sapiens
  DOMAIN (188)..(199): PROTEIN REPEAT NEUROFILAMENT TRIPL domain identified by eMATRIX, accession number PD01351A, p-value=1.000e-09, raw score of 8.69
AMATPDVSVHMEEVVVVTTPDTAVDGSGVEGVKTVLVTTNLAPHGGDLTEDNMETENAAAAAAAAFTASSQLKEAVLVKMAEEGENLEAEIVYPITCGDSRANLIWRKFVCPGINVKCVQVSSNFHRTLDTQEVVLLEQKPQKPQAAQKPQAPQKPQAAQKPQAPQKPQAAQKPQAPQKPQAAQKPQAPRKPQAPRKPQAARKPQAPRKSTGPTDTTGSTDTTGPTGTTGPTEPTGCRVGPAAASAVGVLRLSR

SEQ ID NO: 47168 - protein, 60 aa, Homo sapiens
  misc_feature (1)...(60): Xaa = X or * as defined in Table 2
XNASDADGYVAAELLAKDVPDDAMEIPIGDRLYYGEYYNAPLKRGSDYCIILRITSEWNK

SEQ ID NO: 47169 - protein, 252 aa, Homo sapiens
  DOMAIN (133)..(145): Sushi domain proteins (SCR repeat proteins domain identified by eMATRIX, accession number PF00084B, p-value=3.813e-10, raw score of 9.45
  DOMAIN (113)..(168): Sushi domain (SCR repeat) domain identified by PFam, accession name sushi, E-value=2e-08, PFam score of 41.4
MKASRDDSTGTQSVKHAWKQGDSWRRLLAETAMEKKMAVQGAGWGSRISIKGQRLDPMESVREETVNLTTDSRTPEVCLALYPGTNYTVNISTAPPRRSMPAVIGFQTAEIDCGTPPEVPDGYIIGNYTSSLGSQVRYACREGFFSVPEDTVSSCTGLGTWESPKLHCQDSSLMLLQMAGVGLGSLAVVIILTFLSFSAVWYVRVSFLRNDWNGGEDGSESRRTAGDEGSQRECGWRLSLAQQSTLSGERHD

SEQ ID NO: 47170 - protein, 127 aa, Homo sapiens
  DOMAIN (38)..(72): 3 RETROVIRAL PROTEINASE domain identified by eMATRIX, accession number DM00892C, p-value=3.893e-16, raw score of 23.55
  DOMAIN (31)..(75): G-patch domain identified by PFam, accession name G-patch, E- value=3.1e-14, PFam score of 60.7
HRLSVMSMLAERRRKQKWAVDPQNTAWSNDDSKFGQRMLEKMGWSKGKGLGAQEQGATDHIKVQVKNNHLGLGATINNEDNWIAHQDDFNQLLAELNTCHGQETTDSSDKKEKKSFSLEEKSKIFKN

SEQ ID NO: 47171 - protein, 194 aa, Homo sapiens
MEAVMLLLLLLMVMRMLVSTGRRKQKWAVDPQNTAWSNDDSKFGQRMLEKMGWSKGKQPLVKEQPAPAGCQSGSSLVTTAYPVTQHSPRRHQSQNILDMTKLQRERTDEWFRGDKDEGFREGQLEGQKEQEHTIEEDIRSGNAFDGRENVSQKFLYVIEVQRRQTLAKSSVKKRRRYINHSPGMPSGFLAAIPA

SEQ ID NO: 47172 - protein, 204 aa, Homo sapiens; identical to SEQ ID NO: 34954
  DOMAIN (89)..(106): RNase H domain identified by eMATRIX, accession number PF00075A, p-value=4.000e-09, raw score of 14.44
  misc_feature (1)...(204): Xaa = X or * as defined in Table 2

SEQ ID NO: 47173 - protein, 138 aa, Homo sapiens; identical to SEQ ID NO: 43448
  misc_feature (1)...(138): Xaa = X or * as defined in Table 2

SEQ ID NO: 47174 - protein, 134 aa, Homo sapiens
HVHWGKENDQTFWGLLDIGSELMLIPGDPNRHCGPPVKVGAYGGQVINGVLAQIRLTVGPWTHLMVISPVPECIIGIDTLSSWQNPHIGSMTGRVRTPDLSQFIDSEPFEWSGSRVFLRKDLVRNGLNDVQAHW

SEQ ID NO: 47175 - protein, 559 aa, Homo sapiens; identical to SEQ ID NO: 37914
  DOMAIN (526)..(553): MARCKS family proteins domain identified by eMATRIX, accession number BL00826C, p-value=3.813e-09, raw score of 7.63
  DOMAIN (147)..(337): Reverse transcriptase domain identified by PFam, accession name rvt, E-value=6.9e-07, PFam score of 28.1

SEQ ID NO: 47176 - protein, 18 aa, Homo sapiens
  misc_feature (1)...(18): Xaa = X or * as defined in Table 2
LLKLQHXMQSPYLVGPSQ

SEQ ID NO: 47177 - protein, 269 aa, Homo sapiens
  DOMAIN (175)..(269): Integrase core domain identified by PFam, accession name rve, E-value=4e-15, PFam score of 56.3
DPKHHCGPPVNVGAYGVQVINGFLAQVQLTVGPVGSQTDSVVVSPVPECIIVIDILSSWQNPHIDSLTGSMRAIMVGKAKWKPLELSLPRKIVNQKQYRIPGGIVEISATVKSLKDAGAVIPTTFPFNSLIWSVQKTDRFWKMTVGYCKLNQVVTPIATAIPDVISLLEQISTSPDTWAIFFLTGINTDSGCGFAYPARNASAKTTIHGLMECLIQHHGIPYSIASDQGTHFMAKAVWQWAHAHGIHWSYHIAHHPEAAGLIEQWNGLL

SEQ ID NO: 47178 - protein, 375 aa, Homo sapiens
MEFITRQKSRQAPRGEVESLTHKEVHYTRKELFEFSNLYKQESGEQTWERILRVWYNGGRNVELDQAELIDLGPLRRDSAFSVTAWGVKKGSDSLFAWLAEIWIKRWPIETLRPFTRVTVHWEKRYDQTFQGLLDSGSELMLIPGDPKHHCGPPVKVGAYGGQVINGVLAQVQLTVGPQTYPVVIFPVPECIIGRDIFSNWQNHHIGPLTGRGYINFVALCYNLIRRDLDRFLLLQDITLVDYIDDIMLIRSSEQEVANTLDFLGHCWGNQFHRALRDGSGLKVHPKCGIHSTVAIVGHQPAPPESSAIVFKSFLAALLPLGEQPVLMTAAPVEQKAVPQGQAMAAGLALVQLLRMQTDLTSENSGTSLRMPWRN

SEQ ID NO: 47179 - protein, 397 aa, Homo sapiens
  DOMAIN (264)..(307): kw TRANSCRIPTASE REVERSE II ORF2 domain identified by eMATRIX, accession number DM01354T, p-value=7.245e-40, raw score of 9.48
  DOMAIN (132)..(386): Reverse transcriptase domain identified by PFam, accession name rvt, E-value=1.1e-28, PFam score of 108.8
MASTNTGSRTVLCKTHHPTSSPLTEECWGPESTVPTVPTAITTTEPKVTLSVTRHGMQQYGNLSDAKPSYCQLVSERSVKDSFHIHAQMTENEEYSSSGGDGGSEEDFSTNTKAVNRKTIWIFRDKDVPFLHIQGGQFSNEVLMICFREDGWQKLKCPRSTSDCCAGSKNFKPVDLSLLGSMGVGSAELDHWGPWLQPPFQGSEWFCIAGIPDAEKALDKIQHSFMLKTLNKLGIDGMYLKIIRAIYDETKANIILNGQKLKAFPLKTGTRQGCPLSPLLFNRLLEVLARAIRQEKERKGIHMGREEVKLSLFADDMIVYLENPIVSAQILLKLISNFSNVSGYKINVQKSQTFLYTTHRQTESQIVNELPLTIATKKIKYLGIQFTRDVKDLLKEN

SEQ ID NO: 47180 - protein, 124 aa, Homo sapiens
  DOMAIN (110)..(124): WILM'S TUMOUR PROTEIN SIGNATURE domain identified by eMATRIX, accession number PR00049D, p-value=4.661e-09, raw score of 0.00
VGQPRGLRTLEKLTASVAGGATNFFGDIERDLGPRDTSRGIRGGNLGDRGCSSAEMAYASWQRWSPVEWARWMWTAVTSSGDSSLLVLQGDSGKRSSDSEEAFETPESTTPVKAPPAPPPPPPE

SEQ ID NO: 47181 - protein, 119 aa, Homo sapiens
  DOMAIN (75)..(90): WILM'S TUMOUR PROTEIN SIGNATURE domain identified by eMATRIX, accession number PR00049D, p-value=4.661e-09, raw score of 0.00
MAYASWQRWSPVEWARWMWTAVTSSGDSSLLVLQGDSGKRQVISVYLVSVAHDGAVLGAWSSDSEEAFETPESTTPVKAPPAPPPPPPEVIPEPEVSTQPPPEEPAFPCDEKSAGPNPF

SEQ ID NO: 47182 - protein, 128 aa, Homo sapiens
  DOMAIN (80)..(95): WILM'S TUMOUR PROTEIN SIGNATURE domain identified by eMATRIX, accession number PR00049D, p-value=4.661e-09, raw score of 0.00
KENKLTTSVCFSSMREGPHLAQECSLGLWLLRPLQQLLEARFRSHAAPERLGMTKAKPFDINECLSSDSEEAFETPESTTPVKAPPAPPPPPPEVIPEPEGQHTATPGRTRTWSTGTDCGSAPGGPSH

SEQ ID NO: 47183 - protein, 32 aa, Homo sapiens
  misc_feature (1)...(32): Xaa = X or * as defined in Table 2
TEMASTTTCTRFHDEYQLFEELXKGAFSVNGT

SEQ ID NO: 47184 - protein, 120 aa, Homo sapiens
SGCSPLLGPPGVVAREPAWRSPCCPAPKTGAWASATQGGCPGPSSSCPASSRSVSPRLRQPSLLVCSCVQPKEGVREIHEGTGLESLEGARAQPGPRMASTTTCTRFTDEYQLFEELGKN

SEQ ID NO: 47185 - protein, 605 aa, Homo sapiens
  DOMAIN (232)..(263): Protein kinases ATP-binding region proteins domain identified by eMATRIX, accession number BL00107A, p-value=8.773e-15, raw score of 18.39
  DOMAIN (121)..(379): Eukaryotic protein kinase domain identified by PFam, accession name pkinase, E-value=1.1e-87, PFam score of 304.8
VLYPLHLGTGTGKGAGGASSGEEGSEARRRRRIGGLWGRRPHATLSGHLPSRPAPAHTPSRASYFRTRKVRAALGDSAAGPVPGLAARLLASGPSRSQPGHSPGPEMASTTTCTRFTDEYQLFEELGRGAFSVVRRCMKIPTGQGYAAKIINTKKLSARDHQKLEREARICRLLKHPNIVRLHDSISEEGFHYLVFDLVTGGELFEDIVAREYYSEADASHCIQQILESVNHCHLNGIVHRDLKPENLLLASKSKGAAVKLADFGLAIEVQGDQQAWFGFAGTPGYLSPEVLRKDPYGKPVDMWACGVILYILLVGYPPFWDEDQHRLYQQIKAGAYDFPSPEWDTVTPEAKDLINKMLTINPAKRITASEALKHPWICQRSTVASMMHRQETVDCLKKFNARRKLKGAILTTMLATRNFSAAKSLLKKPDGVKESTESSNTTIEDEDVKARKQEIIKVTEQLIEAINNGDFEAYTKICDPGLTAFEPEALGNLVEGMDFHRFYFENALSKSNKPIHTIILNPHVHLVGDDAACIAYIRLTQYMDGSGMPKTMQSEETRVWHRRDGKWQNVHFHRSGSPTVPIKPPCIPNGKENFSGGTSLWQNI

SEQ ID NO: 47186 - protein, 96 aa, Homo sapiens
  DOMAIN (2)..(17): POLLEN ALLERGEN POA PI SIGNATURE domain identified by eMATRIX, accession number PR00833H, p-value=8.375e-10, raw score of 2.30
MGTAAAAAAAAAAAAAGEGARSPSPAAVSLGLGVAVVSSLVNGSTFVLQKKGIVRAKRRGASLVQKEDPGGLSGLCVPGVLLRSPLRLRPAPNEYK

SEQ ID NO: 47187 - protein, 47 aa, Homo sapiens
RAMEPLLLGRGANRYLMFLLLKFSKAIEIPSSVQQVPTFLKQSKVQL

SEQ ID NO: 47188 - protein, 192 aa, Homo sapiens
  DOMAIN (92)..(192): dUTPase domain identified by PFam, accession name dUTPase, E- value=0.042, PFam score of -12.5
MVFQLLLRILTGGTLDIRLVLFQVKAAPLLFRKKTTRFSWTKDGNPFYFTDHRIIPSNNSGTFRIPNEGHISHFQGKYRCFASNKLGIAMSEEIEFIVPKVLVPEGGTLPPEETITIPLNWKLRLPPGHFGLLLLLSQQAKKGVTVLAGVIDPDYHNEISLLLHNGESKFFSFGLALLAPQPADGLLRDLVI

SEQ ID NO: 47189 - protein, 88 aa, Homo sapiens
RAMEPLLLGRGLIVYLMFLLLKFSKAIEIPSSGKVKTFSAILLSMDSPFQAGGIFGTPPGLGSRILSPSPMVSLGSCCTHRSPICFSP

SEQ ID NO: 47190 - protein, 220 aa, Homo sapiens
MSSKIQYFRFRYILEAQGSHDAQKAHPPDQRQPTRIPEREITQTHTPRTDAARITCSPNKQKASNRQRNEHQQHKGYENDGIIISIFNRKVCVDALGRSMGLGTVEQGQGVVPVGEALAAREPTGVEGAQAWAAVPPPGNGGLAELCHGGPRGRRGRQSSSARVIRMMRTQCLLGLRTFVAFAAKLWSFSALLRWQICMVIQHQTVRYDIIPLSSCPGIS

SEQ ID NO: 47191 - protein, 107 aa, Homo sapiens
  misc_feature (1)...(107): Xaa = X or * as defined in Table 2
TSSENNNGPKRXIHSTESLYLLQGSVVADHDYIGLPEIPIGAYQANILVEDATIGIVDNELLTSSKDRELLEYRNTKISPLIDDHSSLEKQTFSLLDSSNQVLEYLS

SEQ ID NO: 47192 - protein, 139 aa, Homo sapiens
CQRIQPDPMPAKGKPGTEQQGGMSERVWGPATAHCQVCGCSRAGSSQCWHRYWLPARLQLHQAYHKWLPLWHWGTQWGPEAGPRNWHSGPQASCHPSLKVELHQGPAPFCPEAVCLPPPSTCCSPKLFVPEHLQACAKP

SEQ ID NO: 47193 - protein, 64 aa, Homo sapiens
  misc_feature (1)...(64): Xaa = X or * as defined in Table 2
GLEPPQKPGLVTSILQANPVPLPCGNSQSRXTSTRCWYEHLQCTQSHLQMQQYHEAYQSACALA

SEQ ID NO: 47194 - protein, 410 aa, Homo sapiens
  DOMAIN (135)..(289): Integrase core domain identified by PFam, accession name rve, E-value=1.1e-12, PFam score of 47.9
MVRSGKNGDLHLKQIAYYKRTGEYHSTTLPSERSGIRRAAKKFVFKEKKLFYVGKDRKQNRLVIVSEEEKKKVLRECHENDSGAHHGISRTLTLVESNYYWTSVTNDVKQWVYACQHCQVAKNTVIVAPKQHLLKVENPWSLVTVDLMGPFHTSNRSHVYAIIMTDLFTKWIVILPLCDVSASEVSKAIINIFFLYGPPQKIIMDQRDEFIQQINIELYRLFGIKQIVISHTSGTVNPMESTPNTIKAFLSKHCADHPNNWDDHLSAVSFAFNVTHLEPTKNTPYFQMFSRNPYMPETSDSLHEVDGDNTSMFAKILDAIKEADKIMENKTTSLGQMENNNLDELNKSKIIVKKKPKQLNPFHLKVGHEVLRQRKNWWKDGRFQSEWVGPCVIDYITESGCAAPERQHWG

SEQ ID NO: 47195 - protein, 375 aa, Homo sapiens
MEDMPFAFRHDCEASPATWNSSARQRFQPAAGSTWTRRRQPSAAATCLSGFAVQNSLLNHPARLRRGHAPPSGSDANGSRKAVPASQGGVVVMIPRPASLRVALKAAAAAREWRKLKKATAGSGSEEPDNSRGGTGGENWDTKESEKQGTLWIPPAFGCRPEYDNGLEEIVFGFEPWIIVVNLAMPFSIFYRMHAAASLFEPQKVQARSWLLAASAPVSSEAFGWGDDYKNHVKCISEDQKYGGKGYEGKTHKGDIKQQAWIQKISELIKRPNVSPKVRELLEQISAFDNVPRKKAKFQNWMKNSLKVHNESILDQVWNIFSEASNSVNDERTVMHAQHGILLTNKMNIGQFSNLGESPEKNAERRVSLKRLHTV

SEQ ID NO: 47196 - protein, 263 aa, Homo sapiens
VLCLLLVEQNGRICFHQSPARGGSYKDTLQCQCASLCSKSPDLEVDVEGLGRRGGEVRLCPQRRHEAKNRRSASSRWLQSAKRQVLRSGRGSEAAGKGSAACGPLGAGRPQLREATSAHGVCSCSRHQHMEQGSPRIGNPRPGLRLQPRGPRGQPGRGKSGSLRQERRAWASAGGAGGAHPPAGWRRTQGSGGHPTGAPPAPAGARAAVPPASGALAAAVATPDPVLPPRTHQRGPRGRRSGDVGLWVAPHPWPAFPAPVPGE

SEQ ID NO: 47197 - protein, 1662 aa, Homo sapiens
  DOMAIN (697)..(708): Ribonucleotide reductase large subunit proteins domain identified by eMATRIX, accession number BL00089F, p-value=1.849e- 09, raw score of 11.05
  DOMAIN (399)..(840): Ribonucleotide reductase domain identified by PFam, accession name ribonucleo_red, E-value=7.7e-55, PFam score of 146.3
MKPYGRHGKVEIASCGCCASHDGEEDYYKWRTDHRRRFLRRDKKRARQESQKNIAELVQTDRAATYEVVYIEKRTGDECRVRASMIDGKEWYAIVRESDKKIMKQSNLPKVQLAEFIAELESKELFVVTSDTCVICKGLLGSLKDLGLSDFTEVRPISSKADKDFCRENGLWLADIVYYDANKLTIEDVKAGVELGVDKFDKPLRFGDIVMYTEDCKGRSDIKFGRVTGKKRGNFVISRMEDNLHEDLEKLFDETKRWWYCNAMSKASLTKDSKIMIKTIRKSDGTIVPFEPERLNKWASWADKRGIIWSEVTMEAMKRVYEGCSTKEMHQAMIDVCIDKQTQEYSDMAGRLLLGIIYKEAFGGFTKVPQLFNFVMKMEQMGLWEHMDYTEQEIDYLQGHIVHSKDISYGYAVLKQFRDKYGIRDIKSGRLFESPQFMFMGMAMKAFERQPKHRRLEDVIKLYTYLSDLKINAPTPYLNGLRATKSGYASCCLIKANDTAESLGIATKVAYDMTTKQAGIGMLMETRTIGDGIRQNTIEHMGKLPYYKLVRAAVEANKQKSRGGSANNFFTALDPQIEDLLRLKHPTTVPAKRINEMDYSFGANDYFWQCVQYDTDWLLFSYKDAPRLYDMFYTASADEFAMAVGHAVHTGVKHKRVKAREVAKLFIQQRYATGRVYPFFTNNANTHTPFKEALKMSNLCMEIILPVHGFEDERDLYSYTAPKEDGEVALCFLASLVAGRITEYEYADVAYYALAMVDSVIDLMDYPYPSMRNHVQKRRSVGIGLTNVAHYLAKNYVNYSSRAGKTKLHELAEMHSYYLHEASLRLAKERGVPEYMKFTKYPEENARLKSVRESAWLQERANSSLRQMIGGFVSAYAALELAQKTIDAGVKRQSAQLASTAIFGADTQQARMFAASFAHQIGQSYTSTMKQYSNFAAGAQPALGFEGTQEFYKNAAMFSRIRGASDEDLKGIMVAFQQMASKGKIQAEELRGQLGDRLAGAVQLFADAIGKTPQELDKLMKDGKLLANEVLPKVSERMAELVEAAGGMNAVSKQTATSMGQAKSMWDNMLVALFNNSSDGISQLSQSIAMFLQGSMGTAEALGTVIGYLLKGAGNLLDFVTDIMYRTSSLYYSAMAWYKDLDASQQKLIKDSAELVSTFAMIGVAIAAITKVAKIFGGTVAFVKSIFEEGIFAKIMQKFGLGGAAAASEAAGVAGVSATRMALGTVGSSLMLSGSTDRKNNGRFSEVDLPKPFEDAVASITNPKRPMFFDQNGQLQFAQYSVDAQGNRSFVDNGMSNWDIIMNNLSESLNNFATKFNQTPMMMTPSGFPMQTRQTLNVSFNLDENMEYDSPMMVTTQAMQSGQTVTDNVQRAPKTITISGVVVVGYEGSLLRTRQGQLVENFIDTVETWRDQKQIISVICKDGIKIDDSIITNFKASKEHTIANGLRIQMTFQGVEFKAVVGQTDVSAATGKTATTNDGGATSKKNTGNTTTSLGNGKLNCQLLYDLQSNGVRELSSDEYRALAACGRSANTSKGQTTFSDEAERTAGQALNRGAGTDTEWSTQTVTLEGTVFVIELKYKERLDRWFLTLTDVDGNVLLSEKKCLADQSITGRYVIPSLAGEIFVEKIFGTDLQPSRNNFGRDKAFELNYYTSEDMRLMENL

SEQ ID NO: 47198 - protein, 1467 aa, Homo sapiens
  DOMAIN (1051)..(1075): CLASS II CYTOCHROME C SIGNATURE domain identified by eMATRIX, accession number PR00608A, p-value=6.053e-09, raw score of 13.74
MCRNFLKPPQKLMLGLCFLYSLQNPSVSTSHQQAEDRIRTPFSVSVLHYAFGCVSKNSPDLEGLVSIKDKSQQVIVQGVHELYDLEETPVSWKDDTERTNRLVLLGHALRSHRHCNRIRPRMAGSPAVPEGYHVLVVNGCTSSVVLTVNVPKASQVALADKKARILKDVTFSGILAGAILDVDLKDVVCSWNGIAIEGFAPDSFLRLQRTSPLVTPVVGAGGQVALTRNADKTGTIEIELMQTSLSNQMLSAIQAKQDDMELEEDISSNFVIYDPSGSVLATGINAWLQELPQIELGRDQNSKTWIFGCARDGIKMSMKLGKVVVPTIAQMFSSLSGKEQKEGEESVTAVPFKELVEACFDRIDELDIDSMAALLFQGATVDDFPLNFFRSKHFQKPNFSVSMSSAMQTPLTDGAVAATYEEADEMKFVLAIYGMEGCKETLDQLFSMTFSDLLSLRQYLEIQRSYKEEIAYNELRKAVDSFIVELGFSEKVVKGLQRVEKMAMQSAQRIERNINKAFDVKPNKSSQEALNRIVKNAQTASGRINKALNNSLNLDSQGVKSLKRLETQGRKTAKEINKALRDAMKVDGKVTVRGGRKGGTGFPPTGGSGNPRPPRPDIAQRQMERMFNNNFYSGLTRRLETIGGQGNQMAASFRGNLQGLYNKYKGTGKVGEYEMEVKKLIDVTKRWVIAENARLKSVRESAWLQERANSSLRQMIGGFVSAYAALELAQKTIDAGVKRQSAQLASTAIFGADTQQARMFAASFAHQIGQSYTSTMKQYSNFAAGAQPALGFEGTQEFYKNAAMFSRIRGASDEDLKGIMVAFQQMASKGKIQAEELRGQLGDRLAGAVQLFADAIGKTPQELDKLMKDGKLLANEVLPKVSERMAELVEAAGGMNAVSKQTATSMGQAKSMWDNMLVALFNNSSDGISQLSQSIAMFLQGSMGTAEALGTVIGYLLKGAGNLLDFVTDIMYRTSSLYYSAMAWYKDLDASQQKLIKDSAELVSTFAMIGVAIAAITKVAKIFGGTVAFVKSIFEEGIFAKIMQKFGLGGAAAASEAAGVAGVSATRMALGTVGSSLMLSGSTDRKNNGRFSEVDLPKPFEDAVASITNPKRPMFFDQNGQLQFAQYSVDAQGNRSFVDNGMSNWDIIMNNLSESLNNFATKFNQTPMMMTPSGFPMQTRQTLNVSFNLDENMEYDSPMMVTTQAMQSGQTVTDNVQRAPKTITISGVVVVGYEGSLLRTRQGQLVENFIDTVETWRDQKQIISVICKDGIKIDDSIITNFKASKEHTIANGLRIQMTFQGVEFKAVVGQTDVSAATGKTATTNDGGATSKKNTGNTTTSLGNGKLNCQLLYDLQSNGVRELSSDEYRALAACGRSANTSKGQTTFSDEAERTAGQALNRGAGTDTEWSTQTVTLEGTVFVIELKYKERLDRWFLTLTDVDGWKLSFSNCCSTGSAGENPPFDSPLK

SEQ ID NO: 47199 - protein, 72 aa, Homo sapiens
  misc_feature (1)...(72): Xaa = X or * as defined in Table 2
SVLETCMSTAFPVSCHSSFKTAVLRISLSXISAQGGPIDLFSQCHPSSSTGVSSNHRGSWDTPGQSLVVICL

SEQ ID NO: 47200 - protein, 153 aa, Homo sapiens
  DOMAIN (79)..(122): Ribosomal protein S26e proteins domain identified by eMATRIX, accession number BL00733A, p-value=8.435e-28, raw score of 11.62
  misc_feature (1)...(153): Xaa = X or * as defined in Table 2
XLLRDYQQREGIAMDQLLSQRDFREGAYSGSARREPARELSRPDRPGQCGLNTTEHPLGPLTPAPSHSLRSSSPCPTRMTKKRKNNNHAKKGRGHMQPICCMNCARCMPKYKAVKKLVTGASLPNDGDEKYEKTIIKSGDQTFYKFMKRIAAX

SEQ ID NO: 47201 - protein, 555 aa, Homo sapiens
  DOMAIN (270)..(285): G-PROTEIN BETA WD-40 REPEAT SIGNATURE domain identified by eMATRIX, accession number PR00320B, p-value=1.871e-11, raw score of 12.19
  DOMAIN (69)..(538): WD domain, G-beta repeat domain identified by PFam, accession name WD40, E-value=5.3e-38, PFam score of 139.7
FAARAGPGGSRRARRGNKWARMPYEIKKVFASLPQVERGVSKIIGGDPKGNNFLYTNGKCVILRNIDNPALADIYTEHAHQVVVAKYAPSGFYIASGDVSGKLRIWDTTQKEHLLKYEYQPFAGKIKDIAWTEDSKRIAVVGEGREKFGAVFLWDSGSSVGEITGHNKVINSVDIKQSRPYRLATGSDDNCAAFFEGPPFKFKFTIGDHSRFVNCVRFSPDGNRFATASADGQIYIYDGKTGEKVCALGGSKAHDGGIYAISWSPDSTHLLSASGDKTSKIWDVSVNSVVSTFPMGSTVLDQQLGCLWQKDHLLSVSLSGYINYLDRNNPSKPLHVIKGHSKSIQCLTVHKNGGKSYIYSGSHDGHINYWDSETGENDSFAGKGHTNQVSRMTVDESGQLISCSMDDTVRYTSLMLRDYSGQGVVKLDVQPKCVAVGPGGYAVVVCIGQIVLLKDQRKCFSIDNPGYEPEVVAVHPGGDTVAIGGVDGNVRLYSILGTTLKDEGKLLEAKGPVTDVAYSHDGAFLAVCDASKVVTVFSVADGYSENNVFYGHHEK

SEQ ID NO: 47202 - protein, 333 aa, Homo sapiens
MDAIWGGWEGRFSTGWSHNTQRGQNGGGRNRVDTDQGLRAGTLVARHLLQGAHPNQLGKQNRQHSQIQVIMRKYIGYDLEPHLYPLVPVINSCRYWRVDTTGHTASGPQPSEQLPTTTSSAYINEITIRWSVHGAPGVPQYGQQRNWCLLDGRRPTTLSGPLFKSTKATLPLGLKPRDSLIVLLKDQRKCFSIDNPGYEPEVVAVHPGGDTVAIGGVRRLRIVRARDGCLRNNLRVALPRLLEGTVEESAPVGPLEGASPFVGGDRLECVGNHSVSNACGCLIACERTDRASLIGLKRLRLVRYGTAHSPDVVAVATPFASDAMRNSLNRDAL

SEQ ID NO: 47203 - protein, 627 aa, Homo sapiens
  DOMAIN (270)..(285): G-PROTEIN BETA WD-40 REPEAT SIGNATURE domain identified by eMATRIX, accession number PR00320B, p-value=1.871e-11, raw score of 12.19
  DOMAIN (69)..(627): WD domain, G-beta repeat domain identified by PFam, accession name WD40, E-value=1.7e-48, PFam score of 174.6
FAARAGPGGSRRARRGNKWARMPYEIKKVFASLPQVERGVSKIIGGDPKGNNFLYTNGKCVILRNIDNPALADIYTEHAHQVVVAKYAPSGFYIASGDVSGKLRIWDTTQKEHLLKYEYQPFAGKIKDIAWTEDSKRIAVVGEGREKFGAVFLWDSGSSVGEITGHNKVINSVDIKQSRPYRLATGSDDNCAAFFEGPPFKFKFTIGDHSRFVNCVRFSPDGNRFATASADGQIYIYDGKTGEKVCALGGSKAHDGGIYAISWSPDSTHLLSASGDKTSKIWDVSVNSVVSTFPMGSTVLDQQLGCLWQKDHLLSVSLSGYINYLDRNNPSKPLHVIKGHSKSIQCLTVHKNGGKSYIYSGSHDGHINYWDSETGENDSFAGKGHTNQVSRMTVDESGQLISCSMDDTVRYTSLMLRDYSGQGVVKLDVQPKCVAVGPGGYAVVVCIGQIVLLKDQRKCFSIDNPGYEPEVVAVHPGGDTVAIGGVDGNVALYSILGTTLKDEGKLLEAKGPVTDVAYSHDGAFLAVCDASKVVTVFSVADGYSENNVFYGHHAKIVCLAWSPDNEHFASGGMDMMVYVWTLSDPETRVKIQDAHRLHHVSSLAWLDEHTLVTTSHDASVKEWTITY

SEQ ID NO: 47204 - protein, 139 aa, Homo sapiens
  DOMAIN (83)..(98): G-PROTEIN BETA WD-40 REPEAT SIGNATURE domain identified by eMATRIX, accession number PR00320A, p-value=2.853e-10, raw score of 16.74
  DOMAIN (17)..(96): WD domain, G-beta repeat domain identified by PFam, accession name WD40, E-value=4.9e-06, PFam score of 33.5
RPGAATAAIMVSVIFTVDTSHEDMIHDAQMDYYGTRLATCSSDRSVKIFDVRNGGQILIADLRGHEGPVWQVAWAHPMYGNILASCSYDRKVIIWREDGRVFIWTCDDASSNTWSPKLLHKFNDVVWHVSWSITANILA

SEQ ID NO: 47205 - protein, 17 aa, Homo sapiens
HKFNDVVWHVSWSITAN

SEQ ID NO: 47206 - protein, 129 aa, Homo sapiens
  DOMAIN (7)..(22): G-PROTEIN BETA WD-40 REPEAT SIGNATURE domain identified by eMATRIX, accession number PR00320A, p-value=6.049e-09, raw score of 16.74
  misc_feature (1)...(129): Xaa = X or * as defined in Table 2
GMPTSTIASCSQDGRVFIWTCDDASSNTWSPKLLHKFNDVVWHVSWSITANILAVSGGDNKVTEGQQNEQXQDRWGLAPHPPAPGLPLPGPTNQTTGKSPQLQQDYFPRRSYRCSHRLIICLNVIGNAL

SEQ ID NO: 47207 - protein, 146 aa, Homo sapiens
  DOMAIN (59)..(74): G-PROTEIN BETA WD-40 REPEAT SIGNATURE domain identified by eMATRIX, accession number PR00320A, p-value=2.853e-10, raw score of 16.74
  DOMAIN (32)..(72): WD domain, G-beta repeat domain identified by PFam, accession name WD40, E-value=9.2e-06, PFam score of 32.6
AGCRNSARDGTRLATCSSDRSVKIFDVRNGGQILIADLRGHEGPVWQVAWAHPMYGNILASCSYDRKVIIWREENGTWEKSHEHAGHDSSVNSVCWAPHPPAPGLPLPGPTNQTTGKSPQLQQDYFPRRSYRCSHRLIICLNVIGD

SEQ ID NO: 47208 - protein, 423 aa, Homo sapiens
  DOMAIN (235)..(278): 1 kw MIND INHIBITOR DIVISION CONTROL domain identified by eMATRIX, accession number DM01756B, p-value=4.822e-15, raw score of 22.91
  DOMAIN (200)..(302): ParA family ATPase domain identified by PFam, accession name ParA, E-value=5.1e-22, PFam score of 86.6
  misc_feature (1)...(423): Xaa = X or * as defined in Table 2
MKLMETLNQCINAGHEMTKAIAIAQFNDDSPEARKITRRWRIGEAADLVGVSSQAIRDAEKAGRLPHPDMEIRGRVEQRVGYTIEQINHMRDVFGTRLRRAEDVFPPVIGVAAHKGGVYKTSVSVHLAQDLALKGLRVLLVEGNDPQGTASMYHGWVPDLHIHAEDTLLPFYLGEKDDVTYAIKPTCWPGLDIIPSCLALHRIETELMGKFDEGKLPTDPHLMLRLAIETVAHDYDVIVIDSAPNLGIGTINVVCAADVLIVPTPAELFDYTSALQFFDMLRDLLKNVDLKGFEPDIGCNAVSWAPAVVPVSLIDHPSGQKPNYIKRFASGGCDNLIKLWKEGGRTASGREEQKLEAHSDWVSRCGPGPPPSACPPAPSPAAPVLTGHHSKMTGNPAKTNADPSSPGFTGLTGIPAETWNAFX

SEQ ID NO: 47209 - protein, 57 aa, Homo sapiens
  DOMAIN (30)..(45): G-PROTEIN BETA WD-40 REPEAT SIGNATURE domain identified by eMATRIX, accession number PR00320A, p-value=4.706e-10, raw score of 16.74
GPQVSVINTVDTSHEDMIHDAQMDYYGTRLATCSSDRSVKIFDVRNGGQILIADLRG

SEQ ID NO: 47210 - protein, 423 aa, Homo sapiens
  DOMAIN (401)..(416): WILM'S TUMOUR PROTEIN SIGNATURE domain identified by eMATRIX, accession number PR00049D, p-value=6.949e-09, raw score of 0.00
  misc_feature (1)...(423): Xaa = X or * as defined in Table 2
QGEGHGRGLHGFLGRPESQIPSWSRSAPLHRLEIWGALAPSLADHSEGSPEVSVINTVDTSHEYMIYDAQMDYYGHPPGQPASSDRSVKIFXCAQWEGRSLFADLQGSWRGPVWQVGWGFTPLLRATSWAFVASLLTGKFIYSWERGKTGTLGRRATSNAGTRLLKLNFGCCWAPHGLTVLHSWACWVVSDRGPSSLLDFTPGEGQWEVKKINNAHTIGCNAVTWAPACCTWKPHRRPHRGQKPNYIKRFASGGCDNLIKLWKEEEDGQWKEEQKLEGHSDWVRDVAWAPSIGPAHQHHRPAAPRMGRVSIWTCDDASSNTWSPXIVDKFNDVVWHVSWSITANILAVLCGDNKVPLWKESSXWAKWVVPSSDVKQRGPGLPYQPSSDQEGPARNEQVNKDQGGALAPPPAQLPGPAPSPGPT

SEQ ID NO: 47211 - protein, 339 aa, Homo sapiens
  misc_feature (1)...(339): Xaa = X or * as defined in Table 2
MSGEFIDHSHIARIIYPGIFGTDAGSCIDQRGITGKLQQPPEDRRLGEGKLTNTKDIHTKTPSVRHHHQRPKVDKTTKIGKKQSRKTGNSKNQSAPPPPKECSSSPAMEQSWTENDFDELREEGFRRSNYSELKEEFRTHGKEVKNLEKRLDEWLTRITNAEKSLKDLMELKTKARGLQRVSVMEDEMNEMKQEEKFREKRIKRNKQSLQEIWDYVKRPNLRLIGVPESDGENGTKLENTLQDIIQESFPNLARQANIQIQEIQRMPQRDSLRRATPRHIIVRFTKVEMKEKMLRAAREKAHIALIPKLTTXLEVKLSSANVKEQKLXQTVFQTTVQSN

SEQ ID NO: 47212 - protein, 131 aa, Homo sapiens [sequence omitted]

SEQ ID NO: 47213 - protein, 877 aa, Homo sapiens
  DOMAIN (3)..(42): PROTEIN ZINC FINGER ZINC-FINGER METAL-BINDING NU domain identified by eMATRIX, accession number PD01066, p-value=2.125e-37, raw score of 19.43
  DOMAIN (214)..(572): Zinc finger, C2H2 type domain identified by PFam, accession name zf-C2H2, E-value=8.8e-103, PFam score of 354.9
MAFRDVAVDFTQDEWRLLSPAQRTLYREVMLENYSNLVSLGISFSKPELITQLEQGKETWREEKKCSPATCPADPEPELYLDPFCPPGFSSQKFPMQHVLCNHPPWIFTCLCAEGNIQPGDPGPGDQEKQQQASEGRPWSDQAEGPEGEGAMPLFGRTKKRTLGAFSRPPQRQPVSSRNGLRGVELEASPAQSGNPEETDKLLKRIEVLGFGTVNCGECGLSFSKMTNLLSHQRIHSGEKPYVCGVCEKGFSLKKSLARHQKAHSGEKPIVCRECGRGFNRKSTLIIHERTHSGEKPYMCSECGRGFSQKSNLIIHQRTHSGEKPYVCRECGKGFSQKSAVVRHQRTHLEEKTIVCSDCGLGFSDRSNLISHQRTHSGEKPYACKECGRCFRQRTTLVNHQRTHSKEKPYVCGVCGHSFSQNSTLISHRRTHTGEKPYVCGVCGRGFSLKSHLNRHQNIHSGEKPIVCKDCGRGFSQQSNLIRHQRTHSGEKPMVCGECGRGFSQKSNLVAHQRTHSGERPYVCRECGRGFSHQAGLIRHKRKHSREKPYMCRQCGLGFGNKSALITHKRAHSEEKPCFFSPWSFHRGPSHQYIVPSTPVPRPGLAAVTKQSLGSQLHPYQTTKKIDNLQPPPAIPPHQHLHNYSQALHNVRLRRTAYTVCLVLLKISVLQGRQGEKPTKLQAQAISHGKGGITWTADIMENHSQGQYGATKNIRLHNWLKMSFPNNVGPYPSRNGPSQSQNFQRNNQAAAFAVHQDPLFYSHRCSTATAADIQANRVWSGPLANSNRPAAEGPSCLLEGKLTNRKDIHTKNPSVRHHHQRPKVDKATKMGEKQSRKTGNSKKQSTSPPPKERSSSPAMEQSWTENDFDELREEGFR

SEQ ID NO: 47214 - protein, 385 aa, Homo sapiens
MSKGQEALNGGATDLGVGIAFDHVSWRIQRTAASSNSDEGPRTVWGLHEAMGARAASCSSAVFGYLTAQDEDGRSPCSLTLMSGALRVAELSRKPAAIPVLGDLHSKKEANCNGVVSEQQEGLKLLSYSGTSSAASLKLGHRHWSASKDTSLSLSLSPMPSLNGLTRCMWQQKRYTYGETCPLGERVRIGGGMCVLRLAQITMHHPCGDEAVTGPTGLSDDRIIDMHRVPSVESVCGVRSRNGATTSCKGTCGQEERNSSNINQKDIHTKNPSVRHHHQRPKVDKTTKMGKKQSRKTRNSKNQSASPPPKERSSSLATEQSWMENDFDELKEEGFRRSSYSELKEEVQTNGKEVKNFEKKLDEWVTRITNAEKSLKDLMELKTTA

SEQ ID NO: 47215 - protein, 395 aa, Homo sapiens
MTGSSFSLAHLLIISGLLCYSAGCLDPQGDVPDKADGGGKRGEARLGQPSWRDGREDAKEDGMDQMHRKKHKRGDGGQGIEEALPSLDQKKRGGHKACCLLTPPPPPLFPPPFFRGGRSPLLSPDMKNLMLELETSQSPCMQGSLGSPGPPGPQVLLPSSPPLPTKAKGETVKMLQKGFLDKQEYPPETPPHRVLAPLACLQEGAPSPLLLIPRQTGSGMDLRQTPTDLQQRVLTVRRKRNRKDIHTKTPSVHHHHQRPKVDKTTKMGKKQSRKTENSKNQSASPPPKERSSSPAMEQSWTENDFDELREEGFRQSNYSELKEEVRTHGKEVKNLEKRLDEWLTRITSVEKPLNDLMELKTMAQELRDKCTSLSSRFNQLEERVSVMEDQMNEMK

SEQ ID NO: 47216 - protein, 314 aa, Homo sapiens
MSESLKTREADSAALSLQPKAQGPQGRCWHKFQSQRLKILESDVQGQEEWKEANILHVKKKEPEDSACKFISSSPAFFVPAALVANWMMPTHIEGKEGEKKGERKVGRREEENKEKRREAEREKERKGESEGGGKEGKERQQEGMKGRKKDGRGREGGDLGWRKKDLQLRVLAVRRKTNKQKGHPHQKPICMSPSSKTKGRYNHKMGKRQSRKTGNSKNQSASPPPKECSSSPAMEQSWMENDFDEFREEGFRRSNYSELQEEIRTNGKEVKSFEKKLDEWITRITNAEKSLKDLMELKTKARELHDECTSLSS

SEQ ID NO: 47217 - protein, 205 aa, Homo sapiens
  DOMAIN (11)..(58): kw TRANSCRIPTASE REVERSE II ORF2 domain identified by eMATRIX, accession number DM01354V, p-value=8.297e-19, raw score of 12.97
MSKLPFTIASKRIKYLGIQLTRDVKDLFKDLFKENYKQLLNEIKEATNKWKNIPFSWIGRINIVKMAILPKPPLLIPRQTESGVYLQQTPTDLQLRVLLEGKLTNRKDMHTKNPSVRHHHQRPKVDKTTKMGKKQSRKTGNSKNQSASPPPKECSSSPAMEQSWMENDFDKLREDGFRRSNYSELKKEVRTNGKEVKNLEKKLDE

SEQ ID NO: 47218 - protein, 734 aa, Homo sapiens
  DOMAIN (396)..(437): kw TRANSCRIPTASE REVERSE II ORF2 domain identified by eMATRIX, accession number DM01354I, p-value=1.000e-40, raw score of 15.55
  DOMAIN (114)..(384): AP endonuclease family 1 domain identified by PFam, accession name AP_endonucleas1, E-value=5.2e-07, PFam score of -9.9
IKPQRWGKKQSRKTGNSKNQSASPPPKERSSSPAMEQSWTENDFDELREDSFRRLVITNYSELKEEVRTNGKEVKNLEKKLDEWLTRITNAEKSLKDLMELKTMAQELPDQCTSLSSRCDQLEERVSVMEDEMNEMKCEEKFREKRIKRNEQSLQEIWHYVKRPNLRLIGVPESDGENGTKLENTLQDIIQENFPNLARQANIQIQEIQRMPQRYSSRRATPRHIIVRFTKVEMKEKMLRVAREKGQVTHKGKPIRLTADLLAETLQARREWGPIFNILKEKNFQPRISYPAKLSFIDRSTRQKVNKDTQELNSALHQADLIDIYRTLHPKSTEYTFFSAPHHTYSKIDHIVGSKALLSKCKRTEIITNCLSDHSAIKLELRIKKLTRNHSTTWKLNNLLLNDYWVHNEMKAEIKMFFETNENKDKTYQNLWDTFKTVCRGKFIALNAHKRKQERSKIDTLTSQLKGLEKQEQTHSKASRRQEITKIRAELKERVGRWRIGEAADLVGVSSQAIRDAEKAGRLPHPDMEIRGRVEQRVGYTIEQINHMRDVFGTRLRRAEDVFPPVIGVAAHKGGVYKTSVSVHLAQDLALKGLRVLLVEGNDPQGTASMYHGWVPDLHIHAEDTLLPFYLGEKDDVTYAIKPTCWPGLDIIPSCLALHRIETELMGKFDEGKLPTDPHLMLRLAIETVAHDYDVIVIDSAPNLGIGTINVVCAADVLIVPTPAELNDYTSARE

SEQ ID NO: 47219 - protein, 225 aa, Homo sapiens; identical to SEQ ID NO: 41933
  DOMAIN (43)..(95): Ribosomal protein S5 proteins domain identified by eMATRIX, accession number BL00585A, p-value=5.800e-35, raw score of 28.43
  DOMAIN (46)..(164): Ribosomal protein S5 domain identified by PFam, accession name Ribosomal_S5, E-value=4.4e-60, PFam score of 213.0

SEQ ID NO: 47220 - protein, 344 aa, Homo sapiens; identical to SEQ ID NO: 39820
  DOMAIN (155)..(207): Ribosomal protein S5 proteins domain identified by eMATRIX, accession number BL00585A, p-value=7.300e-35, raw score of 28.43
  DOMAIN (158)..(295): Ribosomal protein S5 domain identified by PFam, accession name Ribosomal_S5, E-value=3e-79, PFam score of 276.7

SEQ ID NO: 47221 - protein, 319 aa, Homo sapiens
  DOMAIN (209)..(246): Ribosomal protein S5 proteins domain identified by eMATRIX, accession number BL00585B, p-value=7.207e-27, raw score of 18.78
  DOMAIN (178)..(259): Ribosomal protein S5 domain identified by PFam, accession name Ribosomal_S5, E-value=3.9e-14, PFam score of 54.2
  misc_feature (1)...(319): Xaa = X or * as defined in Table 2
HEAKHQMADDAGGSGGGPKALVGPGMGNPVAFRRGFGIVIRGPGSRPGGRGRGRGRGARGSKAEDKDWMPVTKLGRALVKDHXRSKFPWKEIYLFSLPHXRNQRIIDFFLGGLLSKDEGFEXLCPVQEQDPCPASRTQASRPFVAIGGLQMAHVGLGCXVLPRKVATGHPVGAIILAKLSIVPVRRGYLGNKVLAKPHTVPCKVTGRCGSVLVRLIPAPRGLGMVSAPVAKKLLMMAGIDDCYTSARGCTATLGQIWPRATLXLPFLRTYKLPXPPDLWKGRLYLPSFPIKEFTDHLVKDPHPESSVQQDSELQLVATT

SEQ ID NO: 47222 - protein, 51 aa, Homo sapiens
  misc_feature (1)...(51): Xaa = X or * as defined in Table 2
XKALADEASSGPPGSGVSGTVAPPRVGLAGSRPPKRSDGDTAVEASGSAAQ

SEQ ID NO: 47223 - protein, 686 aa, Homo sapiens
  DOMAIN (590)..(606): Myc-type 'helix-loop-helix' dimerization domain proteins. domain identified by eMATRIX, accession number BL00038A, p-value= 1.667e-10, raw score of 13.61
  DOMAIN (584)..(637): Helix-loop-helix DNA-binding domain identified by PFam, accession name HLH, E-value=3e-20, PFam score of 80.7
KWPKMNPQQQRMAAIGTDKELSDLLDFSAMFSPPVNSGKTRPTTLGSSQFSGSGIDERGGTTSWGTSGQPSPSYDSSRGFTDSPHYSDHLNDSRLGAHEGLSPTPFMNSNLMGKTSERGSFSLYSRDTGLPGCQSSLLRQDLGLGSPAQLSSSGKPGTAYYSFSATSSRRRPLHDSAALDPLQAKKVRKVPPGLPSSVYAPSPNSDDFNRESPSYPSPKPPTSMFASTFFMQDGTHNSSDLWSSSNGMSQPGFGGILGTSTSHMSQSSSYGNLHSHDRLSYPPHSVSPTDINTSLPPMSSFHRGSTSSSPYVAASHTPPINGSDSILGTRGNAAGSSQTGDALGKALASIYSPDHTSSSFPSNPSTPVGSPSPLTGTSQWPRPGGQAPSSPSYENSLHSLQSRMEDRLDRLDDAIHVLRNHAVGPSTSLPAGHSDIHSLLGPSHNAPIGSLNSNYGGSSLVASSRSASMVGTHREDSVSLNGNHSVLSSTVTTSSTDLNHKTQENYRGGLQSQSGTVVTTEIKTENKEKDENLHEPPSSDDMKSDDESSQKDIKVSSRGRTSSTNEDEDLNPEQKIEREKERRMANNARERLRVRDINEAFKELGRMCQLHLKSEKPQTKLLILHQAVAVILSLEQQVRERNLNPKAACLKRREEEKVSAVSAEPPTTLPGTHPGLSETTNPMGHM

SEQ ID NO: 47224 - protein, 45 aa, Homo sapiens
KWPKMNPQQQRMAAIGTDKELSDLLDFSAYSSPFSSPVSDVVYGT

SEQ ID NO: 47225 - protein, 92 aa, Homo sapiens
  misc_feature (1)...(92): Xaa = X or * as defined in Table 2
ATISFRYSQCKXAEQGCDSELGLFTKIRKSGYWGVXATISFRYSQCKALEIHLTAPVVPSALRIWGFQIPGFNQLSFHPSPESKGSFLPCCP

SEQ ID NO: 47226 - protein, 138 aa, Homo sapiens
MAAFSVLRPRVPGSSGTWAADPDASTAVSPSLRFGGREPARPTRGGATVPATPLPGGPDEASSASGRGLLLEDLLEVAEDESPATTHGRYRDRQGAERPTGLQCVLLTIFLSSIRCSLWYLKDVSDKKSSPELEFRAF

SEQ ID NO: 47227 - protein, 595 aa, Homo sapiens
MAPPDEWMGHLLQQAQGQAEEPLLVATSNTTTREFLSGHHRCSLKAQGLSSQLVVNAARLGTHPLGQWAPLWPKAGPEMLTKGLGLHSGTPGACFIPYSTAAELVPELPQLRICLVTPEASTSQSPRPMAYHLGMAAGYLGPKGSLISRNVCYELEPHDCLVPYPTVAELVSKMCVDSSNQAATVKRWETGGIGTSRLSFLPPFSASFSDMKLKPAAPCDIPDSVTRRPSPCGTLWPEGARRAMLCTVSGVLIPMVTKLCTLGPSRRLRKLLEAEFLREGQGPLQILYVNGKHWVRTWPLPKLLLAGSIQHPERDGPQGLEALSQQPTTPEHHRARLFRGSPGLHEVVALEGPAPQARPQPGGRACNININKKDVPSEDHQHQITKVDKSMKMRENQHKKAENSKHQNASCPPKDHNSLPAREQNWMENEFDELTEVGFKTWVTTNSSELKEHVLTQCKEAKHLEKRALIGPFYSVLVGPFYRVLTGPSYRVLIGAFYKPLATYSVLIGAFYNPSYRVLIGAFYNSLVFIQATEHSAPSLQDQHLRRKQKTTQSILGFWVSKPQGTPEMPDEKKANLSHPTRPPPTLPDRTDSPY

SEQ ID NO: 47228 - protein, 1012 aa, Homo sapiens; identical to SEQ ID NO: 30868
  DOMAIN (152)..(203): DNA mismatch repair proteins mutL / hexB / PMS1 proteins domain identified by eMATRIX, accession number BL00058A, p-value= 5.615e-39, raw score of 20.73
  DOMAIN (142)..(412): DNA mismatch repair protein domain identified by PFam, accession name DNA_mis_repair, E-value=1.5e-43, PFam score of 158.1

SEQ ID NO: 47229 - protein, 236 aa, Homo sapiens; identical to SEQ ID NO: 44738

SEQ ID NO: 47230 - protein, 41 aa, Homo sapiens; identical to SEQ ID NO: 44739
  misc_feature (1)...(41): Xaa = X or * as defined in Table 2

SEQ ID NO: 47231 - protein, 445 aa, Homo sapiens; identical to SEQ ID NO: 30861

SEQ ID NO: 47232 - protein, 114 aa, Homo sapiens; identical to SEQ ID NO: 44741

SEQ ID NO: 47233 - protein, 83 aa, Homo sapiens; identical to SEQ ID NO: 44742
  misc_feature (1)...(83): Xaa = X or * as defined in Table 2

SEQ ID NO: 47234 - protein, 434 aa, Homo sapiens; identical to SEQ ID NO: 44743

SEQ ID NO: 47235 - protein, 391 aa, Homo sapiens; identical to SEQ ID NO: 44744

SEQ ID NO: 47236 - protein, 385 aa, Homo sapiens; identical to SEQ ID NO: 44745

SEQ ID NO: 47237 - protein, 72 aa, Homo sapiens; identical to SEQ ID NO: 44746
  misc_feature (1)...(72): Xaa = X or * as defined in Table 2

SEQ ID NO: 47238 - protein, 311 aa, Homo sapiens
SNRECHPSSLSNHKDLNSQLAPGVDPSPPHRSFCWKRKMEWWDESEESLEEEPRKVLAPEPEEIWVAEMLCGLKMKLKRRRVSLVLPEHHEAFNRLLEDPVIKRFLAWDKDLRVSDKYLLAMVIAYFSRAGFPSWQYQRIHFFLALYLANDMEEDDEDSKQNIFHFLYGKTRSRIPLLRKRWFQLGRSMNPRARKNRSRIPLLRKRRFQLGRSMNPRARKYRSRIPLVRKRRFQLRRCMNPRARKNRSQIVLFQKLRFQFFCSMSGRAWVSPEELEENTGPRGDVDFQQELYSNANGRHQEGEEEPFVQII

SEQ ID NO: 47239 - protein, 186 aa, Homo sapiens
MLPDHLKSPVDHHRRRASSNSHSGSAEGEARPLKIGIFQDLVDRVAGEMNLSKTQLRSALRLYTSSWRYLYGVKPGATRVDLDGNPCGTQYGENSDKGEFFYGICLNADYLADLTLSLLENGNLHLVHVGTGRMLLKDPHYGGACLFPAYAVAAVPEVLQAVALPLSIMFKGVPSVGWETLVILSH

SEQ ID NO: 47240 - protein, 255 aa, Homo sapiens
  DOMAIN (190)..(223): TPR Domain domain identified by PFam, accession name TPR, E- value=9.9e-05, PFam score of 29.2
MAKRSQHTAQAIASQGSGPKPWQLPHGVGPAGAQKSRVEVWEPLARFQRMYGKAWMSRQKFAAGQSPHGEPLLGQCRREIFEKRATILQTQNSRSTDSLHSVPGKATDTQGQPMKEARSGAVPCKAIESELPKTLGSHLLHPCDLNASAEFGLVFLCALTGQQRVQCFTIAVSLTVVKEAHCTKPQLPGVNELKEKGNKALGVENIDNALQCYSEAIKLDPHNHVLYSNCSATYAKKGDYQKAYKDGCKTVDLKV

SEQ ID NO: 47241 - protein, 139 aa, Homo sapiens
LITLGVPQDLEHLGVGGVLAQGPHHVPTLAVQDLAIPHSVKQLEGLLELLQLVLVKLDHHFGEIDWRLLGFLRGLGDSWLSFGLGWRSPCCCWLSSRFGDGGPCWFLHGNILLGRHDVRWPKDSVRMGAPISCGVRVWG

SEQ ID NO: 47242 - protein, 612 aa, Homo sapiens
  DOMAIN (557)..(610): Histone H3 proteins domain identified by eMATRIX, accession number BL00322B, p-value=1.000e-21, raw score of 13.68
  DOMAIN (326)..(386): FYVE zinc finger domain identified by PFam, accession name FYVE, E-value=8.9e-20, PFam score of 75.1
HMKPLQVVLICALVLLLGCCLEHGQESLEVHMPGLQVITLGVPQDLHHLGTGEVLVQGPHHVPKLAVWDLAIPHSVKQLEGHLELLQLILVKLDHHFGEINWGLLGFLRGLGDGIAGSALVLAGGAHAAAGLAAPLEMEGPAGSSQNILGRHDVWWPKDSVRMGAPISCRTHEMATDDKTSPTLDSANDLPRSPTSPSHLTHFKPLTPDQDEPPFKSAYSSFVNLFRFNKERAEGGQGEQQPLSGSWTSPQLPSRTQSVRSPTPYKKQLNEELQRRSSALDTRRKAEPTFGGHDPRTAVQLRSLSTVLKRLKEIMEGKSQDSDLKQYWMPDSQCKECYDCSEKFTTFRRRHHCRLCGQIFCSRCCNQEIPGKFMGYTGDLRACTYCRKIALSYAHSTDSNSIGEDLNALSDSACSVSVLDPSEPRTPVGSRKASRNIFLEDDLAWQSWHSVGGEPAKKASGMLSFFRGTAGKSPDLSSQKRETLRGADSAYYQVGQTGKEGTENQGVEPQVMNPPVELREKEGLAWTLCVQDRGKGAGCVAQRHLVQETAKDFKTDQHIQSTAAGALQEKSDVYQVGLSGDTELCAIQAKCVTIMPKDIHAAFMENLLDNPL

SEQ ID NO: 47243 - protein, 354 aa, Homo sapiens
  DOMAIN (15)..(48): Chloramphenicol acetyltransferase proteins domain identified by eMATRIX, accession number BL00100E, p-value=2.929e-33, raw score of 15.41
  DOMAIN (1)..(47): Chloramphenicol acetyltransferase domain identified by PFam, accession name CAT, E-value=1e-34, PFam score of 128.7
MDNFFAPVFTMGKYYTQGDKVLMPLAIQVHHAVCDGFHVGRMLNELQQYCDEWQGGAAATIAWGFTSGLIHLIHSCAWRCHSRRLESSKDGFLFLLLGPLPSGDTNLMPVRSLLYRMSDNPCWKVSPSWVAQGARPVLRSTLSFGGGVTNKKPTQASITKVKQFEGSTSFVRRSQWMLEQLSPELNPRPSLLPVVDLKIPLEKNPFAGNISALADAENISRKIITRCINTAKLPKSVVALFSHPGELSARSGDALQKAFTDKEELLKQQASNLHEQKKAGVIFEAEEVITLLTSVLKTSSASRTSLSSRHQFAPGATVLYKGDKMVLNLDRSRVPTECIEKIEAILKELEKPAP

SEQ ID NO: 47244 - protein, 186 aa, Homo sapiens
METGKSKICKAGWQVGGPRRSQYCSTSPKAFYQQDSFLLGEVSCRNSTECGNKPPTCRCTNLSDLFLAVTNKKPTQASITKVKQFEGSTSFVRRSQWMLEQLRQVNGIDPNGDSAEFDLLFENAFDQWVASTASEKCTFFQILHHTCQRYLTDRKPEFINCQSKIMGGHPSVIPQSFTQRYVNVLN

SEQ ID NO: 47245 - protein, 213 aa, Homo sapiens
EERCFVCGVFHEVQSQLKGCVKDSLRAVLTCSTMSAKSAISKEIFAPLDERMLGAVQVKRRTKKKIPFLATGGQGEYLTYICLSVTNKKPTQASITKVKQFEGSTSFVRRSQWMLEQLRQVNGIDPNGDSAEFDLLFENAFDQWVASTASEKCTFFQILHHTCQRYLTDRKPEFINCQSKIMGGNSILHSAADSVTSAVQKASQALNEPWRAD

SEQ ID NO: 47246 - protein, 338 aa, Homo sapiens
MAWLSVDLETEKVQGLLMDPTVGMWKCQPGTPTAAAGRTAPGTGIGTGSMQGCGWSRHTTSGFSCSCQHLDEGNVVAPENLEMPATADPLRVGAQQSEVDLGQLSLLWGGASAITEALVGGFPLTVLRRLGSLGWLQQSSCGQTASLDSSSLESNNININIKDPHTKTPSKGHQSQRSKVDKSRKMRKNQCKNAENSKNQNASCPSNDCNSCPARAQNWTENEIDELTEAGFRRDMDEAGSHHSQQTITRTENQTPHTLTHRWELNNENTWTQGGEITPDDELERLLSNLPPEGDPGKKDLRATLQPGDLIFPQTQILAASQKQQTPKSNVACQDLRE

SEQ ID NO: 47247 - protein, 988 aa, Homo sapiens
  DOMAIN (633)..(655): RHODOPSIN-LIKE GPCR SUPERFAMILY SIGNATURE domain identified by eMATRIX, accession number PR00237B, p-value=6.400e-14, raw score of 13.50
  DOMAIN (615)..(933): 7 transmembrane receptor (rhodopsin family) domain identified by PFam, accession name 7tm_1, E-value=7.1e-52, PFam score of 166.9
MGEDFMTKTPKAMATKAKIDKWHLIKLKSFCTAKETTIRMNRQPTEWEKIFAIYPSDKGLISRICKELKQIYKKKSNNSINKWAKDMNRHFSKEDIYATKRHMKECSSSLAIREMQIKTTMRYYLTPVRMAIIKKSGNNRCWKGYGEIGTLLHCWWDCKLVQPLWKTVWRFLKDLELEIPFDPAIPLLGIYPKDYKSCCYKDTCTRSILYAQSFLGTSHLNGQFLCLTRKVVGGFRTCQKQSEGLQTLRTDGLRHSWDCLYTAMESDSGGHRKVWKPGYCVVRFRRDAKALKSVREAAPAAGDSRQRGRSYGARALDAPAREHAEWTKCIVQLGHLLATQHPAAPTCGVVSSALVMHSTDVCLAPTMHQALDWAAGIWFTGRLGLREHKSLAQGDSVCPCESELGDFQVYGLVSTEGVVSCFGEKTPQHPGPPASLSLANRCHNVVTAVGAWPAHGSILGNVPEAPVGADVLGAGGCDWADKEALAPGQRAKVHILLESSGQSDPSYAVLPDSWAATEGFPTYRSQVSSPRIPGSSIWLGSGSGWPILGELRECDQMFSCMLPTGCASFQDPGRYGDYDLPMDEDEDMTKTRTFFAAKIVIGIALAGIMLVCGIGNFVFIAALTRYKKLRNLTNLLIANLAISDFLVAIICCPFEMDYYVVRQLSWEHGHVLCASVNYLRTVSLYVSTNALLAIAIDRFSSTIYDSFLICPQVGGCVQRVLLVTVGVLLSISLDMTANGGSSGSSWNLFLSIWLMIRYLAIVHPLKPRMNYQTASFLIALVWMVSILIAIPSAYFATETVLFIVKSQEKIFCGQIWPVDQQLYYKSYFLFIFGVEFVGPVVTMTLCYARISRELWFKAVPGFQTEQIRKRLRCRRKTVLVLMCILTAYVLCWAPFYGFTIVRDFFPTVFVKEKHYLTAFYVVECIAMSNSMINTVCFVTVKNNTMKYFKKMMLLHWRPSQRGSKSSADLDLRTNGVPTTEEVDCIRLK

SEQ ID NO: 47248 - protein, 445 aa, Homo sapiens
  DOMAIN (342)..(386): Phosphatidate cytidylyltransferase proteins domain identified by eMATRIX, accession number BL01315C, p-value=1.000e-40, raw score of 18.61
  DOMAIN (59)..(401): Phosphatidate cytidylyltransferase domain identified by PFam, accession name Cytidylyltrans, E-value=8e-182, PFam score of 617.4
MTELRQRVAHEPVAPPEDKESESEAKVDGETASDSESRAESAPLPVSADDTPEVLNRALSNLSSRWKNWWVRGILTLAMIAFFFIIIYLGPMVLMIIVMCVQIKCFHEIITIGYNVYHSYDLPWFRTLSWYFLLCVNYFFYGETVTDYFFTLVQREEPLRILSKYHRFISFTLYLIGFCMFVLSLVKKHYRLQFYMFGWTHVTLLIVVTQSHLVIHNLFEGMIWFIVPISCVICNDIMAYMFGFFFGRTPLIKLSPKKTWEGFIGGFFATVVFGLLLSYVMSGYRCFVCPVEYNNDTNSFTVDCEPSDLFRLQEYNIPGVIQSVIGWKTVRMYPFQIHSIALSTFASLIGPFGGFFASGFKRAFKIKDFANTIPGHGGIMDRFDCQYLMATFVNVYIASFIRGPNPSKLIQQFLTLRPDQQLHIFNTLRSHLIDKGMLTSTTEDE

SEQ ID NO: 47249 - protein, 329 aa, Homo sapiens
  DOMAIN (108)..(130): RHODOPSIN-LIKE GPCR SUPERFAMILY SIGNATURE domain identified by eMATRIX, accession number PR00237B, p-value=6.400e-14, raw score of 13.50
  DOMAIN (90)..(173): 7 transmembrane receptor (rhodopsin family) domain identified by PFam, accession name 7tm_1, E-value=3.2e-23, PFam score of 75.9
MRKNQCKNAENSKNQNASCPSNDCNSCPARAQNWTENEIDELTEAGFRSYGDYDLPMDEDEDMTKTRTFFAAKIVIGIALAGIMLVCGIGNFVFIAALTRYKKLRNLTNLLIANLAISDFLVAIICCPFEMDYYVVRQLSWEHGHVLCASVNYLRTVSLYVSTNALLAIAIDRKPKAEKKRASGLGWEVSWCLELHLQGRKVIVKTETRYQGQCPPAMLPVYGERPKKKVMCVQIKCFHEIITIGYNVYHSYDLPWFRTLSCVLSVLIIKEYWMLSNGFLNLLRNKCLLRGKQNFNQCVLVDAIIVAWTESLPTGESGQDHAVLFLNGG

SEQ ID NO: 47250 - protein, 349 aa, Homo sapiens
  DOMAIN (70)..(84): LEUCINE-RICH REPEAT SIGNATURE domain identified by eMATRIX, accession number PR00019B, p-value=4.150e-10, raw score of 11.36
  DOMAIN (48)..(167): Leucine Rich Repeat domain identified by PFam, accession name LRR, E-value=1.8e-15, PFam score of 64.8
MGITCWIALYAVEALPTCPFSCKCDSRSLEVDCSGLGLTTVPPDVPAATRTLLLLNNKLSALPSWAFANLSSLQRLDLSNNFLDRLPRSIFGDLTNLTELQLRNNSIRTLDRDLLRHSPLLRHLDLSINGLAQLPPGLFDGLLALRSLSLRSNRLQNLDRLTFEPLANLQLLQVGDNPWECDCNLREFKHWMEWFSYRGGRLDQLACTLPKELRGKDMRMVPMEMFNYCSQLEDENSSAGLDIPGPPCTKASPEPAKPKPGAEPEPEPSTACPQKQRHRPASVRRAMGTVIIAGVVCGVVCIMMVVAAAYGCIYASLMAKYHRELKKRQPLMGDPEGEHEDQKQISSVA

SEQ ID NO: 47251 - protein, 470 aa, Homo sapiens
  DOMAIN (124)..(144): PANCREATIC LIPASE SIGNATURE domain identified by eMATRIX, accession number PR00823F, p-value=7.469e-24, raw score of 15.80
  DOMAIN (47)..(425): Lipase domain identified by PFam, accession name lipase, E- value=1.7e-153, PFam score of 523.3
  misc_feature (1)...(470): Xaa = X or * as defined in Table 2
GLHAARGPWVVQAWISITMERKEVCYGQLGCFSDEKPWAGTLQRPVKLLPWSPEDIDTRFLLYTNENPNNFQLITGTEPDTIEASNFQLDRKTRFIIHGFLDKAEDSWPSDMCKKMFEVEKVNCICVDWRHGSRAMYTQAVQNIRVVGAETAFLIQALSVKPCLGPVLWVGVREGQGDAARGTALEDVHVIAHSLGAHTAAEAGRSWGPRGRITDDLGTAXYKVDGMGXERRGVRFSIXPXGGGVXAGFGGERFRXRKNVGKSTAGWRMGLDPAGPCFQDEPEEVRLDPSDAVFVDVIHTDSSPIVPSLGFGMSQKVGHLDFFPNGGKEMPGCKKNVLSTITDIDGIWEGIGGFVSCNHLRSFEYYSSSVLNPDGFLGYPCASYDEFQESKCFPCPAEGCPKMGHYADQFKGKTSAVEQTFFLNTGESGNFTSWRYKVSVTLSGKEKVNGYIRIALYGSNENSKQYEIFK

SEQ ID NO: 47252 - protein, 74 aa, Homo sapiens
  misc_feature (1)...(74): Xaa = X or * as defined in Table 2
XKYTASGYAARYIYHDLDPNEAKQWLYMEKSKMKLHTTVDLTMHTDLTAANGKKVIALEIFAYALQYSKEQALK

SEQ ID NO: 47253 - protein, 259 aa, Homo sapiens
MPNPKGPEDKAVGLVPKPQGNSIQLRIEKQKAPSKRQQIRKHKRTQAFLDEKESVKNSGNLKSQNIPLYPNVISSPAMVLNQIEMTEMTDIVQNLDVQSQDVGCSEKGIFLSKDIHHFAAEADPKKAGSRRHSADHPLLSWSLRRKGSALELRSGNHSSTQSAGIKCSHGDTHFLSEVLKVALRATTGANQLLKKEHGIGQIIDHLYVLSNIFQKTALCKVSLTDAFTSKLAVCFTASWCLSTFSLMKTCIQYEFKEAL

SEQ ID NO: 47254 - protein, 474 aa, Homo sapiens
  DOMAIN (170)..(189): TRIACYLGLYCEROL LIPASE FAMILY SIGNATURE domain identified by eMATRIX, accession number PR00821E, p-value=3.625e-22, raw score of 9.64
  DOMAIN (48)..(354): Lipase domain identified by PFam, accession name lipase, E- value=7.8e-166, PFam score of 564.3
SGTLDRMLIFWTITLFLLGAAKGKEVCYEDLGCFSDTEPWGGTAIRPLKILPWSPEKIGTRFLLYTNENPNNFQILLLSDPSTIEASNFQMDRKTRFIIHGFIDKGDESWVTDMCKKLFEVEEVNCIFVDWKKGSQATYTQAANNVRVVGAQVAQMLDILLTEYSYPPSKVHLIGHSLGAHVAGEAGSKTPGLSKRLQGLDPVEASFESTPEEVRLDPSDADFVDVIHTDAAPLIPFLGFGTNQQMGHLDFFPNGGESMPGCKKNALSQIVDLDGIWAGTRDFVACNHLRSYKYYLESILNPDGFAAYPCTSYKSFESDKCFPCPDQGCPQMGHYADKFAGRTSEEQQKFFLNTGEASNFARWRYGVSITLSGRTATGQIKVALFGNKGNTHQYSIFRGILKPGSTHSYEFDAKLDVGTIEKVKFLWNNNVINPTLPKVGATKITVQKGEEKTVYNFCSEDTVREDTLLTLTPC

SEQ ID NO: 47255 - protein, 469 aa, Homo sapiens
  DOMAIN (77)..(97): TRIACYLGLYCEROL LIPASE FAMILY SIGNATURE domain identified by eMATRIX, accession number PR00821A, p-value=4.522e-21, raw score of 16.24
  DOMAIN (42)..(346): Lipase domain identified by PFam, accession name lipase, E- value=1.1e-192, PFam score of 653.5
MLPPWTLGLLLLATVRGKEVCYGQLGCFSDEKPWAGTLQRPVKLLPWSPEDIDTRFLLYTNENPNNFQLITGTEPDTIEASNFQLDRKTRFIIHGFLDKAEDSWPSDMCKKMFEVEKVNCICVDWRHGSRAMYTQAVQNIRVVGAETAFLIQALSTQLGYSLEDVHVIGHSLGAHTAAEAGRRLGGRVGRITGLDPAGPCFQDEPEEVRLDPSDAVFVDVIHTDSSPIVPSLGFGMSQKVGHLDFFPNGGKEMPGCKKNVLSTITDIDGIWEGIGGFVSCNHLRSFEYYSSSVLNPDGFLGYPCASYDEFQESKCFPCPAEGCPKMGHYADQFKGKTSAVEQTFFLNTGESGNFTSWRYKVSVTLSGKEKVNGYIRIALYGSNENSKQYEIFKGSLKPDASHTCAIDVDFNVGKIQKVKFLWNKRGINLSEPKLGASQITVQSGEDGTEYNFCSSDTVEENVLQSLYPC

SEQ ID NO: 47256 - protein, 85 aa, Homo sapiens
  misc_feature (1)...(85): Xaa = X or * as defined in Table 2
EPSPDPAHAPSVALLHTGNQSKVLPWPRNPCMKRWXKXKMLKISWVHEWVTSNWISTAVRSLRVFAPKNVFQXXALGPSGWLVYC

SEQ ID NO: 47257 - protein, 79 aa, Homo sapiens
RLRHGPSAAADADRDPHGHGRCAGGSPRGPGLRDHGGQGGRRQRRAPRNGSHICIFISSPESWGHRNNASVPLPYCERH

SEQ ID NO: 47258 - protein, 605 aa, Homo sapiens
  DOMAIN (36)..(56): PANCREATIC LIPASE SIGNATURE domain identified by eMATRIX, accession number PR00823F, p-value=8.594e-24, raw score of 15.80
  DOMAIN (315)..(564): Lipase domain identified by PFam, accession name lipase, E- value=7.6e-13, PFam score of 20.5
MDRKTRFIIHGFIDKGDESWVTDMCKKLFEVEEVNCICVDWKKGSQATYTQAANNVRVVGAQVAQMLDILLTKFSLGKWAAMAAIGFWTTSLGAPGPSVWGGPFLRVASPETCPKYGPDLTMDTDLTAANGKKVKALEIFAYALQYFKEQALKQDDLDFLNSKGQVSKLQCTGRNFQASAGFLFAKVLLAKTNHVATPSPVLNAVKATVIYSTSISPLFPDGRALNLFILMEGDPVPSSEMTKQMSSHQLSSSHSGMGASQISDLLRSQCHMGGARCNSLGIFLWFSPQTGMNQDGFGIGAKPELALRLLLLEEQKKNKTAPEEDEESGGVDVWAKLQNSPQGAHSACGNDDDDDGDDADNGHYHGDGVEDLEPGDLITNDNYATIQLNDLGLAPGMVEDGGDGLRQCPAAMQGVTAVPCCWAVPVDERDLCPSRLDPAGPCFQDEPEEVRLDPSDAVFVDVIHTDSSPIVPSLGFGMSQKVGHLDFFPNGGKEMPGCKKNVLSTITDIDGIWEDDHTSSPAMVLNQIEMAEMSDIEFRIWMARKLNETQEKVETQSKENNKMIQGLKDDITILRKNQNELLEIENLQEFHNTIGSINNNWNRPT

SEQ ID NO: 47259 - protein, 125 aa, Homo sapiens
MQREEGFNTKMADGPDEYDTEAGCVPLLHPEVRNRAEWIPCPAALQPFFPGLAEGGGRRVWGSGTCRSWGGWGGESRPERGCERITGEEIAGRARPGRALGRSPWLCLEDRGGGVDGSAVSPRCV

SEQ ID NO: 47260 - protein, 667 aa, Homo sapiens
  DOMAIN (163)..(218): Domain present in ZO-1 and Unc5-like netrin receptors domain identified by eMATRIX, accession number PF00791B, p-value=2.311e- 10, raw score of 28.49
  DOMAIN (124)..(291): Ank repeat domain identified by PFam, accession name ank, E- value=2.3e-36, PFam score of 134.2
RRRRRPASPPAGLALAPRSPSASPEPREGETLSPSMQREEGFNTKMADGPDEYDTEAGCVPLLHPEEIKPQSHYNHGYGEPLGRKTHIDDYSTWDIVKATQYGIYERCRELVEAGYDVRQPDKENVTLLHWAAINNRIDLVKYYISKGAIVDQLGGDLNSTPLHWATRQGHLSMVVQLMKYGADPSLIDGEGCSCIHLAAQFGHTSIVAYLIAKGQDVDMMDQNGMTPLMWAAYRTHSVDPTRLLLTFNVSVNLGDKYHKNTALHWAVLAGNTTVISLLLEAGANVDAQNIKGESALDLAKQRKNVWMINHLQEARQAKGYDNPSFLRKLKADKEFRQKVMLGTPFLVIWLVGFIADLNIDSWLIKGLMYGGVWATVQFLSKSFFDHSMHSALPLGIYLATKFWMYVTWFFWFWNDLNFLFIHLPFLANSVALFYNFGKSWKSDPGIIKATEEQKKKTIVELAETGSLDLSIFCSTCLIRKPVRSKHCGVCNRCIAKFDHHCPWVGNCVGAGNHRYFMGYLFFLLFMICWMIYGCISYWGLHCETTYTKDGFWTYITQIATCSPWMFWMFLNSVFHFMWVAVLLMCQMYQISCLGITTNERMNARRYKHFKVTTTSIESPFNHGCVRNIIDFFEFRCCGLFRPVIVDWTRQYTIEYDQISGSGYQLV

SEQ ID NO: 47261 - protein, 217 aa, Homo sapiens
  DOMAIN (69)..(196): Adaptin N terminal region domain identified by PFam, accession name Adaptin_N, E-value=7.6e-48, PFam score of 172.4
FSSGSAPWRCLESFPPGPRLPAPAALCPVRPGLLSYTTAIMPAVSKGDGMRWLAVFISDIRNCNSKEAEIKRINKELANIRSKFKGDKALDGYSKKKYVCKLLFIFLLGHDIDFGHMEAVNLLSSHKYTEKQIGYLFISVLVNSNSELIRLINNAIKNDLASRNPTFMCLALHCIANVGSREMGEAFAADIPRILVAGLWEQKTKLVREVLEGCTSK

SEQ ID NO: 47262 - protein, 54 aa, Homo sapiens
GRRAGYNPENLATLERYVETQAKENAYNLEANLAVLKLYQFNPAFFQTTGQRPD

SEQ ID NO: 47263 - protein, 90 aa, Homo sapiens
MGTDDDKSQRWSISCASDTIFTEWLSHLSKATQAQAASSSTAPDTVPGTLEVHGTPWYNPENLATLERYVETHAKENAYDLEANLAVLKL

SEQ ID NO: 47264 - protein, 241 aa, Homo sapiens
  misc_feature (1)...(241): Xaa = X or * as defined in Table 2
PPALVVGRRQKSWRMFEQMRANVGKLLKGIDRYNPENLATLERYVETQAKENAYDLEPNLAVPESCTKFNPAFFQTNGSTAQDSCXKALTNLPHTDFTLCKCMIRPGHIQEERPIPTDFCYLGGPGWETWPFSRAFWESPGMKTVDLLWKVXLGFEDSVRKFICHVVGITYQHIDRWLLAEMLGDLFGQASXRCWMSKYGWSADESGQIFICSPRREHLTPRNIVEKIDFDSVSSIMASSQ

SEQ ID NO: 47265 - protein, 259 aa, Homo sapiens
  DOMAIN (59)..(81): OLFACTORY RECEPTOR SIGNATURE domain identified by eMATRIX, accession number PR00245A, p-value=4.349e-18, raw score of 18.03
  DOMAIN (41)..(238): 7 transmembrane receptor (rhodopsin family) domain identified by PFam, accession name 7tm_1, E-value=8.4e-19, PFam score of 61.9
MSGENVTKVSTFILVGLPTAPGLQYLLFLLFLLTYLFVLVENLAIILIVWSSTSLHRPMYYFLSSMSFLEIWYVSDITPKMLEGFLLQQKRISFVGCMTQLYFFSSLVCTECVLLASMGYDRYVAICHPLRYNLACTDFSTAELVSFILAFIILVFPLLATILSYWHITLAVLRIPSATGCWRAFSTCASHLTVVTVFYTALLFMYVRPQAIDSQSSNKLISAVYTVVTPIINPLIYCLRNKEFKDALKKALGLGQTSH

SEQ ID NO: 47266 - protein, 291 aa, Homo sapiens
  DOMAIN (117)..(157): G-protein coupled receptors proteins domain identified by eMATRIX, accession number BL00237A, p-value=2.800e-13, raw score of 27.68
  DOMAIN (68)..(168): 7 transmembrane receptor (rhodopsin family) domain identified by PFam, accession name 7tm_1, E-value=1.9e-24, PFam score of 79.8
SPPSAYELTGEDLIHPAHWPAAPKHRGMSGENVTRVGTFILVGFPTAPGLQYLLFLLFLLTYLFVLVENLAIILTVWSSTSLHRPMYYFLSSMSFLEIWYVSDITPKMLEGFLLQQKRISFVGCMTQLYFFSSLVCTECVLLASMAYDRYVAICHPLRYHVLVTPGCASSCVTFCGSNVLNHFFCDISPILKLACTDFSTAELVDFILAFIILVFPLLATMLSYAHITLAVLRIPSATGCWRAFFTCASHLTVVTVFYTALLFMYVRPQAIDSRSSNKLISVLYTVITPSV

SEQ ID NO: 47267 - protein, 298 aa, Homo sapiens
  DOMAIN (219)..(250): kw TRANSCRIPTASE REVERSE II ORF2 domain identified by eMATRIX, accession number DM01354G, p-value=1.000e-28, raw score of 11.57
  DOMAIN (56)..(276): AP endonuclease family 1 domain identified by PFam, accession name AP_endonucleas1, E-value=1.8e-08, PFam score of 12.5
MPDVHCTDTYGSCEECFIWSMDALHYSIVGKYRIQMAVILSIPAVSASRIGKNPCNTKSEEKKDDEYSEILIGEIRMWDVLFWSTGKGHITPQDCSLITVGAVPPREHSLAVSSACNRLLSNICRAGLTHRPDRVYPLAFGGGCGAKFVGLFDAPNTGAPKFIKQLLIDLRNEIDSNTIIVEDFNTPLTALDRSSRQKVNKEAMDLNYVQEQMDLTDTYRTFHPTTAEYTFYSTMHGTFSKIDHMIGHKMSLNKFKKIEIILSTLSEHSGIKLEMNAKRNLQNHTNTWKLNNLLLNQH

SEQ ID NO: 47268 - protein, 41 aa, Homo sapiens
QTACTIKIWTAEHVFHHPWETVTTAAMHKYPSPANLSRVWV

SEQ ID NO: 47269 - protein, 273 aa, Homo sapiens
TSTPGEDIPWRADHCQEHTCRGSNTMLCTAAQHRLTSRIAAPAQTNECVDTRTALHHTTTAVTDRLGPRYASGQYGYPKCTKCTYESSTYKLLLTKHRNSRAGLGMPASLFLPGDDSSGAHGPYWHVSDVASTFRPDRDQCRTPETVDFQLDAVTGWDLKVSPIRGEPQVVQGAAEIPPLLGKNQCCGAYGPEDWDLNVYFNCSGASYSREKCGVPFSCCVPDPAIVSAGSHATKAELSLCLKYSLSSPSQRKFATLSWSEGLVGGMIEGHEL

SEQ ID NO: 47270 - protein, 291 aa, Homo sapiens
MGKSGQAVLSQSHGKRWFLVGGVEGEALVGTVALAGQLEFRVGVGLAALHSERQAGPASRGNEGLSTWASGCGSQSCAAGASPTSVAPCCMAPSPIDHPRAEECGRTAQDWQAAPPVAPVQDPLGEASWFPDWEIRQYVFLKRLVVWKANRQTGRKHTNGYKSLRKKAAASEEQRPFCGYLSHSPGFKWGSAVLLLGPPTWLCSSQQGCRRSRRHMDVPQHLHSELTQGNSILVLPARMEGKKLGANQATASNRAITLTVWPKIPFFGIPEAKNPRSENKRLAATLGAGHE

SEQ ID NO: 47271 - protein, 43 aa, Homo sapiens; identical to SEQ ID NO: 32519

SEQ ID NO: 47272 - protein, 380 aa, Homo sapiens
MVNVGDFIADESGSQQERELKGDRMGRQSSSKVRLSLAGLLSEASSEIANKRTGSILHCWQRSGLPCKVKKACTYGASGHLPSHLQKRSYCIEMSGSFLRPSQSFLQIIICPNLCAEGYEASPTAASGSRITNAEKSLKDLMELKTKARELCDKCTSLSSRFDQLEERVSVMEDQMNEMKQEEKFREKRIKRSKQSLQEIWDYVKRPNLRLIGVPESDGENGTKLENTLQNIIQENFPNLARQANIQIREIQRMPQRYSSRRATPRHIIVRYTKVEMKEKMLQAIREKGQVTHKGKPIRPTADLSAETLQARREWGPIFNILKEKNFQPRISYPAKLSFISEGEIKSFTDKQMLGDFVTTRPALKELLKEALNMERNNWY

SEQ ID NO: 47273 - protein, 613 aa, Homo sapiens
  DOMAIN (260)..(305): kw TRANSCRIPTASE REVERSE II ORF2 domain identified by eMATRIX, accession number DM01354N, p-value=1.000e-40, raw score of 13.17
  DOMAIN (344)..(613): Reverse transcriptase domain identified by PFam, accession name rvt, E-value=6.1e-75, PFam score of 262.4
ISGSVCILLWLQLLPAYNLIIHTWEHRHSPPGTRMSRLAKRNAWEADRYAEAKLAASRRGQPSSLMSSREGGWGEGSQSRNSSHGALKEAQFIITNAEKSLKDLMELKTMAQELRDECTSLSSRFDQLEEKVSVMEDEINEMKQEEKVREKRIKRNEQSLQEIWDYVKRPNLHLIGVPESDRENGTKLENTLQDIIQENFPNLARQANIQIQEIQRMPQRYSSRRATPRHIIVRFTKVEMKEKMLRAAREKEIQTTIREYYKHLYTNKLENLEEMDKFLDTYSLPRLNQEEVESLKRPITGSEIGAIINSLPTKKSPGPDGFTAEFYQRYKKELVPFLLKLFQSTEKERILPNSFYEASIILIPKPGRDTTKKENFRPISLMNINAKILNKILANQIQQHIEKLIHHDQVGFIPGMQGWFNIRKSINVIQHINRTNEKNHMIISIDAEKAFDKIQQPFMLKTLNKLGIDGTYLKIVRAIYDKLTANIILNGQKLEAFPLKTGTRQGCPLSPLLFNIVLEVLARAIRQEKEIKGIQLGKEQVKLSLFADDMIVYLENPIVSAQNLLKLISNFSKVSGYKINVQKSQAFLYTNNRQTESQIMSELPFTIASKRIK

SEQ ID NO: 47274 - protein, 89 aa, Homo sapiens
  DOMAIN (11)..(36): ALPHA-CATENIN SIGNATURE domain identified by eMATRIX, accession number PR00805A, p-value=2.674e-28, raw score of 11.15
MTSATSPIILKWDPKSLEIRTLTVERLVEPLVTQVTTLVNTSNKGPSGKKKGRSKKAHVLAASVEQATHNFLGKGEQIAKESQDLKEEL

SEQ ID NO: 47275 - protein, 866 aa, Homo sapiens
  DOMAIN (108)..(153): UDP-glycosyltransferases proteins domain identified by eMATRIX, accession number BL00375F, p-value=1.000e-40, raw score of 16.99
  DOMAIN (93)..(180): UDP-glucoronosyl and UDP-glucosyl transferas domain identified by PFam, accession name UDPGT, E-value=1.3e-52, PFam score of 188.2
DFADFGTTIKQDFRLLGQTSVDRLLQLSQGQAVKGNQLLPVSLVKRKTTLAPNTQTASPRALADSLMQLARQVSRLESGQVKHEGQHTKMSQVLWRSQEENPATLGNNIQLFDWIPQNDLLGHPKTKAFITHGGTNGIYEAIYHGVPMVGVPMFADQPDNIAHMKAKGAAVEVNLNTMTRPGGEGQSAVARLTGEKKNHPGAQYANRLSPRVGRFINAAGTTGFPTGKRAVSATQLMDFADFGTTIKQDFRLLGQTSVDRLLQLSQGQAVKGNQLLPVSLVKRKTTLAPNTQTASPRALADSLMQLARQVSRLESGQDFADFGTTIKQDFRLLGQTSVDRLLQLSQGQAVKGNQLLPVSLVKRKTTLAPNTQTASPRALADSLMQLARQVSRLESGQILPDFGPHHQTEFSPAGANQRGPLAATLSGPGGEGQSAVARLTGEKKNHPGAQYANRLSPRVGRFINAAGTTGFPTGKRAVSATQLIPKVDKTTKIGKKQSRKTGNSKNQSASPPPKESSSSHATEQNWTENDFDELREEGFKRSNCSELQEEVQTHGKEVKNLEKKLDEWLTRITNEEKPLKDLMELKTKAQELRDKCTSLSSRFNQLEERVSVMEDQMNEMKREEKFREKRIKRNEQSLQEIWDYVKRPNLRLIGVPESDGENGTKLENTLQDIIQDFADFGTTIKQDFRLLGQTSVDRLLQLSQGQAVKGNQLLPVSLVKRKTTLAPNTQTASPRALADSLMQLARQVSRLESGHQAPCMKSNNALIVILGTVTLDAVGIGLVMPVLPGLLRDIVHSDSIASHYGVLLALYALMQFLCAPVLAALSDRFGRRTVLLASLLGATIDYAIMATTPVLWIYPLVNSPSC

SEQ ID NO: 47276 - protein, 462 aa, Homo sapiens
SVLIKTKVLLKSKSPFLSPRDSTSQQTSLPRQSLPLQHSGPALLLPRVGPLLGWPPFLLCDTPPPPAPILPAPAPGPSPRASRLRRFSSGSPPACNAVVMDTAPAPYGVALRRRRSLPTATSLCGLPELRPTPPRPFGPPQAARARPPPSHPSMPGAFPGAAEPRGPRGRASEQAAACALAASPSGDPGPAARAWAGRGAIGGRGERLRFQPRVRRRPRRAGRAGGTAPRPEAAAAAAALVPAAASPVPSVITTPAAGNGRERGGGEKLPPTHRATRPRAQLCIPFLLSPSLLPPFLTSSPFFCRVVWVYAPVFDTVLSIETQEEFQTHRKEAKNLEKRLDEWLTRITNVEKSLKDLMELKTMAQELHDKCTSFSSRFDQLEERVSVTEDQMNEMKQEEKFREKREKRKKQNFQEIWDYVKRPNLRLIGVPESDGENGTKLENTLQDIIQENFPNLARQANI

SEQ ID NO: 47277 - protein, 733 aa, Homo sapiens
  DOMAIN (382)..(423): kw TRANSCRIPTASE REVERSE II ORF2 domain identified by eMATRIX, accession number DM01354I, p-value=1.000e-40, raw score of 15.55
  DOMAIN (129)..(374): AP endonuclease family 1 domain identified by PFam, accession name AP_endonucleas1, E-value=1.5e-05, PFam score of -32.1
IHTKTPSVCHHHQRPKVDKTTKMGKKQSRNTGNSKNQSTSPPPKECSSAPAMEQSWMENDFDELREEGFRRSNFSELTEEVRTHRKEAKNLEKKIRQMVTRITNVEKSLNDLMELKNMARELRDKCTSFSSRFDQLEERVSVIEDQMNEMKQEEKFREKRVKRNEQSLQEIRDYVKRPNLRLIGIPESDEENGTKLENTLQDIIQENFPNLARQANIQIKEIQRMPQRYSSRRATPRQIIVRFTEVEMREKMLRAAREKGRVTHKGKTIRLTVDLSAETIQARRESTRQKVNKDIQELNSAQHQADLTDNYRTLHPKSTEYTLFSAPHHTYSKIDHIVGSKALLSKCKRTEIITNCLSDHSAIKLELRIKKLTQNLSTTWKLNNLLLNDYWVHNEMKAEIKMLFETNENKDTTYQNLWDTFKAVCRGKYIALNAHKRKQERSKIDTLTSQLKELEKQEQSHSKASRRQEITKIRAELKEIETQKTLQKINESRDWFFEKINKIDRQLARLIKKKREKNQIDTIKNVLEFLAKAIRQDKEIKGIQLGKEEVKLFLFAEDMIVYLENPIVSAQNLLKLISNFSKVSGYKINVQKSQAFLYTNNRQTESQIMSELPFTIASKRIKYLGIQLTRDMKDLFKENYKPLLNKIKEDTKKWKNIPCSWVGRINIMKMAILPKVIYRFNAIPIKLPMTFFTELEKTTLKFTWNQKRARIAMSILTQKNKIGGIMLPDFKLY

SEQ ID NO: 47278 - protein, 136 aa, Homo sapiens
  DOMAIN (26)..(65): PROTEIN ZINC FINGER ZINC-FINGER METAL-BINDING NU domain identified by eMATRIX, accession number PD01066, p-value=5.395e-31, raw score of 19.43
  DOMAIN (24)..(70): KRAB box domain identified by PFam, accession name KRAB, E- value=4.5e-15, PFam score of 63.5
SIGFPVMLVLSILLYTCEMFQDSVAFEDVAVTFTQEEWALLDPSQKNLYREVMQETLRNLTSIGKKWNNQYIEDEHQNPRRNLSNPSYRLEVLDKASHSPPTATFRIPQPPAPSNPPSTGPALSAKGTYTFPGIDA

SEQ ID NO: 47279 - protein, 178 aa, Homo sapiens
  misc_feature (1)...(178): Xaa = X or * as defined in Table 2
ALGPCSEALPTWVNENGEEMAQEIDLSALKELEREAILQVLYRDQAVQNTEEERTRAAGNXKHTCSISGGKGPKNTDWEHKEKCCARCQQVLGFLLHRGAVCRGCSHRVCAQCRVFLRGTHAWKCTVCFEDRNVKIKTGEWFYEERAKKFPTGDNSVRTSCTGKHETVGGQLLQSYQK

SEQ ID NO: 47280 - protein, 391 aa, Homo sapiens
MKHLSKRNESICPHKALYTDVHRCFLCDSPKLEVIQMSINSEALPTWVNENGEEMAQEIDLSALKELEREAILQVLYRDQAVQNTEEERTRLGSGVPSNTIFFNSEGCRKLKTHLQHLRWKGAKNTDWEHKEKCCARCQQVLGFLLHRGAVCRGCSHRVCAQCRVFLRGTHAWKCTVCFEDRARSGERKVKKQLLYVLKNKKPSIGSAGSFLEPISEFLSERSLQVKKAPQIKRQAVQTPQHVHATRMRPPNPYDEKTHPRVMNFFLCWSPWGPLSPTSCLPQKIRTVSALPSTGVGVNGLFTLTDNPAQLDPTPRDHTTSLGSASARSQRELGLLTWLTPCIVTECHSEAMAGLGQAKGASGSRSGEGTRKETLQEASALDLSAGPAAAG

SEQ ID NO: 47281 - protein, 124 aa, Homo sapiens; identical to SEQ ID NO: 33997
  misc_feature (1)...(124): Xaa = X or * as defined in Table 2

SEQ ID NO: 47282 - protein, 127 aa, Homo sapiens
  misc_feature (1)...(127): Xaa = X or * as defined in Table 2
GSSGQSESAQPQGLWVLPSRTSLAILSTDVNVXQPCFPAGAHQGQPLAWPVPFLAWLSWQQKRCXKQQRSSRNLVDHRNPGWLHEEGDKTPFFHHPFPQLGQSLSQQSLLPAGRRXARGPQQLPSPP

SEQ ID NO: 47283 - protein, 841 aa, Homo sapiens
  DOMAIN (484)..(501): RNase H domain identified by eMATRIX, accession number PF00075A, p-value=8.429e-09, raw score of 14.44
  DOMAIN (697)..(839): Integrase core domain identified by PFam, accession name rve, E-value=1.4e-22, PFam score of 82.1
MGLISDYPENEYRGRREDGLQLYSVSKRKKNLKDIREELTGETEENVGLCGIRPRKEFQEKGIRTISESAEPSSCREKFIISGSLSIAAGIRTTKGLVVQILTALMSLSMGITMMCMASNTYGSNPISVYIGYTIWGSVMCPENSHHQYSRAHAQARPPKLPGICHGVMGHELHTVSLLEKALPFCYIDCLFLVGSDEGTAQQGLDTLLIHMQQPSWAINTDKIKRPNNIQMKLIKLLGIIQKAEKPLIAKMIVKILNFSVPPHQKPQKKPQQLVDLFGYCSLDKVMKENYELRDSNSKLQKQILSLKSSKIALSESLIFCRERAEIVDTQTQAFIMRFADLQQKVTGLGKERKNDQTFWELLDTDSELTLIPGDPKSHCDPPVIVGAYGGHVINGALAQVQLTVAPLSGPPHWPLTHRVKATMVEKAKWKPLELPLPRKAVNQQQYPIPEGIADISATIKDLKYARVMIPTTSPFNSPIWPVQKTDGSWRMTVDYHELNQVVTPVAVAVPDVVSLLEQINPSSGTCWQDQQCTFTVLPQGYINSSLALCHDLVQGDLDHFSLPQNITLVHYIDAIILMGSSEQEVASTLDLLPALMVSWGVPQDQLTEEEKTRALFTDGSARYAGTTSKWSAAALQPLPRTSLKDSGEGKSSQDGGYAWAQQHGLPFTDLAMATAEHLICQQQRPALSPQYSTIPRNDQPATWWQVDYIRPLPSRKGQRFFLTRIDTYFGYGFAYPAHNASGKTTIQELMECLNHCHGIPHSIASDQGTHLLAKEMRQWAHSHGIHWSYHVSHHPEAAGLIEWWNVLLKSQLQHQPGDNTFQGWGNVLQKAVHALNQRLI

SEQ ID NO: 47284 - protein, 107 aa, Homo sapiens
WVAEASFFVLWEAGKAGRETSSCNPALRKVFQAEETAGANAPSRRPLAPPRISRGASVEVRGCSYPPSTGRALSLGPDTMALPSLTGPIEREIPALAQCLKSKASSS

SEQ ID NO: 47285 - protein, 131 aa, Homo sapiens
  misc_feature (1)...(131): Xaa = X or * as defined in Table 2
VTWSAQQMPWAIKNCPTHSPLGQGCLPQPKMXVVQNDFQXGXWTHCRKGIKGGQRVGVWPWQTQNRGKGTFLTPLHSAVADAMLYALXRGSDLDAAQTLPTAAQDALYAVVPGGEPTGQLQVRHNEFALGQ

SEQ ID NO: 47286 - protein, 245 aa, Homo sapiens
MLFTDDLSPDRRLRVRDSHCCSQNLCTQKPDATTIPQLPPTRKTEGKGGADLLFSRGERGTPEMQESETVEGSLHPPPVGHLGLLLNNQLESLPCPPALGEGKLEAQDSSLDLQAHETVRQQSSAPRRVDNASALNGVPVVVSTHTVQHLEEGPVQGTLLIFTGLTPYQPLEMEAIIIPIFTDEETEAQRGSVMLRDSKLQSPHSYPMCYTDVYIELQHWAGIRQALHTSHIWLSLLRVPGPLGH

SEQ ID NO: 47287 - protein, 594 aa, Homo sapiens
RYSHRGSAGAMGNQMSVPQRVEDQENEPEAETYQDNASALNGVPVVVSTHTVQHLEEVDLGISVKTDNVATSSPETTEISAVADANGKNLGKEAKPEAPAAKSRFFLMLSRPVPGRTGDQAADSSLGSVKLDVSSNKAPANKDPSESWTLPVAAGPGQDTDKTPGHAPAQDKVLSAARDPTLLPPETGGAGGEAPSKPKDSSFFDKFFKLDKGQEKVPGDSQQEAKRAEHQDKVDEVPGLSGQSDDVPAGKDIVDGKEKEGQELGTADCSVPGDPEGLETAKDDSQAAAIAENNNSIMSFFKTLVSPNKAETKKDPEDTGAEKSPTTSADLKSDKANFTSQETQGAGKNSKGCNPSGHTQSVTTPEPAKEGTKEKSGPTSLPLGKLFWKKSVKEDSVPTGAEENVVCESPVEIIKSKEVESALQTVDLNEGDAAPEPTEAKLKREESKPRTSLMAFLRQMSVKGDGGITHSEEINGKDSSCQTSDSTEKTITPPEPEPTGAPQKGKEGSSKDKKSAAEMNKQKSNKQEAKEPAQCTEQATVDTNSLQNGDKLQKRPEKRQQSLGGFFKGLGPKRMLDAQVQTDPVSIGPVGKPK

SEQ ID NO: 47288 - protein, 433 aa, Homo sapiens
  DOMAIN (215)..(262): kw TRANSCRIPTASE REVERSE II ORF2 domain identified by eMATRIX, accession number DM01354V, p-value=1.000e-40, raw score of 12.97
  DOMAIN (36)..(228): Reverse transcriptase domain identified by PFam, accession name rvt, E-value=2.4e-05, PFam score of 6.2
MHISSGLASRSTQLLEHCRGTPASEGQLLQEKRTDLKTKESFCSNSRPVAYRWSIPFATHGCLEALSGACHQALPKAMSHDPSIQCCHHSSCDVLGAVQTSIECVSRHRGNSQGTKLPEGFSTGTVLEVLARAVRQEKEIKEIQLGKEEVKLSLFADDMIVYLENPIISAQNLLKLISNFSKVLGYKINVQKSQAFLYANNRQTESQIMSEFPFTIASKRIKYLGIQLTRDVKDLFKENYKPLLTEIKKDTNKWKNIPCSWIGRINIVKMAILPKVIYRFNAIPIKLPMTLFTELEKTTLKFIWNQKRAHIAKSILSQKNKAGGIMLPDFKLYYKATVTKTAWACSYYPCLADSQVYILSLDIYIQRPSSVCLTGISPSTRLHLRLLLIPLLPGGFSSLICSVVNFQYCSLQYSLNTAARIILKSWGYFYLQL

SEQ ID NO: 47289 - protein, 86 aa, Homo sapiens
NIVIKVSKHIVTITEILIKIMAIISDLELNYFGGYSSVPEYYDYGHGVSEDAYDSYGEKLRLRALSTLPQFNNLPVTEQECEFKCV

SEQ ID NO: 47290 - protein, 530 aa, Homo sapiens
  DOMAIN (495)..(508): PROTEIN ZINC-FINGER METAL-BINDI domain identified by eMATRIX, accession number PD00066, p-value=8.200e-16, raw score of 13.92
  DOMAIN (225)..(527): Zinc finger, C2H2 type domain identified by PFam, accession name zf-C2H2, E-value=3.9e-91, PFam score of 316.2
AEKMTAELREAMALAPWGPVKVKKEEEEEENFPGQASSQQVHSENIKVWAPVQGLQTGLDGSEEEEKGQNISWDMAVVLKATQEAPAASTLGSYSLPGTLAKSEILETHGTMNFLGAETKNLQLLVPKTEICEEAEKPLIISERIQKADPQGPELGEACEKGNMLKRQRIKREKKDFRQVIVNDCHLPESFKEEENQKCKKSGGKYSLNSGAVKNPKTQLGQKPFTCSVCGKGFSQSANLVVHQRIHTGEKPFECHECGKAFIQSANLVVHQRIHTGQKPYVCSKCGKAFTQSSNLTVHQKIHSLEKTFKCNECEKAFSYSSQLARHQKVHITEKCYECNECGKTFTRSSNLIVHQRIHTGEKPFACNDCGKAFTQSANLIVHQRSHTGEKPYECKECGKAFSCFSHLIVHQRIHSGDLPYVCNECGKAFTCSSYLLIHQRIHNGEKPYTCNECGKAFTCSSYLLIHQRIHNGEKPYTCNECGKAFRQRSSLTVHQRTHTGEKPYECEKCGAAFISNSHLMRHHRTHLVE

SEQ ID NO: 47291 - protein, 394 aa, Homo sapiens
MVTKHSLGDDLVRGRVFLVLGSQGLLRGADLRGFAMDDQVAKIHKAVVEMANSFNLGVNEDDIEELLAVVSAPAQKQEMHFEETTALGTTKESPPTSPLSGGSAPGAHLEPPYDPGTHHLPSGDFVTLFVPFAYSLIIRVVSKFSSRACRRKGTARDQRDVVHLLSLISKSLLSRWSSPAEQKKDCRIGKKPGPSPWGPVKVRKEEEEEENFPGQASSQQVHSENIKVWAPVQGLQTGLDGSEEEEKWPLGQGTHGSQAAGSLRGLKSEEAPALLSGCLSPRAHAVVTRLVLRPGKKNSGDKSTDGPWEGKLKKVTVLTLTSPPLLLVGSGQNPIVSKGKLSGRVWCLKAKKTEWSSPGWTLAPCSPQKHPSQRASLLFLDNDPTLVNNHSDVK

SEQ ID NO: 47292 - protein, 290 aa, Homo sapiens
GHGTNNLQGSRFLHFRGRQCHYQEQNTTLQTQNAKLQVENSTLNSQSTSLMNQNAQLLIQQSSLENENESVIKEREDLKSLYDSLIKDHEKLELLHERQASEYESLISKHGTLKSAHKNLEVEHRDLEDRYNQLLKQKGQLEDLEKMLKVEQEKMLLENKNHETVAAEYKKLCGENDRLNHTYSQLLKETEVLQTDHKNLKSLLNNSKLEQTRLEAEFSKLKEQYQQLDITSTKLNNQCELLSQLKGNLEEENRHLLDQIQTLMLQNRTLLEQNMESKDLFHVEQRTVHV

SEQ ID NO: 47293 - protein, 161 aa, Homo sapiens
MPDATLSRLIMPTSLCRTVGRIRRSRRIRQLSAGNINRLTPRTFNASANGSTSSGVALAHALRLAIHAVGMKRVQAYRYIAESFDVRRQFFDVLQIIHLARDHQQTQFRQLAALCQQIDLSQYTLNYRYVTGSWLRNDTRQHPLTRPDGLVCSRHPLTDKL

SEQ ID NO: 47294 - protein, 126 aa, Homo sapiens
  misc_feature (1)...(126): Xaa = X or * as defined in Table 2
LKGAPDLELDGESRRTWRERKGRKRKERALGRWQVXRSRCAXPSTPAALNAPLQGASHSPFRLRNCWKGRSVRASSLLRQLAKGGCAARRLSWNLCQIVQMYEGHSQQPGLQPRLQRWSSQTLRTA

SEQ ID NO: 47295 - protein, 674 aa, Homo sapiens
  DOMAIN (81)..(103): DOPAMINE D4 RECEPTOR SIGNATURE domain identified by eMATRIX, accession number PR00569E, p-value=6.538e-09, raw score of 8.78
MTVLEESTYHKLEILIEYLNMSTHVLDVEDGKNKVPTFRDIIDDIQPSRARPRGAVQGRAEPSASESGRAQPSGPESVGAAASPPLSSPRLRRRRRRRLCGACAGRPPGRGEGGPQRGKSGPVAGAATAAAARSVVLLTSRKELRTFVVSVTALKDGMDLKTPGDGHSLSVSGCRKQTSPSGRVNRVLAGCRGCFNYAASEQIVLKGAPICGCENTANRCVRRKSGIRPPFAIQVAQLLGKADRSGPLRYYASWRKGGCAAKAIKLAPAMNYVGQLAETVFGTVKELYRGLNPATLSGGIDVLVVKQVDGSFRCSPFHVRFGKLGVLRSRKKVVDIELNGEPVDLHMKLGDSGEAFFVQELESDDEHVPPGLCTSPIPWGGLSGFPSDSQLGTASEPEGLVMAGTASTGRRKRRRRRKPKQKEDAVATDSSPEELEAGAESELSLPEKLRPEPPGSVQLEEKSSLQPKDIYPYSDGEWPPQASDSGLGARRWSEPSSQKSLRDPNPEHEPEPTLDTVDTIALSLCGGLADSRDISLEKFNQHSVSYQDLTKNPGLLDDPNLVVKINGKHYNWAVAAPMILSLQAFQKNLPKGKRVKEGVGRGGADERSNGQSGGGGERIQSQISPPHQLSKQLRAAAEPRVRAAHHISGAVCHVAEAVPLSHGMYCCTALEFGV

SEQ ID NO: 47296 - protein, 65 aa, Homo sapiens
TLSARLRWSRPELGASRGAAMQQVLDNLGSLPSATGAAELDLIFLRGIMESPIVRSLAKAHERLD

SEQ ID NO: 47297 - protein, 593 aa, Homo sapiens
  DOMAIN (451)..(499): Guanylate kinase proteins domain identified by eMATRIX, accession number BL00856C, p-value=4.103e-32, raw score of 29.21
  DOMAIN (427)..(528): Guanylate kinase domain identified by PFam, accession name Guanylate_kin, E-value=6.3e-32, PFam score of 119.5
GLPGAQERRFRALASFTMPVAATNSETAMQQVLDNLGSLPSATGAAELDLIFLRGIMESPIVRSLAKVIMVLWFMQQNVFVPMKYMLKYFGAHERLEETKLEAVRDNNLELVQEILRDLAQLAEQSSTAAELAHILQEPHFQSLLETHDSVASKTYETPPPSPGLDPTFSNQPVPPDAVRMVGIRKTAGEHLGVTFRVEGGELVIARILHGGMVAQQGLLHVGDIIKEVNGQPVGSDPRALQELLRNASGSVILKILPNYQEPHLPRQVFVKCHFDYDPARDSLIPCKEAGLRFNAGDLLQIVNQDDANWWQACHVEGGSAGLIPSQLLEEKRKAFVKRDLELTPNSGTLCGSLSGKKKKRMMYLTTKNAEFDRHELLIYEEVARMPPFRRKTLVLIGAQGVGRRSLKNKLIMWDPDRYGTTVPYTSRRPKDSEREGQGYSFVSRGEMEADVRAGRYLEHGEYEGNLYGTRIDSIRGVVAAGKVCVLDVNPQAVKVLRTAEFVPYVVFIEAPDFETLRAMNRAALESGISTKQLTEADLRRTVEESSRIQRGYGHYFDLCLVNSNLERTFRELQTAMEKLRTEPQWVPVSWVY

SEQ ID NO: 47298 - protein, 126 aa, Homo sapiens
ERRFRALASFTMPVAATNSETAMQQVLDNLGSLPSATGAAELDLIFLRGIMESPIVRSLAKGGGDSIQRGRERSGGFGPGHVLAWGCGSRMQGIVKGAGERGSEKRGPGWKEAEQGENGGEGSVAL

SEQ ID NO: 47299 - protein, 371 aa, Homo sapiens
SASHSGAPATSLYERGVCPPALRRPPAVLVCRAAASCTLLAMSDLQEEGKNAINSPMSPALVDVHPEDTQLEENEERTMIDPTSKEDPKFKELGKVLLDWINDVLAEERIIVKQLEEDLYDGQVLQKLFEKNLAGLQSLNVAEVTQSEIGQKQKLQKVLEQLHDLLRPRSWALRWLGNSIHGKNLVGNPQLLVSLAMHFRAPIRLPEHVTVQVVVVRKREGLLHSSHISEELTTTTEMMMGRFERDAFDTLFDHAPDKLSVVKKSLITFVNKHLNKLNLEVTELETQFADGVYLVLLMGLLEDYFVPLHHFYLTPESFDQKVHNVSFAFELMLGRRPSRNPRLVLKTWLTWDLKSPLRVLYNLFTKYKNVE

SEQ ID NO: 47300 - protein, 253 aa, Homo sapiens
ACCSKAIMPHPLAVPSSAAVEAGCPELEVFKVQGDSGVKRGNTILLLNLFHGERGTAPGTEGKNAINSPMSPALVDVHPEDTQLGTGVPPSYPTGTGKDRRCTMIDPTSKEDPKFKELVKVRSSVFMVPKDDHVIIPGAIDYHLTWQRDMVGVVSADRVQPKAPSLNDIVTPWLARGPQVSRGTFNDVLVEERIIVKQLEEDLYDGQVLQKLLGEFTAGAFDRWGRWGPQSPGEQPGSLAPSIALEPGRGAFL

SEQ ID NO: 47301 - protein, 410 aa, Homo sapiens
MFFLSVKVTAGTRKRNPVIGIQGQANHALEGKTQHNTTQHNTTQHSTLILLNLDKSEKYCSIKSDDKNENKNDPEKKKKKKDKEKKKKEEKSKDKKEEDLGDNAVNIYGFRIQVLCHNCLHKLVLRADDNNMGNGCSQKLATANLLRFLLLVLIPCICALVLLLVILLSYVGGGSFSAFGLFPLTHIQTSTQPKTQEVLSGVLQSFFCTAAFSAQILATLASLNYEFCLLNFMRQPDSAYDLPPCAIARSLHVVALETVHLVIKTVDGLYDVETISVHLSVTEFLDSRERKPNRLTMDPRAPFGTGSHSQGTRTGSIAMAVATGGIMVNQAAIPMYVFYKFYQYVAGSNEGFREKKIHLLKAEDLAREKTDFEVVNEIVKMSMRSFRRQKDITSRPVIFNFSSTPSATEY

SEQ ID NO: 47302 - protein, 104 aa, Homo sapiens
  DOMAIN (34)..(54): ATP SYNTHASE GAMMA SUBUNIT SIGNATURE domain identified by eMATRIX, accession number PR00126A, p-value=7.968e-18, raw score of 10.39
  DOMAIN (1)..(89): ATP synthase domain identified by PFam, accession name ATP- synt, E-value=3.5e-24, PFam score of 87.5
KYARAERELKPARIYGLGSLALYEKADIKGPEDKKKHLLIGVSSDRGLCGAIHSSIAKQMKSEVATLTAAGKEVMLVGIGDKIRGILYRSVISYKDRRKAHLFP

SEQ ID NO: 47303 - protein, 39 aa, Homo sapiens
  misc_feature (1)...(39): Xaa = X or * as defined in Table 2
IFLLYLKNKVQNKXEIKQHFLGKIMSRDNNTYLTWGTEN

SEQ ID NO: 47304 - protein, 324 aa, Homo sapiens
  DOMAIN (293)..(315): ATP SYNTHASE GAMMA SUBUNIT SIGNATURE domain identified by eMATRIX, accession number PR00126D, p-value=9.289e-21, raw score of 11.99
  DOMAIN (35)..(320): ATP synthase domain identified by PFam, accession name ATP- synt, E-value=1.5e-81, PFam score of 284.3
  misc_feature (1)...(324): Xaa = X or * as defined in Table 2
PTFSRAVATMFSRAGVAGLSAWTLQPQWIQVRNMATLKDITRRLKSIKNIQKITKSMKMVAAAKYARAERELKPARIYGLGSLALYEKADIKGPEDKKKHLLIGVSSDRGLCGAIHSSIAKQMKSEVATLTAAGKEVMLVGIGDKIRGILYRTHSDQFLVAFKEVGRKPPTFGDASVIALELLNSGYEFDEGSIIFNKFRSVISYRTEEKPIFSLNTVASADQHGVSMTDIDADVAAKITQEYNIWANIILLTLWKESTTSGGRSARGXQPWDNGQARIAFWRMDLDNLDIWTFNRTRQAVITKELIEIISGAASSVKKENSAS

SEQ ID NO: 47305 - protein, 152 aa, Homo sapiens
  DOMAIN (56)..(76): ATP SYNTHASE GAMMA SUBUNIT SIGNATURE domain identified by eMATRIX, accession number PR00126A, p-value=7.968e-18, raw score of 10.39
  DOMAIN (28)..(134): ATP synthase domain identified by PFam, accession name ATP- synt, E-value=9.7e-28, PFam score of 100.0
YLSKLPYFELESIAAARSRPTAQRHPRERKLKPARIYGLGSLALYEKADIKGPEDKKKHLLIGVSSDRGLCGAIHSSIAKQMKSEVATLTAAGKEVMLVGIGDKIRGILYRTHSDQFLVAFKEVGRKPPTFGDAFSHCPLKLLNSGYEFDEG

SEQ ID NO: 47306 - protein, 310 aa, Homo sapiens
MSNKIQAEVVSDGNEELVQKWRKGDSCYALAKRVVAFCRCPRDLQNFVLERDDLGYLAEEISKQQSIQEVTWVLLKAFSFIREAKNKSLENLQPDNVIEKKILFSEEKFKPVAEICISNEKLNANPQDNRENISRTCQRSSWQSLPSQAQRFRSKKWFCGPGPGSLCCMQSRDLVSCVPATPAVIKGANAELEMWLQRAQAPSLGSFQVVLSLQGSMTLTAVITECRKVDSDDFLLGPPVYVLGFYKIVYWPLFVLIFHAISPIPHFIAKRVTYDSDATSSACRELAYFFTTGIVVSAFGFPVILARVAV

SEQ ID NO: 47307 - protein, 157 aa, Homo sapiens
SGLGRLPGPWQEAGSSRGPSSGDMAGVKALVALSFSGAIGLTFLHMLGCALEDYGVYWPLFVLIFHAISSIPHFIAKRVTYDSDATSSACRELAYFFTTGIVVSCLWISPVILARVALIKWGACGLVLAGNAVIFPYNSRGFSLYLGRGDDFSWEQW

SEQ ID NO: 47308 - protein, 101 aa, Homo sapiens
IASEVFVKVMDPEQSVKGTKKAEGSPRKRLTKGEAIQTSVSSSVPYPGSGTAATQESPAQELLAPQPFPGPSSVLREGSQEKTGQQQKPTKRPPIEASVHV

SEQ ID NO: 47309 - protein, 455 aa, Homo sapiens
MAGAHPLHLGPRGMALALALFAPAPPPPYLVHRVGLCPHYKAHSTLHPKVSGEGKQKWVGSAFLSQAEASSHTGSTMKHSQQLPGRLHSVCLQQRHCVPSTGAANRTSQNPVGPGVDGEMTGFAQVKEQKGSSCKSHAAGVSWASFWGALNSVGSFLTAFLQGTQDPGLSLDPWESFTGVQERVTGPMAAKVTPGLLICPCWKKPTDQPPEKVEESKPGRQPAACGEETQVLSPLALTRALTGQGKAAKPEEPSRMILLAIAWIKQMVTAVSDSSEVFVKVMDPEQSVKGTKKAEGSPRKRLTKGEAIQTSVSSSVPYPGSGTAATQESPAQELLAPQPFPGPSSVLREGSQEKTGQQQKPPKRPPIEASVHISQLPQHPLTPAFMSPGKPEHLLEGILWLCDDVSVCILSFLYILVTFIIFLFLMLLLFYFIGILTFLGTRLSSGEMGTKESSL

SEQ ID NO: 47310 - protein, 61 aa, Homo sapiens
  DOMAIN (1)..(34): PROLINE-RICH PROTEIN 3 domain identified by eMATRIX, accession number DM00215, p-value=3.118e-11, raw score of 19.43
PRDARGDLGGHPADAPPSPSHPPPRPPPARPPPMSRRSAPARPRSPPVPANLRPPAGPAAP

SEQ ID NO: 47311 - protein, 45 aa, Homo sapiens
  DOMAIN (8)..(21): PROTEIN ZINC-FINGER METAL-BINDI domain identified by eMATRIX, accession number PD00066, p-value=4.808e-10, raw score of 13.92
  misc_feature (1)...(45): Xaa = X or * as defined in Table 2
MFSILTKHKVIHNGEKPYKCEECDKATHAGEKPYKCEECGKAFNX

SEQ ID NO: 47312 - protein, 719 aa, Homo sapiens
  DOMAIN (271)..(288): Zinc finger C2H2 type, domain proteins. domain identified by eMATRIX, accession number BL00028, p-value=3.250e-13, raw score of 16.07
  DOMAIN (101)..(712): Zinc finger, C2H2 type domain identified by PFam, accession name zf-C2H2, E-value=1.6e-176, PFam score of 599.8
MTLNEHAAFKHLFNKAHLAPPLIHLTLSGHSTCFREHRVGVICSHFAQDLWPEQGREDSFQKVILRRYEKCGHENLQLKIGCTNVDESLTYKRIHTGEKPCKCEECDKAFSKFSILTKHKVIHTGEKHYKCEECGKAFTRSSSLIEHKRSHAGEKPYKCEECGKAFSKASTLTAHKTIHAGEKPYKCEECGKAFNRSSNLMEHKRIHTGEKPCKCEECGKAFGNFSTLTKHKVIHTGEKPYKCEECGKAFSWPSSLTEHKRIHAGDKPYKCEECGKTFKWSSTLTKHKIIHTGEKPYKCEECGKAFTTFSSLTKHKVIHTGEKHYKCEECGKVFSWSSSLTTHKAIHAGEKLYKCEECGKAFKWSSRLSEHKRIHTGEKPYKCEECGKAFSWVSVLNKHKKIHAGKKFYKCEECGKDFNQSSHLTTHKRIHTGEKPYKCEECGKAFSKASTLTAHKTIHAGEKPYKCEECGKAFNRSSNLMEHKRIHTGEKPCKCEECGKAFGNFSTLTKHKVIHTGEKPYKCEECGKAFSWPSSLTEHKRIHAGDKPYKCEECGKTFKWSSTLTKHKIIHTGEKPYKCEECGKAFTTFSSLTKHKVIHTGEKHYKCEECGKVFSWSSSLTTHKAIHAGEKLYKCEECGKAFKWSSRLSEHKRIHTGEKPYKCEECGKAFSWVSVLNKHKKIHAGKKFYKCEECGKDFNQSSHLTTHKRIHTGGKTLQM

SEQ ID NO: 47313 - protein, 727 aa, Homo sapiens
  DOMAIN (46)..(85): PROTEIN ZINC FINGER ZINC-FINGER METAL-BINDING NU domain identified by eMATRIX, accession number PD01066, p-value=4.094e-37, raw score of 19.43
  DOMAIN (268)..(720): Zinc finger, C2H2 type domain identified by PFam, accession name zf-C2H2, E-value=4e-113, PFam score of 389.2
PETDSVTMGPNQSKICALSRPVDMRIHFSLPPHAKMPTNVQGSLTFRDVAIQFSLEEWQCLDTAQQNLYRNVMLENYRNLVFLGIAAFKPDLIIFLEEGKESWNMKRHEMVEEPPVICSHFSQEFWPEQGIEDSFQKMILRRYDKCGHENLHLKISCTNVDECNVHKKGYNKLNQSLTTTQSKVFQCGKYANIFHKCSNSKRHKIRHTGKKLLKCKEYVRSFCMLSHLSQHKRIYTRENSYKSEEHGKAFNWSSALTYKRIHTGEKPCKCEECGKAFSKFSILTKHKVIHTGEKHYKCEECGKAFTRSSSLIEHKRSHAGEKPYKCEECGKAFSKASTLTAHKTIHAGEKPYKCEECGKAFNRSSNLMEHKRIHTGEKPCKCEECGKAFGNFSTLTKHKVIHTGEKPYKCEECGKAFSWPSSLTEHKRIHAGDKPYKCEECGKTFKWSSTLTKHKIIHTGEKPYKCEECGKAFTTFSSLTKHKVIHTGEKHYKCEECGKVFSWSSSLTTHKAIHAGEKLYKCEECGKAFKWSSNLMEHKRIHTGEKPYKCEECGKAFSKVANLTKHKVIHTGEKQYKCEECGKAFIWSSRLSEHKRIHTGEKPYKCEECGKAFSWVSVLNKHKKIHAGKKFYKCEECGGKPYKCEECGKFFNCSSILTKHKVIHTGGNSYNCVECGKAFNQSLRLTTYKTTHTGEKPYTCEECGKASNRSSILNRHKLIHTREKLQT

SEQ ID NO: 47314 - protein, 479 aa, Homo sapiens
  misc_feature (1)...(479): Xaa = X or * as defined in Table 2
IKVLLGENRVPNTMAVWLAQWLGKGASLTSFPPCPTASLLRRLGEHIQQFQESSAQGLGLSLGPGAAALPKVGWLEQLLDPFNVSDRRSHLQRYWVNDQHWVGQDGPIFLHLHLTSPPPTHTLFTGHPAALAPAWGALVISLEHRFYGLSIPAGGRLALSRLFNISSSSPWICFGGSYAGSLPSHHAPTFPRAQRISXHFRIPSSAVRPQVVSRSLMSTAIGGSLECRRWGLVRGGLGGKRGLGCQGRGGPAXVLADIASCFPQCRAAVSVAFAEVERRLRSGGAAQAALRTELSACGPLGRAENQAELLGALQALVGGVVQYDGQTGAPLSVRQLCGLLLGGGGNRRGGIYVLCMYIVPXIVLHSLGQKCLSFSRAETVAQLRSTEPQLSGVGEAPIYLAPSYPFFPGDTDPWHVLSVTQALGSSESTLLIRTGSHCLDMAPERPSDSPSLRLGRQNIFQQLQTWLKLAKESQIKGEV

SEQ ID NO: 47315 - protein, 486 aa, Homo sapiens
  DOMAIN (124)..(474): alpha/beta hydrolase fold domain identified by PFam, accession name abhydrolase, E-value=0.0087, PFam score of 4.5
MAVWLAQWLGPLLLVSLWGLLAPASLLRRLGEHIQQFQESSAQGLGLSLGPGAAALPKVGWLEQLLDPFNVSDRRSFLQRYWVNDQHWVGQDGPIFLHLGGEGSLGPGSVMRGHPAALAPAWGALVISLEHRFYGLSIPAGGLEMAQLRFLSSRLALADVVSARLALSRLFNISSSSPWICFGGSYAGSLAAWARLKFPHLIFASVASSAPVRAVLDFSEYNDVVSRSLMSTAIGGSLECRAAVSVAFAEVERRLRSGGAAQAALRTELSACGPLGRAENQAELLGALQALVGGVVQYDGQTGAPLSVRQLCGLLLGGGGNRSHSTPYCGLRRAVQIVLHSLGQKCLSFSRAETVAQLRSTEPQLSGVGDRQWLYQTCTEFGFYVTSLSVAQAVAQTNSYYGGQTPGANKVLFVNGDTDPWHVLSVTQALGSSESTLLIRTGSHCLDMAPERPSDSPSLRLGRQNIFQQLQTWLKLAKESQIKGEV

SEQ ID NO: 47316 - protein, 50 aa, Homo sapiens
GPAAEDKIKVLLGENRVPNTMAVWLAQWLGPLLLVSLWGLLAPGKRRLCC

SEQ ID NO: 47317 - protein, 534 aa, Homo sapiens
MDSLWGPGAGSHPFGVHNSRLSPDLCPGKIVLRALKESGAGMPEQDKDPRVQENPGDQRRVPEVTGDAPSAFRPLRDNGGLSPFVPGPGPLQTDLHAQRSEIRYDQSSQTSWTSSCTNRNAISSSYSSTGGLPGLKRRRGPASSHCQLTLSSSKTVSEDRPQAVSSGHTQCEKVAEKAPGQTLALRNDSSRSEASRPSTRKFPLLPHRRGEPLMLPPPVELGYRVTAEDLDWEKEAAFQCIKSALQVEDKAISDCRPSRPSHTLSSLATGASDSAQVTSLIPAPFPAASMDAGMRRTRPGTSAPAAAAAAPPPSTLNRTLGSLLEWMEALHISGPQPQLQQVPRGQNQRSQTSRTSSCPKLKCHLELLQLYGRPPGTKAEEAPASSHCQLTLSSSNTVSEDGPEAVSSGHTQCEKTADTAPGQTLGPRGGSPRSQSSRPRRHKFPLLPRRRGEPLMLPPPLELGYWVTAEDLDREKEAAFQRINSALQVEDKAISDCRPSRPSHTLSSLATGASGLPAISKAPSMDAQQERHKS

SEQ ID NO: 47318 - protein, 385 aa, Homo sapiens; identical to SEQ ID NO: 41449

SEQ ID NO: 47319 - protein, 411 aa, Homo sapiens
MDSLWGPGAGSHPFGVHNTRLSPDLCPGKIVLRALKESGAGMPEQDKDPRVQENPGDQRRVPEVTGDAPSAFRPLRDNRGLSPFVPGPGPLQTDLHAQRSEIRYNQTSQISWTSSCTNRNAISSSYSSMGGLPGLKRRRGPASSHCQLTLSSSKTVSEDRPQAVSSGHTQCEKAADIAPGQTLALRNDSSTSEASRPSTHKFPLLPRRRGEPLMLPPSLEVGVPGSLVKELDREKEAAFQRINSALQVEDKAISDCRPSWPSHTLSSLATGTSGLPAISKAPSMDAQQETHKSQDCLGLLAPLASAAGVPSTAPMSGKKHRPPGPLFSSSDPLPATSSHSQDSAQVTSLIPAPFPAASMDVGMRRTRRGEPLMLPPPLELGYRVTAEDLDQEKEAAFQRIKSALQVEDKAI

SEQ ID NO: 47320 - protein, 234 aa, Homo sapiens
VAGHPTNTRTLDISGVKTTLRRFSVILQDLCSILVILSSISLHRYHSKPVLCALSSTASPSSATTLSTRTLWGPGAGSHPFGVHNTRLSPDLCPAKIVLRALKESGAGMPEQHKDPRVQENPDDQRTVPEVTGDARSAFWPLRDNGGPSPFVPRPGPLQTDLHAQSSEIRYKHTSQTSWTSSSTKRNGICSSYSSTGGLPGLKQRMGPASSRRGNHRPTGERDTRPLNRYPSGG

SEQ ID NO: 47321 - protein, 981 aa, Homo sapiens
MPEQDKDPRVQENPDDQRRVPKVTGDARSAFRPLRDNGVLSPFVPRPGPLQTYLHAQRSEIRYNQTSQNTWTSSCTNQNAISSSYSSVGGLLGLKWRRGPAGQESGAGMPEQDKDPRVQQNPDDHRTVPEVTGDARSAFWPLRDNGGLSPFVPRPGPLQTDLHAQSSEIRYNQTSQTSWTSSSTKRNAISSSYSSTGGLPGLKQRRGPASSRCQLTLSYSKTVSEDRPQAVSSGHTRCEKAADTAPGQTLAPRGGSPRSQASRPRRRKIPLLPSRRGEPLMLPPPLELGYRVTAEDLHLEKETAFQRINSALHVEDKAIPDCRPSRPSHTLSSLATGASGGPPVSKAPTMDAQPDKLKSQDCLGLVAALASATEVSSTAPMSGKKHRPPGPLFSSSDPLPATSSHSQDSAQVTSMIPAPFTAASRDASMRRTRPGTSAPANAAAAPPPSTLNPTSGSLLNEWMKAPHISWPQPQLQQVPRGQNVRYNQRSQTSRTRSCTKLKCQLELLQLYGRPPGTKAEEGPASSHCQLALSSSNTVSEDGPQAVSSGHSHCENNADTAPGQTLAPRGGSPRSQASRPCINSALQVEDKAISHCRHSRPSHTLSSLATGASGGSSVSKAPTMDAQQDRPKSQDCLGLVAPLASAAQVPSTAPVSGKKHRPPGPLFSSSDPLPATSSHSRDSAQVTSLIPAPFTAASMDAGMRRTRPGTSAPAAAAAAPPPSTLNPMLGLLLNAMDAGPSYFWASATAAAGAQRSEVRYNQRSQTSRTRSCTKRNASSSSYSSTEGLPELKRRRGPASSHCQLALSSSNTVSEDGPQAVSSGHSHCENNADTAPGQTLAPRGGSPRSQASRPRINSALQVEDKAIWHCRHSRPSHTLSSLATGASGGSSVSKAPTMDAQQDRPKSQDCLGLVAPLASAAQVPSTAPVSGKKHRPPGPLFSSSDPLPATYSHSRDSAQVTSLIPAPFTAASMDAGMRMNAGM

SEQ ID NO: 47322 - protein, 131 aa, Homo sapiens [sequence omitted]

SEQ ID NO: 47323 - protein, 337 aa, Homo sapiens; identical to SEQ ID NO: 35913
  DOMAIN (234)..(337): Integrase core domain identified by PFam, accession name rve, E-value=1e-21, PFam score of 79.1
  misc_feature (1)...(337): Xaa = X or * as defined in Table 2

SEQ ID NO: 47324 - protein, 195 aa, Homo sapiens
MASWGVPYYQLTEEEKTRAWFIDGSARYAGTTRKWIAAALQPLSRTSLKDSSEGKSSQWVGLQAVHLVVHFTWKEKWPDVQLYTDSWAVANGLAGWSVTWKKHDWKIVTKKFGEEVALAEEDFNNQVNRMTRSVDNTQPLSPAIPVIAQWAHEQSGHGGRDGGYTWTQQHGFPLSKADLATALLSVQFASSRDRH

SEQ ID NO: 47325 - protein, 98 aa, Homo sapiens
  misc_feature (1)...(98): Xaa = X or * as defined in Table 2
MSPFPEDCGKLEVERGGDQVPLGNWSSETVGRGLFHPPCGPQKQRTSSFRESSMKRKESRPKTTLKHRLIQRDLDHFSLLQDITLVYYTDDIMLIASX

SEQ ID NO: 47326 - protein, 157 aa, Homo sapiens; identical to SEQ ID NO: 38078

SEQ ID NO: 47327 - protein, 904 aa, Homo sapiens; identical to SEQ ID NO: 37053
  DOMAIN (538)..(547): Zinc finger C3HC4 type (RING finger), proteins. domain identified by eMATRIX, accession number BL00518, p-value=2.800e-11, raw score of 12.23

SEQ ID NO: 47328 - protein, 245 aa, Homo sapiens
MSQGTTPWGPTPAGTTPESEVHRPFPFPVPVPVPETSERSFPVRGVCGQAKSGLRRGAARLAPAAYLFTRQQTRELIHSACVSISVNTMHGLSVAINSRRCTYYRKYVIDFSKSEIIGIPISKNIDLTVGTTVTQLQNLNTVGIIGSRGGRGQVAALNCDRQGHLWLFTRVTVHWRMGNDRTFWGLLDTVSELMFIPGNPKHHCGPPVKVGAYGDQVALMASWRVPYDQLTEEQKTRAWFTDGSA

SEQ ID NO: 47329 - protein, 255 aa, Homo sapiens
  misc_feature (1)...(255): Xaa = X or * as defined in Table 2
DPADPMVLEVSEADRDAVPISESQQRPLGFWSKALPSSANNYSFFKRQLLACYWVLVEIEHLTMGHQVTMRPELPIINCVLSDPCSHKVGHAQQHSIIKWRWYIHYQAQAGPEGTSNLHEEVAQMPTVSTSATLPSLPEPTQMALWEVPYDQFTEEEKTGAWFTDGSAHYTGTTXKWTVAALQPLSRTTLKDSCEGKSPHHPVIAQWAHEQSGHGGRDGGYLWAQQHGFPLTKADLAMATAECPICQQQKRTLNP

SEQ ID NO: 47330 - protein, 114 aa, Homo sapiens
  misc_feature (1)...(114): Xaa = X or * as defined in Table 2
LSPHWPPGLPPSALIYAFLGRSSRNKRRLMKTMKVEACEDLSAPKYLRIQLPTGSPRRRSEAPEVCIFQGSSFSLVHPPPLLSYPSARRXPQTPPRPPPRHPSLHPLHPPSAQP

SEQ ID NO: 47331 - protein, 357 aa, Homo sapiens
RHSALGTGGSSSCRQQRPRDTWVPETTILTAWSSRLQQLGPWLQVTVAGQVNTLAGIQKTIHAEHCNVTERPPTGHEALAPPCEQGPPQVLDSNAVAPTADCGYQLSTAINRNQELCGRKPAVSPSRGISPGSPILRPAVHPGHYCLQQRLSGQKSNRRTTQKSFQKLHVDKRKPENFSKESDHLLIYSREGNPDVASLATPPGIWMMSATDLFYGDPFAFPGGGPFTLSLERGPSVILGTDASEELLFTKASLAVSTSVFQFSTGKIYTEWVWQKNKSFLSPHFPTKPMASPVKGKHSTSLLQRLNYRDRWQCLQEGAGLALLSAHMKVPTGSKEPQQAGKLPSKPRKQTTPTFKD

SEQ ID NO: 47332 - protein, 233 aa, Homo sapiens
  misc_feature (1)...(233): Xaa = X or * as defined in Table 2
CSACPVSHPWLLPWQSGSAFSLPXRALQRPPQHGHRLSKPMQSPRLSVLLRPWPRRPLPTDLLYXPSTRGHIHLHDRHHGAPSVSRRWGDKASPPQFPRYSRDSKRRPPQHGEVGTVFTNNKGGQSPATSTWEVQSAECQKAPEAGPTPPSTAGDAEGANALRQESEGNWGSEAKSPHVAEAGSWRPQQGSCHHLHPPDKTKDAARKTHSPGDNGCQPRPPRPCKTLWSLSRI

SEQ ID NO: 47333 - protein, 463 aa, Homo sapiens
  DOMAIN (384)..(397): LDL-receptor class A (LDLRA) domain proteins domain identified by eMATRIX, accession number BL01209, p-value=4.115e-10, raw score of 9.31
  DOMAIN (365)..(401): Low-density lipoprotein receptor domain identified by PFam, accession name ldl_recept_a, E-value=7.6e-09, PFam score of 42.8
RSESPRSPLCFPRVLQFQASALNVRSSMMWSKRLGLGEQDQKHAALQSPGAIFPECSSPQGPQHSRFPPPPPLRDRWQCLQEGAGLALLSAHMKVPTGSKEPQQAGKLPSKPRKKAASIMKRNRSSTSPTDRCAFHVYWRSVGDEDHIHLAVSTEADAQTLKTHAVPKAIGPPQALATKTPAYRSSVLAQHAWTHSSARQTSWGTFCEQALGRQGQPASVPTVLKRQQARPPQHGEVGTVFTNNKGGQSSASCGAARKRPSMKKFAEIHKKRKQACQQRQHGKSNLLNARRPPRQAPPLPAQLEMLKEPMRSDKSQRETGDQRLKAHMWLRRALGARSRAAVIISILLTRQTGPSYTADGYLEAKECKFTCTSGKCLYLGSLVCNQQNDCGDNSDEENCLLVTEHPPPGIFNWHDALSGHTASVVFFPVMQNLILIVIRHRTDPNRRTFCKTLDQQFSKVSRL

SEQ ID NO: 47334 - protein, 99 aa, Homo sapiens
QGCPLTPLLLNMVLEILAGAIRQEKERKDIHTGKEEFKLSRFADYIIACQENPNDSSKKLLELVIVAACVPRLMTPSFIFKTPHSNICCCHHIAHCLFL

SEQ ID NO: 47335 - protein, 133 aa, Homo sapiens
  misc_feature (1)...(133): Xaa = X or * as defined in Table 2
LQAVRLFTLPTTSSGLXKLRTVPTWPSPPSCFPHFQSGPRTTRAPTPSTIPGYSGSYSSGPPSLCPRTSRRAPPRHRVPAGRERLHIRVPPYPRPERHLLRVSRRGILGNNRVGRLPESRAIAGRKEEKTDTK

SEQ ID NO: 47336 - protein, 158 aa, Homo sapiens
  DOMAIN (111)..(127): Ank repeat proteins domain identified by eMATRIX, accession number PF00023A, p-value=5.179e-09, raw score of 16.03
  DOMAIN (73)..(138): Ank repeat domain identified by PFam, accession name ank, E- value=1.2e-07, PFam score of 38.8
MPATRVLPFHFPPGPWGGAVAPHKLPPRAPLRHRGCTRPSAAYNWRQKKSNERKRLRADPRLTLEIPRIMDKDGDRAVHHAAFGDEGADIEVLHRGSADLNARNKRRQTPLHIAVNKGHLQVVKTLLDFGCHPSLQRCPPRFGEFIDLTACGEGPKDA

SEQ ID NO: 47337 - protein, 357 aa, Homo sapiens
  misc_feature (1)...(357): Xaa = X or * as defined in Table 2
RVFSESVCSPVRNLEFLWRFAFPLAPAGRCPPGVPLQTSPRDTDAHRSSPLPPARASPGQVAAAYRWARCPGCGGRKPRSSGSWQLCRCPTLPPPPRGSRSSGRCRTWPSPPSCFPHFQSGPRTTRAPTPSTIPGYSGSYSSGPGRXGLSPLHAAVSPPLPPGGPXGSWARAGLGSIASAHSPCPLCRSLIRSRSXQTCTRSPTXNCEVPPSAPXAASPLRTMFALVRTAGLKVHLLPLGYCTTMSXSSSMPQTVPVVVKVSNIPSVHPPXPCCKDCTISRSRSIFTRSPICNPPGFLLPFCSPSTGQXSLXKEPPLASWTHFRSDVLLLFSVSMNGSTLSLGCPSQKAVIALVQVT

SEQ ID NO: 47338 - protein, 344 aa, Homo sapiens
  DOMAIN (319)..(335): Ank repeat proteins domain identified by eMATRIX, accession number PF00023A, p-value=5.179e-09, raw score of 16.03
  DOMAIN (248)..(344): Ank repeat domain identified by PFam, accession name ank, E- value=3.3e-15, PFam score of 63.9
NVSQDAKGGSFYRDHCPVLGEQNGNRNPGGLQIGDLVNIDLDLEIVQSLQHGHGGWTDGMFETLTTTGTVCGIDEDHDIVVQYPSGNRWTFNPAVLTKANIVRSGDAAQGAEGGTSQFQVGDLVQVCYDLERIKLLQRGHGEWAEAMLPTLGKVGRVQQIYSDSDLKVEVCGTSWTYNPAAVSKVASAGSAISNASGERLSQLLKKLFETQESGDLNEELVKAAANGDVAKVEDLLKRPDVDVNGQCAGHTAMQAASQNGHVDILKLLLKQNVDVEAEDKDGDRAVHHAAFGDEGAVIEVLHRGSADLNARNKRRQTPLHIAVNKGHLQVVKTLLDFGCHPSLQ

SEQ ID NO: 47339 - protein, 37 aa, Homo sapiens
QPCRQQCLQPGSPPRFHARTLTVTLVHTRTHTHAHAH

SEQ ID NO: 47340 - protein, 133 aa, Homo sapiens
RCLGDASQICLPPPCASSGYAPSSSGLYELLLTICRPPPSIQIFLAILFSARCPARARAPIKSYSEPAAGSHFCFSLTAMQAAGLQPGSPPRFHARTLTVTLVHTRTHTHAHDHAHSHSCTCTHSHPHAHSTK

SEQ ID NO: 47341 - protein, 389 aa, Homo sapiens
  DOMAIN (255)..(295): kw TRANSCRIPTASE REVERSE II ORF2 domain identified by eMATRIX, accession number DM01354Y, p-value=2.191e-21, raw score of 10.69
MDEKYRDKGNGNISFVSVYWTLMRPENAVLGGPSSTFKELPHCFLKVASLSSSLMHTLHTQVNNQPNAELVSFNKCAVSYFPWGKKGTVSLTCPLTIVITLLLAFANSIHVSIGPSVYLPTTHENVGESPAKLVGITVNNPWHPVTFPNTLHNMGTWIVSPTKATGGQMYQTTKADEDAAAVHKGTSGTIFSSSMQPVHERPESKEEKKWPVGLRGTDGSLLLQEPAPQCGQSDLVCHPYPSPTFKEGVASVPLPELGVRDPSLTAWYWYQNRDIDQRNRTEPSEIMPRIYNYLIFDKPDKNKKWGKDSLFNKWCWENWLAKCRKLKLDPFLTPYTKINSGWIKDLNVRPKTIKTLEENLGNTIQDIGMGKDFMSKTPKAMATKAKIDK

SEQ ID NO: 47342 - protein, 472 aa, Homo sapiens
LHIPRSLPGDRAARTGHPRLPVPPPRARTEPRPRGQRRLHSSGEMAAGSTTLRAVGKLQVRLGTKTEPKKLEKYLQKLSALPMTADILAETGIRKTVKRLRKHQHVGDFARDLAARWKKLEKRPLCAQGDWHSPTLIREKSFGACLREETPRMPSWASARDRQPSDFKTDKEGGQAGSGQRVPALEEAPDSHQKRPQHSHSNKKRPSLDGRDPGNGTHGLSPEEKEQLSNDRETQEEKPPTAHLDRTSVSSLSEVEEIWKLISERLRSAQGQQALKTVTSTFSSKYVCRAFLAEPGWIAILYIDTANALEQETKLGLRRFEVCDNIDLETILMEYESYYFVKFQKYPKIVKKSSDTDRAPVEEEGTARSGSNRERRGKGGTSLPEGVVNGGSKRCQPPQPCLKAANVELRVWLQRGKAPSPGSFHMALSLQGHRSQELRGNSLLEIACLNELDYSANAGAYVDCMVTTVAVF

SEQ ID NO: 47343 - protein, 129 aa, Homo sapiens
  DOMAIN (52)..(95): kw TRANSCRIPTASE REVERSE II ORF2 domain identified by eMATRIX, accession number DM01354T, p-value=7.750e-38, raw score of 9.48
DAEKAFDEIQQPFMIKILSRISIQGTYLNVIKTIYDKPTANTILNVEKLKTFPLRTGTRQGCPLSALLFNMVLEVIARAIRQEKGIKGIQISKKEVKLSLFADDMIVHIENPKDSSRKLLELIKEFSKV

SEQ ID NO: 47344 - protein, 280 aa, Homo sapiens
  DOMAIN (147)..(190): kw TRANSCRIPTASE REVERSE II ORF2 domain identified by eMATRIX, accession number DM01354T, p-value=7.750e-38, raw score of 9.48
  DOMAIN (36)..(269): Reverse transcriptase domain identified by PFam, accession name rvt, E-value=5.4e-13, PFam score of 56.6
MAQHLLGFFYGLRKISLIAEGKGGAGMSHEREGAREREGVLEVLARAVGQDKEIKGIQIGNKEVKLSLFADDMIVYLENPKDSSRKLLELVNEFSKVSGYKINVHKSELESSWWTISIQGTYLNVIKTIYDKPTANTILNVEKLKTFPLRTGTRQGCPLSALLFNMVLEVIARAIRQEKGIKGIQISKKEVKLSLFADDMIVHIENPKDSSRKLLELIKEFSKVSGYKINVHKPVALLYTNSDQAENQIKNSTPFTVAAKIIKYLEIYLINNMKDLYKEN

SEQ ID NO: 47345 - protein, 125 aa, Homo sapiens; identical to SEQ ID NO: 44513
  DOMAIN (69)..(85): AUXIN BINDING PROTEIN SIGNATURE domain identified by eMATRIX, accession number PR00655E, p-value=9.000e-09, raw score of 8.06
  misc_feature (1)...(125): Xaa = X or * as defined in Table 2

SEQ ID NO: 47346 - protein, 591 aa, Homo sapiens; identical to SEQ ID NO: 33763

SEQ ID NO: 47347 - protein, 276 aa, Homo sapiens
MCWCLRYKPLADTFLREKKEQSAAERCRLVLQQCKLQGWQKTDRSWRMTVDYCKLNQVVTPIAAAVPDVVSLLDQINTSPVTQKTVSFEWGPEQEKVLQRVQAAVQSALPLGPYNPADPKMLEVSVADRDAVWSLWQAPIGESQRRPLGFWGKALPSSADNDSPLERQLLTYYWALVETECLTMGHQLIMNWVLSDPSSHKVGHAQQLPIIKWKWCICDEAQAGPEGTTTPMIAQWAHEQSGYGGKDGGYAWAQKYGLPLTKADVAVATAECPICQ

SEQ ID NO: 47348 - protein, 75 aa, Homo sapiens; identical to SEQ ID NO: 34862
  DOMAIN (25)..(41): AUXIN BINDING PROTEIN SIGNATURE domain identified by eMATRIX, accession number PR00655E, p-value=9.000e-09, raw score of 8.06

SEQ ID NO: 47349 - protein, 69 aa, Homo sapiens; identical to SEQ ID NO: 45022

SEQ ID NO: 47350 - protein, 263 aa, Homo sapiens; identical to SEQ ID NO: 37048
  DOMAIN (55)..(234): Reverse transcriptase domain identified by PFam, accession name rvt, E-value=3.9e-23, PFam score of 90.3

SEQ ID NO: 47351 - protein, 145 aa, Homo sapiens
MTVDYCKLNQVVIPIAAAVSDVVSLLEQINTSPGTWYAAIDLANAFFSIPVHKAQQKQFAFSWQGQQYTFTVLPQWYINSPALCHNLIRRDLDCFSLPLDITLVHYIDDIMLIGSTIKWVVHSSIPSSNGSGMYMIGLEQVLKAQ

SEQ ID NO: 47352 - protein, 269 aa, Homo sapiens
  DOMAIN (2)..(171): Reverse transcriptase domain identified by PFam, accession name rvt, E-value=1.4e-20, PFam score of 81.8
PLIWLVQKTDGSWRMTVDYCKLNQVVIPIAAAVSDVVSLLEQINTSPGTWYAAIDLANAFFSIPVHKAQQKQFAFSWQGQQYTFTVLPQWYINSPALCHNLIRRDLDCFSLPLDITLVHYIDDIMLIGSSEQEVANTLDLFVRHLRARGWEINPTKIQGPSTSVKFLGFQWCGACQAIPSKMRDKLLHLVPPTTKKEAQCLQLLACYWALVETEHLTISHQVTMRPELPIMNWVLFDPSSHKVGCAQQHSIIKWKWYVHDWARAGPEGT

SEQ ID NO: 47353 - protein, 181 aa, Homo sapiens
YKPLADTFLREKKEQSAAERCRLVLQQCKLQGWQKTDRSWRMTVDYCKLNQVVTPIAAAVPDVVSLLDQINTSPVTQKTVSFEWGPEQEKVLQRVQAAVQSALPLGPYNPADPKMLEVSVADRDAVWSLWQAPIGESQRRPLGFWGKALPSSADNDSPLERQLLTYYWALVETECLTMGHQ

SEQ ID NO: 47354 - protein, 211 aa, Homo sapiens; identical to SEQ ID NO: 37055
  DOMAIN (42)..(58): AUXIN BINDING PROTEIN SIGNATURE domain identified by eMATRIX, accession number PR00655E, p-value=6.556e-09, raw score of 8.06

SEQ ID NO: 47355 - protein, 1076 aa, Homo sapiens
  DOMAIN (284)..(305): CONNEXIN SIGNATURE domain identified by eMATRIX, accession number PR00206C, p-value=7.465e-09, raw score of 15.16
  DOMAIN (972)..(1076): Integrase core domain identified by PFam, accession name rve, E-value=8.8e-17, PFam score of 62.0
MVTSSLTVAITSLVVVITSLVVIITSFVVVTTSLVVVITSLVVVITSIAIAIATLVVVLTFTVVVLTSLVVVTTSLVMVITPPFAVITSLGVVITSLVVIITCLVLVITALGVVITSLGVVVTSLVMVITPLVAVITPLGVVITSLVVVITSLVMVITSLTVVITSSIVVITPLVMVITSLTVIITSLFVVITPLVMVITFLIVVNTSLVVVLITLIVSPPPSLCSLVVVITFLVVAITSLVVVITSLVVVITSLVVVIPPSLWLSLPWVWSSFPWLWFSPPWLWFLPLLFVVTTSLVVVLTSLIVSITSLFVVIIPLVVVITSLIVVITSLVVVLIAVIVVTPSLIVVISSLVVVIASLVVVFISLIVVISSLIVVITSLVVVITSLVVVITSLIVVITSLVVVITSLVVVITSLIVVIIPLVVLWVRQPGDPAEMVKEFHWGGAGGSDNQAENTAQGDQKKEKKKKKKKKKKVLSLFSLFKMSHPADMLTLGDLYRQHIPQQKETPRLGINTCQTLEAAPGLFAILHKDLQPFSGKKKKPQMQRGFGSCQQTVPPVLRIRGLRIVRKFWKLPSSPPGHDWTEPGWSLSCRWLWVLEQQSPLMPICVHEYCRRCGDNRPSDADLYAFPASQAANWPWAVGTAASAKEPEGFLDFCSHSGEVVRWGHRKWDGNPNNYYHRRNEMTTTDDLDFKHHNYKEMRQICEGSNCIFEAPWIHPVVTSPVPECIIGIDILRSWQNPHIGSLAGRKTDGSWGMTVDYHKLNQVVTPIAAAVPDVVSFLEQINTSPGNWYAAIDLANAFFSIPVHKAHQKQFVFSWQGQQYTFTVLHQGYINSPALYHNLIWRDLDRFSLPQDITLIHYIDDMTLIGSSEQDVANTLDLLVTSAEEDFNNQVDRMTHSVDITQHLSPATPVIAQWAREQSSHGGRDGGYAWAQQHVLPLTKADLAMATAEYPICQQQRPTLSPQYGTIPQGDQPATRQQVDYIGPLSSWKGQRFVLTGVHAYCGYGFAYPARNASAKTTICGLTECLIHCHGILHSIASDQGTHFTAKEVWQWAPAHGIHWSYHVPHHPEAVGL

SEQ ID NO: 47356 - protein, 157 aa, Homo sapiens; identical to SEQ ID NO: 38078

SEQ ID NO: 47357 - protein, 530 aa, Homo sapiens
  DOMAIN (240)..(252): RNase H domain identified by eMATRIX, accession number PF00075C, p-value=4.326e-10, raw score of 11.58
  DOMAIN (145)..(330): Reverse transcriptase domain identified by PFam, accession name rvt, E-value=1.5e-07, PFam score of 37.5
MTGQSYLRMMCIELDMTKLLQRSQVDFMEPILTKYLQPILPSQKPTWYLAQSVSIVTGDVWPFTRVTMHWGKGNNQTFQRLLDTGCELTLILEDSKHHHGPPVKVGAYGDQVIDGLLAQVQLTVGPEGPQTHPVVISPVPECIIVIDILRSWQNPYIGSLTGRKTDGSWRMTVDYCKLNQVVTPIAVAVPDVVSLLKQINTSPGTWYAAIDLENAFFSIPVHKAHQNQCAFSWQGQQYAFTVLPQGYINSPALCHNLIWRDPDCFLLPQDITLVPYIDDIMLIGSSEQEVANRLDLLVSMASSRVPYDQLTEEEKARFTDGSARYAGTTRKWTAAALQPLSRISLKDSGEARIHGSRNQGVEVAPLIITPSEPLAKFLLPVPMTLHSAVLEVLVTEGRMLLPRDTTIIALNWKLRLPPGHFELLLPLSQQAKKGTTVLAVVIDPDYQDEISLLLHNGGKNPRLAEMLAEGNGNTEWIVEEGSHQYQLPLCDQMLPALKYRTSSSSVLRLGLTLLAPQACRQPVLWDLVIV

SEQ ID NO: 47358 - protein, 458 aa, Homo sapiens
  DOMAIN (329)..(381): ELEMENT TRANSPOSABLE INSERTION PROTEIN TRANSPOSITION DNA domain identified by eMATRIX, accession number PD02455C, p-value= 2.350e-09, raw score of 29.23
  DOMAIN (264)..(419): Integrase core domain identified by PFam, accession name rve, E-value=4.3e-30, PFam score of 108.1
RGYVFCSWKKTDGSWRMTVDYCKLNQVVIPIAAAVSDVVSLLEQINTSPGTWYAAIDLANAFFSIPVHKAQQKQFAFSWQGQQYTFTVLPQWYINSPALCHNLIRRDLDCFSLPLDITLVHYIDDIMLIGPRQLLACYWALVETEHLTISHQVTMRPELPIMNWVLFDPSSHKVGCAQQHSIIKWKWYVHDWARAGPEGTTTPVISQWPHEQCGHGGRDGGYAWAQQCRLPLTKADLNTATAKRPICQQQRPTLSPQYGTIPQGDQPATWWWVDYMGSLPSWKGQRFVLTGIDTYSGYGFAYPACNASAKTAICGLTECLIHHHDIPHSIASDQGTHFMAKEVRQWAHDHGIHWSYHVSHHPEAAGLIEWWNGLLKSQLQCQLGDNTWQGWGKVLQKVVYALNQHPIYGTVSPIAKIHRRVADSLKGGSGSWVWGFSTLAALDNDLGTFRKVRAPSTN

SEQ ID NO: 47359 - protein, 686 aa, Homo sapiens
  DOMAIN (141)..(152): RNase H domain identified by eMATRIX, accession number PF00075B, p-value=3.077e-09, raw score of 12.56
  DOMAIN (460)..(615): Integrase core domain identified by PFam, accession name rve, E-value=3.2e-25, PFam score of 91.2
MDEAGSRHLQQTNTGTENQTPHVLTLKWELNHENTWTQGGKQQTLGSVGGERTEIVEIQTQALIMQVADLQQKMYTLKSLQALRGEVESVTHEEVHTLKKNCFEFSNLYEQPIWRTGAVPDVVSLLEQINTSPATWYAAIDLGNAFFSIPVHNTHQKQFAFSWQGQQYIFTILLQVYINSPALCHNLIGRDFDCFLLLQAITLVHYIDDIMLNGSNTLDSWVRNLHARGWKINPTKIQGASTSVKFLGIQWPYDPADPMVLEVLMADRDAVWILWQAPIGESQQRPLGFWSKALPSSADNYSPFERLLLACYCAFVETERLTMGHQVIVRRELPIMNCMLSDSSGHKVGHAQQHHEIEVIFVYHVSAHQWVTSADEEFNNQVDKMTRSEDTTQPLSSATPVITQWAHEQSGHGGRDGGYTWAQQHGLPLTKADLTMATVECPICQQQRPTLSPQYGTIPWGDQPSTWWQVSYIGPFPSWKGQRFVLTGIGTYSGYGSAYPARNASAKTTTCGLKECLIHHHGIPHSIASDRGTHFMAKEVWQWAHARGVHWSYRVSHHPEADGLIEWWNGLLKSQLQHQLGDNTLQDWGKVLQKATYALNQHLIYEHWTPSSSVLGHGLALLPSQLADNLLWDLVVMAYTLKLQNADEINIRRRCLTRQPGSTAPTERPKYGVNQHASNTSSERKH

SEQ ID NO: 47360 - protein, 541 aa, Homo sapiens
  DOMAIN (259)..(275): AUXIN BINDING PROTEIN SIGNATURE domain identified by eMATRIX, accession number PR00655E, p-value=7.222e-09, raw score of 8.06
  DOMAIN (345)..(425): Integrase core domain identified by PFam, accession name rve, E-value=2e-08, PFam score of 33.1
PHQVSTVRMRALIGKEWDPATWNGDMWEDPDEAGDTELINSDEHFWPEVTASPSPVVATSSPPPMLLSAFPPLSEEINPALPEAVARQNNVDSPQKPPPTPLFASRPITRLKAWWAPRVSECIIGIDIFSSWQNPCIGSLTGRVRATVVGKAKWKPLELPSPRKIANQKEYHIPGGIVEITATIKDLKDAGVVIPIPTTFPLNSPIWPVRKTDGCWRMTVDYCELNQVVTPTAATVPDVVSLLEQINTSPGTWYADIDLANAVFSIPVHKAHQKQFAFSWQGQQYTFTVLPQEYINSLGLCHNLIQRDLDHFSLLQDITLVHYIEDIMLIGSTEQEIANTLDLLFMAKEVWQWAHAHGIHWSYHVSHHPEAAGLIEWWKGLLKLQLQCQLGDNTLEGWGKVLQKTVYALNQHPIYGTVSPIARIHRSRNKGVEVAPFTITPSDPLPQFLLPVPATLCSAGLEVLAPEGGTLPPGDRTTIPLNWKLRLPPEDFGLLPSLSQQAKKGVTVLAGVIHPDYQDEISLLLHNGCKEDLLNGIQQIH

SEQ ID NO: 47361 - protein, 247 aa, Homo sapiens
  DOMAIN (39)..(61): AAA-protein family proteins domain identified by eMATRIX, accession number BL00674B, p-value=4.000e-23, raw score of 4.46
  DOMAIN (41)..(180): ATPases associated with various cellular act domain identified by PFam, accession name AAA, E-value=2.6e-07, PFam score of 26.1
VTWSDIAGLDDVITDLKDTVILPIKKKHLFENSRLLQPPKGVLLYGPPGCGKTLIAKATAKEAGCRFINLQPSTLTDKWYGESQKLAAAVFSLAIKLQPSIIFIDEIGLEVIRSFTLVKRLEYQLKSQGSQSKSAVKQVSNPGLLDSKIDTHATPMHATESFSGPVVGRSGYNAGSSEPRCQGGSPDPSLPLALRQLLGVANRPGRTLGIQHSKLEGIECGIQRSYIFSSKKCPMTAGPQRKRQENY

SEQ ID NO: 47362 - protein, 155 aa, Homo sapiens
  DOMAIN (110)..(153): AAA-protein family proteins domain identified by eMATRIX, accession number BL00674C, p-value=8.800e-13, raw score of 22.60
SYNFNKYSYYLVTFLFVFLRLTFKMVHAEAFSRPLSRNEVVGLIFHLTIFGSVTYFSIKWMVDAIDPIRKQKAEAQKQAEKLMKLIGCGKTLIAKATAKEAGCRFINLEPSTLTNKWYGESQTLAAAVFSLAIKLQLSIIIIDEIDSFVRNRSEF

SEQ ID NO: 47363 - protein, 273 aa, Homo sapiens
RCQRNKDIMMSSKPTSHAEVNETIPNPYPPSSFMAPGFQQPLGSINLENQAQGAQRAQPYGITSPGIFASSQPGQGNIQMINPSVGTAVMNFKEEAKALGVIQIMVGLMHIGFGIVLCLISFSFREVLGFASTAVIGGYPFWGGLSFIISGSLSVSASKELSRCLVKGSLGMNIVSSILAFIGVILLLVDMCINGVAGQDYWAVLSGKGISATLMIFSLLEFFVACATAHFANQANTTTNMVPTIQQLGDWKCCVLHHKAQQLSKSEDKDFMV

SEQ ID NO: 47364 - protein, 415 aa, Homo sapiens
  DOMAIN (232)..(249): PROTEIN GLUTATHIONE SYNTHETASE SY domain identified by eMATRIX, accession number PD02939B, p-value=2.723e-12, raw score of 10.10
PRAREEPPDPGRRYIQEEIIQARKHKLIKMCSSVAAKLWFLTDRRIREDYPQKEILRALKAKCCEEELDFRAVVMDEVVLTIEQGNLGLRINGELITAYPQVVVVRVPTPWVQSDSDITVLRHLEKMGCRLMNRPQAILNCVNKFWTFQELAGHGVPLPDTFSYGGHENFAKMIDEAEVLEFPMVVKNTRGHRGKAVFLARDKHHLADLSHLIRHEAPYLFQKYVKESHGRDVRVIVVGGRVVGTMLRCSTDGRMQSNCSLGGVGMMCSLSEQGKQLAIQVSNILGMDVCGIDLLMKDDGSFCVCEANANVGFIAFDKACNLDVAGIIADYAASLLPSGRLTRRMSLLSVVSTASETSEPELGPPASTAVDNMSASSSSVDSDPESTERELLTKLPGGLFNMNQLLANEIKLLVD

SEQ ID NO: 47365 - protein, 251 aa, Homo sapiens
VCGSVSVLEWGEGEADGTRGCEKLGECARTPGQPAGAAVGGGERRRLPVSRPPPPPLLPPLPAARRPALSRTPQPGSVGRERGRSPPTQVSGRRYIQEEIIQARKHKLIKMCSSVAAKLWFLTDRRIREDYPQKEILRALKAKCCEEELDFRAVVMDEVVLTIEQGNLVHWPFTFKFELALLGSSPDSITPTRYPNGLAPDLDPVKMEAFQFDLVPLFIYAFIAYSFGVIAKNIIAKANVKKLPIPTPIFF

SEQ ID NO: 47366 - protein, 113 aa, Homo sapiens
NSRAKKRPQLLRALARVPSPVRNRALGWSWSTASNSNRSTPACSPILRKRSRSPTPQNQDGDTMVEKGSDHSSDKSPSTPEQGVQRSCSSQSGRSGGKNSKKSQSWYNVLSPT

SEQ ID NO: 47367 - protein, 475 aa, Homo sapiens
MEGKEKGIPYTVSSAEQPEALCMALFRFLDAGTNEVIDCHAIRLSLDILVCASATAITKNNYTLSLPWESPWPEDKHHGDKDCVSFSNLYIPTEEEGLGIVGSWSLYPGHTFSTDIEGMQQIPEVQRVVLYDLDNSLNGNTSTASNSNRSTPACSPILRKRSRSPTPQNQDGDTMVEKGSDHSSDKSPSTPEQGVQRSCSSQSGRSGGKNSKVSGTPLRRYLLVRGCGERYWGGEPENICEGPHVMNSPDGSETVIIQRAGPTVPRQAGLEVIEGPFSLHLMSENRPSPTPDPAPMSACSLDTASGWEFIPSLHGEDDKHPSGCYAERMTLRAKHLPPPSPENQLVDNKPPTTSRASSLEALQGPGEDRQQRSHQRANCLQQFGIQTQLQMPAFMVATAHCQGQDEGGMWEEASWQGNAEVKESEWLSCQWGIFFLTPVGKLLALKQVFRPGAKAGPESLEVVAGLLCVQELDET

SEQ ID NO: 47368 - protein, 294 aa, Homo sapiens
MGQVTCSQVNASHTYDLTSAPHMNNSAQPYAHSQGSTCVASFSRLMSGIPLSNISAIFYETIFLDGQFLASQETDEEARRMYWESPAEEELLRRSGGRALRGAVAPRWQNSASESHTAERDGWCVLAKYWGHWEPCLLPVGVGKPERSGTIKMNAMLETPELPAVFDGVKLAAVAAVLYVIVRCLNLKSPTAPPDLYFQDSGLSRFLLKSCPLLTKENCRSLKDLKKGPYYVSKKGVYVFQKEVYATTDSITWYQIQYMWTDLHGIRSTFILLLNVWLTENCSTIREQEMDLVF

SEQ ID NO: 47369 - protein, 430 aa, Homo sapiens
  DOMAIN (165)..(399): alpha/beta hydrolase fold domain identified by PFam, accession name abhydrolase, E-value=1.7e-31, PFam score of 118.0
VTLIKMNAMLETPTLSAVSDGVKLSAVAAVLYVIVRCMNLKSATAAPDLYLQDSGLSRFLLKSCPLLTKEYIPPLIWGKSGHIQTALYGKMGRVRSPHPYGHRKFITMSDGATSTFDLFEPLAEHCVGDDITMVICPGIANHSEKQYIRTFVDYAQKNGYRCAVLNHLGALPNIELTSPRMFTYGCTWEFGAMVNYIKKTYPLTQLVVVGFSLGGNIVCKYLGETQANQEKVLCCVSVCQGYSALRAQETFMQWDQCRRFYNFLMADNMKKIILSHRQALFGDHVKKPQSLEDTDLSRLYTATSLMQIDDNVMRKFHGYNSLKEYYEEESCMRYLHRIYVPLMLVNAADDPLVHESLLTIPKSLSEKRENVMFVLPLHGGHLGFFEGSVLFPEPLTWMDKLVVEYANAICQWERNKLQCSDTEQVEADLE

SEQ ID NO: 47370 - protein, 121 aa, Homo sapiens
  DOMAIN (95)..(106): PROTEIN GLYCOPROTEIN PRECURSOR RE domain identified by eMATRIX, accession number PD00306B, p-value=2.000e-09, raw score of 5.57
  misc_feature (1)...(121): Xaa = X or * as defined in Table 2
SRSSSVVRQEPGRADGQRRRRRGGPGLRSPGERQQPRPARPCRRAHHPGDPAGAQPPPKTGKTCGAPKATTRSTRCSISRXPPFPRSSCPTSPRATPSSSASSTAAMRRWLVTCRMPNWRA

SEQ ID NO: 47371 - protein, 88 aa, Homo sapiens
  DOMAIN (48)..(63): WILM'S TUMOUR PROTEIN SIGNATURE domain identified by eMATRIX, accession number PR00049D, p-value=5.119e-09, raw score of 0.00
RSSLKGVRSSLSSRYASRSRRHRCLSSLQSGGSKAGYSASMPRSLPGPGPAAPPFVSPPAPPLFSQHWGSGCWRATQPAPSPGLMTVP

SEQ ID NO: 47372 - protein, 617 aa, Homo sapiens
  DOMAIN (505)..(538): PROLINE-RICH PROTEIN 3 domain identified by eMATRIX, accession number DM00215, p-value=9.357e-14, raw score of 19.43
MDFYRYEVSPVALQRLRVALQKLSGTEVTHTHTLTIELTPADVTHTDTLTIRADTCRRHSHPHSHLAVESTREKFNVEVADDPTAPFDFTPNTCKQGSRRGSGSHAGGTWAVATAPGGISPISDFTPNTCKQSSRRGSGSHARGTWAVAAAPGGISPLSDFTPNTCKQGSRRGSGSHARGTWAVAAAPSGITATIELRVEQEKEQRQRPPVLEAPGRRRQGLPPPWKNLLKLQAGAKAGVAAVVTQSFPMPSTHPSPRATLGSPFTVQYAPQWLHQDVWDLYQDMGKKKALACSPDCYSKAPQMEAPLSIDPEALRVAARGEMLNISRHFHLRSLWQEQTPLKQAALSQAGAGLAGCRVPRKHVQGQESATQQLHVNTCPGMQAAGPVHSQSRPHGRSLLSDRYHFHSGGLELWPSEELVTTKVAEQEVLRRKCTFLTTHSQPSSPPVCSPPVRSPPVRSPPVRSPPDRSPPVRSPPDRSPPVRSPPVRSPPERSPPVRSPPDRSPPDRSPPVRSPPVRSPPVRSPPVRSPPVRSPPVRSPPDRSPPVRSPPVRSPPDCSPPDRSPPVRSPPDCSPPDCSPPVRSPPVRSPPDCSPPVHSPPVCSPLDCSPPCQLPS

SEQ ID NO: 47373 - protein, 368 aa, Homo sapiens
MHVKSPVHLDPNPVYTTERKARAPQMGKHAFLITPSPAMRSRRWKEPLPHQQTQRMGRTQKTKARKDEANNSRQRQHWIPVIARMYPPTLDSSCPLILLNNKAVMELQGIDKTPISQHRAVCLGWSRGVGNTLRAPSAPQASSLDVDFTPHSQKQRVSSTGSESTRRVDNSNTRLAVQIERDPERARHSPIANPPPESSVHEEDHPENGSQTGACIRITCRTRQNTDCLAQGPIRRISDSLGPGLNLRIYICNKFLPDAGTAGSAEPERNDDNNLNSIFYEHLTRTLQESLCGDLVLGRWGKYSSGDCFILASDDLNAFVHLIEIGNGLVTFQLRGLEFRDFGLGVVQERIPNPDPKRGFLDLAQERI

SEQ ID NO: 47374 - protein, 122 aa, Homo sapiens
LWECAAAAAGQRDGGVTLFLKGRVLGRRCAASLFAREVCVSTSSSRPACFLHCARARGEQMHQMASGVGSMKRSPRKMWRPGEKKEPQGVVYEDVRDDTEDCKEPLKEKVNSTRWRCSLKIS

SEQ ID NO: 47375 - protein, 1143 aa, Homo sapiens; identical to SEQ ID NO: 36020
  DOMAIN (267)..(322): Domain present in ZO-1 and Unc5-like netrin receptors domain identified by eMATRIX, accession number PF00791B, p-value=6.305e- 12, raw score of 28.49
  DOMAIN (121)..(603): Ank repeat domain identified by PFam, accession name ank, E- value=1.6e-88, PFam score of 307.5

SEQ ID NO: 47376 - protein, 437 aa, Homo sapiens
  DOMAIN (218)..(231): REPEAT PROTEIN ANK NUCLEAR ANKYR domain identified by eMATRIX, accession number PD00078B, p-value=6.250e-13, raw score of 13.14
  DOMAIN (220)..(350): Ank repeat domain identified by PFam, accession name ank, E- value=3.9e-26, PFam score of 100.2
MEFYRAGRKFSHHTTGHKLGRFQPEAAIDKECAAAAAGQRDGRVTLSLKGRVQGRRGAAALFAKELRVSTSSPRPACFLHYKSSAGLRTPSRSSPGLPQSDFFAACARARGEQLHQVASGVGSMKRSLRKMWRPGEKKEPQGVVYEDVPDDTEDFKESLKVVFEGSAYGLQNFNKQKKLKRCDDMDTFFLHYAAAEGQIELMEKITRDSSLEVLHEMDDYGNTPLHCAVEKNQIESVKFLLSRGANPNLRNFNMMAPLHIAVQGMNNEVMKVLLEHRTIDVNLEGENGNTAVIIACTTNNSEALQILLKKGAKPCKSNKWGCFPIHQAAFSGSKECMEIILRFDIEMQTIEKELTAASAKYRKSVSQTGRHTNIHMIPKKCILLPVFTNDSVRPKLPGEFIALSGRDKNGETKNYEQCDVSSRIRGIGRTKYSKDTS

SEQ ID NO: 47377 - protein, 250 aa, Homo sapiens [sequence omitted]

SEQ ID NO: 47378 - protein, 63 aa, Homo sapiens
  misc_feature (1)...(63): Xaa = X or * as defined in Table 2
QPQATTLVHPVHVAXLFXVHWQNRYRAPDNQGYRHWRCLLPALPDAGRVRLSASCXKPPNSRG

SEQ ID NO: 47379 - protein, 45 aa, Homo sapiens
  misc_feature (1)...(45): Xaa = X or * as defined in Table 2
SPKDQEPSISKKVXXXTSLPTSSRSLCLPPARMHFWVLAALLSFA

SEQ ID NO: 47380 - protein, 1187 aa, Homo sapiens
  DOMAIN (80)..(98): GLIADIN AND LMW GLUTENIN SUPERFAMILY SIGNATURE domain identified by eMATRIX, accession number PR00208A, p-value=8.603e- 12, raw score of 12.59
  DOMAIN (162)..(1110): Cysteine rich repeat domain identified by PFam, accession name cys_rich_FGFR, E-value=1.6e-290, PFam score of 978.5
HEARRGLKMAACGRVRRMFRLSAALHLLLLFAAGARNSPARASHSQGQGPGANFVSFVGQAGGGGPAGQQLPQLPQSSQLQQQQQQQQQQQQPQPPQPPFPAGGPPARRGGAGAGGGWKLAEEESCREDVTRVCPKHTWSNNLAVLECLQDVREPENEISSDCNHLLWNYKLNLTTDPKFESVAREVCKSTITEIKECADEPVGKGYMVSCLVDHRGNITEYQCHQYITKMTAIIFSDYRLICGFMDDCKNDINILKCGSIRLGEKDAHSQGEVVSCLEKGLVKEAEEREPKIQVSELCKKAILRVAELSSDDFHLDRHLYFACRDDRERFCENTQAGEGRVYKCLFNHKFEESMSEKCREALTTRQKLIAQDYKVSYSLAKSCKSDLKKYRCNVENLPRSREARLSYLLMCLESAVHRGRQVSSECQGEMLDYRRMLMEDFSLSPEIILSCRGEIEHHCSGLHRKGRTLHCLMKVVRGEKGNLGMNCQQALQTLIQETDPGADYRIDRALNEACESVIQTACKHIRSGDPMILSCLMEHLYTEKMVEDCEHRLLELQYFISRDWKLDPVLYRKCQGDASRLCHTHGWNETSEFMPQGAVFSCLYRHAYRTEEQGRRLSRECRAEVQRILHQRAMDVKLDPALQDKCLIDLGKWCSEKTETGQELECLQDHLDDLVVECRDIVGNLTELESEDIQIEALLMRACEPIIQNFCHDVADNQIDSGDLMECLIQNKHQKDMNEKCAIGVTHFQLVQMKDFRFSYKFKMACKEDVLKLCPNIKKKVDVVICLSTTVRNDTLQEAKEHRVSLKCRRQLRVEELEMTEDIRLEPDLYEACKSDIKNFCSAVQYGNAQIIECLKENKKQLSTRCHQKVFKLQETEMMDPELDYTLMRVCKQMIKRFCPEADSKTMLQCLKQNKNSELMDPKCKQMITKRQITQNTDYRLNPMLRKACKADIPKFCHGILTKAKDDSELEGQVISCLKLRYADQRLSSDCEDQIRIIIQESALDYRLDPQLQLHCSDEISSLCAEEAAAQEQTGQVEECLKVNLLKIKTELCKKEVLNMLKESKADIFVDPVLHTACALDIKHHCAAITPGRGRQMSCLMEALEDKRVRLQPECKKRLNDRIEMWSYAAKVAPADGFSDLAMQVMTSPSKNYILSVISGSICILFLIGLMCGRITKRVTRELKDR

SEQ ID NO: 47381 - protein, 62 aa, Homo sapiens
  misc_feature (1)...(62): Xaa = X or * as defined in Table 2
PDRRRGCPALSGSXSGPAPRLCLCNPTLTFHPGSVIGVCLXRHWLCRANTRHPSYRGRLSSR

SEQ ID NO: 47382 - protein, 493 aa, Homo sapiens
  DOMAIN (182)..(194): TYPE I EGF SIGNATURE domain identified by eMATRIX, accession number PR00009C, p-value=5.941e-09, raw score of 14.11
MRSDTISTLRNKGRTDNGASQKVEKAIVENKCMSVRTGKQPMLPRPQHTQTSQQKAAVGADKYQETEVTGTTGHFKLVRKPKILHLHLKDVGHHGLLQTEGHTLDENSLPYQGKVSSPDETPQITGILGNWEVNGKTIIPYKKGAWCSLCTASVSGCFKAWDHAGGLCVRCSLQCVHGRFREEECSCVCDIGYGGAQCATWNTFVKQLLYFEQIKECADEPVGKGYMVSCLVDHRGNITEYQCHQYITKMTAIIFSDYRLICGFMDDCKNDINILKCGSIRLGEKVSQLAEKWSRKETMTLLGMVGLQRKGGVLAQIKSQKVQDILAFYLGRLETTNEVIDSDFETRNFWIGREHMGAASAGKRGQKGSWQQTPGSEWANLDYPGPGLTYKTAKDSFRWATGEHQAFTSFAFGQPDNHGPAMPRARVEVVRLRGHQGLQRFQPALLANSRPVPLAFCLEEVWALCWEYRGELPRYGTYNLVLAGSEKKYYSPA

SEQ ID NO: 47383 - protein, 2861 aa, Homo sapiens
  DOMAIN (2669)..(2700): Protein kinases ATP-binding region proteins domain identified by eMATRIX, accession number BL00107A, p-value=2.174e-14, raw score of 18.39
  DOMAIN (1237)..(2085): RhoGEF domain identified by PFam, accession name RhoGEF, E- value=2.9e-73, PFam score of 256.8
MKAMDVLPILKEKVAYLSGGRDKRGGPILTFPARSNHDRIRQEDLRRLISYLACIPSEEVCKRGFTVIVDMRGSKWDSIKPLLKILQESFPCCIHVALIIKPDNFWQKQRTNFGSSKFEFETNMVSLEGLTKVVDPSQLTPEFDGCLEYNHEEWIEIRVAFEDYISNATHMLSRLEELQDILAKKELPQDLEGARNMIEEHSQLKKKVIKAPIEDLDLEGQKLLQRIQSSESFPKKNSGSGNADLQNLLPKVSTMLDRLHSTRQHLHQMWHVRKLKLDQCFQLRLFEQDAEKMFDWITHNKGLFLNSYTEIGTSHPHAMELQTQHNHFAMNCMNVYVNINRIMSVANRLVESGHYASQQIRQIASQLEQEWKAFAAALDERSTLLDMSSIFHQKAEKYMSNVDSWCKACGEVDLPSELQDLEDAIHHHQGIYEHITLAYSEVSQDGKSLLDKLQRPLTPGSSDSLTASANYSKAVHHVLDVIHEVLHHQRHVRTIWQHRKVRLHQRLQLCVFQQEVQQVLDWIENHGEAFLSKHTGVGKSLHRARALQKRHEDFEEVAQNTYTNADKLLEAAEQLAQTGECDPEEIYQAAHQLEDRIQDFVRRVEQRKILLDMSVSFHTHVKELWTWLEELQKELLDDVYAESVEAVQDLIKRFGQQQQTTLQVTVNVIKEGEDLIQQLRDSAISSNKTPHNSSINHIETVLQQLDEAQSQMEELFQERKIKLELFLHVRIFERDAIDIISDLESWNDELSQQMNDFDTEDLTIAEQRLQHHADKALTMNNLTFDVIHQGQDLLQYVNEVQASGVELLCDRDVDMATRVQDLLEFLHEKQQELDLAAEQHRKHLEQCVQLRHLQAEVKQVLGWIRNGESMLNAGLITASSLQEAEQLQREHEQFQHAIEKTHQSALQVQQKAEAMLQANHYDMDMIRDCAEKVASHWQQLMLKMEDRLKLVNASVAFYKTSEQVCSVLESLEQEYKREEDWCGGADKLGPNSETDHVTPMISKHLEQKEAFLKACTLARRNADVFLKYLHRNSVNMPGMVTHIKAPEQQVKNILNELFQRENRVLHYWTMRKRRLDQCQQYVVFERSAKQALEWIHDNGEFYLSTHTSTGSSIQHTQELLKEHEEFQITAKQTKERVKLLIQLADGFCEKGHAHAAEIKKCVTAVDKRYRDFSLRMEKYRTSLEKALGISSDSNKSSKSLQLDIIPASIPGSEVKLRDAAHELNEEKRKSARRKEFIMAELIQTEKAYVRDLRECMDTYLWEMTSGVEEIPPGIVNKELIIFGNMQEIYEFHNNIFLKELEKYEQLPEDVGHCFVTWADKFQMYVTYCKNKPDSTQLILEHAGSYFDEIQQRHGLANSISSYLIKPVQRITKYQLLLKELLTCCEEGKGEIKDGLEVMLSVPKRANDAMHLSMLEGFDENIESQGELILQESFQVWDPKTLIRKGRERHLFLFEMSLVFSKEVKDSSGRSKYLYKSKLFTSELGVTEHVEGDPCKFALWVGRTPTSDNKIVLKASSIENKQDWIKHIREVIQERTIHLKGALKEPIHIPKTAPATRQKGRRDGEDLDSQGDGSSQPDTISIASRTSQNTLDSDKLSGGCELTVVIHDFTACNSNELTIRRGQTVEVLERPHDKPDWCLVRTTDRSPAAEGLVPCGSLCIAHSRSSMEMEGIFNHKDSLSVSSNDASPPASVASLQPHMIGAQSSPGPKRPGNTLRKWLTSPVRRLSSGKADGHVKKLAHKHKKSREVRKSADAGSQKDSDDSAATPQDETVEERGRNEGLSSGTLSKSSSSGMQSCGEEEGEEGADAVPLPPPMAIQQHSLLQPDSQDDKASSRLLVRPTSSETPSAAELVSAIEELVKSKMALEDRPSSLLVDQGDSSSPSFNPSDNSLLSSSSPIDEMEERKSSSLKRRHYVLQELVETERDYVRDLGYVVEGYMALMKEDGVPDDMKGKDKIVFGNIHQIYDWHRDFFLGELEKCLEDPEKLGSLFVKHERRLHMYIAYCQNKPKSEHIVSEYIDTFFEDLKQRLGHRLQLTDLLIKPVQRIMKYQLLLKDFLKYSKKASLDTSELERAVEVMCIVPRRCNDMMNVGRLQGFDGKIVAQGKLLLQDTFLVTDQDAGLLPRCRERRIFLFEQIVIFSEPLDKKKGFSMPGFLFKNSIKVSCLCLEENVENDPCKFALTSRTGDVVETFILHSSSPSVRQTWIHEINQILENQRNFLNALTSPIEYQRNHSGGGGGGGSGAAAGVGAAAAAGPPVAAAATVAAPAAAAAPPARAGAGPPGSPSLSDTTPPCWSPLQPRARQRQTRCQSESSSSSNISTMLVTHDYTAVKEDEINVYQGEVVQILASNQQNMFLVFRAATDQCPAAEGWIPGFVLGHTSAVIVENPDGTLKKSTSWHTALRLRKKSEKKDKDGKREGKLENGYRKSREGLSNKVSVKLLNPNYIYDVPPEFVIPLSEVTCETGETVVLRCRVCGRPKASITWKGPEHNTLNNDGHYSISYSDLGEATLKIVGVTTEDDGIYTCIAVNDMGSASSSASLRVLGPGMDGIMVTWKDNFDSFYSEVAELGRGRFSVVKKCDQKGTKRAVATKFVNKKLMKRDQVTHELGILQSLQHPLLVGLLDTFETPTSYILVLEMADQGRLLDCVVRWGSLTEGKIRAHLGEVLEAVRYLHNCRIAHLDLKPENILVDESLAKPTIKLADFGDAVQLNTTYYIHQLLGNPEFAAPEIILGNPVSLTSDTWSVGVLTYVLLSGVSPFLDDSVEETCLNICRLDFSFPDDYFKGVSQKAKEFVCFLLQEDPAKRPSAALALQEQWLQAGNGRSTGVLDTSRLTSFIERRKHQNDVRPIRSIKNFLQSRLLPRV

SEQ ID NO: 47384 - protein, 3038 aa, Homo sapiens
  DOMAIN (2846)..(2877): Protein kinases ATP-binding region proteins domain identified by eMATRIX, accession number BL00107A, p-value=2.174e-14, raw score of 18.39
  DOMAIN (1237)..(2085): RhoGEF domain identified by PFam, accession name RhoGEF, E- value=2.9e-73, PFam score of 256.8
MKAMDVLPILKEKVAYLSGGRDKRGGPILTFPARSNHDRIRQEDLRRLISYLACIPSEEVCKRGFTVIVDMRGSKWDSIKPLLKILQESFPCCIHVALIIKPDNFWQKQRTNFGSSKFEFETNMVSLEGLTKVVDPSQLTPEFDGCLEYNHEEWIEIRVAFEDYISNATHMLSRLEELQDILAKKELPQDLEGARNMIEEHSQLKKKVIKAPIEDLDLEGQKLLQRIQSSESFPKKNSGSGNADLQNLLPKVSTMLDRLHSTRQHLHQMWHVRKLKLDQCFQLRLFEQDAEKMFDWITHNKGLFLNSYTEIGTSHPHAMELQTQHNHFAMNCMNVYVNINRIMSVANRLVESGHYASQQIRQIASQLEQEWKAFAAALDERSTLLDMSSIFHQKAEKYMSNVDSWCKACGEVDLPSELQDLEDAIHHHQGIYEHITLAYSEVSQDGKSLLDKLQRPLTPGSSDSLTASANYSKAVHHVLDVIHEVLHHQRHVRTIWQHRKVRLHQRLQLCVFQQEVQQVLDWIENHGEAFLSKHTGVGKSLHRARALQKRHEDFEEVAQNTYTNADKLLEAAEQLAQTGECDPEEIYQAAHQLEDRIQDFVRRVEQRKILLDMSVSFHTHVKELWTWLEELQKELLDDVYAESVEAVQDLIKRFGQQQQTTLQVTVNVIKEGEDLIQQLRDSAISSNKTPHNSSINHIETVLQQLDEAQSQMEELFQERKIKLELFLHVRIFERDAIDIISDLESWNDELSQQMNDFDTEDLTIAEQRLQHHADKALTMNNLTFDVIHQGQDLLQYVNEVQASGVELLCDRDVDMATRVQDLLEFLHEKQQELDLAAEQHRKHLEQCVQLRHLQAEVKQVLGWIRNGESMLNAGLITASSLQEAEQLQREHEQFQHAIEKTHQSALQVQQKAEAMLQANHYDMDMIRDCAEKVASHWQQLMLKMEDRLKLVNASVAFYKTSEQVCSVLESLEQEYKREEDWCGGADKLGPNSETDHVTPMISKHLEQKEAFLKACTLARRNADVFLKYLHRNSVNMPGMVTHIKAPEQQVKNILNELFQRENRVLHYWTMRKRRLDQCQQYVVFERSAKQALEWIHDNGEFYLSTHTSTGSSIQHTQELLKEHEEFQITAKQTKERVKLLIQLADGFCEKGHAHAAEIKKCVTAVDKRYRDFSLRMEKYRTSLEKALGISSDSNKSSKSLQLDIIPASIPGSEVKLRDAAHELNEEKRKSARRKEFIMAELIQTEKAYVRDLRECMDTYLWEMTSGVEEIPPGIVNKELIIFGNMQEIYEFHNNIFLKELEKYEQLPEDVGHCFVTWADKFQMYVTYCKNKPDSTQLILEHAGSYFDEIQQRHGLANSISSYLIKPVQRITKYQLLLKELLTCCEEGKGEIKDGLEVMLSVPKRANDAMHLSMLEGFDENIESQGELILQESFQVWDPKTLIRKGRERHLFLFEMSLVFSKEVKDSSGRSKYLYKSKLFTSELGVTEHVEGDPCKFALWVGRTPTSDNKIVLKASSIENKQDWIKHIREVIQERTIHLKGALKEPIHIPKTAPATRQKGRRDGEDLDSQGDGSSQPDTISIASRTSQNTLDSDKLSGGCELTVVIHDFTACNSNELTIRRGQTVEVLERPHDKPDWCLVRTTDRSPAAEGLVPCGSLCIAHSRSSMEMEGIFNHKDSLSVSSNDASPPASVASLQPHMIGAQSSPGPKRPGNTLRKWLTSPVRRLSSGKADGHVKKLAHKHKKSREVRKSADAGSQKDSDDSAATPQDETVEERGRNEGLSSGTLSKSSSSGMQSCGEEEGEEGADAVPLPPPMAIQQHSLLQPDSQDDKASSRLLVRPTSSETPSAAELVSAIEELVKSKMALEDRPSSLLVDQGDSSSPSFNPSDNSLLSSSSPIDEMEERKSSSLKRRHYVLQELVETERDYVRDLGYVVEGYMALMKEDGVPDDMKGKDKIVFGNIHQIYDWHRDFFLGELEKCLEDPEKLGSLFVKHERRLHMYIAYCQNKPKSEHIVSEYIDTFFEDLKQRLGHRLQLTDLLIKPVQRIMKYQLLLKDFLKYSKKASLDTSELERAVEVMCIVPRRCNDMMNVGRLQGFDGKIVAQGKLLLQDTFLVTDQDAGLLPRCRERRIFLFEQIVIFSEPLDKKKGFSMPGFLFKNSIKVSCLCLEENVENDPCKFALTSRTGDVVETFILHSSSPSVRQTWIHEINQILENQRNFLNALTSPIEYQRNHSGGGGGGGSGGSGGGGGSGGGGAPSGGSGHSGGPSSCGGAPSTSRSRPSRIPQPVRHHPPVLVSSAASSQAEADKMSGTSTPGPSLPPPGAAPEAGPSAPSRRPPGADAEGSEREAEPIPKMKVLESPRKGAANASGSSPDAPAKDARASLGTLPLGKPRAGAASPLNSPLSSAVPSLGKEPFPPSSPLQKGGSFWSSIPASPASRPGSFTFPGDSDSLQRQTPRHAAPGKDTDRMSTCSSASEQSVQSTQSNGSESSSSSNISTMLVTHDYTAVKEDEINVYQGEVVQILASNQQNMFLVFRAATDQCPAAEGWIPGFVLGHTSAVIVENPDGTLKKSTSWHTALRLRKKSEKKDKDGKREGKLENGYRKSREGLSNKVSVKLLNPNYIYDVPPEFVIPLSEVTCETGETVVLRCRVCGRPKASITWKGPEHNTLNNDGHYSISYSDLGEATLKIVGVTTEDDGIYTCIAVNDMGSASSSASLRVLGPGMDGIMVTWKDNFDSFYSEVAELGRGRFSVVKKCDQKGTKRAVATKFVNKKLMKRDQVTHELGILQSLQHPLLVGLLDTFETPTSYILVLEMADQGRLLDCVVRWGSLTEGKIRAHLGEVLEAVRYLHNCRIAHLDLKPENILVDESLAKPTIKLADFGDAVQLNTTYYIHQLLGNPEFAAPEIILGNPVSLTSDTWSVGVLTYVLLSGVSPFLDDSVEETCLNICRLDFSFPDDYFKGVSQKAKEFVCFLLQEDPAKRPSAALALQEQWLQAGNGRSTGVLDTSRLTSFIERRKHQNDVRPIRSIKNFLQSRLLPRV

SEQ ID NO: 47385 - protein, 480 aa, Homo sapiens
  DOMAIN (91)..(457): impB/mucB/samB family domain identified by PFam, accession name IMS, E-value=1.4e-05, PFam score of -43.3
MGISTVVIGLLPGYATIITAIAAKARRSICCNRATMWSIALTAALKPGNASSRLLVRPTSSETPSAAELVSAIEELVKSKMVRPPRESLTFGSCSVLLLADGFALVFVLLWAAECGCGLWHISGVPMTNLGFTDLKDSENSGKPLYPHLAVYTHERTQIKIGHGRTASGRAQIHLLELSQWLQCESATIQEAEDKPPICTKKIISTRPLAVKAVTFIREIRATVLQRTHLTVGVGIAQTKTLAKLANHAAKKWQRQTGGVVDLSNLERQRKLMSALPVDDVWGIGRRISKKLDAMPRQKFTKPQLFKRFSPKHLSRKMCKGPPSPSDLTRSSYNSLSFSISTAGFTWTWMYGGALMEMYKEINVVFMSANTTCILQPMDQGVILTFKSYYIRNTFCKAVAAIDSDSSDGSGQSKLKAFQKGFTILDAIKNICDSQEEKLPQPPQPLATTLISQQLSTSRPAFHQENDYNSLKAQMIASNF

SEQ ID NO: 47386 - protein, 141 aa, Homo sapiens
FRWKELLDRPLEPSPETAQPPPPWLQKNPTAVERANLLNMAKLSIKGLIESALSFGRTLDSDYPPLQQFFVVMEHCLKHGLKVRKSFLSYNKTIWGPLELVEKLYPEAEEIGASVRDLPGLNEFYEYHALMMEEEGAVIVG

SEQ ID NO: 47387 - protein, 195 aa, Homo sapiens
WMGSCGLHRAWLQMRWWPESAWKELLDRPREPPPETAQPPPPWLQKNPTAVERANLLNMAKLSIKGLIESALSFGRTLDSDYPPLQQFFVVMEHCLKHGLKVRKSFLSYNKTIWGPLELVEKLYPEAEEIGASVRDLPGLKTPLGRARAWLRLALMQKKMADYLRCLIIQRDLLSEFYEYHALMMEEEGAVIVGL

SEQ ID NO: 47388 - protein, 60 aa, Homo sapiens
KNWTASSVFLSTKDPTAVERANLLNMAKLSIKGLIESALSFVRTLDSDYPLLQQFLCVMN

SEQ ID NO: 47389 - protein, 58 aa, Homo sapiens
MGNQEVSLENQQAKNSKKERLLGSASSEDIWRNYSLDEIERNFCLQVRCFPKPQLPTE

SEQ ID NO: 47390 - protein, 45 aa, Homo sapiens
  misc_feature (1)...(45): Xaa = X or * as defined in Table 2
KAHNCSGLERPPLDNPSVSNRLFASFLSPRDLKGRICSDXSQVLK

SEQ ID NO: 47391 - protein, 683 aa, Homo sapiens
MRASAQRQGGEAFVKGISSADLVALWSHLGLNRSSAGEFSLNLKCGAGSARPSQLLQARGPWTPTPGGPAHFLWLLGSPSLMSSPLGTGQLKISTCHGVLLTHGKFTSPVHTKIGVQAAFICCFCLALLCLSESQFLFPGKEAEVRGIRLLSPGYLNNRSLVERKEAKRRFDTLGLSSGGRSSPEQLCAFQWANHPAWERVHFPHSPAFILKPLPNFSLTNDKSLGDVALVGVSSLPGCCFPVLTLEIHMGCSGVLKKRIVLMSSILPKEVNLALAADKVQRFLSGHESRRCQWLGLPLSGRAVEWRTEALEPALLLPVFKNIKTVMKAFELIDVNKTGLVRPQELRRVLETFCMKLRDEEYEKFSKHYNIHKDTAVDYNVFLKNLSINNDLNLRYCMGNQVKSFLKENLGNTIQDIGVGKDFMTKTPNAIAVKAKIDKCDLIKLKSFCAAKQTMIRTQSHRKAEWFLAITLKSLLDGLAAQGHLRTLPPHSGAGLLGPSCGLGAPLKSTSCKAWWQHTGAHVGPDVAYAITLEGASKEILRKSEGCRHYQAALENESWYNCGERGVTEYTVPSAVSQPVRAATGRVHRPVGQVSLENQQAKNSKKERLLGSASSEDIWRNYSLDEIERNFCLQLSKSYEKVEKALSAGDPCKGGYVSFNYLKIVLDTFVYQIPRRIFIQLMK

SEQ ID NO: 47392 - protein, 166 aa, Homo sapiens
MELTFGGSKQMMKHVHLYTATEYSERLMNDEEEGQQECGYFRTPGPERVGREWKVYLTWYLFCEVAAEETLAVTMANKKPKEEVKTENNDHINLKVAGQNGSVAELSSDCGSKDPHSREVLSHILEEGMLHRGQEQSKQALLGLDHTLYIQSHFDTVAHTSIIPIQ

SEQ ID NO: 47393 - protein, 112 aa, Homo sapiens
  DOMAIN (50)..(102): Ubiquitin domain proteins domain identified by eMATRIX, accession number BL00299, p-value=8.200e-23, raw score of 28.84
TWYLFCEAAADETPALAMADEKPKEGVKTENNDHINLKVAGQDGSVVQFKIKRHTPLSKLMKAYCERQGLSMRQITFRFDGQPINETDTPAQLEMEDEDTIDVFQQQTGGVY

SEQ ID NO: 47394 - protein, 85 aa, Homo sapiens
ASTIMDLLFGRRKTPEELDRERQKLETQEKKIIADIKKMAKQGQMDAVRIMAKDLVRTRRYVRKFVLMRANIQAVSLKIQTLQSN

SEQ ID NO: 47395 - protein, 70 aa, Homo sapiens
ASTIMDLLFGRRKTPEELLRQNQRALNRAMRDMDRERQKLETQEKKIIADIKKIAKQGQIDAGRIMAKDL

SEQ ID NO: 47396 - protein, 227 aa, Homo sapiens
MRALNRAMRELYCERQKLKTQEKKIIAYIKKMAKQGQMDAVRIHGQKICFVFDAGQHPGLLSLQDSRHSSPTTRWHKPCKGVTKGMGTMNRQLKLPQIQKIMMEFERQAEIMDMKEEMMNDAIDDAMGDEEDEEERYGETGWEGGDVCLALTECIALTEFSLFPSDAVVSQVLDELGLSLTDELSNLPSTGGSLSVAAGGKKAEAAASALADADADLEERLKNLRRD

SEQ ID NO: 47397 - protein, 460 aa, Homo sapiens
  DOMAIN (152)..(199): kw TRANSCRIPTASE REVERSE II ORF2 domain identified by eMATRIX, accession number DM01354V, p-value=1.000e-40, raw score of 12.97
HKENHQELALHHGFACTFCLSQLTHIMPDTGQGTSVWILQCQPWTVDLESLDACIQRTLSALYPPFEATAATVLWQLFSVAERCHGGDGLHCLTSFLLPAKRALQHLQQEACLISNFSKVSGYKIDVQKSQAFLYTNNRETESQIMSELPFRIASKRIKYLGIQLTRDVKDLFKENHKPLLNEIKEDTKKWKNIPCSWVGRINIVKMAILPKLLATPPVNWGFKTLPSASSIRHLFVWRLPLLPPIEASPTTLPPIEASPTTLPPIEASPTTLPLIEASLTTLPLIEPSLTTRPLIDASPTTLPPIEASPTTRPLIEPSLTSRPPIEPSPTTLHPIEASQTTRHPIEASPTTRPLIEASPTTRHLIEPSPTTRPLIKASPTTRPLIEPSPTTRPPIEASPTTRPLIEASPTTMPPIEASLTTRPLIEPSLTTRPLIKASPTTRPPIEASPTTLFPSMKIL

SEQ ID NO: 47398 - protein, 143 aa, Homo sapiens
LSMPAGSMSTTGYPGVCSTTSYRTHCYIPVTSSVTLSSSDLSPTFGHCLPSSYQGNLWLLDYCQESYGEAPTCKSPSCEPKTCSTTGCDPSNSSVPCNSPSAGQVFSVCETTNVSPSPSCSPSTQTNGYVCNCHIPTRNAYTA

SEQ ID NO: 47399 - protein, 351 aa, Homo sapiens
  DOMAIN (57)..(104): kw TRANSCRIPTASE REVERSE II ORF2 domain identified by eMATRIX, accession number DM01354V, p-value=1.000e-40, raw score of 12.97
MIVYLENPIVSAQNLLKLISNFSKVSGYKINVQKSQAFLYTNNRQTESQIMSELPFTIASKRIKYLGIQLTRDAKDVFKENYKPLLNEIKEDTNKWKNIPCSWIGRINIVKMAILPRNWKKLLQSSYGTKKARITKTILSKKNKAGGITLPNFKLYYKATVTKTAWYWYQHRDIDQWNRTEASEVTPHIYNHLIFDKPDKNKKWGKDSLFNKWCWENWLAICRKLKLDLFLTPYTKINPRWIKDLNLRPRTIKTLEENLGSIFRDIGMSKGFMTKTPKAKATKAKTDKWDLIKLKSFCTAKETTIRVNRQPTEWEKIFAIYPSDKGLISRIYKELKRIYKKKTTPSKSGQR

SEQ ID NO: 47400 - protein, 297 aa, Homo sapiens
  DOMAIN (237)..(284): kw TRANSCRIPTASE REVERSE II ORF2 domain identified by eMATRIX, accession number DM01354V, p-value=1.000e-40, raw score of 12.97
  DOMAIN (46)..(250): Reverse transcriptase domain identified by PFam, accession name rvt, E-value=3.8e-06, PFam score of 17.7
MQLKAKARELREECRSLRSRWNQLEERVSVMEDEMNEMKREGKFREKRIKRNEQSLQEIWDYVKRPNLRLIGVPESDGENATRLENTLQDIIQENFPNLARQANIQIQEIQRMPQRYSSRRASPRHIIVRFTKVEMKEKMLRAAREKVLEVLARAIRQEKEIKGIQLGKEEVKLSLFADDMIVYLENPIISAQNLLKLISNFSKLSGYKINVQKSQAFLYTNNRQTESQIMSELPFTIASKRIKYLGIQLTRDVKDLFKENYKPLLNEIKEDTNKWKNSPCSWVGRINIMKMAILPK

SEQ ID NO: 47401 - protein, 902 aa, Homo sapiens
  DOMAIN (553)..(608): kw TRANSCRIPTASE REVERSE II ORF2 domain identified by eMATRIX, accession number DM01354Q, p-value=1.000e-40, raw score of 9.23
  DOMAIN (502)..(781): Reverse transcriptase domain identified by PFam, accession name rvt, E-value=5.1e-66, PFam score of 232.7
PNWEAPPSRGRLTHHTPGYSSETKLPEERSGSNICCSPISAVLQPLLLIPRQTGSGLDLQQTPTYLQLRVLTLRRKTNKQKGIASTSTKRTSTPKPHLYVTIIKDQSYIKPQRWGKNIAEKLKILKIRVALSLQRNAAPHQQWNKAGRRMSLMSSQKKASEVIESQMNEIKGEEKFREKRVKRNEQSLQEIWDYVKRPDLRLIGVPDSDGENGTRLENTLQDIIRENFPNLARQASIQIQEIQRTPQRYSSRRATPRHIIVRFTKVEMKEKMLRAAREKELKIKKLTQNCLTTWKLNNLLLNDYWVHNEMKGEIKMFFETNENIDTTYQNLWHTFKAVCRGKFIALNAHKRKQERSKIDTLASQLKEIEKQEQTHSKASRRQEITKIRVELKEIETQKSLQKINESRSWFFEKINKIDRPLPRLIKKKREKNQIDTIKNDKGDITTNPTEIQTISREYYKHLYANKLENLEEMDKFLDTYTLSGLNKEEVESLNTSITGSEVEAIINSIPTKKKSRTRWIHSRILPELSRDTTKKENFRPISLMNIDVKILNKMLANGIQQHIKKLIHHDQVGFIPGMQGWFNIHKSINVIQHINRTKDKNHMIISIDAEKAFDKIQQPFMLKTLNKLDIDGTYLKIIRAIYDKPTANIILNGQKLEAFPLKSSTRQGCPLSPHLFNIVLEVLARAIRQEKEIKGIQLGKEEVKLSLFADDMIVYLENPIISAQNLLKLISNFSKVSGYKINVQKSQAFLYTSNRQTESQIMSELPFTIASKRIKYLEIQLTRDVKDLFKENYKPLLNEIKEDTNKWKNIPCSWIGRINIVKMAILPKDDKKCVSDDHDADNDSDNDGDNFLQVSAAKSYISHYFPVIRLLTAYWRRLSNSLEKAKGHDVEGPCGKELVVGL

SEQ ID NO: 47402 - protein, 820 aa, Homo sapiens
  DOMAIN (121)..(168): kw TRANSCRIPTASE REVERSE II ORF2 domain identified by eMATRIX, accession number DM01354V, p-value=1.000e-40, raw score of 12.97
  DOMAIN (2)..(137): Reverse transcriptase domain identified by PFam, accession name rvt, E-value=0.076, PFam score of -43.4
  misc_feature (1)...(820): Xaa = X or * as defined in Table 2
TEPKTKTTXLSQXMQKKPLTKFNNPSCXKLSINIVLEVLARAIRQEKEIKGIQLGKEEVKLSLFADDMIVYLENPIVSAQNLLKLISNFSKVSGYKINVQKSQAFLYTNNRQTESQIMSELPFTIASKRIKYLGIQLTRDVKDLFKENYKPLLKEIKEDTNKWKNIPCSWVGRINIVKMAILPKVIYRFNAIPIKLPMTFFTELEKTTLRFIWNQKRARIAKAILSQKNKAVGITLPDFKLYYKATVTKTAWYWYQNRDIDQWNRTEPSEITPLIYNYQIFDKPEKNKQWGKDSLFNKWCWDNWLAICRKLKLDPFLTPYTKINSRWIKALNLRPKTIKTLEENLGITIQDIGTGKDFMTKTPKAMATKDKIDKWDLIKLKSFCTAKETTIRVNRLPTKWEKIFATYSSDKGLISRIYNELKQIYKKKTNNPIKKWEKDMNRHFSKDDILAAKKHMKKCSSLAIREMQIKTTMRYHLTPVRMAIIKKPGNNSQKDIPDWRNGPKRKDRQITTFRGPTKLQVVVPTLGAAPGRGCPWPRRPRCPGREGEELHPALGGERGQRQAAGSGGARRLAPSAGDGLCVGPVEDTGETQTWKTGQPGLREPWWGWRPTEPPPAPSSHSEEWPRRPPVRRAPRPAGEHAGEGGAAVADTTAFSPWLPRVGGWHLQVHRGGRSCAGARRFGGSRGWDLGDLSSAPVASLQWACFRWAGPASPNLPPAAWRTWTQCSVSCYTGQCRAPGRGARPSSCPGNVGEGGAAFLSGVFLEASDLGFALVRRWPRRAVGTCTPPFPESGASDPPCPAAETGPARVPVTHLLRKTLP

SEQ ID NO: 47403 - protein, 766 aa, Homo sapiens
  DOMAIN (655)..(702): kw TRANSCRIPTASE REVERSE II ORF2 domain identified by eMATRIX, accession number DM01354V, p-value=1.735e-36, raw score of 12.97
  DOMAIN (450)..(668): Reverse transcriptase domain identified by PFam, accession name rvt, E-value=1e-05, PFam score of 11.5
MDLKAIILSEMTQKQSDVPSTIILWIARTFPGRMPYPMGRSLNPSGKKCRCNFIKPEIPNQADIYPCGLFVGCTWVEDSASVRERQSSKKKKNRKLKLVISSFQLRSPKLEKRPRMRLKRRMAGERVQTSWDLLPGCAYAILTCMWKKDTGSPPASEGVMDGSRETLAARDVVLHQTSGHIHNKNISTHLTGNNKQGHGTESSGSGIFAVSTLDGMLKLMEEADKLLWSAQLVKDSSEPLPYLLKLSLILAGWGIHITEVQDLTLGMKDGSSPRVTTSYTPHGLFGERRDKLTLCPFSYGPHPSHQQVRTLSCRSVGVCRRSNADPVCLGISSGGCRTADIGEQQMLLPDRSSGSFVSEEYPAIFQKMYGNAWMPRKKFAAGVGPSWRTSARAMQTGNVGLEPTHRIPSGALPCGAVRRGPPFSRPQNGRSTGSLHHVHGKAADAQDQPVKAAGREAISCKSKGAELPKTRGTHLLHQRDLDVRHGVKGDHIGALRFDCVAGFLTSMGPVSPCFGEYISQDLMVLKTGVSVHKLFHFWHAAIHVRHDLLLFAFFHDCEVSPAMWKLLEVLARAIRQEKEIKGIHLGKEEVKFSLFADDMIVYLENPIISAQNLLKLISNFSKVSGYKVNVQKSQVFLYTNNRQTESQIMNEFTFTIASKRIKYLGIILTRDGKHLFKENYKPLFNEIKEDTNKWKNIPYSCIGRINIVKMATLPKMRLGAQQHAPSWLKETADSTYVPGFSSGTGGTSTDVFASVDTGKNFQTRTF

SEQ ID NO: 47404 - protein, 160 aa, Homo sapiens
  DOMAIN (62)..(94): Nuclear hormones receptors DNA-binding region proteins domain identified by eMATRIX, accession number BL00031B, p-value=7.300e- 29, raw score of 22.25
  DOMAIN (26)..(101): Zinc finger, C4 type (two domains) domain identified by PFam, accession name zf-C4, E-value=1.2e-49, PFam score of 169.3
LPYASARSEELVPSPPSPLSSPRYFKPCSVGQDKGSGYHYGVSACEGCKGFFRRSIQKNMIYTCHRDKNCVINKVTRNRCLYCRLQKCFEVGMSKESVRNDRNKKKKETSKQECTESYEMTAELDDLTEKIRKAHQETFPSLCQLGKYTTNSSADHRVRL

SEQ ID NO: 47405 - protein, 342 aa, Homo sapiens
MYKEAPPDIHRLGGEGFDAGLTVFAPLFASPFPPRGAPYLKAACQTPRSGIGATAISGEALKGAVSSGVDPRWASHLRVKLLEKSFSLQEIQSTEKVLSQQAKTLSLLGEPKLSKQLTGTCIYRKTNLALCRGPAAAKSLFQGAVRNDRNKKKKETSKQECTESYEMTAELDDLTEKIRKAHQETFPSLCQLGKYTTRSTRNGLSLRLEIKRGRKKRSEIKRPDSEEQMSRALRSNTQGGTLGSTSPIGVSQEKHWHVCQAEGESRLNLNQSSLSLGNTVPSQSRDTGQDKTGHFNKWSEVRLEPKQSDSRAALLTSILYTESLERVAKKGEWKLGPLAASS

SEQ ID NO: 47406 - protein, 207 aa, Homo sapiens
MRFAKKHNKKGLKKMQANNAKAMSARAKAIKALVKPKEVKPKIPKGVSHKLHRLAHIAHSKLGKHDHAHIAKGLRLCGPKAKTKDQTKAQPAAPASIPAQAPKGAQATTKGSNWALNCIPKTLLLEQPSAINTTSWRFYCVWHSQVPLLSLSLSLFPCCEKRVDHQAYGRIIGFQASQCEKPEGKSGHLWVYTGQRKRSVEKQRLSW

SEQ ID NO: 47407 - protein, 122 aa, Homo sapiens
  misc_feature (1)...(122): Xaa = X or * as defined in Table 2
ESLKGADPKFLRNMRFANKHNKKGLKKMQANSARATSARADAIKALVKPKEGKPDIPKGVSRKLDPLAYIAHPRLGKCAHSCIAKGLKLCRLQAKDKDQTKAQAAAPAXAPKGARTPTKASE

SEQ ID NO: 47408 - protein, 169 aa, Homo sapiens
  DOMAIN (24)..(63): Ribosomal L29e protein family domain identified by PFam, accession name Ribosomal_L29e, E-value=7.8e-05, PFam score of 29.5
MGQDIPTEFQKPFTCGQQQKKVCKEKRKKDAMSTHAKGRNGIKKPQSQRSVSLKGVDPKFLRNMPFAKKHSKKGLKKMQANSAKAMSARAKAIKALVKPKETQASTREPSRLPEHLWEPELEPELRLELKPWSEPCLEPWPLGQVTGIAGSSDAAGADGQVEDYEMCKN

SEQ ID NO: 47409 - protein, 268 aa, Homo sapiens
  DOMAIN (10)..(49): Ribosomal L29e protein family domain identified by PFam, accession name Ribosomal_L29e, E-value=3e-09, PFam score of 44.2
  misc_feature (1)...(268): Xaa = X or * as defined in Table 2
YRFSGPTIRSIQNHTTHNQGRKWHKKGIKKPRAQRYESLKGPEVXPSGQGVTCLLRADWLSPLLGSGTYVGPKFLRNTRFAKKHNKKGLKKMQANNAKAMSARAEAIKALVKPKEVKPKIPKGGSRKLRSTLPDIVHPKLGKSARAPYLPRGFRLCLPNANAKSISSQGQGQGQGQGSNQGPGFKPQLQVPASGVPNVPRALTKGFQSRYSLAQHEGQERTWVRPPTPRPWGYHFAWGWGSPVAICTNKPEAGKRRNEKEKLCQGDGY

SEQ ID NO: 47410 - protein, 212 aa, Homo sapiens
MIDHLQAGERENPIAAQSKAKSLKTREDDSAAFSLQPKGLEPQEAVGPVPKFQKEERKKERERGRKEGRKEGRKEGRKEGRKGGRKRKKDKERGKQAGARHKAHSSYTLGKINEINTEINQLIEKKMMRNEPIEGKLSLYRQQVETAQNHQWMLKIARQLRVEKEREEYLAQQKQEQKNQINEINTEINQLIEKKMMRNEPIEGKLSLYRQQ

SEQ ID NO: 47411 - protein, 80 aa, Homo sapiens
QTNSPNCVRGRVSPPVLPGSSSMDVLASYSIFQELQLVHDTGYFSALPSLEETWQQTCLELERYLQTEPWRISETFGEDL

SEQ ID NO: 47412 - protein, 324 aa, Homo sapiens
  DOMAIN (261)..(274): PROTEIN ZINC-FINGER METAL-BINDI domain identified by eMATRIX, accession number PD00066, p-value=8.200e-16, raw score of 13.92
  DOMAIN (244)..(324): Zinc finger, C2H2 type domain identified by PFam, accession name zf-C2H2, E-value=1.5e-19, PFam score of 78.4
QTNSPNCVRGRVSPPVLPGSSSMDVLASYSIFQELQLVHDTGYFSALPSLEETWQQTCLELERYLQTEPRRISETFGEDLDCFLHAFPSPCIEESFRRLDPLLLPVEAAICEKSSAVDILLSRDKLLSETCLSLQPASSSLDSYTAVNQAQLNAVTSLTPPSSPELSRHLVKTSQTLSAVDGTVTLKLVAKKAALSSVKVGGVATAAAAVTAAGAVKSGQSDSDQGGLGAEACPENKKRVHRCQFNGCRKVYTKSSHLKAHQRTHTGEKPYKCSWEGCEWRFARSDELTRHYRKHTGAKPFKCNHCDRCFSRSDHLALHMKRHI

SEQ ID NO: 47413 - protein, 316 aa, Homo sapiens
MPQAEGKVDPAEEIQVRTDKDHSISTTSSVSVNTQFQPVALHSCEDYRSEGVKEMVQGAQKRWHMGKSREAPFKQQALWYEFHGQKQECYGRPMDVIWDGFPPLNPSTVAYTTIQVQEKTRTLFKVVARNEWINWTFKKYLIELGDRRCNRSLYVYIPTPENEKSSSSSHHRSSADTSLETPCSSMDVLASYSIFQELQLVHDTGYFSALPSLEETWQQSAELSSRCELPAFQSPTHIPAHTLSGLLSPIRDLPNFWGSEEPGGKGSSSLVSTGKGFFTPRNPLIFCLNPLQLPATLTLKPLANLFSVMLIANADA

SEQ ID NO: 47414 - protein, 15 aa, Homo sapiens
  misc_feature (1)...(15): Xaa = X or * as defined in Table 2
PSFLRXPSFWSREFH

SEQ ID NO: 47415 - protein, 1235 aa, Homo sapiens
  DOMAIN (187)..(210): POLYCYSTIC KIDNEY DISEASE PROTEIN SIGNATURE domain identified by eMATRIX, accession number PR00500I, p-value=1.107e-31, raw score of 9.22
  DOMAIN (51)..(166): PLAT/LH2 domain identified by PFam, accession name PLAT, E- value=3.2e-34, PFam score of 127.1
  misc_feature (1)...(1235): Xaa = X or * as defined in Table 2
ADSGCKLPSSCXHVLCAWVTYMVMAAILHKLDQLDASRGRAIPFCGQRGRFKYEILVKTGWGRGSGTTAHVGIMLYGVDSRSGHRHLDGDRAFHRNSLDIFRIATPHSLGSVWKIRVWHDNKGLSPAWFLQHVIVRDLQTARSAFFLVNDWLSVETEANGGLVEKEVLAASDAALLRFRRLLVAELQRGFFDKHIWLSIWDRPPRSRFTRIQRATCCVLLICLFLGANAVWYGAVGDSAYSTGHVSRLSPLSVDTVAVGLVSSVVVYPVYLAILFLFRMSRSKVAGSPSPTPAGQQVLDIDSCLDSSVLDSSFLTFSGLHAEAFVGQMKSDLFLDDSKSLVCWPSGEGTLSWPDLLSDPSIVGSNLRQLARGQAGHGLGPEEDGFSLASPYSPAKSFSASDEDLIQQVLAEGVSSPAPTQDTHMETDLLSSLSSTPGEKTETLALQRLGELGPPSPGLNWEQPQAARLSRTGLVEGLRKRLLPAWCASLAHGLSLLLVAVAVAVSGWVGASFPPGVSVAWLLSSSASFLASFLGWEPLKVLLEALYFSLVAKRLHPDEDDTLVESPAVTPVSARVPRVRPPHGFALFLAKEEARKVKRLHGMLRSLLVYMLFLLVTLLASYGDASCHGHAYRLQSAIKQELHSRAFLAITRSEELWPWMAHVLLPYVHGNQSSPELGPPRLRQVRLQEALYPDPPGPRVHTCSAAGGFSTSDYDVGWESPHNGSGTWAYSAPDLLGAWSWGSCAVYDSGGYVQELGLSLEESRDRLRFLQLHNWLDNRSRAVFLELTRYSPAVGLHAAVTLRLEFPAAGRALAALSVRPFALRRLSAGLSLPLLTSVCLLLFAVHFAVAEARTWHREGRWRVLRLGAWARWLLVALTAATALVRLAQLGAADRQWTRFVRGRPRRFTSFDQVAQLSSAARGLAASLLFLLLVKAAQQLRFVRQWSVFGKTLCRALPELLGVTLGLVVLGVAYAQLAILLVSSCVDSLWSVAQALLVLCPGTGLSTLCPAESWHLSPLLCVGLWALRLWGALRLGAVILRWRYHALRGELYRPAWEPQDYEMVELFLRRLRLWMGLSKVKEFRHKVRFEGMEPLPSRSSRGSKVSPDVPPPSAGSDASHPSTSSSQLDGLSVSLGRLGTRCEPEPSRLQAVFEALLTQFDRLNQATEDVYQLEQQLHSLQGRRSSRAPAGSSRGPSPGLRPALPSRLARASRGVDLATGPSRTPLRAKNKVHPSST

SEQ ID NO: 47416 - protein, 4977 aa, Homo sapiens
  DOMAIN (1790)..(1811): POLYCYSTIC KIDNEY DISEASE PROTEIN SIGNATURE domain identified by eMATRIX, accession number PR00500B, p-value=1.153e-29, raw score of 7.74
  DOMAIN (177)..(3751): PKD domain identified by PFam, accession name PKD, E-value=0, PFam score of 1499.4
MGSVELRRPPAHQVMVFPGLRLSREAFLTTAEFGTQELRRPAQLRLQVYRLLSTAGTPENGSEPESRSPDNRTQLAPACMPGGRWCPGANICLPLDTSCHPRPAPMAARQGPGLLGAPYALWREFLFSVPAGPPAQYSVTLHSQDVLMLPGDLVGLQHDAGPGALLHCSPAPGHPGPQAPYLSANASSWLPHLPAQLEGTWACPACALRLLAATEQLTVLLGLRPNPGLRLPGRYEVRAEVGNGVSRHNLSCSFDVVSPVAGLRVIYPAPRDGRLYVPTNGSASVLQVDSGASATATARWPGGSVSARFENACPALVATFVPSCPWETNDTLFSVVALPWLGEGEHVMDVVVENSASRANLSLRVTAEEPICGLRATPSPEARVLQGVPVLLAGSSGYLVGFKFLESHGSDSGSANSFHRLISRNEFKTPLPDLTRVPRYSPVVEAGSDMVFRWTINDKQSLTFQNVVFNVIYQSAAVFKLSLTASNHVSNVTVNYNITVERMNRMQGLRVSTVPAVLSPNATLALTAGVLVDSAVEVAFLWTFGDGEQALHQFQPPYNESFPVPDPSVAQVLVEHNVTHTYAAPGEYVLTVLASNAFENRTQQVPVSVCASLPSVSVCASLTGACWVQLGPVHQNAHPSVLCPVYALPPPRLEGGKPDEYPGRGPSSRPNRPVLEVTPLPRQVLIRSGRVPIVSLECVSCKAQAVYEVSRSSYVYLEGRCLNCSSGSKRGGYTFTLTVLGRSGEEEGCASIPLSPNRPPLGGSCRLFPLGAVHALTTKVHFECMGWHDAEDAGAPLVYALLLQRCRQGHCEEFCVYKGSLSGYGAVLPPGFRPHFEVGLAVVVQDQLGAAVVALNRSLAITLPEPNGSAMGLTVWLHGLTASVLPGLLRQADPQLVIEYSLALVTVLNEYERALDVAAEPKHERQRRAQIRKNITETLVSLRVHTVDDIQQIAAALAQCMGPSRELVCRSCLKQTLHKLEAMMRILQAETTAGTVTPTAIGDSILNITGDLIHLASSDVRAPQRSELGAESPSRMVASQAYNLTSALTPIVTRSRVLNEEPLTLAGGLDGVPDTGRRPDPHRAAGLRARLTVKVPNNSDWAARGHRSSANSVVVQPQASVGAVVTLDSSNPAAVLHLQLNYTLLDGRYLSEEPEPYLAVYLHSEPRPNERNCSASRRIRPESLQGADHRPYTFFISPGTRDPVGSYRLNLSSHFRWSALEVSVGLYTSLCQYFSEEDVVWRTEGLLPLEETSPRQAVCLTRHLTAFGTSLFVPPSHIRFVFPEPTADVNYIVMLTCAVCLVTYMVMAAILHKLDQLDASRGCAIPFCGQRGRFKYEILVKTGWGRGSGTTAHVGIMLYGVDSRSGHRHLDGDRAFHRNSLDIFQIATPHSLGSVWKIRVWHDNKGLSPAWFLQHIIVRDLQTARSTFFLVNDWLSVETEANGGLVEKEVLAASKASFRVPTPSRSPVALPAPAGGWLQRGFFDKHIWLSIWDRPPRSCFTRIQRATCCVLLICLFLGANAVWYGAVGDSAYSTGRVSRLNPLSVDTVAVGLVSSVVVYPVYLAILFLFRMSRSKVAGSPSPTPAGQQVLDVDSCLDSSVLDSSFLTFSGLHAELGLKTLCTSQQAFAGQMKSDLFLDDSKRSGPVPVPFPPPCPKPPPPLSWLPQGALKGPGHAGIKIVLEDIFTLWRQVETKVRAKIRKMKVTTKVNRHDKINGKRKTAKEQSPLLQESLFATGDVSHNLLRALDVGLLANLSALAELDISNNKISTLEEGIFANLFNLSEINLSGNPFECDCGLAWLPRWAEEQQVRVVQPEAATCAGPGSLAGQPLLGIPLLDSGCGEEYVACLPDNSSGTVAAVSFSAAHEGLLQPEACSAFCFSTGQGLAALSEQGWCLCGSAQPSSASFACLSLCSGPPPPPAPTCRGPTLLQHVFPASPGATLLAAFHIAAPLPVTATRWDFGDGSPEVDAAGPAASHRYVLPGRYHVMAVLALGAGSALLGTDVQVEAAPAALELVCPSSVQSDESLDLSIQNRVGSGLEAAYSIVALGEEPARAVHPLCPSDTEIFSGNGHCYRLVVEKAAWLQAQEQCRAWAGATLAMVDSPAVQRFLVSRVTRSLDMWIGFSTVQGVEVGPAPQGEAFSLESCQNWLPGEPHPATAEHCVRLGPTGWCNTDLCSALHSYVCELRPGGPVQDAENLLVGAPSGDLQGPLMPLARQYGLSAPHEPVEVMVFPGLRLSREAFLTTAEFGTQELRRPAQLRLQVYRLLSTAGTPENGSEPESRSPDNRTQLAPACMPGGRWCPGANICLPLDASCHPRPAPMAARQGPGLLGAPYALWREFLFSVPAGPPAQYSVTLHGQDVLMLPGDLVGLQHDAGPGALPHCSPAPGHPGPQAPYLSANASSWLPHLPAQLEGTWACPACALRLLAATEQLTVLLGLRPNPGLRLPGRYEVRAEVGNGVSRHNLSCSFDVVSPVAGLRVIYPAPRDGRLYVPTNGSASVLQVDSGASATATARWPGGSVSARFENACPALVATFVPGCPWETNDTLFSVVALPWLGEGEHVMDVVVENSASRANLSLRVTAEEPICGLRATPSPEARVLQGVPVRYSPVVEAGSDMVFRWTINDKQSLTFQNVVFNVIYQSAAVFKLSLTASNHVSNVTVNYNITVERMNRMQGLRVSTVPAVLSPNATLALTAGVLVDSAVEVAFLWTFGDGEQALHQFQPPYNESFPVPDPSVAQVLVEHNVTHTYAAPGEYVLTVLASNAFENRTQQVPVSVRASLPSEAVGVSDGVLVAGRPVTFYPHLLPSPGGVLYTWDFGDGSPVLTQSQPAANHTYPSRGIYHVRLEVNNTVSGAAAQADVRVFEELRGLSVDMSLAVEQGAPVVVSAAVQTGDNITWTFDMGDGTVLSGPEATVEHVYLRAQNCTVTVGAASPAGHLARSLHVLVFVLEVLRVEPAACIPTQPDARLTAYVTGNPARYLFDWTFGDGSSNTTMRGCPTVTHNFTRSGTFPLALVLSSRVNRARYFTSICVEPEVGNVTLQPERQFVQLGDEARLVACAWPPFPYRYTWDFGTEEAVPARVGGPEVTFIYRDPGSYLVTVTASNNISAANDSALVEVQEPMLVTSIKVNGSLGLELHYLWDLGDGGRLEGPEVTHAYNSTGDFTVRVAGCNEVSRSEAWLNVTVKRRVRGLIVNASCTVVPLNGSMSFSTSLEAGSDVRYSWVLCDRCTPISGAENEVGSAQDSIFVYVLQLIEGLQVVGGGRYFPTNHTVQLQAVVRDGTNIYSWTAWRDRGPALAGSGKGFSLTALEAGTYHVQLRATNMLGSAWADCTVDFVEPVGWLMVAASPNPAAVNTSVTLSAELAGGSGVVYTWSLEEGLSWETPEPFTTHSFPTPGLHLVTMTAGNPLGSANATVEVDVQVPVSGLSIRASEPGGSFVAAGSSVPFWGQLATGTNVSWCWAVPGGSSKRGPHVTMVFPDAGTFNIRLNASNAVSWVSATYNLTVEEPIVGLVLWASSKVVAPGQLVHFQILLAAGSAVTFRRQVGGASPEVLPGPRFSHSFPRIGDHVVSVQSKNHVSWAQAQVRIVVLEAVSGLQVPNCCEPGIAMGTERNFTARVQRGSRVAYAWYFSLQKVRGDSLFILSGRDVTYTPWPRGCWRSSENRTLVLEVQDAVQYVALRSGPCFTNRLAQFEAATSPSPRRVAYHWDFGDGSPGQDTDKPRAEHSYLRPGDYRVQVNASNLVSFFVAQATVTVQVLACREPEVDVVLPLQVLMRRSQRNCLDAYVDLRDCVTYQTEYRWEVYRTASCQRPGCPARVALPGVDVSRPQLVLPRLALPVGHYCFVFVVSFGDTPLARSIQANVTVAPERLVPITEGGSYRVWSDTQDLVLDGSESYDPNLEDGDQTPLSFQWACVASTQREAGGCALNFGPRGSSTVTIPRERLAAGVEYTFSLTVWKAGRKEEATNQTCWWRPRALPSLFLMQILCNTTACFSFASFQTCHSSTYSLQATYALVTKATQSPSNTNRSSWLQYTRTHTPVSSALCMPFRRPGWKVANRMSILGGGWHDAEDAGAPLVYALLLQRCCQGHCKEFCVYKSSLSGYGAVLPPGFRPHFEVGLAVVVQDQLGAAVVALNRSLAITLPEPNGSAMGLTVWLHRLTASVLPGLLRQADPQHVIEYSLALVTVLNEGPSRELVCRSCLKQTLHKLEAMMRILQAETTAGTVTPTAIGDSILNITGDLIHLASSDVRAPQRSELGAESPLRMVASQAYNLTSALMRILTRSRVLNEEPAFSRAPANLSDVVQLVFLVDSNPFLFGYISNYTVSTKVASMAFQTQAGAQIPIERLASERAITVKVPNNSDWAARGHRSSANSVVVQPQASVGAVVTLDSSNPVAVLHLQLNYTLLDGRYLSEEPEPYLAVYLHSEPRPNERNCSASRRIRPESLQGADHRPYTFFISPGTRDPVGSYRLNLSSHFRWSALEVSVGLYTSLCQYFSEEDVVWRTEGLLPLEETSPRQAVCLTRHLTAFGASLFMPPSHVRFVFPEPTADVNYIVMLTCAVCLVTYMVMAAILHKLDQLDASRGCAIPFCGQRGRFKYEILVKTGWGRGSGTTAHVGIMLYGVDSRSGHRHLDGDRAFHRNSLDIFQIATPHSLGSVWKIRVWHDNKGLSPAWFLQHIIVRDLQTARSTFFLVNDWLSVETEANGGLVEKEVLAASHAALLRFRRLLVAELQRGFFDKHIWLSIWDRPPRSCFTRIQRATCCVLLICLFLGANAVWYGAVGDSAYSTGHVSRLSPLSVDTVAVGLVSSVVVYPVYLAILFLFRMSRSKVLDIDSCLDSSVLDSSFLTFSGLHAEVRALLGVLGWAGGPAALAQLGLQTLCTSQQAFAGQVKSDLFLDDSKRSGPVPVPFPPPCPKPPPPLSWLPQGALKGPGHAGIKIVLEDIFTLWRQVETKVRAKIRKMKVTTKVNRHDKINGKRKTAKEQ

SEQ ID NO: 47417 - protein, 671 aa, Homo sapiens
  DOMAIN (187)..(210): POLYCYSTIC KIDNEY DISEASE PROTEIN SIGNATURE domain identified by eMATRIX, accession number PR00500I, p-value=1.107e-31, raw score of 9.22
  DOMAIN (451)..(668): Deoxyribonuclease I (DNase I) domain identified by PFam, accession name DNase_I, E-value=3.2e-67, PFam score of 236.8
  misc_feature (1)...(671): Xaa = X or * as defined in Table 2
ADSGCKLPSSCXHVLCAWVTYMVMAAILHKLDQLDASRGRAIPFCGQRGRFKYEILVKTGWGRGSGTTAHVGIMLYGVDSRSGHRHLDGDRAFHRNSLDIFRIATPHSLGSVWKIRVWHDNKGLSPAWFLQHVIVRDLQTARSAFFLVNDWLSVETEANGGLVEKEVLAASDAALLRFRRLLVAELQRGFFDKHIWLSIWDRPPRSRFTRIQRATCCVLLICLFLGANAVWYGAVGDSAYSTGHVSRLSPLSVDTVAVGLVSSVVVYPVYLAILFLFRMSRSKVAGSPSPTPAGQQVLDIDSCLDSSVLDSSFLTFSGLHAEVRTLLGVLGWAGGPAALAQLGLKTLCTSQQAFVGQMKSDLFLDDSKSLVCWPSGEGTLSWPDLLSDPSIVGSNLRQLARGQAGHGLGPEEDGFSLASPYSPAKSFSASDEDLIQQVLAEGVSSPAPTQDTHMETDLLSSLCAEVHTALPLHCSCLQDSVQWHAVQGLPAFCRGDPVTQEAQETARPAAQNLVLIPLHAAPHQAVAEIDALYDVYLDVIDKWGTDDMLFLGDFNADCSYVRAQDWAAIRLRSSEVFKWLIPDSADTTVGNSDCAYDRIVACGARLRRSLKPQSATVHDFQEEFGLDQTQASGPWGGAGLGSPPPGRTQAAGRALAISDHFPVEVTLKFHR

SEQ ID NO: 47418 - protein, 40 aa, Homo sapiens
  misc_feature (1)...(40): Xaa = X or * as defined in Table 2
TKRQENGRKKQDRTPTEQQLRVKXKSRSTKKRRKQSRSES

SEQ ID NO: 47419 - protein, 4292 aa, Homo sapiens [sequence omitted]

SEQ ID NO: 47420 - protein, 197 aa, Homo sapiens
NLLFPVRSERGPHRPTPLSWLWLRPCELNKLAAGGLAAGSSRAGALYLLIYIPRRPARAAPLCPAAATGAPGASAGSASPASARPPGLARAAPGPLRGRRPRSPRTPFCVWLGVSLLLSYQHYFAEPFESFQVCCRHCGILCLTIRVHFPCLSANPFHFSQLHLGPRPGKACHSVGLQIYNSQAHSHPSQQERQLFC

SEQ ID NO: 47421 - protein, 77 aa, Homo sapiens
  misc_feature (1)...(77): Xaa = X or * as defined in Table 2
FFFVLYNLFLFVITSIPLQKVSILTQRQLVAEENVKCCTVPEPQXXXLSNYPIFVEMGFCHVGPGWSRTPTPKSVSR

SEQ ID NO: 47422 - protein, 1270 aa, Homo sapiens
  DOMAIN (187)..(210): POLYCYSTIC KIDNEY DISEASE PROTEIN SIGNATURE domain identified by eMATRIX, accession number PR00500I, p-value=1.107e-31, raw score of 9.22
  DOMAIN (51)..(166): PLAT/LH2 domain identified by PFam, accession name PLAT, E- value=3.2e-34, PFam score of 127.1
  misc_feature (1)...(1270): Xaa = X or * as defined in Table 2
ADSGCKLPSSCXHVLCAWVTYMVMAAILHKLDQLDASRGRAIPFCGQRGRFKYEILVKTGWGRGSGTTAHVGIMLYGVDSRSGHRHLDGDRAFHRNSLDIFRIATPHSLGSVWKIRVWHDNKGLSPAWFLQHVIVRDLQTARSAFFLVNDWLSVETEANGGLVEKEVLAASDAALLRFRRLLVAELQRGFFDKHIWLSIWDRPPRSRFTRIQRATCCVLLICLFLGANAVWYGAVGDSAYSTGHVSRLSPLSVDTVAVGLVSSVVVYPVYLAILFLFRMSRSKVAGSPSPTPAGQQVLDIDSCLDSSVLDSSFLTFSGLHAEVRTLLGVLGWAGGPAALAQLGLKTLCTSQQAFVGQMKSDLFLDDSKSLVCWPSGEGTLSWPDLLSDPSIVGSNLRQLARGQAGHGLGPEEDGFSLASPYSPAKSFSASDEDLIQQVLAEGVSSPAPTQDTHMETDLLSSLSSTPGEKTETLALQRLGELGPPSPGLNWEQPQAARLSRTGLVEGLRKRLLPAWCASLAHGLSLLLVAVAVAVSGWVLLEALYFSLVAKRLHPDEDDTLVESPAVTPVSARVPRVRPPHGFALFLAKEEARKVKRLHGMLRSLLVYMLFLLVTLLASYGDASCHGHAYRLQSAIKQELHSRAFLAITRYGHPVHWSEELWPWMAHVLLPYVHGNQSSPELGPPRLRQVRLQEALYPDPPGPRVHTCSAAGGFSTSDYDVGWESPHNGSGTWAYSAPDLLGAWSWGSCAVYDSGGYVQELGLSLEESRDRLRFLQLHNWLDNRSRAVFLELTRYSPAVGLHAAVTLRLEFPAAGRALAALSVRPFALRRLSAGLSLPLLTSVCLLLFAVHFAVAEARTWHREGRWRVLRLGAWARWLLVALTAATALVRLAQLGAADRQWTRFVRGRPRRFTSFDQVAQLSSAARGLAASLLFLLLVKAAQQLRFVRQWSVFGKTLCRALPELLGVTLGLVVLGVAYAQLAILLVSSCVDSLWSVAQALLVLCPGTGLSTLCPAESWHLSPLLCVGLWALRLWGALRLGAVILRWRYHALRGELYRPAWEPQDYEMVELFLRRLRLWMGLSKVKEVGTAQWGGEGHALGSAQGAAGLTEPLCRPQFRHKVRFEGMEPLPSRSSRGSKVSPDVPPPSAGSDASHPSTSSSQLDGLSVSLGRLGTRCEPEPSRLQAVFEALLTQFDRLNQATEDVYQLEQQLHSLQGRRSSRAPAGSSRGPSPGLRPALPSRLARASRGVDLATGPSRTPLRAKNKVHPSST

SEQ ID NO: 47423 - protein, 115 aa, Homo sapiens
LTSRGPLCCVLLICLFLGANAVWYGAVGDSAYSTGLCVQAEPAERRHSRCWPGVQRGCLSRLPGHPLSLPDVPEQGGWEPEPHTCRAAGAGRRQLPGLNPCWTAPSSRSEASTLR

SEQ ID NO: 47424 - protein, 193 aa, Homo sapiens
  DOMAIN (39)..(61): POLYCYSTIC KIDNEY DISEASE PROTEIN SIGNATURE domain identified by eMATRIX, accession number PR00500H, p-value=1.107e-29, raw score of 17.80
  DOMAIN (51)..(166): PLAT/LH2 domain identified by PFam, accession name PLAT, E- value=3.2e-34, PFam score of 127.1
  misc_feature (1)...(193): Xaa = X or * as defined in Table 2
ADSGCKLPSSCXHVLCAWVTYMVMAAILHKLDQLDASRGRAIPFCGQRGRFKYEILVKTGWGRGSGTTAHVGIMLYGVDSRSGHRHLDGDRAFHRNSLDIFRIATPHSLGSVWKIRVWHDNKGLSPAWFLQHVIVRDLQTARSAFFLVNDWLSVETEANGGLVEKEVLAASKASFRVPTPSRSPVALPAPAGG

SEQ ID NO: 47425 - protein, 64 aa, Homo sapiens
KDQDMRLRFWLLIWLLLGFISHQPTPVINSLAVYRHRETDFGAGVRDHPGQHGKTPSPTKNWII

SEQ ID NO: 47426 - protein, 920 aa, Homo sapiens
  DOMAIN (689)..(742): Link domain proteins domain identified by eMATRIX, accession number BL01241, p-value=1.000e-40, raw score of 35.81
  DOMAIN (289)..(616): Sodium:dicarboxylate symporter family domain identified by PFam, accession name SDF, E-value=4.5e-178, PFam score of 605.0
RQYSQSQQNPIHRHLQQPVHSHQQADVLCWQAHGCQNEEHGDQPGTGDTGRADACQGGCEAMRTEKFRCHLYKAVISKCHIKISKSTLEIWIPKLFLWVPKVICLFTRRIYKQHTVTKSLGFQVQRDTTDCMDGQNGAFGYPRWRAGVFKAVLPTAAASLTVLSGRSHVLNPKSRQLLVVQRKKQLPRRNSGLATDGMRDIAKHPKKTPIRQQGQLVMDGLTNRNDVTGGRRDPNHSEGSTTLLEGYTSHYPHTKESRTFIPVTSAKTGSFGVTAVTVGDSNSNVNRSLSGLSGLDAKASGRLGTRAMVYYMSTTIIAAVLGVILVLAIHPGNPKLKKQLGPGKKNDEVSSLDAFLDLIRNLFPENLVQACFQQIQTVTKKVLVAPPPDEEANATSAVVSLLNETVTEVPEETKMVIKKGLEFKDGMNVLGLIGFFIAFGIAMGKMGDQAKLMVDFFNILNEIVMKLVIMIMWYSPLGIACLICGKIIAIKDLEVVARQLGMYMVTVIIGLIIHGGIFLPLIYFVVTRKNPFSFFAGIFQAWITALGTASSAGTLPVTFRCLEENLGIDKRVTRFVLPVGATINMDGTALYEAVAAIFIAQMNGVVLDGGQIVTVSDSECGELPFMQLHKELMATHFKLWLRDVGFPLRTLTWESRRWSKHNLWSYKDTQIPGVFHVEKNGRYSISRTEAADLCKAFNSTLPTMAQMEKALSIGFETCRYGFIEGHVVIPRIHPNSICAANNTGVYILTSNTSQYDTYCFNASAPPEEDCTSVTDLPNAFDGPITITIVNRDGTRYVQKGEYRTNPEDIYPSNPTDDDVSSGSSSERSSTSGGYIFYTFSTVHPIPDEDSPWITDSTDRIPATSTSSNTISAGWEPNEENEDERDRHLSFSGSGIDDDEDFISSTSKNNQLQYSHLCKAY

SEQ ID NO: 47427 - protein, 30 aa, Homo sapiens
AVLSLPWADSTVVYLEGNWMGPSHPLLSRL

SEQ ID NO: 47428 - protein, 127 aa, Homo sapiens
TRKCGQLPRSVSLPSGPQPLPGSVRHPRPVLRRPLPRAQGSSSSFRPRPPFAPDTMDKFWWHAAWGLCLVPLSLAQIGECPPQPGQQDGCGVLSADPAAAPPAESALGDWSQVSCLRSALGSGKQGW

SEQ ID NO: 47429 - protein, 159 aa, Homo sapiens
  misc_feature (1)...(159): Xaa = X or * as defined in Table 2
IKAPCASFPTSGFPGQRRSFVGRSSSTPEECGHSELGRNEDKASRGRIRQQPFAVLKYLLFCSLRWXYPGKQGLEWTSSKLQQTCRKYRERHKDTPQEEQLQDTXLSGVTKGXNEGKNVKGSQRERSGYSQREAHQTNSRSLGRNSTSQKRVGASIQRS

SEQ ID NO: 47430 - protein, 742 aa, Homo sapiens
  DOMAIN (91)..(144): Link domain proteins domain identified by eMATRIX, accession number BL01241, p-value=1.000e-40, raw score of 35.81
  DOMAIN (75)..(164): Extracellular link domain identified by PFam, accession name Xlink, E-value=4e-64, PFam score of 149.3
RPSGPQPLPGSVRHPRPVLRRPLPRAQGSSSSFRPRPPFAPDTMDKFWWHAAWGLCLVPLSLAQIDLNITCRFAGVFHVEKNGRYSISRTEAANLCKAFNSTLPTMAQMEKALSIGFETCRYGFIEGHVVIPRIHPNSICAANNTGVYILTSNTSQYDTYCFNASAPPEEDCTSVTDLPNAFDGPITITIVNRDGTRYVQKGEYRTNPEDIYPSNPTDDDVSSGSSSERSSTSGGYIFYTFSTVHPIPDEDSPWITDSTDRIPATSTSSNTISAGWEPNEENEDERDRHLSFSGSGIDDDEDFISSTISTTPRAFDHTKQNQDWTQWNPSHSNPEVLLQTTTRMTDVDRNGTTAYEGNWNPEAHPPLIHHEHHEEEETPHSTSTIQATPSSTTEETATQKEQWFGNRWHEGYRQTPREDSHSTTGTAAASAHTSHPMQGRTTPSPEDSSWTDFFNPISHPMGRGHQAGRRMDMDSSHSTTLQPTANPNTGLVEDLDRTGPLSMTTQQSNSQSFSTSHEGLEEDKDHPTTSTLTSSNRNDVTGGRRDPNHSEGSTTLLEGYTSHYPHTKESRTFIPVTSAKTGSFGVTAVTVGDSNSNVNRSLSGDQDTFHPSGGSHTTHGSESDGHSHGSQEGGANTTSGPIRTPQIPEWLIILASLLALALILAVCIAVNSRRRCGQKKKLVINSGNGAVEDRKPSGLNGEASKSQEMVHLVNKESSETPDQFMTADETRNLQNVDMKIGV

SEQ ID NO: 47431 - protein, 660 aa, Homo sapiens
MDKFWWHAAWGLCLVPLSLAQIDVESEFAQRDYQDLEENMGLGAVVGRGSAGYAHHGILGKSMAVLSLPWADSTVVYLEGNWMGPSHPLLSRLQSGPSAAGLLEFAGGPLQILFAWVSPVEAAEQQILQNRKYCSLILPLEASSQRGTRLYEVSVGPYWESCQTGMLKSADVSAAFVQQNKGGDYALPPEVETTEAAGLAELRSQSNSDKVLQISSLDFRNTILLRNLTVLTFPGMPLCYVQVSTRLFALLLVAFWLTDVKIEATIEPAFCISRITHTCLTLAAASKPPDADSCCGNLSKWRDIQIELAKFGTRAKSLGTMGGTSSNTISAGWEPNEENEDERDRHLSFSGSGIDDDEDFISSTSRCGPSNSLVAAELTSAGFLQDAGGEKTLEPRACKPNYLVTLSLARCPQRSQQAATKAANKQMGELTVWGRPNMRPVDRCHLVRILHRLMLFYPFPHTTTMIHRVHNASHTPMGTNCLVILVASSLLLKEAYPNASKRRLHIFLTYATNTQGIRVTLSYLQRNGISLWCQGGYVSTTPRAFDHTKQNQDWTQWNPSHSNPEVLLQTTTRMTADVDRNGTTAYEGNWNPEAHPPLIHHEHHEEEETPHSTSTSKQDGGRQFWKPLQVLGNHRINVYVFNPFYLVAEIGPKTQKDKLI

SEQ ID NO: 47432 - protein, 730 aa, Homo sapiens
  DOMAIN (502)..(545): kw TRANSCRIPTASE REVERSE II ORF2 domain identified by eMATRIX, accession number DM01354T, p-value=1.000e-40, raw score of 9.48
  DOMAIN (373)..(626): Reverse transcriptase domain identified by PFam, accession name rvt, E-value=4.1e-44, PFam score of 160.0
  misc_feature (1)...(730): Xaa = X or * as defined in Table 2
EDFSTSATTPSSSPRELPSGQGLWLCWLELLPSFTRNGVVHTGPCXGLCXRWQLSPQPSLPSNFGMKISDMATLITTVPAAFSSSSDWNTPAPTQSPEEVRRLHLCTSFMDMLKVGGQGEGAAAGLVQNPSGHALGCLDSAASGISDPSVAVLLENVPNQRGESLRCVPVYLGQWNCSKETGMDSGQFGEEKGAHDPSPTYYHACLSTQWWPSPESPYPQPSGPQVKEPRNPGKSISMLCLWIRYHAADSGSSRAKLPLEERLRPFSPTHDCLAFPLPLEKRPEGNVGSRCPSGTKLPEEGSGSNICCSAIFPVLQPPLVIPRQTRSGVDLQQTPTDLQLRDLTDRSSLPAMEQSWIENDFDELNRSRLQKANKLENLEETDKFLDTYTLPRLNQEETESLNRPITGSEIEAIINNVPTKKSPGPDGVTAKFYQRYKEELRTVNKNHMIISIDAEKAFDNIQQPFMLKTLNKLGIDATYLKIIRAIDDKPTANIILNGQKLEAFPLKTGTRQGCPLSPLLFNIVLEVLARAIRQEKEIKGIQLGKEEVKLSLFADDMIVYLENPIVSAQNLLKLINNFSKVSGYKINVQKSQEFLYNNNRQTENQIMSELPFTIASKRIKYLGIQLTRDVKDLFKENYNPLLNEIKKDTNKWKNIPCSWIGRINIMKMAILPKSGPSAARLLEFAGGPLQTLFAWVSPEEAAEQQILPNSQSCYLILPLEASSQRGSWPV

SEQ ID NO: 47433 - protein, 161 aa, Homo sapiens
MQQRGLAIVALAVCAALHASEVVAAVDQERLKWKTAGGSRSREQGRAREVQSDSNKKGVARDVVYLGDVQPPFPPLRVRNLLGATDLAVDGSYPRAERTDVKKLPKYNKYYAKAFLDQVQLLRRALDCLQCLELNMVWLPMHMLFSEKLFLHHLNIWVAVT

SEQ ID NO: 47434 - protein, 90 aa, Homo sapiens
GRQECSREDSPSWPWLSVRPYMPQKPYFPLPPAVARRFHIIFPEGSWERVNMCRIQRADGDCDLGCCHPSCSSAGRNLCSARTTILLSSG

SEQ ID NO: 47435 - protein, 40 aa, Homo sapiens
LTYLRKKLRGRGKKEEEGMALSQGLFTFKDVAIEFSQEEW

SEQ ID NO: 47436 - protein, 37 aa, Homo sapiens
  DOMAIN (3)..(37): KRAB box domain identified by PFam, accession name KRAB, E- value=0.0033, PFam score of 5.7
GLFTFKDVAIQYSQEERECLDPAQRALCRDGTLENYR

SEQ ID NO: 47437 - protein, 158 aa, Homo sapiens
  DOMAIN (24)..(63): PROTEIN ZINC FINGER ZINC-FINGER METAL-BINDING NU domain identified by eMATRIX, accession number PD01066, p-value=5.865e-34, raw score of 19.43
  DOMAIN (22)..(95): KRAB box domain identified by PFam, accession name KRAB, E- value=2.2e-22, PFam score of 87.8
ERNSEEEERKKRREWLFLRDLVTFRDVAIEFSSEEWECLDPAQRALYRDVMLENYRNLLSLDEDNIPPEDDISVGFTSKGLSPKENNKEELYHLVILERKESHGINNFDLKEVWENMPKFDSLWDYDVKNYKGMPLTCNKNLTHRKDQQHNKSSIHFS

SEQ ID NO: 47438 - protein, 66 aa, Homo sapiens
  DOMAIN (33)..(57): PROTEIN NUCLEAR RIBONUCLEOPROTEIN SMALL MRNA RNA domain identified by eMATRIX, accession number PD01861A, p-value=1.540e- 14, raw score of 14.06
  DOMAIN (16)..(66): Sm protein domain identified by PFam, accession name Sm, E- value=3.4e-07, PFam score of 37.3
RPRRPDKEKKKKESILDLSKYIDKTIRVKFQGGREASGILKGFDPLLNLVLDGTIEHVLNGASTRP

SEQ ID NO: 47439 - protein, 147 aa, Homo sapiens
  DOMAIN (57)..(136): Sm protein domain identified by PFam, accession name Sm, E- value=0.043, PFam score of 8.3
  misc_feature (1)...(147): Xaa = X or * as defined in Table 2
CRPVPAATNGRCFPATPRDPGPRMRRACAWGRSKGAGRCLRRATRRDKMAKKESILDLSKYIDKTIRVKFQGGRKASGILKGFEPNLLNLVLTVTIXYMRDPDDQYKLTEDTRQLGLVVFRGTSLVLICPQDGMEAIPNPFIQQQDA

SEQ ID NO: 47440 - protein, 602 aa, Homo sapiens
MQSQSRDASSKVNSSLRMQPAVMGTAIGDNQAANNVPFIPKNTKTTSFSKFDTFPNTGKSWLMCGFNIARVVPFHVGYISKYVVPVLSYSRRQMLLIQRGPCARKVTPQLWNVGSQDPEDYEWPKFHIPPEDQGSGRHTRKDFWGMGRPEEKPGADYHYTKSFTPGKGRNGTPRWSTVGRSSSVLGTIQMHLSSAKLAGAGLDLVTAAAAGAREAASKRAEVMSVLLIDVSQVFSTVPGEDSRCPPNALAYGLPNSLVIDSSGLTEADFGSRGFGGAWVPLLGAIDWAHLELGRLLGTEFQVMFFFSALVLTLCFTVHLCSISEAPLTEVAKGIPPQQTPQDPPLSSDGMYEYGSIKKVKNGYSLSGNSQERGNFGRNRYRNRVPWQEQEQWIQRGSIQGCRSTVFSLAAWRRILVLFDSPSPRSQNSKITSWTGALCAFMQDSQRITEYLYDNIHAVIKNDHTGKAMFHLLLQLFEEMFQDLDPACLKFSLKALLLSAVDLGTILLVPIEWKPHSGPETAKQPLVLNRIPPTRRAMTLKSLLRALVNMPPHYRYLCISHLIGWTAFLSNMLFFTDFMGQWVPDQVSLENERESLQDEVLDG

SEQ ID NO: 47441 - protein, 283 aa, Homo sapiens
RVRVIVQRHHPQAHVWGGTCKKEENDDDFTFGQSALKKIKTETYPQGQPVKFPANANSTKEEVEMNWDMVQVLSERTNIEPWVCANIIRLFNDDNTIPFIIRYRKELINNLDADSLREVQQTLEELRAVAKKVHSTIQKIKKEGKMSECLLKAMLNCKTFEELEHVSAPYKTGSKGTKAQRARQLGLEGAARALLEKPGELSLLSYIRPDVKGLSTLQDIEIGVQHILADMIAKDKDTLDFIRNFLYVDNPSTVSQNTEMNANDERQCGEGKLLWNSLQVLWE

SEQ ID NO: 47442 - protein, 75 aa, Homo sapiens
  DOMAIN (15)..(69): Cytidine and deoxycytidylate deaminase domain identified by PFam, accession name dCMP_cyt_deam, E-value=0.08, PFam score of 5.8
YHTSCTVWRTAKEALENTEVPVGCLMVYNNEVVGKGRNEVNQTKNATRHAEMVAIDQVLDWCRQSGKSPSEVFEH

SEQ ID NO: 47443 - protein, 59 aa, Homo sapiens
  misc_feature (1)...(59): Xaa = X or * as defined in Table 2
DWSDIQKLGXSLSLSKEIFQLXIVSPPALHPAKLLHRSAXLSVPQIGRECQGCGWTAMC

SEQ ID NO: 47444 - protein, 45 aa, Homo sapiens
  misc_feature (1)...(45): Xaa = X or * as defined in Table 2
LRTAPEFPGRRFRGCAAAAAESVAALLXSTPPCRSGDSLCGKSRL

SEQ ID NO: 47445 - protein, 179 aa, Homo sapiens
PKQERRPSRSVLSRNHKRDFPQRLSPGAAKGAWTTAKAATLSAAAAAQPPPLTGPTSPAEWWLGMEAKAAPKPAASGACSVSAEETEKWMEEAMHMVRSPGGTYCLIDEIKSGTDEKVVWSITSYIFHFVFQAKEALENTEVPVGCLMVYNNEVVGKGRNEVNQTKNVCELSSIIANIQ

SEQ ID NO: 47446 - protein, 17 aa, Homo sapiens
  misc_feature (1)...(17): Xaa = X or * as defined in Table 2
YIQPVFXGWTLGCCQFF

SEQ ID NO: 47447 - protein, 330 aa, Homo sapiens
MIREWDEMESEGEAASTSVVREGHSKKPPRLRSRSQCGASSAEPRQGPVGEGEFQPPREEGSTDLCTLVGRHGHVRSSRWGLVSMFAPPGVFSAPARVCTCACSRCVSAWAPVDHPATPLLALCNDSLNDEMSISPQVLNLVPGEPERTLEQEEKEKLVSEAPPPPGAMQSLRPEQTRGLLEPERTKTLLPRESRAWEKPPHPACTKDWEAVEVGASSHDSDEKDLSSQETGLSQEWSSVEEDDESEGSQAVGAIEGVRGLTESLWEPMWKEATLASLLFLKLAYHAYFRTFALFLLRGMLFPQKLPWLPHLLQVSNVTSSQKPSPTTLK

SEQ ID NO: 47448 - protein, 732 aa, Homo sapiens
MFKSTTVTVRENCNEISQRVVVDSVNNQQDFKYTLIHSEENTKDATTVAEDPESANNYTAKNNQVGDQAQGIHRHKIGFSFAFPKKASVKLESSAAAFSEYSDDASVGKGFSRKSRFVPSACHLQQSSPTDVLLSSEEKTNSFHPPEAMCRDKETVQTQEIKEVSSEKDALLLPSFCKFQLQLSSDADNCQNSVPLADQIPLESVVINEDIPVSGNSFELLGNKSTVLDMSNDCISVQATTEENVKHNEASTTEVENKNGPETLAPSNTEEVNITIHKKTNFCKRQCEPFVPVLNKHRSTVLQWPSEMLVYTTTKPSISYSCNPLCFDFKSTKVNNNLDKNKPDLKDLCSQQKQEDICMGPLSDYKDVSTEGLTDYEIGSSKNKCSQVTPLLADDILSSSCDSGKNENTGQRYKNISCKIRETEKYNFTKSQIKQDTLDEKYNKIRLKETHEYWFHKSRRKKKRKKLCQHHHMEKTKESETRCKMEAENSYTENAGKYLLEPISEKQYLAAEQLLDSHQLLDKRPKSESISLSDNEEMCKTWNTEYNTYDTISSKNHCKKNTILLNGQSNATMIHSGKHNLTYSRTYCCWKTKMSSCSQDHRSLVLQNDMKHMSQNQAVKRGYNSVMNESERFYRKRRQHSHSYSSDESLNRQNHLPEEFLRPPSTSVAPCKPKKKRRRKRGRFHPGFETLELKENTDYPVKPNSSLNPLDRLIHHTAAGRAAKKGSTSNFK

SEQ ID NO: 47449 - protein, 309 aa, Homo sapiens
TDTESYPEFLQRQHSSPWGPPQALDSGTAWLRCHGPDRSCSHGAGDGQIALLPLDRKPAKPLWFRRALCSPRKHFDGELGDSTHPAPNWAGFNFTLLLTWAEPQAGGGEDALPLRILKRLDNADEQAAQIRRELDGRLQLADKMAKKYVNVILEEKKSRWPETLGLICEVVPDVPSNPMNELVQERKFPKFIAKDMENMYIEELRSSVNLLMANLESLPVSKGGPEFKLQKLKRSQNSAFLDIGDENEIQLSKSDVVLSFTLEYFKQELCVQQQSKIVLSDDGAVHVYRTPERIDMPLVTGPVTSAKLN

SEQ ID NO: 47450 - protein, 151 aa, Homo sapiens
  DOMAIN (37)..(101): Eukaryotic protein kinase domain identified by PFam, accession name pkinase, E-value=7.3e-06, PFam score of 25.1
ESDSRKVAEETPFGAPALCPSPEALSPEPPAYSLQDFDTLATVGTGTFGRVHLVKEKTANHFFALKVMSIPDVIRLKQEQHVHNEKSVLKEVSHPFLIRLWPRCNADLTCTKAVQNGWDLLKVPTCLHLLLAVPGVGLFIDEGVKQGFSVE

SEQ ID NO: 47451 - protein, 319 aa, Homo sapiens
  DOMAIN (207)..(264): Eukaryotic protein kinase domain identified by PFam, accession name pkinase, E-value=0.0077, PFam score of 14.2
MLGAPAFLAAIQHSVHAPRGQRLLPPGAIAASAAAAAESNSREVTEDAADWTPALCPSPEARSPEAPAYRLQDCDALVTMGCLPVVVYCGGSRLKTRFGATIIIFVSPTPRFLCRHPSPQDDDISRIPEANLVSCWRSKTETQVLEGRLFAQKPGHVDEFGNTHVCAEGHSLLDLGPTLNPGWPHLEIVYLIETTMTLFSNKALFTGTGTFGRVHLVKEKTAKHFFALKVMSIPDVIRRKQEQHVHNEKSVLKEVSHPFLIRLHTECASFLFAFCQDCVNVGELWDKRGQGESSIWSDNYRKSTGQVATVKPENVMFKI

SEQ ID NO: 47452 - protein, 52 aa, Homo sapiens
  DOMAIN (18)..(42): HMW KININOGEN SIGNATURE domain identified by eMATRIX, accession number PR00334B, p-value=9.370e-10, raw score of 8.69
ETGACIHCHCYWTPCQGHQRHHHHHHHQYHHHHHHHQCHHHQYYHHHHHHFH

SEQ ID NO: 47453 - protein, 97 aa, Homo sapiens; identical to SEQ ID NO: 42987

SEQ ID NO: 47454 - protein, 44 aa, Homo sapiens
  misc_feature (1)...(44): Xaa = X or * as defined in Table 2
XACRHPMEDSMDMDMSPLRPQNYLFDYHFKVDNDENEHQLSLRT

SEQ ID NO: 47455 - protein, 370 aa, Homo sapiens
WGTVTASFAMWMTQNAPEAHPPFASWRNSEEARTVRTSQKREMTSRLMDRDSTLTVSILCKLRQQDYFPYIKFISKGVFSMSSSTIDVQVSKCGTVIHLDVQAKNPKAITESLLCHLTQKPCGLHLLISASPSDHHRLSPTLLPAKIDCYSQFCTQQPGKSIPNSKSVSHHMIPLSKPPVAFHRNQMYSSYSSLLRAIFPSPCLRKPVDLHYIKGFLAFCFLVSTCHHPMKDVMDTDMSPVRPQNYLFGCELKAIKDDHFKVDNDEDEHQLSLRTVSSGAGAKDELHIVEAEAMNYEGSPIKVTLATLKMSVQPMISLRGFEIIPPVVLQLKCGSGPVHISGQHLVAVEEDAESEDEEEEDVKFLSISGR

SEQ ID NO: 47456 - protein, 338 aa, Homo sapiens
  DOMAIN (206)..(240): Amyloidogenic glycoprotein extracellular domain proteins domain identified by eMATRIX, accession number BL00319C, p-value= 5.737e-09, raw score of 17.12
SVVEFIPSCAVVLWSSVLLSPVRLLSYLSGVPPGHPMEDSMDMDMSPLRPHNYLFGCELKAGQDYHFKVDNDENEHQLSLRTVSLGAGAKDELHIVEAEAMYYEGSPIKVTHLATLKMSVQPTVSLGGFEITPPVVLRLKCGSGPVHISGQHLVAVEEDAESEDEEEEDVKLSLSISGKRSAPGGGSKVPQKERKTCMLMKDDDDDDEEDGYDEDDDDDDDDFDDEEAEEKAPSERNLYRDTPAKNAQKSNQNGKDSKPSSTPRSKGQESFKKQEKTPKTPKGPSSVEDIKAKMQASIAEKGGSLPKVEAKFINYVKNCFPMTDQDAIQDLWQWRKSL

SEQ ID NO: 47457 - protein, 96 aa, Homo sapiens
  DOMAIN (29)..(42): HIGH MOBILITY GROUP PROTEIN (HMGY) SIGNATURE domain identified by eMATRIX, accession number PR00930A, p-value=1.000e- 16, raw score of 3.02
HLLLREGKMSESSSKSSQPLASKQEKEGTEKRGRGRPRKQPPMSPLNSCVVFCSMFHSSTSVIAAATSAKYSSSLPPVLPTIPSRKILFVGKRGWG

SEQ ID NO: 47458 - protein, 40 aa, Homo sapiens
GQGPTFPGTGVVGHPACHAPAPLPHKEYLGGGDRGQNRRQ

SEQ ID NO: 47459 - protein, 129 aa, Homo sapiens
  DOMAIN (65)..(78): HIGH MOBILITY GROUP PROTEIN (HMGY) SIGNATURE domain identified by eMATRIX, accession number PR00930A, p-value=1.000e- 16, raw score of 3.02
VRGGQAFRQRPAPPLPVTRSAHRGRRPTRASQPSLFHLLLREGKMSESSSKSSQPLASKQEKDGTEKRGRGRPRKQPPVSPGTALVGSQKEPSEVPTPKRPRGRPKGSKNKLEKEEEEGISQESSEEEQ

SEQ ID NO: 47460 - protein, 100 aa, Homo sapiens
MATPPQQNRGRRWPLHPLWSIRAPLLTLLQILEAGPHLPWDWGSRSPSLHCPSPSSPQRVSWGRGSWAEQEAMRMNIAQTPFKGHLTAQGGGRRQGWDAV

SEQ ID NO: 47461 - protein, 35 aa, Homo sapiens
  misc_feature (1)...(35): Xaa = X or * as defined in Table 2
MREQRRRPAGARSGLPGAAVLGAEDRPGSAAAAAX

SEQ ID NO: 47462 - protein, 138 aa, Homo sapiens
NKEVTAVQECYLEVCREKDNLELTLRKTTEKEQQTQEKIKEKLIQQLEKEWQSKLDQTIKAMKKKTLDCGSQTDQVTTSDVISKKEMAIMIEEQKCTIQQNLEQEKDIAIKGAMKKLEIELELKHCENITKQVEIAVQ

SEQ ID NO: 47463 - protein, 126 aa, Homo sapiens
GDLLEVGLPPGLEFPRGICLRGLRRTMSLDFGSVALPVQNEDEEYDEEDYEREKELQQLLTDLPHDMLDDDLSSPELQYSDCSEDGTDGQPHHPEQLEMSWNEQMLPKSQSVNGYNEIQSLYAGEK

SEQ ID NO: 47464 - protein, 331 aa, Homo sapiens
MSEMAELSELYEESSDLQMDVMPGEGDLPQMEVGSGSRELSLRPSRSGAQQLEEEGPMEEEEAQPMAAPEGKRSLANGPNAGEQPGQVAGADFESEDEGEEFDDWEDDYDYPEEEQLSGAGYRVSAALEEADKMFLRTREPALDGGFQMHYEKTPFDQLAFIEELFSLMVVNRLTEELGCDEIIDRENIIYINIFNTVDEKDGLTLSLRESQKLFQNGKEREIQLEAQIKALETQIQALKVNEEQMIKKSRTTEMALESLKQQLVDLHHSESLQRAREQHESIVMGLTKKYEEQVLSLQKNLDATVTALKEQVGMISNEQLLSTSKAGYVL

SEQ ID NO: 47465 - protein, 429 aa, Homo sapiens
MVQDFDHDKQEAVDRCERTYQQHHEAMKTQIRESLLAKHALEKQQLFEAYERTHLQLRVSTRGGSATVPAAASTEGTCYECKHEQGFASECCHLEEALWVSELGSSYITFLNLGFLCIIEVVGPPSNQPMGVVHHLLHTVGKSNSVSQKAPPSAFKPKEHTTFHGGQNLRDRDEELTELKDEISLYESAAKLGIHPSDSEGELNIELTESYVDLGIKKVNWKKSKVTRSVATLDSHRRMNPIVNYTYEGSRLHAPYENLMLDDLSTTDAELDKSRNHNRTGKSKQSFCIGICMGGATALTGWDFGVHYSRQRGRFWNVRTKDHVFDNVGHLIRYHMDNSLPIISSGSEDQTAKQPEKNPKPPRKALSPTIYFKYAHEEQCHTNWKDVFGSSGERSRNTKTRLLNTSSQSGDQTKSDTKTNPEQNNFNIL

SEQ ID NO: 47466 - protein, 668 aa, Homo sapiens
  DOMAIN (529)..(556): Mrp family proteins domain identified by eMATRIX, accession number BL01215A, p-value=4.964e-11, raw score of 9.75
MLLNDQWINDKIKKKIEKYFETNDNGNTTYQNLWDTAKAVPEGKFIAISFAVSEAKEKWKSELENMRKNILPGKELEEKIHSLQKELELKNEEVPVVIRAELAKARSEWNKEKQEEIHRIQEQNEQDYRQFLDDHRNKINEVLAAAKEDFMKQKTELLLQKETELQTCLDQSRREWTMQEAKRIQLEIYQYEEDILTVLGVLLSDTQKEHISDSEDKQLLEIMSTCSSKWMSVQYFEKLKGCIQKAFQDTLPLLVENADPEWKKGAQHFTDFGVAGFAFVITNSDLRGRLHFTELDAANADNANIAVVIELRNLHLERTVKVNVRRRNVVNNRLVQRGHVFRHIYEVQTRDTVQGKSVNDREVHLLVGRKQTLFWFLNAFAGFGRQMRQPPADMSPPWDSYTLQLHHRKSLPPGVSTMLIRMFRMKLMETLNQFIYAGHEMTKAIAIAQFNDDSPEARKITRRWRIGEAADLVGVSSQAIRDAEKAGRLPHPDMEIRGRVEQRVGYTIEQINHMRDVFGTRLRRAEDVFPPVIGVAAHKGGVYKTSVSVHLAQDLALKGLRVLLVEGNDPQGTASMYHGWVPDLHIHAEDTLLPFYLGEKDDVTYAIKPTCWPGLDIIPSCLALHRIETELMAKFDEGKLPTEPHLMLRLAMETVAHDYEVIVIGRRA

SEQ ID NO: 47467 - protein, 456 aa, Homo sapiens
  DOMAIN (418)..(450): kw TRANSCRIPTASE REVERSE II ORF2 domain identified by eMATRIX, accession number DM01354K, p-value=1.571e-23, raw score of 9.35
MPSIVQEEDPNEELSKDEFILKLKAEVQRLLGSNSMKRHLVSQLQNDLKDCHKKIEDLHQVKKDEKSIEVEISFAVSEAKEKWKSELENMRKNILPGKELEEKIHSLQKELELKNEEVPVVIRAELAKARSEWNKEKQEEIHRIQEQNEQDYRQFLDDHRNKINEEHISDSEDKQLLEIMSTCSSKWMSVQYFEKLKGCIQKAFQDTLPLLVENADPEWKKLWDPYFHFFLSLQPRLYTHIRTTCKHLALWLGVLCLSWYDIDADFLIQLQQLLTDLPHDMLDDDLSSPELQYSDCSEDGTDGQPYTNGQKQEFNDQATNVIKFSDPQWNHFQGPSCQGLEPYNKVTYKPYQSSAQNNGSPAQEITGSDTFEGLQQQFLGANESRFLLRGKFIAINVYIKKTERAQTDNLKSHLKELEKQEQTKPKPSRRKEITKIRAELNGIEAKEAKRTNPKDK

SEQ ID NO: 47468 - protein, 1012 aa, Homo sapiens
  DOMAIN (713)..(767): Kinesin light chain repeat proteins domain identified by eMATRIX, accession number BL01160B, p-value=7.102e-09, raw score of 19.54
MANKDVVGDIASALSRPPGVPQSTSVYPILGFCVFCFCVTVHSENRCRLVKLLWVTKNQNGLRTMSLDFGSVALPVQNEDEEYDEEDYEREKELATVPTSHTDMGLCTQTCLLHSGKFSARALRAFEFMTLLWLGVLCLSWYDIDADLLTQLQQLLTDLPHDMLDDDLSSPELQYSDCSEDGTDGQPYTNGQKQEFNNQATNVIKFSDPQWNHFQGPSCQGLEPYNKVTYKPYQSSAQNNGSPAQEITGSDTFEGLQQQFLGANENSAENMQIIQLQVLNKAKERQLENLIEKLNESERQIRYLNHQLVIIKDEKDGLTLSLRESQKLFQNGKEREIQLEAQIKALETQIQALKVNEEQMIKKSRTTEMALESLKQQLVDFHHSESLQRAREQHESIVMGLTKKYEEQVLSLQKNLDATVTALKEQVGMISNEQLLSTRSVQEVAQLQFQLQQAQKAHAMSANMNKALQEELTELKDEISLYESAAKLGIHPSDSEGELNIELTESYVDLGIKKVNWKKSKVTSIVQEEDPNEELSKDEFILKLKAEVQRLLGSNSMKRHLVSQLQNDLKDCHKKIEDLHQVKKDEKSIEVETKTDTSEKPKNQLWPESSTSDVVRDDILLLKNEIQVLQQQNQELKETEGKLRNTNQDLCNQMRQMVQDFDHDKQEAVDRCERTYQQHHEAMKTQIRESLLAKHALEKQQLFEAYERTHLQLRSELDKLNKEVTAVQECYLEVCREKDNLELTLRKTTEKEQQTQEKRQLLEEREEYVSKLQVELEKKYQDTLMMEKSKWLKDQETDIKQQVESEVILAKAHWDKEEQEIKEKLIQQLEKEWQSKLDQTIKAMKKKTLDCGSQTDQVTTSDVISKKEMAIMIEEQKCTIQQNLEQEKDIAIKGAMKKLEIELELKHCENITKQVEIAVQNAHQRWLGELPELAEYQALVKAEQKKWEEQHEVSVNKRISFAVSEAKEKWKSELENMRKNILPGKELEEKIHSLQKELELKNEEVPVVIRAD

SEQ ID NO: 47469 - protein, 326 aa, Homo sapiens
  DOMAIN (81)..(128): 2'-5'-oligoadenylate synthetases proteins domain identified by eMATRIX, accession number BL00832E, p-value=7.750e-15, raw score of 8.80
MADSTYDVHRRFWSVVFFLAGRENASNNNWCRIPGREKTRDWRKEDPSFQNQNCGSRVKRPVVCQCLFLLGGKEKLRGPLLPQYALEWLPVYVGEYGIHENPGLHTAQCFRTVLELVTKYKRLRIYWTWCYDFQHEISDYLQGQIKKASSEADEEFSSEETDWEEEAAHYEKKGYQPGHLCSKRPPKHPPPAISGWHRKATYVSPFSPLYDFNECAGILLPSPIVTIQIPWLSEPHTAFCHMQQVERIGDIEERGKILVSLMYSTQQGGLIVGIIRCVHLAAMDANGYSDPFVKLMGGTLEASLLQESTYGVDVCYELKMECDAGT

SEQ ID NO: 47470 - protein, 672 aa, Homo sapiens
  DOMAIN (370)..(411): CORE POLYPROTEIN PROTEIN GAG CONTAINS: P domain identified by eMATRIX, accession number PD02059C, p-value=8.313e-09, raw score of 21.58
  DOMAIN (355)..(398): gag gene protein p24 domain identified by PFam, accession name gag_p24, E-value=0.035, PFam score of 12.8
MERRALTGPGDWVTSGAGLRWGGPGSLERQLRVQGIPVQTGKLGQGLPQAGKGNRNRFQRRIVKGQGGTAHNHRRTEPKKPEEHTREKAQQNRENKKNPADLEIQDSLSEVKWKIALQGMFGLELSLVLEALLFLFTCYQVVKAGRILDEIQDNLSEVKRGERVGAKRKYGTQNKYTGLSKGLEPEEKLRLGRNTWREIRRKRGKREKKKDQLAEVSRKRSLCSSLDGLGEPALSSSEADEEFSSEETDWEEEAAHYEKKGYQPGKVLANQLRKPKAAGEGQFADWPQGSRLQGPPYAESPPCVVRQPCAERQCAERQCADSFIPREEQRKIQQEFPVFEGAEGGRVHAPVEYLQITEIAESVRKYGTNANFTLVQLDRLAGMALTPADWQTVVKAALPSITTVVTRIIRYGTSSTGQISTIVAQATLVGQSTEAVIQNPFSNGGSPAAEAVSGEARFAYFPASSVGDTTAVSVQTTDQSLQAGGQFYVMMTPQDVLQTGTQRTIAPRTHPYSPKIDGTRTPRDERRRAQHNEVVSDFCGTSPNHESFFLERPKNRSEKPAHQRGSQPHLTHFIFQALFLAPDSDQDVMRVAFTEYKREFSQVTLGFYVGRTGHELWLRELEMSHGTASGTTVKVKVCRPASMALNGCISPGLWKGRTPPDCDWEEFGMFTE

SEQ ID NO: 47471 - protein, 356 aa, Homo sapiens
  DOMAIN (5)..(29): RHODOPSIN-LIKE GPCR SUPERFAMILY SIGNATURE domain identified by eMATRIX, accession number PR00237E, p-value=9.280e-12, raw score of 13.03
  DOMAIN (1)..(293): 7 transmembrane receptor (rhodopsin family) domain identified by PFam, accession name 7tm_1, E-value=2.7e-34, PFam score of 111.1
MEVTTFAMCLIIVLVPLLLILVSYGFIAVAVLKIKSAAGRQKAFGTCSSHLVVVSIFCGTVTYMYIQPGNSPNQNEGKLLSIFYSIVTPSLNPLIYTCLMWFGCVPTQISSSVVAPIIPAWEHGRDPVRADIQKIAKMINDSYFGWLMLLGFPGKPQLEMIISGVVFFFYAISLMGNMVLILLPLLDKHLQTPIYFFLRNLAILDLCYTTNIVPQMLVNAWGKDKKITFGGCAFQLFTNVTLCTVECMLLAVMSYDPFNAVCKPLDYMTIMNPQLCQGLVAMTWLIGVTNCMILSPCPVSLPRCGDHHLDHYFCEISAMVKIACGATTVMEETVRVKERRKKHETWLCSQRQVFFT

SEQ ID NO: 47472 - protein, 821 aa, Homo sapiens
  DOMAIN (749)..(764): OLFACTORY RECEPTOR SIGNATURE domain identified by eMATRIX, accession number PR00245B, p-value=2.286e-14, raw score of 10.38
  DOMAIN (613)..(821): 7 transmembrane receptor (rhodopsin family) domain identified by PFam, accession name 7tm_1, E-value=5.3e-17, PFam score of 56.2
MDKFLNTYTLPRLNQEEVESLNRPITGSEIVAIINSLRIKKSAGPDGFTAEFYQRYKEELVPFLLKLFQSIEKEGILPNAFYEASIILIPKPGRDTTKKENFWPISLMNIDAKILNKIPANRIQQHIKKLIHHDQLDLWRRQLSLGLAQDVDLGTPQKGRSGRLTERRRKAHRMLKLYKGLSEGEALGLPAGPDPLDPTDLNGAHFDPEVYLDKLPRECPLAQLIDSETDMVQQIRALDSDMQTLTSQCQVYKCVQNWWVLGLTDFKNEAADPPGVKLQTFSVSVTAHKGSVDPNSEQQQDLLQRAKEQSFHSVEGDPTAAIRAVPPKKQGKGGPGKETQLGCQSLQHNQCAYCKEIGQWKNKCPQLKRKQGDSEQEAPDKEERALLILVEGLMSFCWDTPRQSGVPRERIALRRHLEDCGYKVSKKKAQICRQQLTLADLTSGTKLGHQYTGNYTCMGAASSTPKEREVQGMRDNLDTVVEARSMPQGTSAQKAELIAFIRALELSEALAKTVRQRCVSCRQHHARQGPAVPPGIQAYGAAPFEDLQVDFTEMPKCGDIRKIVTGDVNTPAILGVVSSSPPSHIGNNITEDPELQPILAGLSLSMYLVTVLRNLLIILAVSSDPHLHTPMCFFLSNLCWADIGFTLATVPKMIVDMQSHTRVISYEGCLTRISFLVLFACIEDMLLTVMAYDCFVAICRPLHYPVIVNPHLCVFFLLVYFFLSLLDSQLHSWIVLQFTIIKNVEISNFVCDPSQLLKLACSDSVINSIFMYFHSTMFGFLPISGILLSYYKIVPSILRISSSDGKYKAFSTCGSHLAVVC

SEQ ID NO: 47473 - protein, 108 aa, Homo sapiens
  DOMAIN (44)..(63): Histone deacetylase family domain identified by eMATRIX, accession number PF00850A, p-value=3.250e-24, raw score of 11.85
GNITHSSLLHQSMQAKKAIERVGQQDGNWVLTGDVGNYYYGQGHPMKPHRIRMTHNLLLNYGLYRKMEIYLTQAVTHVHFPPGGVKAEFLDLMRPPGVPHITGDLALS

SEQ ID NO: 47474 - protein, 492 aa, Homo sapiens
  DOMAIN (248)..(290): Histone deacetylase family domain identified by eMATRIX, accession number PF00850G, p-value=6.211e-39, raw score of 22.75
  DOMAIN (18)..(333): Histone deacetylase family domain identified by PFam, accession name Hist_deacetyl, E-value=2.6e-160, PFam score of 546.0
  misc_feature (1)...(492): Xaa = X or * as defined in Table 2
GREASKMAQTQGTRRKVCYYYDGDVGNYYXGQGHPMKPHRIRMTHNLLLNYGLYRKMEIYRPHKANADEMTKYHSDDYIKFLRSIRVPDNIVGSTSKQMQRFNVGEDFPSIPMACFEFCQLSTGGSVAKCLXNFNKQQTDIAVNWAGGLHHAKKSEASGFCYVNDIVLAILELLKYHQRVLYIDIDIHHGDGVEEAFYTTDRVMTVSFHKYGEYFPGTGDLRDIGAGKGKYYAVNYPLRDGIDDESYEAIFKPVMSKVMEMFQPSAVVLQCGSDSLSGDRLGCFNLTIKGHAKCVEFVKSFNLPMLMLGGGGYTIRNVARCWTYETAVALDTEIPNELPYNDYFEYFGPDFKLHISPSNMTNQNTNEYLEKIKQRLFENLRMLPHAPGVQMQAIPEDAIPEESGDEDEDDPDKRISICSSDKRIACEEEFSDSEEEGEGGRKNSSNFKKAKRVKTEDEKEKDPEEKKEVTEEEKTKEEKPEAKGVKEEVKLA

SEQ ID NO: 47475 - protein, 164 aa, Homo sapiens
MNNTPDQVMELVQCENTVLLPSTERNSIDINKKDVHTKTPLEGHQHQRRKDHNSWTAREQNWMENEFDELTEVGFRRWVITNSSELKEHVLTQCKEAKNLEKRLDELLTIITSLEKNTNDLMELKNIAEELYEAYTSFNSRIDQAEERISKKGRISEIEEQLMQ

SEQ ID NO: 47476 - protein, 617 aa, Homo sapiens
  DOMAIN (238)..(277): Phosphatidylinositol 3- and 4-kinases proteins domain identified by eMATRIX, accession number BL00915C, p-value=3.152e- 25, raw score of 22.43
  DOMAIN (173)..(302): Phosphatidylinositol 3- and 4-kinases domain identified by PFam, accession name PI3_PI4_kinase, E-value=1.7e-30, PFam score of 113.7
MGRNQHKKVENSKNQNASSLKDHNSSPPRKQNWMENESDELTEVGFRRWVITNSSELKEHVLTQCKEAKNLEKSQMNFWCGELIFQVEALNKLKTLNSLIKLNAVKLNRAKGKEAMHTCLKQSAYREALYDMQSPLNPCVILSELYVEKCKYMYSKMTPLWLVYNNKVFGEDSVGVIFKNGDVSRKIPLTILCLFDLTQTSPSMNCLFPGEFLKNTQRHLFNIVAVLGDDLDRAIEEFTLSCAGYCVASYVLGIGDRHSDNIMVKKTGQCCEDAYLILRRHGNLFITLFALMLTAGLPELTSVKDIQYLKDSLALGKSEEEALKQFKQKFDEALRESWTTKEGLYKARIFEVTDRTVRTCIGEAVAAAAADGVTFSVPVTPHTFRHSYAMHMLYAGIPLKVLQSLMGHKSISSTEVYTKVFALDVAARHRCDNLKTCHTSHGSVMAETAVINHKKRKNSPRIVQSNDLTEAAYSLSRDQKRMLYLFVDQIRKSDGTLQEHDGICEIHVAKYAEIFGLTSAEASKDIRQALKSFAGKEVVFYRPEEDAGDEKGYESFPWFIKRAHSPSRGLYSVHINPYLIPFFIGLQNRFTQFRLSETKRNHQSVCHAYIRIPVSVS

SEQ ID NO: 47477 - protein, 251 aa, Homo sapiens
MPTTRPTQQHQVCFQAAAQHRETPFVSEKAREDKSLCLVIQRIIPDLVQDQQGGNSGTSEKKAAAPVRGLEIKPPSPWDRAPGGRGRCGHSVSRLKRPGLTALKRAADLLARSSSRSQSVRALLKRQKVDKSTKMGRNQHKKVENSKNQNASSLKDHNSSPPRKQNWMENESDELTEVGFRRWVITNSSELKEHVLTQCKEAKNLEKRYPRNYAQRGDSGTEQANGGIVDCFPYSGQSWVYLMGRPDSAVL

SEQ ID NO: 47478 - protein, 63 aa, Homo sapiens
  misc_feature (1)...(63): Xaa = X or * as defined in Table 2
XMPYTERRNLERQSGYSGFAELWRAVPSWIFPGIFVYTVRGKRPTQASVMGDAPSPHQARVSQ

SEQ ID NO: 47479 - protein, 216 aa, Homo sapiens
MSTDVIRLVQSLTKQSFDHTFPISKLLYIFFQQFTTPLASKSDNKFGKWHHPKKLSCKFPLAEKTSAGDTQANRVCSVPPTNHSRPAADRPVRRKINKQKTATSTSTKRTSTQRPHPKVTNVKDQRITAPHQQGNKTGWRIEFDELTEVGFRRWVITNSSELKKHVLTQCKEAKNLEKRLGELLTRITSLEKNINDLMELKNTARELHEAYTSINS

SEQ ID NO: 47480 - protein, 141 aa, Homo sapiens
  DOMAIN (93)..(129): TGF-beta family proteins domain identified by eMATRIX, accession number BL00250A, p-value=6.294e-13, raw score of 21.24
THLPGNPFCLAGGWKLAGLLGSREAALEGAAASAVCPSHPHCLGLHLGQGWGPDARGVPVADGEFSSEQVAKAGGTWLGTHRPLARLRRALSGPCQLWSLTLSVAELGLGYASEEKVIFRYCAGSCPRGARTQHGLALARL

SEQ ID NO: 47481 - protein, 408 aa, Homo sapiens
MHGITLHSPFNGITRMKEGKKCMLIGLWAAMGGPEKGITSSHSSLWDWVPSPQPSGPPWLEVKTGGTDKNKAGERPCSSGGKGKLEGCCGCNEGITSSRKLSPTTLNALLFALMTFWHLAQYAAIRLWLKCYQLCAILSGVQEESIHIDKLKNGKCGGFYCWMEVALSSMDVELERGWSGKMIFPRSSVVPQPISSLTVPSRTLLDIQTLLFFSPSLCDLEPEWLDSVQKNGELFYLELSEDEEESLLPETPTVNHVRFSENEIIIEDDYKERKKYEPKLKQFTKILRRKRLLPKRCNKKNSNDNGPVSILKHQSNQKTGVIVQQRYKDVNVYVNPKKLTVIKAKEQLKLLEVLVGIIHQTKWSWRRTGKQGDGERLVVHGLLPGGSAMKSGQVLIEILINDDTLREM

SEQ ID NO: 47482 - protein, 167 aa, Homo sapiens
SHHISLLVFPFLYDLLLFCFTFLYLQSRKGSGAERQEVSENFSANHFGGQPAPPSFSPACLFFLQPPLPLLVLTGLFGMAECWSPTLRSQVTMALKKYRPQADDTRLLAELSAIASTIQILNRYQQVELHCPAHPQCPLLHCPAVSSSTVPTLAMSTSALPSGSLSS

SEQ ID NO: 47483 - protein, 439 aa, Homo sapiens
  DOMAIN (41)..(85): Aromatic amino acids permeases proteins domain identified by eMATRIX, accession number BL00594A, p-value=3.050e-09, raw score of 16.75
ARMPGSRLGLLQSPCVDTAPKSEWEASPGGLDRGTSSTLGAIFIVVNACLGAGLLNFPAAFSTAGGVAAGIALQMGMLVFIISGLVILAYCSQASNERTYQEVVWAVCGKLTGVLCEVAIAVYTFGTCIAFLIIIGDQQDKIIAVMAKEPEGASGPWYTDRKFTISLTAFLFILPLSIPREIGFQKYASFLSVVGTWYVTAIVIIKYIWPDKEMTPGNILTSIEECRNIIVQFGVREVTAAQVARVLGMMARTHSGLTDGIPLQSISAPGSGIWSDGKDKSDGAQAHTWNVEVLIDVLKELNPSLNFKEVTYELDHPGFQIRDSKGLHNVVYGIQRGLGMEVFPVDLIYRPWKHAEGQGQSPSIRQLIMHAMAEWYMRGEQYDQAKLSRILDVAQDLKALSMLLNGTPFAFVIDLAALASRREYLKLDKWLTDKIREHG

SEQ ID NO: 47484 - protein, 355 aa, Homo sapiens
ILLLEVNMENEPDHENVEQSLCAKTSEEELNKSFNLEASLSKFSYIDMDKELEFKNDLIDDKEFDIPQVDTPPTLESILNETDDEDESFVLEDPTLLNIDTIDSHSYDTSSVASSDSGDRTNLKRKKKLPDSFSLHGSVMRHSLLKGISAQIVSAAIRIKLCDSVWVALVLEVSMALSLPSVSTMIAQDFFVALLKDRRVMGVRTCESRCLFSGSKGEVCCIEPLHSKPELKDHPITQFSLLAMASLTKILVIGLKPFLILWMTFPYGRMDPSSVPLLAWHFVAVQNYVNPMLAFCRGDVVHFLLDHTDKTMFYLLLQFFKEMFQDVDSTCLKFPLKALLLSAADLDTTVLAAIK

SEQ ID NO: 47485 - protein, 126 aa, Homo sapiens
FRRGAWVPLLTRWGFRPRGGCISNDSPRRSIHYRETKPEPPVRVCARGLQRTPSAGHRAVLRMPRRGRTRPGAPQGGAALGGPARDRECACAGRGAQTFALRKNCVCKMPSGRGRTCSKNFSYFPS

SEQ ID NO: 47486 - protein, 268 aa, Homo sapiens
TRSGRDEVPPCPRSKMAASMARRLWPLLTRRRFRPRGGCISNDSPRRSFTTEKRNRNLLYEYAREGYSALPQLDIERFCACPEEAAHALELRKGELRSADLPAIISTWQELRQLQEQIRSLEEEKAAVTEAVRALLANQDSGEVHQDPKYQGLRARGREIRKELVHLYPREAQLEEQFYLQALKLPNQTHPDVPVGDESQARVLHMVGDKPVFSFQPRGHLEIGEKLDIIRQKRLSHVSGHRSYYLRGAGALLQHGLVNFTFNKLLRR

SEQ ID NO: 47487 - protein, 341 aa, Homo sapiens
RPLFGMGEFFYIQEFFFCIAMGAFGGRRLLQVKESISTFCFTHTSPIHGSLVYNALHLEDKSAQNCHREQEEGGRISRPGRFKLELAQARSRPPRPGGSVPASQPAGYPPAALRASRPCPPPAGAPAPALTHATPGAMRPRPFYTREHRARGAPDPAATAADPYSVPPPLGGPLPRPPLPSPLPAPVRGPALTSPPSSGLGLSGSEPGKDLSRVPPSPVKSVRASASSPESAGDVVYLRVCACADPNQGFPPPGSVAQERKGWYMGDLTPTEPAGSNAVNKPGSLPRVGVWFTEYFKPTIETYCSEKRIPFKILLVINKAPGHQGTLMKMYKEINVTLHVC

SEQ ID NO: 47488 - protein, 122 aa, Homo sapiens
KTTISCGGCGSRDSMSSGAVSAAVGDMGDPGSEIIESVPPAGPEASESTTDENEDDIQFVSVLFGFQQDASNLTIAWLGPNPVPEIKKMALQDPQPWTMWLPQMTQADTGPRRNAEEDKSDD

SEQ ID NO: 47489 - protein, 1092 aa, Homo sapiens
  DOMAIN (669)..(686): Zinc finger C2H2 type, domain proteins. domain identified by eMATRIX, accession number BL00028, p-value=8.800e-10, raw score of 16.07
  DOMAIN (200)..(843): Zinc finger, C2H2 type domain identified by PFam, accession name zf-C2H2, E-value=4.1e-19, PFam score of 76.9
RQAVQGGKGIRGDGGGRDSRSSGAVSAAVGDMGDPGSEIIESVPPAGPEAFESTTDENEDDIQFVSEGPLRPVLEYIDLVSSDDEEPSTSYTDENIKRKDHIDYQKDKVALTLARLARHVEVEKQQKEEKNRAFREKIDFQHAHGLQELEFIRGHSDTEAARLCVDQWLKMPGLKTGTINCGTKSSFRRGGHTWVSGKPILCPIMHCNKEFDNGHLLLGHLKRFDHSPCDPTITLHGPFFSSFACVVCYKKFVTQQQYRDHLFDKEATDDGHNNNLLPQIIQCFACPNCFLLFSRKEECSKHMSGKNHFHQSFKLGDNKGIAHPISFPSFAKKLLISLCKDVPFQVKCVACHKTLRSHMELTAHFRVHCRNAGPVAVAEKSITQVAEKFILRGYCPDCNQVFVDETSTQNHKQNSGHKVRVINSVEESVLLYCHSSEGNKDPSSDLHLLLDQSKFSSLKRTMSIKESSSLECIAIPKKKMNLKDKSHEGVACVQKEKSVVKTWFCECNQRFPSEDAVEKHVFSANTMGYKCVVCGKVCDDSGVIRLHMSRIHGGAHLNNFLFWCRTCKKELTRKDTIMAHVTEFHNGHRYFYEMDEVEGETLPSSSTTLDNLTANKPSSAITVIDHSPANSSPRGKWQCRICEDMFDSQEYVKQHCMSLASHKFHRYSCAHCRKPFHKIETLYRHCQDEHDNEIKIKYFCGLCDLIFNVEEAFLSHYEEHHSIDYVFVSEKTETSIKTEDDFPVIETSNQLTCGCRESYICKVNRKEDYSRCLQIMLDKGKLWFRCSLCSATAQNLTDMNTHIHQVHKEKSDEEEQQYVIKCGTCTKAFHDPESAQQHFHRKHCFLQKPSVAHFGSEKSNLYKFTASASHTERKLKQAINYSKSLDMEKGVENDLSYQNIEEEIVELPDLDYLRTMTHIVFVDFDNWSNFFGHLPGHLNQGTFIWGFQGGNTNWKPPLNCKIYNYLNRIGCFFLHPRCSKRKDAADFAICMHAGRLDEQLPKQIPFTILSGDQGFLELENQFKKTQRPAHILNPHHLEGDMMCALLNSISDTTKECDSDDNMGAKNTSIGEEFISTEDVELEEAIRRSLEEM

SEQ ID NO: 47490 - protein, 307 aa, Homo sapiens
GGCGSRDSRSSGAVSAAVGDMGDPGSEIIESVPPAGPEASESTTDENEDDIQFVSTHWSSGELATLKGRKQDWLASLLVDCRALETSANIGGSQIVVTAGRRYGCSDQKLRLYHPSPFKYLESLFKVEVYKQAQTVKTTINTQLFDAKTVMNEGPLRPVLEYIDLVSSDDEEPSTSYTDRMPESKVPSSENHRPEMCSSCNVPLPIGDSSSFSGSCSSSPERIVSQTSSVENPLENQKNDQNNSDTKISETETLKSSQNFQTLPSSPLLVPQESLASSEVKENLRIRFFFSFTAWTGCHPLSPDTSS

SEQ ID NO: 47491 - protein, 255 aa, Homo sapiens
MRIHLEIPNGAAAFEKQNNDNFLKASLGKKPPGSLPTHNTDLAPRASPPRQPPASPPLPSLAGLQDAAARVLTLPPLRGRRQAQAYLPCPEGPAPGARLPAPALPNRAARSMRSGTARLGGHRRRGAGGAEDPRTAARPGWVTREEGWIFDVDRGAERKLRKHWRNAPPKLRNKLRKKETWDSGNQEFSKGERNSQEDAKRKFQYHSFALGLESYQSKLGQEDRRHQEQLSPRTKETVKLIDNLKRMQNWTKRHY

SEQ ID NO: 47492 - protein, 130 aa, Homo sapiens
EMKFKRDKATLEEPLKATIDGSRGKLRTEIDKVPSTYTCINHLLEYHEESNYKAALSILLFLVNLSLNGRHMRALLEMTKIFNKISCMRKEEEWGEEEEEHTCKQASPGMGRNKPSRPFKSESPSKSLDK

SEQ ID NO: 47493 - protein, 985 aa, Homo sapiens
  DOMAIN (653)..(684): Protein kinases ATP-binding region proteins domain identified by eMATRIX, accession number BL00107A, p-value=1.857e-16, raw score of 18.39
  DOMAIN (521)..(794): Eukaryotic protein kinase domain identified by PFam, accession name pkinase, E-value=1e-68, PFam score of 241.7
RDKELCRRPRRPASASGRDEAAGSPGRARGCSARGLGAAAAAASARGGMHRPRRRGTRPPLLALLAALLLAARGAAAQETELSVSAELVPTSSWNISSELNKDSYLTLDEPMNNITTSLGQTAELHCKVSGNPPPTIRWFKNDAPVVQEPRRLSFRSTIYGSRLRIRNLDTTDTGYFQCVATNGKEVVSSTGVLFVKFGPPPTASPGYSDEYEEDGFCQPYRGIACARFIGNRTVYMESLHMQGEIENQITAAFTMIGTSSHLSDKCSQFAIPSLCHYAFPYCDETSSVPKPRDLCRDECEILENVLCQTEYIFARSNPMILMRLKLPNCEDLPQPESPEAANCIRIGIPMADPINKNHKCYNSTGVDYRGTVSVTKSGRQCQPWNSQYPHTHTFTALRFPELNGGHSYCRNPGNQKEAPWCFTLDENFKSDLCDIPACDSKDSKEKNKMEILYILVPSVAIPLAIALLFFFICVCRNNQKSSSAPVQRQPKHVRGQNVEMSMLNAYKPKSKAKELPLSAVRFMEELGECAFGKIYKGHLYLPGMDHAQLVAIKTLKDYNNPQQWMEFQQEASLMAELHHPNIVCLLGAVTQEQPVCMLFEYINQGDLHEFLIMRSPHSDVGCSSDEDGTVKSSLDHGDFLHIAIQIAAGMEYLSSHFFVHKDLAARNILIGEQLHVKISDLGLSREIYSADYYRVQSKSLLPIRWMPPEAIMYGKFSSDSDIWSFGVVLWEIFSFGLQPYYGFSNQEVIEMVRKRQLLPCSEDCPPRMYSLMTECWNEIPSRRPRFKDIHVRLRSWEGLSSHTSSTTPSGGNATTQTTSLSASPVSNLSNPRYPNYMFPSQGITPQGQIAGFIGPPIPQNQRFIPINGYPIPPGYAAFPAAHYQPTGPPRVIQHCPPPKSRSPSSASGSTSTGHVTSLPSSGSNQEANIPLLPHMSIPNHPGGMGITVFGNKSQKPYKIDSKQASLLGDANIHGHTESMISAEL

SEQ ID NO: 47494 - protein, 333 aa, Homo sapiens
  DOMAIN (228)..(252): Receptor tyrosine kinase class III proteins domain identified by eMATRIX, accession number BL00240B, p-value=5.787e-09, raw score of 24.70
  DOMAIN (223)..(284): Immunoglobulin domain identified by PFam, accession name ig, E-value=3.6e-11, PFam score of 41.0
MDLEVENKTPQNQHNHLMSLRIEIIFATAQELSETELSVSAELVPTSSWNISSELNKAAVFHLSVPQQLPSHTQVPVFCYMSPVTGINQLPVYPFQQEMKFKRDKATLEEPLKATIDGSRGNFIEDLRHFKQGPHVSPIQREVDQEKQYGEGFEREKNSVSSCELLEIRTGSFTQKMFIFIVPPRYLTWGRGLDTGECKRKGWVGDSYLTLDEPMNNITTSLGQTAELHCKVSGNPPPTIRWFKNDAPVVQEPRRLSFRSTIYGSRLRIRNLDTTDTGYFQCVATNGKEVVSSTGVLFVKFGKQTPTGDGLWPSAQCGRMARVHRDRKEGMHT

SEQ ID NO: 47495 - protein, 108 aa, Homo sapiens
  DOMAIN (69)..(108): KRAB box domain identified by PFam, accession name KRAB, E- value=2e-13, PFam score of 58.0
MCMSVKAVANKTLQSGQQHPVALSESFVANASGKTTQSATQDGFLANSRAQISSKFHSRNRTWLRQETVTFKDVAVDLTQEEWEQMKPAQRNLYRDVMLENYSNLVTV

SEQ ID NO: 47496 - protein, 179 aa, Homo sapiens
  misc_feature (1)...(179): Xaa = X or * as defined in Table 2
MPTTTTREMTQNSSETIKNKNGKKQRKQRKNSKKNRRKQKDEDKTRRQNKRHHKKNDINPEEERTAVRLKDGGAPAPQAVQEHDAGICSASGGAQETYILVEGKGEASTSPGQSKGSREGGVGANETCSKKLYRDVMLENYSNLVTVAVKSPNRMCIQVGARRGALGDGGRNFGRHCPX

SEQ ID NO: 47497 - protein, 121 aa, Homo sapiens
  DOMAIN (43)..(82): PROTEIN ZINC FINGER ZINC-FINGER METAL-BINDING NU domain identified by eMATRIX, accession number PD01066, p-value=4.882e-27, raw score of 19.43
  DOMAIN (41)..(103): KRAB box domain identified by PFam, accession name KRAB, E- value=1.3e-40, PFam score of 148.4
RAYCWAYIRLSCLTVILIAWCSQESALSEEEEDTTRPLETVTFKDVAGDLTQEEWEQMKPAQRNLYRDVMLENYSNLVTVGCQVTKPDVIFKLEQEEEPWVMEEEMFGRHCPEPRRGENCC

SEQ ID NO: 47498 - protein, 75 aa, Homo sapiens
  DOMAIN (5)..(44): PROTEIN ZINC FINGER ZINC-FINGER METAL-BINDING NU domain identified by eMATRIX, accession number PD01066, p-value=5.200e-30, raw score of 19.43
  DOMAIN (3)..(65): KRAB box domain identified by PFam, accession name KRAB, E- value=7.2e-43, PFam score of 155.8
  misc_feature (1)...(75): Xaa = X or * as defined in Table 2
ETVTFKDVAVDLTQEEWEQMKPAQRNLYRDVMLENYSNLVTVGCQVTKPDVIFKLEQEEEPWVMEEEMFGRHCPX

SEQ ID NO: 47499 - protein, 395 aa, Homo sapiens
MLPAPSLVVGVEGVTAQLLQRQRLPPPCSRPAGSEHLPHADRAPAPMFTMLRKTCGGQQEDSRGMGPHLPRRLAAGWFLFQKSVQILSSGFALPKTQSAPRLSPWTSGERGLSLCALQVQCVGASPGPCTGSVAPAACGKRQSSCMPDLAPHGSLGSSALAVGTGRLIRVHAAPPPSPLSGSVVSNNLAATTQVAKVKLKFQAAFPNPEIENKLAKCEPSRARSTALTQMTDDPTSSSPASGPTTRPYYCFTAPSPPVELNIEFILNGVTWISAWAFIGVLSAMGFGHVNVNKMSIRVEWITAFTIAAGRAATGYLAYKRFYDKDHQNKAMMNLHIQKDNPKIVHAFDMEDLEDKAVYCHCWRYKKFPFCDGSHTKHNEQTGDNVGPLIIEKKET

SEQ ID NO: 47500 - protein, 105 aa, Homo sapiens
LPVPAYELNGSQQLPLLLGAAAIGYLAYKRFYVKDHRNKAMINLHIQKDNPKIRHAFDMEDLGDKAVYCRCWRSKKFPFCDGAHTKHNKETGDNVGPLIIKKKET

SEQ ID NO: 47501 - protein, 71 aa, Homo sapiens
MLQAEKLTSSSEKALANQFLAPGRVPTTARERVPATKTVHLQSRARYTSEMRSEPLGTDSAEPEMDVRKRT

SEQ ID NO: 47502 - protein, 88 aa, Homo sapiens
  misc_feature (1)...(88): Xaa = X or * as defined in Table 2
PAWHEGQPQPESECPPQRQCICSHGRGTPARCGVSYXARTPAGESPXTQQDLRASXLGTRANHSQRASARHKDSASAVTGAGHQRDAE

SEQ ID NO: 47503 - protein, 73 aa, Homo sapiens
HRPRRRFQIKPQSQVPEHAPLPLPTASDPPAHSPRCPSESRLSPGGQRLGFPSSVLNCSKCSWQLAACMGFSF

SEQ ID NO: 47504 - protein, 208 aa, Homo sapiens
SSRASPKHLFRQLFLEVLMSLQDEVLAQLPTASHSLGWGPWPLQFSSLRPISSFCKSPCLSSSIPHLRWCTAPVTADAPSLWRALALWLWLAHGQGPGTGWPVLSLRRRSASRLAASPSENPTFQEYSLITSEAGLLEGRKKKNKTSRGPSGPATCPLGLPRTSPGATRPGPVSPLPSPRSGIAAAPGLAPASTPPLSPGPTPPLPPR

SEQ ID NO: 47505 - protein, 458 aa, Homo sapiens
MVRRDEGAEVEECQQSENAPAAGSGHLTVGQQQQVLRSSSTSDIPEPLCSDSSQGQKAENTQNSSSSEPQPIQENKGHVKREHEGITILVRRSSSPAELDLKDDLQQTQGKCRERQKSESTNSDTTLGCTNEAELSMGPWQTCEEDPELNTPTDVVADADARHWLQLSPTDASNLTDSSECLTDDCSIIAGGSLTGWHPDSAAVLWRRVLGILGDVNNIQSPKIHARVFCYLYELWYKLAKAATLPNEYKEGKLQAYRLICAMMTRRQDVLPNSDFLVHFYLVMHLGLTSEDQAKQEVCTPCLASAAECVWVDSAVSVHPRAHVQSLGKPCSLATSLGCREAAGETAQLQLAPQPPAEAVILSLEHYPENHPLTLKGAMAGPTQGESEHRPAQPYPHLLTQLELLPCEFSMNVPTDSPPGTIHGGCILTEALSKFRLAQEAESQFLSIWNINIPHPYR

SEQ ID NO: 47506 - protein, 2063 aa, Homo sapiens
  DOMAIN (1009)..(1028): ALPHA/BETA GLIADIN FAMILY SIGNATURE domain identified by eMATRIX, accession number PR00209B, p-value=6.318e-11, raw score of 4.88
MVLDDLPNLEDIYTSLCSSTMEDSEMDFDSGLEDDDTKSDSILEDSTIFVAFKGNIDDKDFKWKLDAILKNVPNLLHMESSKLKVQKVEPWNSVRVTFNIPREAAERLRILAQSNNQQLRDLGILSVQIEGEGAINLALAQNRSQDVRMNGPMGAGNSVRMEAGFPMASGPGIIRMNNPATVMIPPGGNVSSSMMAPGPNPELQPRTPRPASQSDAMDPLLSGLHIQQQSHPSGSLAPPHHPMQPVSVNRQMNPANFPQLQQQQQQQQQQQQQQQQQQQQQQQQQLQARPPQQHQQQQPQGIRPQFTAPTQVPVPPGWNQLPSGALQPPPAQGSLGTMTANQGWKKAPLPGPMQQQLQARPSLATVQTPSHPPPPYPFGSQQASQAHTNFPQMSNPGQFTAPQMKSLQGGPSRVPTPLQQPHLTNKSPASSPSSFQQGSPASSPTVNQTQQQMGPRPPQNNPLPQGFQQPVSSPGRNPMVQQGNVPPNFMVMQQQPPNQGPQSLHPGLGGMPKRLPPGFSAGQANPNFMQGQVPSTTATTPGNSGAPQLQANQNVQHAGGQGAGPPQNQMQVSHGPPNMMQPSLMGIHGNMNNQQAGTSGVPQVNLSNMQGQPQQGPPSQLMGMHQQIVPSQGQMVQQQGTLNPQNPMILSRAQLMPQGQMMVNPPSQNLGPSPQRMTPPKQMLSQQGPQMMAPHNQMMGPQGQVLLQQNPMIEQIMTNQMQGNKQQFNTQNQSNVMPGPAQIMRGPTPNMQGNMVQFTGQMSGQMLPQQGPVNNSPSQVMGIQGQVLRPPGPSPHMAQQHGDPATTANNDVSLSQMMPDVSIQQTNMVPPHVQAMQGNSASGNHFSGHGMSFNAPFSGAPNGNQMSCGQNPGFPVNKDVTLTSPLLVNLLQSDISAGHFGVNNKQNNTNANKPKKKKPPRKKKNSQQDLNTPDTRPAGLEEADQPPLPGEQGISLDNSGPKLPEFSNRPPGYPSQPVEQRPLQQMPPQLMQHVAPPPQPPQQQPQPQLPQQQQPPPPSQPQSQQQQQQQQQMMMMLMMQQDPKSVRLPVSQNVHPPRGPLNPDSQRMPMQQSGSVPVMVSLQGPASVPPSPDKQRMPMPVNTPLGSNSRKMVYQESPQNPSSSPLAEMASLPEASGSEAPSVPGGPNNMPSHVVLPQNQLMMTGPKPGPSPLSATQGATPQQPPVNSLPSSHGHHFPNVAAPTQTSRPKTPNRASPRPYYPQTPNNRPPSTEPSEISLSPERLNASIAGLFPPQINIPLPPRPNLNRGFDQQGLNPTTLKAIGQAPSNLTMNPSNFATPQTHKLDSVVVNSGKQSNSGATKRASPSNSRRSSPGSSRKTTPSPGRQNSKAPKLTLASQTNAALLQNVELPRNVLVSPTPLANPPVPGSFPNNSGLNPQNSTVSVAAVGGVVEDNKESLNVPQDSDCQNSQSRKEQVNIELKAVPAQEVKMVVPEDQSKKDGQPSDPNKLPSVEENKNLVSPAMREAPTSLSQLLDNSGAPNVTIKPPGLTDLEVTPPVVSGEDLKKASVIPTLQDLSSSKEPSNSLNLPHSNELCSSLVHPELSEVSSNVAPSIPPVMSRPVSSSSISTPLPPNQITVFVTSNPITTSANTSAALPTHLQSALMSTVVTMPNAGSKVMVSEGQSAAQSNARPQFITPVFINSSSIIQVMKGSQPSTIPAAPLTTNSGLMPPSVAVVGPLHIPQNIKFSSAPVPPNALSSSPAPNIQTGRPLVLSSRATPVQLPSPPCTSSPVVPSHPPVQQVKELNPDEASPQVNTSADQNTLPSSQSTTMVSPLLTNSPGSSGNRRSPVSSSKGKGKVDKIGQILLTKACKKVTGSLEKGEEQYGADGETEGQGLDTTAPGLMGTEQLSTELDSKTPTPPAPTLLKMTSSPVGPGTASAGPSLPGGALPTSVRSIVTTLVPSELISAVPTTKSNHGGIASESLAGGLVEEKVGSHPELLPSIAPSQNLVSKETSTTALQASVARPELEVNAAIVSGQSSEPKEIVEKSKIPGRRNSRTEEPTVASESVENGHRKRSSRPASASSSTKDITSAVQSKRRKSK

SEQ ID NO: 47507 - protein, 2759 aa, Homo sapiens
  DOMAIN (1248)..(1267): ALPHA/BETA GLIADIN FAMILY SIGNATURE domain identified by eMATRIX, accession number PR00209B, p-value=6.318e-11, raw score of 4.88
MVLDDLPNLEDIYTSLCSSTMEDSEMDFDSGLEDDDTKSDSILEDSTIFVAFKGNIDDKDFKWKLDAILKNVPNLLHMDSETAAKGKNTEVRQFDQSAIKNIESAKGRDVWDSWPLQNADGTVAEYTGYHVVFALAGSRKDADDTSIYMFYQKVGDNSIDSWKNAGRVFKDSDKFDANDPILKDQTQEWSGSATFTSDGKIRLFYTDYSGKHYGKQSLTTAQVNVSKSDDTLKINGVEDHKTIFDGDGKTYQNVQQFIDEGNYTSGDNHTLRDPHYVEDKGHKYLVFEAQHGEQKTDSQGEESLFNKAYYGGGTNFFQSSKLKVQKVEPWNSVRVTFNIPREAAERLRILAQSNNQQLRDLGILSVQIEGEGAINLALAQNRSQDVRMNGPMGAGNSVRMEAGFPMASGPGIIRMNNPATVMIPPGGNVSSSMMAPGPNPELQPRTPRPASQSDAMDPLLSGLHIQQQSHPSGSLAPPHHPMQPVSVNRQMNPANFPQLQQQQQQQQQQQQQQQQQQQQQQQQQLQARPPQQHQQQQPQGIRPQFTAPTQVPVPPGWNQLPSGALQPPPAQGSLGTMTANQGWKKAPLPGPMQQQLQARPSLATVQTPSHPPPPYPFGSQQASQAHTNFPQMSNPGQFTAPQMKSLQGGPSRVPTPLQQPHLTNKSPASSPSSFQQGSPASSPTVNQTQQQMGPRPPQNNPLPQGFQQPVSSPGRNPMVQQGNVPPNFMVMQQQPPNQGPQSLHPGLGGMPKRLPPGFSAGQANPNFMQGQVPSTTATTPGNSGAPQLQANQNVQHAGGQGAGPPQNQMQVSHGPPNMMQPSLMGIHGNMNNQQAGTSGVPQVNLSNMQGQPQQGPPSQLMGMHQQIVPSQGQMVQQQGTLNPQNPMILSRAQLMPQGQMMVNPPSQNLGPSPQRMTPPKQMLSQQGPQMMAPHNQMMGPQGQVLLQQNPMIEQIMTNQMQGNKQQFNTQNQSNVMPGPAQIMRGPTPNMQGNMVQFTGQMSGQMLPQQGPVNNSPSQVMGIQGQVLRPPGPSPHMAQQHGDPATTANNDVSLSQMMPDVSIQQTNMVPPHVQAMQGNSASGNHFSGHGMSFNAPFSGAPNGNQMSCGQNPGFPVNKDVTLTSPLLVNLLQSDISAGHFGVNNKQNNTNANKPKKKKPPRKKKNSQQDLNTPDTRPAGLEEADQPPLPGEQGINLDNSGPKLPEFSNRPPGYPSQPVEQRPLQQMPPQLMQHVAPPPQPPQQQPQPQLPQQQQPPPPSQPQSQQQQQQQQQMMMMLMMQQDPKSVRLPVSQNVHPPRGPLNPDSQRMPMQQSGSVPVMVSLQGPASVPPSPDKQRMPMPVNTPLGSNSRKMVYQESPQNPSSSPLAEMASLPEASGSEAPSVPGGPNNMPSHVVLPQNQLMMTGPKPGPSPLSATQGATPQQPPVNSLPSSHGHHFPNVAAPTQTSRPKTPNRASPRPYYPQTPNNRPPSTEPSEISLSPERLNASIAGLFPPQINIPLPPRPNLNRGFDQQGLNPTTLKAIGQAPSNLTMNPSNFATPQTHKLDSVVVNSGKQSNSGATKRASPSNSRRSSPGSSRKTTPSPGRQNSKAPKLTLASQTNAALLQNVELPRNVLVSPTPLANPPVPGSFPNNSGLNPQNSTVSVAAVGGVVEDNKESLNVPQDSDCQNSQSRKEQVNIELKAVPAQEVKMVVPEDQSKKDGQPSDPNKLPSVEENKNLVSPAMREAPTSLSQLLDNSGAPNVTIKPPGLTDLEVTPPVVSGEDLKKASVIPTLQDLSSSKEPSNSLNLPHSNELCSSLVHPELSEVSSNVAPSIPPVMSRPVSSSSISTPLPPNQITVFVTSNPITTSANTSAALPTHLQSALMSTVVTMPNAGSKVMVSEGQSAAQSNARPQFITPVFINSSSIIQVMKGSQPSTIPAAPLTTNSGLMPPSVAVVGPLHIPQNIKFSSAPVPPNALSSSPAPNIQTGRPLVLSSRATPVQLPSPPCTSSPVVPSHPPVQQVKELNPDEASPQVNTSADQNTLPSSQSTTMVSPLLTNSPGSSGNRRSPVSSSKGKGKVDKIGQILLTKACKKVTGSLEKGEEQYGADGETEGQGLDTTAPGLMGTEQLSTELDSKTPTPPAPTLLKMTSSPVGPGTASAGPSLPGGALPTSVRSIVTTLVPSELISAVPTTKSNHGGIASESLAGGLVEEKVGSHPELLPSIELEVNAAIVSGQSEPKEIVEKSKIPGRRNSRTEEPTVASESVENGHRKRSSRPASASSSTKGIQVPSSRYLLEEKGRGIIGYPFLPSNLERKRGLWEKMKRGPLKALNLDRNNLQIETVGVLDSYSGLLASHTEQGVKYKARGKVKTELSALGWLHPMAASFPRFPPSSPSNSRLTVLFYILYLSRPKQLHRVPPPRQKEGETKSKTLSPYWRAMTAAQAAQALPGVRVKGEWVQRQIRGSEMGKLRVSGKERLSPNLTRFKKGGFGVQPEESEEPDRDRDRQGVRGAAGGRSVVELALARLVDEAALVLGPARTALAGSVLPLHRLGAQRVALCPLPGPLQPPHLARLLQQRRPRWERSGVARGPRLAAGGRQFPVRTEPGSVKPDWGARRPSCGYQPGGASSVLALNRPSALRMTSQAQETDPGLTRQVNDEPAVHFILLRHEGAGAVGVFGGRGGAEEEAGEALEHGCKEKVGDQRPDPSPWISLGNRRSPCSPLWIAASHPGPSPDTAATGSREDKRPEPVGALGGLEKRGTSPTPGSRGASGNVEKLVKLT

SEQ ID NO: 47508 - protein, 333 aa, Homo sapiens
SFLIVLLAYASGIIFTMVLDDLPNLEDIYTSLCSSTMEDSEMDFDSGLEDDDTKSDSILEDSTIFVAFKGNIDDKDFKWKLDAILKNVPNLLHMDSETAAKGKNTEVRQFDQSAIKNIESAKGRDVWDSWPLQNADGTVAEYTGYHVVFALAGSRKDADDTSIYMFYQKVGDNSIDSWKNAGRVFKDSDKFDANDPILKDQTQEWSGSATFTSDGKIRLFYTDYSGKHYGKQSLTTAQVNVSKSDDTLKINGVEDHKTIFDGDGKTYQNVQQFIDEGNYTSGDNHTLRDPHYVEDKGHKYLVFEAQHGEQKTDSQGEESLFNKAYYGGGTNFF

SEQ ID NO: 47509 - protein, 149 aa, Homo sapiens
MTWIHDKNLERDSGFLIGPLAYASGIIFTRVLDDLPNLDDIYISLCSSTVEDSEMDFDSGLEDDDTKRQKNEAQRNTRACVESVVLMAVLKHGHSFFGTPIERQSPCPLSLYLELHNSDLSAVSPSGNGEKEMTTLILRKVQHEGKVIE

SEQ ID NO: 47510 - protein, 155 aa, Homo sapiens
  DOMAIN (24)..(73): Tropomyosins proteins domain identified by eMATRIX, accession number BL00326B, p-value=3.514e-10, raw score of 7.68
  DOMAIN (33)..(66): Tropomyosins domain identified by PFam, accession name Tropomyosin, E-value=1.9e-08, PFam score of 28.9
MGITSAGMQSRDAECGERIFTRTVEEELTHLQKKLKGTEDELDKYSEDMKDAQEKLELTEKKASDAGRAAGGGGRGGGEGGASQRFLQISPEKGHFPAAVASGADVRPSPSGADVGELSALRSTAHAPGLIDHEVIIPDCGKFASSNATTRRKHE

SEQ ID NO: 47511 - protein, 1302 aa, Homo sapiens
  DOMAIN (483)..(502): TYPE III EGF-LIKE SIGNATURE domain identified by eMATRIX, accession number PR00011A, p-value=4.822e-09, raw score of 14.06
HASGPGLKMALAGLCALLACCWGPAAVLATAAGDVDPSKELECKLKSITVSALPFLRENDLSIMHSPSASEPKLLFSVRNDFPGEMVVVDDLENTELPYFVLEISGNTEDIPLVRWRQQWLENGTLLFHIHHQDGAPSLPGQDPTEEPQHESAEEELRILHISVMGGMIALLLSILCLVMILYTRRRWCKRRRVPQPQKSASAEAANEIHYIPSVLIGGHGRESLRNARVQGHNSSGTLSIRETPILDGYEYDITDLRHHLQRECMNGGEDFASQVTRTLDSLQGCNEKSGMDLTPGSDNAKLSLMNKYKDNIIATSPVDSNHQQATLLSHTSSSQRKRINNKARAGSAFLNPEGDSGTEAENDPQLTFYTDPSRSRRRSRVGSPRSPVNKTTLTLISITSCVIGLVCSSHVNCPLVVKITLHVPEHLIADGSRFILLEGSQLDASDWLNPAQVVLFSQQNSSGPWAMDLCARRLLDPCEHQCDPETGECLCYEGYMKDPVHKHLCIRNEWGTNQGPWPYTIFQRGFDLVLGEQPSDKIFRFTYTLGEGMWLPLSKSFVIPPAELAINPSAKCKTDMTVMEDAVEVREELMTSSSFDSLEVLLDSFGPVRDCSKDNGGCSKNFRCISDRKLDSTGCVCPSGLSPMKDSSGCYDRHIGVDCSDGFNGGCEQLCLQQMAPFPDDPTLYNILMFCGCIEDYKLGVDGRSCQLITETCPEGSDCGESRELPMNQTLFGEMFFGYNNHSKEVAAGQVLKGTFRQNNFARGLDQQLPDGLVVATVPLENQCLEEISEPTPDPDFLTGMVNFSEVSGYPVLQHWKVRSVMYHIKLNQVAISQALSNALHSLDGATSRADFVALLDQFGNHYIQEAIYGFEESCSIWYPNKQVQRRLWLEYEDISKGNSPSDESEERERDPKVLTFPEYITSLSDSGTKRMAAGVRMECQSKGRCPSSCPLCHVTSSPDTPAEPVLLEVTKAAPIYELVTNNQTQRLLQEATMSSLWCSGTGDVIEDWCRCDSTAFGADGLPTCAPLPQPVLRLSTVHEPSSTLVVLEWEHSEPPIGVQIVDYLLRQEKVTDRMDHSKVETETVLSFVDDIISGAKSPCAMPSQVPDKQLTTISLIIRCLEPDTIYMFTLWGVDNTGRRSRPSDVIVKTPCPVVDDVKAQEIADKIYNLFNGYTSGKEQQTAYNTLLDLGSPTLHRVLYHYNQHYESFGEFTWRCEDELGPRKAGLILSQLGDLSSWCNGLLQEPKISLRRSSLKYLGCRYSEIKPYGLDWAELSRDLRKTCEEQTLSIPYNDYGDSKEI

SEQ ID NO: 47512 - protein, 623 aa, Homo sapiens
  DOMAIN (543)..(578): Matrix protein (MA) p15. domain identified by eMATRIX, accession number PF01140D, p-value=9.880e-11, raw score of 15.54
LTLFTQRAKVTPQSTKSLDSGPFVPFDRSNEEKMAYKEEPREMTGPPAWAPWLFVCARRQCSGSARWLYESHPCGLRIIECQSYNKIFKFIDTDPPCSDEKTQIKATHSRRNWLIGTSGEEEDEKLGPILILTCAFGVHLLEISGNTEDIPLVRWRQQWLENGTLLFHIHHQDGAPSLPGQDPTEEPQHESAEEELRILHISVMFVHWKEGVKKEKKKGEEAGGRKDFQVVEQESFKEKEGLQRQIEIYPFHKHSHPNLDNSALHPPVHMVQKQESMRPLGEALLARRGRAQRAEAGGRGGEMRGYYTQLRLLLTRLGRQSRPGNLAALVTTRGFRIWPLHTASHFTVVSALSRHYLTHQTHGLPAREQKPAEGELSVREEARVMMGKHEALFNNQLLWELIRFTPWRQQEKSHKQRDHGHPNDRGMEETTAPATAEFTGTTAPSFLKTESQGPATGSGLPKIVQQSEKLGGTMFLLESGFSRAPLERRNRTLGLIPRAPLVCWTQKNVREKVVAFSLTPRGRGEDKSKRERKRGRERGEEGGVERKTERKRERERKREREGEEEREGDRKREREIGRGRGRERGRGRAREGGRERKKKEEEEKKKEEEEKKKEEEEEEKEDE

SEQ ID NO: 47513 - protein, 222 aa, Homo sapiens
MLASGMTQHSPSCDSYRESSLLLEKSREKNKGDFVLQQSVSGTTLGQRDACYPENFLLPEPAEGHLQQQPDTKAVLNRKVLRTGTLYIAESHLSWLDSSGLGFSLEYPTISLLALSRDQSDCLGEHLYATVNDKFEESKESVADEEEEDSDDVELITEFIFVPSDKSALGAMFTAMCECQALHPDPEDEDEDDYDGEEYDVEAHERGKGDIPKSYTYEGLSH

SEQ ID NO: 47514 - protein, 211 aa, Homo sapiens
  misc_feature (1)...(211): Xaa = X or * as defined in Table 2
FPGRRFRRAVWCTHCCAPTPSGPVLPHSAAMSFLKSFPPPGPAEGLLRQQPDTEAVLNGKGLGTGTLYIAESRLSWLDGSGLGFSLEYPTISLHALSRDRSDCLGEHLYVMVNAKFEEESKEPVADEEEEDSDDDVEPITEFRFVPSDKSAFXFPCSVEAMFTAMCECQALHPDPEDEDSDDYDGEEYDVEAHEQGQGDIPTFYTYEEGLS

SEQ ID NO: 47515 - protein, 932 aa, Homo sapiens
  DOMAIN (328)..(346): CADHERIN SIGNATURE domain identified by eMATRIX, accession number PR00205B, p-value=9.118e-11, raw score of 11.39
  DOMAIN (31)..(665): Cadherin domain identified by PFam, accession name cadherin, E-value=1.8e-91, PFam score of 317.3
MAAQPRGGDYRGFFLLSILLGTPWEAWAGRILYSVSEETDKGSFVGDIAKDLGLEPRELAERGVRIISRGRTQLFALNQRSGSLVTAGRIDREEICAQSARCLVNFNILMEDKMNLYPIDVEIIDINDNVPRFLTEEINVKIMENTAPGVRFPLSEAGDPDVGTNSLQSYQLSPNRHFSLAVQSGDDETKYPELVLERVLDREEERVHHLVLTASDGGDPPRSSTAHIQVTVVDVNDHTPVFSLPQYQVTVPENVPVGTRLLTVHAIDLDEGVNGEVTYSFRKITPKLPKMFHLNSLTGEISTLEGLDYEETAFYEMEVQAQDGPGSLTKAKVLITVLDVNDNAPEVTMTSLSSSIPEDTPLGTVIALFYLQDRDSGKNGEVTCTIPENLPFKLEKSIDNYYRLVTTKNLDRETLSLYNITLKATDGGTPPLSRETHIFMQVADTNDNPPTFPHSSYSVYIAENNPRGASIFLVTAQDHDSEDNAQITYSLAEDTIQGAPVSSYVSINSDTGVLYALQSFDYEQLRELQLRVTAHDSGDPPLSSNMSLSLFVLDQNDNPPEILYPALPTDGSTGMELAPRSAEPGYLVTKVVAVDKDSGQNAWLSYLLLKASEPGLFAVGLYTGEVRTARALLDRDALKQSLVVAVQDHGQPPLSATVTLTVAVADSIPEVLADLGSLEPSDGPYNYDLTLYLVVAVATVSCVFLAFVLVLLALRLRRWHKSRLLQASEGGLANVPTSHFVGMDGVQAFLQTYSHEVSLTADSRKSHLIFPQPNYVDMLISQESCEKNDSLLTSVDFQECKENLPSIQQAPPNTDWRFSQAQRPGTSGSQNGDDTGTWPNNQFDTEMLQAMILASASEAADGSSTLGGGAGTMGLSARYGPQFTLQHVPDYRQNVYIPGSNATLTNAAGKRDGKAPAGGNGNKKKSGKKEKK

SEQ ID NO: 47516 - protein, 797 aa, Homo sapiens
  DOMAIN (223)..(241): CADHERIN SIGNATURE domain identified by eMATRIX, accession number PR00205B, p-value=8.342e-14, raw score of 11.39
  DOMAIN (138)..(664): Cadherin domain identified by PFam, accession name cadherin, E-value=7.2e-78, PFam score of 272.1
MEIRGALDLRKRQVLIFLVLLGLSRAGTESAHYSVAEETEIGSFVANLARDLGLGVEELSSREARVVSDDNKKYLHLDLLTGNLLLNEKLDRDELCGSTEPCVLHFQVVLENPLQFFRFELCVKDINDHSPTFLDKEILIKISEGTTVGATFLMESAQDLDVGSNSLQNYTISPNSHFYIKIPDSSDRKIYPELVLDRALDYEQEAELRLTLTAVDGGSPPKSGTTLVLIKVLDINDNAPEFPQSLYEVQVPEDRPLGSWIATISAKDLDAGNYGKISYTFFHASEDIRKTFEINPISGEVNLRSPLDFEVIQSYTINIQATDGGGLSGKCTLLVKVMDINDNPPEVTISSITKRIPENASETLVALFSILDQDSGDNGRMICSIQDNLPFFLKPTFKNFFTLVSEKALDRESQAEYNITITVTDLGTPRLKTEYNITVLLSDVNDNAPTFTQTSYTLFVRENNSPALHIGSVSATDRDSGTNAQVNYSLLPPQDRHLPLASLVSINADNGHLFALRSLDYEALQEFEFRVGATDRGSPALSSEALVRVLVLDANDNLPFVLYPLQNGSAPCTELVPRAAEPGYLVTKVVAVDGDSGQNAWLSYQLLKATEPGLFGVWAHNGEVRTARLLSERDAAKHRLVVLVKDNGEPPRSATATLHVLLVDGFSQPYLPLPEAAPAQAQADLLTVYLVVALASVSSLFLLSVLLFVAVRLCRRSRAASVGRCSVPEGPFPGHLVDVSGTGTLFQSYQYEVCLTGGSETGEFKFLKPITPHLPPHRGGKEIEENSTLPNSFGFNY

SEQ ID NO: 47517 - protein, 398 aa, Homo sapiens
  DOMAIN (204)..(222): CADHERIN SIGNATURE domain identified by eMATRIX, accession number PR00205B, p-value=8.342e-14, raw score of 11.39
  DOMAIN (46)..(319): Cadherin domain identified by PFam, accession name cadherin, E-value=6e-22, PFam score of 86.3
STSRDRRLSKRSRTTMAAQPRGGDYRGSFLLSILLGTPWEAWAGRILYSVSEETDKGSFVGDIAKDLGLEPRELAERGVRIISRGRTQLFALNQRSGSLVTAGRIDREEICAQSARCLVNFNILMEDKMNLYPIDVEIIDINDTFQILDGRNKCKNNVMNTPGLLGVRFQIYPELVLDRALDYEQEAELRLTLTAVDGGSPPKSGTTLVLIKVLDINDNAPEFPQSLYEVQVPEDRPLGSWIATISAKDLDAGNYGKISYTFFHASEDIRKTFEINPISGEVNLRSPLDFEVIQSYTINIQATDGGGLSGKCTLLVKVMDINDNPPEVTISSITKRIPENASETLDRHLPLASLVSINADNGHLFALRSLDYEALQEFEFRVGATDRGSPALSILTNN

SEQ ID NO: 47518 - protein, 92 aa, Homo sapiens
MQKSLGGIYEDGGKPPVPCLRVSKALDPKSTGRKYFLPQVVVTVNPQSSSTQWEVAPEKGEELELSVESPCELREPEPSPFSSKRTMYETEE

SEQ ID NO: 47519 - protein, 86 aa, Homo sapiens
WQGGILGSDPTPPLTSPNLLQTACFREERDVRRERGQPLGDHSALCLPRRGVPVPCDGLLCWWGPPDAAEPLRGPSPARAGPVLPG

SEQ ID NO: 47520 - protein, 1144 aa, Homo sapiens
  DOMAIN (1012)..(1031): TYROSINE KINASE CATALYTIC DOMAIN SIGNATURE domain identified by eMATRIX, accession number PR00109B, p-value=7.176e-12, raw score of 12.27
  DOMAIN (958)..(1118): Eukaryotic protein kinase domain identified by PFam, accession name pkinase, E-value=1.8e-41, PFam score of 151.2
GRRWPPCESSWSRPHSHRRSGKEEALCQLQEENRRLSREQERLEAELAQEQESKQRLEGERRETESNWEAQLADILSWWDHQWKARRLQKMEASARLELQSALEAEIRAKQGLQERLTQVQEAQLQAERRLQEAEKQSQALQQELAMLREELRARGPVDTKPSNSLIPFLSFRSSEKDSAKDPGISGEATRHGGEPDLRPEGRRSLRMGAVFPRAPTANTASTEGLPAKGWGMGPWEALGNGCPPPQPGSHTLRPRSFPSPTKCLRCTSLMLGLGRQGLGCDGPRSEVTTSQLAVPPTTCTVLLLAESEGERERWLQVLGELQRLLLDARPRPRPVYTLKEAYDNGLPLLPHTLCAAILDQDRLALGTEEGLFVIHLRSNDIFQVGECRRVQQLTLSPSAGLLVVLCGRGPSSVNEVLESMESPLELVEGFVGSIEVAVPWAALLTDHCTVRVSGLQLTLQPRRGPAPGAADSQSWASCMTTSLQLAQECLRDGLPEPSEPPQPLEGLEMFAQTIETVLRRIKVTFLDTVVRVEHSPGDGERGVAVEVRVQRLEYCDEAVRDPSQAPPVDVHQPPAFLHKLLQLAGVRLHYEELPAQEEPPEPPLQIGSCSGYMELMLEVAGQLGSLHLLLTPRQLQQLQELLSAVSLTDHEGLADKLNKSRPLGAEDLWLIEQDLNQQLQAGAVAEPLSPDPLTNPLLNLDNTDLFFSMAGLTSSVASALSELSLSDVDLASSVRSDMASRRLSAQAHPAGREGLTGTAVQLSWELRTGSRGRSTTSMEVHFGQLEVLECLWPRGTSEPEYTESRPRRSVACHCHSELALDLANFQADVELGALDRLAALLRLATVPAEPPAGLLHCLSPASSPTSRVDPLSLAFSAHQGIYEDGGKPPVPCLRVSKALDPKSTGRKYFLPQPNSFPKPGANPGLESAWEWLELPFLETACFREERDVLVKGDSRWVTTLHYAFQDEEYLYLVMDYYAGGDLLTLLSRFEDRLPPELAQFYLAEMVLAIHSLHQLGYVHRDVKPDNVLLDVNGHIRLADFGSCLRLNTNGMVDSSVAVGTPDYISPEILQAMEEGKGHYGPQCDWWSLGVCAYELLFGETPFYAESLVETYGKIMNHEVWTPGSGLPEGAVGPLSLCGWKYRQ

SEQ ID NO: 47521 - protein, 594 aa, Homo sapiens
  DOMAIN (332)..(383): Neuromodulin (GAP-43) proteins domain identified by eMATRIX, accession number BL00412D, p-value=8.773e-11, raw score of 16.54
SPPTPAYPSGPKSCTHTPTTKDKLSRSEGSRDTEPGGVCTLAGGLCGNCLTLRTSAVSLLRAGVLERVQTQLFRSSLHLLSGISVRLADVAFADRMLIEVDPHRVTQDSDTALETWMDKGFWPQVWVSCWRRACLEKGGWLGEKPGSRCISAPVGACRVLICCTQLTRMSCTGNVVWLDEMTATRALINMSSLPAQDKIRSRDASEDKSAEKRKKDKQEDSSDDDEAEEGEVEDENSSDVEVEEESLLRNDLRPANKLAKGNRLFMRFATKDDKKELGAARRSQYYMKYGNPNYGGMKGILSNSWKRRYHSRRIQRDVIKKRALIGDDVGLTSYKHRHSGLVNVPEEPIEEEEEEEEEEEEEEEEDQDMDADDRVVVEYHEELPALKQPRERSASRRSSASSSDSDEMDYDLELKMISTPSPKKSMKMTMYADEVESQLKNIRNSMRADSVSSSNIKNRIGNKLPPEKFADVRHLLDEKRQHSRPRPPVSSTKSDIRQRLGKRPHSPEKAFSSNPVVRREPSSDVHSRLGVPRQDSKGLYADTREKKSGNLWTRLGSAPKTKEKNTKKVDHRAPGAEEDELYAAAVEDPRIGTG

SEQ ID NO: 47522 - protein, 424 aa, Homo sapiens
  DOMAIN (270)..(321): Neuromodulin (GAP-43) proteins domain identified by eMATRIX, accession number BL00412D, p-value=8.773e-11, raw score of 16.54
MVRYVPNCDSEGESNEFFKWYRSYRVDIWRRTAIEEAFMKERDTCKLTLEAMKNRGEIHLGKDRKALQVFTRPRKSSWLDLSPALWEAQEAIEKKEQRAKRFHFRSEVNLAQRNVALDRDMMKKAIPKVRLETIYICGVDEMSTQDVFSYFKEYPPAHIEWLDDTSCNVVWLDEMTATRALINMSSLPAQDKIRSRDASEDKSAEKRKKDDKKELGAARRSQYYMKYGNPNYGGMKGILSNSWKRRYHSRRIQRDVIKKRALIGDDVGLTSYKHRHSGLVNVPEEPIEEEEEEEEEEEEEEEEDQDMDADDRVVVEYHEELPALKQPRERSASRRSSASSSDSDEMDYDLELKMISTPSPKKSMKMTINIKNRIGNKLPPEKFADVRHLLDEKRQHSRPRPPVSSTKSVIVSISISIIPTVRNA

SEQ ID NO: 47523 - protein, 191 aa, Homo sapiens
  DOMAIN (72)..(86): F-box domain proteins domain identified by eMATRIX, accession number PF00646A, p-value=9.036e-10, raw score of 14.37
  DOMAIN (65)..(114): F-box domain identified by PFam, accession name F-box, E- value=2.3e-05, PFam score of 31.3
PVPRSRRHPSGAQSPSRNSRACPGPPVCALRSPQRPARASPAGPMRRDVNGVPKSRFEMFSNSDEAVINKKLPKELLLRIFSFLDVVTLCRCAQVSRAWNVLALDGSNWQRIDLFDFQRDIEGTVVENISKRCGGFLRKLSSRGCLGIGDNALSLGNKRKTLKKKKRKEIDPEVTEIELNNKEFKNSSYKP

SEQ ID NO: 47524 - protein, 339 aa, Homo sapiens
  DOMAIN (222)..(245): Immunoglobulins and major histocompatibility complex proteins domain identified by eMATRIX, accession number BL00290A, p-value= 6.400e-12, raw score of 20.89
  DOMAIN (24)..(198): Class I Histocompatibility antigen, domains domain identified by PFam, accession name MHC_I, E-value=1.1e-14, PFam score of 57.3
MGLGPVFLLLAGIFPFAPPGAAAEPHSLRYNLTVLSWDGSVQSGFLAEVHLDGQPFLRYDRQKCRAKPQGQWAEDVLGNKTWDRETRDLTGNGKDLRMTLAHIKDQKEGLHSLQEIRVCEIHEDNSTRSSQHFYYDGELFLSQNLETEEWTVPQSSRAQTLAMNVRNFLKEDAMKTKTHYHAMHADCLQELRRYLESGVVLRRTVPPMVNVTRSEASEGNITVTCRASSFYPRNIILTWRQDGVSLSHDTQQWGDVLPDGNGTYQTWVATRICRGEEQRFTCYMEHSGNHSTHPVPSELVSLQVLDQHPVGTSDHRDATQLGFQPLMSALGSTGSTEGT

SEQ ID NO: 47525 - protein, 369 aa, Homo sapiens
  DOMAIN (152)..(175): Immunoglobulins and major histocompatibility complex proteins domain identified by eMATRIX, accession number BL00290A, p-value= 4.789e-13, raw score of 20.89
  DOMAIN (148)..(214): Immunoglobulin domain identified by PFam, accession name ig, E-value=2.1e-05, PFam score of 22.5
MGLGPVFLLLAGIFPFAPPGAAAGEWRSWRSSAEREQRDVSGGREIRVCEIHEDNSTRSSQHFYYDGELFLSQNVETEEWTVPQSSRAQTLAMNVRNFLKEDAMKTKTHYHAMHADCLQELRRYLESSVVLRRRVPPMVNVTRSEASEGNITVTCRASSFYPRNITLTWRQDGVSLSHDTQQWGDVLPDGNGTYQTWVATRICQGEEQRFTCYMEHSGNHSTHPVPSGKVLVLQSHWQTFHVSAVAAAAAAIFVIIIFYVRCCKKKTSAAEGPGEKSGQFLEMLLMTDRFTAEQKGLGRDGGGTSGTDLQGLTLWGNICPEELEPSCDDTELKCDIREGIESAWRFSDFEESQSVRFWRKVTAGEVWTE

SEQ ID NO: 47526 - protein, 126 aa, Homo sapiens
EGGDVGAMGLGPVFLLLAGIFPFAPPGAAAGEWRSWRSSAEREQWDVSGGRVGSGERCAVRAGLLCPVGGAGSWTRPVTATLQPCFPVTFQSSSGSRITCTFWSPPALSLLASPPLPLTFRTNQSF

SEQ ID NO: 47527 - protein, 324 aa, Homo sapiens
  DOMAIN (161)..(184): Immunoglobulins and major histocompatibility complex proteins domain identified by eMATRIX, accession number BL00290A, p-value= 4.789e-13, raw score of 20.89
  DOMAIN (157)..(223): Immunoglobulin domain identified by PFam, accession name ig, E-value=2.1e-05, PFam score of 22.5
MGLGPVFLLLAGIFPFAPPGAAAEPHSLRYNLTVLSWDGSVQSGFLAEVHLDGRFRVCEIHEDNSTRSSQHFYYDGELFLSQNVETEEWTVPQSSRAQTLAMNVRNFLKEDAMKTKTHYHAMHADCLQELRRYLESSVVLRRRVPPMVNVTRSEASEGNITVTCRASSFYPRNITLTWRQDGVSLSHDTQQWGDVLPDGNGTYQTWVATRICQGEEQRFTCYMEHSGNHSTHPVPSGKVLVLQSHWQTFHVSAVAAAAAAIFVIIIFYVRCCKKKTSAAEGPELVSLQVLDQHPVGTSDHRDATQLGFQPLMSALGSTGSTEGA

SEQ ID NO: 47528 - protein, 149 aa, Homo sapiens
  misc_feature (1)...(149): Xaa = X or * as defined in Table 2
NLLCCTCSPFSSPVSAPQTCTSNCIALLVHQQQWLVSSHLQKHFLHLHIFLALIVFNFSLHSFXIFDFDPWKLPPXPISPTLSSLPSNRHIALILPCSCMTEDFDFKMPPAVARYMTSPQAVHIIAVCPFKASRKVSHSSLKIWLFKSV

SEQ ID NO: 47529 - protein, 97 aa, Homo sapiens
  misc_feature (1)...(97): Xaa = X or * as defined in Table 2
KFFSLRMLNINPHCLLACRVSAERSAVSLMGFPLCISRPFSLAALNIFSFISTLVNLMIISLGVALLEEYLCGILCISXIGMLACLARLGKFSWIIR

SEQ ID NO: 47530 - protein, 80 aa, Homo sapiens
  DOMAIN (4)..(53): Eukaryotic RNA polymerase II heptapeptide repeat proteins domain identified by eMATRIX, accession number BL00115Z, p-value= 5.963e-09, raw score of 3.12
YTPPFPMDVASDCKWLLLSSSSSSSSSSSSSSSSSSSSSSSSSSSSSSSSSSSSSSLFFFFFSLLLPLLLPLLLLLLYFK

SEQ ID NO: 47531 - protein, 44 aa, Homo sapiens
  misc_feature (1)...(44): Xaa = X or * as defined in Table 2
CLQLCSFGLGLTWXCGLFFYSTXTLKXFFPILXRMMVVFXWGLH

SEQ ID NO: 47532 - protein, 34 aa, Homo sapiens
RKTRTHARRREAQGWLGPGCLGRRVPAFSLDDGI

SEQ ID NO: 47533 - protein, 48 aa, Homo sapiens
  misc_feature (1)...(48): Xaa = X or * as defined in Table 2
LWWFNALFLCWLTSFLTTTLLELHECLPVWRDXTRRHLTGWSKGSCTN

SEQ ID NO: 47534 - protein, 141 aa, Homo sapiens
  misc_feature (1)...(141): Xaa = X or * as defined in Table 2
TPVFRFIALSYTFADSDGEYFXILLSENPQRFFKCCFNMRSNKIPWDTFANSIKGAEFSGKHFITEFISSSESESESESTRFRDFRGLETSSSLSLDSFSLLGDDFLSFLLSFTIDAVSSKRLSKEIRKARLCWRFPRIME

SEQ ID NO: 47535 - protein, 724 aa, Homo sapiens
  DOMAIN (575)..(601): G-protein coupled receptors family 2 proteins domain identified by eMATRIX, accession number BL00649C, p-value=6.143e- 09, raw score of 17.82
  DOMAIN (428)..(476): Latrophilin/CL-1-like GPS domain identified by PFam, accession name GPS, E-value=5.9e-11, PFam score of 49.8
MVNNNDKNHLKLDRRLLQPTLKKFRTAHYAPPIGEKRKYPLSKKPEVRGHAPRMRASGQLTLPKSRHPVRKQGLFGLGSRDPASPAPRAVAHASWEAASIGKGGEYYNKGTSCGTKESEEQPSSLDLPSDRAYPNEKEPENRGNMTKQDSLISPKNHTSSPAMGPNQEEIPDLSEKEFKRQGGLPGPLRVQRCLGQQLRQGNCNCTQGAPTRATEKRVGLPLAPRSRWLSGVCSPGPCLLTAWSGSFRSWALGLAIGNVRLGGHLDVEQILRTQPQVTRSRDCSPGAGTWRRRRVGRGGHVAGWVLEAGTAPTSHPGPLKRDPSSTSRAWLPRSMCKCGTAPDPVPPGDPLCLLFLARLHCSPSDYTKTCGFVVYQNDKLFQSKTFTAKSDFSQKIISSKTDENEQDQSASVDMVFSPKYNQKEFQLYSYACVYWNLSAKDWDTYGCQKDKGTDGFLRCRCNHTTNFAVLMTFKKDYQYPKSLDILSNVGCALSVTGLALTVIFQIVTRKVRKTSVTWVLVNLCISMLIFNLLFVFGIENSNKNLQTSDGDINNIDFDNNDIPRTDTINIPNPMCTAIAALLHYFLLVTFTWNALSAAQLYYLLIRTMKPLPRHFILFISLIGWGVPAIVVAITVGVIYSQNGNNPQWELDYRQEKIFLTKNVHSSRLARICKHKAFISEGSPLWLLASLFTEHRLWTPWPLPSHMSRKMRDIHILHEKGPDSY

SEQ ID NO: 47536 - protein, 60 aa, Homo sapiens; identical to SEQ ID NO: 37268

SEQ ID NO: 47537 - protein, 867 aa, Homo sapiens
  DOMAIN (110)..(151): kw TRANSCRIPTASE REVERSE II ORF2 domain identified by eMATRIX, accession number DM01354I, p-value=1.000e-40, raw score of 15.55
  DOMAIN (328)..(591): Reverse transcriptase domain identified by PFam, accession name rvt, E-value=1.5e-71, PFam score of 251.1
MGDFNTPLSTLDRSTRQKVNKDIQDLNSALHQADLIDIYRTLHPKSTEYTFFSAPHHTYSKIDHIVGSKALLSKCKRTEIITNYLSDHSAIKLDLRIKKLTENRATTWKLNNLLLNDYWVHNEMKAEIKMFFETNENKDTTYQNLWNTFKAVCRGKFIALNAHKRKQERSKIDSLTSQLKELEKQEQTHSKASRRQEITKIRAELKVIETQKAPQKISESRSWFFEKINKIDRLLARRIKKKREKNQIDAIKNDKADITTDTTEIQKNLEEMDKFLDTYTLPRLNQEEVESLNRPITGSQIEAIINSLPTKKSPGPDGFTAEFYQRYKEELHYPDNQRLVETTKKENFRPISLMNIDAKILNKILANRIQQHINKLIHHDQAGFIPGMQGWFSIHKSINVIQHINRSNDKNHMIISIDAEKAFDKIQQPFVLKTLNKLGIDGTYLKIIRAIYDKPTANIILNGQKLEAFPLKTGTRQGCPLSPLLFNIVLEVLARAIRQEKKINVIQLGKEEVKLSLFADDMIVYLENPIISAQNLLKLIRNFSKVSGYKINVQKSQAFLYTNNRQTESQIMSELPFTIASKRIKYLGIQLTRDMKDLFKEKYKPLPNKQMEEHSMLMSRKNQYCGNGNTAQELEKTTLKFIWNQKRARIAKSILSQKNKAGGITVPDFQLYYKATVTKTAWYWYQNRDIDQWNRKEPSEIMPHIYDSLIFGKPDKNKQWGKDSLFNKWCWEDWLAICRKLKLDPFLTPCTKINSRWVKDLNIRPKTIKTLEENLGNTIQDIGMAKDFMSKTPKAMATKAKIDKWDLIKLKSFCTRIAKEPTISVNRQPTEWEKMFAICSSDKGVISRIYSDLKQIYKKKITPLTSG

SEQ ID NO: 47538 - protein, 1013 aa, Homo sapiens
  DOMAIN (272)..(317): kw TRANSCRIPTASE REVERSE II ORF2 domain identified by eMATRIX, accession number DM01354N, p-value=1.000e-40, raw score of 13.17
  DOMAIN (356)..(631): Reverse transcriptase domain identified by PFam, accession name rvt, E-value=8.2e-85, PFam score of 295.2
MGDFNTPLSTLDRSTRQKVNKDTQELNSALHQADLIDIYRTLHPKSTEYTFFSAPHHTYSKIDHILGSKALLSKCKRTEIITNYLSDHSAIKLELRIKNLTQSLSTTWKLNNLLLNEYWVHNEMKAEIKMFFETNENKDTTYQNLWDAFKAVCRGKFIALNAHKRKQERSKIDTLTSQLKELEKQEQTHSKASRRQEITKIRAELKEIETQKTLQKINESRSWFFERINKIDRPLARLIKKKREKNQIDTIKNDKGDITTDPTEIQTTIREYYKHLYANKLENLAEMDKFLDTYTLPRLNQEGVESLNRPITGAEIVAIINSLPTKKSPGPDGFTAEFYQRYKEELVPFLLKLFQSIEKEGILPNSFYEASIILIPKPGRDTTKKENFRPISLMNIDAKILNKILANRIQQHIKKLIHHDQVSFIPGMQGWFNICKSINVIQHINRAKDKNHMIISIDAEKAFDKIQQRFMLKTLNKLGIDGTYFKIIRAIYDKPIANIILNGQKLEAFPLKTGTRQGCSLSPLLFNIVLEVLARAIRQEKEIKGIELGKEEVKLSLFADDMIVYLENPIVSAQNLLKLISNFSKVSGYKINVQKSQAFLYTNNRQTESQIMSELPFTIASKRIKYLGIQLTRDGKDLFKENYKPLLKEIKEDTNKWKNIPCSWVGRINIVKMAILPKVIYRFNAIPIKLPMPFFTELEKTTLKFIWNQKRARIAKSILSQKNKAGGITLPDFKLYDKATVTKTAWYWYQNRDIDQWNRTEPSEITLHTYNYLIFDKPDKNKQWGKDSLFNKWCWENWLAICRKLKLDPFLIPYTKINSRWIKDLNVRPKTIKTLEENLGITIQDIGMGKDFMSKTPKAMATKAKIDKWDLIKLKSFCTAKETTIRVNRQPTTWEKIFATYSSDKGLISRIYNELKQIYKKKTNNPIKKWAKDMNRHFSKEDIYAAKKHMKKCSPSLAIREMQIKTTMRYHLIPVRMAIIKKSGNNKCWRGCGEIGTLLHCWDMDEIGKHHSQ

SEQ ID NO: 47539 - protein, 460 aa, Homo sapiens
  DOMAIN (306)..(353): kw TRANSCRIPTASE REVERSE II ORF2 domain identified by eMATRIX, accession number DM01354V, p-value=1.000e-40, raw score of 12.97
  DOMAIN (116)..(319): Reverse transcriptase domain identified by PFam, accession name rvt, E-value=6.6e-05, PFam score of 0.0
MGDFNTPLSTLDRSKRQKVKKDIQELNSALHQVDLIDIYRTPYPKSTEYTFFSAQHHTYSKTDHIVGSKELLSKCKRTEIITNCLSDHSAIKLELRIKKLTQNRSTTWKLNNLLLNDYWVHNEMKAEIKMFFETNENKDTTYQNLRDTLKAVCRGKFVALNAHQRKQKISKIDTLTSQLKELEKQEQTHSKASRRQEITKIRAELKEIETQKTLQKINDSRSWAIRQEKEIKGIQLGKEEVQLSLFADDMIVHLENPIVSAQNLLKLIGNFSKVSGYKINVKKSQAFLYTNNRQTESQIMSEFPFTIASKRIKYLGIQLTRDVKDLFKENYKTLLNEIKEDTNKWKNIPCSWVGRINIVKMAILPKVIYRFNAISIKLPMTFFTELGKPTLKLVWNQKRVRIAKSILSQKNKAGGIMLPDFKLYYKATVTKTAWYWYQNRDIDQWNRTEPSEIMPHITTI

SEQ ID NO: 47540 - protein, 331 aa, Homo sapiens
  DOMAIN (110)..(151): kw TRANSCRIPTASE REVERSE II ORF2 domain identified by eMATRIX, accession number DM01354I, p-value=1.000e-40, raw score of 15.55
MGDFNTPLSTLDRSTRQKVNKDIQDLNSALHQADLIDIYRTLHPKSTEYTFFSAPHHTYSKIDHIVGSKALLSKCKRTEIITNYLSDHSAIKLDLRIKKLTENRATTWKLNNLLLNDYWVHNEMKAEIKMFFETNENKDTTYQNLWNTFKAVCRGKFIALNAHKRKQERSKIDSLTSQLKELEKQEQTHSKASRRQEITKIRAELKVIETQKAPQKISESRSWFFEKINKIDRLLARRIKKKREKNQIDAIKNDKADITTDTTEIQKNLEEMDKFLDTYTLPRLNQEEVESLNRPITGSQIEAIINSLPTKKSPGPDGFTAEFYQRYKEEL

SEQ ID NO: 47541 - protein, 831 aa, Homo sapiens
  DOMAIN (98)..(139): kw TRANSCRIPTASE REVERSE II ORF2 domain identified by eMATRIX, accession number DM01354I, p-value=1.000e-40, raw score of 15.55
  DOMAIN (344)..(578): Reverse transcriptase domain identified by PFam, accession name rvt, E-value=1.9e-13, PFam score of 58.1
  misc_feature (1)...(831): Xaa = X or * as defined in Table 2
RSTRQKVNKDTQELNSALHQADLIDIYRTLHPKSTEYTFFSAPHHTYSKIDHIVGSKTLLSKCKRTEIITNYLSDHSAIKLELRIKNLTQSRSTTWKLNNLLLNDYWVHNEMKAEIKMFFETNENKDTTYQNLWDAFKAVCRGKFIALNAYKRKQERSKIDTLTSQLKELEKQEQTHSKASRRQEITKIRAELKEIETQKTLQKINESRSWFFERINKIDRPLARLIKNKREKNQIDTIKNDKGDITTNPTEIQTTIREYYKHLYANKLENLEEMDTFLDTYTLPRLNQEEVESLNRPITGSEIVAIINSLPTKKSPGPDGFTAEFYQRYKEELVPFLLKLFQSIEKEGILPNSFYEASIILIPKPGRDTTKKENFRPISLMNIDAKILNKILANRIQQHIKKLIHHDQVGFIPGMQGWFNIHKSINVIQHINRAKDKNHMIISIDEEKAFDKIQQPFMLKTLNKLGDKIPRNPTYKGCEGPLQGELQTTAQGNKRGHKQMEEHSMLMGRKNQYHENGHTAQGILXIQCHPHQATNDFLHRIGKNYFKVHMEPKKSPHRQVNPKPKEQSWRHHTTXLQTILQGYSNQNSMVLVPKQRYRSMEQNRALRNNAAYLQLSDLXQPXEKQAMGKGFPIXXMVLGKLASHMXKAETGSLPYTLYKNQFKMDXRFKRXTXNHKNPRRKPRHYHSGHRHGQGLHVQNTKSNGNKSQNXQMGSNXTKELLHSKRNYHQSEQATYNMGENFHNLLIXQRANIQNLQXTQTNLQEKNKEPHQKVGEGHEQTLLKRRHLCSQKTHEKMLIITGHQRNANQNHYEISSHTSXNGNHXKVRKQQ

SEQ ID NO: 47542 - protein, 72 aa, Homo sapiens; identical to SEQ ID NO: 34627
  DOMAIN (16)..(48): kw TRANSCRIPTASE REVERSE II ORF2 domain identified by eMATRIX, accession number DM01354J, p-value=9.763e-17, raw score of 15.12

SEQ ID NO: 47543 - protein, 1063 aa, Homo sapiens; identical to SEQ ID NO: 34337
  DOMAIN (272)..(317): kw TRANSCRIPTASE REVERSE II ORF2 domain identified by eMATRIX, accession number DM01354N, p-value=1.000e-40, raw score of 13.17
  DOMAIN (212)..(466): Reverse transcriptase domain identified by PFam, accession name rvt, E-value=8.3e-07, PFam score of 27.0

SEQ ID NO: 47544 - protein, 412 aa, Homo sapiens
  DOMAIN (272)..(317): kw TRANSCRIPTASE REVERSE II ORF2 domain identified by eMATRIX, accession number DM01354N, p-value=1.000e-40, raw score of 13.17
MGDFNTPLSTLDRSTRQKVNKDTQELNSALHQADLIDIYRTLHPKSTEYTFFSAPHHTYSKIDHIVGSKALLSKCKRTKIITNCLSDHSAIKLELRIKKLTQNCSTTWKLNNLLLNDYWVCNEMKAEIKMFFETNENKDKTYQNLWDTFKAVCRGKFIALNAHKRKQERSKIDTLTSQLKELEKQEQTHSKASRRQEITKIRAELKEMETQKTLQKINESRSWFFEKINKIDRPLARLIKKKREKNQIDAIKNNKGDITTDPTEIETTIREYYKHLYTNKLENLEEMDKFLDTYTLPRLNQEEVESLNRPITGSEVVAIINSLPTKKSPGPDGFTAEFHQRYKEKLISELLPMPNHTALKKQTQDLSDCKAMFLYYQSVSVQTAIINYHRLRGLNNRNLFLTVLEYSSLRSG

SEQ ID NO: 47545 - protein, 1046 aa, Homo sapiens
  DOMAIN (272)..(317): kw TRANSCRIPTASE REVERSE II ORF2 domain identified by eMATRIX, accession number DM01354N, p-value=1.000e-40, raw score of 13.17
  DOMAIN (356)..(631): Reverse transcriptase domain identified by PFam, accession name rvt, E-value=5.8e-89, PFam score of 309.0
MGDFNTPLSTLDRSTRQKVNKDTQELNSALHQADLIDIYRTLHPKSTEYTFFSAPHHTYSKIDHIVGSKALLSKCKRTEIITNYLSDHSAIKLELRIKNLTQSRSTTWKLNNLLLNDYWVHNEMKTEIKMFFETNENKDTTYQNLWDAFKAVCRGKFIALNAYKRKQERSKIDTLTSQLKELEKQEQTHSKASRRQEITKIRAELKEIETQKALQKINESRSWFFERINKIDRPLARLIKKKREKNQIDTIKNDKGDITTDPTEIQTTIREYYKHLYANKLENLEEMDTFLDTYTLPRLNQEEVESLNRPITGSEIVAIINSLPTKKSPGPDGFTAEFYQRYKEELVPFLLKLFQSIEKEGILPNSFYEASIILIPKPGRDTTKKENFRPISLMNIDAKILNKILANRIQQHIKKLIHHDQVGFIPGMQGWFNIRKSINVIQHINRAKDKNHMIISIDAEKAFDKIQQPFMLKTLNKLGIDGTYFKIIRAIYDKPTANIILNGQKLEAFPLKTGTRQGCPLSPLLFNIVLEVLARAIRQEKEIKGIQLGKEEVKLSLFADDMIVYLENPIVSAQNLLKLISNFSKVSGYKINVQKSQAFLYTNNRQTESQIMSELPFTIASKRIKYLGIQLTRDVKDLFKENYKPLLKEIKEDTNKWKNIPCSWVGRINIVKMAILPKVIYRFNAIPIKLPMTFFTELEKTTLKFIWNQKRARIAKSILSQKNKAGGITLPDFKLYYKATVTKTAWYWYQNRDIDQWNRTEPSEIMLRIYNYLIFDKPEKNKQWGKDSLFNKWCWENWLAICRKLKLDPFPTPYTKINSRWIKDLNVRPKTIKTLEENLGITIQDIGVGKDFMSKTPKAMATKAKIDKWDLIKLKSFCTAKETTIRVNRQPTKWEKLFATYSSDKGLISRIYNELKQIYKKKTNNPIKKWAKDMNRHFSKEDIYAAKKHMKKCSSSLAIREMQIKTTMRYHLTPVRMAIIKKSGNNRKEEKGARDINKQFTEEATLMANQPMKRCLTFPAITERQTPALSPQPHGIFLVNLIKAFI

SEQ ID NO: 47546 - protein, 592 aa, Homo sapiens
  DOMAIN (231)..(276): kw TRANSCRIPTASE REVERSE II ORF2 domain identified by eMATRIX, accession number DM01354N, p-value=1.000e-40, raw score of 13.17
  DOMAIN (246)..(494): Reverse transcriptase domain identified by PFam, accession name rvt, E-value=8.8e-45, PFam score of 162.2
MGDFNTPLSTLDRSTRQKVNKDTQELNSALHQADLIDIYRTLHPKSTEYTFFSAPHHTYSNIDHIVGSKALFSKCKRTEIITNCLSDHSAIKLELRIKKLTQNHSTTWQLNNLLLNDYWVNNEMKAEIKMFFETNENKDTTDQNLWDTFKAVCRGKFMALNAHKRKQERSKMGTLTSQLKELEKQEQTHSKASRRQEITKIRAELKEIETQKPFKKLMNPGAEIQTTIREYHKHLYANKLENLEEMDKFLDTYILPRLNQEEVESLNRPVTGSEIEAIINSLPTKKSPGPYGFTAEFYQRYKEELHINRTKDKNHMIISIDAEKAFDKIQQPFMLKTLNKLGIDGTYLKILRAIYDKPTANIILNGQKLEAFHLKTGTRQGCPLSPLLFNIVLEVLARAIRQEKEIKGIQLGKEEVKWSLFADDMIVYLENPIVSTQNLFKLISNFSKVSGYKINVQKSQAFLYTNNRQTESQIMSELPFTIASKRIKYLGIQLTRDVKDLFKENYKPLLNEIKEDTNKWKNIPCSRAGRINIVKMAILPKVIYRFSAIPIKLPMTFFTELEKTKVHMEPKKSPHCQVNPKPKAQSWRHHTT

SEQ ID NO: 47547 - protein, 1043 aa, Homo sapiens; identical to SEQ ID NO: 45120
  DOMAIN (272)..(317): kw TRANSCRIPTASE REVERSE II ORF2 domain identified by eMATRIX, accession number DM01354N, p-value=1.000e-40, raw score of 13.17
  DOMAIN (356)..(631): Reverse transcriptase domain identified by PFam, accession name rvt, E-value=7.2e-87, PFam score of 302.0
  misc_feature (1)...(1043): Xaa = X or * as defined in Table 2

SEQ ID NO: 47548 - protein, 1108 aa, Homo sapiens; identical to SEQ ID NO: 40447
  DOMAIN (272)..(317): kw TRANSCRIPTASE REVERSE II ORF2 domain identified by eMATRIX, accession number DM01354N, p-value=1.000e-40, raw score of 13.17
  DOMAIN (356)..(631): Reverse transcriptase domain identified by PFam, accession name rvt, E-value=2.6e-81, PFam score of 283.5

SEQ ID NO: 47549 - protein, 1048 aa, Homo sapiens
  DOMAIN (110)..(151): kw TRANSCRIPTASE REVERSE II ORF2 domain identified by eMATRIX, accession number DM01354I, p-value=1.000e-40, raw score of 15.55
  DOMAIN (356)..(631): Reverse transcriptase domain identified by PFam, accession name rvt, E-value=2.7e-88, PFam score of 306.8
MGDFNTPLSTLDRSTRQKVNKDTQELNSALHQADLIDIYRTLHPKSTEYTFFSAPQHTYSKIDHILGSKALLSKCKRTEIITNYLSDHSAIKLELRIKNLTQNRSTTWKLNNLLLNDYWVHNEMKAEIKMFFETNENKDTTYQNLWDTFKAVCRGKFIALNAHKRKQERSKIDTLTSQLKELEKQEQTHSKASRRQEITKIRAELKEIETQKTLQKINESRSWFFERINKIDRPLARLMKKKREKNQIDAIKNDKGDITTNPTEIQTTIREYYKHLYANKLEHLEEMDKFLNTYTLPRQNQEEVESLNRPITGSEIVAIINSLLTKKSPGPDGFTAEFYQRYKEELVPFLLKLFQSIEKEGILPNSFYEASIILIPKPGTDTTKKENFRQISLMNIDVKILNKILANRIQQHIKKLIHHDQVGFIPGMQGWFNIRKSINVIQHINRAKDKNHMIISIDAEKAFDKIQQPFMLKTLNKLGIDGTYFKIIRAIYDKPTANIILNGQKLEAFPLKTGTRQGCPLSPLLFNIVLEVLARAIRQEKEIKGIQLGKEEVKLSLFADDMIVYLENPIVSAQNLLKLISNFSKVSGYKINVQKSQAFLYTNNRQTESQIMGELPFTIASKRIKYLGIQLTRDVKDLFKENYKPLLKEIKEDTNKWKNIPCSWVGRINIVKMAILPKVIYRFNAIPIKLPMTFFTELEKTTLKFIWNQKRARITKSILSQKNKAGGITLPDFKLYYKATVTKTAWYWYQNRDIDQWNRTEPSEIMPHIYNYLIFDKPEKNKQWGKDSLFNKWCWENWLAICRKLKLDPFLTPYTKINSRWIKDLNVRPKTIKTLEENLGITIQDIGVGKDFMSKTPKAMATKDKIDKWDLIKLKSFCTAKETTIRVNRQPTTWEKIFATYSSDKGLISRIYNELKQIYKKKTNNPIRKWAKDMNRHFSKEDIYAAKKHMKKCSSSLAIREMQIKTTMRYHLTPVRMAIIKKSGNNSQVEHSGGPELNIASSKVTTARTAKATPAQHREGSQADFLEQLPRESAQCDGERAPRVEHLP

SEQ ID NO: 47550 - protein, 243 aa, Homo sapiens
  DOMAIN (112)..(153): kw TRANSCRIPTASE REVERSE II ORF2 domain identified by eMATRIX, accession number DM01354I, p-value=1.000e-40, raw score of 15.55
  misc_feature (1)...(243): Xaa = X or * as defined in Table 2
MIMGDFNTPLSTLDRSTRQKVNKDIQELNSALHQADLIDIYRTLHPKSTEYTFFSASHLTYSKIDHIVGSKALLSNCKRTEIITNYLSDHSAIKLELKIKKLTPNRSTTWKLNNLLLNDYWVHNEMKAEIKMFFETNENKDTTYQNLWDTFKAECRGKFIALNAHKRKQERSKIDTLTSQLKELEKQEQTHSKASRRQEITKIRAELKEMETQKTLQKINESRGWKKFLEKLCFIELSXARRI

SEQ ID NO: 47551 - protein, 1076 aa, Homo sapiens; identical to SEQ ID NO: 45268
  DOMAIN (110)..(151): kw TRANSCRIPTASE REVERSE II ORF2 domain identified by eMATRIX, accession number DM01354I, p-value=1.000e-40, raw score of 15.55
  DOMAIN (356)..(631): Reverse transcriptase domain identified by PFam, accession name rvt, E-value=8.3e-88, PFam score of 305.1

SEQ ID NO: 47552 - protein, 401 aa, Homo sapiens; identical to SEQ ID NO: 38231
  DOMAIN (110)..(151): kw TRANSCRIPTASE REVERSE II ORF2 domain identified by eMATRIX, accession number DM01354I, p-value=1.000e-40, raw score of 15.55

SEQ ID NO: 47553 - protein, 328 aa, Homo sapiens
  DOMAIN (110)..(151): kw TRANSCRIPTASE REVERSE II ORF2 domain identified by eMATRIX, accession number DM01354I, p-value=1.000e-40, raw score of 15.55
MGDFNTPLSTLDRSTRQKVNKDTQELNSALHQADLIDIYRTLHPKSTEYTFFSAPHHTYSKIDHILGSKALLSKCKRTEIITNYLSDHSAIKLELRIKNLTQSCSTTWKLNNLLLNDYWVHNEMKAEIKMFFETNENKDMTYQNLWDTFKAVCRGKFIALNAHKRKQERSKIDTLTSQLKELEKQEQTHSKASRRQEITKIRAELKEIETQKAIQKINESRSWGPPGNCQQNYRNSESGEKSAPEGQAQHAGPTEGKVPTFLYVGKEKFPPSYLLTRKSSHLPTCGDPICGEKCWRVPTTSGQGNKADQWGGVGIGDTDHDSAGTLCQ

SEQ ID NO: 47554 - protein, 1056 aa, Homo sapiens
  DOMAIN (110)..(151): kw TRANSCRIPTASE REVERSE II ORF2 domain identified by eMATRIX, accession number DM01354I, p-value=1.000e-40, raw score of 15.55
  DOMAIN (288)..(486): Reverse transcriptase domain identified by PFam, accession name rvt, E-value=3.6e-09, PFam score of 43.9
  misc_feature (1)...(1056): Xaa = X or * as defined in Table 2
MGDFNTPLSTLDRSMRQKVKKDTQELNSALHQADLIDIYRTLHPKSTEYTFFSAPHHTYSKIDHILGSKALLSKCKRTEIITNYLSDGSAIKLELRIKNLTQNRSTTWKLNNLLLNDYWVPNEMKAEIKMFFETNENKDTTYQNLWDTFKAVCRGKFIALNAHKRKQERPKIDTLTSQLKELEKQEQTHSKASRRQEITKIRAELKEIETQKTLQKINXSQSWFFERVKKIDRPLARLIKKKREKNQIDTIKNDKGDITTNPTEIQTTIREYYKHLYANKLENLEEMDKFLDTYTLPRLNQEEVESLNRPITGSEIVAIINSLPTKKSPGPDGFTAKFYQRYKEELHINRAKDKNHMIISIDAEKAFDKIQQRFMLKTLNKLVLEVLARAIRQEKEIKGIQLGKEEVKFSLFADDMIVYLENPIVSAQNLLKLISNFSKVSGYKINVQKSQAFLYTNNRQTESQIMSELPFIIASKRIKYLGIQLTRDVKDLFKENYKPLLKEIKEDTNKCKNIPCSWVGRINIVKMAILPKVIYRFNAIPIKLPMPFFTELEKTTLKFIWNQKRARIAKSILSQKNKAGGIMLPDFKPYYKATVTKTAWYWYQKRDIDQWNRTEPSEITPHIYNYLIFDKPEKNKQWGKDSLFNKWCWENWLAICRKLKLDPFLTPYTKINSRWIKDLNVRPKTIKTLEENLGNTIQDIGMGKDFMSKTPKAMATKDKIDKWDLIKLKSFCTAKETTIRVNRQPTKWEKIFTTYSSDKGLISRIYNELKQIYKKKTNNPIKKWAKDMNRHFSKEDIYTAKRHMKKCSSSLAIREIQIKPTMRYYLTPVRMAIIKKSGNNRAECGWSIVEGPPKVNIVTPLQDAIEQDEENNDKHVAVTEAESVPDSQAGVMCKLQERDEIGRIELVQKLAKENYQFLQTDKKEQEKSEHGEWMYLRVSAEGNNHHIWNKEQQKAVAFQLAHFSFWSLEVYTSWRVRFAGSESSPHTVECITLDLLSSCSEWDAASGKHRQEIRGWKERKNESPCMAFPNQTGHPELKTGYARTFDSHFGLDLPVA

SEQ ID NO: 47555 - protein, 715 aa, Homo sapiens
  DOMAIN (443)..(488): kw TRANSCRIPTASE REVERSE II ORF2 domain identified by eMATRIX, accession number DM01354N, p-value=1.000e-40, raw score of 13.17
  DOMAIN (458)..(683): Reverse transcriptase domain identified by PFam, accession name rvt, E-value=3.6e-25, PFam score of 97.1
MEDQVNEMKQEEKFREKRIKRNEQSLQEIWDYVKRPNLCLIGVPESDGENGTKLENTLQDIIQENFPKLARQANIQIREIQRMPQRYSSRRATPRLIIVRFIKVAIKEKMLRAAREKGRVTHKGKPIRLTADLSAETLQARRQWGPIFNILKEKNFQPRISYPAKLSFISEGEIKSFTDKQTTDQRRQKVNKDIQELNSALHQVDLIHIYRTLHPKSTEHTFFSAPCRTYSKIDHIVGSKGLLSKCKRTEIITNCLSDHSAIKLELRIKKLTQNCSTTWKLNNLLLNAYWVHNEMKAEVKMLFETNENKDTTYQNLWDTFKAVWRGKFIALNAHKRKQERSKIDTLTSQLKELEKQEQTHSKASRRQEITKIRAELKEIETQKTLEKINESRSWFFEKIKKIDKPLARLIKKKREKNQIDAIKNDKGDITTNPTEIQITIREYYKHLYANKLENLEEMDKFLDTYTLPRLNQQKVESLNRPTTGSEIEAIINSLPTKKGPDQMDSQLNSTRDAEKAFDKIQQSFMLKTLNKLGIDGMYLKIIRAVYDKPTASIILNGQKLEAFPLKTDTRQGCPLSPLLLVLEVLARAIRQEKEIKGIQLGKEEVKLSLFAYDVIVYLENPTVSAQNLLKPIGNFSKVSGYKINVQKSQAFLYTNNRQTESRIMSELPFTIASKRVKYLGIQLTRDMKDLFKENYKPLLNEIKEDTNKRKNIPCS

SEQ ID NO: 47556 - protein, 472 aa, Homo sapiens
  DOMAIN (246)..(287): kw TRANSCRIPTASE REVERSE II ORF2 domain identified by eMATRIX, accession number DM01354I, p-value=1.000e-40, raw score of 15.55
  DOMAIN (24)..(232): AP endonuclease family 1 domain identified by PFam, accession name AP_endonucleas1, E-value=2.2e-06, PFam score of -19.4
MELKTTARELRHECTRLSSRCDQLEERVSAMEDEMKEMKQEEKFREKRIKRNEQSLQEIWDYVKRPNLHLIGVSESDRENGTKLENTLQDIIQENFPNLARQANIQIQEIQKTPQRYSSRRATPRHIIIRFTKVEMKEKMLRAAREKDRSKRQKVNKDIQESNSPLHQADLIDIYRTLRPKSTEYTFFSAPHHTYSKIDHIVGSKALLSKCKRTEIITNCLSDHSAIKLEFRIKKLIQNHSTTWKLNNLLLNDYWVHNEMKAEIKMFFETNENKDTTYQNLWDTVKAVCRGKFIALNAHKRKQERSKIDTLTSQLKELEKQEQTHSKASRRQEITKIRAELKEIETQKTLQKINESRSWFFEKINKIDRPPARLIKKKREKDQIDAIKNDKGDITTDPTEIQTTIREYYKHLYANKPENLEEGDVEQELVPCGYRTEAGSFLETSHNSLEHRAIIKWIITDKSVQRGMMSTF

SEQ ID NO: 47557 - protein, 1033 aa, Homo sapiens; identical to SEQ ID NO: 44316
  DOMAIN (272)..(317): kw TRANSCRIPTASE REVERSE II ORF2 domain identified by eMATRIX, accession number DM01354N, p-value=1.000e-40, raw score of 13.17
  DOMAIN (356)..(631): Reverse transcriptase domain identified by PFam, accession name rvt, E-value=4e-87, PFam score of 302.9
  misc_feature (1)...(1033): Xaa = X or * as defined in Table 2

SEQ ID NO: 47558 - protein, 1115 aa, Homo sapiens; identical to SEQ ID NO: 36443
  DOMAIN (323)..(369): kw TRANSCRIPTASE REVERSE II ORF2 domain identified by eMATRIX, accession number DM01354O, p-value=1.000e-40, raw score of 8.73
  DOMAIN (356)..(631): Reverse transcriptase domain identified by PFam, accession name rvt, E-value=3.2e-86, PFam score of 299.8

SEQ ID NO: 47559 - protein, 1041 aa, Homo sapiens
  DOMAIN (110)..(151): kw TRANSCRIPTASE REVERSE II ORF2 domain identified by eMATRIX, accession number DM01354I, p-value=1.000e-40, raw score of 15.55
  DOMAIN (356)..(631): Reverse transcriptase domain identified by PFam, accession name rvt, E-value=9.2e-89, PFam score of 308.3
MGDFNTPLSTLDRSTRQKVNKDTQELNSALHQADLIDIYRTLHPKSTEYTFFSAPHHTYSKIDHILGSKALLSKCKRTEIIANYLSDHSAIKLELRIKNLTQNRSTTWKLNNLLLNDYWVHNEMKAEIKMFFETNENKDTTYQNLWDAFKAVCRGKFIALSAHKRKQERSKIDTLTSQLKELEKQEQTHSKASRRQEITKIRAELKEIETQKTLQKINESRSWFFERINKIDRPLARLIKKKREKNQIDAIKNDKGDITIDPTEIQTTIREYYKHLYANKLENLEEMDKFLDTYTLPRLNQEEVKSLNRPITGAEIVAIINSLAIKKSPGPDGFTAEFYQRYKEELVPFLLKLFQSIEKEGILPNSFYEASIILIPKPGRDTTKKENFRPISLMNIDAKILNKILANRIQQHIKKLIHHDQVGFIPGMQGWFNIHKSINVIQHINRARDKNHMIISIDAEKAFDKIQQPFMLKTLNKLGIDGTYLKIIRAIYDKPTANIILNGQKLEAFPLKTGTRQGCPLSPLLFNIVLEVLARAIRQEKEIKGIQLGKEEVKLSLFADDMIVYLENPIVSAQNLLKLISNFSKVSGYKINVQKSQAFLYTNNRQTESQIMSELPFTIASKRIKYLGIQLTRDVKDLFKENYKPLLKEIKEDTNKWKNMPCSWVGRINIVKMAILPKVIYRFNAIPIKLPMAFFTELEKTTLKFIWNQKRARIAKSILSQKNKAGGITLPNFELYYKATVTKTAWYWYQNRYIDQWNRTEPSEITPHIYNYLIFDKPGKNKQWGKDSLFNKWCWENWLAICRKLQLDPFLTPYTKINSRWIKDLNVRPKTIKTLEEDLGITIQDIGMGKDFMSKTPKAMATKDKIDKWDLIKLKSFCTAKETTIRVNRQPTKWEKIFATYSFDKGLISRIYNELQQIYKKKTNNPIKKWAKDMNRHFSKEDIYAAKKHMKKYSSSLAIREMQIKTTMRYHLTPVRMATIKNSGNNRSLCFYKENLSLCLAILLSVPVQEGGARSFLAPAGGVAGRATSHYGGHMATAERL

SEQ ID NO: 47560 - protein, 706 aa, Homo sapiens
  DOMAIN (283)..(329): kw TRANSCRIPTASE REVERSE II ORF2 domain identified by eMATRIX, accession number DM01354O, p-value=1.000e-40, raw score of 8.73
  DOMAIN (316)..(563): Reverse transcriptase domain identified by PFam, accession name rvt, E-value=1.6e-68, PFam score of 241.0
MGDFNTTLSTLERSARQKVNKDIQELNSGLHQADLIDIYKTVKPKSTEYTFFSGPHRTYSKIDHIVGSKALLSKRKRTEIITNCLSDHSAIKLELRIKKLTQNRSTTWKLNNLFLNDYWVHNKMKAEIKMFFETNENKDTTYQTLWDTFKAVCRGKFIALNAHKRKQERSKIDTLTSQLKELEKQEQTHSKVSRRQEITKIRAELKEIETQKNPSKKSMNPGAEIQATIREYYKHLYANKLENLEEIDKFLDTYTLPRLNQEEAESLNRQITGSEIEAIINSLPTKKSPGPDGFTAEFYQRDKEELVPFLLKLFQSIEKEGILPNSFYEASIILIPKPGRETTKKENFRPISLMNIDAKILNKILANRIQQHIKKLIHHDQVDFIPGMQGWFNICKTINIIQHINRTKDKNHTIISLDAEKAFDKIQQPFMLKTLNKLGIDGTYLKIIRTIYDKPTANIIPNGQKLEAFPLKTGTRQGCPLSTLLFNIVLEVLARAIRQEKEIKAQNLLKLIGNFSKVSGYKINVQKSQAFLYTNNRQTESQIMSELPFTIASKRIKYLGIQLTRDVKDLFKENYKPLLKEIKEDTNKWKNIPCSWVGRINIVKMATLSKVIYRFNAIPIKLPMTFFAELEKTTLKFIWNQKRARIAKSILSQKNKAGGIELPDFKLYYKAMAPECDITLPVSMWKSSFSANYRKDKKPNTACSYS

SEQ ID NO: 47561 - protein, 1042 aa, Homo sapiens
  DOMAIN (277)..(322): kw TRANSCRIPTASE REVERSE II ORF2 domain identified by eMATRIX, accession number DM01354N, p-value=1.000e-40, raw score of 13.17
  DOMAIN (361)..(636): Reverse transcriptase domain identified by PFam, accession name rvt, E-value=2.6e-83, PFam score of 290.2
TWKGTTSTSRCKIMPKYRSTRQKVNKDTQELNSALHQADLIDIYRTLHTKSTEYTFFSAPHHTYSKIDHIVGSKALLSKCKRTEIITNYLSDHSAIKLELRIKNLTQSRSTTWKLNNLLLNDYWVHNEMKAEIQMFFETNENKDTTYQNLWDAFKAVCRGKFIALNAHKRKQERSKIDTLTSQLKELEKQEQTHSKASRRQEITKIRAEVKEIETQKTLQKINESRSWFFERINKIDRPLARLIKKKREKNQIDAIKNVKGDITTDPTEIQTTIREYYKHLYANKLENLEEMDKFLDTYTLPRLNQEEVESLNRPITGAEIVAIINGLPTKKSPGPDGFTAGFYQRYKEELVPFLLKVFQSIEKEGILPNSFYEASIILIPKPGRDTTKKENFRPISLMNIDAKILNKILANQTQQHIKKLIHHDQMGFIPGMQGWFNIRKSINVIQHINRAKDKNHMIISIDAEKAFDKLQQPFMLKTLSKLGIDGTYFKIIRGIYDKPTANIILNGQKLEAFPLKTGTRQGCPLSPLLFNIVLEVLARAIRQEKEIKGIQLGKEEVKLSLFADDMIVYLENPIVSAQNLLKLISNFSKVSGYKINVQKSQAFLYTNNRQTESQIMSELPFTIASKRIKYLGTQLTRDVKDLFKENYKALLKEIKEDTKKWKNIPCSWVGRINIVKMAILPKVIYRFNAIPIKLPMTFFTELEKTTLKFIWNQKRARIAKSILSQKNKAGGITLPDFKLYYKATVTKTAWYWYQNRDIDQWNRIEPSEITPHTYNYLIFDKPEKNKQWGKDSLFNKWCWENWLAICRKLKLDPFLTPYTKINSRWIKDLNVRPKTIKTLEENLGITIQDIGVGKDFMSKTPKAMATKAKIGKWYLIKLKSFCTAKETTIRVNRQPTTWEKIFATYSSDKGLISRIYNELKQIYKKKTNNPIKKWAKDMNRHFSKEDIYAAKKYVKKCSSSLAIREMQIKTTMRYHLTPVRMAIIKKSGNNSDLYLMSAGTSCLMGRHWDSGQETCVQNVVLDTCSPSEQLLRAIADLVPQP

SEQ ID NO: 47562 - protein, 915 aa, Homo sapiens
  DOMAIN (110)..(151): kw TRANSCRIPTASE REVERSE II ORF2 domain identified by eMATRIX, accession number DM01354I, p-value=1.000e-40, raw score of 15.55
  DOMAIN (356)..(559): Reverse transcriptase domain identified by PFam, accession name rvt, E-value=5.1e-12, PFam score of 53.3
MGDFNTPLSTLDRSTRQKVNKNIQDLNSALHQADLIDIYRTLHPKSTEYTFSSAPHRTYSKIDHIVGSTTLLSKCKRTEITTNYLSDHSAIKQELRIKKLTQNRSTTWKLNNLLLNDYWVNNEMKAEIKMFFETNENKDTTYQNLWDTFKAVCGGKFIALNAHKTKQERSKMDTLTSQLKELEKQEQTHSKARRRQEITKIRAELKEIETQKNLQKINESRSWFSEKINKIDRLLARLIKKKREKNQIDTIKNDKGDITTDPTEIQTTMREYYKHLYTNKLENPEEMDKFLDTYTLPRLNQEEAESLNRPITGSEIEAIINSLPTKKGPGPDEFTAKFYQRYKEELVTFLLKLFQSIEKEGILPNSFYEASIILTPKPGRDTTKKENFRPISLMNIDAKILNKILAKRIQQHIKKLIHHDQVGFIPGMQGWFNIRKSINVIQHINRAKDKNHMIISIDAEKAFDKIQQPFMLKTLNKLELEETTVKFIWNQKRAHIAKSILSQKNKAGGITLRDFKLYYKATVTKTAWYWYQNRDIDQWNRTEPSEITLHIYNYLIFDKPEKNKQWGTDSLFNKWCWENWLAICRKLKLDPFLTPYTKINSRWIKDLNVRPKTIKTLEENLGITIQDIGMGKDFMSKTPKAMATKAKIDKWDLIKLKSFCTAKETTIRVNRQPTKWEKIFTTYSSDKGLISRIYNELKQIYKKKTNNPIKKWAKDMNRHFSEEDIYAAKKHMKKCSSSLAIREMQIKTTMRYHLTPVRMAIIKKSGNNRCWRGCGEIRTLLHCWWDCKLVQPLWKSVWRFLRDLELEIPFDPAIPLLGIYPNDYKSCCYKDTCTRMFIAALFTIAKTWNQPKCPTMIDWIKKMWHIYTMEYYAAIKNDEFMSFVGTWMKLEIIILSKLSQEQKTKHRIFSLIGGN

SEQ ID NO: 47563 - protein, 1015 aa, Homo sapiens
  DOMAIN (329)..(374): kw TRANSCRIPTASE REVERSE II ORF2 domain identified by eMATRIX, accession number DM01354N, p-value=1.000e-40, raw score of 13.17
  DOMAIN (416)..(597): Reverse transcriptase domain identified by PFam, accession name rvt, E-value=2.6e-25, PFam score of 97.5
MTVKVRITVTSGKKPPWLIPRQTGYGVDLWQTPTDLQLRVLTVRRKTNKQKGHPHQNPICTSPSSKTKDRSTRQKVNKDIQELNSALHQEDLIDIYRTLHPKSTEYTFFSAPHHTYSKIDHIVGSKALLSKWKRTEITANCLSDHSAIKLELRIKKLTQNWSATWKLNNLLLNDCWVHKEMKAEIKMFFETKENKDTTYQNLWDAFKAVCRGKFIALNAHKRKQERSKIDTLTSQLKELEKQEQTHSKASRRQEITKIRAELKEIETQKTLQKINESRSWFFERINKIDRPLARLIKKKREKNQIDTIKNDKGDITTDPTEIQTTIREYYKHLYANKLENLEQMDAFLDTYTLPRLNQEEVESLNRPITGAEIVAIINSLPTKKSPGPDGFTAEFSQRYKEELVPFLLKLFQSIEKEGILPNSFYEASIILIPKPGRDTTKKENFRPISLMNIDAKILNKILANRIQQHIKKLIHHDQVGVIPGMQGWFSIRKSINVIQHINRAKDKNHMIISIDAEKAFDKIQQPFMLKTLNKLAQNLLKLISNFSKVSGYKINVQKSQAFLYTNNRQTESQIMSELPFTIASKRIKYLGIQLTRDVKDLFKENYKPLLKEIKEDTNKWKNIPCSWVGRINIVKMAILPQVIYRFNAIPIKLPMTFFTELEKTTFKFIWNQKRARIAKSILSQKNKAGGITLPDFKLYYKATVTKTAWYWYQNRDIDQWNRTEPSEITPLTYNYLIFDKPDKNKQWGKDSLFNKWCWENWLAICRKLKLDPFLMPYTKINSRWIKDLNIRPKTIKTLEENLGITIQDIGMGKDFMSKTPKAMATKAKIDKWDLIKLKSFCTAKETTIRVNRQPTTWEKIFATYSSDKGLIARIYNELKQIYKKKTNNPIKKWAKDMNRHFSKEDIYAAKKHMKKCSSSLAIREMQIKTTMRYHLTPVRMAIMKKSGNNRCWRGCGEIGTLLHCWWDCKLVQPLWKSVWRFLRDLELEIPFDPAIPLLGIYPKDYKSCCYKDTCT

SEQ ID NO: 47564 - protein, 1364 aa, Homo sapiens
  DOMAIN (880)..(905): 7 kw REVERSE TRANSCRIPTASE RNA POLYMERASE domain identified by eMATRIX, accession number DM00895E, p-value=4.931e-10, raw score of 15.72
  DOMAIN (173)..(1094): Reverse transcriptase domain identified by PFam, accession name rvt, E-value=6.9e-65, PFam score of 229.0
PLSTLDRSTRQKVNKDIQELNSALHQVDLIDIYRTLHPKSTEYTFFSVPHHNYSKIDHIVGSKALLSKCKRTEIITNCLSDYNAIKLELRTEKLTQNRSTTWKLNNPLLNDYWVHKEMKAEIKMFFETNENKDTTYQNLWDAFKAVCRGKFIALNAHKRKQERSKIDTLTSQLKELEKQEQTHSKATRRQEITKTRAELKKIETQKTLQKINESRSWFFEKTNKIDRLLATLIKKKREKNQIGARKNDEGAITTNPTEIQTTIREYYKHLYTNKLENLEEMDKFLDTYTLPRPNQEEVELLTSPIRGSEIEAIINSLPTKKKSRTRWLHSRILPEVQGGTGTIPSDRAIRQEKEIKGIQLGKEEVKLSPFADDMIVYLENPIVSAQNLLKLISNFSKVSGYKINVQKSQAFLYSNKRQTENQIMSELPFTIASKRIKYLGIQLTRDVKDLFKENYKPLLNEIKEDKNKWKNIPCSRVGRINIVKMAILPKVIYRFKFPLTTDQENVVRLTRQKVNKGIQELNSALPRVDLIDIYRTLQPKSTEYTFFSVPHHNYSKIDHIVGSKALLSKCKRTEIITNCLSDHSAIKLELRIKKHTQNRSTTWKLNNLLLNDYWVHNKMKAEIKMFFETNENKDTTYQNLWDTFKAVCRGKFIALNAHKRKQERSKIDTLTSQLKELEKQEQTHSKASRRQQITKIRAELKEIETQKTLQKINESRSWFFERINKIDRPLARLIKKKREKNQIDAIKNDKGDITTDPTEIQTTIREYYKHLYANKLENLEEMDKFLHTYTLPRLNQEEVESLNRPITGSEIVAIINSLPTKKSPGPDGFTAEFDQRYKEELVPFLLKLFQSIEKEGILPNSFYEASIILIRKPGRDTTKKENFRPISLMNTDAKILNKILAKRIQQHIKKLIHHDQVGFIPGMQGWFNIHKSINVIQHINRAKDKNHMIISIDAEKAFDKIQQPFMLKTLSKLGIDGTYFKIIRAIYDKPTANIILNGQKLEAFPLKTGTRQGCPLSPLLFNIVLEVLARAIRQEKEIKLISNFSKVSGYKINVQKSQAFLYTNNRQTESQIMSQLPFTIASKRIKYLGIQLTRDVKDLFKENYKPLLKEIKEDTNKWKNIPCSWVGRINIMKMAILPKVIYRFNAIPIKLPMTFFTELEKTTFKFIWNQKRARITKSILSQKNKAGGITLPDFKLYYKATVTKTAWYWYQNRDIDQWNRTEPSEIMLHIYNYLIFDKPEKNKQWGKDSLFNKWCWENWLAICRKLKLDPFLTPYTKINSRWIKDLNVRPKTIKTLEENLGITIQDIGIGKDFMSKTPKAMATKAKIDKWDLIKLKSFCTAKETTIRVNRKPTEREKIFATYSS

SEQ ID NO: 47565 - protein, 1078 aa, Homo sapiens
  DOMAIN (285)..(326): kw TRANSCRIPTASE REVERSE II ORF2 domain identified by eMATRIX, accession number DM01354I, p-value=1.000e-40, raw score of 15.55
  DOMAIN (453)..(711): Reverse transcriptase domain identified by PFam, accession name rvt, E-value=2.4e-47, PFam score of 170.7
MANKNNQCREVLKGPDELKTMAREPHDKCTSFSSQFDQLEERVSAMEDQMNEMKREEKFREKRIKRNEQRLQEIWDYVKRPNLCLIGVPESDGENGTKLENTLQDIIQENFPNLARQANIQIQEIQRMPQRYSLRRTTPRHIIVRFTKVEMKEKMLRAAREKGRVTHKGKPIRLTADLSAETLQARRESTRQKVNKDIQELNSAQHQADLTDNYRTLHPKSTEYTLFSAPHHTYSKIDHIVGSKALLSKCKRTEIITNCLSDHSAIKLELRIKKLTQNLSTTWKLNNLLLNDYWVHNEMKAEIKMLFETNENKDTTYQNLWDTFKAVCRGKYIALNAHKRKQERSKIDTLTSQLKELEKQEQSHSKASRRQEITKIRAELKEIETQKTLQKIINESRSWIFEKINKIDRPLAKLIKKKREKNQIDAIKNDKGDIITDPTEIQTTIREYYKHLYTNKLENLEEMDKFLNTYTLPRLNQEEIESLNRPITGSEIEAIINSLPTKKSPGPDGFTAEFYQRYKKELHINRTKDKNHIIISIDAEKAFDKIQQPFMLKTLNNLGIDGTYLKIIRAIYDKPTANIILNGQKLEAFPLKTGTRQGCPLSPLLFNIVLEVLARAIRQEKEIKGIQLGKEEVKLSLFADDMIVYLENPIVSAQNLLKLISNFSKVSGYKINVQKSQAFLYINNRQTESQIMSELPFTIASKRIKYLGIQLTRDVKDLFKENYKPLLKEIKEDTNKWKNIPRSWVGRINIVKMAILPKVIYRFNAIPIKLPMPFFTEMEKTTLKFIWNQKRARIAKSILSQKDKAGSITLPDFKLYYKATVTQTAWYWYQNRDIDQWNRTEPSEITLHTYNYLIFDKPEKNKQWGKDSLFNKWCWENWLAICRKLKLDPFLTPYTKINSRWIKDLNVRPKTIKTLEENLGITIQDIGVGKDFMSKTPKAMATEAKIDKWDLIKLKSFCTAKETTIRVNRQPTTWEKIFATYSSDKGLISRIYNELKQIYKKKTNNPIKKWAKDMNRHFSKEDIYAAKKYMKKCSSSLAIREMQIKTTMRYHLTPVRMAIIKKSGNNRDMDEIGNLHSQ

SEQ ID NO: 47566 - protein, 1129 aa, Homo sapiens
  DOMAIN (188)..(229): kw TRANSCRIPTASE REVERSE II ORF2 domain identified by eMATRIX, accession number DM01354I, p-value=1.000e-40, raw score of 15.55
  DOMAIN (418)..(687): Reverse transcriptase domain identified by PFam, accession name rvt, E-value=1.2e-69, PFam score of 244.8
MLTLNHNRLTDAILNISTCLSRHLDLNTGGKKRISYKRNYLMEEHLEGLCSNEFTWENSTIMTDSQMLMHREEPGSLPNIPILSIVFTNNRSKRQKVNKDIQELNSALHQADLIDIYRTLHPKSTEYTFFSAPHHTYSKTDRIVGSKALLSKCKRTEIITNCLSDHSAIKLELRIKKLTQNCSTTWKLNNLLLNDYWVHNEMKAEIKMFFETNENKDTTYQNLWDTFKAVCRGKFIALNAHKRKQERSKIDTLTSQLKELEKQEQTHSKASRRQEITKIRAELKEIETQKTLQKINESRSWFFETINKIDRPLARLIKKKREKNQIDAIKNDKGDITTDPTEIQTTIREYYKHLYANKLENLEEMDKFLDTYTLPRLNQEEVESLNRPITGAEIVAIINSLPTKKSPGPDGFTAEFYQRYKEELIILIPKPGRDTTKKENFRPISFMNIDAKILNKILANQIQQHIKKLIHHDQVGFIPGMQGWFNIRKSINVIQHTNRTKDKNHMIISIDAEKAFDKIRQPFMLKTLKKLGIDGTYLKIIRAIYDRPTANIILNGQKLEAFPLKMGTRQGCPLSPLLFNIVLEVLARAIRQEKEIKCIQLGKEKVKSSLFADDMTVYLENPIISAQNLLKVISNFSKVSGYKINVQKSQPFLYTNNRQTESQIMSELPFTIASKRIKYLGIQLTRDVKDLFRENYKPLLKEIKEDTNKWKNIPRSWVGRINMVKMAILPKVIYRFNAIPIKLPMTFFTELEKTTLKFIWNQKRARITKSILSQKNKAGGITLPDFKLYYKITVTKTAWYWYQNRDIDQWNRTEPSEIMPHTYNYLIFDKPEKNKQWGKDSLFNKWCWENWLAICRKLKLDPFLTPYTKINSRWIKDLNVRPKTIKTLEENLGMTFQDIGMGKDFMSKTPKAMATKAKIDKWDLIKLKSFCTAKETTIRVNRQPTKWEKIFATYSSDKGLISRIYNELKQIYKKKTNNPIKKWAKDMNRHFSKEDIYAAKKHMKKCSSSLAIREMQIKTTMRYHLTLVRMAIIKKSGNNSKARMISAENCSPKLTEKIELSDWNSPNIQTCTDPLFLCPTERAVTLTVKVCGFTPEVIETTNPPGGTNNSGRDTLKSCNTHCEGLRLHS

SEQ ID NO: 47567 - protein, 583 aa, Homo sapiens
  DOMAIN (336)..(379): kw TRANSCRIPTASE REVERSE II ORF2 domain identified by eMATRIX, accession number DM01354T, p-value=1.000e-40, raw score of 9.48
  DOMAIN (183)..(458): Reverse transcriptase domain identified by PFam, accession name rvt, E-value=6e-46, PFam score of 166.1
MENGFDELREEGFRRSNYSELQEEIQTKGKEVKNIEKNLDECITRIPNTEKCLKKLMELKTKARELREECISLRSRCDQLEESVSVMEDEMHEMKREGKFREKRIKRNEQSLQEIWDYVKRPNLRLIGVPEDRSMRQKVNKDTQELNSALHQADLIDIYRTLHPKSTEYTFFSAPTPHLFQNMDKFLDTYTLPRLNQEEVESLNRPITGSEIEAIINSLPTKKSPGPDGFTAEFYQRYKEELLIHHEQVGFIPGMQGWFNVHKSVNVIQHINRTKDKNHMTISIDAEKAFDKIQQCFMLKTLNKLGIDGMYLKIIRAICDKPTANIILNGQKLEAFPLKTGTRQGCPLSPLLFNIVLEVLARAIRQEKEIKGIQSGKEELKLSLFADDMIVYLENPIISAQNLLKLISNFSKVSGYKINVQKSQAFLYTKNRQTESQIMSELPFTIASKRIKDLGIQLTRDLKDLLKENYKPLLNEMKEDTNKWKNIPCSWVGRINIVKIAILPKVIYRFNAIPIKLPMIFFTELEKTTLKFIWNQKRAHIAKSILSQKNKAGGITLPDFKLYYKATVTKTAWYWYQNRHIDK

SEQ ID NO: 47568 - protein, 1419 aa, Homo sapiens
  DOMAIN (112)..(153): kw TRANSCRIPTASE REVERSE II ORF2 domain identified by eMATRIX, accession number DM01354I, p-value=1.000e-40, raw score of 15.55
  DOMAIN (318)..(1306): Reverse transcriptase domain identified by PFam, accession name rvt, E-value=3.5e-171, PFam score of 582.1
MIMGDFNTPLSTLDRSTRQKVNKDIQELNSALHQADLIDIYRTLHPKSTEYTFFSASHLTYSKIDHIVGSKALLSNCKRTEIITNYLSDHSAIKLELKIKKLTPNRSTTWKLNNLLLNDYWVHNEMKAEIKMFFETNENKDTTYQNLWDTFKAECRGKFIALNAHKRKQERSKIDTLTSQLKELEKQEQTHSKASRRQEITKIRAELKEMETQKNPSKKSMNPGAEIQTTIREYYKHLYANKLENLEEMDTFLDTYTLPRLNQEEVESPNRPITGSEIEAIINSLPTKKSPGPDGFTAKFYQRYKEELVPFLLKLFQSIEKEGILPNSFYEASIILIPKPGRDTTKKENFRPISLMNIDAKILNKILANRIQQHIKKLIHHDQVGFIPGMQGWFNIRKSINIIQHINRTNNKNHMIISIDAEKAFDKIQQPLMLKTLNKLGIDGTYFKIIRAIYDKPTANIILNGQKLEAFPLKTGTRQGCPLSALLFNIVLEVLARAIRQEKEIKGIQLGKEEVKLSLFADDMIVYLENPIVSAQNLLKLISNFSKVSGYKINVQKSQAFLYTNNRQTESQIMSELPFTIASKRIKYLGIQLTRDVKDLFKENYKPLLKEIKEDTNKWKNIPCSWVGRINKPPLLIPRQTGSGVDLQQTPTDLQLRVLTATRKTNQQKGHPHQNPICTSPSSKTKGRSTRQKVNKDIQEFNSALPQVDLIDIYRTLHPKSTENTFFSAPHHTYSKIDHIVGSKALLSRCKRTEIITNCLSDHSAIKLELRIKKLTQNCSTTWKLNNLLLNDNWVHNEMKAEIKMFFETNANKNTTYQNLWDTFKALCRGKFIALNAHKRQQERSKTDTLTSQLKELEKQEQSHSKASRRQEITKIRAELKEIGTQKILQKINESRSWFFEKINKIDRLLARLIKKKREKNQTDAIKNDKGDITTDPTEIQTAISEYYKHLYANKLENLEEMDKFLDTYTLPRLNQEEVESLNRPITGSEIEAIINSLPTKKSPGPDGFMAEFYQRDKEELVPFLLKLFQSIEKEGILPNSFYEASIMLIPKPGRDTTKKENFRPISLMNIDAKILNKILANRIQQHIKKLIHHDQVGFIPGMQGWFNLRKSLNVIQHINRTNDKNHMIISIDAEKAFDKIQQPFMLKTLNKLGIDGMYLKIIRAIYDRPTANIILNGQKLEAFPLKTGTRQGCPLSPLLFNIVLEVLARAIRQEKEIKGIQLGKEEVKLSLFADDMTVYLENAIVSAPNLLKLIGNFSKVSGYKINVQKSQAFLYTNNRQTESQIMSELPFRIASKRIKYLGIQLTRDVKDLFKQNYKPLLNEIKEDTNKWKNIPCSWVGRINIVKMAILPKGTQRPYAKVRVQLNSGEELHFLGLLDTSTQVTVIPTNPCIKMRRKQIVFSDFGLLLTSVVMAPTTE

SEQ ID NO: 47569 - protein, 1141 aa, Homo sapiens
  DOMAIN (592)..(617): 7 kw REVERSE TRANSCRIPTASE RNA POLYMERASE domain identified by eMATRIX, accession number DM00895E, p-value=3.333e-11, raw score of 15.72
  DOMAIN (564)..(774): Reverse transcriptase domain identified by PFam, accession name rvt, E-value=9.5e-45, PFam score of 162.1
MVVKTNARELRDECTSLSSPFNQLEERVSVMENQMNKMKQEEKFREKRIKRNEQSLQEIWDYVKRPNLCLIGVTESDGENGTKLENTLQDITQENFPNLARKANIQIQETQRTPQRYSSRRATLRHIIVRFTKVEMKEKMLRAAREKDFTPTKIKRDKEGHYIMVKGSIQQEELTILNIYAPNTGAPRFIKQVLSDLQRDLDSHTLIMGDFNTSLLTLDRSMRQKVNKDTQELNSSLHQADLIDIYRTLHPKSIEYTFFSAPHHTYSKIDHIVGSKALLSKCKRTEIITNYLSDHSAIKLELRIKNLTQSRSTTWKLNNLLLNDYWVHNEMKAEIKMFFETNESKDTTYQNLWDAFKAVCRGKFIALNAHKRKQERSKIDTLTSQLKEVEKQEQTHSKVSRRQEITKIRAELKEIETQKTLQKISESRSWFFERINKIDRPLARLIKKKREENQIDTIKNDKGDITTDPTEIQTTIREYYKHLYANKPENLEEMDKFLDTYTLPRLKQEEVESLNRPITGAEIVAIINSLPTKKSPGPDGFTAEFYQRYKEELVPFLLKLFQSIEKEGILPNSFYEASIILIPKPGRDTTKKENFRPISLMNIDAKILNKILANRIQQHIKKLIHHDQVGFIPGMQGANIILNGQKLEAFPLKTGTRQGCPLSPLLFNTVLEVLARAIRQEKEIKGIQLGKEEVKLSLFADDMIVYLENPIVSAQNLLKLISNFSKVSGYKINVQKSQAFLYTNNRQTESQIMSELPFTIASKRIKYLGIQFTRDVKDLFKENYKPLLKEIKEDTNKWKNIPCSWVGRINIVKMAILPKVIYRFNAIPIKLPMTFFTELEKTTLNFIWNQKRARIAKSILSQKNKAGGITLPDFKLYYKATVTKTAWYWYQNRDIDQWNRTEPSEITPHTYNYLIFDKPEKNKQRGKDSLFNKWCWENWLAICRKLKLDPFLTPYTKINSRWIKDLNVRPKTIKILEENLGITIQDIGVGKDFMSKTPKAMATKAKIDKWDLIKLKSFCTAKETTIRVNRQPTTWEKIFATYSSDKGLISRIYNELKQIYKKKTNNPIKKWAKDMNRHFSKEDIYAAKKYMKKCSSSLAIREMQIKTTMRYHLTPVRMAIMKKVRKQQRQRVSPIGDGYCT

SEQ ID NO: 47570 - protein, 353 aa, Homo sapiens [sequence omitted]

SEQ ID NO: 47571 - protein, 321 aa, Homo sapiens
RLCAPQPSPSCIAFPASSGPSVLSAVPTAAMATLLRSKLSNVATSVSNKSQAKMSGMFARMGFQAATDEEAVGFAHCDDLDFEHRQGLQMDILKAEGEPCGDEGAEAHVEGDIHYQRGSGAPLPPSGSKDQVGGGGEFGGHDKPKITAWEAGWNVTNAIQCELLQSVAKAASQAGKGTVQETEDKEIGNPAQQRQELIDSSPRCPGDADADLDQRCQPGHCQSPQPLTRAPGHRQLATYLGAPGTAIGKVMAPQGPNVKLKQDTQVGDKAKNRFPLALKCCLSEIDSPTALAGDRHRGLTLLPTLRYTATIIDRHSRKLLG

SEQ ID NO: 47572 - protein, 308 aa, Homo sapiens
  DOMAIN (130)..(175): kw TRANSCRIPTASE REVERSE II ORF2 domain identified by eMATRIX, accession number DM01354N, p-value=1.000e-40, raw score of 13.17
MELKNMTQELRDECISFSSRFDQLGERVSVIEDQMNEMKPNLHRIGVSESDPESGTKLENTLQDIIQEKFPNLAKQANIQIQEIQRMPQRYSLRRATPRHIIVRFTKAEMKEKMLRAAREKEIQTTIREYYKHLYANKLENLEEMDKFLDAYTLPRLNQEEVESLNRPITGSEIEAIINSLPTKKSPGPDGFTAKFYQRRDEDNDWAVLYSSSLSLDVAFLVHPTQDLQARGFFIADSISELVIVLFRVSKVFLVQSLEFLVKKMLASPSAVIKISLRVEANLHGLTLYDTAPCPINNERTRLLSRDI

SEQ ID NO: 47573 - protein, 402 aa, Homo sapiens; identical to SEQ ID NO: 46561

SEQ ID NO: 47574 - protein, 418 aa, Homo sapiens; identical to SEQ ID NO: 46564

SEQ ID NO: 47575 - protein, 228 aa, Homo sapiens
  misc_feature (1)...(228): Xaa = X or * as defined in Table 2
MEIILRICKLTISKELLDSGSSRLTMTHYKHRYFSHSAEEQIISEELNESEMICQHHHTAENDFDELREEGFRRSVITNFSKLKEDVQTHFKEAKNLEKRLDEWLTRINSVEKTLNDLMXLKTVAXELRDTYTSFNSRFDQVEERVSVIEDQMNEMEREEKFREKRVXRNEQSLQEIWNYVKRPNLHLIGVSEIDRENGTKLENTLQDIFQENFTYLARQANIQIQEI

SEQ ID NO: 47576 - protein, 385 aa, Homo sapiens
  DOMAIN (259)..(304): kw TRANSCRIPTASE REVERSE II ORF2 domain identified by eMATRIX, accession number DM01354N, p-value=1.000e-40, raw score of 13.17
MTHYKHRYFSHSAEEQIISEELNESEMICQHHHTAARCPSETKLPEEGSGNNICRSAIFAVLQPPLVILRQTGTGVDLQQTPTDLQLKVLTVTRKTNKHKGHPHQNPICTSPSTKTKENDFDELREEGFRRSVITNFSKLKEDVRTHRKEAKNLEKRLDEWLTRINSVEKTLNDLMELKTMAQELRDTYTSFSSRFDQVEERVSVIEDQMNDMKREEKFREKRVKRNEQSLQEIWDYVKRPNLRLIGVPEKIQTTIREYYKHLYANKLENLEEMDKFLDTYTCPRLNQEEVESLNRPVTGSEIEAIINSLPTKKVQDQADSQPNSTRVFKTVCISSLGHTTASADTQDVCQLPVTSLLEQGLSSKSAGFLDYAVQRLWLLGTEPL

SEQ ID NO: 47577 - protein, 389 aa, Homo sapiens
  DOMAIN (204)..(259): kw TRANSCRIPTASE REVERSE II ORF2 domain identified by eMATRIX, accession number DM01354Q, p-value=1.000e-40, raw score of 9.23
  DOMAIN (151)..(389): Reverse transcriptase domain identified by PFam, accession name rvt, E-value=9.6e-33, PFam score of 122.2
MGRNQLKKPENSKNQNASSTPKVHNSSPAREQNWTENEFDELTEVGFRRWVITNSSELKEHALTQCREARNLEKSYSKIGDDYFIRGTDINTGTQEAWKKIQTTIRKYYKHLYANKLENPQEMDKFLNSYTLPRLNQEEAESLNRPITGSEIEAIINSLPTKKSPGPDGFTAKFYQSLAETQQQQKKNFRPISPMSIDEKILNKILAKRIQQHIKKLIHHDQVGFIPGMQGWFNICKSINIIQHINRTNDKNHMIISIDAEKAFDKIQQHFMLKTLNKLGIDGTYLKIIRAIYDKPAANIILNGHKLEAFPLKTGTRQGCALSPLLFNIMLEVLARKIRQEKEIKGIQLEKEEVKLSLFADDMTVYLANPIVSAQNLLKLISNFSKVSG

SEQ ID NO: 47578 - protein, 775 aa, Homo sapiens
MGVSGAQPGRSCWHRSSTGSQGLGPVPEPADCGGEAAGRAREEGTVSLTMGTADSDEMAPEAPQHTHIDVHIHQESALAKLLLTCCSALRPRATQARGSSRLLVASWVMQIVLGILSAVLGGFFYIRDYTLLVTSGAAIWTGAVAVLAGAAAFIYEKRGGTYWALLRTLLTLAAFSTAIAALKLWNEDFRYGYSYYNSACRISSSSDWNTPAPTQSPEEVRRLHLCTSFMDMLKVGGQGEGAAAGLVQNPSGHALGCLDSAASGISDPSVAVLLENVPNQRGESLRCVPVYLGQWNCSKETGMDSGQFGEEKGAHDPSPTYYHACLSTQWWPSPESPYPQPSGPQVKEPRNPGKSISMLCLWIRYHAADSGSSRAKLPLEERLRPFSPTHDCLAFPLPLEKRPEGNVGSRCPSGTKLPEEGSGSNICCSAIFPVLQPPLVIPRQTRSGVDLQQTPTDLQLRDLTVRRKTNKQKGHPHQNPMCTSPSSKTKELKEDVRTHHKEAKNLEKRLDKMVNRINSVEKTLNDPMELKTQARELHDKCTSFSSRFDQLEERVSVTEDQMNEMKREEKFREKRVKRNEQSLQEIRDYVKRPNLCLTGVPESDGENETKLENTLQDNIQENFPNLARQANIQIQEIQRTPQRYSSRRATPRHIIVRFTKVEMKEKMLRAAGEKGQVTHKGKPITLTADLLAETLQARREWGPIFNILKEKNFQPRISYPAKLSFISEGEIKSFTDKQMLRDFVTTRPALQELLKEALNMERSNRYQPLQKHAKL

SEQ ID NO: 47579 - protein, 53 aa, Homo sapiens
PGCIRCKCVAVDGDPCMKSNNALIVILGTVTLDAVGIGLVMPVLPGLLRDIVH

SEQ ID NO: 47580 - protein, 53 aa, Homo sapiens
PGCIECKCVAVDGDPCMKSNNALIVILGTVTLDAVGIGLVMPVLPGLLRDIVH

SEQ ID NO: 47581 - protein, 258 aa, Homo sapiens
MKSNNALIVILGTVTLDAVGIGLVMPVLPGLLRDIVHSDSIASHYGVLVALYALMQFLCAPVLGALSDTFAAAQDFADFGTTIKQDFRLLGQTSVDRLLQLSQGQAVKGNQLLPVSLVKRKTTLAPNTQTASPRALADSLMQLARQVSRLESGQYSVAVDVLLNSAFKIRVLILQMLEVLAADNLHQTSVPLQNRIQSMGVASYGDWMFGWARELVVSGMFSLPDYLEGQLNKGWLPIPVPVSSNIQNRKGSSGNWTL

SEQ ID NO: 47582 - protein, 168 aa, Homo sapiens
MSGFEKQYKKIRLDKTLDSENEGLELPVPAKRSNLGVRLYACCGLLLCPAYPQHFAHGYVDKIPGYPGRAGTLTGLHPMQVCRCRRQAPCLKSNNALIVILGTVTLDAVGIGLVMPVLPGLLRDIVHSDSIASHYGVLLALYALMQFLCAPKYKLPSENTTNTSMQIN

SEQ ID NO: 47583 - protein, 245 aa, Homo sapiens
  DOMAIN (179)..(212): ESICULAR LUMEN DOMAIN domain identified by eMATRIX, accession number DM01292C, p-value=4.672e-09, raw score of 12.45
MAETAVINHKKRKNSPRIVQSNDLTEAAYSLSRDQKRMLYLFVDQIRKSDGTLQEHDGICEIHVAKYAGIFGLTSAEAKRSNLGVRLYACCGLLLCPAYPQHFAHGYVDKIPGYPGRAGTLTGLHPMQVCRCRRQAPCMKSNNALIVILGTVTLDAVGIGLVMPVLPGLLRDIVHSDSIASHYGVLLALYALMQFLCAPVLGALSDRFGRRPVLLASLLGATIDYAIMATTPVLWIYPLVNSPSC

SEQ ID NO: 47584 - protein, 367 aa, Homo sapiens
  DOMAIN (308)..(341): ESICULAR LUMEN DOMAIN domain identified by eMATRIX, accession number DM01292C, p-value=4.672e-09, raw score of 12.45
MVLVWKESKEELHGVWVYQVPYRPEKGDYRGAMWCPDSSGSPTTVQGHEVLKVEAGPQEGQQKGSASGWHTITSAHVSVFSDSPMANPTVSIAGRVTVDSDTLASDAARLTCRHGLGNQVFCPHTRAQNVVDKQDTAAIHSRHTTAHRGYSVLQSYIKFENAEIAQGTNKPIGGLNKLPHGFCAWKQQAADPLLFEAAFCYTGQGSYRTRRLSPTRGLSTRVWDHDPTRVVGLIIGLGPRSHLYCRSDYQRETTIPSMPVKGNQAPCMKSNNALIVILGTVTLDAVGIGLVMPVLPGLLRDIVHSDSIASHYGVLLALYALMQFLCAPVLGALSDRFGRRPVLLASLLGATIDYAIMATTPVLGSTH

SEQ ID NO: 47585 - protein, 53 aa, Homo sapiens; identical to SEQ ID NO: 47579

SEQ ID NO: 47586 - protein, 102 aa, Homo sapiens
PGCIRCKCVAVDGDPCMKSNNALIVILGTVTLDAVGIGLVMPVLPGLLRDIVHSDSIASHYGVYNTIITFGKCSSFTTATPIGNFYDTRYSSTERRCLLTSQ

SEQ ID NO: 47587 - protein, 217 aa, Homo sapiens
  DOMAIN (45)..(78): ESICULAR LUMEN DOMAIN domain identified by eMATRIX, accession number DM01292C, p-value=4.672e-09, raw score of 12.45
QAPCMKSNNALIVILGTVTLDAVGIGLVMPVLAGLLRDIVHSDSIASHYGVLLALYALMQFLCAPVLGALSDRFGRRPVLLASLLGATIDYAIMATTPVLWIYPLNGEEVIDKSNYTSGDNHTLRDPHYVEDKGHKYLVFEANTGTENGYQGEESLFNKAYYGGGTNFFRKESQKLQQSAKKRDAELANGALGIIELNNDYTCEKSNEAADHFKHGN

SEQ ID NO: 47588 - protein, 311 aa, Homo sapiens
  DOMAIN (204)..(233): kw REPLICATION REPB REPA INITIATION domain identified by eMATRIX, accession number DM00653A, p-value=7.207e-27, raw score of 20.40
  DOMAIN (188)..(300): Initiator RepB protein domain identified by PFam, accession name RepB_protein, E-value=1.1e-07, PFam score of 29.7
QAPCMKSNNALIVILGTVTLDAVGIGLVMPVLPGLLRDIVHSDSIASHYGVLLALYALMQFLCAPVLGALSDRFGRRPVLLASLLGATIDYAIMATTPVLWIYPLIRKSEGTSQEHDGICEIHVAKYAEIFGLTSAEASKDIRQALKSFAGKEVVFYRPEEDAGDEKGYESFPWFIKRAHSPSRGLYSVHINPYLIPFFIGLQNRFTQFRLSETKEITNPYAMRLYESLCQYRKPDGSGIVSLKIDWIIERYQLPQSYQRMPDFRRRFLQVCVNEINSRTPMRLSYIEKKKGRQTTHIVFSFRDITSMTTG

SEQ ID NO: 47589 - protein, 66 aa, Homo sapiens
CSHLLIIQLANQNTIITGGSSCMKSNNALIVILGTVTLDAVGIGLVMPVLPGLLRDIVHSDSIASH

SEQ ID NO: 47590 - protein, 225 aa, Homo sapiens
  DOMAIN (159)..(192): ESICULAR LUMEN DOMAIN domain identified by eMATRIX, accession number DM01292C, p-value=4.672e-09, raw score of 12.45
MAETAVINHKKRKNSPRIVQSNDLTEAAYSLSRDQKRMLYLFVDQIRKSDGTLQEHDGICEIHVAKYAEIFGLTSAEASKDIRQALKSFAGKEVVFYRPEEDAGDEKGYESFPCQAPCMKSNNALIVILGTVTLDAVGIGLVMPVLPGLLRDIVHSDSIASHYGVLLALYALMQFLCAPVLGALSDRFGRRPVLLASLLGATIDYAIMATTPVLWIYPLVNSPSC

SEQ ID NO: 47591 - protein, 228 aa, Homo sapiens
  DOMAIN (162)..(195): ESICULAR LUMEN DOMAIN domain identified by eMATRIX, accession number DM01292C, p-value=4.672e-09, raw score of 12.45
MKLMETLNQCINAGHEMTNAIAIAQFNDDSPEARKITRRWRIGEAADLVGVSSQAIRDAEKAGRLPHPDMEIRGRVEQRVGYTIEQINHMRDVFGTRLRRAEDVFPTGIGVAAIKVGQAPCMKSNNALIVILGTVTLDAVGIGLVMPVLPGLLRDIVHSDSIASHYGVLLALYALMQFLCAPVLGALSDRFGRRPVLLASLLGATIDYAIMATTPVLWIYPLVNSPSC

SEQ ID NO: 47592 - protein, 213 aa, Homo sapiens
  DOMAIN (106)..(135): kw REPLICATION REPB REPA INITIATION domain identified by eMATRIX, accession number DM00653A, p-value=7.207e-27, raw score of 20.40
  DOMAIN (160)..(202): Initiator RepB protein domain identified by PFam, accession name RepB_protein, E-value=0.00033, PFam score of 17.4
QAPCMKSNNALIVILGTVTLDAVGIGLVMPVLPGLLRDIVHSDSIASHYGVLLALYALMQFLCAPVLGALSDRFGRRPVLLASLLGATIDYAIMATTPVLWIYPLNRFTQFRLSETKEITNPYAMRLYESLCQYRKPDGSGIVSLKIDWIIERYQLPQSYQRMPDFRRRFLQVCVNEINSRTPMRLSYIEKKKGRQTTHIVFSFRDITSMTTG

SEQ ID NO: 47593 - protein, 269 aa, Homo sapiens
  DOMAIN (207)..(250): 1 kw MIND INHIBITOR DIVISION CONTROL domain identified by eMATRIX, accession number DM01756B, p-value=4.822e-15, raw score of 22.91
  DOMAIN (172)..(266): ParA family ATPase domain identified by PFam, accession name ParA, E-value=1.6e-18, PFam score of 74.9
MKSNNALIVILGTVTLDAVGIGLVMPVLPGLLRDIVHSDSIASHYGVLLALYALMQFLCAPVLGALSDRFGRRPVLLASLLGATIDYAIMATTPVLWIYPLDLALKGLRVLLVEGNDPQGTASMYHGWVPDLHIHAEDTLLPFYLGEKDDVTYAIKPTCWPGLDIIPSCLALHRIETELMGKFDEGKLPTDPHLMLRLAIETVAHDYDVIVIDSAPNLGIGTINVVCAADVLIVPTPAELFDYTSALQFFDMLRDLLKNVDLKGFEPDV

SEQ ID NO: 47594 - protein, 38 aa, Homo sapiens
VYESNNALIVILGTVTLDAVGIGLVMPVLPGLLRDIVH

SEQ ID NO: 47595 - protein, 561 aa, Homo sapiens
  DOMAIN (349)..(382): ESICULAR LUMEN DOMAIN domain identified by eMATRIX, accession number DM01292C, p-value=4.672e-09, raw score of 12.45
DTGNNEWKQQEGLSHNNWLGLGCLFGPETPIFYPATLGHTSSIYYERKKEDKNGMKEEHDTSVAMFFTLFNFQISVENIRKGPMVVGESIAQSYLNVVQEIFRSRNHQLLQDLTRDLCDNLKTCHTSHGSVMAETAVINHKKRKNSPRIVQSNDLTEAAYSLSRDQKRMLYLFVDQIRKSDGTLQEHDGICEIHVAKYAEIFGLTSAEASKDIRQALKSFAGKEVVFYRPEEDAGDEKGYESFPWFIKQRSNLGVRLYACCGLLLCPAYPQHFAHGYVDKIPGYPGRAGTLTGLHPMQVCRCRRQAPCMKSNNALIVILGTVTLDAVGIGLVMPVLPGLLRDIVHSDSIASHYGVLLALYALMQFLCAPVLGALSDRFGRRPVLLASLLGATIDYAIMATTPVRGHSVLKGKQHKSVENLQPDNVIEKKIPFSGEKFKPAAEICKSNRELNVNHQDNGENVSRACQRPLLQPLPSQAWRFRRKNWFCGPGPWSPFSVQSRDLVPCVPAAPALTKRGQGTAQAVASEGGSPKPWQLPHGVEPAGAQKSRAEVWEPPPRFQKM

SEQ ID NO: 47596 - protein, 166 aa, Homo sapiens
  misc_feature (1)...(166): Xaa = X or * as defined in Table 2
XENIFVDPEDQSQVTLAGYGFAFRYCPSGKHVAYVEGSRSPHEGDLEFISMDLHKGCGPSRRSDLQSLGYCMLKWLYGFLPWTNCLPNTEDIMKQKQKFVDKPGPFVGPCGHWIRPSETLQKYLKVVMALTYEEKPPYAMLRNNLEALLQDLRVSPYDPIGLPMVP

SEQ ID NO: 47597 - protein, 616 aa, Homo sapiens
  DOMAIN (198)..(240): Chloramphenicol acetyltransferase proteins domain identified by eMATRIX, accession number BL00100C, p-value=1.000e-39, raw score of 23.60
  DOMAIN (139)..(309): Chloramphenicol acetyltransferase domain identified by PFam, accession name CAT, E-value=4.6e-121, PFam score of 415.6
MQPSAHHPARQPEHDITFGKCSSFTTATPIGNFYDTRYSSTERRCAIVTGDAVGMDDIPQEARQYRHNQAYAYSIQGDGAEDDDERIVRFHTRLCRNFQRYTGIQHVHRIGMAERMWCDRNRERHTVSSSGGNRLPNPEHFEAFQSVAQCTYNQTVQLDITAFLKTVKKNKHKFYPAFIHILARLMNAHPEFRMAMKDGELVIWDSVHPCYTVFHEQTETFSSLWSEYHDDFRQFLHIYSQDVACYGENLAYFPKGFIENMFFVSANPWVSFTSFDLNVANMDNFFAPVFTMGKYYTQGDKVLMPLAIQRIPLRERVRIEIASTHIALQHAIVTGDAVGMDDIPQEARQYRHNQAYAYSIQGDGAEDDDERIVRFHTRHTGTENGYQGEESLFNKAYYGGGTNFFRKESQKLQQSAKKRDAELANGALGIIELNNDYTLKKCLANECTQQSSRFSISQEIVRYAELKTVLQTYRIRICILTRFQVLHVHVNFGEAFLFGYLDVNAQMVYCWPRASRYQQGHQDLFILRSDLPSQVFIRDKLMERRNRRTGRTEKARIWEVTDRTVRTWIGEAVAAAAADGCDVLCSGHTTYVPPFLCDAHAVCRYTAESSAKPDGT

SEQ ID NO: 47598 - protein, 387 aa, Homo sapiens
  DOMAIN (78)..(111): ESICULAR LUMEN DOMAIN domain identified by eMATRIX, accession number DM01292C, p-value=4.672e-09, raw score of 12.45
PTSAYERGQRFASRLQMNLLEYFLRWLMAKIFPQAPCMKSNNALIVILGTVTLDAVGIGLVMPVLPGLLRDIVHSDSIASHYGVLLALYALMQFLCAPVLGALSDRFGRRPVLLASLLGATIDYAIMATTPVLWIYPLVNVSKSDDTLKINGVEDHKTIFDGDGKTYQNVQQFIDEGNYTSGDNHTLRDPHYVEDKGHKYLVFEANTGTENGYQGEESLFNKAYYGGGTNFFRKESQKLQQSAKKRDAELANGALGIIELNNDYTLKKVMKPLITSNTVTDEIERANVFKMNGKWYLFTDSRGSKMTIDGIKLNDIYMLGFVSNSLTGPYKPLNKTGLVLQMVLDPNDVTFTNFYLPGPQAKANMWLLQAHDKKSFSRIKGTFGPAL

SEQ ID NO: 47599 - protein, 183 aa, Homo sapiens
  DOMAIN (117)..(150): ESICULAR LUMEN DOMAIN domain identified by eMATRIX, accession number DM01292C, p-value=4.672e-09, raw score of 12.45
HRPFPQDRKAGECLLHEYEDLVPIRDTLRLFPGGRYLPRAKHVAPSEPDPGYPGRAGTLTGLHPMQVCRCRRQAPCMKSNNALIVILGTVTLDAVGIGLVMPVLPGLLRDIVHSDSIASHYGVLLALYALMQFLCAPVLGALSDRFGRRPVLLASLLGATIDYAIMATTPVLWIYPLVNSPSC

SEQ ID NO: 47600 - protein, 251 aa, Homo sapiens
  DOMAIN (163)..(183): ALCOHOL DEHYDROGENASE SUPERFAMILY SIGNATURE domain identified by eMATRIX, accession number PR00080C, p-value=4.789e-14, raw score of 17.16
  DOMAIN (44)..(199): short chain dehydrogenase domain identified by PFam, accession name adh_short, E-value=5e-51, PFam score of 182.9
LVRRFHSEALSVLPANLIPQCHGWRMALSILLPLLSAEYPFTDLEEAVRFAELAVEKLHQEGIQAVAAPFNVTHKHEIDAAVEHIEKDIGPIDVLVNNAGIQRRHPFTEFPEQEWNDVIAVNQTAVFLVSQAVTRHMVERKAGKVINICSMQSELGRDTITPYAASKGAVKMLTRGMCVELARHNIQVNGIAPGYFKTEMTKALVEDEAFTACMRTQQEGSYLQARTKALIGNRICWHLAPGLPSLQNKSH

SEQ ID NO: 47601 - protein, 799 aa, Homo sapiens
  DOMAIN (471)..(493): HIV REV INTERACTING PROTEIN SIGNATURE domain identified by eMATRIX, accession number PR00405C, p-value=1.000e-19, raw score of 19.41
  DOMAIN (420)..(541): Putative GTP-ase activating protein for Arf domain identified by PFam, accession name ArfGap, E-value=8.4e-66, PFam score of 232.0
  misc_feature (1)...(799): Xaa = X or * as defined in Table 2
GRPFPRPPRLCQRRLRGGGRMKMTGDFEECLKDSPRFRAALEEVEGDVAELELKLDKLVKLGIAMIDTGKAFCVANKQFMNGIRDLAQYSSNDAVVETSLTKFSDSLQEMINFHTILLXPNSEINLRHSFSNFVKEDLRKFKDAKKQFEKVSEEKENALVKNAQVQRNKQHEVEEATNILTATRKCFRHIALDYVLQINVLQSKRRSEILKSMLSFMYAHLAFFHQGYDLFSELGPYMKDLGAQLDRLVGDAAKEKREMEQKHSTIQQKDFSRDDSKLKYNVDAANGIVMEGYLFKRASNAFKTWNRRWFSIQNNQVVYQKKFKDNPTVVVEDLRLCTVKHCEDIERRFCFEVVSPTKSCMLQADSEKLRQAWIKAVQTSIATAYREKGDESEKLDKKSSPSTGSLDSGNESKEKLLKGESALQRVQCIPGNASCCDCGLADPRWASINLGITLCIECSGIHRSLGVHFSKVRSLTLDTWEPELLKLMCELGNDVINRVYEANVEKMGIKKPQPGQRQEKEAYIRAKYVERKFVDKYSISLSPPEQQKKFVSKSSEEKRLSISKFGPGDQVRASAQSSVRSNDSGIQQSSDDGRESLPSTVSANSLYEPEGERQDSSMFLDSKHLNPGLQLYRASYEKNLPKMAEALAHGADVNWANSEENKATPLIQAVLGGSLVTCEFLLQNGANVNQRDVQGRGPLHHATVLGHTGQVCLFLKRGANQHATDEEGKDPLSIAVEAANADIVTLLRLARMNEEMRESEGLYGQPGDETYQDIFRDFSQMASNNPEKLNRFQQDSQKF

SEQ ID NO: 47602 - protein, 260 aa, Homo sapiens
MVERRKAKTHFKDLVQKGTPNLTTTYTKSTFIRTKNHLDRLVVDAAKEKREMEQKHSTIQQKRARKEVGGHSELGLNASFKRGRPLEEAVHEGEGHGSILLVCHSSSWSSWKFIWKARVFEGPQGKKKPGVNTSVLDGEGGEENKSADLRKFKDAKKQFEKVSEEKENALVKNAQVQRNKQHEVEEATNILTATRKCFRHIALDYVLQHIPILKECPLQKGGETEILQIIQLDLDLKFKTNIRELFEEFDSFLRTLPSSE

SEQ ID NO: 47603 - protein, 158 aa, Homo sapiens
  DOMAIN (81)..(104): TRANSFORMING PROTEIN P21 RAS SIGNATURE domain identified by eMATRIX, accession number PR00449C, p-value=9.308e-22, raw score of 17.27
  DOMAIN (40)..(158): Ras family domain identified by PFam, accession name ras, E- value=1.2e-32, PFam score of 121.9
GIPHLSSRDMTGTPGAVATRDGEAPERSPPCSPSYDLTGKVMLLGDTGVGKTCFLIQFKDGAFLSGTFIATVGIDFRNKVVTVDGVRVKLQIWDTAGQERFRSVTHAYYRDAQALLLLYDITNKSSFDNIRAWLTEIHEYAQKDVVIMLLGNKADMSS

SEQ ID NO: 47604 - protein, 284 aa, Homo sapiens
  DOMAIN (214)..(236): TRANSFORMING PROTEIN P21 RAS SIGNATURE domain identified by eMATRIX, accession number PR00449A, p-value=8.200e-15, raw score of 13.20
MVRAYAMLVLMCLLSGGDLVSGKGESVNQPGARSWQPRELQAFDLVPKGSASHYMGLEVFDLHGHQGQVQGILKLKGKEFLKDCRKYRPGENRMTVRPKAVKYIQLREAEELPGAWDILAALLKMIYDFMNLFGSSSGPGDMTGTPGAVATRDGEAPERSPPCSPSYDLTGKLPGAEVLMEKWVNIVSGPGSVFLGKLSKQEEVAERGKKGPGQKTILVGDSGVGKTSLLVQFDQGKFIPGSFSATVGIGFTPCTHKKLLADEQSGVAEKERRDKQLNVKSGSN

SEQ ID NO: 47605 - protein, 88 aa, Homo sapiens
EDWFTGGWNTCLGGTFLKSERTRSFFLPRLFRIPPAPPTASSGRPLPIFRNLFLPSGSPGSPSNSRPPPPLLSPTRPAAPVPAPASAP

SEQ ID NO: 47606 - protein, 97 aa, Homo sapiens
  DOMAIN (1)..(60): Intermediate filament proteins domain identified by PFam, accession name filament, E-value=1.4e-15, PFam score of 62.4
  misc_feature (1)...(97): Xaa = X or * as defined in Table 2
ETEIEALKEELLFLKKNQEEEVKGLQAQIAISGLTVEVDVPKSQDLAKIMADIWAQXDELEDGEDFSLRDALDSSNSMQTIRKTTTRPIVSGWQSGV

SEQ ID NO: 47607 - protein, 96 aa, Homo sapiens
  DOMAIN (47)..(78): Intermediate filaments proteins domain identified by eMATRIX, accession number BL00226C, p-value=5.800e-19, raw score of 13.23
  DOMAIN (24)..(82): Intermediate filament proteins domain identified by PFam, accession name filament, E-value=1.1e-15, PFam score of 62.8
  misc_feature (1)...(96): Xaa = X or * as defined in Table 2
SQKKGLVGALTLNPPHFCPCHLXEVKGLQAQIASSGLTVEVDAPKSQDLAKIMADIRAQYDELARKNREELDKYWSQQVREGKGMGCQGVGGRQTE

SEQ ID NO: 47608 - protein, 302 aa, Homo sapiens
  DOMAIN (251)..(282): Intermediate filaments proteins domain identified by eMATRIX, accession number BL00226C, p-value=7.692e-15, raw score of 13.23
  DOMAIN (98)..(297): Intermediate filament proteins domain identified by PFam, accession name filament, E-value=9.3e-74, PFam score of 258.5
MGHHRRQSLSPVLSLSSPDSMSFTTRSTFSTNYQSLGSVQAPSYGARPVSSAASVYAGAGGSGSRISVSRSTSFRGGMGPGGLAAGMAGGLAGMGGIQNKKTMQSLNDRLASYLDRVRSLETENRRLESKIREHLENKGPQVKDWSHYCKTIEDLRAQIFANTVDNACIVLHIDNARLAADDFRVKYETQLAMRQSVENDIHGLRKLETEIEALREELLFMKNHEEEVKGLQAQIASFRLTVEVDAPKSQDLAKIMADIRAKYDELAGKNREELDKYWPQQFEENTTVVTTQSAELGLPVLC

SEQ ID NO: 47609 - protein, 475 aa, Homo sapiens
  DOMAIN (388)..(435): Intermediate filaments proteins domain identified by eMATRIX, accession number BL00226D, p-value=9.710e-33, raw score of 19.10
  DOMAIN (113)..(461): Intermediate filament proteins domain identified by PFam, accession name filament, E-value=5.2e-41, PFam score of 149.7
  misc_feature (1)...(475): Xaa = X or * as defined in Table 2
TGPEFHDRLRVRRRPQSLSPVLLLSSPDSMSFTTRSTFSTNYRSLGSVQAPSYGAGPRRAARPASYAGAGGSGSRISVSRSTSFRGGMGSGSLATGIAGGLAGMGGIQNEKETMQSLNDRLASYLDRVRSLETENRRLESKIREHLEKKGPQVRDWSHYFKIIEDLRAQIFANTVDNARIVLQIDNAPSCVRDDFRVKYETELAMRQSCWRTDIHGAPQGPFDDTNYHTDLQLEKTEIRGSSRRELLFQXRRNHEEEKLKGLQAQIAQFLGLTRGRLDCPQIFRDLRQDSWADIRGPIIDELASEEPRGSLDKYWSQQIEESTTVVTTQFAEVEAAETTLTELRRTVQSLEIDLDSMRNLKASLENSLREGXRPAYALQMEQLNGILLHLESELAQTRAEGQRQAQEYEALLNIKVKLEAEIATYRRLLEDGEDFNLGDALDSSNSMQTIQKTTTRRIVDGKVVSETNDTKVLRH

SEQ ID NO: 47610 - protein, 125 aa, Homo sapiens
GFGPRGAAMPVELELCPGRWVGGQHPCFIIAEIGQNHQGDLTVAKRMIRMAKECGADCAKFQKSELEFKFNRKALDRPYTSKHSLGEDVRGAQTDIWKFNHDQVQGAARGTPKEVANAHHCLWHG

SEQ ID NO: 47611 - protein, 416 aa, Homo sapiens
VRGRGFGAGRLRGLTGRRMVPPRRHRGAGRPGVLSSSPPFRLRSAKFSGIALEDLRRALKTRLPMVCVFVMNRMNSQNSGFTQRRRMALGIAILLLVEVIWVASSELTSYVFTQYNKPFFSTFAKTSMFALYLLGFIIWKPWRQQCTRGLRGKHAAFFADAEGYFAACTTDTTMNSSLGYLGPRETAMHWLCTKCGVKRAASPHESCQVWKIMHKILDWKLTPHLPLEARLLCYLLTLDLAIRLASAHKMSANYEKEPMLYWAWRPRSEKWFYSLGPGPHCPEQPQDTAPCIPATPVSAMAKRARDTSQATASEGASHKPWWLPYSVKPAGAQRARVEAWEPLPRFRRMHGNAWVFRQKSAVGAEPSWRTSTMAVQRGNVGLESSHRVQVEPSSRTQNGSIDSLHHAAGKVAGTQC

SEQ ID NO: 47612 - protein, 93 aa, Homo sapiens
  DOMAIN (15)..(32): 5-HYDROXYTRYPTAMINE 1F RECEPTOR SIGNATURE domain identified by eMATRIX, accession number PR00515C, p-value=9.686e-09, raw score of 11.23
IFLQFPYGHEGRCQKNQGKPRDDQLLVTHLHVYQVHADRCGPSPEPPTEVAARRYPRPTVHPLLGVPPRPGVHPRPGVHPRRSTSPSLLSTSA

SEQ ID NO: 47613 - protein, 196 aa, Homo sapiens
FFFNFFQGGGDFPQEKVVFMFGIQESIQRSVSSMKEEPLGSRCNAVRSWMQGAGVLDANTAAQSGVGLARAHFEKQPPSNLRKSNFFHFVLALYDRQGQPVEIERTAFVGFVEKEKEANSEKTNNGIHYRLQLLYSNGIRTEQDFYVRLIDSMTKQAIVYEGQDKNPEMCRVLLTHEIMCSRCCDKKSCGNRNETS

SEQ ID NO: 47614 - protein, 57 aa, Homo sapiens
EPVAAQESWLRSGASTENNERLVTIFLQFPYGHEGRCQKNQGKPRDDQLLVTHPQSV

SEQ ID NO: 47615 - protein, 88 aa, Homo sapiens
MRKLIAGLIFLKIWTCTVRTSTDLPQIENCFQYIHQVTEVGQKVATVLLFYGYYKCTGTLKITCLYNVILYKVCSPGSDQPDVCYDPF

SEQ ID NO: 47616 - protein, 670 aa, Homo sapiens
  DOMAIN (111)..(139): CHAIN FACTOR INTERLEUKIN-12 BETA PRECURSOR IL-1 domain identified by eMATRIX, accession number PD02365A, p-value=4.000e- 34, raw score of 7.74
MRQTKGNLSSLVEEEEEEKEKRKEERKKEGKKERRKEKKKEERKGKEKKLRKREEVDCEQYVDGSSFTNPCKVTLKKMTSPAPEADWSTHGRSMRKLIMGLIFLKIWTCTMCHQQLVISWFSLVFLASPLVAIWELKKDGNQPLIILCGGPTSKPGLLGSHCVQRGAAGLALALLEARRQVLQLGLGWGYPDLSVLTARVPLLSHTAFKAMTLQPLSPRGHGPAAWAKPKEQASGRGGRMKVAQGGMRHYTWPQESIQRSGSSMKEEPLGSGMNAVRTWMQGAGVLDANTAAQSGVGLARAHFEKQPPSNLRKSNFFHFVLALYDRQGQPVEIERTAFVGFVEKEKEYAAIGNNHRQSLVQRQEPKRRRFSIHRTHVQHLTELPNPELSAFQTEEKPPIMSHSSLHHLDLSGDRHYIFHMLHVEIPYSPEQNHNTWSNSMNTLREEDRMVSRHTMSTQQTFVVYEFVHFLMDSMKNHQMPPTPKYAVGTLHSASITDASGAYLTSLCPTSDFSHMSDPDHNLLCRGFLPRHANSEADAQPAHQHPGTALNQEGTGLISGELQTKKASDLSQPFQDPQETLSLWLMNSTPKTGNRKQALEEGKEYVKKVDTGEPGDSGERSKQEDHQSSHKGLSPLLPRWLLLQEETTINFQDNVRGVGVINMSPETADVP

SEQ ID NO: 47617 - protein, 147 aa, Homo sapiens
  misc_feature (1)...(147): Xaa = X or * as defined in Table 2
VPDLPPSHRGFRAAQGGLPPKNKVAALPSWGSANQNSSARWELVSPPIHRGGSXGPGETGDLDGSSIQRAVELRLVQAFVVPKSSLRDPSREGRGGWAGXVQTKGAXARPTLLWAPKRDRGGKAAPTSTWNSPKAGCPSARSSPAPP

SEQ ID NO: 47618 - protein, 453 aa, Homo sapiens
  DOMAIN (394)..(419): kw ANNEXIN ANTIGEN PROLINE TUMOR domain identified by eMATRIX, accession number DM00250C, p-value=9.338e-09, raw score of 23.62
MGDSRRRSLGNQPSSEAAGRSEREQDGDPRGLQSSVYESRRVTDPERQDLDNAELGPEDPEEELPPEEVAGEEFPETLDPKEALSELERVLDKDLEEDIPEIRWAPGNGPAWVRWAWSLHVPDLPPSHRGFRATQGGLPPKNKVAALPSWGSANLQRKQQQLHPAVATGPPAATMPNSSLCERHPQILIQFNLREKSKSLSASRLSISQKLPSTTMTKARKRRRRRRLMELAEPKINWQVLKDRPSVYWTERFLEDTTLTITVPAVSRRVEELSRAKRFYLEYYNNNRWGKEGWVATHTAEFGRNALFSPRQDAAWDTLGPQGLCRDGRGTQSVPNVCLTYSRVNEQLCRTLPALPEAFGRGQCCPSSRTEQLPPGAAVAKAHGLGVPTAEMCPPGSGGQSFAIQVSAGLASSRGSEGDCVCVLLQLVVVAGGPRPVDASVQSLPLSLHGRCP

SEQ ID NO: 47619 - protein, 40 aa, Homo sapiens
RKALGAHWVPKQPIPAWQHKDPSGGRPEEQGVKLYREKEF

SEQ ID NO: 47620 - protein, 40 aa, Homo sapiens; identical to SEQ ID NO: 47619

SEQ ID NO: 47621 - protein, 72 aa, Homo sapiens
  misc_feature (1)...(72): Xaa = X or * as defined in Table 2
AKYRGTGSSRKALGAHWVPKQPIPAWQHKDPSGGRPEEQGVKLYREKEFSSXTLXRIXTGPDAWAYAWADAW

SEQ ID NO: 47622 - protein, 313 aa, Homo sapiens
NWVVPLPSGAYVHSSDFHLPLPWYSGSLTIPAEIWGDPGDTPNTMSVPTVQVGKGVSRTHTPTGEAEGVCGRSFRLYLELSQVRELSEIQGYRKQQKGPRSSLGPQAAHSCLATQRSIRRAARGAGEPTQMRRNQKTNPGNMTKQGSSTPPQNHTSSPAMDPNQEETLDLPEKEFRTLVIKLIREGPEKDEAQCKEIQKMIQELQKRAELSMEILNRWDQDYEEFLQRIVTGDETWLYQYDPEDRTQLKQLPPRENDVELFQWIQKESQVDIKFKWILAVTEKEEEAQRHMEAAKGLGLDPLKPWPKLYLGPS

SEQ ID NO: 47623 - protein, 205 aa, Homo sapiens
  DOMAIN (156)..(201): kw TRANSCRIPTASE REVERSE II ORF2 domain identified by eMATRIX, accession number DM01354N, p-value=3.520e-40, raw score of 13.17
MRKNQCKKAENSKNHNASSLPKDHNSSPGREQNWTEIEFDELTEVGFRRRKRERSKIDTLTSHLKELEKHEQTNSKASRRQEIIKIREELKEIETQKTLQRINESRSWFFEKINKIDRPLARLMKKREKNQIETIENDKGDITTDPTEIQTTIREYYKHLYANKPENVEEMDKFLDTYTLPRLNQEEVESLNSPITSSEKPNNKF

SEQ ID NO: 47624 - protein, 187 aa, Homo sapiens
  DOMAIN (131)..(176): kw TRANSCRIPTASE REVERSE II ORF2 domain identified by eMATRIX, accession number DM01354N, p-value=1.000e-40, raw score of 13.17
QTPPSFIKEHVLTQCKEAKNLEKRRKRERSKIDTLTSHLKELEKHEQTNSKASRRQEIIKIREELKEIETQKTLQRINESRSWFFEKINKIDRPLARLMKKREKNQIETIENDKGDITTDPTEIQTTIREYYKHLYANKPENVEEMDKFLDTYTLPRLNQEEVESLNSPITSSEIEAVIKSHTSTTI

SEQ ID NO: 47625 - protein, 147 aa, Homo sapiens
  DOMAIN (69)..(124): Sodium:solute symporter family proteins domain identified by eMATRIX, accession number BL00456C, p-value=1.878e-30, raw score of 24.55
VVEFLLALAWVFVPIYISSEIVTLPEYIQKRYGGQRIRMYLSVLSLLLSVFTKISLDLYAGALFVHICLGWNFYLSTILTLGITALYTIAGGLAAVIYTDALQTLIMVVGAVILTIKAFDQIGGYGQLEAAYAQAIPSRTIANTTCP

SEQ ID NO: 47626 - protein, 54 aa, Homo sapiens
  DOMAIN (21)..(51): Sodium:solute symporter family proteins domain identified by eMATRIX, accession number BL00456B, p-value=8.875e-10, raw score of 18.94
  misc_feature (1)...(54): Xaa = X or * as defined in Table 2
XAAGGLAVAGFEWNATYVLLALAWVFVPIYISSEIVTLPEYRSLRQMPLAYCRS

SEQ ID NO: 47627 - protein, 50 aa, Homo sapiens; identical to SEQ ID NO: 35029

SEQ ID NO: 47628 - protein, 130 aa, Homo sapiens
CRQAGEWGSPLLIHRATERPTRRPCPRSPSGVACWSPGNNSPTQGSLPPQLDLYAGALFVHICLGWNFYLSTILTLGITALYTIAGMVPAAGRSTQGTCKGVRRPPPPTGPREQPRKWPQQEPQKFPPPM

SEQ ID NO: 47629 - protein, 591 aa, Homo sapiens
  DOMAIN (299)..(354): Sodium:solute symporter family proteins domain identified by eMATRIX, accession number BL00456C, p-value=4.886e-28, raw score of 24.55
  DOMAIN (149)..(585): Sodium:solute symporter family domain identified by PFam, accession name SSF, E-value=8.7e-21, PFam score of 82.5
MELQIQTTERHHRKPIRVAKIQNTDNAKCWGGCGATGTLIHCWWECKMLLCDFEQVPLFLCASDFPSLKELGELRVDDAWAHGDCSSLGLIPSACGRTAMAANSTSDLHTPGTQLSVADIIVITVYFALNVAVGIWSSCRASRNTVNGYFLAGRDMTWWPIGASLFASSEGSGLFIGLAGSGAAGGLAVAGFEWNVSPGGLAACGRARAQDVVAALEGDSSQWLVSADVQATYVLLALAWVFVPIYISSEIVTLPEYIQKRYGGQRIRMYLSVLSLLLSVFTKISLDLYAGALFVHICLGWNFYLSTILTLGITALYTIAGGLAAVIYTDALQTLIMVVGAVILTIKGTALAGRGYPPCCPAVTSSGPGKELTQELRASHTRIGSALDAFDQIGGYGQLEAAYAQAIPSRTIANTTCHLPRTDAMHMFRDPHTGDLPWTGMTFGLTIMATWYWCTDQVLRLRQFGVWDSEGTRMLLGGPAIGHGAGILGQSWAAGIRKQAGYLTSLGLPVVGASHGWASVSGRALDAVSSRASVAATSVITATTAFVGSVLTPMATPQNSLIIFPEKENSHSPEALEEPGTGLAGYTSSLT

SEQ ID NO: 47630 - protein, 53 aa, Homo sapiens
PSICQNYSGLSVRMYKEEQVPVLLKLFQEIEEERLFPNLFYETRIILIPKPGS

SEQ ID NO: 47631 - protein, 270 aa, Homo sapiens
PAVASFHLTIPEAAIIVSGKMGDTAPPQAPAGGLGGASGAGLLGGGSVTPRVHSAIVERLRARIAVCRQHHLSCEGRYERGRAESSDRERESTLQLLSLVQHGQGARKAGKHTKATATAATTTAPPPAPAAPPAASQAAATAAPPPPPDYHHHHQQHLLNSSNNGGSGGINGEQQPPASTPGDQRNSALIAASPQSCWTSGLWWKVEPCPVALQASSLLELHGTSGFYVCSSLPRSALAKATGNGHASPKVLKKPKGDGAIVSNCSSKGA

SEQ ID NO: 47632 - protein, 396 aa, Homo sapiens
MLGKSLDLLDDSLAETGSKESIPQTEKLALLVLKLETYICLIRQTFLSQEIDPQASQIVSRKLKLTRSEAIEQALGHPQNGQLIHLVMESLIHSGCSLWTLTQYTNIRAQSKKSIHILFSQNSDVLQVPSPTQESGEFWVQTQPETNCQESPLVSFIGHPPRAQNKRVRCGCGSPKPVGGTCIILAGREERFWALTPRQHLRLIVYSSRSPSGPNLRLIGVPENDGKNGTKLENTLQVIIQENFPNLARQTNIQIQEIQRTPQRYSSRRATPRHIIVRFTKVEMKEKMFRAAREKGRVTHKGKPIRLTADLSAETLQARREWGPIFNILKEKNFQHRISYPAKLSFISEGEIKSFTDKQMLRDFVTTRPALKELLKEALNMKRNNWYRPLQKHAKL

SEQ ID NO: 47633 - protein, 149 aa, Homo sapiens
PSVPTEGSRNRTTAVAVEERQSDGSGSLSPGKLQTTTTGIIPALLHITGAPVSSDFRLDWLIERPKGGRRAELSIRSLALPLPQHCGSDNDWIPLQLRLLSRASFHSDDDLGFGAYRRLALHILCIHSSKEALELNTFQPVTFLNAFSK

SEQ ID NO: 47634 - protein, 899 aa, Homo sapiens; identical to SEQ ID NO: 38905
  DOMAIN (687)..(892): 3' exoribonuclease family domain identified by PFam, accession name RNase_PH, E-value=1.5e-28, PFam score of 108.3

SEQ ID NO: 47635 - protein, 439 aa, Homo sapiens
  DOMAIN (7)..(22): moaA / nifB / pqqE family proteins domain identified by eMATRIX, accession number BL01305D, p-value=7.279e-09, raw score of 14.97
  DOMAIN (277)..(439): 3' exoribonuclease family domain identified by PFam, accession name RNase_PH, E-value=0.0003, PFam score of 0.2
MAACRYCCSCLRLRPLSDGPFLLPRRDRALTQLQVRALWSSAGSRAVAVDLGNRKLEISSGKLARFADGSAVVQSGDTTVMVTAVSKTKPSPSQIMPLVVDYRQKAAAAVRIGIIDGEYVVNPTRKEMSSSTLNLVVAGAPKSQIVMLEASAENILQQDFCHAIKVGVKYTQQIIQGIQQLVKETGVTKRTPQKLFTPSPEIVKYTHKLAMERLYAVFTDYEHDKVSRDEAVNKIRLDTEEQLKEKFPEADPYEIIESFNVVAKEVFRSIVLNEYKRCDGRDLTSLRNVSCEVDMFKTLHGSALFQRGQTQVLCTATFDSLESGIKSDQVITAINGIKDKNFMLHYEFPPYATNEIGKVTGLNRRELGHGALAEKALYPVIPRDFPFTIRVTSEVLESNGSSSMASACWRKFSINGFRGSNFICCCRPYKLGLVTKTRS

SEQ ID NO: 47636 - protein, 71 aa, Homo sapiens
  misc_feature (1)...(71): Xaa = X or * as defined in Table 2
ASLRSSPFSRSLRCQGKNTPERSGLPKALFCTKPSRADLGPAGHRRPLPSVQPGXAIPGRVSRGEKNLTNR

SEQ ID NO: 47637 - protein, 847 aa, Homo sapiens
EYARLVMEAQPEWLRAEVKRLSHELAETTREKIQAAEYGLAVLEEKHQLKLQFEELEVDYEAIRSEMEQLKEAFGQAHTNHKKVAADGESREESLIQESASKEQYYVRKVLELQTELKQLRNVLTNTQSENERLASVAQELKEINQNVEIQRGRLRDDIKEYKFREARLLQDYSELEEENISLQKQVSVLRQNQVEFEGLKHEIKRLEEETEYLNSQLEDAIRLKEISERQLEEALETLKTEREQKNSLRKELSHYMSINDSFYTSHLHVSLDGLKFSDDAAEPNNDAEALVNGFEHGGLAKLPLDNKTSTPKKEGLAPPSPSLVSDLLSELNISEIQKLKQQLMQMEREKAGLLATLQDTQKQLEHTRGSLSEQQEKVTRLTENLSALRRLQASKERQTALDNEKDRDSHEDGDYYEVDINGPEILACKYHVAVAEAGELREQLKALRSTHEAREAQHAEEKGRYEAEGQALTEKVSLLEKASRQDRELLARLEKELKKVSDVAGETQGSLSVAQDELVTFSEELANLYHHVCMCNNETPNRVMLDYYREGQGGAGRTSPGGRTSPEARGRRSPILLPKGLLAPEAGRADGGTGDSSPSPGSSLPSPLSDPRREPMNIYNLIAIIRDQIKHLQAAVDRTTELSRQRIASQELGPAVDKDKEALMEEILKLKSLLSTKREQITTLRTVLKANKQTAEVALANLKSKYENEKAMVTETMMKLRNELKALKEDAATFSSLRAMFATRCDEYITQLDEMQRQLAAAEDEKKTLNSLLRMAIQQKLALTQRLELLELDHEQTRRGRAKAAPKTKPATPSVSHTCACASDRAEGTGLANQVFCSEKHSIYCD

SEQ ID NO: 47638 - protein, 68 aa, Homo sapiens
  misc_feature (1)...(68): Xaa = X or * as defined in Table 2
PQALREHSPSVXTGRQDRQLLFKDCTCQRQRRDVDSVQGKRRLHISSPQGLNSFPAVSLKLEHNVKAE

SEQ ID NO: 47639 - protein, 162 aa, Homo sapiens
  misc_feature (1)...(162): Xaa = X or * as defined in Table 2
VLYRSSRMCRKIRVLISRPFSIVKICERVLSQTSQGRHDYAAAAVSKTGQKRIHSSGTRGSGAPHSPGWWEPSPDRVGVSICFLFSLKYRLFSSCLVQPCLGPVLGNNSCSPEGPREPSPPSHGLGFPKMCTXTQVPASTTQSDNGQNHPNPGCPMPISPDS

SEQ ID NO: 47640 - protein, 229 aa, Homo sapiens
  DOMAIN (9)..(37): GLYCOSYL HYDROLASE FAMILY 48 SIGNATURE domain identified by eMATRIX, accession number PR00844D, p-value=9.563e-09, raw score of 9.26
QLRCRPGCGQQRAMDAELAEVRALQAEIAALRRACEDPPAPWEEKSRVQKSFQAIHQFNLEGWKSSKDLKNQLGHLESELSFLSTLTGINIRNHSKQTEDLTSTEMTEKSIRKVLQRHRLSGNCHMVTFQLEFQILEIQNKERLSSAVTDLNIIMEPTECSELSEFVSRAEERKDLFMFFRSLHFFVEWFEYRKRTFKPSQGKVPRCRVPLGGALLLLHGDPQRQPARV

SEQ ID NO: 47641 - protein, 73 aa, Homo sapiens
  misc_feature (1)...(73): Xaa = X or * as defined in Table 2
GRKQFPHLATGKEGCVGGQRLPCVTVELIFPAPAGAAVPRRPXLPRTAPSXLHCLPVCRMPGEAPTARHAAWV

SEQ ID NO: 47642 - protein, 874 aa, Homo sapiens
TYGWETQQLRRSQVHIQGNDPPHRCLPMHGLNSQSPSLKTGPRHRTVSMRGSNGAEAGARERPTSPGFGPQQRGGTPEPSGSSSMTHASDGEQRRALNAGSLRDSIAVPSLSPKLRPGEAKINGMHATAVPSQAEGRHQQSIMGNRLVSSLQPEGAVLGPVATSQINQNVEIQRGRLRDDIKEYKFREARLLQDYSELEEENISLQKQVSVLRQNQLLPRRGNTDQHVPALTLLTMALALTAALPQNPVCRKNKSLTKLLGVVSAEQLVVRNRAFSFPRMLAFQFDITDQALRDSQVLDEEKYPDAVYLSEGPSSCSMGIRSASRPGFQKAHNDMFYCFFRFELVIVWRIQIDEDGKVFPKLDLLTKVPQRASREECGVLVRSMPAENKRPKAATLKFLTRFNVFFIALELDKNRAIETAPLSFRTLNRDLISRPFSIVKICERVLSQTSQGRHDYAAAAVSKTGQKRIHSSGTRGSGAPHSPGCHWQDGHRHQQACLTGELTQGVHAQEGVWVLCSTAGLELRSRPKVSLSTTISTQTNNEKGKQKDMPYQFLMYLLNTPVQFAEFVMSSLREKKRHYKLNGNVQQVQQYRVAMTAKDCSIMIALSPCLQDARTFSVAIKEYLKLEESLPYVTLASPSNRHRQQPPHERSNSSKLKTTPGSVYLTVAPSHYRLPDHKGSGQDRTLGCPRRVMCRMHSKALKAGERGGRPRYNFHVDKTLMLLFPPTFELFQVEFEGLKHEIKRLEEETEYLNSQLEDAIRLKEISERQLEEALETLKTEREQKNSRNGELIYGCKDARSPVADWSELAHHLKPFFFPSNGLASGPHCTRAVIRELGARDHTGAAEWLGQGPGRHPESGARASGPASLRSQPFQ

SEQ ID NO: 47643 - protein, 584 aa, Homo sapiens; identical to SEQ ID NO: 45222
  DOMAIN (10)..(240): Diaminopimelate epimerase domain identified by PFam, accession name DAP_epimerase, E-value=1.4e-114, PFam score of 394.0

SEQ ID NO: 47644 - protein, 51 aa, Homo sapiens
AGAGCSVWTSESEKLGEAVSGGARPTLLWALPPGTPPGTKVKDPREIPLLP

SEQ ID NO: 47645 - protein, 363 aa, Homo sapiens
MVCVGGSVRVKALLWPWGVLPDYYLSSLKAHKLFSQFVVNAAWPGPHPSGRRAPLCPRAGPEMLSKSQILGLGTPRAHVVLCPAMALLVPKKGYTRQQFYHKSTPNKGDRVIYNLTRPPYCYVRFPLASTGPHILYLSQLASNLELFKRGTGRREQRKEEVTCGMLRKIIENQLDTETITISYEFILCQHLIANTEFSYLALPENYNRLFLPNSKNQTNNRFKTLNSKAIGRLLAAGGVYNGNIEGFRDTAEKLGGDAIKGYDQILNEKTAGIAIATASILLTKRSNVDTYTEINSYLGKLRGQQKLLDGIDIIEIIYIKRPSKDLANLRKEFNKTVRYQLSARPHLQFREILVLRNRNTSPG

SEQ ID NO: 47646 - protein, 305 aa, Homo sapiens
VIVSLYYGTLPSDASSKLERVNFPNLKLVGLGLGSGEGNPEAQHAGKRAIKLQAVMQPEPLTIAPSARDPYHLTVTIATNPIQHKSSSYVRTSPRSSSDRPRRQNEMDLPTLIHLPEENQLRKWENNTATSTQQCSDRKAWEKSSFLLVGMTIKLHDHFDDAAGEEAWGLALGAASEGPRGAGHPEPAPRGIIRTAGIGNIYLQEPVSSLPDLAPQFLVTSHDWLLALQSSACTCPPHSILCTPPSSSYTVHTLSASMPILSSTRPGPVFVYGSTASTLPLSSPEGGDQSLGPPPAWAGRPDALL

SEQ ID NO: 47647 - protein, 572 aa, Homo sapiens
  DOMAIN (395)..(572): RhoGEF domain identified by PFam, accession name RhoGEF, E- value=0.0011, PFam score of -3.0
MDGESEVDFSSNSITPLWRRRSIPQPHQVLGRSKPRPQSYQSPNGLLITDFPVEDGGTLLAAQIPAQVPTASDSRTVHRSPLLLGAQRRAVANGGTASPEYRAASPRLRRPKSPKLPKAVPGGSPKSPANGAVTLPAPPPPPVLRPPRTPNAPAPCTPEEDLTGLTASPVPSPTANGLAANNDSPGSGSQSGRKAKDPERGLFPGPQKSSSEQKLPLQRLPSQENELLENPSVVLSTNSPAALKVGKQQIIPKSLASEIKISKSNNQNVEPHKRLLKVRSMVEGLGGPLGHAGEESEVDNDVDSPGSLRRGLRSTSYRRAVVSGFDFDSPTSSKKKNRMSQPVLKVVMEDKEKFSSLGRIKKKMLKGQGTFDGEENAVLYQNYKEKALDIDSDEESEPKEQKSDEKIVIHHKPLRSTWSQLSAIALARTSSTIVLVRFHAADKDIPETGFFIELEARHQNNIFIDDISDIVEKHTASTFDPYVKYCTNEVYQQRTLQKLLATNPSFKEVLSRIESHEDCRNLPMISFLILPMQRVTRLPLLMDTICQKTPKDSPKYEVCKRALKEVSKVTVG

SEQ ID NO: 47648 - protein, 64 aa, Homo sapiens; identical to SEQ ID NO: 34226
  misc_feature (1)...(64): Xaa = X or * as defined in Table 2

SEQ ID NO: 47649 - protein, 424 aa, Homo sapiens
  DOMAIN (357)..(412): Sialyltransferase family domain identified by eMATRIX, accession number PF00777C, p-value=9.786e-09, raw score of 18.60
AKKFRKRWPLEEQEQNVPDGGAAPVTALRKRVTSQRCSLEFLEDAVGCAPAQRYTPPSAPSSTTPLGLPLTTCGARGSWEEKSDLCPLPCRTKHTSGSPRHKGLKKTHFIKNMRQYDTRNSRIVLICAKRSLCAAFSVLPYGEGLRISDLRVDSQKQRHPSGGVSVSSEMVFELEGVELGADGKVVSYAKFLYPTNALVTHKSDSHGLLPTPRPSVPRTLPGSRHKPAPTKSAPASTELGSDVGDTLEYNPNLLDDPQWPCGKHKRVLIFASYMTTVIEYVKPSDLKKDMNETFREKFPHVKLTLSKIRSLKREMRSLSEECSLEPVTVAMAYVYFEKLVLQGKLIKQNRKLCAGACVLLAAKISSDLRKSGVTQLIDKLEERFRFNRRDLIGFEFTVLVALELALYLPENQVLPHYRRLTQQF

SEQ ID NO: 47650 - protein, 843 aa, Homo sapiens
MESFMESLNRLKEIHEKEVLGLQNKLLELNSERCRDHTGHFIPLKPQCASTTTVLWCRRETEAQCGGGGSHLSKVTRTDITEERADDWGGCVDGTDVTEERADDWGGWDAQRIEELFSKNHQLREQQKTLKENLRVLENRLRAGLCDRCMVTQELARKRQQEFESSHLQNLQRIFILSRHCSFNSIQSAMHAASIHGAPAACQALGYVLGALLRGFPVPFAANEMNGLKEENETLKEEVKRLRGLGDRPKPRAKEGTSDPPSPLLLPSPGGWKAITEKPPGGHEEAEEDHQGVGLRGEEKPAGHRTSPVAKISPGATLPESRAPDMSPQRISNQLHGTIAVVRPGSQACPADRGPANGTPPPLPARSSPPSPAYERGLSLDSFLRASRPSAMTHEAPKLSPKVDRLCLLNRPLSLHLQSPHSSPLAPAAAPSDPRLQDLKAREAEAWEEPTELLGLPSALAGMQDLRLEGALHLLLAQQQLRARARAGSVRPRGQPTPGEMLPSLPVGSDSEGPENEGTRAALAAAGLSGGRHTQPAGPGRAQRTEAAATQDCALDKPLDLSEWGRARGQDTPKPAGQHGSLSPAAAHTASPEPPTQSGPLTRSPQALSNGTKGTRVPEQEEASTPMPPDLDGHPEPSKAEVLRPESDELDETDTPGSEVGLSSQAEATTSTTGEGPECICTQEHGQGPPRKRKRASEPGDKGTAGMGQPFPGSAHALGGNGPLGPPPLPAKLQAQSWTPPRGLTANRCLAEASHVPALLPGVSGRCRGMRSSTEVHAPVRPELYDSARAATDPCGARGSWEEKSDLCPLPCRTKHTSGSPRHKGLKKTHFIKNMRQYDTRNS

SEQ ID NO: 47651 - protein, 502 aa, Homo sapiens
  DOMAIN (400)..(447): kw TRANSCRIPTASE REVERSE II ORF2 domain identified by eMATRIX, accession number DM01354V, p-value=5.500e-35, raw score of 12.97
  DOMAIN (226)..(413): Reverse transcriptase domain identified by PFam, accession name rvt, E-value=0.0048, PFam score of -26.3
MDAMFPLSAALKVWAPLPLRYWLQISVSHFQIAHYNPGLGHTGGARTAKSVFFPQRSGNKGGTATLAMAKVLSVSSENSNAERHRGAANEIVQPGVRDPGFLVGRTMAAGTRVFRDPGPSGLQVGLSGGSAQTPHGSACQSGGPMSSRSRESPVPRIAKVHRSIAEVNTKFNNYLHQKRHLRKNQKPGSTACSFERDLYLPFEERRGEPLQLQPWLKGAKVQIGPLFQRMQAPSLGGFHVVLGLTVHRRQEFKNLHEDFRRCLKTPACLGRSLLQGQSLHEKLLPDQLAVTLLYVQFPDVNNKLLANYQVLEVLARAIRQEKETMGIQIGREEVKFSLFADDMNLYLENPIIISAPKLLKLISNFSKVSGHKINVQKSQAFLYINNTQAKSQIMNELPFRITTKRIKYVGIQLTRYVKDLFEENYKPLLKEIREDANKWKNIPSSLIGRINIVKMATLTKVIYRFNAIPIKLPLTFFTELEINWHMCTYVTNLHIVHMYPKT

SEQ ID NO: 47652 - protein, 181 aa, Homo sapiens
EELCVREHVTGGICGGSQMMVVLLGATTLVLVAVAPWVLSAAAGERRGGESWRRAGGRARSWATGAAMLLGATDAQSGKPSVHFAAPKIKPDLGSQINQEKVVFWVLSCRLPVAVYGSSGAPGSHPREMAVPELCVEFDSFRETHQILLVYFVCGPRQLFFQCGPRKPKRVDTLDADEACR

SEQ ID NO: 47653 - protein, 575 aa, Homo sapiens
  DOMAIN (51)..(97): RECEPTOR PRECURSOR TRANSMEMBRANE domain identified by eMATRIX, accession number PD02520A, p-value=1.000e-40, raw score of 24.85
EELRVREHVTGGICGGSQMMVDLLGATTLELVAVAPWVMSAAAGGKNLKSPHKVEVDIIDDNFILRWNRSDESVGNVTFSFDYQKTGMDNWIKLSGCQNITSTKCNFSSLKLNVYEEIKLRIRAEKENTSSWYEVDSFTPFRKAQIGPPEVHLEAEDKAIVIHISPGTKDSVMWALDGLSFTYSLLIWKNSSGVEERIENIYSRHKIYKLSPETTYCLKVKAALLTSWKIGVYSPVHCIKTTVENELPPPENIEVSVQNQNYVLKWDYTYANMTFQVQWLHAFLKRNPGNHLYKWKQIPDCENVKTTQCVFPQNVFQKGIYLLRVQASDGNNTSFWSEEIKFDTEIQAFLLPPVFNIRSLSDSFHIYIGAPKQSGNTPVIQDYPLIYEIIFWENTSNAERKIIEKKTDVTVPNLKPLTVYCVKARAHTMDEKLNKSSVFSDAVCEKTKPGNTSKIWLIVGICIALFALPFVIYAAKVFLRCINYVFFPSLKPSSSIDEYFSEQPLKNLLLSTSEEQIEKCFIIENISTIATVEETNQTDEDHKKYSSQTSQDSGNYSNEDESESKTSEELQQDFV

SEQ ID NO: 47654 - protein, 123 aa, Homo sapiens
RIRGSSACGSIGLCSGGSSTRLCSGNPQRLKPWQDAFSGTDWMLEKMDLKEFDLDALLGIDDLETMPDDLLTTLDDTCDLFAPLVQETNKQPPQTVNPIGHLPESLTKPDQVAPFTFLQPLPL

SEQ ID NO: 47655 - protein, 144 aa, Homo sapiens
LPRFVGQQPRPLGPLRGSGSEGCRAPGEAVRAPDYAFPIPGTRASPLNRFPLGGTAWPQAHPTNPKPAPAPGAQLDDPPRYSRHGLSRWGLPLQSLVLLPPLQRPMLPQAAAPNTPWWPWTLRAGRRENAHAQRKLHLWAGKVE

SEQ ID NO: 47656 - protein, 93 aa, Homo sapiens
VASREGQIQLPCSSPFDQSGLGAEESLGLLDDYLEVAKHFKPHGFSSDKAKAGSSEWLAVDGLVSPSNNSKGEWATTTSSWWDLGLGASYLCI

SEQ ID NO: 47657 - protein, 121 aa, Homo sapiens
  DOMAIN (80)..(110): bZIP transcription factor domain identified by PFam, accession name bZIP, E-value=0.00024, PFam score of 20.8
RVLGLEESLGLLDDYLEVAKHFKPHGFSSDKAKAGSSEWLAVDGLVSPSNNSKEDAFSGTDWMLEKMDLKEFDLDALLGIDDLEKKNEALKERADSLAKEIQYLKDLIEEVRKARGKKRVP

SEQ ID NO: 47658 - protein, 410 aa, Homo sapiens
VRSSRRSRGRHKDGKHVVGPLRCAEGRCTYKPVAGAVWAGGSAAGGSLLVAGLKKQFYKASQLVSEKVGGSEGTKLDNDFKEMEKKVDVTSKAVTEVLARTIEYLQPNPASQAKLTMLNAVCKIRGQVKNPGYPQSEGLLSECLIRHQKELGNESNFSDALLDAGESMKHLAEVKDSLDIEKRQDKIPDEELRQALEKSEDSKEVAETSMRSWTPTLSRVHGHHGVSGAAVPVAALAFAAAAAAPGSAAAPPSGLSHGASQGIQQQRCSKHRNMTEMSFLSSEVLVGDLMSPFDQSGLGAEESLGLLDNYLEVAKHFKPHGFSRDKAKAGFSEWLAVDGLGSPSNNSKEDAFSGTDWMLEKMDLKEFVFDALLGIDDLETMPDELLTTLDDTCDLFAPLVRETNKETPRR

SEQ ID NO: 47659 - protein, 366 aa, Homo sapiens
  DOMAIN (297)..(310): bZIP transcription factors basic domain proteins domain identified by eMATRIX, accession number BL00036, p-value=2.241e-09, raw score of 9.02
  DOMAIN (307)..(366): bZIP transcription factor domain identified by PFam, accession name bZIP, E-value=2.9e-19, PFam score of 73.3
  misc_feature (1)...(366): Xaa = X or * as defined in Table 2
RRMSFMSSEVLVGELMSPFDQSGLGAEESLGLLDDYLEVAKHFKPHGFSSDKAKAGLLPNGLAVDGLVSPSNNSKEDAFSGTDWDVGRKWVLKEFDFGCPCLGIEXPWETIARLTFLTTFGIDICDSLLPPXFQGRLIKAAPPRRLNPIGHLPQKFLTKPRPGLAPFTFLQPLPLSPGVLSSTPDSFPFSFRSWGSXKWDIHXKGDXRKPDYTAYVAMIPQCIKEEDTPSDNDSGICMSPESYLGSPQHSPSTRGSPNRSLPSPGVLCGSARPKPYDPPGEKMVAAKVKGEKLDKKLKKMEQNKTAATRYRQKKRAEQEALTGECKELEKKNEALKERADSLAKEIQYLKDLIEEVRKARGKKRVP

SEQ ID NO: 47660 - protein, 419 aa, Homo sapiens
  DOMAIN (362)..(408): Vertebrate metallothioneins proteins domain identified by eMATRIX, accession number BL00203, p-value=2.484e-11, raw score of 13.94
  misc_feature (1)...(419): Xaa = X or * as defined in Table 2
DSCCIQGTMRLSRTQQRPGVEGSLKQHQRLHSNFSSINESVFIVSFSLNTIGSGGRGAEGEPGREPLSRPQPPAGPLGGALPAPPSLMPQLXSEXGRLLQLLYLLLQPAVCSCSRCSAPRSRCVARPAARTGLPTPAPASSPCSRSLSSSRSLSSSCRVSCCHSLSSCCRSLSCSRSSSTSSRSSSTSSSSLSLSSSLSCSSCRLSCSNSFSTSSSSLSLSSSLSCSSCCLSCSNSFSTSSSSLSLSSSLSCSSCRLSCSNSFSTSSSSLSCPGSFSCSHSLSSCSRSLSSCSHSLSSCSRSLSSCSHSLSSCSRSLSSCSHSLSSCSRSLSSCSHSLSSCSRSLSSCSCSLSSCSRSLSSCSHSLSSCSHSLSSCSRSLSSCSCSLSSCSRCLSSCSCSLSSCSRSLSSCLLFRRLNI

SEQ ID NO: 47661 - protein, 95 aa, Homo sapiens
KQQFLPLVWDLQLDLLEREDLLYEMQVPMLPLEHHYNRTFTSSLLPLTPSRSLVPMRQSFQNLGLDNRAYRCIKCFTHGKSSKKLLFCLSPFLHI

SEQ ID NO: 47662 - protein, 235 aa, Homo sapiens
  DOMAIN (58)..(235): SCAN domain identified by PFam, accession name SCAN, E-value= 2.5e-80, PFam score of 280.3
  misc_feature (1)...(235): Xaa = X or * as defined in Table 2
VIAPGLWMMAADIPRVTTPLSSLVQVPQEEDRQEEEVTTMILEDDSWVQEAVLQEDGPESEPFPQSAGKGGPQEEVTRGPQGALGRLRELCRRWLRPEVHTKEQMLTMLPKEIQAWLQEHRPESSEEAAALVEDLTQTLXDSWVQEAVLQEDGPESEPFPQSAGKGGPQEEVTRGPQGALGRLRELCRRWLRPEVHTKEQMLTMLPKEIQAWLQEHRPESSEEAAALVEDLTQTL

SEQ ID NO: 47663 - protein, 92 aa, Homo sapiens
  misc_feature (1)...(92): Xaa = X or * as defined in Table 2
SSGFWPLRFPLDVIKAVSTIAVHEKEESLWPRVAVFSTLAPESPPWGEAPQSAGRXSGVPEDHVHLRYRGTLSLACCSSRHHPPAQLSHYKN

SEQ ID NO: 47664 - protein, 297 aa, Homo sapiens
  DOMAIN (203)..(279): SCAN domain identified by PFam, accession name SCAN, E-value= 9e-27, PFam score of 102.4
MQTPLPSAVLQAGWGLLTPGRSGHRWRIAALALGLVERDGVLKFGSWGQGPGPSIASLGSDGQLWLLDPRDLCHPVSSVQCPVSVPSPDPELLRVTWAPGLKNCLAISGTAQAVSPKPYSGDRGQVRLRADYISHNALGPASLLPPGWVPSPPTERQNFQGRSRQPMSAAVPQEEDRQEEEVTTMILEDDSWVQEAVLQEDGPESEPFPQSAGKGGPQEEVTRGPQGALGRLRELCRRWLRPEVHTKEQMLTMLPKEIQAWLQEHRPESTLLSSPKFWNDCLIGTNDLEGVNGNNWK

SEQ ID NO: 47665 - protein, 92 aa, Homo sapiens
  misc_feature (1)...(92): Xaa = X or * as defined in Table 2
QVLLQGALLLLITVAQAGRVLKLGVSREFQDLLILWGKETFRRCPGPCSPALHLQPGSSIPSSQQLLXYLAAEQPQLHRGPPRTPAPVSGAE

SEQ ID NO: 47666 - protein, 99 aa, Homo sapiens
  DOMAIN (70)..(99): Laminin G domain identified by PFam, accession name laminin_G, E-value=0.00078, PFam score of 17.7
ETNNENGLVDGGKVGMQPLVLFERSLYPGSLLCSGKAHCTLDAAASFFGENHLEVTVAMALTDIDLQLQFSTSQPEALLLLAAGPADHLLLQLYSGHLQ

SEQ ID NO: 47667 - protein, 117 aa, Homo sapiens
MGKGDLQAVPGPCSPAPHLQPGSSIPCPSSSFSTWLQSSRNFTEDRPVPPPLSRERSSGGLFSRPHTLFAERPGQTTSTRFRSHWRPLIPAPAAHASLHPWCLIIAPGSHEIVDPGI

SEQ ID NO: 47668 - protein, 77 aa, Homo sapiens
  misc_feature (1)...(77): Xaa = X or * as defined in Table 2
GKNSTLQQFNNLLHYSSITVAVNNPTLGNSVSVFPLYILFTGIHQLVKVILRKLGKXRFGLELASLSLLFLPPVSLF

SEQ ID NO: 47669 - protein, 59 aa, Homo sapiens
GQQFASFFGYNHPEVTVAMALTDIDLQLQFSMSQPEALLLLAAGPADHLLLQLYSGHLQ

SEQ ID NO: 47670 - protein, 131 aa, Homo sapiens
  misc_feature (1)...(131): Xaa = X or * as defined in Table 2
DHAYVFLGRTACYLMKAYRKVNPRVIFSSNTIETHPKDLLHSCDHPFAEKTQFTVSTLDDVKNSGSIRDNYCRTSEISAVHIDTECVSVMLQAGTPPLQVKXRKNFQQRKQGXKMKWDPSDISNSMAEVLG

SEQ ID NO: 47671 - protein, 49 aa, Homo sapiens
  misc_feature (1)...(49): Xaa = X or * as defined in Table 2
EKEIPGPWLLGAMRFRFCGDLDCPDWVLAEISTLAKIPLXSCGCSAARY

SEQ ID NO: 47672 - protein, 200 aa, Homo sapiens
QFYNKTPSRSECPNLLHHMRTEGPPGGVDQPDGHQAGWPPPEPAGQQRGRQSGCHLLQGGASPRPSCGTVHARACTPPASCPPCHRYRSHLQRGKWWPKGLPQHTRLDHTEVLGAAEGSTVSAVPSATRAARDHVRRLQTRKCFCKGALLLLITAARAGRVLFGQPQLLQFTGQGFAIDTVLGRTGEDETQHCHCGLHIA

SEQ ID NO: 47673 - protein, 120 aa, Homo sapiens
GRGARGGSGAGASAAVWLSAEAVGQGPPAWLPQPLVRVRRAPLLPLLFQESAGRAAPRPLGHRGRLLQLPGPRRGGGAGHGAARALPGAQRGSRHGAQGSQSSTHDLLVTGASAEEMGIL

SEQ ID NO: 47674 - protein, 431 aa, Homo sapiens
  DOMAIN (153)..(276): Laminin G domain identified by PFam, accession name laminin_G, E-value=0.0011, PFam score of 17.2
KHRIIETAEETSGTSAGRNNVIFFAYNMTAGFGGHSDAENNEKKSALQLEQQVKELQEKLDEVKEMSQYQELAVALESSSVTINQLNENIESLLALVEHSVKVAALDVAEGGAASGAGLQVAEAEALPLTHTVSAFVFGPVGRTGVGPSEGPAGGRRGDFIYVDIFEGHLRAVVEKGQGTVLLHNSVPVADGQPHEVSVHINAHRLEISVDQYPTHTSNRGVLSYLEPRGSLLLGGLDAEASCHLQEHRLGLIPGATNVSLLGCMEDLRVNGQRQGLREALLTRNMAAGCRLEEEEYEDDAYGHYEAFSTLAPEAWLAMELPEPCVPEPGLPPVFANFTQLLTISPLVVAKGGTAWLEWWHVQPTLDLIGAELRKSQCSAPCGSGVQRRLVKCVNTQTGLPEEDSDQCGHEAWPESSRPCGTEDCEPIESP

SEQ ID NO: 47675 - protein, 887 aa, Homo sapiens
  DOMAIN (96)..(137): kw TRANSCRIPTASE REVERSE II ORF2 domain identified by eMATRIX, accession number DM01354I, p-value=1.000e-40, raw score of 15.55
  DOMAIN (224)..(491): Reverse transcriptase domain identified by PFam, accession name rvt, E-value=5.4e-32, PFam score of 119.7
MRQKVNKDIQELNSALHQVDLIDIYRTLHPKSTEYTFFSAPHLTYSKIDHLVSSKALLSKCKRTEIIRNCLSDHSATKLELRIKKLTQNRSTTWKLNNLLLNDYWVHNEMKAEIKMFFETNENKNTTYQNLWDTFKAVCRGKFIALNTHNRKQERSKIDTLTSQLKEPEKQDQTHSKASRRQEITKIRAELKEIETQKTLQKINESRSWFFEKINKIDRPLARLIKKEGEKNQIHTIKNDKGDLTTNPIEIQTTIREYYIHFYANTLENLEEMDKFLNTYTLLRLNQEEVESLNRRITGSEIEAIINSLPTKKSPGPDAEKAFDKSQQRFMLKTLNKLGIDGTYLKIIRAIYDKPIANIILNGQKLEAFPLKTGTRQGCPLSPLLFNIVLEVLARAIRQEKEIKGIQSGKEELKLSLFADDMIVYLENPILSAQNLLKLIGNFSKVSGYKINVQKSQAFLYTKNRQTESQIMSELPFTIASKRIKDLGIQLTRDVKDLFKENYKPLLEEIKEDTNKWKNIPCSWIGGINIVKIAILPKPCGKLKLDPFLTPYTKINSRWIKDLHVRPKNVKTLEENLGNTIQDIGMGKDFMSKTPKAMATKAKIDKWDLIKLKSFCTVKETTIRVNRQPTEWEKIFAIYSSDKGLISRIYNELKQIYKKKTNNPIKKWAKDMNRHFSKEDIYAAKRHMKKCSASLAIREMQIKTTMRYHLTPVRMATIKKSGNNRGYMTMLEQESFFLSLNIAYDSVLLPVILPVPPFGVPDFPQQVPGSSHWDWLDSECSPWRCSLTGRHLPVGANRHLIEVGAPLGRSFQRKDQAAIFAVLQPLLVIPRQTASGVDLRQPPTDLQEHNSSPAREENWTENEFDELTEVGFRRLVITKFSELKEDV

SEQ ID NO: 47676 - protein, 762 aa, Homo sapiens
  DOMAIN (279)..(304): 7 kw REVERSE TRANSCRIPTASE RNA POLYMERASE domain identified by eMATRIX, accession number DM00895E, p-value=3.333e-11, raw score of 15.72
  DOMAIN (252)..(525): Reverse transcriptase domain identified by PFam, accession name rvt, E-value=5.5e-76, PFam score of 265.9
AIKLELRIKKLTQNCSPTWKLNNLLLNDYWVHNEMKAEIKMFFETNENKDTTYQNLWDTFKAVCRGKFIALNAHKRKQERSKIDTLTSQLKELEKQEQTYSKASRRQEITKIRAELKEIETQKILQKINESRSWFFEKINNIDRPLARLIKKKREKNQIDAIKNDTGDITTNPTEIQTTIREYYKHLYTNKLENLEEMDKFLDIYTLPRLNQEEVESLNRPITGSEVEAIINSLPTKKIPGPDGFTAEFYQRKRGILPNSFYEASIILIPKPGRDTTNKENFRPISLMNIDAKILNKILANRIQQHIKKLIHHDQVGFIPGMQGWFNIRKSINVIQHINRTNDKNHMVISIDAEKTFDEIQQPFMLKTLNKLGIDGTYLKIIRAVYDKPTGNIILNGQKLEAFPLKTGTRQGCPLSPLLFNIVLEVLARAIRQEKEIKGIQLGKEEVKLSLFADDKIVYLENPIVSAQNLLKPIGNFSQVSGYKINVQKLQAFLYTNNRQTESQIVSEFPFTIASKRIKYLGIQLIRDMKDLFKQNYKPLLNEIKEDTNKWKNIPCSWIGRINIMKMAILPKVIYRFNAIPIKLPMTFFTELEKTTLNFRWNQKRARIAKSILSQKNKAGGITLPDFKLYYKATVTKTAWYWYQNRDIDKWNRTEPSEIMPHIYNHLIFDKPDKNKKWGKDSLFNKWCWENGLAICRKLKLDPFLTPYTKINSRWIKDLNVRPKTIKALEENLGNTIEDIGMGKDFMSKTPKARATKDKIDK

SEQ ID NO: 47677 - protein, 664 aa, Homo sapiens
  DOMAIN (110)..(151): kw TRANSCRIPTASE REVERSE II ORF2 domain identified by eMATRIX, accession number DM01354I, p-value=1.000e-40, raw score of 15.55
  misc_feature (1)...(664): Xaa = X or * as defined in Table 2
MGDFNTPLSTLDRSMRQKVNKDIQELNSAVHQVDLIDIYRTLHPKSTEYTFFLAPHRTYSKIDHIVGSKALLSKCKRTEIIRNCLSDHSAIKLELRINKLTQNCSTTWKLNNMLLNDYWVHNEMKAEIKMFFETNENKDTTYKNLWDTFKAVCRGKFIALNAHKRKQERSKIDTLTSQFKELEKQEQTHSKASRRQEITKIRAELKEIETQKTLQKINESRSWFFEMISKIDRPLARLIKKKREKNQIDTIKNDKGDIITDPTEIQTTIREYYKHLYAIKLENLEEMDKFPYTNTLPRLNEEEIESLNRTITGSEIEAIIKSLPTKKSPGPDGFTAKFYQRYKEELVPFLLKLFQSIEKEGILPNSFYEASIILIPKPDVGSSSQGNQAGERNKGYSFRKRGSQIVPVCRXYDCTFRKSHFLSPKSPXADKQLQQSLRIQNQCAKITSIPIHHQQTNREPNHEXTPIHNCFKENKIPRNPTYKGCEGPLQGELQTTAQXNKKGHKQMEEHSMLMDRKNQYRENGHTAQGNLQIQCHPHQATNDFLHRIGKNYFKVHMEPKKSPHCQDTPKQKEXSWRHHATXLQTILQGYSNQNSMVLVPKQRYRPMEQNRALRNNTTHLQQSDLXQTXQKEEMGKGFPIXXMVLGKLASHMXKAETGSLLYIL

SEQ ID NO: 47678 - protein, 559 aa, Homo sapiens; identical to SEQ ID NO: 37206
  DOMAIN (514)..(539): 7 kw REVERSE TRANSCRIPTASE RNA POLYMERASE domain identified by eMATRIX, accession number DM00895E, p-value=4.889e-11, raw score of 15.72
  DOMAIN (40)..(226): AP endonuclease family 1 domain identified by PFam, accession name AP_endonucleas1, E-value=5.2e-05, PFam score of -40.6

SEQ ID NO: 47679 - protein, 725 aa, Homo sapiens
  DOMAIN (110)..(151): kw TRANSCRIPTASE REVERSE II ORF2 domain identified by eMATRIX, accession number DM01354I, p-value=1.000e-40, raw score of 15.55
  DOMAIN (358)..(581): Reverse transcriptase domain identified by PFam, accession name rvt, E-value=1.1e-51, PFam score of 185.1
MGDFNTPLSTLGRSTRQKVNKDTQELNSALHQADLIDIYGTLHPKSTEYTFFSAPHHTYSKIDHIVGSKALLSKCKRTEIITNCLSDHRAIKLELRIKKLTQNRSTTWKLNNLLLNDYWVHNEMKAEIKMFFETNENKDTTYQNLWDTFKAVCRGKFIALNAHKRKQERSKIDTLTSQLKELEKQEQTHSKASRRQEITKIRAELKEIETQKTLQKINESRSWFFERINKIDRPLARLIKEKREKNQIDATKNDKGDITTDPTEIQTTIREYYKTLYANKLENLEEMDKLLDTYTLPRLNQEEVESLNRPITGSEVVAIINSLPTKNSPGPDGFTAKYYQRYKEELVPFLLKLFQSTEKEGILPNSFYEASIILIPKPGRDTTKKENFRPISLMNVDAKILNKILANRIQQHIKKLIHHDQVGFIPGMQGWFNICKSINVIQHINRTKDKNHMIISIDAEKAFDKIQQPFMLKTLNKLVLEVLARAIRQEKEIKGIQLGKEEVKLSLFADDMIVYLENPIISAQNLLKLISNFSKVSGYKINVQKSQAFLYTNNRQTESQIMSELPFTIASKRIKYLGIQLTRDVKDLFKENYKPLLNEIKEDTNKWKNIPCSWIGRINIVKMAILPKVIYRFNAIPIKLPMTFFTELEKTTLKFIWNQKRARITKSILSQKNKAGGITLPDLKLYYKAIVTKTAWYCYQNRDIDQWNRTEPSEIMLHIYNYLIF

SEQ ID NO: 47680 - protein, 590 aa, Homo sapiens
  DOMAIN (110)..(151): kw TRANSCRIPTASE REVERSE II ORF2 domain identified by eMATRIX, accession number DM01354I, p-value=1.000e-40, raw score of 15.55
  DOMAIN (209)..(437): Reverse transcriptase domain identified by PFam, accession name rvt, E-value=2e-06, PFam score of 21.6
MGDFNTPLSTLDRSMRQKVNKDTQELNSALHQADLIDIYRTLHPKSKEYTFFSALHHTYSKIDRTVGSKALLSKCKRTEIITNSLSDHRAIKLELRIKKLTQNRSTTWKLNNLLLNDYWVHNEMKAEIKMFFETNENKDTTYQNLWDTFKAVCRGKFIALNAHNRKQERSKIDTLTSQLKELEKQEQTQSKASRRQEITKIRAELMEIETQKTLQKSNESRSWFFERINKIDRPLARLIKKKREKNQIDVIKNDKGDITTDPTEIQTTIREYYKHLYANKLENLEEMDKFLDTYTLPRLNQEEVESLNRPITGSEIVAIINSLPTKKSPGPDGFTVEFYQRAIRREKEIKGIQLGKEEVKLSLFGDDMIVYLENPIVSDQNLLKLVSNFSKVSGYKINVQKSQAFLYTNNRQTESQIMSELPFTIASKRIKYLGIHLTRDVKDLFKENYKPLLNEIKEDTNKWKNIPCSWVGRINIVKMAILPKVICRFSAIPIKLPMTFFTELEKSTLKFIWNQKRARITKSILSQKNKAGGITLPDFKLYYKATVIKTAWYWYQNRDIDQWNRTEPSEIMPHIYNNLIFDKLEKNKQW

SEQ ID NO: 47681 - protein, 367 aa, Homo sapiens
  DOMAIN (159)..(200): kw TRANSCRIPTASE REVERSE II ORF2 domain identified by eMATRIX, accession number DM01354I, p-value=6.447e-40, raw score of 15.55
MAQELHDECTSLSSRCDQLEERVSAMEDEMNEMKREEKFREKRIKRNEQSLQEIWDYVKRPNLRLIGVPESDGENGTKLENTLQDIIQENFPNLARQANIQIQEIQRTPQRYSSRRATPRHIIFRFTKIEMKEKMLRAAREKELRIKKLTQNRSTTWKLINLLLNDYWVHNEIKAEIKMFFETNENKDTTYQNLWDTFKALCRGKFIALNAHKRKQERSKIDTLTSQLKELEKQEPTHSKASRRQEITKIGAELKEIETQKTLQKINESRSWFFEKINKIDRPLARLIKKKREKNQIDAIKNDNGDITTDTTEIQTTIREYYKHLYANKLENLEEMDKFLDTYTLPRLNQEEVESPKRPIAGSEIEA

SEQ ID NO: 47682 - protein, 538 aa, Homo sapiens
  DOMAIN (96)..(137): kw TRANSCRIPTASE REVERSE II ORF2 domain identified by eMATRIX, accession number DM01354I, p-value=1.000e-40, raw score of 15.55
  DOMAIN (224)..(491): Reverse transcriptase domain identified by PFam, accession name rvt, E-value=5.4e-32, PFam score of 119.7
MRQKVNKDIQELNSALHQVDLIDIYRTLHPKSTEYTFFSAPHLTYSKIDHLVSSKALLSKCKRTEIIRNCLSDHSATKLELRIKKLTQNRSTTWKLNNLLLNDYWVHNEMKAEIKMFFETNENKNTTYQNLWDTFKAVCRGKFIALNTHNRKQERSKIDTLTSQLKEPEKQDQTHSKASRRQEITKIRAELKEIETQKTLQKINESRSWFFEKINKIDRPLARLIKKEGEKNQIHTIKNDKGDLTTNPIEIQTTIREYYIHFYANTLENLEEMDKFLNTYTLLRLNQEEVESLNRRITGSEIEAIINSLPTKKSPGPDAEKAFDKSQQRFMLKTLNKLGIDGTYLKIIRAIYDKPIANIILNGQKLEAFPLKTGTRQGCPLSPLLFNIVLEVLARAIRQEKEIKGIQSGKEELKLSLFADDMIVYLENPILSAQNLLKLIGNFSKVSGYKINVQKSQAFLYTKNRQTESQIMSELPFTIASKRIKDLGIQLTRDVKDLFKENYKPLLEEIKEDTNKWKNIPCSWIGGINIVKIAILPK

SEQ ID NO: 47683 - protein, 626 aa, Homo sapiens
  DOMAIN (342)..(383): kw TRANSCRIPTASE REVERSE II ORF2 domain identified by eMATRIX, accession number DM01354I, p-value=1.000e-40, raw score of 15.55
  DOMAIN (133)..(328): AP endonuclease family 1 domain identified by PFam, accession name AP_endonucleas1, E-value=4.9e-30, PFam score of 113.2
MVLALTGNKADLASKRPLEFQEAQAYADDDSWLFMETSAKGAMNVNEIFMAIAEKLPKNKPQNAAGAPDRNQGYLSACEFSGRKLPKQTTKHIKQSLRTKLCGASYASSNLIPRKLYEPPLVIPRKTGSGVDLQQTPTDLQLWVLTVRRKSNKQKGYPHQNPICMLPSSKTKDFKPTKIKRDKDGHYIMVKGSIQQEELTVLNINAPNTGAPRFIKQALRDLQRDLDSHTIIMGDFNTPLSTLDRSTRQKVNKDIQELNSALHQADLIDIYRTLHPRSKDYTFFSAPHHTYSKIDHIVGSKALLAKCKRTEITRNCLSDHSAIKLELRIKKLTQKCSTTWKLNNLLLNDYWVHNEMKAEIKMFFETNENQDTTYQNLWDTFKAVCRGKFIALNAHKRKQERSKIDILTSQLKELEKQEQTHSKASRRQEITKIRVELKEIKTQKTLQKINESRSWLFEKINKIDRQLARLIKKKREKNQIDAIKNDKGDITTDPTEIQTTIREYYKHLYAKKLENLEEMDKFLDTYTLPRLNQEEVESLNRPITGSEIEAIIKSLPAKKSPGPDGFTAEFYQRCEKELAQFLLRLFKSTEKEGILPNSFYEDSIILILPKPGRDTTKKENFRPISL

SEQ ID NO: 47684 - protein, 587 aa, Homo sapiens
  DOMAIN (226)..(267): kw TRANSCRIPTASE REVERSE II ORF2 domain identified by eMATRIX, accession number DM01354I, p-value=1.000e-40, raw score of 15.55
ALEASYFISSKTSGQKRYQPHCPPSCDHNCLQKGLYLHSPPQFPFNGFKAFKSALMSSYWCSGKGDVIDDWCRCDLSAFDANGLPNCSPLLQPVLRLSPTVEPSSTVVSLEWVDVQPAIGTKVSDYILQHKKVDEYTDTDLYTVGKVNPLGSYKFRGLSRIALVATCSWFSAPPRSSNGSRGQPKWLPSSFGLGLTLVLYWWEHSAIKLELRIKKLTQNRSTTWKLNNLLLNDYWVHNEMKAEIKMFFETNENKDTTYQNLWDTFKAVCRGKFIAINAHKRKQERSKIDTLTSQLKELKKQEQTHSKASRRQEITKIRAEVKEIETQKTLQKINESRSWFFERINKIDRPLARLIKKKREKNQIDAIKNDKGDITTDPTEIQTTIREYYKHLYANKLENLEEMDKFLDTYTIPRLNQEEVESLNRPITGSEIVAIINSLPTKKSPGPDGFTAEFYQGYKEELVSFLLKLFQSTEKEGILPNSFYEASIILIPKPGRDTTKKENFRSISLINIDAKILNKILANRIQQHIKKRIHHDQVGFIPGMQGWFNICKSINAIQHINRTKDKNHMIISIDAEKAFDKIQQPSC

SEQ ID NO: 47685 - protein, 625 aa, Homo sapiens; identical to SEQ ID NO: 35248
  DOMAIN (272)..(317): kw TRANSCRIPTASE REVERSE II ORF2 domain identified by eMATRIX, accession number DM01354N, p-value=1.000e-40, raw score of 13.17

SEQ ID NO: 47686 - protein, 537 aa, Homo sapiens
  DOMAIN (419)..(444): 7 kw REVERSE TRANSCRIPTASE RNA POLYMERASE domain identified by eMATRIX, accession number DM00895E, p-value=2.889e-11, raw score of 15.72
MTDCTGKIGTLPPKYCAVPTVLANSTPGNYIPHMAQQDCSSSPAMEQSWTENDFDKLTEVAFRKSVITNFSELKEDVRTHCKGAKNLENRLDEWLTKINSVGKPLNDLRKLKTMARELPPHHTYSKIDHIVGSKALLSKCKRTEITTNCLSDHSAIKFELRIKKLTQKHTTTWKLNNLLLNDYWVNNEMKAEIKMFFETNENKDKMYQNLWDTFKAVCRGKFIALNAHKRKQERSKIDILTSQLKELEKQEQTNSNASRRQEITKIRAELKEIKIQETLQKISESSSWFFEKISKIDRPLARLIKKKKEKNQIDTIKVDKGDITTDPTEIQTTIREYYKHLYANEVENLEEMDKFLDTYTLPRLHQEEVKSLNRPITSSEMEVVINSLPTEKKSPGPDGFTVKFYQRYKEELRHNNNKKENFRPISLMNINEKILNRILANRIQQHIKKLIHYDQACFIPGMQGSFNIRKSIHIIHHINRTNDKNHMIISIDAEKAFDKIQQDFMLKTLNKLGIDGTYLKIVRATYDKPTASIILNG

SEQ ID NO: 47687 - protein, 1513 aa, Homo sapiens
  DOMAIN (959)..(970): NEUROKININ RECEPTOR SIGNATURE domain identified by eMATRIX, accession number PR00244D, p-value=1.000e-13, raw score of 6.84
  DOMAIN (413)..(688): Reverse transcriptase domain identified by PFam, accession name rvt, E-value=3.2e-82, PFam score of 286.6
MGRKNRKLDSRQHSYTSPQSRSHEDPAAVLQALSSSGVVIYQSLVAVQSPLAAPGCDGSRCEVRGLTVGSRYGSWRLAGCRDNEMVNACQSGWCYQNLTVLRGWKVLLEMTPHHTYSKIDHILGSKALLSKCKRTEIITNYLSDHSAMKRELRIKNLTQNRSTTWKLNNLLLNDYWVHNEMKAEIKMFFETNENKDTTYQNLWDIFKAVCRGKFIALNAHKRKQERSKTDTLTSQLKELEKQEQTHSKASRRQEITKIRAELKEIETQKTLQKINESRSWFFERINKIDRPLARLIKKKREKNQIDAIKNDKGDITTDPTEIQTTIREYYKHLYANKLEDLEEMDKFLNTYTLPRLNQEEVESLNRPITGAEIVAIINSLPTKKSPGPDGFTAEFNQRYKEELVSFLLKLFQSIEKEGILPNSLDEASIILIPKPGRDTTKKENFRPISLMNIDAKILNKILANRIQQHIKKLIHHDQVGFIPGMQGWFNRCKSINVIQHINRTNDKNHMIISIDAEKAFNKIQQPFMLKTLNKLGIDGTYLKIIRAIYDKPTANSILNGQKLEAFPLKTGTRQGCPLSPLLFNIVLEVLARAIRQEKEIKGIQLGKEEVKLSLFADDMIVYLENPMVSAQNLLKLISNFSKVSGCKINVQKSQAFLYTNNRQTESQIMSEFPFTIASKRIKYLGIQLTREVKDLFKENYKPLLKEIKEDTNKWKNIPCSWIGRINITKMAILPKVIYRFNAIPIKLPMTFFTELEKTTLKFIWNQKRAHIAKSILSQKNKAGGITLPDFKLYYKATVTKTAWNPYGATTTIPALLLHNPTGQSAVLTPVIRVLCKAIEEDHLSSSRNKDLNVKPKAIKALEGNLGDTLLDKGRDKDFITRTPKAIATKAKIDKWDLIKLKSFCTAKETINRAYRQPTEWEEIFVNYPSDNGLISSISEQSVLLFYPITGRYMAIIHPLQPRLSATATKVVICVIWVLALLLAFPQGYYSTTETMPSRVVCMIEWPEHPNKIYEKVSYFGQPSGNQPEMLALYTALFPQPPLEEGIHWRMLQVVQLQDAEPPSPKFLTKEKDSPGLGGTYTGKEYRRVDHSVPPITLRPNLAQCPVAMSRQSSANMFWSQTISLHEAGLFFQDSPLADPSQKPESKGVLWCGPYSTHLDAEEDKDREALERAVAANALKPSGHPIATKSSHLGKYVMGRYHDPSVCTKAPVAIPFLLWTYSPLKSHKESVWNLHNENLVEFLEVRSIRVTAPLKRVDSRSSLLSCYSSQPLVIAQTSHGHVSLPIKDYVSSAPGIYEEELPMSSIGSTEDSTKLPVLRYQLELTDDYIIRINRLKMKGRIKVMFGCALQAVRPYGYLLCSLNIAVILFFFKLPRFHNAQTHMFYKQFVQEATYAEHFLHLCSNEQQLHPGLIWKTDRNSGRPCREELIDEISAYPGIGEGRTGRVCNDDIQLIDTVRIPVGVHWPCLTVQAGAISPPLPRVALSDLPRPGRLIHSLRTSSCKFLPSWGLCFGG

SEQ ID NO: 47688 - protein, 2097 aa, Homo sapiens
  DOMAIN (373)..(418): kw TRANSCRIPTASE REVERSE II ORF2 domain identified by eMATRIX, accession number DM01354N, p-value=1.000e-40, raw score of 13.17
  DOMAIN (378)..(636): Reverse transcriptase domain identified by PFam, accession name rvt, E-value=1.3e-42, PFam score of 155.0
MARSRLTATSASRVQAILLPHPPNPVSFPAVGGPRRAAAMGNTTSDRVSGERHGAKAARSEGAGGHAPGKEHKIMVGSTDDPSVFSLPDSKVEEPMIPRLVYSSVVLQNVAWLKKRQPTAALKTLLSIPRTFRKRTTCFHSLPGDKEFVSWQQDLEDSVKPTQQARPTVIRWSEGGKEVFISGSFNNWSTKIPLIKRIKKPTQNRSTTWKLNNLLLNDYWVLNKMKAEIKMFFETNENKDTTYQNLWDTFKAVCRGKFIALNAHKRKQERSKIDTLTSQLKELEKQEQTHSKASRRQEITKIRAELKEIETQKTLQKINESRSWFFEKINKIDRLLARLVKKKRERNQIDAIKNDKGDITTNPTEIQTTIREYYKHLYANKLENLEEMDKFLNTYTLPRLNQEEVESLNRPITGSEIVAIINSLPTKKSPGPDGFTAEFYQRYKEELHINRAKDKNHMIISIDAEKAFDKIQQPFMLKTLNKLGIDGTYLKIIRAIYDKPTANIILNGQKLEVFPLKTGTRQGCPLSPLLFNIVLEVLARAIRQEKEIKGIQLGKEEVKLSLFAHDMIVYLENPIVSAQNLLKLISNFSKVLGYKINVQKSQAFLYTNNRQTETQIMSELPFTIASKRIKYLGIQLTRDVKDLFKENYKPLLKEIKEDTNKWKNIPCSWVGRINIVKMAILPKVIYRFNVIPIKLPMAFFTELGKTTLKFTWNQKRACIAKSILSKKNKARGVTLPDFKLYYKATVTKTEWYWYQNRHIDQWNRTEPSEIMPHIYNHLIFDKPEKNKKWGKDSLFNKWCWENWLAICTKLKLDPFLTPYTKVNSRWIKDLHVRPKTIKNLEENLGNTIQDIGMGKDFMSKTPKAMATKAKIDKWDLIKLKSFCTAKETTIRVNRKPTEWEKIFANYSSDKGLISRIYNELKQIYKKKTTPSKSVRASVPGNARVRDFPKEAERPVDSSDGSFRSWLRLHPTFYAAWAPLAQLGFGRARSSITACLVARRDRIVVSTLRCGRSNLGSNPSHGKVARLGSQLIRFAPRNQARQDQPLIQIRAVGTTKGVQLYPWNPQKSWVGKLEYHQLERQGCLVADSGPIVVGFVHFANWRQGLDSPSPATGGPGGPSEEVRSTSWRGERILGERTQPSTWLALVNRLRRGRFGGQNRRKDLKVETHDVEMLKASNPKSAEARDAAKHLTIHRRAPPPPRNTHSAEVEKLACRSMPTHLADGKSRIGDQFDLGPEEKTQTSAGTLGALPRAYGRVALQYSLRWENGSARLWPGDPLLSLHALPLHKGASLGRWSGSARTLQLAPGLVSLNLALSPPQLGLDYQSGNCFALTAFPQESSFTPARCQPSWNCTQEAHRLCRLCRPGGADRAELRITKREAKASRGVCACHKLSADRGRSVEPPHLRSRVTCFLGLQKKRLEAMPARLEVGLSGKGRRCLLTQQRQHVEQAQMENCGRSRTDRCELSVFYTLNLAIGKKALTQSLGLLPTCTRLPDSRLQARLLARWRAASTECGTAAAAAPARWRADTSRRKDTRPAWWESMGDLAFPPDEKVSLQSLDTRWMEAPLLGTRRLLLRPGFAQWLLGPARPLPSRGSKSCFTHLSRLPLSPQLSLGQQGPQPRVQGAGSGPRTPRSSWRAWVAWPRSWPHGHLQHCSSGNGRHYPAGPTLTHERHREMLLRKLELCALDHFGVKLPSAHPSFEGPWGEEKCSRTMPFAVSQPRPEERRSYRSTFHSLEEQQVGLALDIGSEYSIVKVIKLQLASQASVTLVYLSVEDVTQVSLNLSPFSVSSKLACFSSSVHHLAGPQCDQVKKDDREATCPSFSYFFKLSRELLEVEEPEVLQDSLDRYYSTPTSYLELPDSCQPYRSTFTHWRNSMLAWLLMGTDWTVDCCMNRGIDLMCLSLSDFVADIEKNQEEEEDQDPQCPRLSPDLPEVEEQDVPQDSLDEVYLTPSLPHDLSDCQQPYNSTLYSLEDQLTCFALDVACAGLTDEESTVVLIPMISSKPLLLLSHLMRNAHRCGGAGHPFKSDTLCSQEDEEQIHGRHFKENLEKPCSHPGGLSSRALEWRLEPPPVRGGGFTGTAGAKNPGAQLSVTATGSRV

SEQ ID NO: 47689 - protein, 637 aa, Homo sapiens
  DOMAIN (181)..(222): kw TRANSCRIPTASE REVERSE II ORF2 domain identified by eMATRIX, accession number DM01354I, p-value=1.000e-40, raw score of 15.55
  DOMAIN (387)..(637): Reverse transcriptase domain identified by PFam, accession name rvt, E-value=1.6e-49, PFam score of 178.0
SLTFSPAISSVLQAADPKMLSHTKVLRPTSAGDTQANRVGVDLQQTPTDLQLRVLTVRKKTNKQKGHPHQNPICTSPSSKTKDRSTRQKVNKDIQDLNSALHKADLIDIYRTLHPKSTEYTFFLAPHHTYSKIDHIVRSKALLSKCKSIEIITNCLSDHSAIKLQLRIKKLTQNHSTTWKLDNLLLNDYWVHNEMKAEIKMFFETNENKDTTYQNLWDTFKAVCRGKFIALNAHKRKQERSKMGTLTSQLKELEKQEQTYSKASRRQEITKIRAELKEIETQKTLQKKINDSRSWFLEKINKIDKPLARLIKKKGEKNQIDAIKNDKGDLTTDPTEIQTTIREYYKHLYANKLENLEEMDKFLHPHTLSRLNQEEVESLNRPITGSEIEAIINSLPTKKCPGPDGFTAEFYHSIILTPKPGRDTTKKENFRPISLMNIDAKILNKILANGIQQHIKKLIHHDQVGFIPGMQGWFNIRKSTNVIHHINRTKDKNHMIISIDAEKAFDKIQQPFMLKTLNKLGIDGTYLKITRAIYDKPTGNIIWNGQKLEVFPLKTATTQGCPFSPLLFNIVLEVLATAIRQEKEIKVIQLGKEEVKLSLFADDMIVYLENSIVSIQNLLKLISNFSKVSGHKINVQK

SEQ ID NO: 47690 - protein, 342 aa, Homo sapiens
  DOMAIN (146)..(187): kw TRANSCRIPTASE REVERSE II ORF2 domain identified by eMATRIX, accession number DM01354I, p-value=4.150e-39, raw score of 15.55
MPNAYLIGHIAGWISDVLYTSLRTGILNSGCTLESPAELLKHTNVGPPTPKRRKVNKDIQGLNSALQQADLTEIYRTLHPKSTEYTFFSAPHRTYSKIDHIIESKALLSKGKRPEITTNCLSDHSAIKLELRIKKLTQNHTTTWKLNNLLLNDYWVNKEMKAEIKMFFETNENKDTMYQNLWDTFKAVCRGKFIALNAHKRKQERSKMDILTSQLKELEKQEQTNAKASRRQEITKIRAEVKEIETHKKKTFKKINESRSWIFEKINKIDRPLARLIKKKREKNQIDAIKNDKGDITTHPTEIQTTIREYYKIYIKYLYANKLENLEEMDNFLDTYRFPELN

SEQ ID NO: 47691 - protein, 704 aa, Homo sapiens; identical to SEQ ID NO: 39332
  DOMAIN (419)..(464): kw TRANSCRIPTASE REVERSE II ORF2 domain identified by eMATRIX, accession number DM01354N, p-value=1.000e-40, raw score of 13.17
  DOMAIN (356)..(590): Reverse transcriptase domain identified by PFam, accession name rvt, E-value=2.8e-07, PFam score of 33.7

SEQ ID NO: 47692 - protein, 628 aa, Homo sapiens
  DOMAIN (230)..(271): kw TRANSCRIPTASE REVERSE II ORF2 domain identified by eMATRIX, accession number DM01354I, p-value=1.000e-40, raw score of 15.55
  DOMAIN (1)..(216): AP endonuclease family 1 domain identified by PFam, accession name AP_endonucleas1, E-value=9.7e-07, PFam score of -14.0
  misc_feature (1)...(628): Xaa = X or * as defined in Table 2
MENGFDELREEGFRRSNYSELQEEIQTKGKEVKNIEKNLDECITRIPNTEKCLKKLMELKTKARELREECISLRSRCDQLEESVSVMEDEMHEMKREGKFREKRIKRNEQSLQEIWDYVKRPNLRLIGVPEDRSMRQKVNKDTQELNSALHQADLIDIYRTLHPKSTEYTFFSAPHHTYSKIDHIVGSKALLSKCKRTEIITNYLSDHSAIKLELKIKKLTQNFSTTWKLNNLLLNDYWVHNKMKAEIKMFFETNENKDTTYQNLWDTFKAVCRGKFIALNAYKRKQERSKIDTLTSQLKELEKQEQTHSKASRRQEITKIRAELKEIETQKTLQKINESRSWFFERINKIDRPLARLIKKKREKNQIDAIKNDKGDITTDPTEIQTTIREYYKHLYTNKLENLEEMDKFLDTYTLPRLNQEEVESLNRPITGSEIVAIIHSLPTKKSPGPDGFTAQFYQRYKEELRNKIPRNPTYKGCEGPLQGELQTTAQGNKRGDKQMEEHSMLMGRKNQYRENGHTAQGNLQIQCHPHQATNDFLHRIGKNYFKVHMEPKKSPHRQVNPKPKEQSWRHHATXFQIILQGYSNQNSMVLVPKQRYRSMEQNRALRNNATYLQLSDLXQTXEKQAI

SEQ ID NO: 47693 - protein, 565 aa, Homo sapiens
  DOMAIN (396)..(437): kw TRANSCRIPTASE REVERSE II ORF2 domain identified by eMATRIX, accession number DM01354I, p-value=7.000e-38, raw score of 15.55
MRNSRERSEENQPAASQKSKEQKVRECQSWQGLKELKKSCYCVRCQPQLPESCRANQQASFNSPAEEISTCRALVTMDEQRQDGSWNNATGTQVFCILVNNTASYPDTQPKTLPPSAFLSHPTVRSSENSVFYLQIQPNPTTSHHVFSIILIETPPALTCSLHEPPLLLLLQTHPPEYSTKQPEHPFKTPIRHVDCHIPAPVQHGWGGLKELMIIVEGEANTSFFTWQQQGEVQHEEGEKPLIKASDLKRTHYHKKSMENNEIDQIATGGKSPGIRISHKLDIGLWILESYPLARNQNGLGSFLVNIPTTLGAEHLREQGEGSQAPGLPPVTGPGTQLDSSFPEAAPPNAPSSGGSTSATDRVPGIPVSSGLSNHTSASGDQIKKLTQNHTTTWKLNNLLLNDYWLHNKMKAEIKMFFETNENKDTRYQNLWDTFKAECRGKFIALNAHKRKQERSKIDTLTSQLKELEKQEQTHSKASRRQEITKIRAELKEITDTKKPFKKINESKNWFFETINKIDRALARLIKKKREKNQTDTIKNDKGNITTDPTEIQTIIREYYKHFYA

SEQ ID NO: 47694 - protein, 1257 aa, Homo sapiens
  DOMAIN (481)..(526): kw TRANSCRIPTASE REVERSE II ORF2 domain identified by eMATRIX, accession number DM01354N, p-value=1.000e-40, raw score of 13.17
  DOMAIN (570)..(847): Reverse transcriptase domain identified by PFam, accession name rvt, E-value=1.8e-80, PFam score of 280.8
MELKTKARELREECRSLRSRRNQLEERVSAMEDEMNEMKREGKFREKRIKRNEQSLQEIWDYVKRPNLRLIGVPESDAENGTKLENTLQDIIQEDFPNLARQANVQIQEIQRTPQRYSSRRATPRHIIVRFTKVEMKQKMLRAAREKDFKPTKIKRDKEGHYIMVKGSIQQEELTILNIYAPNTGAPRFIKQVLSDLQRDLDSHTLIMGDFNTPLSTLDRSTRQKVNKDTQELNSALHQADLIDIYRTLHPKSTEYTFFSAPHHTYSKIDHIVGSKALLSKCKRTQIITNYLSDHSAIKLELRIKNLTQSRSTTWKLNNNMLLNDYWVHNKMKAEIKMFFETKENKDTTYQNLWDAFKAVCRGKFIALNAHKRKQERSKIDTLTSQLKELEKQEQTNHSKASRRQEITKIRAELKEIETQKTLQKINESRSWFFERINKIDRPLARLIKKKREKNQIDTIKNDKGDITTDPTEIQTTIREYYKHLYANKLENLEEMDKFLDTYTLPRLNQEEVESLNRPITDSEIEAIINSLPTKKSPGLDGFTAELYQRYKEELVPFLLKLFQSIEKERILPNSFHEASIILIPKPGRDTAKKENFRPISLMNIDAKILNKILANRIQQHIKKLIHHDQVGFIPGMQGWFNIRKSINVIQHITRTKDKNHMIISIDAEKAFDKIQQPFMLKTLNKLGIDGTYLKIIRAIYDKPTANSILNGQKLEAFPLKTGTRQGCPLSPLLFNIVLEVLARAMRQEKEIKGIQLGKEEVKLSLFADDMIVYLENPIVSAQNLLKLISNFSKVSGYKINVQKSQAFLYTNNRQTESQIMSELPFTIASKRIKYLRIQLTRDVKDLFKENYKPLVKEIKEDTNKWKNIPCSWVGRISIVKMAIPPKVIYRFNAIPIKLPMTFFTELEKTTLKFIWNQKRARIAKSILSQKNKAGGITLPDFKLYYKATVTKTAWYWYQNRDIDQWNRTEPSEITPHIYNYLIFDKPEKNKQWGKDSLFNKWCWENWLAICRKLKLDPFLTPYTKINSRWIKDLNIRPKTTKTLEENLGITIQDIGMGKDFMSKTPKAMATKAKIDKWDLIKLKSFCTAKETTIRVNRQPTKWEKIFATYSSDKGLISRIYNELKQIYKKKTNNPIKKWAKDMNRHFSKEDIYAAKKHMKKCSSSLAIREMQMKTTMRYHLTPVRMAIIKKSGNNSQVEHSGGPELNIASSKVTTARTAKATPAQHREGSQADFLEQLPRESAQCDGERAPRVEHLP

SEQ ID NO: 47695 - protein, 245 aa, Homo sapiens
  DOMAIN (96)..(175): von Willebrand factor type D domain identified by PFam, accession name vwd, E-value=5.6e-21, PFam score of 77.3
MRGRDELIEHTQLDVVVLQWGMRNEGIIKSEPQASSTGQFLRRGEVFWDDLNCTVKCRCLDFNNEIYCQEASCSPYEVCEPKGKFFYCSAVETSTCVVFGEPHYHTFDGFLFHFQGSCAYLLARQCLQTSSLPFFSVEAKNEHRRGSAVSWVKELSVEVNGYKILIPKGSYGRVKSCCFIFRETSKWIDVSRGTTCAGTWIGFGDFLSEAWVGKSHESSAQTPLEYSPQLPPRITEKNMGICWPV

SEQ ID NO: 47696 - protein, 847 aa, Homo sapiens
  DOMAIN (172)..(186): LEUCINE-RICH REPEAT SIGNATURE domain identified by eMATRIX, accession number PR00019B, p-value=7.120e-09, raw score of 11.36
  DOMAIN (647)..(727): von Willebrand factor type D domain identified by PFam, accession name vwd, E-value=9.5e-22, PFam score of 80.0
MQIFGEDKWETSMASGSHKAKINVSAGLFSISEALEENLFAGTVRMVAEFSSFLYFSCVPSSNQQWYHELITKYGKLEPLAEVDLRPQSSAKVEVHFNDQVEEMSIRLDQTVAELKKQLKTLVQLPTSNMLLYYFDHEAPFGPEEMKFLEVGKKYGNSVMKIETVSKIVSNVPQLEFLNLSSNPLNLSVLERTCAGSFSGVRKLVLNNSKASWETVHMILQELPDLEELFLCLNDYETVSCPSICCHSLKLLHITDNNLQDWTEIRKLGVMFPSLDTLVLANNHLNAIEEPDDSLARLFPNLRSISLHKSGLQSWEDIDKLNSFPKLEEVRLLGIPLLQPYTTEERRKLVIARLPSVSKLNGSVVTDGEREDSERFFIRYYVDVPQEEVPFRLGDAPLRPPYNRDVRSTVGQQPPALSAFRLSPSAETQDTLFMGQPSANDRARCSRRWKINPTKIQGCYFSKVVRNPVARNMLGQLLQRKRQIAASCSLSTKKFFVLCQLLRVLQATFSKLREIASVLLTLWVHTAFMSCNTHREGLQLHSGASETTNPPEGRNSGRIRTSEGRNSRRATLRAVAFTARVRGFILEVRQFLRRGEVFWDDLNCTVKCRCLDFNNEIYCQEASCSPYEVCEPKGKFFYCSAVETSTCVVFGEPHYHTFDGFLFHFQGSCAYLLARQCLQTSSLPFFSVEAKNEHRRGSAVSWVKELSVEVNGYKILIPKGSYGRVKVEDRVRGMKQGITFGDKSSLGSPALSTVGHKHNDSIGRVKGGAMITYARKKKVSTGTLLTPTVTQVSGQPECDKNRGRETGVLRVVMFFSGKEVPVWSLQQPYEVDTLISIFLLVRKLMHR

SEQ ID NO: 47697 - protein, 487 aa, Homo sapiens
  DOMAIN (275)..(360): von Willebrand factor type D domain identified by PFam, accession name vwd, E-value=3.5e-23, PFam score of 85.0
MANPRLEQRKYKMSPEYIVPRGKQRMMKQMSTETIAGGDSHWPYMEQFEHKTNYDNRYNRYHELITKYGKLEPLAEVDLRPQSSAKVEVHFNDQVEEMSIRLDQTVAELKKQLKTLVQLPTSNMLLYYFDHEAPFGPEEMNQILKDILIHVCRHLVYLVMPRRHLYQQQSCLEKDGASNCVLVLCTCSTFVGTVSLDSCQAQHVSGWVMWQLSPDYRPGIQERRVLTWIKWYNGSKAFSPMPGTEGKCSVNVGSNVIIPQDNSFGEGSAVETSTCVVFGEPHYHTFDGFLFHFQGSCAYLLARQCLQTSSLPFFSVEAKNEHRRGSAVSWVKELSVEVNGYKILIPKGSYGRVKVNNNGVVSFNVLVSQFTPESFPLTDGRAFVAPFWADVHNGIRGEIYYRETMEPAILKRATKDIRKYFKDMATFSATWVFIVTWEEVTFYGGSSTTPVIIQIFCFPLHNLTSNSCPSSLPRRSLIIRAKECQFP

SEQ ID NO: 47698 - protein, 143 aa, Homo sapiens
  DOMAIN (73)..(121): Ribosomal protein S13 proteins domain identified by eMATRIX, accession number BL00646A, p-value=2.887e-11, raw score of 25.82
  DOMAIN (20)..(143): Ribosomal protein S13/S18 domain identified by PFam, accession name Ribosomal_S13, E-value=3.5e-26, PFam score of 100.4
AACAAAMSLVIPEKFQHILRVLNTNIDGRRKIAFAITASSSSSSSSSSSSSSSSSSSSSSSSSSSSSSSSSSSSSSSSSSSVNLLSNGLYLVKGVGRRYAHVVLRKADIDLTKRAGELTEDEVERVITIMQNPRQYKIPDWFL

SEQ ID NO: 47699 - protein, 205 aa, Homo sapiens; identical to SEQ ID NO: 41919
  DOMAIN (107)..(155): Ribosomal protein S13 proteins domain identified by eMATRIX, accession number BL00646A, p-value=7.158e-21, raw score of 25.82
  DOMAIN (107)..(205): Ribosomal protein S13/S18 domain identified by PFam, accession name Ribosomal_S13, E-value=4.3e-40, PFam score of 146.6

SEQ ID NO: 47700 - protein, 51 aa, Homo sapiens
  DOMAIN (1)..(31): Ribosomal protein S13/S18 domain identified by PFam, accession name Ribosomal_S13, E-value=2.1e-12, PFam score of 52.4
MQNPRQYKIPDWFLNRQKDVKDGKYSQVLANWSGQQCSVKTWEPTEEDSGP

SEQ ID NO: 47701 - protein, 135 aa, Homo sapiens
  misc_feature (1)...(135): Xaa = X or * as defined in Table 2
FFFFFLQKVGIYLHIKTFQQHRLWVTSAAFLSLSSMAAVGTSSSLSENSGPGHGGKQTFXGPEGTDIPEGRHHFSAQAFSVVAGRGTAAALLHGSHVPQGRSRIGSRSGGPPSHPDTCSGSSHSAGRSCPHSCTG

SEQ ID NO: 47702 - protein, 1160 aa, Homo sapiens
  DOMAIN (1054)..(1102): Membrane attack complex components / perforin proteins domain identified by eMATRIX, accession number BL00279E, p-value=5.886e- 14, raw score of 37.11
  DOMAIN (449)..(1054): von Willebrand factor type A domain identified by PFam, accession name vwa, E-value=2.1e-104, PFam score of 360.3
VKPSLGIWTPEAICLMKKLVQNKIITVKVVDKLENSSLVELIDKSETPHVSVSKVLLDAGFAVGEQSMVTDKPSDVKETSVPLGVEGKVNPLEWTWVELGVDQTVDVVVCVIYSPGEFYCHVLKEDALKKLNDLNKSLAEHCQQKLPNGFKAEIGQPCCAFFADIQSRNKHWSEEAITRFQMCVAGIKLQARVVEVTENGIGVELTDLSTCYPRIISDVLIDEHLVLKSASPHKDLPNDRLVNKHELQVHVQGLQATSSAEQWKTIELPVDKTIQANVLEIISPNLFYALPKGMPENQEKLCMLTAELLEYCNAPKSRPPYRPRIGDACCAKYTSDDFWYRAVVLGTSDTDVEVLYADYGNIETLPLCRVQPITSSHLALPFQIIRCSLEAPGLQITPNYFVGSQRALVNLILCRMECESCWQEVHVSKETIGKISAASKMMWCSAAVDIMFLLDGSNSVGKGSFERSKHFAITVCDGLDISPERVRVGAFQFSSTPHLEFPLDSFSTQQEVKARIKRMVFKGGRTETELALKYLLHRGLPGGRNASVPQILIIVTDGKSQGDVALPSKQLKERGVTVFAVGVRFPRWEELHALASEPRGQHVLLAEQVEDATNGLFSTLSSSAICSSATPAGSPELVFMERLMGISLIGPCDSQPCQNGGTCVPEGLDGYQCLCPLAFGGEANCALKLSLECRVDLLFLLDSSAGTTLDGFLRAKVFVKRFVRAVLSEDSRARVGVATYSRELLVAVPVGEYQDVPDLVWSLDGIPFRGGPTLTGSALRQAAERGFGSATRTGQDRPRRVVVLLTESHSEDEVAGPARHARARELLLLGVGSEAVRAELEEITGSPKHVMVYSDPQDLFNQIPELQGKLCSRQRPGCRTQALDLVFMLDTSASVGPENFAQMQSFVRSCALQFEVNPDVTQVGLVVYGSQVQTAFGLDTKPTRAAMLRAISQAPYLGGVGSAGTALLHIYDKVMTVQRGARPGVPKAVVVLTGGRGAEDAAVPAQKLRNNGISVLVVGVGPVLSEGLRRLAGPRDSLIHVAAYADLRYHQDVLIEWLCGEAKQPVNLCKPSPCMNEGSCVLQNGSYRCKCRDGWEGPHCENREWSSCSVCVSQGWILETPLRHMAPVQEGSSRTPPSNYREGLGTEMVPTFWNVCAPGP

SEQ ID NO: 47703 - protein, 109 aa, Homo sapiens
  DOMAIN (3)..(16): ANNEXIN TYPE II SIGNATURE domain identified by eMATRIX, accession number PR00198A, p-value=1.818e-17, raw score of 10.33
  DOMAIN (10)..(71): Annexin domain identified by PFam, accession name annexin, E- value=7.8e-17, PFam score of 69.4
MSTVHEILCKLSLEGDGLGTDQDSLIEIICSRTNQELQEINRVYKEMYKTDLEKDIISDTSGDFRKLMVALAKGRRAEDGSVIDYELIDQDARDLYDAGVKRKGTDVPN

SEQ ID NO: 47704 - protein, 60 aa, Homo sapiens
  DOMAIN (28)..(36): ANNEXIN TYPE II SIGNATURE domain identified by eMATRIX, accession number PR00198F, p-value=1.082e-10, raw score of 7.98
KVFDRYKSYSPYDMLESIRKEVKGDLENAFLNLVQCIQNKPLYFADRLYDSMKGKGTRDK

SEQ ID NO: 47705 - protein, 81 aa, Homo sapiens
YRDLPHFLLNSDLIFNMSTSLRETMILIRTLSRVPLPLHGVIQPISKIQGLVLNALNQVQESIFQVSFNLFPDAFQHVIRA

SEQ ID NO: 47706 - protein, 379 aa, Homo sapiens
  DOMAIN (316)..(358): Sodium:dicarboxylate symporter family proteins domain identified by eMATRIX, accession number BL00713A, p-value=2.976e- 25, raw score of 20.35
  DOMAIN (77)..(360): Sodium:dicarboxylate symporter family domain identified by PFam, accession name SDF, E-value=2.9e-82, PFam score of 286.7
MVSTISGRSGRVGLQSSPPHRVSTSSHGAKPRPNVTITITIVAINPNLKYPLARIEIEIGGASRIQLRMAEKIERHRDWLVVNLLSPAGDIFIHLIKMIVVPIVISTLVVGIAGVGDAKQLGRIGAKTIIYFELNDKKLGGKNTDFWLPVVICLRTARILEAEDAFARSCMISGFPGNENIHFAQKNKKIPAGSGKVFDRYKSYSPYDMLESIRKEVKGDLENAFLNLVCHVLAFLNGERRSIEEVIHMKNIKFSLAWQILFAMVLGILLGSYLHYHSDTRDWLVVNLLSPAGDIFIHLIKMIVVPIVISTLVVGIAGLGDAKQLGRIGAKTIIYFEVITTVAIILGITLANVFQPGAGGRRAEDGSVIDYELIDQDAR

SEQ ID NO: 47707 - protein, 88 aa, Homo sapiens
  DOMAIN (54)..(66): CLASS III CYTOCHROME C SIGNATURE domain identified by eMATRIX, accession number PR00609C, p-value=7.146e-09, raw score of 11.99
  misc_feature (1)...(88): Xaa = X or * as defined in Table 2
QSPWPSLLRGDVSITPNLIFSCLSIGWPFCLVSFCXPKKXTFQGVGSEVYDVKHFASCVLCHKQMNKLNLYFRNTYFVALLSTELFEN

SEQ ID NO: 47708 - protein, 125 aa, Homo sapiens
  DOMAIN (71)..(82): RNase H domain identified by eMATRIX, accession number PF00075D, p-value=7.188e-09, raw score of 10.71
DQGEQSKKEKQDQRKTVALVMALRQINLGGSERTENGAGQSAGFRDSPQLFGQALAQDLGHFSSPGTLVLQYVDDLLLATSLEASCQQATLDLLNFLANQGYKVSRSKAQLCLQQVKYLGLILAR

SEQ ID NO: 47709 - protein, 70 aa, Homo sapiens
DGEPIEHDCQQIIVQTSAAREDLLEVPLANPDLNLYTDGSSFVENGEVAKAVIAQFPTTVGVSCLDGRLR

SEQ ID NO: 47710 - protein, 244 aa, Homo sapiens
  DOMAIN (59)..(70): RNase H domain identified by eMATRIX, accession number PF00075B, p-value=1.000e-13, raw score of 12.56
  DOMAIN (1)..(184): Reverse transcriptase domain identified by PFam, accession name rvt, E-value=2e-14, PFam score of 61.4
CSSPSNTILGVQKLNSQWRLAQDFRLINEAVIPLYPVVPNPYTLLSQIPEEAESFTVLDLKDAFFCIPLHSDSQFLFAFEDPTDHNSQLTWMVLPQGFRDSPHLFGQAQAQDLVHFSSPGTLVVQYMDDLLLATSSEASCQQATLDLLNFLANQGCKRVGIALGVLTQTHGTTPQPVAYLSKETDVAAKGPLTAILLLLAFGPCIFNLLVKLVSSRIDAIKLQMVLQMEPQMSSTNNFYRGPLD

SEQ ID NO: 47711 - protein, 1001 aa, Homo sapiens
  DOMAIN (311)..(350): NEGATIVE FACTOR F-PROTEIN PROTEIN 3'ORF AIDS GTP- domain identified by eMATRIX, accession number PD00444B, p-value=7.750e- 10, raw score of 14.01
  DOMAIN (341)..(542): Reverse transcriptase domain identified by PFam, accession name rvt, E-value=2.3e-26, PFam score of 101.0
  misc_feature (1)...(1001): Xaa = X or * as defined in Table 2
MPGAQDLQPTMPEPPHPQWAPTWPEPPRRVPPPAPRRPVPLTAQGLSVDQSRLGKFSDDPDRYIDVLQGLGQTFDLTWRDVMLLLDQTLAFNEKNAALAAAREFKDTWYLSQVNDRMTAEERDKFPSGQQAVPSMDPHWDLDSDYGDWSHKYLLTCVLEGLRRIRKKPMNYSMMSTITQGKEENPAFLEQLWEALRKYIPLSPKSLEGQLILKDKFITQSAADIRGKLQKQSLVPEQNLEALLNLATSVFYNRDQEEQAQKEKQDQKKAAALVLAPTQASLGGSERTEGGAGQSPMLISCPGRLSSRSITIRGILGQPVTRQYPLRPEAHKGLQDIVKHLKAQGLARKCSSPCNTLILGVQKPNVQWRLVQDLRLINEVVIPLYPVVPNSYTLLSQIPEEAEWFTVLDLKVAFFCIPLHFDSQFLFAFEDPTDHTSQLTWTVLPQGFRDSPLLFGQALAKDLGHFSSPGPLFLQYVDDLLLATSSEASCQQATLDLLNFLANQGYKARGTKALSKEXIQPILAYPCPKTLKQLWGFLGITGFCXLWIPXYKRAEIALGVLTQTRGKTLTPVAYLSKETDVVAKGWPHCLRVVAAVAVLVSEAIKIIKGKDLTVWTTHDVNGILGAKGSLRLSDNCLLRYQVLLLEGLVLQKCTCMALNPATFLPKDGDPIEHGCQQIIVQTYAARDDLLEVSLANPDFNLYTNGSSFVENGIRRAGYAIVSDVTILESKPLPPGTSAQLPELVAFTRALELGKGKRINVYTDSKYAYLILHAHAAIWKEREFLTSGGTPIKYHKEIIELLHTVQKPKEVTVLHCQSHQKGEGEKAGGNCQAEAEAKIAARQNLPLEIPTEGPSSDRSSSLSELAWTEASLITKQGPHTVHIDGRTSAVAPPVCRDRRPQIRQINTSDRNNGRNQAGERFPRKKWLRGNWLPICRTLKRYPVVTRYTKINARGIKDLNVRPKTIKTLEENLGITIQDIGMGKDFMSKTPKAMATKAKIDKWD

SEQ ID NO: 47712 - protein, 207 aa, Homo sapiens
IQPILAYPHPKTLKQLWGFLGITGFCPVWIPRCSKIAKSLYTLIKETQRANTHLVEWEPEAETAFKTLKQALVQAPTLSLPTGENFSLYVTERAGIALGVLTQTRGTTPQPVTYLKDGEPMKCDCQQIIVQTYATQDDLLEVPLANPDLNLYTDGSSFVENGIRRAGYAIVSDVTILESKPLPPGTSAQLAELVALTRALELGKGKE

SEQ ID NO: 47713 - protein, 1361 aa, Homo sapiens; identical to SEQ ID NO: 43990
  DOMAIN (1236)..(1286): ENV polyprotein (coat polyprotein) domain identified by eMATRIX, accession number PF00429, p-value=3.631e-17, raw score of 31.08
  DOMAIN (18)..(812): Retroviral aspartyl protease domain identified by PFam, accession name rvp, E-value=1.8e-31, PFam score of 117.0
  misc_feature (1)...(1361): Xaa = X or * as defined in Table 2

SEQ ID NO: 47714 - protein, 189 aa, Homo sapiens
  DOMAIN (59)..(70): RNase H domain identified by eMATRIX, accession number PF00075B, p-value=1.000e-13, raw score of 12.56
  DOMAIN (1)..(184): Reverse transcriptase domain identified by PFam, accession name rvt, E-value=2e-14, PFam score of 61.4
CSSPSNTILGVQKLNSQWRLAQDFRLINEAVIPLYPVVPNPYTLLSQIPEEAESFTVLDLKDAFFCIPLHSDSQFLFAFEDPTDHNSQLTWMVLPQGFRDSPHLFGQAQAQDLVHFSSPGTLVVQYMDDLLLATSSEASCQQATLDLLNFLANQGCKRVGIALGVLTQTHGTTPQPVAYLSKETDVAAK

SEQ ID NO: 47715 - protein, 199 aa, Homo sapiens; identical to SEQ ID NO: 35685
  DOMAIN (83)..(94): RNase H domain identified by eMATRIX, accession number PF00075B, p-value=1.000e-13, raw score of 12.56
  DOMAIN (12)..(188): Reverse transcriptase domain identified by PFam, accession name rvt, E-value=1.6e-07, PFam score of 37.3
  misc_feature (1)...(199): Xaa = X or * as defined in Table 2

SEQ ID NO: 47716 - protein, 123 aa, Homo sapiens
DGDPIKHDCQQIIVQTYATQDNLLEVPLGNPDLSLYTDGSSFVKNGIQRAGYAIVSDVTILKTLILLSQNNKEETDILPEPFSSIRKKKDQEYPPVISPCLQLAAIKGELLACPVMQNQPSNQ

SEQ ID NO: 47717 - protein, 544 aa, Homo sapiens; identical to SEQ ID NO: 35688
  DOMAIN (454)..(465): RNase H domain identified by eMATRIX, accession number PF00075B, p-value=1.000e-13, raw score of 12.56
  DOMAIN (44)..(262): Gag P30 core shell protein domain identified by PFam, accession name Gag_p30, E-value=2.8e-28, PFam score of 102.6

SEQ ID NO: 47718 - protein, 400 aa, Homo sapiens
  DOMAIN (35)..(47): PEPSIN (A1) ASPARTIC PROTEASE FAMILY SIGNATURE domain identified by eMATRIX, accession number PR00792C, p-value=1.931e- 09, raw score of 9.10
  DOMAIN (18)..(115): Retroviral aspartyl protease domain identified by PFam, accession name rvp, E-value=1.7e-15, PFam score of 60.2
SNDRTEDDCGKHPFMSSPPTEPWVCLIIEGQEIDFLLDTGTTFSVLIPCLGRLSSRSVTIQGILGQPVTRYFSHLLSCNWETLLFSHAFLVMPESPTPLLGRDILAKAGAIISMKTGNKLPICCPLLEGINPEVWALEGQFGRAKNAHPLQIRLKDPISFPYQRQYPLRPEAHKGLQDIVKHLKAQDSVRKCSSPCNTPILGVQKLNSQWRLVQDLRLINEAVIPLYPVVRNPYTLLSQVPEEAEWFTVLDLKDAFFCIPLHSDSQFLFAFEDPTDHTSQLMWMVLPQRFRDSPHLFGQAQAQDLGHFSSPGTLVLQYSEIAKTLYTLIKEMERANTHLVEWEPEAETAFETLKQALVQAPALSLPTGQNFALYVIERAGIALGVLTQTHRTTPQPVAYL

SEQ ID NO: 47719 - protein, 129 aa, Homo sapiens
  DOMAIN (6)..(129): RNase H domain identified by PFam, accession name rnaseH, E- value=5.6e-08, PFam score of 35.5
  misc_feature (1)...(129): Xaa = X or * as defined in Table 2
EISFVENGIQRAGYAIVSDVTVLESKPLLPGTSAQLAELVALTRAFELGKGKRINANTDSKYAYLILHALAAIWKEREFLISGGTPIKYHKEIMELLHAMQKPKEVAVLHCQSHQKGXEWDTKGRLCHS

SEQ ID NO: 47720 - protein, 294 aa, Homo sapiens
  DOMAIN (50)..(61): RNase H domain identified by eMATRIX, accession number PF00075B, p-value=1.000e-13, raw score of 12.56
  DOMAIN (2)..(168): Reverse transcriptase domain identified by PFam, accession name rvt, E-value=4.6e-23, PFam score of 90.0
PGVQKPGQWRLVQDLRLINEAVIPLYPVVPKPYTLFSQIPKEAESFTVLDLKDAFFCIPLHSDSQFLFAFEDPTDHTSQLTWTVLPQRFRDSPHLFGQALVQDLGHFSSPGTLVLQFVDDLLLAASSEASCQQATRDLLNFLANQGYKASKSKAQLCLQQVKYLGLILARGTRALSKKRIQPILAYPRPKTLKQLRGFLGITSFCRLQIPGYSKMARPLYTLIKETQRANTHLVEWEPEAETAFKSLKQALVQAPALSLPTRQNFSLYVRERAGIALEVLTQTHGTTLQPVAKG

SEQ ID NO: 47721 - protein, 805 aa, Homo sapiens
  DOMAIN (134)..(145): RNase H domain identified by eMATRIX, accession number PF00075B, p-value=1.000e-13, raw score of 12.56
  DOMAIN (71)..(252): Reverse transcriptase domain identified by PFam, accession name rvt, E-value=7.4e-38, PFam score of 139.2
VCSTIEGQEIDFLLDTGAAFSVLISCPGRLSSRSVTIRGILGQPVTRQYPLRPEVHKGLQNIVKHLKAPGLVRKCSSHCNTPILGVQKPNGQWRLVQDLRLINEAVVPLYPVVPNPYTLLSQTPEEAEWFMVLDLKDAFFCIPLHSDSQFLFAFEDPTDHTSQITWMVLPQGFRDSPYLFGQALAQDLGHFSSRGTLVLQYADDLLFATSSEASCQQATLDLLNFLANQGYKVSRSKAQLCLQQVKYLGLILAKGTRALIKERIQPILAYPCPKTLKQLRGFLGITGFCQLWIPGYSEIARPLYTLIKDTQRANTHLVEWESEAETAFKTLKQALVQAPGLSLPTGQNFSLYVTERAGIALGVLTQTRGTTPQPVAHLSKETDVVAKGWPHCLRVVAAVAVLVSEAIKIIQGKDLIVWTTHEVNGILGAKGSLRLSDNCLLRYQVLLLEGLVLQKCTCMALNPATFLPKDGDPIEHGCQQIIVQTYAARDDLLEVSLANPDFNLYTNGSSFVENGIRRAGYAIVSDVTILESKPLPPGTSAQLPELVAFTRALELGKGKRINVYTDSKYAYLILHAHAAIWKEREFLTSGGTPIKYHKEIIELLHTVQKPKEVTVLHCQSHQKGEGEKAGGNCQAEAEAKIAARQNLPLEIPTEGPSSDRSSSLSELAWTEASLITKQGPHTVHIDGRTSAVAPPVCRDRRPQIRQINTSDRNNGRNQAGERFPRKKWLRGNWLPICRTLKRYPVVTRYTKINARGIKDLNVRPKTIKTLEENLGITIQDIGMGKDFMSKTPKAMATKAKIDKWD

SEQ ID NO: 47722 - protein, 840 aa, Homo sapiens
  DOMAIN (689)..(704): RIBOSOMAL PROTEIN P2 SIGNATURE domain identified by eMATRIX, accession number PR00456E, p-value=3.392e-09, raw score of 3.06
  DOMAIN (98)..(283): Reverse transcriptase domain identified by PFam, accession name rvt, E-value=3.1e-37, PFam score of 137.1
KNSGHILGTCPGYRYAKGKETGKEIIKGPQNPPGYRLCPLQAVGGGEFGPTQVHVPFSLSDLKQIRVDLGKFSDDPDRQYPLRPEAHEGLQDILRYLKVQGLVRKCSSPCNTRILGVQKPKGQWRLVQDLRFINEAVIPLHSVVPNSYTLLSQIPEEVEWFTVLDLKDAFFCIPLHSVCQFLFAFEDPTDHTSQFTWTVLPQGFRDSPHLFGQILAQDLGHFSSPGTLVLQYVDDLLLATSLEASCQQATLDLLNLLANQGYKASKPKAQLCLQQVKYLDLSLARVTRALSKERIQPILACPRPKTLKQLRGFLGITNFCQLWIPGYSEMARPLYTLIKETQRANSHLVEREREAETAFKTLKQALVQALALSLPTGQNFSLYARERAGIALGILTQTHGTTPQPVTYLRKLIYSFVENGMRRAGYAIVSDVTVPESKPLPPGTSTQLAELVVLTQALELRKKKRINVNTDSKYAYLILHAHAAIWKEREFLTSGGTPNKYHKEIMELLHAVQKPKEVAVIPCQSHQKGEEKEAEGNRRADAEAKIAARRNLPTEIPMEGPLVWNNPVQEIKPQYSLTKTEWGLSQGHSFLPLGWLTTLEGKAGRATPNPRNVYFPLHLRGLRTGRLPLSQSTRAQEMTLVRPRPSSSPPPEKAAEGRGRRCSSETKLRHRRLFRPLRTPLCATAPLAASVAAVLAAAPAAAARVRFHALRRGRARATARWRHLATDRQRAAGSGDAGPESRLRQLPRLFRIGPTLCPSRTGGPRVWLPCRHLAPVTTRHCMASPAHVTTDEKVLGACGVTSSRPPQTRSASSWRCRKVLQGVGPERDESASAVNVEAAK

SEQ ID NO: 47723 - protein, 735 aa, Homo sapiens
  DOMAIN (650)..(700): ENV polyprotein (coat polyprotein) domain identified by eMATRIX, accession number PF00429, p-value=4.724e-11, raw score of 31.08
  DOMAIN (256)..(437): Reverse transcriptase domain identified by PFam, accession name rvt, E-value=6.4e-30, PFam score of 112.8
MAALSERFHAKEPAGSDSYPWTSRVLQRNDGDSLFTDAQIRGRIMEAALLGKARVQVFENASVRAIKSDLPQSSLWSRRKTSVSASVSVSATILISRVRGPLRKQAKKSPKAHKKPLAIGYVPYKLRGRGIWPNPEGLRRNRKKPMNYSVMSTITQGKEENPSAFLKWLQEALRKYTPLSTGSIKGQLILKDKFITQSAADIRRKLQKQALGPDLNLEVLLNLATSVFHNRDQEEQAQREKRDQRKAAAFVMTIRETNIGGSERTENGAGVQKSNGQWRLVQDLRLINEAVIPLYPIVPNPYTLLSQIQEEAEWFTVLDLKDAFFCIPLHSDSQFLFAFEDSTDHTSQFTWMVLPQGFRDSPHLFGQALAQDLDHFSSRGTLVLQYVDDLLLATNLDASCQQATLDLLNFLANQGYKASKLKAQLCLQQVKYLGLILARGTKTLSKEQIQPVLAYPHPKTLKLLQGFLGITGFCQLWITRYSEIARPLYILIKETQRANTHLIEWEPEAETAFKTLKQALVQAPALSLPTGQNFFLYITERAGIALGILTQTRETTPQPVAYLSKEVDVVAKVWLHCLRDGEPIKHDCQQIIVQIYAARDDLLEVPLANPDLNLYIDGSSFVENGIRRAGYAIVSDVTVLENSLAAVTLQNRQGLDLLTAEKGGLCTFSGKECCFYTNQSGISSPLEDTTTAGPFLHPIQQEVARAIIGQFPTAFGVSCLEGRLRGEASWTSWVE

SEQ ID NO: 47724 - protein, 55 aa, Homo sapiens
LGCTHTVEFLQGSCRPAQNPQEHRSLRAAVLRNCSPERQPATGHCSQSLPFPLVP

SEQ ID NO: 47725 - protein, 48 aa, Homo sapiens
AERQNKCMHTQTHICKHRHSNSHSYMDTFTHSYTAIPLDTPVALVAAS

SEQ ID NO: 47726 - protein, 78 aa, Homo sapiens
  misc_feature (1)...(78): Xaa = X or * as defined in Table 2
TFITGDCLGTKNHIFDGCGVLSEVGLVLDCSNQRFKAGPAXLCQSPFKNILXESLPMCMCRQLEKHAHPQGLCHTQVT

SEQ ID NO: 47727 - protein, 714 aa, Homo sapiens
  DOMAIN (15)..(54): PROTEIN ZINC FINGER ZINC-FINGER METAL-BINDING NU domain identified by eMATRIX, accession number PD01066, p-value=1.849e-26, raw score of 19.43
  DOMAIN (142)..(714): Zinc finger, C2H2 type domain identified by PFam, accession name zf-C2H2, E-value=4.2e-116, PFam score of 399.1
DLGHRGSREMASVALEDVAVNFTREEWALLGPCQKNLYKDVMQETIRNLDCVGMKWKDQNIEDQYRYPRKNLRCRMLERFVESKDGTQCGETSSQIQDSIVTKNTLPGSVGPYESRMSGEVIMGHSSLNCYIRVGAGHKPHEYHECGEKPDTHKQRGKAFSYHNSFQTHERLHTGKKPYDCKECGKSFSSLGNLQRHMAVQRGDGPYKCKLCGKAFFWPSLLHMHERTHTGEKPYECKQCSKAFSFYSSYLRHERTHTGEKPYECKQCSKAFPFYSSYLRHERTHTGEKPYKCKQCSKAFPDSSSCLIHERTHTGEKPYTCKQCGKAFSVSGSLQRHETTHSAEKPYACQQCGKAFHHLGSFQRHMIRHTGNGPHKCKICGKGFDCPSSLQSHERTHTGEKPYECKQCGKALSHRSSFRSHMIMHTGDGPHKCKVCGKAFVYPSVFQRHERTHTAEKPYKCKQCGKAYRISSSLRRHETTHTGEKPYKCTLGKAFIDFCSFQNHKTTHTGEKPYECKECGKAFSRFRYLSRHKRTHTGEKPYECKTCRKAFGHYDNLKVHERIHSGEKPYECKECGKAFSWLTCFLRHERIHMREKSYECPQCGKAFTHSRFLQGHEKTHTGENPYECKECGKAFASLSSLHRHKKTHWKKTHTGENPYECKECGKAFASLSSLHRHKKTHWKKTHTGENPYECKECGKAFASLSSLHRHKKTH

SEQ ID NO: 47728 - protein, 439 aa, Homo sapiens
  DOMAIN (8)..(47): PROTEIN ZINC FINGER ZINC-FINGER METAL-BINDING NU domain identified by eMATRIX, accession number PD01066, p-value=6.526e-24, raw score of 19.43
  DOMAIN (6)..(152): KRAB box domain identified by PFam, accession name KRAB, E- value=1.9e-16, PFam score of 68.1
MDQASVALEDVAVNFTREEWALLGPCQKNLYKDVMHETIRNLDCAQGNHNYALKKGITGFSQSPNVHSDPQLSSAQQLLSVQRAPSTDSVAFEDVAVNFTHEEWALVGPSQKSLDRDVMWETITNLDCIGTVSGIDAHLRGQNDTQAIWLRLHLVHLDTHRQTLNDFYPFDGRIMRWKQGERSIFAHIQTNHSGEEKRKTAICKPRSRPLLETYNAGTGKHSPNNREKRTSGKECSLRKAEITAGGDQTERQRKRKERGEDGSNHKDEKKKPTEKSQGSTSRRQEPLKHRVVEGKGFIQLGWEHRRTHVSKNRAPRPSASGCSDLGCEPVLVPPHNLGRSGAEGAELPKEGRRGRGRIRSSWTGQDARGSGLPAQPHPAGKRTEDRVPRGRDLEPYPIRAMGRGRENCQSGARLAVGCQVQRARGVFTPLRSALDSVAR

SEQ ID NO: 47729 - protein, 112 aa, Homo sapiens
MSGELDIIKTNRTFRSFKLNRRTDALVSAAFADAQAFHSLTHRNATGLRKRWSHTKSWEKGRIIIWGQGFACVFPDVYDHGMADWRDPWIPTMDRVPPVRGMSQLNLNAKME

SEQ ID NO: 47730 - protein, 101 aa, Homo sapiens
MGPSSLPFHGRAHLEGIHTVRSSHSDWDEFSRIHLGDIFALRGMFLIFSSSSPLSRHRTVGLLPPLTCLFPHPSRDSKTCDSGRLPAPPAECSWLSTEYLK

SEQ ID NO: 47731 - protein, 53 aa, Homo sapiens
  misc_feature (1)...(53): Xaa = X or * as defined in Table 2
YAIHIMDVHTVRSLYYFNCFRYXACYCCHYLTDIPEITKLSGCSYGGTSLIWG

SEQ ID NO: 47732 - protein, 572 aa, Homo sapiens
  DOMAIN (387)..(399): RNase H domain identified by eMATRIX, accession number PF00075C, p-value=6.786e-13, raw score of 11.58
  DOMAIN (259)..(474): Reverse transcriptase domain identified by PFam, accession name rvt, E-value=4.8e-16, PFam score of 66.7
MYCPQETHFSFKDIQTLKVDGSKSFQTSKIEEERIHPTYFTGQTLTLHQNSLLRLAPSEPLRIVQRLAQALYSWRSIFYLLINVESPLYYRFSGMKLGGLSSIRPLRLAWGEGSFLLPLLSSGLTSPDTLTVNAASPPPPALPGMGSAEPSPTLGLTPERKSDVGHAGKGPLESSSPDCFLGGQERWEKGCKTATSVSITNPISRDEKHSPQGKNVPKMYSGEFSPVRVCVPFSLSDLKQIKIDLGAFSDNPDDYIDVLQELGQSFDLTWRDAMLLLNQTLTPNERSATITAARELGDLCCRREDKRACSQTTISSTAFRGLSQTLKRTNSESGTARQAFKEPDSTRVPQIAGRGDAVPPTSEQDREKFAFTIPAINNERSALRFHWKVLPQGMLNSPTICQYHENQALLPSRKEFHNCKIIHFMDDILLAAPTEPALLSLYAFVIKNAQLGGLIIVPEKVRLSSPWKYLGYILTSRSIRPQKVKLNASNLYTLNDYQKLLGDIIWLCPTLDITTDKLQNLFSILKGNTALDSPRCMTRAREPLNVSRSYSTGGPSERGALAHGRVSPWLAK

SEQ ID NO: 47733 - protein, 280 aa, Homo sapiens
MGSVGSQCLEEPSVAGTPDPGIVMSVTFDSHQLEEAAEAAQGQGLGQGRPSFHGYQVGCVTPGEALWHRGAMGGHGGLEVVPVTLEEPVPNDRYHAIYFAMLLSGVGFLLPYNSFITDVDYLHHKYPGTSIVFDMSLTYILVALAAVLLNNVLVERLTLHTRITASYLLALGPLLFISICDVWLQLFSRDQAYAINLAAVGTVAFGCTVQNQNEQVLVGGPGKEAGDKAKEQQQSRERPIPSPTVQFLYYTRLDPFLYEQKNQTICSFGGENVLSIMHLA

SEQ ID NO: 47734 - protein, 195 aa, Homo sapiens
  misc_feature (1)...(195): Xaa = X or * as defined in Table 2
LLTARLTWVSARLMSYVLLMCXLFPRLLSCLTTPPHCSFSICFVICFKNVDLKGFEPDVRILLTKYSNSNGSQSPWMEEQIRDAGERVHSAFSLNWGKPLVFEKDRPYSVSVFIGLFLPMAEKTGPLKGNPGGEFLLFLRQIQLVWLPAAGIMTEHYFPITATQALEINNAISTIMEIFPTVSFASQWITASFSV

SEQ ID NO: 47735 - protein, 54 aa, Homo sapiens
VTSFVSFPGKPPSLASNSVLEQSGSPFPFTTGFPSLTPPCPINISPSGHVHVLI

SEQ ID NO: 47736 - protein, 817 aa, Homo sapiens
  DOMAIN (631)..(676): Amino acid permeases proteins domain identified by eMATRIX, accession number BL00218D, p-value=9.597e-13, raw score of 21.49
MCCTEGSLRKRDSQRAPEAVLCLQLWQRTVPLDTLKGLGTCFPSGPELRGAGIAAAMERASERRTASALFAGFRALGLFSNDIPHVVRFSALKRRFYVTTCVGKSFHTYDVQKLSLVAVSNSVPQDICCMAADGRLVFAAYGNVFSAFARNKEAPAVDVVAIGLMSGQVIIHNIKFNETLMKFRQDWGPITSISFRTDGHPVMAAGSPCGHIGLWDLEDKKLINQMRNAHSTAIAGLTFLHREPLLVTNGADNALRIWIFDGPTGEGRLLRFRMGHSAPLTNIRYYGQNGQQILSARLINKKRVKRKGLQNTMSVRLPPITKFAAEEARESDWDGIIACHQGKLSCSTWNYQKSTIGAYFLKPKELKKDDITATAVDITSCGNFAVIGLSSGTVDVYNMQSGIHRGSFGKDQAHKGSVRGVAVDGLNQLTVTTGSEGLLKFWNFKNKILIHSVSLSSSPNIMLLHRDSGILGLALDDFSISVLDIETRKIVREFSGHQGQINDMIPLRRDPCVGHHQLFLFVDLQQRLAPQPVKQLVGIRRFQQRCQAIFRFIAADPGKYRQQMQIVIAQHQTGKFYFMQQCDQFIVTTMNVANKVCRHILLMNECGNGESEYGNVDAERTPFSSIISYSWSYTGMASICYMTGEIKNPGKTMPRALIGSCLLVLVLYTLLALVISGLMPFDKLANSETPISDALTWIPALGSTAGIFVAITAMIVILGSLSSCVMYQPRLEYAMAKDNLFFKCFGHVHPKYNTPDVSIILQGALGIFFIFVSDLTSLLGYFLTAKDWKLVFHRKLIGVYLGQFAVASVMYSALRPA

SEQ ID NO: 47737 - protein, 1180 aa, Homo sapiens
  DOMAIN (894)..(922): INTERFERON ALPHA AND BETA SUBUNIT SIGNATURE domain identified by eMATRIX, accession number PR00266B, p-value=1.863e-09, raw score of 16.44
  DOMAIN (988)..(1114): Phosphotyrosine interaction domain (PTB/PID) domain identified by PFam, accession name PID, E-value=2.7e-47, PFam score of 170.5
SWGKGREGVVSPAGLGGALPGDGKFGSPSRLGCSLGEGVQRVAALGMGKEQELLEAARTGHLPAVEKLLSGKRLSSGFGGGGGGGSGGGGGGSGGGGGGLGSSSHPLSSLLSMWRGPNVNCVDSTGYTPLHHAALNGHKDVVEVLLRNDALTNVADSKGCYPLHLAAWKGDAQIVRLLIHQGPSHTRVNEQNNDNETALHCAAQYGHTEVVKVLLEELTDPTMRNNKFETPLDLAALYGRLEVVKMLLNAHPNLLSCNTKKHTPLHLAARNGHKAVVQVLLDAGMDSNYQTEMGSALHEAALFGKTDVVQILLAAGTDVNIKDNHGLTALDTVRELPSQKSQQIAALIEDHMTGKRSTKEVDKTPPPQPPLISSMDSISQKSQGDVEKAVTELIIDFDANAEEEGPYEALYNAISCHSLDSMASGRSSDQDSTNKEAEAAGVKPAGVRPRERPPPPAKPPPDEEEEDHIDKKYFPLTASEVLSMRPRIHGSAAREEDEHPYELLLTAETKKVVLVDGKTKDHRRSSSSRSQDSAEGQDGQVPEQFSGLLHGSSPVCEVGQDPFQLLCTAGQSHPDGSPQQGACHKASMQLEETGVHAPGASQPSALDQSKRVGYLTGLPTTNSRSHPETLTHTASPHPGGAEEGDRSGARSRAPPTSKPKAELKLSRSLSKSDSDLLTCSPTEDATMGSRSESLSNCSIGKKRLEKSPSFASEWDEIEKIMSSIGEGIDFSQERQKISGSRTLEQSVGEWLESIGLQQYESKLLLNGFDDVHFLGSNVMEEQDLRDIGISDPQHRRKLLQAARSLPKVKALGYDGNSPPSVPSWLDSLGLQDYVHSFLSSGYSSIDTVKNLWELELVNVLKVQLLGHRKRIIASLADRPYEEPPQKPPRFSQLRCQDLLSQTSSPLSQNDSCTGRSADLLLPPGDTGRRRHDSLHDPAAPSRAERFRIQEEHREAKLTLRPPSLAAPYAPVQSWQHQPEKLIFESCGYEANYLGSMLIKDLRGTESTQDACAKMRKSTEHMKKIPTIILSITYKGVKFIDASNKNVIAEHEIRNISCAAQDPEDLCTFAYITKDLQTSHHYCHVFSTVDVNLTYEIILTLGQAFEVAYQLALQAQKSRATGASAAEMIETKSSKPVPKPRVGVRKSALEPPDMDQDAQSHASVSWVVDPKPDSKRSLSTN

SEQ ID NO: 47738 - protein, 385 aa, Homo sapiens
  DOMAIN (263)..(279): Ank repeat proteins domain identified by eMATRIX, accession number PF00023A, p-value=9.143e-11, raw score of 16.03
  DOMAIN (258)..(380): Ank repeat domain identified by PFam, accession name ank, E- value=2e-23, PFam score of 91.2
MWGIGSRTPIYNKILVYSSPEVSCEKPKYVKSQTSTHTGFESHKRYIFYLRLVGKNLHVSAMGLGKSQERRKKALKSQPQQPADSFPSLPTVEGLTTSGEVAAGFWLSGEALSSCVVCGEAALTQVSAHRMAFLKSYVADDIKGEGKESLVGPWLRRKALFSFAAEHQSQSLIGGLSLLPVISYRILDSVQLWGLAVGNAKNSYKISSGFKNRVYFALSDEYIVSPKLRFHIVSLGKQLLLCDPGMWRGPNVNCVDSTGYTPLHHAALNGHKDVVEVLLRNDALTNVADSKGCYPLHLAAWKGDAQIVRLLIHQGPSHTRVNEQNALEIKELKKYGPFDPYINAKNNDNETALHCAAQYGHTEEVKVLLEELTDPTMRSNKFETP

SEQ ID NO: 47739 - protein, 392 aa, Homo sapiens
  DOMAIN (75)..(88): GLIADIN domain identified by eMATRIX, accession number DM00406, p-value=4.600e-09, raw score of 7.73
MFGVPQNLTQPEECEHNIPYPDKHPLAFSLSDGHIKTMGSKCDGAHVTSVVLTINQHVVVLVLKNSEFRVSSLWSQQQQQQRQQQQPSLSHASIHDCMQTDIHPPAPHSFFLGKFHIGLWLHLKAQCGYLISKASSTLCASCNKRPLPPDAQCSHQDLQLGSKLSWISAPAQPAQPQTVALLGYTKILFKVSDHHSDYYRKNHKPFPNKCTPKPPSDIGVKKEFLRQTARPWESLVLKKSLKEIFVPLKVLNYKQKRLKMTNLSKRRIIRIHHGLRINRNLQSFRGPEKILDKHKKQEPRGMDHSSSPATEQGWMENDFDELTELGFRRSVKTNFSELKEDIQTHRKEAKNLEKRLDKRLTRVTSVEKTLNDLKELKTMTRELRDTHRSFSS

SEQ ID NO: 47740 - protein, 85 aa, Homo sapiens
  DOMAIN (21)..(53): Ank repeat domain identified by PFam, accession name ank, E- value=0.00018, PFam score of 28.3
EEACTVILLEHGTNPNLKDIYRNTALHYAVYSESTSLAEKLHFHGANIEALDKVLSISFLSKILMSSLKTCGRDAEDYTISHHLT

SEQ ID NO: 47741 - protein, 353 aa, Homo sapiens
  DOMAIN (5)..(44): Domain present in ZO-1 and Unc5-like netrin receptors domain identified by eMATRIX, accession number PF00791C, p-value=1.353e- 09, raw score of 20.98
  DOMAIN (19)..(84): Ank repeat domain identified by PFam, accession name ank, E- value=1.7e-12, PFam score of 55.0
QCKPLLVSRKCQIDICDKENRTPLIQAVHCQEEACAVILLEHGANPNLKDIYRNTALHYATYSESTSLAEKLLSHDADIEALDKARYWGDYQLTGHPENEKTWTSTSEISLKEDFADFGTTIKQDFRLLGQTSVDRLLQLSQGQAVKGNQLLPVSLVKRKTTLAPNTQTASPRALADSLMQLARQVSRLESGQDFADFGTTIKQDFRLLGQTSVDRLLQLSQGQAVKGNQLLPVSLVKRKTTLAPNTQTASPRALADSLMQLARQVSRLESGQDFADFGTTIKQDFRLLGQTSVDRLLQLSQGQAVKGNQLLPVSLVKRKTTLAPNTQTASPRALADSLMQLARQVSRLESGQ

SEQ ID NO: 47742 - protein, 589 aa, Homo sapiens
  DOMAIN (369)..(385): Ank repeat proteins domain identified by eMATRIX, accession number PF00023A, p-value=7.000e-10, raw score of 16.03
  DOMAIN (364)..(462): Ank repeat domain identified by PFam, accession name ank, E- value=9e-14, PFam score of 59.2
RTVPPASLQLQLQLQPWLKDAQVQLGSLLQRVQAASLGGFHIVLSQQVHRLGSLCLDSRVCKEKPQCPAGQKLFQEAEPHGKPLLWLCRLQPPWLLPWAGLVWSACSLSILRVRAVGGLMNLGSGGWWPPVWELQAHIFLLHCHSGSFPRGSASAGGFCLATVGGGMGGGSFTIGLVRGASSVGPDNGVMIGGTCRTWSVGAAEYCWEMSGEMHVIEEPVDSWGGPVVFNGPVKSGQSRCLDGPGRSCSEILTGQRPWGLGEKNGIRGQPHGPAAVCSLRILLPASQQPQLLLRPWLKDAQDTAACIPAAPFPAPAMDERCTGTACITASEDASSKPWWLPHSVKPAGAQSTKLEAWEPLSRLQSITALHLACASGHVKVVTLLVSRKCQIDICDKENRMLLIQAVHCQEEACAVILLEHGTNPNLKDIYRNTALQYAVYSESTSLAEKLLFHGANIEALDKLSTPHRRPRAASRAPWSSSPSPAALLLHGRESLRCATRVTRLRPVLRGVAPRLLPPGHRFLFRGGALPLPKWLNFWRNGLGAVAPPGAVPVSLLAAVGRPAPRAFLVPGPTSGVGAGGAGELFYDSP

SEQ ID NO: 47743 - protein, 94 aa, Homo sapiens
KKAIGNKDAKFVEERRKQLQNYLRSVMNKVIQMVPEFAASPKKETLIQLMPFFVDITPPGEPVNSRPKAASRFPKLSRGQPRETRNVEPQSGDL

SEQ ID NO: 47744 - protein, 47 aa, Homo sapiens
DAKFVEERRKQLQNYLRSVMNKGMQMVPEFAASPKKETLIQLMPFFV

SEQ ID NO: 47745 - protein, 336 aa, Homo sapiens
  misc_feature (1)...(336): Xaa = X or * as defined in Table 2
PHSPLWKTLCSPSSGVCCGFVTLFCNDRFACLFQLTPPPSPAWMTAAASLLASLLPALPPLNLQDAKFVEERRKQLQNYLRTVMNKVIQMVPEFAASPKKETLIQLMPFFVMGLQVGMYGLFHFGVMMDQPQPSLTRADESPCDRVLSPCAAHRKQRDCCLSWKAEPEXFLVKXKTLCSPSSGVCCGFVTLFCNDRFACLFQLTPPPSPAWMTAAASLLASLLPALPPLNLQDAKFVEERRKQLQNYLRTVMNKVIQMVPEFAASPKKETLIQLMPFFVMGLQVGMYGLFHFGVMMDQPQPSLTRADESPCDRVLSPCAAHRKQRDCCLSWKAEPE

SEQ ID NO: 47746 - protein, 247 aa, Homo sapiens
MRPTEKSACPTSSRYTWQSMCTLAVTSASSESLSDVQISGPIPDLLHENLHVHRPPAATISCLDDCSSILAGLSASCIASSESSGDLRSHLLPGICSLNKCVWSLLGSPGTVIGSGDKGMNQTDKVPALVELPSSKGGEEDVPKRRCFVFPQDAKFVEERRKQLQNYLRSVMNKVIQMVPEFAASPKKETLIQLMPFFVSGSTAALRDALIAMGPRRTPGAVPGAKVEVGSQRFGASKGMGREQACK

SEQ ID NO: 47747 - protein, 331 aa, Homo sapiens
MTSYWSKSVGSDDSGGARSRQGLPSWVPLQLPDLQLQTWLSHSIHRAGRSRGQVGDLPLPSWWSRSSLGAAVTALPGLEDRDPPGSQLKALEGYTLRTEVNRSLPGRHFPVGAERHLIKESSCWHLVGAPLGQSFQRKDQAAIFAVLQPPLVIPRRTGSGVDLQQTPTDLKLRDLTVRRKTKKQKGIASTSTKRTSTPKPTSRPKVDKRPKVDKTTKMGRNQSRKAKNSKNQKASSPPKDHNSSPVREQNWTENEFDALTEVGFRRWVITNFSERKEHVLTHCKEAKNLEKRLEAWLTRIRITSVEKNINYLRELKKTARELHEAYTSFNS

SEQ ID NO: 47748 - protein, 48 aa, Homo sapiens
  misc_feature (1)...(48): Xaa = X or * as defined in Table 2
XDGSKGSDMSQCEEALEDSPHSWSPHFLKQTAAVLQGLISLVPNDVFX

SEQ ID NO: 47749 - protein, 572 aa, Homo sapiens
  DOMAIN (52)..(65): BTB (also known as BR-C/Ttk) domain proteins domain identified by eMATRIX, accession number PF00651, p-value=1.000e-13, raw score of 15.00
  DOMAIN (24)..(137): BTB/POZ domain identified by PFam, accession name BTB, E- value=6.7e-23, PFam score of 89.5
TGMSVDEKPDSPMYVYESTVHCTNILLGLNDQRKKDILCDVTLIVERKEFRAHRAVLAACSEYFWQALVGQTKNDLVVSLPEEVTARGFGPLLQFAYTAKLLLSRENIREVIRCAEFLRMHNLEDSCFSFLQTQLLNSEDGLFVCRKDAACQRPHEDCENSAGEEEDEEEETMDSETAKMACPRDQMLPEPISFEAAAIPVAEKEEALLPEPDVPTDTKESSEKDALTQYPRYKKYQLACTKNVYNASSHSTSGFASTFREDNSSNSLKPGLARGQIKSEPPSEENEEESITLCLSGDEPDAKDRAGDVEMDRKQPSPAPTPTAPAGLCLERSRSGNYGQPHVGQKEVSNFTMGSPLRGPGLEALCKQEGELDRRSVIFSSSACDQVSTSVHSYSGGARFLATEHQEPGLMGDGMYNQVRPQIKCEQSYGTNSSDESGSFSEADSESCPVQDRGQETGSTSDLRLSTKLQSCSGPMFKGPTATVAATESWGTVLQNIPLGCAGTGEEVTYTNPPPRGRAALVPRSPLTVYSSSLPEHQTSLKQCAQAGPGVCLLVHNHWQLLEGAFSCLASH

SEQ ID NO: 47750 - protein, 363 aa, Homo sapiens
  DOMAIN (241)..(254): BTB (also known as BR-C/Ttk) domain proteins domain identified by eMATRIX, accession number PF00651, p-value=1.000e-13, raw score of 15.00
  DOMAIN (212)..(321): BTB/POZ domain identified by PFam, accession name BTB, E- value=0.01, PFam score of 20.7
MGPYYGRIKFRQKNLDLTRKMLRAFHENSSRIAEVLWTSENVFDMGTTWALSRCFLMEPWCLPARPQPLAAVGRGFQLPCFSLNCFNTSFLRAQLHRKGGKQVQGHKPVSGRFGDSVAESKPLVVQADAVQRELESCLRREYTPENLPLLLLQIKPKCDPWQKKLLTKLKERRRTDALLQLQAKFLKGVNGMSVDEKPDSPMYVYESTVHCTNILLGLNDQRKKDILCDVTLIVERKEFRAHRAVLAACSEYFWQALVGQTKNDLVVSLPEESHLTHLHSLGSQPLCSSRGPAQPGLRVPPRSLKLPNTNCHSSPQLPIHLRPNPDLPSSDCPVVQFHPQIPIPDEPRHYQHIRATHRAQHSL

SEQ ID NO: 47751 - protein, 17 aa, Homo sapiens
MDHITGLFADTPQPGAW

SEQ ID NO: 47752 - protein, 237 aa, Homo sapiens
MSLLPEHLCMEVCIPQDLQNSRNGSEKQPRAAVCILSVRFTGENQRSSGCTLESPINTKPVHRTKIQPKTLTESTSLPCYLHQSRSWFPWLRDLKMDHITELFADTPQYQPRARITPAHKQWIQTKTKISKLPEKEFRRLMIKPIKEIPEKGELQLKEIKNMTQDMKGIFFSEMDSISKKQSQLLEIEDTLIEMQNALESLSNRIKQAEEKTSELEDKAFELTQSIKDREKKNSKKK

SEQ ID NO: 47753 - protein, 416 aa, Homo sapiens
MTGVLLTDSQKEGTESGWREDTEAGMKWEKTGLIPGLWWLRGNGLHSELKDAVEKKLEAFPLGTEVGTDIYADDETVRNLQEQLQLANQEKTQAVELWQTVSQELDRLHKLYQEHMTEAQIHVFESQKQKDQLFDFQQLTKQLHVTNENMEVSGLSTNPKEIECFGLSLQLLQPFQNIAAISEHCRSHFRTIPRLRFLSLGMLQLLDPPTYTDLLDFAQGSPGYLYPHGSEAPEKQQAPKQAKLELRVAVAKVEELTNVTEDLQGQMKKKEKDVVSAHGREEASDRRLQQLQSSIKQLEIRLCVTIQEANQLRTENTHLEKQTRELQAKCNELENERYEAIVRARNSMQLLEEANLQKSQALLEEKQKEEDIEKMKETVSRFVQDATIRTKKEVFLLISCSQPFPAITAIHSGSIY

SEQ ID NO: 47754 - protein, 41 aa, Homo sapiens
HGKFNQVVTPIAAVVPDVVSLLELFPGTWYAVIDLANAFIS

SEQ ID NO: 47755 - protein, 24 aa, Homo sapiens
HGKFNQVVTPIAAVVPDVVSLLEL

SEQ ID NO: 47756 - protein, 75 aa, Homo sapiens; identical to SEQ ID NO: 34862
  DOMAIN (25)..(41): AUXIN BINDING PROTEIN SIGNATURE domain identified by eMATRIX, accession number PR00655E, p-value=9.000e-09, raw score of 8.06

SEQ ID NO: 47757 - protein, 78 aa, Homo sapiens
MGPCQRLQTASQSATDTSNTIGSAGSYGPSGRAACIAAWTSCRAFFQMRNVLPQNPNRPTRHCASFLVVGGAKCTKLI

SEQ ID NO: 47758 - protein, 42 aa, Homo sapiens; identical to SEQ ID NO: 46779

SEQ ID NO: 47759 - protein, 519 aa, Homo sapiens
  misc_feature (1)...(519): Xaa = X or * as defined in Table 2
MASPEAVASQDNDGFSQKPPPTPLFASRSVNRLKSQRTPRGEVESVTDGEKTDGSWRMTVDYCKLNQVVTPIAAAVPDVVSLLEQINTSPDITLVHYIDDIMLNGSSEQEVTNTLDLLVRHLCATGWEINPTKIQGSSTSVKFLGVQWCGDCRDVPSKVKDKLLHLAPPTTKKEAQHLTGLFGFRRKYIPYLGVLLCPIYQVTRKAASFQWRPEQEKALQQVQAAMQAALPLGPYDPAGPMVLEIAVADTEAVWGHWHSASFPSHPCHCPMGPXTKWPXWQGWRLCMGSATWTSTHEGXPGYGHQXVPNLPAAETNTEPAIXHHSSRRSASYLVAGXLYWTSCIMERAEHLLWIWVCLSCMQCFCQDYHPWTHGMPYPPLWYSTQLCLXPRHSLYHXRSVAVGSCSWNSLVLPCSPSSXSSRVDRTVERPFEITTTMPTSQESRVQESRGGSGSGTTHHHPXXSTSNIFASCFYGITFCWSRGLSSRGRNAATRRQNNSIKLXVKIATWTLWAPPTSKL

SEQ ID NO: 47760 - protein, 373 aa, Homo sapiens
  misc_feature (1)...(373): Xaa = X or * as defined in Table 2
PSKVKEKLLHLAPPTIKKEAQRLVGQLGFWRQHIPHLGALLWLIYQATQKAASFEWGPEQEKALQQVQVAVQAALPLGPYDPADPMVLEVSVADRDAVWSLWQAPIGESQQRPLGFWSKALPSSTDNYSCFRCAIIYXFMGCCQXFGWIVRDLEEAXLENWXQRNLGKRYVDGPLXVVKNWKDICIPCECSPTGDLSRGGFXXSSGXDDPFCGHHSASFPSHPCCRPMGPXTKWPWWQEXRLCMDSATWTSTHQSXPDYSHCXVPNLPAAETNTETSIWHHFSGXSASYLLAGXLHXTSSIMEKAEVSPHWNKHSLWIWVCLSSMQCFCQDYHPWTHSMPYPLSWYSTQHCLSLQRERHSLYRXRSAAVGACS

SEQ ID NO: 47761 - protein, 636 aa, Homo sapiens; identical to SEQ ID NO: 35566
  DOMAIN (253)..(276): PHOSPHOLIPASE D SIGNATURE domain identified by eMATRIX, accession number PR00718F, p-value=9.909e-09, raw score of 11.34

SEQ ID NO: 47762 - protein, 305 aa, Homo sapiens
  DOMAIN (7)..(259): TBC domain identified by PFam, accession name TBC, E-value= 1.5e-09, PFam score of 30.7
EELRRLSWSGIPKPVRPMTWKLLSGYLPANVDRRPATLQRKQKEYFAFIEHYYDSRNDEVHQDTYRQIHIDIPRMSPEALILQPKVTEIFERILFIWAIRHPASGYVQGINDLVTPFFVVFICEYIEAEEVDTVDVSGVPAEVLCNIEADTYWCMSKLLDGIQDNYTFAQPGIQMKVKMLEELVSRIDEQVHRHLDQHEVRYLQFAFRWMNNLLMREVPLRCTIRLWDTYQSEPDGFSHFHLYVCAAFLVRWRKEILEEKDFQELLLFLQNLPTAHWDDEDISLLLAEAYRLKFAFADAPNHYKK

SEQ ID NO: 47763 - protein, 222 aa, Homo sapiens
GPVGESRTCLHTEVRHPGPQGGAALCFWDQTGNELEDPWQQENGVEQEPEDFRRCQSRMALSGFERDPKSSTEELGQWSECGTIDGVTSVREACESGQQAPGGSISTRLCPPRFHSAGFITSLPDTCPGAVEVDTVDVSGVPAEVLCNIEADTYWCMSKLLDGIQVSAEAEDFGVSQHHPSVPKKLRAWWDVFFHVLVRAEPERSVNSKMSDLSCRIQGVLK

SEQ ID NO: 47764 - protein, 444 aa, Homo sapiens
  DOMAIN (222)..(248): CALPAIN CYSTEINE PROTEASE (C2) FAMILY SIGNATURE domain identified by eMATRIX, accession number PR00704D, p-value=2.432e- 24, raw score of 11.05
  DOMAIN (134)..(418): Calpain family cysteine protease domain identified by PFam, accession name Peptidase_C2, E-value=4.1e-89, PFam score of 309.5
MAVSQSDGSETHNGSSWAPAAAQVFMKYGLGAEVSTAPGASSPVLALVFNAGCFCQQLHLQSGLRKAENKLACKATPGAIISPRGFCHKIPDLPPGPQALEWKLAPRYSRRASPQQPQQDFEALLAECLRNGCLFEDTSFPATLSSIGSGSLLQKLPPRLQWKRPPELHSNPQFYFAKAKRLDLCQGIVGDCWFLAALQALALHQDILSRVVPLNQSFTEKYAGIFRFWFWHYGNWVPVVIDDRLPVNEAGQLVFVSSTYKNLFWGALLEKAYAKLSGSYEDLQSGQVSEALVDFTGGVTMTINLAEAHGNLWDILIEATYNRTLIGCQTHSGEKILENGLVEGHAYTLTGIRKVTCKHRPEYLVKLRNPWGKVEWKGDWSDRLIIGDLLVFGAGRVSTGPASGVLRAATYKASSLARLCRSHTRAGNSVSTFITTNSQVAASS

SEQ ID NO: 47765 - protein, 174 aa, Homo sapiens
TAPFFLPRAPGWGRRRGRSARGRDSGIPPRSQAAKRLVPLLLPALFGGRESGPTLRLDLRPPMSGGEVVCSGWLRKSPPEKKLKRYVSRAAGTTPRASASTPLPSRLAGGCSWPRAGLVLKRMPVSFPLAPTPGGLGTGCLALPHAQASTWPDNFLPPGSRQPALRACSPHKRT

SEQ ID NO: 47766 - protein, 275 aa, Homo sapiens
MRDCAMMNGAFQPRHYAFPTVFTTSRLGDSLWCLRHQDHGFQAQIWAAIWADTELVAGVFSSYPSGVNRHLIQESSGWHLGGAPLGRSFQKKEQAAIFAVRQPLLMITRQTGSGVDLQQTPADLQKRDFTGRRKTNKQKGIAPTSTKITSTWKPHPKDCNSSPAREQNWMENEFDKLTEVGFRRWTITNSSKLKERVLTQCKEATNLAKRLEKLLTRITSLEKNKNDLMELKNTAQELREAYTSISGRINQAEQRTSEIEDQLNEIKREDKIREK

SEQ ID NO: 47767 - protein, 104 aa, Homo sapiens
FQLKTKCNSIWYSSDSLGRHWSPDPVLLSCLKRIPNRVTSIFWYRSCRACLDVQTSAGPSLESVMSAFRTSACRRYCALCRLIVPPPPPRLPAKPPWVSQAPRS

SEQ ID NO: 47768 - protein, 226 aa, Homo sapiens
QSAQNLRQAEVLKADMNDTKLGPAEVWTSRQALQDLYQKMLVTDLEYALDKKVEQDLWNHAFKNQITTLQGQAKNRANPNRSEVQANLSLFLEAASGFYTQLLQELCTVFNVDLPCRVKSSQLGIISNKQTHTSAIVKPQSSSCSYICQHCLVHLGDIARYRNQTSQAESYYRHAAQLVPSNECLKPFYLMRNWMFLQIVIVGENVSFMSHYEDRKLEIRGASEIK

SEQ ID NO: 47769 - protein, 276 aa, Homo sapiens
  misc_feature (1)...(276): Xaa = X or * as defined in Table 2
MHCFFIFSAAWFCLWSISLHLVERPDMAVLLFPFGLRLGLMLQCPRGYWPVLLGAEWLLIYWLTQAVGLTHFPLLMIGSLLTLLPVALISRYRHQRDWRTLLLQGAALTAAALLQSLPWLRHGKESWNALLLTLTGEPDAGPDMSGVLALSRQXHLAAARSVTGFSANQLARATSGLVLAAVCYQSLAPVGIAGRTVALYAILSGAADYRAGLALWLARGADCDVDERHRADRHQSWRDLPWTYCSGDCDSRHGAQGQKARAPPKHDQFPHAIFRG

SEQ ID NO: 47770 - protein, 174 aa, Homo sapiens
  misc_feature (1)...(174): Xaa = X or * as defined in Table 2
RSKTTAFTPLRVRTSAHARPAGPAPIIATFLPVCFTPDISGRQPISNALSLIXRSMLPMVTAPNSSFRVQEPSSQTVLRADSSANFRQGVGLVRQFRRFKNTPLVGELQPVRDVVVYRAFPLAVWVAARQAAVSLRFGLAFGKRLVNFNKLNFADLQRFLWRINALQVDKLITF

SEQ ID NO: 47771 - protein, 179 aa, Homo sapiens
  DOMAIN (103)..(135): ABC transporters family proteins domain identified by eMATRIX, accession number BL00211B, p-value=4.429e-20, raw score of 13.37
  DOMAIN (19)..(178): ABC transporter domain identified by PFam, accession name ABC_tran, E-value=7.7e-17, PFam score of 69.4
LLLMPFYFRKECPLTQATSGKTVLKNQTADGLYYAVRYLSYMASATVRPEQEASPQWQPGEATRGTLACWQAHERAGADNARVNVAMNQTRINHLAVRRLTELSGGQRQRAFLAMVLAQNTPVVLLDEPTTYLDINHQVDLMRLMGELRTQGKTVVAVLHDLNQASRYCDQLVVPATTL

SEQ ID NO: 47772 - protein, 68 aa, Homo sapiens
  misc_feature (1)...(68): Xaa = X or * as defined in Table 2
MSDHLDLFSARNPXXXXXXXXXXXXXXXXXXXXXXXXXXXXXXXXXXXXXXXXXFRIPIAMXAIPILE

SEQ ID NO: 47773 - protein, 94 aa, Homo sapiens
  misc_feature (1)...(94): Xaa = X or * as defined in Table 2
MAMGFSXXXXXXXXXXXXXXXXXXXXXXXXXXXXXXXXXXXXXXXXXRGFLLKIGQGDQTSPWMVEDEEPDQILRVEGSNWIFQGNAQINLREG

SEQ ID NO: 47774 - protein, 125 aa, Homo sapiens
KRPGSGITEATSSRRQRPTRRLQGQLPGQEKRVLKATEGIANPSWGWGGAVSPLRASLTSLRHKINNHYNTENWKLPIKDSHLIPSPQAPSMPFPLANPPWAPHPREKMWNPQIQGTNCIWVCGP

SEQ ID NO: 47775 - protein, 99 aa, Homo sapiens
DSSCSLLSLGSPRLTFPLFCCSCRWRHFHRKRQARPRGWRESRFPFWAISGFSSVCFGVGAAPSRGRGLCAGLAPDPSHRPAASASPDSPPGDPEAPTR

SEQ ID NO: 47776 - protein, 134 aa, Homo sapiens
  misc_feature (1)...(134): Xaa = X or * as defined in Table 2
VLSFLIHRWEGDKDSLLGPNFSQTPQPSRRFICAFPWENPSXEPSYPSISDPGFLILLPSKGDVWIHLGPIFSKKPLYSXSSFLVIFYPVTPSFLFLGYKFPLAHAVFRVEPTLSLLIQNSHCHGCYTYPDGPE

SEQ ID NO: 47777 - protein, 79 aa, Homo sapiens
  misc_feature (1)...(79): Xaa = X or * as defined in Table 2
IGVVREGIPVLCLFSKGMLPVFAHSVXYWLWVCHRXLLLFXDTSHQYLIYXEFLAXSVVDFCQRPFLHLVLDFFWLVSY

SEQ ID NO: 47778 - protein, 138 aa, Homo sapiens
  misc_feature (1)...(138): Xaa = X or * as defined in Table 2
CQLELSCMKCPSTPVGRSLPVGCTRSGTQLRWHSVPWQSWCTVLGESLLSGLVVLFRASRPEXXNPLKLLPQLPLPPDALSQGDGSFVCKHPTGAVTFPSGMPLGSMTIFKILILPIHEHGMFFSLSVSSFVSLSSGL

SEQ ID NO: 47779 - protein, 138 aa, Homo sapiens; identical to SEQ ID NO: 47778
  misc_feature (1)...(138): Xaa = X or * as defined in Table 2

SEQ ID NO: 47780 - protein, 109 aa, Homo sapiens
  misc_feature (1)...(109): Xaa = X or * as defined in Table 2
CQLELSCMKCPSTPVGRSLPVGCTRSGTQLRWHSVPWQSWCTVLGESLLSGLVVLFRASRPEXXNPLKLLPQLPLPPDALSQGDGSFVCKHPTGAVTFPSGCPTHTLQA

SEQ ID NO: 47781 - protein, 158 aa, Homo sapiens
MGVGTKCEELSMACEYPPESIIVEKSRNYKVDWSEQAGYPEQVVTSPDPDFIFSKSSLCPLPKEFDVDMQFLQGQYFKNIFTKISPIVATGDSEESFGEKSGPSSAALLEFAESPLQTLFACVSPAEAAEQQRLLPAPSFGSFVQEGHPSDASQSSPV

SEQ ID NO: 47782 - protein, 128 aa, Homo sapiens
  misc_feature (1)...(128): Xaa = X or * as defined in Table 2
FLYVIKALGKKQLQFGQQILIPSIELLDYLINPGSGCVSLWKLNKPQYCYLIHFSGLTELSWKVHTILLEGHYEFLEYAADRXPICLFSWKERQLVSFLDYSLHHLLGSFYVVFFFFLYLLVRLCWDL

SEQ ID NO: 47783 - protein, 72 aa, Homo sapiens
AENGPQLAASKKAGISVVQLQGTVWKDRPTTTTMFCPGNFAFSQKCYKVQLEVFFSLWSFPSSSGIPPQGSA

SEQ ID NO: 47784 - protein, 241 aa, Homo sapiens
  misc_feature (1)...(241): Xaa = X or * as defined in Table 2
TGWSPLQLSKATVARLPLWIPPLWAGHLGELWLASGEYPSGLKLPEEGTGSNLRCSAASAGDTQANRVWSGPAANFSRPAAEGPAFHALRGPSVHCSPLCVHEFSSFSSLISENMQYLVFCSGVRFLRIMVISSIHILCLVPKRTRVLGRLSLTCFRFLRGPKEPRITIPHSSAPPLGHVIAIPLPXSFMKPSPEADAPMTGSFLKSPSEADTGATLPVQSVVPIPLSILPILEVGGVLFT

SEQ ID NO: 47785 - protein, 508 aa, Homo sapiens
MGKDSIKMPNDKAKRRERTKRESYPRNQDKKQSQEIFVKETEAQRTQVTCLRPQSSSHFSKNVFEPLGKYAFKPFKNSRSSEIILEAVALLLNSYVAISLLLQLANLYFSPIRGPLPSKWQMASSEPPCVNKVSDWKLEILQNGLYLIYGQVAPNANYNDVAPFEVRLYKNKDMIQTLTNKSKIQNVGGTYELHVGDTIDLIFNSEHQVLKNNTYWDMVVLEDKEQSENYWNRGTSGIKWNVRYLEISLGFIFLRMQGALKSLIKGVIPNPHVELCETLLLDFCVDVIFVDVDAIPFPLLVFLLTGPSSAGLLKFAEGPLQTLFAWVSPAEAAEQQRLLPVLPSGSFVPVGHQMAEFFKVRLVDVVLDSPKMLGKKKVFVVANNCCLSSFMLLVPISVLVHLCCCDRILQTVYLIKNGNLFLIVLGSGKPKIKVLASVVGLLATSSLAEESTLTPFQVVQHRERGFICFGESKRKEQGSLLVTQIIIPDFIQDNQGGTSTSLEKAQHY

SEQ ID NO: 47786 - protein, 75 aa, Homo sapiens
  misc_feature (1)...(75): Xaa = X or * as defined in Table 2
SRKMGAPNAXXSAWSWSREGLAAPXSMFSSLSADSSADCKLPEGKVQPASSTGLTARASKDLYFCCCFSISARAS

SEQ ID NO: 47787 - protein, 289 aa, Homo sapiens
MRDRAVRDGAVQPRYYAFPTVFITCRPGDSLRCLHHQGPRFQAQNWSAIWADIKLAAGVFSHTPVVPGMQESSSWHLVGAPLGQSFQRKEQAAIFAVLQPPLVIPRQTGSGMDLQQTPADLQERRLTVRRKTNKHKAITLTSTKRMSTQKPHPKVTNIKDQRCEAGVRERWERRCRSKRSSDLHSGNPGSLSKGKDRNAREIHTFRRGISSPTVPLGSLYIDWFRDKHVTQFGPMRVKHRNFVYAHEEEKHSISVGRGARRSESGATRGDHRERLSENKANRVKQNAEV

SEQ ID NO: 47788 - protein, 103 aa, Homo sapiens
  DOMAIN (9)..(55): CHAIN PROTEIN LIPOPOLYSACCHARIDE BIOSYNT domain identified by eMATRIX, accession number PD02629F, p-value=3.373e-09, raw score of 12.19
  misc_feature (1)...(103): Xaa = X or * as defined in Table 2
SSSTARPSQTSSAEESPTSWYRGDNPSKPMDPLVAGVFGAIVGAASVLGNAPLDGIETGCGAWSSTNAEHTGLWLQILRKEGLKDLXNGTVPRLGRWTASPWM

SEQ ID NO: 47789 - protein, 861 aa, Homo sapiens
  misc_feature (1)...(861): Xaa = X or * as defined in Table 2
MAKKEQLLSAAPSKTNAEGQEIPSGVYTTRALGFKHKTGQPFGQTPSYPQEFILYTNDTWNASKTEPFTPLERGLKPGSQESSGWHLVGTPLGRSFQRKEQAAIFAVLQPPLVIPRQTGSGVDLQQTPTDLQKRVLTVRRKTNSININKKDDHAKTTSKGHQQQRPKVDKSTKMRKNQCKKATNSKNQNVSSPPKDHNSSTAKEQNWMENEFDKLTEVGFRSSQFDQVEERISDIEDKLNEIKHEDKIREKRMKKKEQSLQEIWEYVKRPNLRLIGVPESDGENGTKLENTLQDTIQENFPNLARQANIQIQEIQRTPQRYSSRRATPRHIIEXIHQGXNEGKTVKGSQREKXGQEIPSGVYTTRALGFKHKTGQPFGQTPSYPQEFILYTNDTWNASKTEPFTPLERGLKPGSQESSGWHLVGTPLGRSFQRKEQAAIFAVLQPPLVIPRQTGSGVDLQQTPTDLQKRVLTVRRKTNSININKKDDHAKTTSKGHQQQRPKVDKSTKMRKNQCKKATNSKNQNVSSPPKDHNSSTAKEQNWMENEFDKLTEVGFRSSQFDQVEERISDIEDKLNEIKHEDKIREKRMKKKEQSLQEIWEYVKRPNLRLIGVPESDGENGTKLENTLQDTIQENFPNLARQANIQIQEIQRTPQRYSSRRATPRHIIGRFTKVEMKEKRLRAVREKSRVTHKGKLIRLTADLSAETLQGRREWGSILNILKEMNFQPRISYPAKLSFISEGEIKCFTDKQMLRDFANTRPALQELLKEALNIERKNRYRPLQKQIKNHSGFQAQILNQVCVKYKQGFSREEKDEARALTSKMNMLIKATHSLKSVLYDIYLIVGPHQLDPINGLLLKSIHS

SEQ ID NO: 47790 - protein, 195 aa, Homo sapiens
  DOMAIN (157)..(170): PROTEIN ZINC-FINGER METAL-BINDI domain identified by eMATRIX, accession number PD00066, p-value=2.800e-14, raw score of 13.92
  DOMAIN (79)..(193): Zinc finger, C2H2 type domain identified by PFam, accession name zf-C2H2, E-value=1.8e-26, PFam score of 101.4
  misc_feature (1)...(195): Xaa = X or * as defined in Table 2
ATGGHSNQRQRSXKLSKKFRRMYNXNNQYREVLKGADGAENQGSRTTETLCMXRMRQSLQFDSDLVRHQRKHSGEKPYECCECGKAFRGSSELIRHRRIHTGEKPYECGEYKSYECIACGKAFGRSSTLIENQRIHTGEKPYECNECGKSFNQSSALTQHQRIHTGEKPYECSECRKTFRHRSGLMQHQRTHTRV

SEQ ID NO: 47791 - protein, 218 aa, Homo sapiens
MAGKPEYDKTISTSIVLNALNALGVSAEASGRNDLVVKTVEGDRKVSGSAYRETKDRGFHHGTLLLNADLSRLANYLNPDKKKLAAKGITSVRSRVTNLTELLPGITHEQVCEAITEAFFAHYGERVEAEIISPNKTPDLPNFAETFARQSSWEWNFGQAPAFSHLLDERFTWGGVELHFDVGKRPYHPRPGVYRQPQPRAAGSPRRTTARLPFLSLQ

SEQ ID NO: 47792 - protein, 119 aa, Homo sapiens
LLDIRMLCHGKGVIIHVLRLQFLLGRPAPHRLHAALQLPGLSLHGTLALGLWLQLRQLLLLGQPFGISGCGSGCDPEQDCVDCGRGCWPRKCPQGSHSAPRSRGAPHRPRPQQRAAGRQ

SEQ ID NO: 47793 - protein, 353 aa, Homo sapiens
  DOMAIN (173)..(215): Proteasome A-type subunits proteins domain identified by eMATRIX, accession number BL00388B, p-value=9.419e-26, raw score of 31.38
  DOMAIN (159)..(291): Proteasome A-type and B-type domain identified by PFam, accession name proteasome, E-value=2.1e-50, PFam score of 180.9
  misc_feature (1)...(353): Xaa = X or * as defined in Table 2
YPFFHLIDSTIDTCVCFTKFLCCVFQLHQVIYVLLXTGYSLIFDADDLWMGFLRGHPFCXCYCFLFVSFPSNSQAPLLQVCWSLLEVHSRPCSPGYHQRRLQNSKDCCLLLPLEALSQSGTHQMPAGALLYEMSVNPCWEEHQTDQLFTHESTFIRSKTQKKVPDKLLDSSTVTPLFKITENIGCVMTGMTADSRSQVQRARYEAANWKYKYGYEIPVDMLCKRIADISQVYTRNAEMRPLGCCMILIGIDEEQGPQVCKCDPAGYYCGCKATAVGVKQTESTSFLEKKVKKKFDWTFEQTLETAITCLSTVLSIDFKPSEIEVGVVTVENPKFRILTEAEIDAHLVALAERD

SEQ ID NO: 47794 - protein, 62 aa, Homo sapiens
  misc_feature (1)...(62): Xaa = X or * as defined in Table 2
DGQQLIALHRLALRELQQAVHAGIAPAGENPVXWWFRNRQNPLIALRSLPAFQSGNLSCQLH

SEQ ID NO: 47795 - protein, 98 aa, Homo sapiens
  misc_feature (1)...(98): Xaa = X or * as defined in Table 2
SSISDILSSAXSIRLLILVYASXSSRAVFFSTIRSFIFFSKLVILVSPSCNLLSRFLASFHWVRTCSFSSKEFVIITHLLPTSVNSSYSSLFSFVHFG

SEQ ID NO: 47796 - protein, 165 aa, Homo sapiens
  DOMAIN (79)..(134): kw TRANSCRIPTASE REVERSE II ORF2 domain identified by eMATRIX, accession number DM01354Q, p-value=9.864e-34, raw score of 9.23
  misc_feature (1)...(165): Xaa = X or * as defined in Table 2
FTNQKESRTRWIHSRILPEVQGGTGTIPSETIPINRKRGNPPXLILXGQRHSDTKAGRDTTKKENFRPISLMNIDAKILNKILANRIQQHIKKLIHHDQVGFIPGMQGWFNIRKCNKCNPAYKQSQRQKHTXLSQXMQKKPLTKFNNPSCXKLSINXVLVGRISK

SEQ ID NO: 47797 - protein, 717 aa, Homo sapiens
  DOMAIN (99)..(118): ALPHA/BETA GLIADIN FAMILY SIGNATURE domain identified by eMATRIX, accession number PR00209B, p-value=6.087e-10, raw score of 4.88
MPAPRRVGTCLAASRRNCHGIRGARVGLDFVLVVVRSEMIPERVDDGPHEPLFTPIVEPVQQPQQPVAPQQQYQQPQQPVPPQPQYQQPQQPVAPQPQYQQPQQPVAPQQQYQQPQQPVAPQQQYQQPQQPVAPQPQDTLLHPLLMRNGDSRPLHKPTTPLPSLDLLTPPPSEVEPVDTFALEQMARLVEARLADFRIKADVVNYSPGPVITRFELNLAPGVKAARISNLSRDIARSLSTVAVRVVEVIPGKPYVVRLDLQRWEGRGPVTWIKHTMWTRTGLSRRVDLLGGAYSLSGTKTPGNSDCARLGDERRRFANLRIFSRTVTGVNAGAVYLLYVGCITRYEIAENRRFCGRDCYVCYVTPVFGDGEEGAGSNFCCSAASAGDIGKQGLETQMDPHFLRPMCILTPRISSQDDDMPVAHVALPVPLPRTFDYLLPEGMTVKDGCRVRVPFAKQQERIGIVVSVSDASELPLNELKAVVEVLDSEPVFTHSVWRLLLWAADYYHHPIGDVLFHALPILLRQGRPAANAPMWYWFATEQGQAVDLNSLKRSPKQQQALAALRQGKIWRDQVATLEFNDAALQALRKKGLCDLASETPEFSDWRTNYAVSGERLRLNTEQATAVGAIHSAADTFSAWLLAGVTGSGKTEVYLSVLENVLAQGKQALVMVPEIGLTPQTIARFRERFNAPVEVLHSGLNDSERLSAWLKAKNGEAAI

SEQ ID NO: 47798 - protein, 88 aa, Homo sapiens
LNTLYFLLLPNCPGQNFQHPKGYCDDEQRQHMLKCLPLCPRCRRTSKEFTISFQCLSIGSINWVKLLSSCQGYGEGATGLIVFLCIEK

SEQ ID NO: 47799 - protein, 107 aa, Homo sapiens
GPRWGPRVHRAPDPVRIPSSGPLLPPRFYPRYVLPPPSASTSRPCQRTSASGRCPCPMHDTVKATMPIWVDPPVPDHYEGEAEHQGILVTHPHHQRCPAGHRHRVVF

SEQ ID NO: 47800 - protein, 209 aa, Homo sapiens
  DOMAIN (26)..(78): Surp module domain identified by PFam, accession name Surp, E -value=6.6e-26, PFam score of 99.5
MRPNPKRRARPPPPRPGAEPTDQELRNVIDKLAQFVARNGPEFEKMTMEKQKDNPKFSFLFGGEFYSYYKCKLALEQQQRRPIERFLSRIPVRALPQTSFFRVVYSLKWSSSVHTIPVPLFPRPCTERLLGATVMENNEVLRDSRIHHLRLLNILGCHAVFFMIPTWVLVDLSAFLVSSDLGDRIRIPNLSIMQYSHVTNMHMYSLYLQ

SEQ ID NO: 47801 - protein, 187 aa, Homo sapiens
  DOMAIN (42)..(137): SCAN domain identified by PFam, accession name SCAN, E-value= 5e-36, PFam score of 133.1
GNGRTVDTQVCQAPITSQSLERPADPNPGEQDAEAGPASRRDTEAERLRFRQFQYHVASGPHLAVGQLWTLCRQWLRPEARSKEQMLEVLVLEQFLGALPSKMRTWVQSQGPRSCREAASLVEDLTQMCQQEGLAAHPSHDTAIRGIPRLAASWETASAMEATADARQKRTHTEKEAWLLEAPHELA

SEQ ID NO: 47802 - protein, 433 aa, Homo sapiens
  DOMAIN (119)..(152): PROLINE-RICH PROTEIN 3 domain identified by eMATRIX, accession number DM00215, p-value=7.254e-09, raw score of 19.43
  DOMAIN (278)..(370): SCAN domain identified by PFam, accession name SCAN, E-value= 3.4e-38, PFam score of 140.3
MRIPAAATVSTFRSSVPDAARPVAKATGTAARGNWRARRGRGAHPRRLLIGLGRLVRHSPAPARESRSGDLSPTPGVIQRTNGGRPRRAACGDGVPPAALGALASPGVAMTERPRPERSPRAAHLPPEQPPPTHPPPNHPTILPPTSRPQPSSLPLPCIPSALPLHTSPARLLWNSSVWHPKLPTPSPLPQPRTLEDAEGLQPPSLESPGPLIADSVRLPHRLCPEPLGLGIQSTHTPQRGTVAREMLPRPKAPASPRRPQTPTPSEQDADPGPASPRDTEAQRLRFRQFQYHVASGPHLALGQLWTLCRQWLRPEARSKEQMLELLVLEQFLGALPSKMRTWVQSQGPRSCREAASLVEDLTQMCQQEVLVSLDSVEPQDWSFGEEEDGKSPRSQKEPSQCLSPSHLVIQHTLTDELREQECLPRGVASTAQ

SEQ ID NO: 47803 - protein, 410 aa, Homo sapiens
  DOMAIN (246)..(294): G-protein coupled receptors family 3 proteins domain identified by eMATRIX, accession number BL00979A, p-value=5.259e- 09, raw score of 19.66
MPHFTFAQCIPNTHQVGNSIAIGLATGHWHQHRHKHQGASPSHSIQASTGSTLVSVSNSNTKSYSSISSSSYKTQPYFIVPSKIIRSTWYSTCYKKGNIIAQLKTHSKHYPKSAQQHHQSASLTTILQHSKGGTAGSKPHLGYTGPAKYQARDGRTQSTTNGPLDNLDTNKLERLQGGYPPGHRDPGKNTTGSWRLPGKSPRFDCPGDVVVRASFSIFHLYNITLFDFTAPPAGLESSSVSTWGYWEAQGFTFAMEEINRDAHLLPSLRLGFSIRNSGRSPSPATRLGPALSELLWRNMLGVVYANGQAPGTLQVSPASGISGKALLPIPAIEFGARAADLSAHARPQPRTLEDAEGLQPPSLESPGVSSLPCPLPGLHPQLGPGRKVRKTAKITPWVDLLLVVVSSIIM

SEQ ID NO: 47804 - protein, 183 aa, Homo sapiens
  DOMAIN (25)..(127): gag gene protein p24 domain identified by PFam, accession name gag_p24, E-value=5e-23, PFam score of 89.9
MNTANVEKPYVQKYQTAFVLVMKHRQCQLASHLVQNYRSIQLWAWEKIQDPGTTCPSFNTITQGSKKPYPDFVARLRDAAQNSITDENARKVIVELMAYGNANPECQSATKPLKGKVPTGSDVISDQKAVGVQAAKRRNRTDTGLGRSARKSGKGVTRMLPKHASMILDGGGPATSPSCCRFL

SEQ ID NO: 47805 - protein, 121 aa, Homo sapiens
  DOMAIN (24)..(88): gag gene protein p24 domain identified by PFam, accession name gag_p24, E-value=4.8e-18, PFam score of 72.1
SPYWNKGKSPGWLAESFKRPVFRQGAKEPYPDFAASLQDAAQKSITNENARKVIVELMAYENANPECQSAIKPLKGKVPVGSDVISRGFQGQQPPLSQVLQGMGQLPQYSNCPRPQAAVQQ

SEQ ID NO: 47806 - protein, 275 aa, Homo sapiens
  DOMAIN (199)..(209): C2HC-TYPE ZINC-FINGER SIGNATURE domain identified by eMATRIX, accession number PR00939A, p-value=8.000e-10, raw score of 8.95
  DOMAIN (23)..(181): gag gene protein p24 domain identified by PFam, accession name gag_p24, E-value=1.7e-71, PFam score of 250.9
HISRLKSQRPPRGEFESVPHEETWWIDGVQEQVRRNRAANPPVNIDADQLLGIGQNWSTISQQALMQNEAIEQVRAICLRAWEKIQDPGSTCPSFNTVRQGSKEPYPDFVARLQDVAQKSIADEKARKVIVELMAYENTNPECQSAIKPLKGKVPAGSDVISEYVKACDGIGGAMHKAMLMAQAITGVVLGGQVRTFGGKCYNCGQIGHLKKNCPVLNKQNITIQATTTTVSLQNTYLLFPSTMSIWKTHLDQVQCLPPTSKSGGPSPKVPDTVA

SEQ ID NO: 47807 - protein, 140 aa, Homo sapiens
  DOMAIN (60)..(124): gag gene protein p24 domain identified by PFam, accession name gag_p24, E-value=1.8e-23, PFam score of 91.4
MDQPLLAKSPKQFLRLLVFSGNFISLTILNLQERVKVGSSVVIEDKSTRDPEYIYNQPYVRQGSKEPYPDLVARLQDVAQKSIADENACKVIVELMAYENANPECQSAIKPLKGKVPAGSDVISGVPNSSEETATIQNGP

SEQ ID NO: 47808 - protein, 649 aa, Homo sapiens
  DOMAIN (159)..(200): CORE POLYPROTEIN PROTEIN GAG CONTAINS: P domain identified by eMATRIX, accession number PD02059A, p-value=1.225e-10, raw score of 28.10
  DOMAIN (465)..(549): gag gene protein p24 domain identified by PFam, accession name gag_p24, E-value=3.8e-30, PFam score of 113.6
MVAHAYHPSDPGGQEKKNQLSEEEFKLAEEICISNKEPNVNSQDNGENVSRACQRPSWQPLLSQAQRSWREKWFPGPDPGPNCSVQPRDLVPCIPVDPAPATAKRSPQGELLLWQCGRKMWSCSPCTGSPLGHCLVELVKVRSSVVIEDKSMRDSQVRLQSALRKFCPWFLEQGTLYLKDWEKIGKELKQASREGKIIPLTVWNDWVIIKVALEPFQTEEDSVSVSDAPESCLIDCKEEAEIKSRKGTESLHCEYVAEPVMAQSMQNVDYNQLQEVIYPETLKLEEKGPELAGPSESKPRGPTPLPAVQMPVTLQPQMQVRQVQTPREYQIEKDRVSVTAMPIQIQYPQYQPVENKTQLPVAYQYWLPAELKCRPPPENQYGQPGMFPAPQDRAPYPQPPTMRLNPTAPPSEQGSVLHKIIDEARKQRDIEAWQFPVILEPIPPGEGAQEGEPPLAEARYESFSIKMLKDMKEGVKQASEKIQDPGTACPSFNTIRQGSKEPYPDFVARLQDVAQKSITDENACKVIVELMAYENANPECQSAIKPLKGGTRDLRKQRDTETKYRERKVGPGDQRSAYGGPVPALVSEFPQYLLIITSTISERGMWQDNRVIVERGSAAKHVNKCLCIINKITGAEKEQNYSSCGITWR

SEQ ID NO: 47809 - protein, 132 aa, Homo sapiens
  DOMAIN (3)..(14): RNase H domain identified by eMATRIX, accession number PF00075F, p-value=5.091e-09, raw score of 12.87
PLKVNIYPDSKYAFHILHHHERGFLTTQGSSIINASLIKTLLKAALLPKEARVIHCKGHQRASDPIAQDNAHTDKIAKKAASIPTYTPHFQFFSFSSATPTYSPAETSTYQSLPTQGKWFLDKETYFLPASQ

SEQ ID NO: 47810 - protein, 794 aa, Homo sapiens; identical to SEQ ID NO: 31228

SEQ ID NO: 47811 - protein, 731 aa, Homo sapiens
  DOMAIN (571)..(582): RNase H domain identified by eMATRIX, accession number PF00075F, p-value=2.588e-10, raw score of 12.87
  DOMAIN (20)..(190): Josephin domain identified by PFam, accession name Josephin, E-value=1.3e-126, PFam score of 434.0
MAPEQGRVSILQTLFIEYHGYSIFVVKGDLPDCEADQLLQMIRVQQMHRPKLIGEELAQLKEQRVHKTDLERVLEANDGSGMLDEDEEDLQRALALSRQEIDMEDEEADLRRAIQLSMQGSSRNISQDMTQTSGTNLTSEELRKRREAYFEKQQQKQQQQQQQQQQGDLSGQSSHPCERPATSSGALGSDLALLLTQSLFGSLFTWTRVTFGAEDPGQEDSFRRRVPCPCPHSVRRSTYDLGSSDQPAQGTSHEFQIGLLLTRLSQVPILPQPPVPHPIILLSPPPHTVSGLQFLSVTSPPLPAQQFLLKEVAGAEGIAKVIPTCPVPLLGQDILTKLSASLIIPGLQPHLIATLLPNPKPPSPLPLVSPNLNPQVWDTSTPSLATDQTPITIPLKPNHPYLAQCHYSIPQLALRGLKPVITRLLQHGLLKPINSSYNSPILPVQKPDKSYRLPQDLDLINQIVLPIHPVASPHIIPDTTPDPHDCISLIHLAFTPFPHTSFFPIPHPDHTWFIDGSSTWPNRHSPAKVGYAIVVSSTSILEATALPPSTTSQQAELIALTRALALAKGLHVNIYTDSKYAFHILHHNAVIWAERGFLSTQRSSIIIASLIKTLLKAALLPKEAGVIHCKGHQKASDPIAQGNAYADKSDNGLAFTSQIIHKQFLRLLVFSGTFIPLTVLNLQERTGQYFYLLPFTELEPVLEKLQGTVHLNFYMDALSCSAPTSFQTPAL

SEQ ID NO: 47812 - protein, 118 aa, Homo sapiens
LYSVFVESPTVTIVPGLDFNLASHVIPDTTPDPHDCISLIHLTFTPFPHIFFFPVPHPDHIWFIDGSSTRPNHYSPAKEAGVIHCKGHQKASDPIALGNAYADNVAKEASSVPTSVPH

SEQ ID NO: 47813 - protein, 78 aa, Homo sapiens
MHEIWCRDSDRGTSFGRSIPCPPDLYSMRKIHLQPQVLRLTSPRNISPISNPDPTENQTVQLTWQPLPEPLELWPKAL

SEQ ID NO: 47814 - protein, 143 aa, Homo sapiens
LGPLPFSLSPCCLHCQGKRLCGHHEEARRRKNVSIPRKEAGIIHCKGHQKASDPIAQGNAYADKTKFLDLAFPPLRLSFTCQITQAVSQALGIQWNLHTLTILNLQKRIRACPQDATGYSPFELLYGCSFLLGPSLIPDTSPT

SEQ ID NO: 47815 - protein, 40 aa, Homo sapiens
  misc_feature (1)...(40): Xaa = X or * as defined in Table 2
TQKGQRAALFLICILSPSPLPTLGKNFKNXIPALKPHNRI

SEQ ID NO: 47816 - protein, 266 aa, Homo sapiens
  DOMAIN (100)..(111): RNase H domain identified by eMATRIX, accession number PF00075F, p-value=2.059e-10, raw score of 12.87
  DOMAIN (59)..(181): RNase H domain identified by PFam, accession name rnaseH, E- value=2.8e-08, PFam score of 38.7
MTSGPQTSQPKEHLTNFKSDEQERVSSLAQSHTDNHRLHEPGLQEGIRAVPREDPQWNYQADSPRGPLDHHRRRASGNSQWRQAKLIALTRALTLAKGLRINIYTDSKYAFRILHHHAVIWAERGFLPTQGSSIINATLIKTLLKAALLPKEAGVIHCKGHQKASDPITQGNAYADKGTKKWKKEAEEGEPERWQPEKDLPEKDSADIAGFEDGEMRLSQGMQVASGAAKDKEMDSPTDPPEGMQTCQHYDFSPVRPILECWPPEP

SEQ ID NO: 47817 - protein, 199 aa, Homo sapiens
MGSASSRKEGTVTYLFWYYGAPQSARAIQLKTDTAQSPRKPTGPSQMLWVTLTVEGSSIINASLIKTLLKAALLPKEAGVIHCKGHQKASDPIAQGNAYADKDPSCCSSETAGSHPFKIPSQSGSTSLPLTSPFTAFGSCGPFLSGSQGPEPLSSPGLGGPGPSSADWAVDVGPEKSGGGGGGGGEGKATLKRRLAVSA

SEQ ID NO: 47818 - protein, 491 aa, Homo sapiens
  DOMAIN (445)..(463): RNase H domain identified by eMATRIX, accession number PF00075J, p-value=7.923e-13, raw score of 15.78
  DOMAIN (351)..(491): Integrase core domain identified by PFam, accession name rve, E-value=8e-29, PFam score of 103.7
IPTCPVPLLGQDILTKLSASLIIPGLQPHLIATLLPNPKPPSPLPLVSPNLNPQVWDTSTPSLATDQTPITIPLKPNHPYLAQCHYSIPQLALRGLKPVITRLLQHGLLKPINSSYNSPILPVQKPDKSYRLPQDLDLINQIVLPIHPVASPHIIPDTTPDPHDCISLIHLAFTPFPHTSFFPIPHPDHTWFIDGSSTWPNRHSPAKVGYAIVVSSTSILEATALPPSTTSQQAELIALTRALALAKGLHVNIYTDSKYAFHILHHNAVIWAERGFLSTQRSSIIIASLIKTLLKAALLPKEAGVIHCKGHQKASDPIAQDNAYADKLAKKAASVPTSVPHGISQAPPPLPTHQARYWQIDFTHMPRVRKLKYLLVWVDTFTGWVEAFPTGSKKATAVISSLLSDIIPQFSLPTSIHSDSRLAFISQITQAVSQALGIQWNLHISYRPQSSGKVEQTNGLLKTHLTKLSLQLKKDWTVLLPLALLRIRACP

SEQ ID NO: 47819 - protein, 191 aa, Homo sapiens
  misc_feature (1)...(191): Xaa = X or * as defined in Table 2
VGSGDLPWEGNPLSSCSLLHEKDPPTTSGPQTDQPKEHLTNFKSGCSSPGPARSQFFLSLRSSTLXSFYHLPSSHLVCLTVSFRDXPSPTCPAIDSXKGGCELKARVKEHFCHDLPASSMQSNYPVHDSGHLTTGPSLFKPTLNIEYSTGHAPYHVRSACFPFAFCHDCQFPEASPEAEAAAILSVQPAEP

SEQ ID NO: 47820 - protein, 384 aa, Homo sapiens
MAAGWRPQCHLLKAQKLGSLPSFCIQTLKMHNPPPVADSAQWEKEKRRDKGDTFYPWTQNSGAGKVERTKGLLKTHLTKLSYQLKKDWTILLRLSFLRSQTCPQNATSMCLMTESCPPKCQEPTRDGLFSSTLLSACGRDCACAAEGGGGRHPTPRVVVAGTPPSAAASACQAPPCQVALPSFYPVLKTRRSGMARFDSGVGVGASASATPVVSLSAEALPATSSDGLLQVAGGVVGTLKEIKRHRLDARSVVPRLQEPLRALRGGEGFGAGLQRGGNTPLLFSQGEWVGDGKGVFAISQREHFCHDLPASSMQSNYPVHDSGHLTTGPSLFKPTLNIEYSTGHAPYHVRSACFPFAFCHDCQFPEASPEAEAAAILSVQPAEP

SEQ ID NO: 47821 - protein, 53 aa, Homo sapiens
MEQRAGGQGIDLPREVPPIRVMVPNFIRVRVKRPPNRLCVRNTAVYFTWVQAG

SEQ ID NO: 47822 - protein, 141 aa, Homo sapiens
  DOMAIN (74)..(115): Ferritin iron-binding regions proteins domain identified by eMATRIX, accession number BL00540A, p-value=1.000e-40, raw score of 15.06
  DOMAIN (82)..(141): Ferritins domain identified by PFam, accession name ferritin, E-value=8e-38, PFam score of 130.3
MSQACNCGKLLVFCECQLASCSHLQPLPPQEFWFGSGLGFYKLQRELLGDHRPRSHRRRLSLVAALTTASTSQVRQNYHQDSEAAINRQINLELYASYVYLSMSYYFDHDDVALKNFAKYFLHQSHEEREHAEELMKLQNQ

SEQ ID NO: 47823 - protein, 145 aa, Homo sapiens
  DOMAIN (73)..(94): RIBOSOMAL PROTEIN L5 SIGNATURE domain identified by eMATRIX, accession number PR00058C, p-value=6.087e-24, raw score of 7.38
  DOMAIN (31)..(134): Ribosomal L18p/L5e family domain identified by PFam, accession name Ribosomal_L18p, E-value=3.9e-22, PFam score of 87.0
  misc_feature (1)...(145): Xaa = X or * as defined in Table 2
KLINLFSNFCSYSRQFLSFSSTLYFVWVFCYNRCCFSKXRMIVHITNRDINCQIAYARIEGDMIVCAAYAHELPKYGVKVGLTNYAATYCTGLLLAHRLLNRFGMDKICYLDAGLARTTTGNKVFGDLDGGLSIPQSTKXFPGYD

SEQ ID NO: 47824 - protein, 352 aa, Homo sapiens
  DOMAIN (77)..(97): RIBOSOMAL PROTEIN L5 SIGNATURE domain identified by eMATRIX, accession number PR00058B, p-value=1.529e-27, raw score of 8.75
  DOMAIN (61)..(225): Ribosomal L18p/L5e family domain identified by PFam, accession name Ribosomal_L18p, E-value=7.8e-06, PFam score of 14.1
  misc_feature (1)...(352): Xaa = X or * as defined in Table 2
GPLCIALALQEFGTRRRWACRSLSSSGRRSLFRRMGSVKAVKNKAYFKRYQVKFRRRREGKTDYYARKRLVIQDKNKYNTPKYRMIVRVTNRDIICQMLYARRIEGDMIVCAAYCTPNLPKIWVXRVGLTNYAAAYCTGLLLARRLLPXRFGMDKIYEGQVELTGDEYNVESIDGQPGCLPPAYLDAGPCSEPTHWPLKFFGAPEGKLWMGGLSIPSQYPNRFPGYDSEKQRNFNAEVHRKAHSWGQNCCRFTWRYFMEEDEDAYKKQFSQYIKNSVTPDMMEEMYKKAHAAIRENPVLWKRRPKKEVKKKRWNRPKMSLAQKKDRVAQKKASFLQSSRSGLLESLTPAIFP

SEQ ID NO: 47825 - protein, 1655 aa, Homo sapiens
  DOMAIN (644)..(679): Matrix protein (MA) p15. domain identified by eMATRIX, accession number PF01140D, p-value=6.760e-11, raw score of 15.54
  DOMAIN (1243)..(1541): CNH domain identified by PFam, accession name CNH, E-value= 1.4e-130, PFam score of 447.2
RRTSAVSRGLLFMSFVQPLLQPPVHLLTARVRVPGYLQIDGVKIKEHNGKLMNCFKTKMTYYSFMKCVGLPAQLTIGFSGPSRETGSDPRAARRGEDPQSKDRGDGLSEQTEAQRSGVHCPRSQLVGELAGQSPRTIPAALRVCLYLLCITSYNHTSKDESSKDEEEEIKLEINMLKKYSHHRNIATYYGAFIKKSPPGHDDQLWLVMEFCGAGSITDLVKNTKGNTLKEDWIAYISREILRGLAHLHIHHVIHRDIKGQNVLLTENAEVKLDHHHHPIGWDAEVTEKSAEVPSALGSLKALKVVVHSKGPLLVTVGEAGEAARSRPHRSFQTVDFGVSAQLDRTVGRRNTFIGTPYWMAPEVIACDENPDATYDYRSDLWSCGITAIEMAEGAPPLCDMHPMRALFLIPRNPPPRLKSKKWSKKFFSFIEGCLVKNYMQRPSTEQLLKHPFIRDQPNERQVRIQLKDHIDRTRKKRGEKDETEYEYSGSEEEEEEVPEQEGEPSSIVNVPGESTLRRDFLRLQQENKERSEALRRQQLLQEQQLREQEEYKRQLLAERQKRIEQQKEQRRRLEEKLLEDVFQQSKKEDDKDSREVCGQKYRMTGKQSVSKNKERIPDFFNCVERSVMQQRREREARRQQEREQRRREQEEKRRLEELERRRKEEEERRRAEEEKRRVEREQEYIRRQLEEEQRHLEVLQQQLLQEQAMLLECRWREMEEHRQAERLQRQLQQEQAYLLSLQHDHRRPHPQHSQQPPPPQQERSKPSFHAPEPKAHYEPADRAREVEDRFRKTNHSSPEAQSKQTGRVLEPPVPSRSESFSNGNSESVHPALQRPAEPQDPCPPSRSEVLSQSSDSKSEAPDPTQKAWSRSDSDEVPPRVPVRTTSRSPVLSRRDSPLQGSGQQNSQAGQRNSTSSIEPRLLWERVEKLVPRPGSGSSSGSSNSGSQPGSHPGSQSGSGERFRVRSSSKSEGSPSQRLENAVKKPEDKKEVFRPLKPADLTALAKELRAVEDVRPPHKVTDYSSSSEESGTTDEEDDDVEQEGADESTSGPEDTRAASSLNLSNGETESVKTMIVHDDVESEPAMTPSKEGTLIVRQSTVDQKRASHHESNGFAGRIHLLPDLLQQSHSSSTSSTSSSPSSSQPTPTMSPQTPQDKLTANETQSASSTLQKHKSSSSFTPFIDPRLLQISPSSGTTVTSVVGFSCDGMRPEAIRQDPTRKGSVVNVNPTNTRPQSDTPEIRKYKKRFNSEILCAALWGVNLLVGTESGLMLLDRSGQGKVYPLINRRRFQQMDVLEGLNVLVTISGKKDKLRVYYLSWLRNKILHNDPEVEKKQGWTTVGDLEGCVHYKVVKYERIKFLVIALKSSVEVYAWAPKPYHKFMAFKSFGELVHKPLLVDLTVEEGQRLKVIYGSCAGFHAVDVDSGSVYDIYLPTHIQCSIKPHAIIILPNTDGMELLVCYEDEGVYVNTYGRITKDVVLQWGEMPTSVAYIRSNQTMGWGEKAIEIRSVETGHLDGVFMHKRAQRLKFLCERNDKVFFASVRSGGSSQLQNSLSLNDSVLWVSDSGDDEHAVGFIGSGHKEAFHKMKHATVNTLVYISREEGKAQVENSKRPGRHDRRRANLGPCSQCWHLALVSRAARAASSSIRHINKPLRVSS

SEQ ID NO: 47826 - protein, 77 aa, Homo sapiens
RQTRRAAGIVRGDCPASSPTNCDLGQCNSTSLEPRFVQTVHLLCPWTGGSSPLLAARGSLPVSLLGPLKPMVSCAGR

SEQ ID NO: 47827 - protein, 1175 aa, Homo sapiens
  DOMAIN (106)..(125): TYROSINE KINASE CATALYTIC DOMAIN SIGNATURE domain identified by eMATRIX, accession number PR00109B, p-value=8.364e-11, raw score of 12.27
  DOMAIN (857)..(1155): CNH domain identified by PFam, accession name CNH, E-value= 1.4e-130, PFam score of 447.2
QVYKGRHVKTGQLAAIKVMDVTEDEEEEIKLEINMLKKYSHHRNIATYYGAFIKKSPPGHDDQLWLVMEFCGAGSITDLVKNTKGNTLKEDWIAYISREILRGLAHLHIHHVIHRDIKGQNVLLTENAEVKLVDFGVSAQLDRTVGRRNTFIGTPYWMAPEVIACDENPDATYDYRSDLWSCGITAIEMAEGAPPLCDMHPMRALFLIPRNPPPRLKSKKWSKKFFSFIEGCLVKNYMQRPSTEQLLKHPFIRDQPNERQVRIQLKDHIDRTRKKRGEKDETEYEYSGSEEEEEEVPEQEGEPSSIVNVPGESTLRRDFLRLQQENKERSEALRRQQLLQEQQLREQEEYKRQLLAERQKRIEQQKEQRRRLEEQQRREREARRQQEREQRRREQEEKRRLEELERRRKEEEERRRAEEEKRRVEREQEYIRRQLEEEQRHLEVLQQQLLQEQAMLLHDHRRPHPQHSQQPPPPQQERSKPSFHAPEPKAHYEPADRAREVEDRFRKTNHSSPEAQSKQTGRVLEPPVPSRSESFSNGNSESVHPALQRPAEPQVPVRTTSRSPVLSRRDSPLQGSGQQNSQAGQRNSTSSIEPRLLWERVEKLVPRPGSGSSSGSSNSGSQPGSHPGSQSGSGERFRVRSSSKSEGSPSQRLENAVKKPEDKKEVFRPLKPAGEVDLTALAKELRAVEDVRPPHKVTDYSSSSEESGTTDEEDDDVEQEGADESTSGPEDTRAASSLNLSNGETESVKTMIVHDDVESEPAMTPSKEGTLIVRQTQSASSTLQKHKSSSSFTPFIDPRLLQISPSSGTTVTSVVGFSCDGMRPEAIRQDPTRKGSVVNVNPTNTRPQSDTPEIRKYKKRFNSEILCAALWGVNLLVGTESGLMLLDRSGQGKVYPLINRRRFQQMDVLEGLNVLVTISGKKDKLRVYYLSWLRNKILHNDPEVEKKQGWTTVGDLEGCVHYKVVKYERIKFLVIALKSSVEVYAWAPKPYHKFMAFKSFGELVHKPLLVDLTVEEGQRLKVIYGSCAGFHAVDVDSGSVYDIYLPTHIQCSIKPHAIIILPNTDGMELLVCYEDEGVYVNTYGRITKDVVLQWGEMPTSVAYIRSNQTMGWGEKAIEIRSVETGHLDGVFMHKRAQRLKFLCERNDKVFFASVRSGGSSQVYFMTLGRTSLLSW

SEQ ID NO: 47828 - protein, 1219 aa, Homo sapiens
  DOMAIN (72)..(91): TYROSINE KINASE CATALYTIC DOMAIN SIGNATURE domain identified by eMATRIX, accession number PR00109B, p-value=8.364e-11, raw score of 12.27
  DOMAIN (928)..(1219): CNH domain identified by PFam, accession name CNH, E-value= 1.8e-122, PFam score of 420.2
MLKKYSHHRNIATYYGAFIKKSPPGHDDQLWLVMEFCGAGSITDLVKNTKGNTLKEDWIAYISREILRGLAHLHIHHVIHRDIKGQNVLLTENAEVKLVDFGVSAQLDRTVGRRNTFIGTPYWMAPEVIACDENPDATYDYRSDLWSCGITAIEMAEGAPPLCDMHPMRALFLIPRNPPPRLKSKKWSKKFFSFIEGCLVKNYMQRPSTEQLLKHPFIRDQPNERQVRIQLKDHIDRTRKKRGEKDETEYEYSGSEEEEEEVPEQEGEPSSIVNVPGESTLRRDFLRLQQENKERSEALRRQQLLQEQQLREQEEYKRQLLAERQKRIEQQKEQRRRLEEQQRREREARRQQEREQRRREQEEKRRLEELERRRKEEEERRRAEEEKRRVEREQEYIRRQLEEEQRHLEVLQQQLLQEQAMLLECRWREMEEHRQAERLQRQLQQEQAYLLSLQHDHRRPHPQHSQQPPPPQQERSKPSFHAPEPKAHYEPADRAREVEDRFRKTNHSSPEAQSKQTGRVLEPPVPSRSESFSNGNSESVHPALQRPAEPQVQWSHLASLKNNVSPVSRSHSFSDPSPKFAHHHLRSQDPCPPSRSEVLSQSSDSKSEAPDPTQKAWSRSDSDEVPPRVPVRTTSRSPVLSRRDSPLQGSGQQNSQAGQRNSTSSIEPRLLWERVEKLVPRPGSGSSSGSSNSGSQPGSHPGSQSGSGERFRVRSSSKSEGSPSQRLENAVKKPEDKKEVFRPLKPADLTALAKELRAVEDVRPPHKVTDYSSSSEESGTTDEEDDDVEQEGADESTSGPEDTRAASSLNLSNGETESVKTMIVHDDVESEPAMTPSKEGTLIVRQTQSASSTLQKHKSSSSFTPFIDPRLLQISPSSGTTVTSVVGFSCDGMRPEAIRQDPTRKGSVVNVNPTNTRPQSDTPEIRKYKKRFNSEILCAALWGVNLLVGTESGLMLLDRSGQGKVYPLINRRRFQQMDVLEGLNVLVTISGKKDKLRVYYLSWLRNKILHNDPEVEKKQGWTTVGDLEGCVHYKVVKYERIKFLVIALKSSVEVYAWAPKPYHKFMAFKSFGELVHKPLLVDLTVEEGQRLKVIYGSCAGFHAVDVDSGSVYDIYLPTHIQCSIKPHAIIILPNTDGMELLVCYEDEGVYVNTYGRITKDVVLQWGEMPTSVAYIRSNQTMGWGEKAIEIRSVETGHLDGVFMHKRAQRLKFLCERNDK

SEQ ID NO: 47829 - protein, 1165 aa, Homo sapiens
  DOMAIN (143)..(162): TYROSINE KINASE CATALYTIC DOMAIN SIGNATURE domain identified by eMATRIX, accession number PR00109B, p-value=8.364e-11, raw score of 12.27
  DOMAIN (839)..(1145): CNH domain identified by PFam, accession name CNH, E-value= 5.4e-126, PFam score of 432.0
MANDSPAKSLVDIDLSSLRDPAGIFELVEVVGNGTYGQVYKGRHVKTGQLAAIKVMDVTEDEEEEIKLEINMLKKYSHHRNIATYYGAFIKKSPPGHDDQLWLVMEFCGAGSITDLVKNTKGNTLKEDWIAYISREILRGLAHLHIHHVIHRDIKGQNVLLTENAEVKLVDFGVSAQLDRTVGRRNTFIGTPYWMAPEVIACDENPDATYDYRSDLWSCGITAIEMAEGAPPLCDMHPMRALFLIPRNPPPRLKSKKWSKKFFSFIEGCLVKNYMQRPSTEQLLKHPFIRDQPNERQVRIQLKDHIDRTRKKRGEKDETEYEYSGSEEEEEEVPEQEGEPSSIVNVPGESTLRRDFLRLQQENKERSEALRRQQLLQEQQLREQEEYKRQLLAERQKRIEQQKEQRRRLEEQQRREREARRQQEREQRRREQEEKRRLEELERRRKEEEERRRAEEEKRRVEREQEYIRRQLEEEQRHLEVLQQQLLQEQAMLLHDHRRPHPQHSQQPPPPQQERSKPSFHAPEPKAHYEPADRAREVPVRTTSRSPVLSRRDSPLQGSGQQNSQAGQRNSTSIEPRLLWERVEKLVPRPGSGSSSGSSNSGSQPGSHPGSQSGSGERFRVRSSSKSEGSPSQRLENAVKKPEDKKEVFRPLKPAGEVDLTALAKELRAVEDVRPPHKVTDYSSSSEESGTTDEEDDDVEQEGADESTSGPEDTRAASSLNLSNGETESVKTMIVHDDVESEPAMTPSKEGTLIVRQTQSASSTLQKHKSSSSFTPFIDPRLLQISPSSGTTVTSVVGFSCDGMRPEAIRQDPTRKGSVVNVNPTNTRPQSDTPEIRKYKKRFNSEILCAALWGVNLLVGTESGLMLLDRSGQGKVYPLINRRRFQQMDVLEGLNVLVTISGKKDKLRVYYLSWLRNKILHNDPEVEKKQGWTTVGDLEGCVHYKVVKYERIKFLVIALKSSVEVYAWAPKPYHKFMAFKSFGELVHKPLLVDLTVEEGQRLKVIYGSCAGFHAVDVDSGSVYDIYLPTHVRKNPHSMIQCSIKPHAIIILPNTDGMELLVCYEDEGVYVNTYGRITKDVVLQWGEMPTSVAYIRSNQTMGWGEKAIEIRSVETGHLDGVFMHKRAQRLKFLCERNDKVFFASVRSGGSSQVYFMTLGRTSLLSW

SEQ ID NO: 47830 - protein, 93 aa, Homo sapiens
  DOMAIN (33)..(71): Eukaryotic protein kinase domain identified by PFam, accession name pkinase, E-value=0.0022, PFam score of 16.1
PLVSVAQAGKLAVTLEQQGGERTLSPRTEEMDCLVMEFCGAGSITDLVKNTKGNTLKEDWIAYISREILRGKDVRKALSKRLLQLTLRGQPIH

SEQ ID NO: 47831 - protein, 873 aa, Homo sapiens
FVPGLREPQWEPAQPSATMSAPSEEEEYARLVMEAQPEWLRAEVKRLSHELAETTREKIQAAEYGLAVLEEKHQLKLQFEELEVDYEAIRSEMEQLKEAFGQAHTNHKKVAADGESREESLIQESASKEQYYVRKVLELQTELKQLRNVLTNTQSENERLASVAQELKEINQNVEIQRGRLRDDIKEYKFREARLLQDYSELEEENISLQKQVSVLRQNQVEFEGLKHEIKRLEEETEYLNSQLEDAIRLKEISERQLEEALETLKTEREQKNSLRKELSHYMSINDSFYTSHLHVSLDGLKFSDDAAEPNNDAEALVNGFEHGGLAKLPLDNKTSTPKKEGLAPPSPSLVSDLLSELNISEIQKLKQQLMQMEREKAGLLATLQDTQKQLEHTRGSLSEQQEKVTRLTENLSALRRLQASKERQTALDNEKDRDSHEDGDYYEVDINGPEILACKYHVAVAEAGELREQLKALRSTHEAREAQHAEEKGRYEAEGQALTEKVSLLEKASRQDRELLARLEKELKKVSDVAGETQGSLSVAQDELVTFSEELANLYHHVCMCNNETPNRVMLDYYREGQGGAGRTSPGGRTSPEARGRRSPILLPKGLLAPEAGRADGGTGDSSPSPGSSLPSPLSDPRREPMNIYNLIAIIRDQIKHLQAAVDRTTELSRQRIASQELGPAVDKDKEALMEEILKLKSLLSTKREQITTLRTVLKANKQTAEVALANLKSKYENEKAMVTETMMKLRNELKALKEDAATFSSLRAMFATRCDEYITQLDEMQRQLAAAEDEKKTLNSLLRMAIQQKLALTQRLELLELDHEQTRRGRAKAAPKTKPATPSVSHTCACASDRAEGTGLANQVFCSEKHSIYCD

SEQ ID NO: 47832 - protein, 548 aa, Homo sapiens
  DOMAIN (277)..(311): kw TRANSCRIPTASE REVERSE II ORF2 domain identified by eMATRIX, accession number DM01354P, p-value=1.000e-20, raw score of 9.18
GIRHEGLRLGMEEGKMDENEWGYHGEGNKSLVVAHAQRCVVLRFLKFPPNRKKTSEEIFQHLQNIVDFGKNVMKEFLGENYVHYGEVVQLPLEFVKQLCLKIQSERPESRCDKDLDTLSGYAMCLPNLTRLQTYRFAEHRPILCVEIKVTCRGADGVGKGERVEERRATAIPYCAQQDTLLFVFPGQSLYRQAFGQAHTNHKKVAADGESREESLIQESASKEQYYVRKVLELQTELKQLRNVLTNTQSENERLASVAQELKEKIETEGKLPNTFYEASIVLLPKPDKDINRKEKDKPVFLMNKDAKVLNKILANQIQKCVKRIMLYDQGEFIPGLGHGEHKMILEQFASDIKEVITIITNYDVLKTWSQLGGAPTGQICYHLSIKASIPMKCTMSTPYSTEAKAEAQRRQEVCWGLATKRSQHPDTLATRGLPVTTGRRKAAGSFRQLHIRRRGRKLLFRLPRPRSGNESLYQYLRWPPAHPPSRSVGWFPARRAAPSSRPRVLAREAPGLRLGMEEGKMDENEWGYHGEGNKSLVVAHAQNLKAFT

SEQ ID NO: 47833 - protein, 1218 aa, Homo sapiens; identical to SEQ ID NO: 36413
  DOMAIN (56)..(111): kw TRANSCRIPTASE REVERSE II ORF2 domain identified by eMATRIX, accession number DM01354Q, p-value=1.000e-40, raw score of 9.23
  DOMAIN (1)..(284): Reverse transcriptase domain identified by PFam, accession name rvt, E-value=8.2e-52, PFam score of 185.6

SEQ ID NO: 47834 - protein, 1189 aa, Homo sapiens; identical to SEQ ID NO: 32525
  DOMAIN (562)..(607): kw TRANSCRIPTASE REVERSE II ORF2 domain identified by eMATRIX, accession number DM01354N, p-value=1.000e-40, raw score of 13.17
  DOMAIN (646)..(871): Reverse transcriptase domain identified by PFam, accession name rvt, E-value=4.9e-50, PFam score of 179.7

SEQ ID NO: 47835 - protein, 1221 aa, Homo sapiens; identical to SEQ ID NO: 35785
  DOMAIN (387)..(432): kw TRANSCRIPTASE REVERSE II ORF2 domain identified by eMATRIX, accession number DM01354N, p-value=1.000e-40, raw score of 13.17
  DOMAIN (473)..(746): Reverse transcriptase domain identified by PFam, accession name rvt, E-value=1.8e-87, PFam score of 304.0

SEQ ID NO: 47836 - protein, 621 aa, Homo sapiens
  DOMAIN (121)..(168): kw TRANSCRIPTASE REVERSE II ORF2 domain identified by eMATRIX, accession number DM01354V, p-value=1.000e-40, raw score of 12.97
  DOMAIN (1)..(137): Reverse transcriptase domain identified by PFam, accession name rvt, E-value=0.093, PFam score of -44.6
  misc_feature (1)...(621): Xaa = X or * as defined in Table 2
TEPKTKTTXLSQXMQKRPLTKFNNTSCXKLSINIVLEVLARAIRQEKEIKGIQLGKEEVKVSLFADDMIVYLENPTVSAQNLLKLIGNFSKVSGYKINVQKSQAFLYTNNRQTERQIMSELPFTIASKRIKYLGIQLTRDVKDLFKENNKPLLKEVKEDTNEWKNIPCSWVGRINIVKMAILPKVIYRFNAIPIKLPMTFFTELEKTTLKFIWNQKRACIAKSIFSQKNKAGGITLPDFKLYYKATVTKTAWYWYQNRDIAQWNRTEPSEIMLHIYNYLIFDKPEKNKQWGKDSLFNKWCWENWLAICRKVKLDPFLTPYTKMNSRWIKDLNVRPKTIKTLEENLGITIQDIGVGKDFMSKTPKAMATKAKIDKWDLIKLKSFCTAKETTIRVNRQPTTWEKIFATYSSDKGLISRIYNELKQIYKKKTNNPIKKWAKDVNRHFSKEDIYAAKKHMKKCSSSLAIREMQIKTTMRYHLTPVRMAIIKKSGNNRKIQGGIWCDRILXRXTTCRVAKEIQSLXRRIWKRLQRTLSIPVLDAVXPPMFXASVIDTMTIXCFEARDTCFTLTLESFWDMHRCLAASKGIGLLLCXPLIWHMSLMGVKSPPFVFSCLWTSAVRPTT

SEQ ID NO: 47837 - protein, 1117 aa, Homo sapiens; identical to SEQ ID NO: 32526
  DOMAIN (297)..(338): kw TRANSCRIPTASE REVERSE II ORF2 domain identified by eMATRIX, accession number DM01354I, p-value=1.000e-40, raw score of 15.55
  DOMAIN (543)..(752): Reverse transcriptase domain identified by PFam, accession name rvt, E-value=1.8e-46, PFam score of 167.8

SEQ ID NO: 47838 - protein, 1099 aa, Homo sapiens; identical to SEQ ID NO: 34343
  DOMAIN (22)..(67): kw TRANSCRIPTASE REVERSE II ORF2 domain identified by eMATRIX, accession number DM01354N, p-value=1.000e-40, raw score of 13.17
  DOMAIN (71)..(341): Reverse transcriptase domain identified by PFam, accession name rvt, E-value=7.5e-70, PFam score of 245.5

SEQ ID NO: 47839 - protein, 854 aa, Homo sapiens; identical to SEQ ID NO: 36422
  DOMAIN (50)..(96): kw TRANSCRIPTASE REVERSE II ORF2 domain identified by eMATRIX, accession number DM01354O, p-value=1.000e-40, raw score of 8.73
  DOMAIN (83)..(358): Reverse transcriptase domain identified by PFam, accession name rvt, E-value=1.5e-87, PFam score of 304.3

SEQ ID NO: 47840 - protein, 1170 aa, Homo sapiens; identical to SEQ ID NO: 34344
  DOMAIN (246)..(287): kw TRANSCRIPTASE REVERSE II ORF2 domain identified by eMATRIX, accession number DM01354I, p-value=1.000e-40, raw score of 15.55
  DOMAIN (459)..(736): Reverse transcriptase domain identified by PFam, accession name rvt, E-value=5.5e-72, PFam score of 252.6
  misc_feature (1)...(1170): Xaa = X or * as defined in Table 2

SEQ ID NO: 47841 - protein, 1231 aa, Homo sapiens; identical to SEQ ID NO: 36973
  DOMAIN (541)..(586): kw TRANSCRIPTASE REVERSE II ORF2 domain identified by eMATRIX, accession number DM01354N, p-value=1.000e-40, raw score of 13.17
  DOMAIN (625)..(900): Reverse transcriptase domain identified by PFam, accession name rvt, E-value=1.7e-88, PFam score of 307.4

SEQ ID NO: 47842 - protein, 593 aa, Homo sapiens; identical to SEQ ID NO: 36974
  DOMAIN (121)..(168): kw TRANSCRIPTASE REVERSE II ORF2 domain identified by eMATRIX, accession number DM01354V, p-value=1.000e-40, raw score of 12.97
  DOMAIN (443)..(541): 7 transmembrane receptor (rhodopsin family) domain identified by PFam, accession name 7tm_1, E-value=6.8e-12, PFam score of 39.9
  misc_feature (1)...(593): Xaa = X or * as defined in Table 2

SEQ ID NO: 47843 - protein, 1014 aa, Homo sapiens; identical to SEQ ID NO: 37215
  DOMAIN (380)..(421): kw TRANSCRIPTASE REVERSE II ORF2 domain identified by eMATRIX, accession number DM01354I, p-value=1.000e-40, raw score of 15.55
  DOMAIN (626)..(901): Reverse transcriptase domain identified by PFam, accession name rvt, E-value=1.1e-83, PFam score of 291.4

SEQ ID NO: 47844 - protein, 1127 aa, Homo sapiens; identical to SEQ ID NO: 36435
  DOMAIN (154)..(195): kw TRANSCRIPTASE REVERSE II ORF2 domain identified by eMATRIX, accession number DM01354I, p-value=1.000e-40, raw score of 15.55
  DOMAIN (400)..(675): Reverse transcriptase domain identified by PFam, accession name rvt, E-value=5.1e-89, PFam score of 309.1

SEQ ID NO: 47845 - protein, 1087 aa, Homo sapiens
  DOMAIN (272)..(317): kw TRANSCRIPTASE REVERSE II ORF2 domain identified by eMATRIX, accession number DM01354N, p-value=1.000e-40, raw score of 13.17
  DOMAIN (356)..(631): Reverse transcriptase domain identified by PFam, accession name rvt, E-value=7.2e-87, PFam score of 302.0
MGDFNTPLSTLDRSMRQKVNKDTQELNSALHQADLIDIYRTLHPKSTEYTFFSAPHHTYSKTDHIVGSKALLSKCKRTEIITNCLSDHSAIKLELRIKNLTQNRSTTWKLNNQLLNDYWAHNEMKAEIKMFFETNENKDTTYQNLWDTFKAVCRGKFIALNAHKRKQERSKIDTLTSQLKELEKQEQTHSKASRRQEITKIRAELKEIETQKILQKINESRSWFFERINKIDRPLARLIKKKREKNQIDAIKNDKGDITTDPTEIQNTIREYYKHLYTNKLENLEEMDKFLDTYTLPRLNQEEVESLNRPITGPEIVAIINSLPTKKSPGPDGFTAKFYQRYKEELVPFLLKLFQSIEKEGILPNSFYEASIILIPKPGRDTTKKENFRPISLMNIDAKILNKILAKRIQQHIKKLIHHDQVGFIPGMQGWFNIHKSINVIQHINRPKDKNHMIISIDAEKAFDKIQQPFMLKTLNKLGIDGTYFKIISAIYDKPTANIILNGQKVEAFPLKTGTRQGCPLSPLLFNIVLEVLARAIRQEKEIKGIQLGKEEVKLSLFADDMIVYLENPIVSAQNLLKLISNFSKVSGYKINVQKSQAFLYTNNRQTESQIMSELPFTIASKRIKYLGIQLTRDVKDLFKENYKPLLKEIKEDTNKWKNIPCSWVGRINIVKMAILPKVIYRFNAIPIKLPMTFFTELEKTTLKFIWNALITKSILSQKNKAGGITLPDFKLYYKATVTKTAWYWYQNRDIDQWNRTEPSEITPHIYNYLIFDKPEKNKQWGKDSLLNKWCWENWLAICRKLKLDPFLTPYTKINSRWIKDLNVRPKTIKTLEENLGITIQDIGMGKDFMSKTPKAMATKAKIDKWDLIKLKSFCTAKQTTIRVNRQPTKWEKIFATYSSDKGLISRIYNELKQIYKKKTNNPIKKWAKDMNRHFSKEDIYAAKKHMKKCSSSLAIREMQIKTTMRYHLTPVRMAIIKKSGNNRTWEYNILCSLVPLLCSLLWLHLTDHHLKEDRTKHLTASDNLEKTELSRWKERALLYEHRVLRPAIDSQHSCAPRRIQGHLVCGSDLTGFMDDVAVILIDVSPF

SEQ ID NO: 47846 - protein, 1260 aa, Homo sapiens; identical to SEQ ID NO: 36437
  DOMAIN (272)..(317): kw TRANSCRIPTASE REVERSE II ORF2 domain identified by eMATRIX, accession number DM01354N, p-value=1.000e-40, raw score of 13.17
  DOMAIN (356)..(631): Reverse transcriptase domain identified by PFam, accession name rvt, E-value=2.6e-81, PFam score of 283.5

SEQ ID NO: 47847 - protein, 1055 aa, Homo sapiens
  DOMAIN (110)..(151): kw TRANSCRIPTASE REVERSE II ORF2 domain identified by eMATRIX, accession number DM01354I, p-value=1.000e-40, raw score of 15.55
  DOMAIN (356)..(631): Reverse transcriptase domain identified by PFam, accession name rvt, E-value=2.7e-88, PFam score of 306.8
MGDFNTPLSTLDRSTRQKVNKDTQELNSALHQADLIDIYRTLHPKSTEYTFFSAPQHTYSKIDHILGSKALLSKCKRTEIITNYLSDHSAIKLELRIKNLTQNRSTTWKLNNLLLNDYWVHNEMKAEIKMFFETNENKDTTYQNLWDTFKAVCRGKFIALNAHKRKQERSKIDTLTSQLKELEKQEQTHSKASRRQEITKIRAELKEIETQKTLQKINESRSWFFERINKIDRPLARLMKKKREKNQIDAIKNDKGDITTNPTEIQTTIREYYKHLYANKLEHLEEMDKFLNTYTLPRQNQEEVESLNRPITGSEIVAIINSLLTKKSPGPDGFTAEFYQRYKEELVPFLLKLFQSIEKEGILPNSFYEASIILIPKPGTDTTKKENFRQISLMNIDVKILNKILANRIQQHIKKLIHHDQVGFIPGMQGWFNIRKSINVIQHINRAKDKNHMIISIDAEKAFDKIQQPFMLKTLNKLGIDGTYFKIIRAIYDKPTANIILNGQKLEAFPLKTGTRQGCPLSPLLFNIVLEVLARAIRQEKEIKGIQLGKEEVKLSLFADDMIVYLENPIVSAQNLLKLISNFSKVSGYKINVQKSQAFLYTNNRQTESQIMGELPFTIASKRIKYLGIQLTRDVKDLFKENYKPLLKEIKEDTNKWKNIPCSWVGRINIVKMAILPKVIYRFNAIPIKLPMTFFTELEKTTLKFIWNQKRARITKSILSQKNKAGGITLPDFKLYYKATVTKTAWYWYQNRDIDQWNRTEPSEIMPHIYNYLIFDKPEKNKQWGKDSLFNKWCWENWLAICRKLKLDPFLTPYTKINSRWIKDLNVRPKTIKTLEENLGITIQDIGVGKDFMSKTPKAMATKDKIDKWDLIKLKSFCTAKETTIRVNRQPTTWEKIFATYSSDKGLISRIYNELKQIYKKKTNNPIRKWAKDMNRHFSKEDIYAAKKHMKKCSSSLAIREMQIKTTMRYHLTPVRMAIIKKSGNNSQVEHSGGPELNIASSKVTTARTAKATPAQHREGSQADFLEQLPRESAQCDGERAPRVEHLPGNLAFLS

SEQ ID NO: 47848 - protein, 1298 aa, Homo sapiens; identical to SEQ ID NO: 36439
  DOMAIN (154)..(195): kw TRANSCRIPTASE REVERSE II ORF2 domain identified by eMATRIX, accession number DM01354I, p-value=1.000e-40, raw score of 15.55
  DOMAIN (400)..(675): Reverse transcriptase domain identified by PFam, accession name rvt, E-value=5.1e-89, PFam score of 309.1

SEQ ID NO: 47849 - protein, 1115 aa, Homo sapiens; identical to SEQ ID NO: 36443
  DOMAIN (323)..(369): kw TRANSCRIPTASE REVERSE II ORF2 domain identified by eMATRIX, accession number DM01354O, p-value=1.000e-40, raw score of 8.73
  DOMAIN (356)..(631): Reverse transcriptase domain identified by PFam, accession name rvt, E-value=3.2e-86, PFam score of 299.8

SEQ ID NO: 47850 - protein, 1153 aa, Homo sapiens; identical to SEQ ID NO: 34357
  DOMAIN (267)..(312): kw TRANSCRIPTASE REVERSE II ORF2 domain identified by eMATRIX, accession number DM01354N, p-value=1.000e-40, raw score of 13.17
  DOMAIN (351)..(626): Reverse transcriptase domain identified by PFam, accession name rvt, E-value=5.8e-89, PFam score of 309.0

SEQ ID NO: 47851 - protein, 1143 aa, Homo sapiens; identical to SEQ ID NO: 34358
  DOMAIN (110)..(151): kw TRANSCRIPTASE REVERSE II ORF2 domain identified by eMATRIX, accession number DM01354I, p-value=1.000e-40, raw score of 15.55
  DOMAIN (356)..(631): Reverse transcriptase domain identified by PFam, accession name rvt, E-value=9.2e-89, PFam score of 308.3

SEQ ID NO: 47852 - protein, 1307 aa, Homo sapiens; identical to SEQ ID NO: 36445
  DOMAIN (294)..(335): kw TRANSCRIPTASE REVERSE II ORF2 domain identified by eMATRIX, accession number DM01354I, p-value=1.000e-40, raw score of 15.55
  DOMAIN (540)..(815): Reverse transcriptase domain identified by PFam, accession name rvt, E-value=7.7e-89, PFam score of 308.6

SEQ ID NO: 47853 - protein, 1598 aa, Homo sapiens
  DOMAIN (554)..(599): kw TRANSCRIPTASE REVERSE II ORF2 domain identified by eMATRIX, accession number DM01354N, p-value=1.000e-40, raw score of 13.17
  DOMAIN (569)..(1459): Reverse transcriptase domain identified by PFam, accession name rvt, E-value=1.5e-131, PFam score of 450.4
MGKKQNRKTGNSKKQSASPPPKEHSSLPATEQSWMEKDFDELREEGYRRSNYSELWEDIQTKGKEVENFEKNLEECITRITNTERCLKELMELKTKARDLREECRSLRSRCDQLEERARPKRAPEGRAKHGKEQPVPAAAKSCQNVKTIKTRKKLHQLMSKITRHRLANWIKSQDPSVCYIPETHLTCRDTHRLKIKGWRKIYQANGKQKQAGVAIHISDKTDFKPTKIKRDKEGHYIMVKGSIQQEKLTILNVYAPNTGAPRFIMQVLSDLQRDLDSHTLIMGDFNTPLSTLDRLTRQKVNKDTQELNSALHQVDLIDIYRTLQPKSTEYTLFSAPHHTYSKIDHILGSKALLSKCKRTEIITNYLSDHSAIKLELRIKKLTQIRSTAWKLNNLLLNDYWVHNEMKAEIKMFFKNNENKDATCQNLWDTFKAVCRGKFLALNAHKRKQERSKINTLTSQLKELEKQEQTHSKASRRQEITKIRAELKEIETQKTLQKINESRSWFFERINKIDRPLARLIKKKREKNQIDTIKNDKGDITTDPTEIQTTVREYYKHLYANKLENLEEMDKFLDTYTLPRLNQEEFESLNRPVTGSEIVAIINSLPTKKSPGPDGFTAEFYRRYKEELHINRAKDKNHMIISIDAEKAFDKIQQPFMLKTLNKLGTAGTYFKIIRAIYDKPTANIILNGQKLEAFPLKTGTRQGCPLSPLLFNIVLEVLARAIRQEKEIKGIQLGKEEVKLSLFADDMIVYLEKLIVSAQNLLKLISNFSKVSGYKINVQKSQAFLYTNNRQTESQIMSELPFTIASKRIKYLGIQLTRNVKDLFKENYKPLLKEIKEDTNKWKNIPCSWVGRINIVKMAILPKGIYRFNAIPIKLPKTFFTELEKTTLKFIWNQKRAHITKSILSQKNKAGGITLPAFKLYYKATVTKTAWYWYQNRDIDQWNRTEPSEITPHIYNYLIFDKPERNKQWGKDSLFNKWCWENWLAICRRKLKLDPFLTPYTKINSRWIKDLNVRPKTIKTLEENLGNTIQDIGMGKDFMSTTPKAMATKAKIDKWDLIKLKSFCTAKETTITVNRQPTEWEKIFTIYPSDKGLISRIYKELKQIYKKRTNNPINKWVKDMNRHFSKEDIYTAKRHMKKCSSSLAIREMQIKTTYHAGPDGFTAEFYQRYKEELVPFLLKLFQSIEKEGILPNSFYEASIILIPKPGRDTTKKENFRPISLMNIDAKILNKILAKRIQQHIKKLIHHDQVGFIPGMQGWFNICKSINVIQHINRTKDKNHMIISIDAEKAFDKIQQLFMLKTLNKLGIDGTYLKIIRAIYDKPTANIILNGQKLEAFPLKTGTRQGCPLSPLLFNIVWEVLARAMRQEKEIKGIQLGKEEVKLSLFADDMIVYLENPIVSAQNLLKLISNFSKVSGYKINVQKSQAFLYTNNRQTESQIMSELPFTTASKRIKYLGIQLTRDEKDLFKENYKPLLNEIRGYKQMEEHSMLTGRKNQYRENAHTAQAKANHRPATSKKVYLITAMKPLSSPIPEGLGLENRTGKEIKSREWTTMLRLAVAAELTFRDWKERSRRTLDTHETKGIPLSKSRAGILVIDIR

SEQ ID NO: 47854 - protein, 3444 aa, Homo sapiens
  DOMAIN (154)..(195): kw TRANSCRIPTASE REVERSE II ORF2 domain identified by eMATRIX, accession number DM01354I, p-value=1.000e-40, raw score of 15.55
  DOMAIN (323)..(3086): Reverse transcriptase domain identified by PFam, accession name rvt, E-value=1.7e-189, PFam score of 642.9
MVKGSIQQEELTILNIYAPNTGAPRFIKQVLSDLQRDLDSHTLIMEDFNTPLSTLDRSTRQKVNKNTQELNSALHQADLIDIYRTLHPKSTEYTFFSAPHHTYSKIDHIVGSKALLSKCKRTEIITNYLSDHSAIKLELRIKNLTQSRSTTWKLNNLLLNDYWVHNEMKAEIKMFFETNENKDTTYQNLWDAFKAVCRGKFIALNAYKRKQERSKIDTLTSQLKELEKQEQTHSKASRRQEITKIRAELKEIETQKTLQKINESRSWFFERINKIDRPLARLIKKKREKNQIDTIKNDKGDITTDPTEIQTTIRESYKHLYANKLENLEEMDTFLDTYTLPRLNQEEVESLNRPITGSEIVAIINSLPTKKSPGPDGFTAEFYQRYKEELHINRTKDKNHMIISIDAEKAFDKIQQRFMLKTLNKLVLEVLARAIRQEKEIKGVQLGKEEVKLSLFADDMIVYLENPIVSAQNLLNLISNFSKVSGYKINVQKSQAFLYTNNRQTESQIMSELPFTIASKRIKYLGIQLTRDVKDLFKENYKPLLNERKEDTNKWKNIPCSWVERINIVKMAILPKVIYRFNAIPIKLPMTFFTELEKTTLKFIWNQKRARIAKSILSQKNKAGGITLPDFKLYYKATVTKTAWYSYQNRDIDQWNRTEPSEILPRIYNYLIFDKPEKNKQWGKDSLFNKWCWENWLAICRKLKLDPFLKPYTKIKSGWIKDLNVRPKTIKTLEENLGITIQDIGMGKDFMSKTPKAMATKAKIDKWDLIKLKSFCTAKETTIRVNRQPTEREKIFATYSSDKGLISRIYKELKQIYKKRTNNLIKKWVKDMNRHFSKEDVYAAKKHMKKCSSSLAIREMQIKTTMRYHLTPVRMAIIKKSGNNRRDRTAEETAERWKIFESVLSPPNLRRAFKEKQEEEVGFRRWVITNSSKLKQHVLTQCKEAKNLEKRLEEFLTRITSLEKNINDLMDLKNTARELLDAYTSINSQINQAEERLSETEDQLNQIKHEDKIRGKKMKRNKQSLQEIWDYVKRPNLRLIGVAESDRENGAKLENTLQYIIQENFPNLARQANTQIQETQRPPQRYSLRKATPRHIIVRFTKVEMKQKMLRAAREKDFKPTKIKRDKEGHYIMVKGSIQQEELTILNIYAPNTGAPRFIKQVLSDLQRDLDSHTLIMGDFNTPLSTLDRSTRQKVNKDTQELNSALHQADLIDIYRTLHPKSTEYTFFSAPHHTYSKIDHIVGSKALLSKCKRTQIITNYLSDHSAIKLELRIKNLTQSRSTTWKLNNLLLNVYWVHNEMKAEIKMFFETNENKDTTYQNLWDTFKAVCRGKFIALNAHKRKQERSKIDTLTSQLKELEKQEQTHSKASRRQEITKIRAELKEIETQKTLQKLNESRSWFFERINKIDRPLARLIKKKREKNQIDTIKNDKGDITTDPTEIQTTIREYYKHLYAYKLENLEEMDTFLDTYTLPRLNQEEVESLNRPITGSEIVAIINSLPTKKSPGPDGFTAKFYQRYKEELVPFLLKLFQSIEKEGILPNSFYDASIILIPKPGRDTTKKENFRPISLMNIDAKILNKILANRIQQHIKKLIHHDQVGFIPGMQGWFNIRKSINVIQHINRAKDKNHMIISIDAEKAFDKIQQPFMLKTLNKLGIDGTYFKIIRAIYDKPTANIILNGQRLEAFPLKTGTRQGCPLSPLLFNIVLEVLARAIRQEKEIKGIQLGKEEVKLSLFADDMIVYLENPIVSAQNLLKLISNFSKVSGYKINVQKSQAFLYTNNRQTESQIMSELPFTIASKRIKYLGIQLTRDVKNLFKENYKPLLKEIKEDTNKWKNIPCSWVGRINIVKMAILPKVIYRFNAIPIKLPMTFFTELEKTTLKFIWNQKRARIAKSILSQKNKAGGITLPDFKLYYKATVTKTAWYWYQNRDIDQWNRTEPSEIMPHIYNYLIFDKPEKNKQWGKDSLFNKWCWENWLAICRKLKLDPFLTPYTKINSRWIKDLNVRPKTIKTLEENLGITIQDIGVGKDFMSKTPKAMATKAKIDKWDLIKLKSFCTAKETTIRVNRQPTTWEKIFATYSSDKGLISRIYNELKQIYKKKTNNPIKKWAKDMNRHFSKEDIYAAKKHMKKCSSSLAIREMQIKTTMRYHLTPVRMAIIKKSGNNRRDRTAEETAERWKIFESVLSPPNLRRAFKEKQEEEVGFRRWVITNSSKLKQHVLTQCKEAKNLEKRLEEFLTRITSLEKNINDLMDLKNTARELLDAYTSINSQINQAEERLSETEDQLNQIKHEDKIRGKKMKRNKQSLQEIWDYVKRPNLRLIGVAESDRENGAKLENTLQYIIQENFPNLARQANTQIQETQRPPQRYSLRKATPRHIIVRFTKVEMKQKMLRAAREKDFKPTKIKRDKEGHYIMVKGSIQQEELTILNIYAPNTGAPRFIKQVLSDLQRDLDSHTLIMGDFNTPLSTLDRSTRQKVNKDTQELNSALHQADLIDIYRTLHPKSTEYTFFSAPHHTYSKIDHIVGSKALLSKCKRTQIITNYLSDHSAIKLELRIKNLTQSRSTTWKLNNLLLNVYWVHNEMKAEIKMFFETNENKDTTYQNLWDTFKAVCRGKFIALNAHKRKQERSKIDTLTSQLKELEKQEQTHSKASRRQEITKIRAELKEIETQKTLQKLNESRSWFFERINKIDRPLARLIKKKREKNQIDTIKNDKGDITTDPTEIQTTIREYYKHLYAYKLENLEEMDTFLDTYTLPRLNQEEVESLNRPITGSEIVAIINSLPTKKSPGPDGFTAKFYQRYKEELVPFLLKLFQSIEKEGILPNSFYDASIILIPKPGRDTTKKENFRPISLMNIDAKILNKILANRIQQHIKKLIHHDQVGFIPGMQGWFNIRKSINVIQHINRAKDKNHMIISIDAEKAFDKIQQPFMLKTLNKLGIDGTYFKIIRAIYDKPTANIILNGQRLEAFPLKTGTRQGCPLSPLLFNIVLEVLARAIRQEKEIKGIQLGKEEVKLSLFADDMIVYLENPIVSAQNLLKLISNFSKVSGYKINVQKSQAFLYTNNRQTESQIMSELPFTIASKRIKYLGIQLTRDVKNLFKENYKPLLKEIKEDTNKWKNIPCSWVGRINIVKMAILPKVIYRFNAIPIKLPMTFFTELEKTTLKFIWNQKRARIAKSILSQKNKAGGITLPDFKLYYKATVTKTAWYWYQNRDIDQWNRTEPSEIMPHIYNYLIFDKPEKNKQWGKDSLFNKWCWENWLAICRKLKLDPFLTPYTKINSRWIKDLNVRPKTIKTLEENLGITIQDIGVGKDFMSKTPKAMATKAKIDKWDLIKLKSFCTAKETTIRVNRQPTTWEKIFATYSSDKGLISRIYNELKQIYKKKTNNPIKKWAKDMNRHFSKEDIYAAKKHMKKCSSSLAIREMQIKTTMRYHLTPVRMAIMKKVRKQQGHG

SEQ ID NO: 47855 - protein, 388 aa, Homo sapiens
  DOMAIN (53)..(93): kw TRANSCRIPTASE REVERSE II ORF2 domain identified by eMATRIX, accession number DM01354Y, p-value=1.474e-10, raw score of 10.69
IQCHPHQATNYFLHRIGKNYFKLHMEPNKSLHSQDNPKQKGTKLEVCTLPDFKLYYKATVTKTALYLYQNQRCRSMEQNRALRNNATYIYNYLIFDKPEKNKQWGKDTLFNKWCWENWLAICRKLKLDPFLTPYTKINSRWIKDLNVRPKTIKTLEENLGNTIQDIGMGKDFMSKTPKATATKAKIDKWDLIQLKSFCTAKETTIRVNRQPTEWEKIFGIYSSDKGLISRIYNELQQIYKKKTNNPIKKWVKDMNRYFSKEDIYAAKRHMKKCSSSLAIREMQIKTTMRYYLTPLRMAIIKKFGNNRQETVREMACLLSGTMDFRHRACFVLSKPDFSTRWPGADAQRPPVLVVVALDSSLPFPQASGQRPPSLEDVDGGAGALVAPC

SEQ ID NO: 47856 - protein, 409 aa, Homo sapiens
  DOMAIN (189)..(229): kw TRANSCRIPTASE REVERSE II ORF2 domain identified by eMATRIX, accession number DM01354Y, p-value=6.000e-09, raw score of 10.69
MALLAYRSIFYLSAALLCVVGRLTSVSIRLSLAQRTYRWKLEIVRKGEGEIARQQEVLMARGMSFPKWHKILVKSFLLEYRPFLWRKSVRKTNKQTLIVSQLLLSAPNAVLTDKVVFHVSVEENCAHMLQRISSECETNLTIIEERENIKIRIRTNYFKLHMEPKESCIAKAILSKKNKAGGIMLPDFRLYYKATVTKTASLDTCYQEMFELEQQSPNSLAPATKFMEDNFSTDVDVEGVGELFHTDDEEEGEYSKVTEEVTEQVYLPAKAKAAKEGKVHSYPSAPPPYYFEEKEPPDLSFLEVTGPGIQQARQEGDLEAWQFPVRIQPPDQQGNIIATFEPFPCKLLKEFKQAINQYGPDGSSNGKAYSGSKGKVFQMPYTSAQKGELVAVIEVLTALELPSNGSSGS

SEQ ID NO: 47857 - protein, 924 aa, Homo sapiens
  DOMAIN (552)..(574): RECOVERIN FAMILY SIGNATURE domain identified by eMATRIX, accession number PR00450C, p-value=8.457e-11, raw score of 12.22
  DOMAIN (170)..(382): TBC domain identified by PFam, accession name TBC, E-value= 4.9e-56, PFam score of 199.6
  misc_feature (1)...(924): Xaa = X or * as defined in Table 2
NLCSLIIPLREVTIVEKADSSSVLPSPLSISTRNRMTFLFANLKDRDFLVQRISDFLQQTTSKIYSDKEFAGSYNSSDDEVYSRPSSLVSSSPQRSTSSDADGERQFNLNGNSVPTATQTLMTMYRRRSPEEFNPKLAKEFLKEQAWKIHFAEYGQGICMYRTEKTRELVLKGIPESMRGELWLLLSGAINEKATHPGYYEDLVEKSMGKYNLATEEIERDLHRSLPEHPAFQNEMGIAALRRVLTAYAFRNPNIGYCQAMNIVTSVLLLYAKEEEAFWLLVALCERMLPDYYNTRVVGALVDQGVFEELARDYVPQLYDCMQDLGVISTISLSWFLTLFLSVMPFESAVVVVDCFFYEGIKVIFQLALAVLDANVDKLLNCKDDGEAMTVLGRYLDSVTNKDSTLPPIPHLHSLLSDDVEPYPEVDIFRLIRTSYEKFGTIRADLIEQMRFKQRLKVIQTLEDTTKRNVVRTIVTETSFTIDELEELYALFKAEHLTSCYWGGSSNALDRHDPSLPYLEQYRIDFEQFKGMFALLFPWACGTHSDVLASRLFQLLDENGDSLINFREFVSGLSAACHGDLTEKLKLLYKMHVLPEPSSDQDEPDSAFEATQYFFEDITPECTHVVGLDSRSKQGADDGFVTVSLKPDKGKRANSQENRNYLRLWTPENKSKSKNAKDLPKLNQGQFIELCKTMYNMFSEDPNEQELYHATAAVTSLLLEIGEVGKLFVARACKGGRERRQWAVLPPGHPRRALPQERARPALRGGVCXAPAGQPGPRQRGTLPWRTNGGHQAGGLLAPGQRGLPSMLISDDDTKDDSSMSSYSVLSAGSHEEDKLHCEDIGEDTVLVRSGQGTAALPRSTSLDRDWAITFEQFLASLLTEPALVKYFDKPVCMMARITSAKNIRMMGKPLTSASDYEISAMSG

SEQ ID NO: 47858 - protein, 1157 aa, Homo sapiens
  DOMAIN (68)..(114): kw TRANSCRIPTASE REVERSE II ORF2 domain identified by eMATRIX, accession number DM01354O, p-value=8.624e-27, raw score of 8.73
  DOMAIN (437)..(661): TBC domain identified by PFam, accession name TBC, E-value= 0.0018, PFam score of -53.3
MAIVLGGKKKLVSEKNQCAACHGDLTEKLKLLYKMHVLPEPSSDQDEPDSAFEATQYFFEDITPECTHATKKSLGPDEFTAEFYQTYKEELALILLILYQIIEEKKLLLNSFYKATMTLILKYVKDTTKKEKYRPISLLNTDAKILNQIQKHDKKLIGHNQKFGTIRADLIEQMRFKQRLKVIQTLEDTTKRNVVRTIVTETSFTIDELEELYALFKSLHFSDEETEPRKMEALRVSRLVGGALGAASALSTEWTVAPLPACIRHLRCKLEIRKAGENNDAIQIRFLRDAEDQKKRSQGMGAGPGFWGELNEVEVAAGGSKSMDSESKEIETRPTADFHLRLLGLIPNGGPQAARHPITGQSRSSLPLPGKTILLIYISAYITRSFNLEQGTSSSDKAMSWNMTITNQNHRTPVESIVRSAEYSGFVSDHFYKSLENQGSGNEETIKCYEHLGPHKPPGAINEKATHPGYYEDLVEKSMGKYNLATEEIERDLHRSLPEHPAFQNEMGIAALRRVLTAYAFRNPNIGYCQGIIAEYNKINDVKEDDDTEKFKEAIVKFHRLFGMPEEEKLVNYYSCSYWKGKVPRQGWMYLSINHLCFYSFLMGREAKLVIRWVDITQLEKNATLLLPDVIKVSTRSSEHFFSVFLNINETFKLMEQLANIAMRQLLDNEGFEQDRSLPKLKRKSPKKVSALKRSHPTSLPPHSLLSTPGITRKEETPDNVVEKKDLELYKEAPSTFQALFSDPPPSKKPQYGRPYPFLGQPTVAADADGLAPDVLLPADGTKRLTLSPEDKLILLSPSKIPEPLREDPEEEPLAEQEAKVEVDDVDERPAELPPLELPLPLPAMETMATPSPAGGCRGGPLEAQALSATGQGCTEPSECPDFAEGPEACVDSPGRTEPCTAALDLGVQLTPETLVEAKEEPVEVPVAVPAAEAAPEEGLAQAALSEPQPSLEMSDCDVPAGEGECPRLEPREAVPVPGSTCYLEEASSEQFLPGLEDPLAGMEVAMELPQARPLPSPGATGVQALEKQEAAESLVLEQSFLHGITLLSEIAELELERRSKKVGGAERALVARPSLESLLAAGSHMLREVLDGPVVGPAQEPAAPTGAEAQQQVQLDAQEGGKNVCHEVLPGGHGRPGTGLQNVAGRGPAPVQGEAA

SEQ ID NO: 47859 - protein, 300 aa, Homo sapiens
MIRPKNAKDSTSNSMENTDSTWSKLFGELCKINEFDTPDSPLLRGKEFNDSILNTFDHMWRTREHNEAVWLLLSSVDKVMKENDELRDSVSQLQRQIPAQKIDGSWRMTVNYCNLNQVVTPISAAVPDAVSLLEQMNTSPRIWYAAIDLANAFYSIPVHKAHQKQFAFSWQVTMQPELCIINWVLSDPSSHKVGHAQQHSIIKWKWYIRDRAQAGPEGTTKNHGSRDQEVKVEVAPLTITPSDPLAKLLLHVPTTSRSAGLEILVPEGGTLPPGDMTMIPLNWKIATWTLWGPPTFKSAG

SEQ ID NO: 47860 - protein, 430 aa, Homo sapiens
MSIQVLKVFQHQFTRNGSRTLGQIQKTSIEDRVLPCMYARNLEVRVLAPAFPKTSEKLLFVSGISRGDSNGNQLPGEFFSGHVFLPADKMPTLSRAVISGGSIRDAMWCIRGSEFDSRILRGYGVPTFVATVSPFVLCRCRQSVVHGVSSLGAHSYADSFLLKSCPAYSRGFWSWLLNMIRPKNAKDSTSNSMENTDSTWSKLFGELCKINEFDTPDSPLLRGKEFNDSILNTFDHMWRTREHNEAVWLLLSSVDKVMKENDELRDSVSQLQRQIPAQKIDGSWRMTVNYCNLNQVVTPISAAVPDAVSLLEQMNTSPRIWYAAIDLANAFYSIPVHKAHQKQFAFSWQAKNHGSRDQEVKVEVAPLTITPSDPLAKLLLHVPTTSRSAGLEILVPEGGTLPPGDMTMIPLNWKIATWTLWGPPTFKSAG

SEQ ID NO: 47861 - protein, 1226 aa, Homo sapiens
  DOMAIN (76)..(126): PHOSPHORYLASE KINASE ALPHA MUSCL domain identified by eMATRIX, accession number PD01841A, p-value=1.000e-40, raw score of 21.71
RVAMRSRSNSGVRLDGYARLVQQTILCHQNPVTGLLPASYDQKDAWVRDNVYSILAVWGLGLAYRKNADRDEDKAKAYELEQSVVKLMRGLLHCMIRQVDKVESFKYSQSTKDSLHAKYNTKTCATVVGDDQWGHLQLDATSVYLLFLAQMTASGLHIIHSLDEVNFIQNLVFYIEAAYKTADFGIWERGDKTNQGISELNASSVGMAKAALEALDELDLFGVKGGPQSVIHVLADEVQHCQSILNSLLPRASTSKEVDASLLSVVSFPAFAVEDSQLVELTKQEIITKLQGRYGCCRFLRDGYKTPKEDPNRLYYEPAELKLFENIECEWPLFWTYFILDGVFSGNAEQVQEYKEALEAVLIKGKNGVPLLPELYSVPPDRVDEEYQNPHTVDRVPMGKLPHMWGQSLYILGSLMAEGFLAPGEIDPLNRRFSTVPKPDVVVQVSILAETEEIKTILKDKGIYVETIAEVYPIRVQPARILSHIYSSLGCNNRMKLSGRPYRHMGVLGTSKLYDIRKTIFTFTPQFIDQQQFYLALDNKMIVEMLRTDLSYLCSRWRMTGQPTITFPISYSMLDEDGTSLNSSILAALRKMQDGYFGGARVQTGKLSEFLTTSCCTHLSFMDPGPEGKLYSEDYDDNYDYLESGNWMNDYDSTSHARCGDEVARYLDHLLAHTAPHPKLAPTSQKGGLDRFQAAVQTTCDLMSLVTKAKELHVQNVHMYLPTKLFQASRPSFNLLDSPHPRQENQVPSVRVEIHLPRDQSGEVDFKALVLQLKETSSLQEQADILYMLYTMKGPDWNTELYNERSATVRELLTELYGKVGEIRHWGLIRYISGILRKKVEALDEACTDLLSHQKHLTVGLPPEPREKTISAPLPYEALTQLIDEASEGDMSISILTQEIMVYLAMYMRTQPGLFAEMFRLRIGLIIQVMATELAHSLRCSAEEATEGLMNLSPSAMKNLLHHILSGKEFGVERSVRPTDSNVSPAISIHEIGAVGATKTERTGIMQLKSEIKQVEFRRLSISAESQSPGTSMTPSSGSFPSAYDQQSSKDSRQGQWQRRRRLDGALNRVPVGFYQKVWKVLQKCHGLSVEGFVLPSSTTREMTPGEIKFSVHVESVLNRVPQPEYRQLLVEAILVLTMLADIEIHSIGSIIAVEKIVHIANDLFLQEQKTLGADDTMLAKDPASGICTLLYDSAPSGRFGTMTYLSKAAATYVQEFLPHSICAMQ

SEQ ID NO: 47862 - protein, 295 aa, Homo sapiens
  DOMAIN (76)..(126): PHOSPHORYLASE KINASE ALPHA MUSCL domain identified by eMATRIX, accession number PD01841A, p-value=1.000e-40, raw score of 21.71
RVAMRSRSNSGVRLDGYARLVQQTILCHQNPVTGLLPASYDQKDAWVRDNVYSILAVWGLGLAYRKNADRDEDKAKAYELEQSVVKLMRGLLHCMIRQVDKVESFKYSQSTKDSLHAKYNTKTCATVVGDDQWGHLQLDATSVYLLFLAQMTASAWQKQYSRRVQPRAQSPQLVPSLGTLYLSEGGLHIIHSLDEVNFIQNLVFYIEAAYKTADFGIWERGDKTNQGISELNASSVGMAKSFYPPEALTRWGPLTLDFISMMNGSQVLFLKTMEERPQGISEILDAAFSITGPKA

SEQ ID NO: 47863 - protein, 243 aa, Homo sapiens
MWKQLWNWVTCRGQNTLEGSEEDRKMWESLELPRDLLNDFDQNADNDMDNEIQAEVVSDEDEELVGNWSKAHYRFCIGQGWPVLWPLARAQVGHSSGSPKVNAAMRQPWLALEEVGGSGSRPAAPRLWRVHVSAPFALQAAFFVCYTTYSPSKLATQWTPKLLCPDQLQRRSELSLEILNKWDQDLEAFIQRTVTGDETWLYQYNPEDKAQSKHWHRRGGSGPVRAKADWSRAEVMAPVFQDA

SEQ ID NO: 47864 - protein, 744 aa, Homo sapiens
  DOMAIN (143)..(182): PROTEIN ZINC FINGER ZINC-FINGER METAL-BINDING NU domain identified by eMATRIX, accession number PD01066, p-value=5.071e-32, raw score of 19.43
  DOMAIN (239)..(741): Zinc finger, C2H2 type domain identified by PFam, accession name zf-C2H2, E-value=4.5e-103, PFam score of 355.8
MQPGPRASCPVPARRLRPRRPLWAAPSPQPRVSPDCAAVTNTAWLAVPVNPVLRTAPAANAGSRGTQAATELPGRLLATEPSTERPAQELPKNVVKYIKSLQPPGKTDYDYDIPSLMVNTECQLDWIEGYKVLILGASDSVVFEDVAVNFTQEEWALLGPSQKKLYRDVMQETFVNLASIGENWEEKNIEDHKNQGRKLRSHMVERLCERKEGSQFGETISQTPNPKPNKKTFTRVKPYECSVCGKDYMCHSSLNRHMRSHTEHRSYEYHKYGEKSYECKECGKRFSFRSSFRIHERTHTGEKPYKCKQCGKAFSWPSSFQIHERTHTGEKPYECKECGKAFIYHTTFRGHMRMHTGEKPYKCKECGKTFSHPSSFRNHERTHTAEKPYKCKQCGKAFRYYQTFQIHERTHTGEKPYQSFSFPSSFRKHERIHTGEKPYDCKECGKAFISLPSYRRHMIMHTGNGPYKCKECGKAFDCPSSFQIHERTHTGEKPYECKQCGKAFSWSSSFRMHERTHTGEKPHECKQCGKAFSCSSSVRIHERTHTGEKPYECKQCGKAFSCSSSFRMHERIHTGEKPYECKQCGKAFSFSSSFRMHERTHTGEKPYECKQCGKAFSCSSSFRMHERTHTGEKPYECKQCGKAFSCSSSIRIHERTHTGEKPYECKQCGKAFSCSSSVRMHERTHTGVKPYECKQCDKAFSCSRSFRIHERTHTGEKPYACQQCGKAFKCSRSFRIHERVHSGE

SEQ ID NO: 47865 - protein, 62 aa, Homo sapiens
  misc_feature (1)...(62): Xaa = X or * as defined in Table 2
TQWGPSVCWCLIPWPSFPDQXPGFXAVLLPWRCQGFWPLLLACAPAGPATAAEPAVSSPAEP

SEQ ID NO: 47866 - protein, 208 aa, Homo sapiens
  DOMAIN (29)..(38): Zinc finger C3HC4 type (RING finger), proteins. domain identified by eMATRIX, accession number BL00518, p-value=1.600e-11, raw score of 12.23
  DOMAIN (14)..(56): Zinc finger, C3HC4 type (RING finger) domain identified by PFam, accession name zf-C3HC4, E-value=6.4e-13, PFam score of 46.2
MIPLQKDNQEEGVCPICQESLKEAVSTNCGHLFCRVCLTQHVEKASASGVFCCPLCRKPCSEEVLGTGYICPNHQKRVCRFCEESRLLLCVECLVSPEHMSHHELTIENALSHYKERLNRRSRKLRKDIAELQRLKAQQEKKLQALQQWLGQLEHMPAEAARILDISRAVTQLRSLVIDLERTAKELDTNTLKAPTGSTQCIFGPASS

SEQ ID NO: 47867 - protein, 192 aa, Homo sapiens
RDLDLFSLPQDITLVHYVDGIMLIGSSEQEVASTLDLLVRHLHARGWEINLTKIQGLATSVKFLGVQWYGACRDIPSKVKDKLLHLAPPTTKKEAQHLAASFEWGPEQKGLQQVQVAVQAALPLGLYDPADPMVLEVSVADRDAVWSLWQAPIGESQWRPLGFQNKALPSADNYSPFERQLLACYWALVETE

SEQ ID NO: 47868 - protein, 94 aa, Homo sapiens
PIYRVSRKAANFEWSPEQEKALQQVQAAVQAAWPLGPYDPADPMVLEVSVADRDADWSCWQASIGHKVGHAQQHSIIKWKWYIRDWARADPEGT

SEQ ID NO: 47869 - protein, 113 aa, Homo sapiens
SIYLVTQKAASSEWGPEQEKALQEVQAAVQAALILEPYDPAGPVVLEVSLADRDAVWSLWQAPIGESQQRPLGFWSKALPSSADHKACHAQQHSIIKWKWYIHDRARAGPEGT

SEQ ID NO: 47870 - protein, 252 aa, Homo sapiens
  DOMAIN (18)..(48): bZIP transcription factor domain identified by PFam, accession name bZIP, E-value=0.056, PFam score of 12.4
MWRTKEHNEAGWLLLSSVDEVMKENDELRDSISQLQKQILSLKSAKIALTESLISFRERAEIVEKQTQALIMGTVYWGKGNDQTFQGLLDTGSELTLIPGDPKHHCGPPGPKVRAYGDQVINGVLAQVQLIVGPVGPWTHPVVISPVPECVIGIAILNSWQNPHIGSLTVHLSSDPKGCHSEWGPEQEKALQEVQAAVQAALILEPYDPAGPVVLEVSLADRDAVWSLWQAPIGESQQRPLGFWSKALPSSA

SEQ ID NO: 47871 - protein, 439 aa, Homo sapiens; identical to SEQ ID NO: 46780

SEQ ID NO: 47872 - protein, 329 aa, Homo sapiens
  misc_feature (1)...(329): Xaa = X or * as defined in Table 2
LCQRLLLAEPNEKPGSLGNVMAVARIEIGICEYYHEKTTEKALDSHGVLAGSTIKGVRSFQRNLELKLPATERATANAIELLTVLDQAYENFAPQILPSTGSPTSQETAQFKANQNKPLVRGKGSPHEAIRYISAAHREWKPAILTSAIRSFCSTWLVFTSKNFPKLVTQHGSTIAGNGQSSDETQVQGAAWKSDSRGTKRQIPTWILAEGNNAGAQLDIPGPTIPAPNCSLKVPQSWSTTPSMPSSLGKAYWLLACYWALVETERLAMGHQVTMKPELPVMNWVLSDPSSHKVGGAQQHSINKWKWYIRNRARAGPEGTSXLPAPLIG

SEQ ID NO: 47873 - protein, 605 aa, Homo sapiens; identical to SEQ ID NO: 34065
  DOMAIN (220)..(237): RNase H domain identified by eMATRIX, accession number PF00075A, p-value=4.000e-09, raw score of 14.44
  DOMAIN (466)..(512): Integrase core domain identified by PFam, accession name rve, E-value=0.0097, PFam score of 13.5

SEQ ID NO: 47874 - protein, 347 aa, Homo sapiens
  DOMAIN (176)..(221): kw TRANSCRIPTASE REVERSE II ORF2 domain identified by eMATRIX, accession number DM01354N, p-value=1.000e-40, raw score of 13.17
  misc_feature (1)...(347): Xaa = X or * as defined in Table 2
PGKQGLEWTPRKLQQTCKRGAGQLEEKLANRKQXHQHXQKGXPPQKLNAKDHNSSPTREQNWTENEFDELTEVGFRRWVITNSSELKEHVLTQCKEAKNFDKRLEELLIQITSLEKNISDLMELKNTARELLEAYTSINSQIDQAEMDRXPDXXRRKERRIKXHNKKXXRGYHNXSQEIQTTIREYYKHLYANKLENLEEMDKFLDTYTLPRLNQEEVEPLNRPITSSEIEAVINSLPNQKSPGQTNSQLTSTRDAEKAFNKIQHPFMLKTLNKLDIDGTYLKITRAISXQTHSQCHTEWAKAGSIPFENRHKTRMPSLTTPIQYSIGNSGQGNQEFWKLHLVEREW

SEQ ID NO: 47875 - protein, 385 aa, Homo sapiens
  DOMAIN (255)..(300): kw TRANSCRIPTASE REVERSE II ORF2 domain identified by eMATRIX, accession number DM01354N, p-value=1.000e-40, raw score of 13.17
MGRNQRIKAENCKNQNSSSPPKDHNSSPAREQKWTKNEFDKLTEVGFRRWVITNSSKLKEHVLTQCKEAKNLEKRLDDLLSGTTSLKKNINDLMELKNTARELREPYTSINSQIDQAEKRITEIEDQHNEIKGEDKIREKRMKRNEQSLQEIWDYVERPNLHLTSVPESDGENGTKSENTLQDIIQENFHNLPTQTNIQIQEIQRKPQRYSLRRATPRHINVRFTKVEMKEKMLRAAREEGRVTHKEIQTTIRQYYKHLYANKLENLEEMDKFLDTYTLPRLNQEEVESLNRPLTSSEIEAAINRLPTKKSPGPDGFTAEFYQRYKEELVPFLLKLFRSTEKDRICPNSFYEASIILIPKPGRDITTTKNVQANIPDEHRCENQQ

SEQ ID NO: 47876 - protein, 165 aa, Homo sapiens
  misc_feature (1)...(165): Xaa = X or * as defined in Table 2
IILKPSPSPLYPWKNCLPRNPSLVPKRQTGSGVDIWQTAADLQQRGLLEGKLTNRKEXYQHQQKRCPHQNPIXRSPTSNTKAREQNWTENEFDELTEVGFRRWIITNSSQLKEHLLTQCKEAKNLEKRLEELLTRITSLEKNINDPMELKNTAEEPHEAYTSINS

SEQ ID NO: 47877 - protein, 205 aa, Homo sapiens; identical to SEQ ID NO: 43254

SEQ ID NO: 47878 - protein, 196 aa, Homo sapiens; identical to SEQ ID NO: 42655

SEQ ID NO: 47879 - protein, 380 aa, Homo sapiens; identical to SEQ ID NO: 37338

SEQ ID NO: 47880 - protein, 258 aa, Homo sapiens
MRKNQCKKAENSKNQDSSSPPKDHNSSPAREQNWMENEFDELTEVGFRRQVITNSSELKEHVLTQCKEAKNLEKRDMDEAGNHDSQQTDTGTENQTRIFSLPAIPAERKLPGLGYMSVLVKSVYFIFLATVIMPTPGTGHWFGPSRITQSEQVRDKRNILLTQEFSLSPFAGLAAGASCLLGLPHSVPCGRENVRERVQEPAGHSSSMDGSVLAAQSAPGPVTWSGYSLPVRAKGQCDSLSVYLHSVGPELLSSIQEE

SEQ ID NO: 47881 - protein, 175 aa, Homo sapiens
  misc_feature (1)...(175): Xaa = X or * as defined in Table 2
AENSKKQNASSPPNDRNSSEAQNWTENEFDELTEVGFRRWIVTNSSKLKEHVLTQCKEAKNLDKRLQELLTRITSLEKNINDLMELKNTARELREAFTSFCVNCEAVSLITSLREDSHWLEDSKGHRMRRHQEXKCEYFHPPHPGLQFYQLPESDSHSDPLWPHGGSFLSSVVRC

SEQ ID NO: 47882 - protein, 461 aa, Homo sapiens
  DOMAIN (174)..(220): kw TRANSCRIPTASE REVERSE II ORF2 domain identified by eMATRIX, accession number DM01354O, p-value=1.000e-40, raw score of 8.73
  DOMAIN (209)..(460): Reverse transcriptase domain identified by PFam, accession name rvt, E-value=2.8e-54, PFam score of 193.7
MGRNQHKKAENSKNQNTSSPPKDHNSLPAREQNWTENEFDELTEVGFRRWVITNSSELKEHVLTQCKEAKNLDKRLTRITSLEKNINDPMELKNTARKLREAYTSINSQINQAHANAERFCQQQACLTRAPEGSTKHGKEQLVPASTKTYQMEEVKSPDRTITSSEIEAAINSLPTKKSPGPDGFTAKFYQRYKEELVPFLLKLFQTIEKEGILPNSFYEASIILIRKPNRDTTKPENFRPISLMNIYAKILNKILANQIQQHIKKLIYHNQISFILGMQGWFNICKSINIIHHINRTNDKNPRLSQADAEKAFDKIQQPFMLKILNKLGIDGMYLKIIRAIYDKPAANIILNGQKLEAFPLKTGTRQGCPLSPLLFNIVLEVLARAIRQEKEIKGIQKGREEVKLSLFADDMIVYLENPIVSAQNLLKLINNFSKVSGYKINMQKSQAFLYINKRQRAKS

SEQ ID NO: 47883 - protein, 330 aa, Homo sapiens
MLAGQQREFPVGVGSADPALGAAGWPQRPGQARDLQLAMPEPPPTPWAPVRLEPRLRAPPPAPRRPVPSTTQGLRSAGAGRGTGRQLHLQPPCGIHWVKPAGLLSLVCSFTPEASETTSSPGGTNNSRRPALRAVTLTVKVCGFTPEPARPPTHQKEETLNTSEHQKEQTPDTPPLRTVTLTASVRGFILEVKGKQTERNSININKKDVHTETPSKGQQQQRPKVDKSMKIRKNQCRKAENSKNQNASSPPKDHNSSPAREQNWTENEFDELTEVGFRKWVITNSSELKEHVLTQCKETKNVEKSLEELLTSITSLKKNINDLIEMKNTA

SEQ ID NO: 47884 - protein, 392 aa, Homo sapiens; identical to SEQ ID NO: 45738

SEQ ID NO: 47885 - protein, 107 aa, Homo sapiens; identical to SEQ ID NO: 45742

SEQ ID NO: 47886 - protein, 257 aa, Homo sapiens
  misc_feature (1)...(257): Xaa = X or * as defined in Table 2
MPFSDTERVITGPSTKVHSYPGGLQALLLQLRLHSLMWRWSAAVAIGVHVRCDLLAVHPVLWAVPQWQEPIEKMLTLIPGPRITATIIGLYQHEGIRAYCDSRVYYIKPSSGIESVLTRPSTQDHNSSPAREQNWTENEFDELTEVGFKKWVITNSFELKEHVLTQWKEAKNLEKRLANLLTRITSLENINDLMELKNTAQELHEAYASINSRINQSEERISEIEDQLTEIEQVDKIREKRIKRRNEQSLXEIWDYV

SEQ ID NO: 47887 - protein, 440 aa, Homo sapiens
  DOMAIN (363)..(408): kw TRANSCRIPTASE REVERSE II ORF2 domain identified by eMATRIX, accession number DM01354N, p-value=1.000e-40, raw score of 13.17
  misc_feature (1)...(440): Xaa = X or * as defined in Table 2
PGKQGLEWTPRKLQQTCKRGAGQLEEKLANRKQXHQHXQKGXPPQKLNAKDHNSSPTREQNWTENEFDELTEVGFRRWVITNSSELKEHVLTQCKEAKNFDKRLEELLIQITSLEKNISDLMELKNTARELLEAYTSINSQIDQAEMDRXPDXXRRKERRIKXHNKKXXRKEQAAIFAVLQPPLVITRQTGSGVDPQKTPADLQKRCRTVRRKTSQQKAVASTLTKRITTQKLNAKDHNSSPTREQNCTENEFDELTEVGFRRWVITNSSELKEHVLTQCKEAKNFDKRLEELLIQITSLEKNISDLMELKNTARERWKHTQVSIAKSIKQKWTASQTNKEEKREESNSTIKNDKGDITTDPTEIQTTIREYYKHLYANKLENLEEMDKFLDTYTLPRLNQEEVEPLNRPITSSEIEAVINSLPNQKSPGQTNSQLTSTR

SEQ ID NO: 47888 - protein, 522 aa, Homo sapiens; identical to SEQ ID NO: 47047

SEQ ID NO: 47889 - protein, 334 aa, Homo sapiens
  DOMAIN (23)..(41): ATP SYNTHASE GAMMA SUBUNIT SIGNATURE domain identified by eMATRIX, accession number PR00126B, p-value=9.673e-10, raw score of 15.14
MNRVPPAFAKITWKEVDTKGCFDECEIYYNKPQFPIRQEVTGYRNPALKRAADLADLPAQSSTYAKGQTASSSGSLTPVPPDKETPPSRGRQTPYTKQLQLASGRSPSGTNLPEEGAGSNLCYSVASTGDMQTNRVWGGSPANSSRPAEEKPDSHQHQRPKVAKATEVRKNQRNKAENSKNQNASSPPEDHNSSPTREQNRTENEFDELTEVGFRRWVITNSTELKEHVLTQCKEAKNLDKRLEELLPRITSLEKNINDLMELKNTAQELREAYTSIHSRINQAEERISEFEAQLNQIKHEDKIRAKKHKKERTKPPRNMRLHEKNKHMFDCCT

SEQ ID NO: 47890 - protein, 724 aa, Homo sapiens; identical to SEQ ID NO: 45743
  DOMAIN (402)..(447): kw TRANSCRIPTASE REVERSE II ORF2 domain identified by eMATRIX, accession number DM01354N, p-value=1.000e-40, raw score of 13.17
  DOMAIN (486)..(722): Reverse transcriptase domain identified by PFam, accession name rvt, E-value=2.7e-49, PFam score of 177.2

SEQ ID NO: 47891 - protein, 168 aa, Homo sapiens
MAEKEQFQSATPSEINSEGRMSLKERQQPQSEAYGSNSYLPGTEHLGEGVADHNSLPPREQNWRENEFEELTEVGFRRWVIRNSSELKEQVLTQCKEAKNLEKRLVWPIEPSFTAVTFKNESCGFALRRRKGDLKYDSDSSLQKAGTLENYLRGKVREQGDTSKAAQK

SEQ ID NO: 47892 - protein, 533 aa, Homo sapiens
  DOMAIN (410)..(451): kw TRANSCRIPTASE REVERSE II ORF2 domain identified by eMATRIX, accession number DM01354I, p-value=1.419e-37, raw score of 15.55
SITHNSQKVETTKCPRMDEWINKRQYIHTMEYYSALKRKESLLHADSENIMLSERSQTQKDKSAIAKIYKKKVNSAKEVLNKEPKRRSEGSRSNPLLQKLKLNHKQKANGTWNTSKSEPFTPLERGLKPGSQMVWLVGSHPHRAQQTKIHWLEILAASTAAVWDRPGVLELEHLGEGAAVRRSFSRLKRPCLTALKRAVDLPAQRSSSAKGQTASSSGSLIPVYPDWETPPSHKHRRPKVDKSTKMGRNQRKKAENSKNKNASFPPKDLNSSPAREQNWMENEFDELTEVGFKMWVITNSSELKEHVLTQCKEAKNLEKRLDELLTRINSLEKNINDLMELKNTAWELREVYTTRHHTYSKIDNIIGSKTLLSKCKRTEIKTNSLPDHSASKLELRIKKLTKNCTTTQKLNNLLLNDCWVNNDMKAEIKMFFETNENKDTTYHNLWDTFKAVCRGKFIALNAQKRKQERSKTDTLTSKLKELEKQQQTNSKASRRQEITKIRTEPKEIETQKTLQKINESRSWIFEKINKIDH

SEQ ID NO: 47893 - protein, 48 aa, Homo sapiens
MNSFRRLHRARELPWNELVSLYQSHSRRPRKQKGSHIGRIQNYLMKTF

SEQ ID NO: 47894 - protein, 149 aa, Homo sapiens
  misc_feature (1)...(149): Xaa = X or * as defined in Table 2
EVLRVMIELNAVIYPYPKDTGCQPLVXHAAASLNSPEVMGATQLKPLRPCKKCPKILEGGHXEWMEARHRNLGTLHGLPCSRTHFXTTTAQGEWLCCLCHCGEHPQGGRHPCICXHCYSCHTLAPPVQWTPNVAEPDNKAGAQYKSPRV

SEQ ID NO: 47895 - protein, 321 aa, Homo sapiens; identical to SEQ ID NO: 46869

SEQ ID NO: 47896 - protein, 122 aa, Homo sapiens
  misc_feature (1)...(122): Xaa = X or * as defined in Table 2
EFSDPIHHTFDHMWRTKEHNEAGWLLLSSVDKVMKENDELGDSISQLQKQILSLKSAKIALSESLISCRERTEIVEKXTXALIMLVADLQXKVHAQPHHAQPRQVSTVKVRALIVLQEVTDP

SEQ ID NO: 47897 - protein, 627 aa, Homo sapiens
  DOMAIN (590)..(601): dUTPase domain identified by eMATRIX, accession number PF00692B, p-value=5.304e-09, raw score of 8.14
  DOMAIN (439)..(500): Integrase core domain identified by PFam, accession name rve, E-value=5.4e-09, PFam score of 35.1
MRRLALYILAPDRLQEQTSNPERTHRPSEGSGLLLQDLGETPNTSTQMGRNQKTNPGNMTKQGSSTCPSNHTTSPAMNPNQEEIPDLPEKEFRSLVIKLIRERPEKAMFVAPPSTNLCKTLEGYPEHFLLFPSPHSMYYQSSVDKVMKENDELRDSFSKLQKQILSLKSAKIALSESLISCRERAEIVEKQTQALIISNGGNSSHSTTKCTYNGNNWILRWHGPSGSTQLSKAHRSNLPSAGKASNIPLQAYLRDISTLCLCVIILFRETLISLLLQNITLVHYIDDIMLIGSSEQELAYTLDLLVRRLCAKGWEINLTEIQEASTSVKFLRVQWCGACQDIPSKMKDKLLHLFPPTTKKKASLFGFRRQCIPHLECGPEQEKALQQAQAAVQAAVPLERYDPADPMVLEADLAMATAECPICQQRRPTLSPPYGTVPWGGQPATWWQVDYIGYLPSWKGQSFVLTGIDTYSGYGFAYPAHNAIAKTTICELTKCLIHRHARIHRSRNQGVEVAPLTVTPSDPLAKFLLPVPMTLRSAGLEVLVPEEGTLPPGDMTMIPLNWKLRLPTGHFGLLLLLSQQAKKGVTVLAGVIDPDYQDEISLLLHNRELLDEEIPCQKKENLRAGGG

SEQ ID NO: 47898 - protein, 61 aa, Homo sapiens
  misc_feature (1)...(61): Xaa = X or * as defined in Table 2
ARKNTRIIYSYGVCKNVETWRXMFCTLLGRQQGCATVGKGDRCGPLRYYASWRKGDVLQGD

SEQ ID NO: 47899 - protein, 19 aa, Homo sapiens
VLQLQPLNVSSLADSILKG

SEQ ID NO: 47900 - protein, 640 aa, Homo sapiens
HPRRLKVKPDSEILVIENGTAFPFQVEVLDESDNITAQPKLIVHCKSCKDVAPVEKTIKLLPSSHVARLQIFSVEGQKAIQIKHQDEVNWIAGDIMHNLIFQMYDEGEREINITSALAEKIKVNWTPEINKEHLLQGLLPDVQVPTSVKDMRYCQVSFQDDHVSLESAFTVRRGLFKSLSASVAFTQRSEIDSKWDVTATSLDVQDLKATLRTVDGQLHAEVWLEDVAPGKRKHRVTKVLEEGGVPVLQTSESPGQGKSRRKDGSALSFVMRLPQWKACMSYISRGWAQPAVGDDVIFSHVSLLRRKGLGAEGNGEMVFNGNRLSVWEGETVLEVVSGDDYITTRVADSLKGGSGSWVWGFSTLAALDNDLGTFRKMLPALEHWTPSPSVLRLGLALLAPQACRQPIVGPCGSCKEFSDSIYNTFDHVWRTKEHNEAGCLLLSSVDKVMKENDELRDSVSQLQKQILTLKYSKIALSESLISCKERAEIVEKQTQARIMQVADLQQGNDQTFQGLLDTGSELTLIPGDPKHHCGPPGPKVRAYGDQVINGVLAQVQLIVGPVGPWTHPVVISPVPECVIGIAILNSWQNPHIGSLTGRVRAIMVGISWQGQQYTFTVLPQRYINFPALCHKTAKRHTARR

SEQ ID NO: 47901 - protein, 379 aa, Homo sapiens
  DOMAIN (178)..(206): IL1/HBGF FAMILY SIGNATURE domain identified by eMATRIX, accession number PR00262A, p-value=1.882e-11, raw score of 28.26
  DOMAIN (180)..(205): Fibroblast growth factor domain identified by PFam, accession name FGF, E-value=4.4e-05, PFam score of 21.1
MKRGATSQGMQAASRAGKAQDNCKSLFQDDDDDVEKKIKWLLLDFSRATSMLSQVSAAATVSFKALQLYSDYGTKREDGEIICLDTVRQPYQFNFAIKRISSATERQVVRQSICLTVNRARQHRREAPGANRPPVDTPSRAPQTIAGGGLPICCAAVQLPLASEQCVEALFNLIPVGLRVVAIQGVKTGLYIAMNGEGYLYPSTKTFGGGGGGARSNLNMNAAGNRNREVLQKEKSTKSEGKHEGVYRELIWDFWSWLLNMIRSKTAMDSTSNSVENTDSPSHELFRELCKINAFTVFDSSLMRGKEFSDSIHNTFDHMWRTKEHNEAGWLLLSLVDKVMKENDELRHPISWLQKQILSLKSAKIALSKSLIVTGGSLS

SEQ ID NO: 47902 - protein, 107 aa, Homo sapiens; identical to SEQ ID NO: 45742

SEQ ID NO: 47903 - protein, 356 aa, Homo sapiens
  DOMAIN (321)..(352): kw TRANSCRIPTASE REVERSE II ORF2 domain identified by eMATRIX, accession number DM01354G, p-value=3.717e-30, raw score of 11.57
MDGDLHKGVAVFWPPDAAGGHTCCRSMVCRSLLGGAQWKFHSFRCRIRFELILHMIQERNSINISQKDVHTETPSETHHHQRPKVDKSMKMRRNQCKKAENSKNQKASSPPKEHNSWRAREQNWTENEFDKLTEVGFRRWVITNSSELKEHILTQCKEAKNLEKTLEELLTRITSLEKNINDLMKLKNTARELREAYTSINSRIDQAKERMSEIVDQLNERNDRENGTKLENTLQDITQDNFPYLARQVNIQIQETQRMPQRYYSRRVTPRHIIVRFAKVEMKEKMLRAAREKDTSVKQKVNKDIQELNSALHQVDLIAIYRTLHPKSTEYTFFSAPHHTYSKTDHIVHSILCDSG

SEQ ID NO: 47904 - protein, 238 aa, Homo sapiens; identical to SEQ ID NO: 45740

SEQ ID NO: 47905 - protein, 572 aa, Homo sapiens
VLQLLRQERLELFVPPGELVVSLASGVKLQTFAGGKAWLLQTHSDLGEQKLTTFIPISLSLKVIFWCNWPEAKTAAYDGEQATCEPVLKAMFLADTHLLREFLGHWLDKLRREWQVERAFQTALWLLQPEVVFILEDVFDEGKWSTSEAWVDDVEQFRKMFRHPSHVQLKVVAGNHDTGFHYETNTYEVERWRNRNNPSFIMGSITPTDYALSKCHLPPEDVVLIIYCGVKLPDRIVDSKAGLLKLPVLKNVISTQLQFPSIMDQLLVYNLFNETSPLVMCLDVMAMSNRGNHHLAATRLRKVLDHNSLPAREQNWTENEFDELTEVVFRRWVITSSSELKECDVLTQWKEAKNLEKRLDELLTRITSLQKNINDLIELKNTAQELHEAYTSINSQIDQVEERISEIEDQLNEIKCEDKIREKRMKRNKQTLQETWDYVKRPNPCWIGVPESDGENGTKLENTLQDIIQENFPNLARQANIQIQEIQRTPQRYSSRRATPRHIIVRFTKVEMKEKMLRAAGEKEDETDNNEFFLWSQKGKRAGTLNDHVEESCPPTKNACLGTPIHCYVGKK

SEQ ID NO: 47906 - protein, 94 aa, Homo sapiens; identical to SEQ ID NO: 47868

SEQ ID NO: 47907 - protein, 300 aa, Homo sapiens
  DOMAIN (239)..(298): Integrase core domain identified by PFam, accession name rve, E-value=1.7e-07, PFam score of 30.0
VYQPSGFAALCHHLIHRDLDHFSLPQDMTLVNCIDDIMLIGSSEQEVANSLDLLERHLHDRGWEINLTQIQELSTLVKFLGVQWCGACPDIPSKVKDKLLHLAPPTAKKETQHLVGLFGFWRQHIPHLGVFLWPIYQVTQKAASFEWGPEQEKALQQVQDAVQAALPLGPYDPAYGSTHVIAQWAHKQSGHGGRDGCDIRAQQHGLPLTKADLAAATAECPICQQQRPTVSPRYGTISQGDQPATWWQLDYTEPLPPWKGQRFVLTRIDTYSRYGFAYPAGNASAKTINRGFIECLIHSP

SEQ ID NO: 47908 - protein, 116 aa, Homo sapiens
GYINSPALCHNLIQRDFDHFSLLQDIALGHYIDYIVLIGSSEPEVANALDLLPIYQVTRKAANFEWGPEQEKALQQVQAAVQSALPLGPYDPTDPMVLEVSVANRDAVWSLWQALI

SEQ ID NO: 47909 - protein, 163 aa, Homo sapiens
PIYQVTRKAANFEWGPEQEKALQQVQAAVQSALPLGPYDPTDPMVLEVSVANRDAVWSLWQALIARVHGFSNQEVEVEVAPLAITPSDPLAKFLLPVPATLHSAGLETSVPEGGKLPPGVATTIPLNWKLRLPPGHFGVLLPLSKQAKKGATVLAAVIASDYR

SEQ ID NO: 47910 - protein, 117 aa, Homo sapiens; identical to SEQ ID NO: 34864
  DOMAIN (49)..(65): AUXIN BINDING PROTEIN SIGNATURE domain identified by eMATRIX, accession number PR00655E, p-value=9.000e-09, raw score of 8.06

SEQ ID NO: 47911 - protein, 168 aa, Homo sapiens
  DOMAIN (77)..(89): RNase H domain identified by eMATRIX, accession number PF00075C, p-value=4.326e-10, raw score of 11.58
  DOMAIN (1)..(168): Reverse transcriptase domain identified by PFam, accession name rvt, E-value=7.7e-05, PFam score of -0.9
KTDGSWRMTVDYHKLNQVATPVAAAVPDVVSLLEQINTSLDTWYAAIDLGNVFFSIPVHKVHQKKFAFSWQGQQYTFTVLPQGYINSPALCRHFVRRHLDRFSLPQDITVVHYIDDIMLVGPLIYRMTRKAAIFEWGPEQKALQQVQAAVQAALPLGPYDPADPMRLR

SEQ ID NO: 47912 - protein, 519 aa, Homo sapiens; identical to SEQ ID NO: 47759
  misc_feature (1)...(519): Xaa = X or * as defined in Table 2

SEQ ID NO: 47913 - protein, 263 aa, Homo sapiens
  DOMAIN (48)..(65): RNase H domain identified by eMATRIX, accession number PF00075A, p-value=7.429e-09, raw score of 14.44
  DOMAIN (25)..(184): Reverse transcriptase domain identified by PFam, accession name rvt, E-value=0.025, PFam score of -36.6
MTLNESPEKIGKWIECYGHPPASKLVEIYIHTVFVEDKLSICIRSFNKKADGSWRMTVDYCKLNQVVTAIAAAIPDVVSLLEQINTSPDTWYAAIDLANALFSIPVHKGYINSLALCHNVIWRELDCFSLPRDTTLVHYIDDIMLIGSSVQEVENKLDLLVKDKLLHLAPPTTKEEVQHMVGLFGFWRQHIPHLGVLHQPIYRVIRKAASLSGVQNRRRLCNRSRLLLVGNNLKTTWVTRGHQASGFPEDPTASPEAAMATLL

SEQ ID NO: 47914 - protein, 522 aa, Homo sapiens; identical to SEQ ID NO: 36483

SEQ ID NO: 47915 - protein, 327 aa, Homo sapiens; identical to SEQ ID NO: 46037
  DOMAIN (182)..(199): RNase H domain identified by eMATRIX, accession number PF00075A, p-value=6.000e-09, raw score of 14.44
  misc_feature (1)...(327): Xaa = X or * as defined in Table 2

SEQ ID NO: 47916 - protein, 346 aa, Homo sapiens; identical to SEQ ID NO: 34868

SEQ ID NO: 47917 - protein, 885 aa, Homo sapiens
  DOMAIN (160)..(347): Reverse transcriptase domain identified by PFam, accession name rvt, E-value=3.8e-06, PFam score of 17.6
MENTDSPWHELFRELSKINAFDTLDSLLMRGKEFSDSTHNTFDHMWRTKEHNKAGWLPLNSVEKVMKENYELKDSVSQLQKQILNLKSARIALTERLISCRKRTEIVDKQTQALIMLVADLQQKMHAQPRQGDLWPFTRVTVHWEKGNDQTLWGLLDTGSELTLIPGDPKCHCGPPVKVGAYRGQKTDGSWRMTVDYCKLNQVVTPIAAVVPDVISLLEQINTFPGTWYAATGLASAFFSISIHKAHKKQFDFNWQGQQYTFTVLPQGHINFPALHHNLIWKDLDCFLLSQDITLVHYIDDIMLIGSGEQEVANTLDLLVDYIGPPLSWKGQTFDLTGIDTYSGYGFAYPARNTFSKTTIHGLKECLIHHHGIPSSIASDQGTRFLPKEVQNGLVLMEFTARIHRSRNQGVEVAPPTITPSDPLAKFLLPVPTTLCSAGLAVLVPEGGMLPPGDATMIPLNWKLRLPPGQFGLLLHLSQQAKKGVTVLVGMTDPDYQDEISLLLHNRRKEESPKSHVIIAISSKSRISSTKSDPGTDEISQGEFQSSAPYMDSLTIETYENRNPGSLLLTHQYTMVKQHRHTHLDSQTWAQSPRVHHNENIVNFPRMSRVTRLGESRTYRPKSRNDSELWTAGILPVLPVRAESEADTGSPGSTNASRERYSNWLGESSWCLWTSNREDGAAVAGTGDPSGSGLRWDNAIARNLWSQSLTPQREAAVKKASKSRYRRSSILVDASSLNCRPHFASIGYAVDHRTCSASIEDNHYHLLVSQCAFSSSLSTVPVGSIDLISASASSAAHVRQVMAIASSCYAQHFVIIVPRSCRGELDLSPCSSTCSDQHAILSSLLIFVRLHPGDEADLIIVDKLFDVLLDLVCQYFIEDFCINVH

SEQ ID NO: 47918 - protein, 314 aa, Homo sapiens; identical to SEQ ID NO: 34000
  DOMAIN (110)..(126): AUXIN BINDING PROTEIN SIGNATURE domain identified by eMATRIX, accession number PR00655E, p-value=7.889e-09, raw score of 8.06
  DOMAIN (41)..(221): Reverse transcriptase domain identified by PFam, accession name rvt, E-value=4.2e-10, PFam score of 47.0
  misc_feature (1)...(314): Xaa = X or * as defined in Table 2

SEQ ID NO: 47919 - protein, 289 aa, Homo sapiens
  DOMAIN (181)..(191): THIOREDOXIN FAMILY SIGNATURE domain identified by eMATRIX, accession number PR00421B, p-value=7.400e-09, raw score of 11.40
  DOMAIN (1)..(181): Reverse transcriptase domain identified by PFam, accession name rvt, E-value=1.4e-12, PFam score of 55.3
MVIPTTSSFTSPNWPVQKTDGSWRMTVDYHKLNQVMTPVAAAVPDVVSLLEQMNTSPGTWYAATDLANAFFSIPVHKAYQKQFAVSWQGQQYTFTVLPQEYINFPSLCHNLIQRELDHFLLLQDITLVCYINGITLIGSSEQEVANTLDLLVRHLLARGWEINLTKIQGTSTSVNFLGVQWCGACRYIPSKVPAGESQWRPLGFWSKALPSSADNYSPFERQLLACYWALVETERLTVAHQVTMRPELPIMNWVLSEPSSHKVGCAHQHSIIKWKWYIHDQSQAGPEGT

SEQ ID NO: 47920 - protein, 87 aa, Homo sapiens
KTQFKCSSPPHGSHSEPHFCGPIGTLVIGLEANKGVEGARGESILSCLATASGEAITVASGSTGFISSDKGGKADGSMGRGEDVATI

SEQ ID NO: 47921 - protein, 214 aa, Homo sapiens
  DOMAIN (110)..(126): AUXIN BINDING PROTEIN SIGNATURE domain identified by eMATRIX, accession number PR00655E, p-value=7.889e-09, raw score of 8.06
  DOMAIN (41)..(214): Reverse transcriptase domain identified by PFam, accession name rvt, E-value=1.8e-07, PFam score of 36.4
  misc_feature (1)...(214): Xaa = X or * as defined in Table 2
MVGKAKWKPLELPLPRKIVNQKQHHIPEGIAEIAATIKDLKDAGVVIPTTSPFNSPIWPVQKTDGSWRMTVDYCKLNQVVTPIAAAVPDVVSFLEEINTSLGTWYAAIDLANAFFSIPVHKVHQKPFAFSWQGQQYTFTVLPQDYINSLALXHNLIWRDLDYFLLLQDITLVHYIDDIMLIGSNDHKVGGAQQHSIIKWKLYIHDQAQTGPEGT

SEQ ID NO: 47922 - protein, 54 aa, Homo sapiens
MPRCHSLGYHVLTPATAQTTAQETGTEREVDCRGFSWKDVTVVKERKRGAWTLP

SEQ ID NO: 47923 - protein, 136 aa, Homo sapiens
  DOMAIN (47)..(64): RNase H domain identified by eMATRIX, accession number PF00075A, p-value=6.000e-09, raw score of 14.44
LKSRQAPRCEVESVTHEEVYYTRKELFEFSNLYRKKSGEQIREWILRKTDGSWRITVDYRKLNQMVTPIAAAVPDVVVSLLEQINTSPGTWLCHNLIWRDLDCFLLPQNITLVHYTDDIMQIGSSEQEVANTLDLL

SEQ ID NO: 47924 - protein, 175 aa, Homo sapiens
  DOMAIN (63)..(80): RNase H domain identified by eMATRIX, accession number PF00075A, p-value=7.429e-09, raw score of 14.44
PRGRNRRRKTFQERRMTLNESPEKIGKWIECYGHPPASKLVEIYIHTVFVEDKLSICIRSFNKKADGSWRMTVDYCKLNQVVTAIAAAIPDVVSLLEQINTSPDTWYAAIDLANALFSIPVHKGYINSLALCHNVIWRELDCFSLPRDTTLVHYIDDIMLIGSSVQEVENKLDLL

SEQ ID NO: 47925 - protein, 143 aa, Homo sapiens
TPLASTRATVDWGNGNDQTFQGLLDTGSELTLTPGDTKCHCRSPVKVGAYGGQWGPEQEKVLQQVQAAVQAVLTLGPYDPSDPMVLEVSVADRDAVWSLWQAPVGETQWQPLGFGPALIASWGVHYNQSIEEEKTRAWLINSP

SEQ ID NO: 47926 - protein, 483 aa, Homo sapiens
MPAQPAHPGNWRPLRGRRQWNALRTALLMRLVRLKRGNGADHIIYRLGTVLITTNRTHDGCGIPVIMFTFQECRKEKTANTAGHQKEQTGDTLPLRNITGTVRVHGFILEVSETKNPPNPGHKTTSISQRPKALVSLGPEVRRGTRGEDEKALEKEGGGRRWECGEANELCGRPPAFTRVTVHWGKGNDQTFQDLLDTGSELTLIPGDPKRHCGPPVKIGAYGGQIINGVLAQVQLTVDAVGPWTHPVVFPSARMHNWNRHTQQLAESHIGSLTVHLSSDPKGCHSEWGPEQEKALQEVQAAVQAALILEPYDPAGPVVLEVSLADRDAVWSLWQAPIGESQQRPLGFWSKALPSSAAIKRVMHSSIPSSNGSGIYMIGLEQVRKAQIVLHDMQPPCENGTASALQPLSRKSLKDSSEGKSSQWAELRAVHLAVHVAWKEKWPDVRLDTDSWAVAMVWPDGQGLGRSMIGKLVTKKSGEEVRG

SEQ ID NO: 47927 - protein, 251 aa, Homo sapiens
  DOMAIN (158)..(174): AUXIN BINDING PROTEIN SIGNATURE domain identified by eMATRIX, accession number PR00655E, p-value=9.000e-09, raw score of 8.06
  DOMAIN (90)..(251): Reverse transcriptase domain identified by PFam, accession name rvt, E-value=2.3e-05, PFam score of 6.7
MKSGSELGGWSLGRWTHDGIDINNNFPDLNTLLWEAEDRQNVPRKVPNHYIAIPEWFLSENATICEGSNCIFEAPWIHPVVTSPVPECIIGIDILRSWQNPHIGSLAGRKTDGSWGMTVDYHKLNQVVTPIAAAVPDVVSFLEQINTSPGNWYAAIDLANAFFSIPVHKAHQKQFVFSWQGQQYTFTVLHQGYINSPALYHNLIWRDLDRFSLPQDITLIHYIDDMTLIGSSEQDVANTLDLLVRHLLARG

SEQ ID NO: 47928 - protein, 79 aa, Homo sapiens; identical to SEQ ID NO: 35920
  misc_feature (1)...(79): Xaa = X or * as defined in Table 2

SEQ ID NO: 47929 - protein, 122 aa, Homo sapiens
  misc_feature (1)...(122): Xaa = X or * as defined in Table 2
KTDGSWRTVDYRKLNQVVTPIAAAVPDVVSLLEHINISPGIWHHQKQFAFSXQGQQFTFTVLPHGYINSLALCHNLIRRDLDHFSLPQDITLVHYIDDIVLTGSSEQEVAGSLESTCRHTKV

SEQ ID NO: 47930 - protein, 453 aa, Homo sapiens
  DOMAIN (200)..(387): Reverse transcriptase domain identified by PFam, accession name rvt, E-value=2.5e-06, PFam score of 20.1
CGDNCVFESWIGDIILDMDNEFSDSIHNTFGHMWRTKEHNEAGWLLLSSVDKVMKENDELRDSISWLQKQILSLKSAKIALSESLISCRERAEIVEKQTQAVIMRMADPQGKVHAQPQQVSTVKGRTLIGKEWDPATWNGDVWEDPDEAGDTEFVNSDEPFLPEVTASPSPRDLWPFTRVTLHWGKGNDQTFWGLLDTGSELVMIPGDPKCHCGPPVKVGAYRGQKTDGSWRMTVDYCKLNQVVTPIAAVVPDVISLLEQINTFPGTWYAATGLASAFFSISIHKAHKKQFDFNWQGQQYTFTVLPQGHINFPALHHNLIWKDLDCFLLSQDITLVHYIDDIMLIGSGEQEVANTLDLLVDYIGPPLSWKGQTFDLTGIDTYSGYGFAYPARNTFSKTTIHGLKECLIHHHGIPSSIASDQGTRFLPKEVQNGLVLMEFTGLTMFPIILKQLD

SEQ ID NO: 47931 - protein, 401 aa, Homo sapiens
  DOMAIN (256)..(267): RNase H domain identified by eMATRIX, accession number PF00075B, p-value=8.615e-09, raw score of 12.56
  DOMAIN (183)..(374): Reverse transcriptase domain identified by PFam, accession name rvt, E-value=4.2e-05, PFam score of 2.9
MGDPSRRRTCRAMQAKYPLVFKGCGVCWGSLDPRCRVASQVWPIPKRLSRGWPFHNAVGRQVSDWKSGQDFADFGTTHQTGFSPAGANQRGPLAATLSGPGGEGQSAVARLTGEKKNHPGAQYANRLSPRVGRFINAAGTTGFPTGKRAVSATQLMILCLLPGYLCNGKRKLSAIQGLLDNGSELSLFPENPKRHCGLPVKVGAYGGQKTDRSWRKTVDYCKLNQVVAPIVAAVPDVVSLLEQINTSPGTWYAAIDLTNAFFSIPVHKAHQKQFAFSWQGQQYTFTVLPQGYISSLALCHNLIRRDLDGFLLLQNITLLVHYVDDIMLIGSSEQEVANALDLLVFSDHLAIKWVMHSSIASSSGSGICVIRLKKVLKAQPAPMASWGVLYDQLTEEEKIRA

SEQ ID NO: 47932 - protein, 414 aa, Homo sapiens
MRALSELAIKKFSDLLCLKVDHKTLIPEVLPYTQGKGMPHREAKKNLKDSEQRGRATEKKESREKSLDVDGRDEGTHTAHGKLPSKSSVLVPYWEWSWRSPAAVAVSWPHQVSTVRMRALIGKEWDPATWNGDMWEDPDEAGDTELINSDEHFWPEVTASPSPVVATSSPPPMLLSAFPPLSEEINPALPEAVARQNNVDSPQKPPPTPLFASRPITRLKAWWAPRVSECIIGIDIFSSWQNPCIGSLTGRVRATVVGKAKWKPLELPSPRKIANQKEYHIPGGIVEITATIKDLKDAGVAIPTTSSFSSPIWPVQKTDGAWRMTVDYCKLNQVVTPITAAVPDVVSLLDFEWGPEQQKALQQVQAAVQAALPLGPYDPSDPVVLEVLAFGKLHRRITVEASRILDQGPVISCR

SEQ ID NO: 47933 - protein, 354 aa, Homo sapiens
MASPEAVASQDNDGFSQKPPPTPLFASRSVNRLKSQRTPRGEVESVTDGEKTDGSWRMTVDYCKLNQVVTPIAAAVPDVVSLLEQINSLLGYINSPGLCHNLIQRDLDRFWFPQDITLVPYIDDIMLIRSSEQEVANILDLLVRHLHARRWEINPTKIQEPSTSVKFPGVPWCGTCQDIPSKVKDKLLHLAPPTIKKEAQCLVSLFGFWRKHILHLGESQETPLGFWSKALPSSADTYSLFERQLLASYWALVETECLTMDHQVTMRPELPVMNWVLSDPSSHKVGHAQQHFVIRWKWYIYDQAQAATLVIAKWAHEQSGHGGRDGGYTRTQQYGLLLTKADLATAGKVFQKAV

SEQ ID NO: 47934 - protein, 78 aa, Homo sapiens
KLSASSHCFQVKRRSPCFLGKEKERCLLTPGPQPAVVASLCWPLCCCPLLPSFLALCSLQVAPCHSGGMWNEIAQLWI

SEQ ID NO: 47935 - protein, 46 aa, Homo sapiens
NKHQEDSLKPPIPGPSSWTAFPKPTLGQKGTCCTEKKKKKKKKGRI

SEQ ID NO: 47936 - protein, 423 aa, Homo sapiens
  DOMAIN (84)..(131): kw TRANSCRIPTASE REVERSE II ORF2 domain identified by eMATRIX, accession number DM01354V, p-value=1.000e-40, raw score of 12.97
MGKDFMTKTQKAIATKAKIDKRDLIKLKSFCTAKEMIIRATKEVIEREAPGMALAMLMGSLNVTPLGMLSRQTESQIMSELPFTNASKRIKYLGIQLTRDVEDLFKENYKLLLNKIKEDTNKWKNIPCSWIGRINIVKMAILPKVVVAPIVCDIFIYSPSYWSYDCVSRVGSFRWVRGLADFKNEAADLCSIFVPSDTCDASHGLRQGQVYCQGMQNDGKLAVHLDLTFSNVKTECFQFILPALPHAIDLLRDAIVKVKEVHDELEDLPSPPPPLSPPPTTSPHKQTEDKGVQCEEEEEEKKDSGVASTEDSSSSHITAAAIAAKKHPFYTSPAVVMAHGEQPIPGLINYSHHSTDERAQGSYRLAATDVYSRPKGFLVTTAVTSPSEAYLRVPNKRDHRPSLQLHDRLEVDGLKVTREKPGY

SEQ ID NO: 47937 - protein, 56 aa, Homo sapiens
  misc_feature (1)...(56): Xaa = X or * as defined in Table 2
MLIHVHGRVYKVTRIHRLSHMLTNVIRRPYTFTLADPSPQCKLCARVNLNXHSVQE

SEQ ID NO: 47938 - protein, 506 aa, Homo sapiens
QAGSWQVISPSGLRFPHLQDERAAPDGNSGGKGMSSRSPPPPPRDPGASIPVPTTHLLHKSCPRTPVEPAAESAAPALRAAAAGTKILGGGGKKSRWQKAAATGAKSRGSKKPRRRGQKAAAAWGQKATAGKKPRRQKAMAARVQKAVSAVGQKAWSGKKPRQRRRAKSRGGGGRKVAAAGGKKPRRSKSRGRGGKSHGSEKAAAAGGAKSGGGQKAAGGKQPLHQLGEKAAAGKKPRRQNSQRRRSKSRGGQKALALGGQKAAAGKKRRRGHADWLCAGFFKAREKCVFTLALNEVQVHSCTEVALRGGIGQGFSRRGFLPCRPGILPSWLLAEATAAFYAFPPPPPRLFSPSATGFSSRGFLPPLCSQHRAALRSAPMGEKKESGGGGDAAIAEGGAGAAASRVLQQCGQLQKLIGISLGSLRGLRTKCTVSKDLTQQEIRTVQEEANGFAFLALSSTLGTLRTGEILGEPSGVCHGWALFEGQSAQWAGSARMNCLESLEMSG

SEQ ID NO: 47939 - protein, 125 aa, Homo sapiens
  DOMAIN (103)..(121): PROTEIN NUCLEAR BROMODOMAIN TRANS domain identified by eMATRIX, accession number PD01234B, p-value=3.455e-11, raw score of 15.53
  misc_feature (1)...(125): Xaa = X or * as defined in Table 2
VVRAWYPGWGQGSEKEWQWDQQEALGRVRGSKVTGEWEGRAGPEGTGQNGEGPRGILEVGGTTAPFCLAEGEWGPGGHPHHLLFPPSPPRPPPQPPPTPPEPPSXPPSPPRPPPQPPPTPPEPPS

SEQ ID NO: 47940 - protein, 106 aa, Homo sapiens
  misc_feature (1)...(106): Xaa = X or * as defined in Table 2
NWLQPCGXAHPTGSGFPAPKLCPASPGAPFSNEILSEPGPTLAPMPTGAPCRSHGAGHSGDPGWPSSSPTGEDTNSAGPGAARVQMGCGHCVSLVPRXCCWTPGGA

SEQ ID NO: 47941 - protein, 249 aa, Homo sapiens
  misc_feature (1)...(249): Xaa = X or * as defined in Table 2
TDHRDRKDKHPPALPASAMDKKNAGQEGRPGASRGSSPMATATTGPQGVMPGYHXCSLRPKGSSVGLWXMLPGLGLTLQDSGLPSGPRQVQNYCPGAKALNQGPQEPAXCKASNQRPSVYLPTREYPSEQIIVTEKTNILLRYLHQQWTKRTLPRRKTRSKQRKLTYGYCHYRSTGSNARLPLMFIKTQGFFSRLVVDAAWPGTHPSGQWAPFWPKAGPELLSRSQGFESGTSRARLMFYPTMAAPVPK

SEQ ID NO: 47942 - protein, 46 aa, Homo sapiens
  DOMAIN (16)..(31): WILM'S TUMOUR PROTEIN SIGNATURE domain identified by eMATRIX, accession number PR00049D, p-value=8.185e-11, raw score of 0.00
TGSPFKKSAIFCFRPSPPRPPPQPPPPPPEPPSSRAEFLQPEARSI

SEQ ID NO: 47943 - protein, 99 aa, Homo sapiens
  DOMAIN (10)..(50): G-protein coupled receptors proteins domain identified by eMATRIX, accession number BL00237A, p-value=2.688e-27, raw score of 27.68
  DOMAIN (10)..(51): 7 transmembrane receptor (rhodopsin family) domain identified by PFam, accession name 7tm_1, E-value=2e-17, PFam score of 57.5
FWQTWNKDNWTFSPALCKGSAFLMYMNFYSSTAFLTCIAVDRYLAVVYPLKFFFGAVVCFLVIFFHKGLSRSSCQKCSRKSQNCGLFYNFFDVHLHVGW

SEQ ID NO: 47944 - protein, 130 aa, Homo sapiens
MVEQGKGGWSTCRLVIPKHDSGARGRRDECEELYWFMGILPENSRAKEELGTKWAAASDFSSPKCLGKHSGFFPLPTLILAWLAVLGQNSRKYRALVATSRAEPYRKWTHHAFTTGGWHLQGAAPGYRPQ

SEQ ID NO: 47945 - protein, 232 aa, Homo sapiens
AGAQPGVHALQLKPVCVSDSLKKGTKFVKWDDDSTIVTPIIVRTDPQGFFFYWTDQNKETELLDLSLVKDARCGRHAKAPKDPKLRELLDVGNIGRLEQRMITVVYGPDLVNISHLNLVAFQEEVAKEWTNEVFSLATNLLAQNMSRDAFLEKAYTKLKLQVTPEGRIPLKNIYRLFSADRKRVETALEACSLPSSRVEKANEAAKSEQSCGKAPPKHPHLHFIKQNKMLEP

SEQ ID NO: 47946 - protein, 296 aa, Homo sapiens
MGPPGWAITSQALPALHSVRAVAVAKEKFLKKAATDTAAAVSSVAIQITISILSLLKKAAVGNKACKSWEWEHRPCKRDRGGNSGGSSSICYVLLGFIGTSKTHLLLKWWPSDGKGRSTTEVKIHVLFLNERKGICDCASDWVASKILFLRTASQAKMSVGKGKKPECLPKHLGLLKSDAEGKGQPLNFFKLDSLTVSPLPANILVVIAVEMKKPGHMLDLLMSGFSTVSSQRETELLDLSLVKDARCGRHAKAPKHIMTIAGDKDEQRGMNDAQKGACNQDCGSQEARDVQDSEM

SEQ ID NO: 47947 - protein, 306 aa, Homo sapiens
  DOMAIN (206)..(247): kw TRANSCRIPTASE REVERSE II ORF2 domain identified by eMATRIX, accession number DM01354I, p-value=8.105e-40, raw score of 15.55
  DOMAIN (2)..(192): AP endonuclease family 1 domain identified by PFam, accession name AP_endonucleas1, E-value=1.4e-05, PFam score of -31.8
LLEGKLTKQKGIASTSTKRTSPQKLHLKVTNIKDQSNGENGTKLENTLQVVIQENYPNLARQANIQIREIQRTPQRYYSRRATPRHIIVRFTRIEMKEKMLRAAREKDRSTSQKINKDIQDLNSALDQVDLIDIYRTLHPKSTEYTFFSAPHHTYSKFNRIIGSKTLLSKWKRMEIITNRLSDHSAIKLELRIKKLTQNRTTTWKLNNLLLNDYWVNNKIKAEINKFFETNENKDATYQNLWDTAKAVFRRKFIALNAHRKRQKRSKISTLILQLKELEKQEQTKSKASRRQEITKIRVELKEIET

SEQ ID NO: 47948 - protein, 696 aa, Homo sapiens
  DOMAIN (199)..(220): GTP1/OBG GTP-BINDING PROTEIN FAMILY SIGNATURE domain identified by eMATRIX, accession number PR00326A, p-value=2.904e- 13, raw score of 8.75
  DOMAIN (116)..(349): GTPase of unknown function domain identified by PFam, accession name MMR_HSR1, E-value=0.0029, PFam score of -51.7
RPRRTPNDAGAQRRIFPLLCHSAGPRRPPRRRTAFGAPKPALVKDFIDLTLSKTQRKTPTVIHKHYQIHRIRHFYMRKVKFTQQNYHDRLSQILTDFPKLDDIHPFYADLMNILYDKDHYKLALGQINIAKNLVDNVAKDYVRLMKYGDSLYRCKQLKRAALGRMCTIIKRQKQSLEYLEQVRQHLSRLPTIDPNTRTLLLCGYPNVGKSSFINKVTRADVDVQPYAFTTKSLFVGHMDYKYLRWQVVDTPGILDHPLEDRNTIEMQAITALAHLRAAVLYVMDLSEQCGHGLKEQLELFQNIRPLFINKPLIVVANKCDVKRITELSEEDQKIFTDLQAEGFPVIETSTLTEEGVIQVKTEACDRLLAHRVETKMKGNKVNEVLNRLHLAVPNKRDDKERPPFIPEGVVARRKRMEIVEPRKKRERDLELEMGDDYILDLQKYWDLMNSSEKYDKIPEIWEGHNVADYIDPAIMKKLEELEKEEELRTAAGEYDSDSESEDEEMMEIRQLAKQIREKKKLKILQSKEKNTQGPRMPRTAKKGSLSVPVTGESRENLCRCEWKTSDSSHFLASYWDVIVSYFCFRLDDRPISHVYPFDYSFPESWGKGVAGSQKRQGSGKLKYNRRVQRADLENEMRSLGVDMDDKDNAHYAVQARRSRSVTRKRKREESVPPSSIARSRSCSRTPRDVSGLRDVK

SEQ ID NO: 47949 - protein, 82 aa, Homo sapiens
LHSHLVFHNQEQFLLESSKISKASFHMRPFLLSAVPGPHKLYWLCSFQSLILHPFRSSIFGLVMLKPVVGNLQCHFCHLASG

SEQ ID NO: 47950 - protein, 37 aa, Homo sapiens
SGCWVTHSYIYWFIKPSEPLKFLLICKISNTLVTQTA

SEQ ID NO: 47951 - protein, 242 aa, Homo sapiens
  misc_feature (1)...(242): Xaa = X or * as defined in Table 2
MAQEIEGDRLFRARLTRRVQGKGPCGPLKAPLGMVPECHSVKPSRDTFDSTKSFKALLLSFLKIPAIDVHKPIDHPINFTFPDPGHRAPARHRHSTAAAVTMSPSGPPAAAPSPCSPIPRHGXGPLRATSYCPVSWKQKQNSVSNKQTNEQTKTAKAEGARSRGPRNKIPGLPPGPRSGLRIWLPPPREGSGFQTPARGHPQPPCSGKGTECQSIAQNLASRISPVGTSCGRTSRQTIRVRK

SEQ ID NO: 47952 - protein, 273 aa, Homo sapiens
MPVLRVFELGFGQKFQNAGVDSLYRLGFQKPGVLRLLYLPAIRQERNEFLRSGFKHYAIYARLLFGKATANNLVQKLYQCDNNNLGLYSVRLDCPNSRDCVGGCASITGYAPRLLSKSYKLASASFYGKHAAYRIRRLQRQVARRRKKQKGTLAEMAAATSVHVVAVIEPIIQHADWFFPEEVEFTVSEAFVPLTTPSSNHSFHTGNDSDSGTLERKRPASTPVMEGDLVKKESVVNFDRRKILRVNRLEHHIGTDHLGGDSGLHRRSRTCPW

SEQ ID NO: 47953 - protein, 1231 aa, Homo sapiens
  DOMAIN (216)..(271): Fimbrial biogenesis outer membrane usher protein domain identified by eMATRIX, accession number BL01151, p-value=8.258e-36, raw score of 29.09
  DOMAIN (14)..(877): Fimbrial Usher proteins domain identified by PFam, accession name Usher, E-value=2.4e-300, PFam score of 1011.2
  misc_feature (1)...(1231): Xaa = X or * as defined in Table 2
MSGSYSSVWAEDDIQFDSRFLELKGDTKIDLKRFSSQGYVEPGKYNLQVQLNKQPLAEEYDIYWYAGEDDVSKSYACLTPELVAQFGLKEDVAKNLQWSHDGKCLKPGQLEGVEIKADLSQSALVISLPQAYLEYTWPDWDPPSRWDDGISGIIADYSITAQTRHEENGGDDSNEISGNGTVGVNLGPWRMRADWQTNYQHTRTQLALGEDYLNSDIFDGLNYVGGSVSTDDQMLPPHLRGYAPDISGVAHTTAKVTVSQMGRVIYETQVPAGPFRIQDLGDSVSGTLHIRIEEQNGQVQEYDISTASMPYLTRPGQVRYKIMMGRPQEWGHHVEGGFFSGAEASWGIANGCRYMPSAGCIAEFPFPGATKLLREVGMDWMSQDLAARLSTRPAQGIGAGLLTARLGIKAMELCRPLPWIDDDKPRLGDFRRQLIGQVKVPMRLEVFCEDRLGLTRELLDLLVLRGIDLRGIEIDPIGRIYLNFAELEFESFSSLMAEIRRIAGVTDVRTVPWMPSERRVDMANPASCQLFGQKLDRLRNHTAAQXLELKGDTKIDLKRFSSQGYVEPGKYNLQVQLNKQPLAEEYDIYWYAGEDDVSKSYACLTPELVAQFGLKEDVAKNLQWSHDGKCLKPGQLEGVEIKADLSQSALVISLPQAYLEYTWPDWDPPSRWDDGISGIIADYSITAQTRHEENGGDDSNEISGNGTVGVNLGPWRMRADWQTNYQHTRTQLALGEDYLNSDIFDGLNYVGGSVSTDDQMLPPHLRGYAPDISGVAHTTAKVTVSQMGRVIYETQVPAGPFRIQDLGDSVSGTLHIRIEEQNGQVQEYDISTASMPYLTRPGQVRYKIMMGRPQEWGHHVEGGFFSGAEASWGIANGCRYMPSAGCIAEFPFPGATKLLREVGMDWMSQDLAARLSTRPAQGIGAGLLTARLGIKAMELCRPLPWIDDDKPRLGDFRRQLIGQVKVPMRLEVFCEDRLGLTRELLDLLVLRGIDLRGIEIDPIGRIYLNFAELEFESFSSLMAEIRRIAGVTDVRTVPWMPSEPEWIWRTRRAVSFLGKIGSPAQPYRRTMIRYRTRVYLHLINSGSAALDGSCKQRDSEGNPTMKLQVAAIAALEGDQQCVRDIAEQYKRRRDVLVKGAVIVIAFNTSQGADQRFVANHKADTSPRAPHPQQREQMRPNPGRGGKKKKGNKRVSGRKITSEEPARESWLDAPTEEGTRQLTSRGTMVQRG

SEQ ID NO: 47954 - protein, 360 aa, Homo sapiens
MKIELKITINLTTSYTTNSDSASPPIMIGRCKDNTNKNRKLEVSAKHRPDDVPVFVRGHAAFAEGVGEILTPVDPPEKWYLVAHPGVSIPTPVIFKDLELPRNTPKRSIETLLKCEFSNDCEVIARKRFREVDAVLSWLLEYAPSRLTGTGACVFAEFDTESEARQVKVPMRLKVFCKDRLGLTRELLDLLVLRGIDLRGIEIDPIGRIYLNFAELEFESFSSLMAEIRRIAGVTDVRTVPWMPSEREHLTLSALLKALPEPVLSVDMKSKVDMANPESCQLFGQKLDCLRNHTAAQLINAFNFLRWLKSDPQDSHTELVVINGQNFFMQIHMQKHRCTHKFYTPLSKSDFILSPKHITK

SEQ ID NO: 47955 - protein, 84 aa, Homo sapiens
MGVVRTFQHVRLFREMTVIENLLVAQHQQLKTGLFSGLLKILKGVPGMMSELSIPEGCGYSSIVPSRTSEKGLNTAAKAGPQVT

SEQ ID NO: 47956 - protein, 357 aa, Homo sapiens
  DOMAIN (332)..(351): UvrD/REP helicase domain identified by eMATRIX, accession number PF00580E, p-value=5.154e-17, raw score of 13.89
  DOMAIN (57)..(256): ABC transporter domain identified by PFam, accession name ABC_tran, E-value=1.3e-55, PFam score of 198.2
  misc_feature (1)...(357): Xaa = X or * as defined in Table 2
MTTKLWFKERVLIQDTVQLKRERVPNSNSKTWAYGGCPELQLHCHLEDPVNLELYPQEIVSLIGPNGAGKTTVFNCLTGFYKPTGGTILLRDQHLEGLPGQQIARMGVVRTFQHVRLFREMTVIENLLVAQHQQLKTGLFSGLLKTPSFRRAQSEALDRAATWLERIGLLEHANRQASNLAYGDQRRLEIARCMVTQPEILMLDEPAAGLNPKETKELDELIAELRNHHNTTILLIEHDMKLVMGNSDRIYVVNQGTRWQTNPGQLKKPLNSLTNGDKKAVTLLDESQLDALLDKLSGYAKPEERILILARYHHMRPASLEKAATRWPKLQIDFMTIHASKGQQADYVIIVGLQEGX

SEQ ID NO: 47957 - protein, 254 aa, Homo sapiens
  DOMAIN (67)..(113): p53 tumor antigen proteins domain identified by eMATRIX, accession number BL00348D, p-value=1.000e-40, raw score of 12.93
  DOMAIN (70)..(251): P53 domain identified by PFam, accession name P53, E-value= 1.8e-137, PFam score of 470.1
MAAIAFIGLGQMGSPMASNLLQQGHQLRVFDVNAEAVRHLVDKGATPAANPAQAAKDAEFIITMLPNGDLHLIRVEGNLRVEYLDDRNTFRHSVVVPYEPPEVGSDCTTIHYNYMCNSSCMGGMNRRPILTIITLEDSSGNLLGRNSFEVRVCACPGRDRRTEEENLRKKGEPHHELPPGSTKRALPNNTSSSPQPKKKPLDGEYFTLQIRGRERFEMFRELNEALELKDAQAGKEPGGSRAHSSHLKSKKVES

SEQ ID NO: 47958 - protein, 284 aa, Homo sapiens
  DOMAIN (50)..(89): 3-hydroxyisobutyrate dehydrogenase proteins domain identified by eMATRIX, accession number BL00895B, p-value=8.200e-29, raw score of 21.14
MLPNGDLVRNVLFGENGVCEGLSTDALVIDMSTIHPLQTDKLIADMQAKGFSMMDVPVGRTSANAITGTLLLLAGGTAEQVERATPILMAMGSELINAGGPGMGIRVKLINNYMSIALNALSAEAAVLCEALNLPFDVAVKVMSGTAADSVRHLVVKSATPAASQEQTAKDADLIYAMSPNVDLVRTVLFGEIGVCKGLSRNPLFFDMSTILPMPTDKLIAYMLAKGFSSMHVPLARIFANANIGRVQVLADAIVVQVEHANPIILGVQCEYINVGAQRFTNPV

SEQ ID NO: 47959 - protein, 474 aa, Homo sapiens
  DOMAIN (78)..(122): Delta-aminolevulinic acid dehydratase proteins domain identified by eMATRIX, accession number BL00169F, p-value=6.657e- 38, raw score of 18.30
  DOMAIN (6)..(132): Delta-aminolevulinic acid dehydratase domain identified by PFam, accession name ALAD, E-value=1e-83, PFam score of 291.5
MARQRPTLENLGKQAVVAAAAGADFIAPSAAMDGQVQAIRQALDAAGFKDTAIMSYSTKFASSFYGPFREAAGSALKGDRKSYQMNPMNRREAIRESLLDEAQGADCLMVRPAGAYLDIVRDWRGRTGLPVAHIRRAGMSQPLLSVNGLMMRFGGLLAVNNVNLELYPQEIVSLIGPNGAGKTTVFNCLTGFYKPTGGTILLRDQHLEGLPGQQIARMGVVRTFQHVRLFREMTVIENLLVAQHQQLKTGLFSGLLKTPSFRRAQSEALDRAATWLERIGLLEHANRQASNLAYGDQRRLEIARCMVTQPEILMLDEPAAGLNPKETKELDELIAELRNHHNTTILLIEHDMKLVMGISDRIYVVNQGTPLGNGTSYTACRANSDASFSAACAINEAQISAFFSHTDVTANCPAATSIATSCQSRKIRQRRLFGVTLITHTNQIAGFCSVTTSFSSFYWRWYGKRGEMAVKYAI

SEQ ID NO: 47960 - protein, 157 aa, Homo sapiens
SGAYSGTLKPVWFRACGRSSEDLFAGGYAVQKRHLVDKGATPAANPAQAAKDAESIITMLPNGDLVRTFQHVRLFREMTVIENLLVAQHQQLKTGLFSGLLKTPSFRRAQSEALDRAATWCARTPHIPSIPPERHHPANNTRKYSHTYNQQQDTYKL

SEQ ID NO: 47961 - protein, 85 aa, Homo sapiens
  DOMAIN (20)..(61): 34-dihydroxy-2-butanone 4-phosphate synthase. domain identified by eMATRIX, accession number PF00926A, p-value=9.357e- 38, raw score of 19.11
  DOMAIN (20)..(85): 3,4-dihydroxy-2-butanone 4-phosphate sy domain identified by PFam, accession name DHBP_synthase, E-value=4.4e-07, PFam score of -55.3
GFFTMNQTLLSSFGTPFERVENALAALREGRGVMVLDDEDRENEGDMIFPAETMTVEQMALTIRHGSGIVCLCITEDRRKQLDLP

SEQ ID NO: 47962 - protein, 282 aa, Homo sapiens
  DOMAIN (243)..(278): Ribosomal protein L31 proteins domain identified by eMATRIX, accession number BL01143, p-value=1.333e-34, raw score of 20.32
  DOMAIN (213)..(279): Ribosomal protein L31 domain identified by PFam, accession name Ribosomal_L31, E-value=4.3e-44, PFam score of 159.9
MIPFVVSGGILLAVSVMLYGKGAVPDAVADPNLKKLFDIGVAGLTLMVPFLAAYIGYSIAERSALAPCAIGAWVGNSFGAGFFGALIAGIIGGIVVHYLKKIPVHKVLRSVMPIFIIPIVGTLITAGIMMWGLGEPVGALTNSLTQWLQGMQQGSIVMLAVIMGLMLAFDMGGPVNKVAYAFMLICVAQGVYTVVAIAAGWKSDAALNRGFPMKKDIHPKYEEITASCSCGNVMKIRSTVGHDLNLDVCSKCHPFFTGKQRDVATGGRVDRFNKRFNIPGSK

SEQ ID NO: 47963 - protein, 605 aa, Homo sapiens; identical to SEQ ID NO: 34065
  DOMAIN (220)..(237): RNase H domain identified by eMATRIX, accession number PF00075A, p-value=4.000e-09, raw score of 14.44
  DOMAIN (466)..(512): Integrase core domain identified by PFam, accession name rve, E-value=0.0097, PFam score of 13.5

SEQ ID NO: 47964 - protein, 526 aa, Homo sapiens; identical to SEQ ID NO: 46141
  DOMAIN (12)..(38): COMPONENT PHOSPHOTRANSFERASE SYST domain identified by eMATRIX, accession number PD02963A, p-value=3.250e-25, raw score of 12.85
  DOMAIN (48)..(191): Integrase core domain identified by PFam, accession name rve, E-value=6.5e-28, PFam score of 100.5

SEQ ID NO: 47965 - protein, 383 aa, Homo sapiens
  DOMAIN (127)..(153): COMPONENT PHOSPHOTRANSFERASE SYST domain identified by eMATRIX, accession number PD02963A, p-value=3.250e-25, raw score of 12.85
MQAAHRLRPAYRIKTGKPPALADYHPAYQEMLSRKQDRVIDQIDFGIKDTVEILHMGQIQSMGREFALSLRFSIHGHNVHGNESPEMGPERRSGFYDEWSPERIIQYYRPAREQLMNELVQILKNTRQHLMTGVSHMIPFVVSGGILLAVSVMLYGKGAVPDAVADPNLKKLFDIGVAGLTLMVPFLAAYIGYSIAERSALAPCAIGAWVGNSFGAGFFGALIDAFPRLSEEINPALPEAKVMACLEAVARQDNVDSPQELPPTPLFASRPITRLKSWWAPGGEVESGTHKKRERARDTADFPEIGHLLLVEKAPPSLTKRRRSETVRVWSRPALTALRDWWVLDAGKFGLYQTPPRGTAGPPLAFQSSTRRMECPTETQATL

SEQ ID NO: 47966 - protein, 140 aa, Homo sapiens
  DOMAIN (78)..(112): Sodium:dicarboxylate symporter family domain identified by PFam, accession name SDF, E-value=8.5e-12, PFam score of 48.0
LAERISLILPGRILCPVFSSATRAFFRRSLMTENAVLQLRAERIARATRPFLARGNRVRPCQRCLLPEKLCLCSTISLYFQVLTAIAIGILLGHFYPEIGEQMKPLGDGFVKPHLQTLGIWITDVVWNQVKLKGVFLNSQ

SEQ ID NO: 47967 - protein, 30 aa, Homo sapiens
PPDPHHARRHHQRRFSDWWSGNGTGFPHPR

SEQ ID NO: 47968 - protein, 76 aa, Homo sapiens
  misc_feature (1)...(76): Xaa = X or * as defined in Table 2
MESKRLDNACAGGGDXPQLHQCPRXTAVDXRRNQTAFAXRDASTYRHESGGNASPECHGLYQRQKNADGGGGQRRI

SEQ ID NO: 47969 - protein, 187 aa, Homo sapiens
  DOMAIN (8)..(40): Pyridine nucleotide-disulphide oxidoreducta domain identified by PFam, accession name pyr_redox, E-value=9.4e-07, PFam score of 25.5
MPWLESHGVTVDKWGRIIADVESQYRYQTTNPKIFAGGDAVRDKILSDNYFTLHNITYDLTRKDGEVIRHKREVYDRGNGATILLYNTKKKTVVLIRQFRVATWVNGNESGQLIESCAGLLDNDEPEVCIRKEAIEETGYEVGEVRKLFELYMSPGGVTELIHFFIAEYSDNQRANAGGGVEDEDIE

SEQ ID NO: 47970 - protein, 118 aa, Homo sapiens
  DOMAIN (56)..(75): ATP-DEPENDENT CLP PROTEASE ATP-BINDING SUBUNIT SIGNATURE domain identified by eMATRIX, accession number PR00300A, p-value= 3.520e-15, raw score of 9.56
GSPMSEMTPREIVSELDKHIIGQDNAKRSVAIALRNRWRRMQLNEELRHEVTPKNILMIGPTGVGKTEIARRLAKLANAPFIKVEATKFTEVECGCQSKNWTPKRSTTIFHSLLEPHY

SEQ ID NO: 47971 - protein, 119 aa, Homo sapiens
  DOMAIN (57)..(81): DAHP synthetase family domain identified by eMATRIX, accession number PF00793A, p-value=1.947e-15, raw score of 19.57
RTSALAYFFVIMLTTRRGVTHLALEISSDWFIVMRITSRQSCRRSNKFLRLVMNRTDELRTARIESLVTPAELALRYPVTPGVATHVTDSRRRIEKILNGEDKRLLVIIGPCSIHDLTA

SEQ ID NO: 47972 - protein, 323 aa, Homo sapiens
  DOMAIN (62)..(114): DAHP synthetase family domain identified by eMATRIX, accession number PF00793B, p-value=1.000e-40, raw score of 22.84
  DOMAIN (27)..(315): DAHP synthetase family domain identified by PFam, accession name DAHP_synth_1, E-value=1.7e-141, PFam score of 483.5
MVVLVTACGMLLLLAQVQVGMRQRHQELVVWRTLGAGKKLLRTRCGWTARVLALRIEKILNGEDKRLLVIIGPCSIHDLTAAMEYATRLQSLRNQYQSRLEIVMRTYFEKPRTVVGWKGLISDPDLNGSYRVNHGLELARKLLLQVNELGVPTATEFLDMVTGQFIADLISWGAIGARTTESQIHREMASALSCPVGFKNGTDGNTRIAVDAIRAARASHMFLSPDKNGQMTIYQTSGNPYGHIIMRGGKKPNYHADDIAAACDTLHEFDLPEHLVSGCGYAEVGQEPKLEPPNGTITGWGKNRSNRRQIPEGLRRARGAKVG

SEQ ID NO: 47973 - protein, 260 aa, Homo sapiens
  DOMAIN (18)..(142): Carbamoyl-phosphate synthase (CPSase) domain identified by PFam, accession name CPSase_L_chain, E-value=1.9e-64, PFam score of 227.5
NLTSRWSSSSNEANMLDKIVIANRGEIALRILRACKELGIKTVAVHSSADRDLKHVLLADETVCIGPAPSVKSYLNIPAIISAAEITGAVAIHPGYGFLSENANFAEQVERSGFIFIGPKAETIRLMGDKVSAIAAMKKAGVAGSAWKSVGGIDILSASSAEGTEKGRGMKETTFVLTNAMLGRKKLDALDFKVNIFHEHLIQQFLSRTKQQKQDRQESLLLVAPDPGLANRTNLLLHVHTIRRPQGSKQILPCRKPSMI

SEQ ID NO: 47974 - protein, 179 aa, Homo sapiens
REQTAATLPASLYAGTGRVARYAQWRHRVDCSYDAVPAGRNKPYQNTSLRASRPSDQARRINKGYTMSSVDILVPDLPESVADATVATWHKKPGTQSYVMKCSLPFAGHTLHFVEFDPANFCEQDLLWLPHYAQLQHAGRKRKTEHLAGRIAAVYALREYGYKCVPAIGELRQPVWPGV

SEQ ID NO: 47975 - protein, 83 aa, Homo sapiens
LASACKACALACLFIPTVCCTWAKPMAVTLTFNLPYAKQPSPPYSAPALCMSISCTCMCPATLHSGPYPCGTGLIGFSIKPPI

SEQ ID NO: 47976 - protein, 279 aa, Homo sapiens
  DOMAIN (17)..(36): ASPARTATE AMINOTRANSFERASE SIGNATURE domain identified by eMATRIX, accession number PR00799F, p-value=8.071e-17, raw score of 11.64
  DOMAIN (205)..(276): 4'-phosphopantetheinyl transferase superfami domain identified by PFam, accession name ACPS, E-value=0.0015, PFam score of 19.2
AGLTKEQVLRLREEFGVYAVASGRVNVAGMTPDNMAPLCEAIVAVLGGYPMSGRHRAVLIEVWSPSKLRGREIRLRVRRFEAGAPGVLRGPPGADPVSNMVDMKTTHTSLPFAGHTLHFVEFDPANFCEQDLLWLPHYAQLQHAGRKRKTEHLAGRIAAVYALREYGYKCVPAIGELRQPVWPAEVYGSISHCGTTALAVVSRQPIGIDIEEIFSVQTARELTDNIITPAEHERLADCGLAFSLALTLAFSAKESAFKASEIQTDIFSSYLIVQSWQYF

SEQ ID NO: 47977 - protein, 149 aa, Homo sapiens
YFLPPESAAKLASLCQTGYKVRFNVMAEHLMSDVPFWQSKTLDEMSDAEWESLCDGCGQCCLHKLMDEDTDEIYFTNVACRQLNIKTCQCRNYERRFEFEPDCIKLTRENLPTFEWLPMTCAYPFAAGSKDLPAWNPLLTGSKAAMHGE

SEQ ID NO: 47978 - protein, 786 aa, Homo sapiens; identical to SEQ ID NO: 36620
  DOMAIN (686)..(741): kw TRANSCRIPTASE REVERSE II ORF2 domain identified by eMATRIX, accession number DM01354Q, p-value=1.000e-40, raw score of 9.23
  DOMAIN (641)..(784): Reverse transcriptase domain identified by PFam, accession name rvt, E-value=5.5e-05, PFam score of 1.2

SEQ ID NO: 47979 - protein, 944 aa, Homo sapiens; identical to SEQ ID NO: 40571
  DOMAIN (700)..(745): kw TRANSCRIPTASE REVERSE II ORF2 domain identified by eMATRIX, accession number DM01354N, p-value=1.000e-40, raw score of 13.17
  DOMAIN (70)..(943): Reverse transcriptase domain identified by PFam, accession name rvt, E-value=8.6e-18, PFam score of 72.5

SEQ ID NO: 47980 - protein, 1159 aa, Homo sapiens; identical to SEQ ID NO: 34600
  DOMAIN (283)..(328): kw TRANSCRIPTASE REVERSE II ORF2 domain identified by eMATRIX, accession number DM01354N, p-value=1.000e-40, raw score of 13.17
  DOMAIN (369)..(559): Reverse transcriptase domain identified by PFam, accession name rvt, E-value=9.5e-10, PFam score of 45.8

SEQ ID NO: 47981 - protein, 994 aa, Homo sapiens; identical to SEQ ID NO: 36964
  DOMAIN (158)..(203): kw TRANSCRIPTASE REVERSE II ORF2 domain identified by eMATRIX, accession number DM01354N, p-value=1.000e-40, raw score of 13.17
  DOMAIN (242)..(520): Reverse transcriptase domain identified by PFam, accession name rvt, E-value=1.5e-78, PFam score of 274.3
  misc_feature (1)...(994): Xaa = X or * as defined in Table 2

SEQ ID NO: 47982 - protein, 1006 aa, Homo sapiens; identical to SEQ ID NO: 36631
  DOMAIN (173)..(219): kw TRANSCRIPTASE REVERSE II ORF2 domain identified by eMATRIX, accession number DM01354O, p-value=1.000e-40, raw score of 8.73
  DOMAIN (206)..(470): Reverse transcriptase domain identified by PFam, accession name rvt, E-value=3.1e-37, PFam score of 137.1

SEQ ID NO: 47983 - protein, 1457 aa, Homo sapiens; identical to SEQ ID NO: 36425
  DOMAIN (154)..(195): kw TRANSCRIPTASE REVERSE II ORF2 domain identified by eMATRIX, accession number DM01354I, p-value=1.000e-40, raw score of 15.55
  DOMAIN (400)..(675): Reverse transcriptase domain identified by PFam, accession name rvt, E-value=1.2e-87, PFam score of 304.6

SEQ ID NO: 47984 - protein, 669 aa, Homo sapiens
  DOMAIN (438)..(463): 7 kw REVERSE TRANSCRIPTASE RNA POLYMERASE domain identified by eMATRIX, accession number DM00895E, p-value=3.444e-11, raw score of 15.72
  DOMAIN (409)..(590): Reverse transcriptase domain identified by PFam, accession name rvt, E-value=7.2e-20, PFam score of 79.4
MDSNTIIVRDFSTPLPALDRSSTQKINKETMDLNYTLEQMDLTDTYRTFHPTAAEYTFYSTTHGTFSKADHMIGHKTSLNKFQKIEIISSTLSDYSGIKLEINSKRNLQNHANTWKLNNLLLNKHWVKNEIKMEIKKLFKLNSNNDTTYQNLLDTAKAVLRGKFIALTAYNEKTERAQTDILSKQRNAAGPSEWSLPLPAPKQLASSCAHVLQFLPAKGSGKYPALSTQYYRAQLEKQEQTHSKASRRQEITKIRAELKEIETQKTLQKINESRSWFFEKINKIRRPLARLIKKKREKNQIDAIKNDKGDITPNPTEIQTTIREYYKHLYTNELENLEEMDKFLNTYNLPRLNQEEVESLNRPITGCEIEALINSLPTKKSPGTDGLTAKFYHRYKEELVPFLLKRFQSVEKERILPNSFYEASIILIPKPGRDATKEENFRPISLMNIDAKILNKILANRIQQHIKKLIHHDQVGFIPGMQGWFNICKSINVIQHINRTNDKNHIIISIDAEEAFNKIQQPFMLKTLNKLAPNLLKLISNFSKVSGYKINVQKSQAFLYTNNRQTESQIMSELPFTIASKRIKYLGIQLIRDVKDLFKENYKPLLNEIKEDTNKWKNIPCSWIGRINIMKMATLPKDLSFVHMKRENAGVSSTYKDVSPIACHPYDLI

SEQ ID NO: 47985 - protein, 722 aa, Homo sapiens; identical to SEQ ID NO: 40581
  DOMAIN (45)..(90): kw TRANSCRIPTASE REVERSE II ORF2 domain identified by eMATRIX, accession number DM01354N, p-value=1.000e-40, raw score of 13.17
  DOMAIN (129)..(367): Reverse transcriptase domain identified by PFam, accession name rvt, E-value=7.5e-63, PFam score of 222.2

SEQ ID NO: 47986 - protein, 688 aa, Homo sapiens
  DOMAIN (188)..(243): kw TRANSCRIPTASE REVERSE II ORF2 domain identified by eMATRIX, accession number DM01354Q, p-value=1.000e-40, raw score of 9.23
  DOMAIN (141)..(416): Reverse transcriptase domain identified by PFam, accession name rvt, E-value=2.7e-77, PFam score of 270.2
MKEIEIQKSLPKINESRSWFFEKIHKIDRLLARLIKKKREKNQIDTIKNDKGDITANPTAIQTTIREYYKHLYANKLENLEEMDKFLDTYTLPRLNQEEAESLNTPITGSDIEAIINSLPTKKSPGPDGLTAEFYQRYKEELKKEGILLSSFYEASILLIPKPGRDTTKKENFRPISLMNIDAKILNKILANRIQQHIKKLIHHDQVGFIPGMQGWFNICKSINVIQHINRTKDKNHTIISIDAEKAFDKIQQPFMLKTLNKLGIDGTYLKIIRAIYDKPTANIILNGQKLEAFPLKTGTRQGCPVSPVVFNTVLEVLAREIRQEKEIKGIQLGKEEVKRSLFADDMIVYLENPIVSAQNLLKLISNFSKVSGYKINVQKSQAFLYTNNRQTESQIMSELPFTIAPKRIKYLRIQLTRDVKDLFKENYKLLLNEIKEDTNKWKNIPCSWVGRINIVKMAILPKGIHRFNAIPIKLPMTFFTELEKTTLKFIWNQKRARIAKSILSRKYKAGGSMLPDFKLCYKATVTKKAWYWYQNRDIDQWNRTEPSEIMPHIYNYLIFDKPEKNKQWGKDSLFNKWCWENWLTICRKLKLDPFLTPYTEINSRWIKDLNVRPKTIKTLEENLGNTIQDIGMGKDFMSKTPKAMATKAKIDEWDLLKLKSFCTAKETTVRVNRQPTEWETIFAIYSS

SEQ ID NO: 47987 - protein, 1152 aa, Homo sapiens; identical to SEQ ID NO: 36432
  DOMAIN (154)..(195): kw TRANSCRIPTASE REVERSE II ORF2 domain identified by eMATRIX, accession number DM01354I, p-value=1.000e-40, raw score of 15.55
  DOMAIN (400)..(675): Reverse transcriptase domain identified by PFam, accession name rvt, E-value=1.2e-87, PFam score of 304.6

SEQ ID NO: 47988 - protein, 1210 aa, Homo sapiens
  DOMAIN (154)..(195): kw TRANSCRIPTASE REVERSE II ORF2 domain identified by eMATRIX, accession number DM01354I, p-value=1.000e-40, raw score of 15.55
  DOMAIN (400)..(675): Reverse transcriptase domain identified by PFam, accession name rvt, E-value=6.5e-89, PFam score of 308.8
MVKGSIQQEELTILNIYAPNTGAPRFIKQVLSDLQRDLHSHTLIMGDFNTPLSTLDRSTRQKVNKDTQELNSALHQADLIDIYRTLHPKSTEYTFFSAPHHTYSKIDHIVGSKALLSKCKRTEIITNYLSDHSAIKLELRIKNLTQSRSTTWKLNNLLLNDYWVHNEMKAEIKMFFETNENKDTTYQNLWDACKAVCRGKFIALNAYKRKQERSKIDTLTSQLKELEKQEQTHSKASRRQEITKIRAELKEIETQKTLQKINESRSWFLERINKIDRPLARLIKKKREKNQIDSIKNDKGDITTDPTEIQTTIREYYKHLYANKLENLEEMDTFLDTYTLPRLNQEEVESLNRPITGSEIVAIINSLPTKKSPGPDGFTAEFYQRYKEELVPFLLKLFQSIEKEGILPNSFYEASIILIPKPGRDTTKKENFRPISLMNIDAKILNKILANRIQQHIKKLIHHDQVGFIPGMQGWFNIRKSINVIQHINRAKDKNHMIISIDAEKAFDKIQQPFMLKTLNKLGIDGTYFKIIRAIYDKPTANIILNGQKLEAFPLKTGTRQGCPLSPLLFNIVLEVLARAIRQEKEIKGIQLGKEEVKLSLFADDMIVYLENPIVSAQNLLKLISNFSKVSGYKINVQKSQAFLYTNNRQTESQIMTELPFTIASKRIKYLGIQLTRDVKDLFKENYKPLLKEIKEDTNKWKNIPCSWVGRINIVKMAILPKVIYRFNAIPIKLPMTFFTELEKTTLKFIWNQKRARIAKSILSQKNKAGGITLPDFKLYYKATVTKTAWYWYQNRDIDQWNRTEPSEIMPRIYNYLIFDKLEKNKQWGKDSLFNKWCWENWLAICRKLKLDPFLTPYTKINSRWIKDLNVRPKTIKTLEENLGITIQDIGVGKDFMSKTPKAMATKAKIDKWDLIKLKSFCTAKETTIRVNRQPTTWEKIFATYSSDKGLISRIYNELKQIYKKKTNNPIKKWAKDMNRHFSKEDIYAAKKHMKKCSSSLAIREMQIKTTMRYHLTPVRMAIIKKSGNNRCSSLLAPESPDGPDEEGFPTTQHSCATKKQPDCFFKQALILFLLTGTKDKNHMIISIDAEKAINKIQYPFKLKTLNKLGIEGAHIKIIRAIYDKLTANIIPNGQKLEAFPLKSSTRQGYPLSQLLFNIVLEVLARAIRQDKEIKDNLGIHRIAERRDHQEFTRVRQMSTHHALMAYRVL

SEQ ID NO: 47989 - protein, 1127 aa, Homo sapiens; identical to SEQ ID NO: 36435
  DOMAIN (154)..(195): kw TRANSCRIPTASE REVERSE II ORF2 domain identified by eMATRIX, accession number DM01354I, p-value=1.000e-40, raw score of 15.55
  DOMAIN (400)..(675): Reverse transcriptase domain identified by PFam, accession name rvt, E-value=5.1e-89, PFam score of 309.1

SEQ ID NO: 47990 - protein, 732 aa, Homo sapiens
  DOMAIN (145)..(190): kw TRANSCRIPTASE REVERSE II ORF2 domain identified by eMATRIX, accession number DM01354N, p-value=1.000e-40, raw score of 13.17
  DOMAIN (229)..(432): Reverse transcriptase domain identified by PFam, accession name rvt, E-value=1.8e-09, PFam score of 44.9
MKMFFETNENKDTTYQNLWDTFKAVCRGKFIALHAHKRKQERSKIDTLMSQLKELEKQEQTHSKASRRQEITKIRAELKEIETKKTLQKINESRNWFFEKINKIDRLLARLIKKRREKNQIDAIKNDKGDITSDPTEIQTTIREYYKHLYANKLENLEEMDKFLDTSTLPRLNQEEVESLNRPITGSEIVAIINSLPTKKSPGPDGFTAEFYQRYKEELVSLLLKLFQLIEKEGILPNSFYEASIILIPKPGRDTTKKENFRPISLMNIDAKILSKILANRIQQHIKKLIHHDQAGFIPGMQGWFNICKSINVIHHINRTKDKNHMIISIDAEKASDKIQQPFMLKTLNKLELEKTTLKFIWNQKRARIAKSILSQKNKAGGIKLPDFKLYYKATVTKTAWYWYQNRDIDQWNRTEPSEITLHIYNYLIFDKPEKNKQWGKDSLFNKWCWENWLAICRKLKLDPFLTPYTKINSRWIKDLNVRPKTIKTLEENLGITIQDIGMGKDFMSTTPKAMATKAKIDKWDLIKLKSFCTAKETTIRVNRQPTKWEKIFTTYSSDKGLISRIYNELKQIYKKKTNNPINKWAKDMNRHFSKEDIYAAKKHMKKCSSSLAIREMQIKTTMRDHLTPVRMAIIKKSGNNRCQQKDGTLQILQEKGEDSSLPWRHLHCCHRGRRYSTHSFLPTPGQVAPQCSYSHFPGPPDLLLLPPLRPMPIQPLLLSPSMHRHSLQGPY

SEQ ID NO: 47991 - protein, 1308 aa, Homo sapiens
  DOMAIN (110)..(151): kw TRANSCRIPTASE REVERSE II ORF2 domain identified by eMATRIX, accession number DM01354I, p-value=1.000e-40, raw score of 15.55
  DOMAIN (356)..(631): Reverse transcriptase domain identified by PFam, accession name rvt, E-value=1.8e-86, PFam score of 300.7
MGDFNTPLSTLDRSTRQKVNKDTQELNSALHQADLIDIYRTLHPKSTEYTFFSAPHHTYSKIDHIVGSKALLSKCKRTEIITNYLSDHSAIKLEIRIKNLTQSHSTTWKLNNLLLNDYWVHNEMKAEIKMFFETNENKDTTYQNLWDAFKAVCRGKFIALNAYKRKQERSKIDSLTSQLKELEKQEQTHSKASRRQEITKIRAELKEIETQKTLQKINESRSWFFERINKIDRPLARLIKKKREKNQIDTIKNDKGDITTDPTEIQTTIREYYKHLYANKLENLEEMDTFLDTYTLPRLNQEEVESLNRPITGSEIVAIINSLPTKKSPGPDGFTAEFYQRYKEELVPFLLKLFQSIGKEGILPNSFYEASIILTPKPGRDTTKKENFRPISLMNIDAKILNKILANRIQQHIKKLIHHDQVGFIPGMQGWFNIRKSINVIQHINRAKDKNHMIISIDAEKAFDKIQQPFMLKTLNKLGIDGTYFKIIRAIYDKPTANIILNGQKLEAFPLKTGTRQGCPLSPLLFNIVLEVLARAIRQEKEIKGIQLGKEEVKLSLFADDMIVYLENPIVSAQNLLKLISNFSKVSGYKINVQKSQAFLYTNNRQTESQIMGELPFTIASKRIKYLGIQLTRDVKDLFKENYKPLLKEIKEDTNKWKNIPCSWVGRINIVKMAILPKVIYRFNAIPIKLPMTFFTELEKTTLKFIWNQKRARIAKSILSQKNKAGGITLPDFKLYYKATVTKTAWYWYQNRDIDQWNRTEPSEIMPHIYNYLIFDKPEKNKQWGKDSLFNKWCWENWLAICRKLKLDPFLTPYTKINSRWIKDLNVRPKTIKTLEENLGITIQDIGVGKDFMSKTPKAMATKAKIDKWDLIKLKSFCTAKETTIRVNRQPTTWEKIFATYSSDKGLISRIYNELKQIYKKKTNNPIKKWAKDMNRHFSKEDIYAAKKHMKKCSSSLAIREMQIKTTMRYHLTPVRMAIIKKSGNNSSREAAPKPPRRRRRRSRILSRLLAKSGRPEAAANSSQLLPIRWAKQHASCASLLGAEPVSEGLGRLHSLALHTTYVEARPARGAQRKPAPGEALAGSQTRTQTWVRVGDLPVISDLPIALNLRKPCHLKPPNGAYQSVLQSVREAERGITEPPDIGCNLMGRSDSRNSTMAIDVPAHALCRSLGNLFKALPPPESIMTSVAGTKVRIIRKHDHSSAPAYARYPAQRRSRFLSPPETHQPQAHIYTKFFRRPSLLLDILPLCNTLINPTWFSHSAAMNIHGIKRNESMSFAGAWMELEVIILSKLTQEQKTKYRKFSLISGH

SEQ ID NO: 47992 - protein, 1115 aa, Homo sapiens; identical to SEQ ID NO: 36436
  DOMAIN (154)..(195): kw TRANSCRIPTASE REVERSE II ORF2 domain identified by eMATRIX, accession number DM01354I, p-value=1.000e-40, raw score of 15.55
  DOMAIN (400)..(675): Reverse transcriptase domain identified by PFam, accession name rvt, E-value=2.8e-87, PFam score of 303.4

SEQ ID NO: 47993 - protein, 794 aa, Homo sapiens
  DOMAIN (154)..(195): kw TRANSCRIPTASE REVERSE II ORF2 domain identified by eMATRIX, accession number DM01354I, p-value=1.000e-40, raw score of 15.55
  DOMAIN (400)..(675): Reverse transcriptase domain identified by PFam, accession name rvt, E-value=4.4e-89, PFam score of 309.4
MVKGSIQQEELTILNIYAPNTGAPRFIKQVLSDLQRDLDSHTLIMGDFNTPLSILDRSTRQKVNKDTQELNSALHQADLIDIYRTLHPKSTEYTFFSAPHHTYSKIDHIVGSKALLSKCKRTEIITNCLSDHSAIKLELRIKNLTQSRSTTWKLNNLLLNDYWVHNEMKAEIKMFFETNENKDTTYQNLWDAFKAVCRGKFIALNAYKRKQERSKIDTLTSQLKELEKQEQTHSKASRRQQITKIRAELKEIETQKTLQKINESRSWFSERINKIDRPLARLIKKKREKNQIDTIKNDKGDITTDPTEIQTTIREYYKHLYANKLENLEEMDTFLDTYTLPRLNQEEVESLNRPITGSEIVAIINSLPTKKSPGPDGFTAEFYQRYKEELVPFLLKLFQSIEKEGILPNSFYEASIILIPKPGRDTTKKENFRPISLMNIDAKILNKILANRIQQHIKKLIHHDQVGFIPGMQGWFNIRKSINVIQHINRAKDKNHMIISIDAEKAFDKIQQPFMLKTLNKLGIDGTYFKIIRAIYDKPTANIILNGQKLEAFPLKTGTRQGCPLSPLLFNIVLEVLARAIRQEKEIKGIQLGKEEVKLSLFADDMIVYLENPIVSAQNLLKLISNFSNVSGYKINVQKSQAFLYTNNRQTESQIMGELPFTIASKRIKYLGIQLTRDVKDLFKENYKPLLKEIKEDTNKWKNIPCSWVGRINIVKMAILPKRYKQLDVERNTQVEEHTNRYRLTPAGHQPARRNDAEFGPGGRGYEQRDTKEESHTPITSPERGTRELSLFHL

SEQ ID NO: 47994 - protein, 1240 aa, Homo sapiens; identical to SEQ ID NO: 36438
  DOMAIN (110)..(151): kw TRANSCRIPTASE REVERSE II ORF2 domain identified by eMATRIX, accession number DM01354I, p-value=1.000e-40, raw score of 15.55
  DOMAIN (356)..(631): Reverse transcriptase domain identified by PFam, accession name rvt, E-value=8.3e-88, PFam score of 305.1

SEQ ID NO: 47995 - protein, 1298 aa, Homo sapiens; identical to SEQ ID NO: 36439
  DOMAIN (154)..(195): kw TRANSCRIPTASE REVERSE II ORF2 domain identified by eMATRIX, accession number DM01354I, p-value=1.000e-40, raw score of 15.55
  DOMAIN (400)..(675): Reverse transcriptase domain identified by PFam, accession name rvt, E-value=5.1e-89, PFam score of 309.1

SEQ ID NO: 47996 - protein, 808 aa, Homo sapiens
  DOMAIN (76)..(121): kw TRANSCRIPTASE REVERSE II ORF2 domain identified by eMATRIX, accession number DM01354N, p-value=1.000e-40, raw score of 13.17
  DOMAIN (161)..(436): Reverse transcriptase domain identified by PFam, accession name rvt, E-value=2.9e-86, PFam score of 300.0
MGCVRQIIPLGTHPVVHQLTSIPQNCQSPQKTRKDREIGQPRGAYGDMRSKCNVMLMMESWNRKRTLEIQTTIREYYKHLYTNKLENLEEMDKFLDTYTLPRLNQEEVESLNRPITHSDIVTIINSLPTKKSPGPDRFTAKFYQRYKEELVPFLLKLFQSIEKEGILPNSFYEASIILIPKLGRDTTKKENFRPISLMNTDAKILNKILANRIQQHIKKLIQHDQVGFIPGMQGWFNIRKSINIIQHINRIKDKNHMIISIDAEKAFDKIQQPFMLKTLNKLGIDGTYLKIIRAIYDKPTANIILNGQKLEAFPLKTGTRQGCPLSPLLFNIVLEALARAIRQEKEIKGIQLGKEEVKLSLFADDMIVYLENPIVSAQNLLKLISNFSKVSGYKINVQKSQAFLYTSNRQTESQIMSELPFTIASKRIKYLGIQLTRDVKDLFKENYKPLLKEIKEDTNKWKNIPCSWIGRINIVKMAILHKALYRFNAIPIKLPMTFFTELEKTTLKFIWNQKRACIAKSILSQKNKAGGITLPDFKLHYKATVTKTAWYWYQNRDIDQWNRTEPSEIIPPIYNYLIFDKLDKNKKWGKDCLFNKWCWQNWLAICRKLKLDPLLTPYTKINSRWIKDLNVRPKTIKTLEENLGITIQDIGMGKDFMSKTPKAMATKDKIDKWDLIKLKSFCTAKETTIRVNRQPTKWEKIFVTYSSDKGLISRIYNELKQIYKKKTNNPIKKWAKDMNRHFSKEDIYAAKKHMKKCSSSLAIREMQIKTTVRYHLTPVRMAIIKKSGNNSCWRGCGEIGTLHCWWDC

SEQ ID NO: 47997 - protein, 1260 aa, Homo sapiens; identical to SEQ ID NO: 36441
  DOMAIN (154)..(195): kw TRANSCRIPTASE REVERSE II ORF2 domain identified by eMATRIX, accession number DM01354I, p-value=1.000e-40, raw score of 15.55
  DOMAIN (400)..(675): Reverse transcriptase domain identified by PFam, accession name rvt, E-value=1.8e-88, PFam score of 307.4

SEQ ID NO: 47998 - protein, 936 aa, Homo sapiens
  DOMAIN (269)..(314): kw TRANSCRIPTASE REVERSE II ORF2 domain identified by eMATRIX, accession number DM01354N, p-value=1.000e-40, raw score of 13.17
  DOMAIN (617)..(754): SET domain identified by PFam, accession name SET, E-value= 2.2e-54, PFam score of 194.1
MGDFNTPLSTLDRSTRQKVNKDIQELNSALHQADLIDIYRTLHPKSTEYTFFSAPHHTYSKIDHIVGSKALLSKCKRTEIITNCLSDHSAIKLELRIKKLTQNRSTTWKLNKNDYWVHNEMKAEIKMFFETNKNKDTTYQNLWDTFKAVCRGKFIALNAHKRKQERSKIDTLTSQLKEPEKQEQTHSKASRRQEITKIRAELKEIETQKTLQKINESRSWFFERINKIDRPLARLIKKKREKNQIDPIKNDKGDITTDPTEIQTTIREYYKHLYTNKLENLEEMDKFLDTYTLPRLNQEEVESLNRPLTGSEIVAIINSLPTKKSPGPDGFTAEFYQRYKEELVPFLLKLFQSIEKEGILPNSFDEASIILIPKPGRDSTKKENFRPISLMNIDAKILNKILANRIQQHIKKLIHHDQVGFIPGMQVWFNIRKSINVIQHINRTKDKNHMIISIDAEKAFDTIQQPFMLKTLNKLGIDGMYLKIIRAIYDKPTANITLNGQKLEAFPLKTGTRQGCPLSPFLFNIVLGYPSLLLPHTYTPDHVVGPGADIDPTQITFPGCICVKTPCLPGTCSCLRHGENYDDNSCLRDIGSGGKYAEPVFECNVLCRCSDHCRNRVVQKGLQFHFQVFKTHKKGWGLRTLEFIPKGRFVCEYAGEVLGFSEVQRRIHLQTKSDSNYIIAIREHVYNGQVMETFVDPTYIGNIGRFLNHSCEPNLLMIPVRIDSMVPKLALFAAKDIVPEEELSYDYSGRYLNLTVSEDKERLDHGKLRKPCYCGAKSCTAFLPFDSSLYCPVEKSNISCGNEKEPSMCGSAPSVFPSCKRLTLEVDAFPPNGYGLYNIVGNAWEWTSDWWTVHHSVEETLNPMVPIPAGVFTMGTDDPQIKQDGEAPARRVTIDAFYMDAYEVSNTEFEKFVNSTGYLTEVPHTTPGDYGNYNSR

SEQ ID NO: 47999 - protein, 1614 aa, Homo sapiens
  DOMAIN (1262)..(1294): ABC transporters family proteins domain identified by eMATRIX, accession number BL00211B, p-value=3.250e-18, raw score of 13.37
  DOMAIN (331)..(606): Reverse transcriptase domain identified by PFam, accession name rvt, E-value=5.8e-89, PFam score of 309.0
MAIAMAVRCIHQPIIYIRFSASFRSSFRAGLVVTKSLSICLSIKYFISPSLMKLSLAGYLSDHSAIKLELRIKNLTQSRSTTWKLNNLLLNDYWVHNEMKTEIKMFFETNENKDTTYQNLWDAFKAVCRGKFIALNAYKRKQERSKIDTLTSQLKELEKQEQTHSKASRRQEITKIRAELKEIETQKTLQKINESRSWFFERINKIDRPLARLIKKKREKNQIDTIKNDKGDITTNPTEIQTTIREYYKHLYANKLENLEEMDTFLDTYTLPRLNQEEVESLNRPITGSEIVAIINSLPTKKSPGPDGFTAEFYQRYKEELVPFLLKLFQSIEKEGILPNSFYEASIILIPKPGRDTTKKENFRPISLMNIDAKILNKILANRIQQHIKKLIHHDQVGFIPGMQGWFNIRKSINVIQHINRAKDKNHMIISIDAEKAFDKIQQPFMLKTLNKLGIDGTYFKIIRAIYDKPTANIILNGQKLEAFPLKTGTRQGCPLSPLLFNIVLEVLARAIRQEKEIKGIQLGKEEVKLSLFADDMIVYLENPIVSAQNLLKLISNFSKVSGYKINVQKSQAFLYTNNRQTESQIMSELPFTIASKRIKYLGIQLTRDVKDLFKENYKPLLKEIKEDTNKWKNIPCSWVGRINIVKMAILPKVIYRFNAIPIKLPMTFFIELEKTTLKFIWNQKRARIAKSIVSQKNKAGGITLPDFKLYYKATVTKTAWYWYQNRDIDQWNRTEPSEITPHIYNYLIFDKPEKNKQWGKDSLFNKWCWENWLAICRKLKLDPFLTPYTKINSRWIKDLNVRPKTIKTLEENLGITIQDIGVGKDFMSKTPKAMATKAKIDKWDLIKLKSFCKAKETTIRVNRQPTTWEKIFATYSSDKGLISRIYNELKQIYKKKTNNPIKKWAKDMNRHYSKEDIYAAKKHMKKCSSSLAIREMQIKTTMRYHLTPVRMAIIKKSGNNRDQRAGKISERLVITSEMIENIQSVKAYCWEEAMEKMIENLRQTELKLTRKAAYVRYFNSSAFFFSGFFVVFLSVLPYALIKGIILRKIFTTISFCIVLRMAVTRQFPWAVQTWYDSLGAINKIQDFLQKQEYKTLEYNLTTTEVVMENVTAFWEEGFGELFEKAKQNNNNRKTSNGDDSLFFSNFSLLGTPVLKDINFKIERGQLLAVAGSTGAGKTSLLMVIMGELEPSEGKIKHSGRISFCSQFSWIMPGTIKENIIFGVSYDEYRYRSVIKACQLEEDISKFAEKDNIVLGEGGITLSGGQRARISLARAVYKDADLYLLDSPFGYLDVLTEKEIFESCVCKLMANKTRILVTSKMEHLKKADKILILHEGSSYFYGTFSELQNLQPDFSSKLMGCDSFDQFSAERRNSILTETLHRFSLEGDAPVSWTETKKQSFKQTGEFGEKRKNSILNPINSIRKFSIVQKTPLQMNGIEEDSDEPLERRLSLVPDSEQGEAILPRISVISTGPTLQARRRQSVLNLMTHSVNQGQNIHRKTTASTRKVSLAPQANLTELDIYSRRLSQETGLEISEEINEEDLKECFFDDMESIPAVTTWNTYLRYITVHKSLIFVLIWCLVIFLAEWAPAWPKPPDEHRPLLHGTQSHRPPKG

SEQ ID NO: 48000 - protein, 983 aa, Homo sapiens
  DOMAIN (10)..(50): G-protein coupled receptors proteins domain identified by eMATRIX, accession number BL00237A, p-value=7.097e-15, raw score of 27.68
  DOMAIN (218)..(491): Reverse transcriptase domain identified by PFam, accession name rvt, E-value=8.9e-86, PFam score of 298.4
MITDFFSQRKVISFKGCLVQIFLLHFFGGSEMVILIAMGFDRYIAICKPLHYTTIMCGNACVGIMAVAWGIGFLHSVSQLAFAVHLPFCGPNEVDSFYCDLPRVIKLACTDTYRLDIMVIANSEIQTTIREYYKHLYANKLENLEEMDKFLDTYTLPRLNQEEVESLNRPITEAEIVAIINSLPTKKSPGPDGFTAEFYQRYKEELVPFLLKLFQSIEKEGVLPNSFYEASIILIPKPGRDTTKKENFRPISLMNIDAKILNKILAKRIQQHIKKLIHQDQVGFIPGMQGWFNIRKSINVIQHINRAKDKNHMIISIDAEKAFDKIQQPFMLKTLNKLGIDGTYFKIIRAIYDKPTANIILNGQKLEAFPLKTGTRQGCPLSPLLFNIVLEVLARAIRQEKEIKGIQLGKEEVKLSLFADDMIVYLENPIVSAQNLPKLISNFSKVSGYKINVQKSQAFLYTNNRQTESQTMSELPFTIASKRIKYLGIQLTRDVKDLFKENYKSLLKEIKEDTKKWKNMPCSWVGRINIVKMAILPKVIYRFNAIPIKLPMTFFTELEKTTLKFIWNQKRARIAKSILSQKNKAGGITLPDFKLYDKATVTKTAWYWYQNRDIDQWNRTEPSEIMPHIYNYLIFDKPEKNKQWGKDSLFNKWCWENWLAICRKLKLDPFLIPYTKINSRWIKDLNVRPQTIKTLEENLGFTIQDIGMGKDFMSKTPREALLCIVGENTKWSKDPSALSTPPTSCSRPQRRNKSVSHGSYPHPLLFTMNDRVNSVKTTILPKATYKFNAIPIKIPPSFFTELEKTRLKFTWNQKRAHIAKARLSKKNKSRGITLLDFKLYYKAIVTKTAWYWYKNRHIDQWNRIENPEIKPNTFSQLIFDKASKNIKWGKDTLFNKWCWYNWQATCRRMQLDPHLSPYKQINSRWFTDLNLRPETIKILEDKIGKTLLDIGLGKDFTIKNPKANTTKINRWDLIKLKAFCTSK

SEQ ID NO: 48001 - protein, 960 aa, Homo sapiens
  DOMAIN (157)..(202): kw TRANSCRIPTASE REVERSE II ORF2 domain identified by eMATRIX, accession number DM01354N, p-value=1.000e-40, raw score of 13.17
  DOMAIN (241)..(516): Reverse transcriptase domain identified by PFam, accession name rvt, E-value=2.8e-87, PFam score of 303.4
MTGQAQTTNQLISLTLFTSKTMNGKKSMAKIPHPAKVGYVDTFLASESAFKLERSKIDTLTSQLKELEKQEQTHSKASRRQEITKIRAELKEIETQKTLQKINESRSWFFERINKIDRPLARLIKRKREKNQIDTIKNDKGDITTDPTEIQTTIREYYKHLYANKLENLEEMDTFLDTYTLPRLNQEEVESLNRPITGSEIVAIINSLPTKKSPGPDGFTAEFYQRYKEELVPFLLKLFQSIEKEGILPNSFYEASIILIPKPGRDTTKKENFRPISLMNIDAKILNKILANRIQQHIKKLIHHDQVGFIPGMQGWFNIRKSINVIQHINRAKDKNHMIISIDAEKAFDKIQQPFMLKTLNKLGIDGTYFKIIRAIYDKPTANIILNGQKLEAFPLKTGTRQGCPLSPLLFNIVLEVLARAIRQEKEIKGIQLGKEEVKLSLFADDMIVYLENLIVSAQNLLKLISNFSKVSGYKIDVQKSQAFLYTNNRQTESQIMGELPFTIASKRIKYLGIQLTRDVKDLFKENYKPLLKEIKEDTNKWKNIPCSWVGRINIVKMAILPKVIYRFNAIPIKLPMTFFTELEKTTLKFIWNQKRARIAKSILSQKNKAGGITLPDFKLYYKATVTKTAWYWYQNRDIDQWNRTEPSEIMPHIYNYLIFDKPEKNKQWGKDSLFNKWCWENWLAICRKLKLDPFLTPYTKINSRWIKDLNVRPKTIKTLEENLGITIQDIGVGKDFMSKTPKAMATKAKIDKWDLIKLKSFCTAKETTMRVNRQPTTWEKIFTTYSSDKGLISRIYNELKQIYKKKTNNPIKKWAKDMNRHFSKEDIYAAKKHMKKCSSSLAIREMQIKTTMRYHLTPVQLEALLFLTPVHEESCHLVPRDGIVAGGHVLSPFQEILFLLLQLLALISELPFSGCSCLTQMQQIVSVDSEDQSDGRVMDEWSLRPESLLKDELLRNVVR

SEQ ID NO: 48002 - protein, 1071 aa, Homo sapiens
  DOMAIN (123)..(164): kw TRANSCRIPTASE REVERSE II ORF2 domain identified by eMATRIX, accession number DM01354I, p-value=1.000e-40, raw score of 15.55
  DOMAIN (369)..(644): Reverse transcriptase domain identified by PFam, accession name rvt, E-value=4.2e-89, PFam score of 309.4
MSSEWEWLRCSEVKGQRDVRPGCLGWDFRVYIVEDTQDEDRTWSVKEACELVLRVQEMIITRVVDAAPHHTYSKIDHIVGSKALLSKCKRTEIITNCLSDHSAIKLELRIKNLTQSRSTTWKLNNLLLNDYWVHNEMKAEIKMFFETNENKDTTYQNLWDAFKAVCRGKFIALNAYKRKQERSKIDTLTSQLKELEKQEQTHSKASRRQEITKIRAELKEIETQKTLQKINESRSWFFERINKIDRPLARLIKKKREKNQIDAIKNDKGDITTDPTEIQTTIREYYKQLYANKLENLEEMDTFLDTYTLPRLNQEEVESLNRPITGSEIVAIINSLPTKKSPGPDGFTAEFYQRYKEELVPFLLKLFQSIEKEGILPNSFYEASIILIPKPGRDTTKKENFRPISLMNIDAKILNKILANRIQQHIKKLIHHDQVGFIPGMQGWFNIRKSINVIQHINRAKDKNHMIISIDAEKAFDKIQQPFMLKTLNKLGIDGTYVKIIRAIYDKPTANIILNGQKLEAFPLKTGTRQGCPLSPLLFNIVLEVLARAIRQEKEIKGIQLGKEEVKLSLFADDMIVYLENPIVSAQNLLKLISNFSKVSGYKINVQKSQAFLYTNNRQTESQIMGELPFTIASKRIKYLGIQLTRDVKDLFKENYKPLLKEIKEDTNKWKNIPCSWVGRINIVKMAILPKVIYRFNAIPIKLPMTFFTELEKTTLKFIWNQKRARIAKSILSQKNKAGGITLPDFKLYYKATVTKTAWYWYQNRDIDQWNRTEPSEIMPHIYNYLIFDKPEKNKQWGKDSLFNKWCWENWLAICRKLKLDPFLTPYTKINSRWIKDLNVRPKTIKTLEENLGITIQDIGVGKDFMSKTPKVMATKAKIDKWDLIKLKSFCTAKETTIRVNRQPTTWEKIFATYSSDKGLISRIYNELKQIYKKKTNNPIKKWAKDMNRHFSKEDIYAAKKHMKKCSSSLAIREMQIKTTMRYHLTPVRMAIIQKSGNNRDNTKEALLCNNLVAEVLEAKQAQKLQGKAAVLSLSKIYAITETNAETPNRKMKIKLKRPMTKLHPSIQMLV

SEQ ID NO: 48003 - protein, 853 aa, Homo sapiens
  DOMAIN (149)..(194): kw TRANSCRIPTASE REVERSE II ORF2 domain identified by eMATRIX, accession number DM01354N, p-value=1.000e-40, raw score of 13.17
  DOMAIN (233)..(432): Reverse transcriptase domain identified by PFam, accession name rvt, E-value=4.8e-31, PFam score of 116.6
MKAEIKTFFETNKNKDTTYQNLWDTFKAVCRGKFIALNAHKRKQERSKIDTLTSQLKELEKQEQTYSKASRRQEITKIRAELKEIETQKTLQKINESRSWFFEKINKIDRPLTRLIKKKREKNQIDSIKNDKGDITTDPTEIQTTIREYYKHLYANKLENLEEMDKFLDTYTLPRLNQEEVESLNRPITGSEIEAIINSLPTKKSPGPDGFTAEFYQRYKEELVPFLLKLFQSIEKEGILPNSFYEASIILITKPGRHTTKKNFRPISLMNIGAKILNKILANRIQQHIKKLIHHDQVGFIPGMQGWFNIRKSINVIQHINITNDKNHMIISIDAENAFDKIQQRFMLKTLNKLGIDGMYLKIIRAIYDKPTATQNLLKLIGNFSKVSGYKINVQKSQAFLYTNNSQTESQIMTELPFTIASKRIKYLGIQLTRDVKDLFKENYKPLLSEIKEDTKKGKNIPCSWVGRINIMKMDILPKVIYTFNAIPIKLPMTFFTEVEKTTLKFICNQKRARIAKSFLSQKNKAGGITPPDFKLYYKATVTKTACYWYQNRDIDQWNRTEPSEIMQHIYNYLIFDKPDKNKQWGKDSLFNKWCWENWLAICRKLKLDSFLTPYTKINSRWIKDLNIRPKTIKTLEENLGSIIQDIGMGKDFMSKTPKAMATKAIIDEWDLIKLKSFCTAKETTMRVNRQPTEWEKIFATYSSDIGLISRIYNELKQIYKKKTNNPIQKWPKDMNRHFSKEDIYAANRHMKKCSSSLAIREMQIKTTMRYHLTPVRMAIIKKSGNNRCWRGCGEIGTLLHCWWDCKLVQPLWKSVWRFLRDLELEIPFDPAIPLLGIHPKDYKSCCYNDTCT

SEQ ID NO: 48004 - protein, 1680 aa, Homo sapiens
  DOMAIN (252)..(293): kw TRANSCRIPTASE REVERSE II ORF2 domain identified by eMATRIX, accession number DM01354I, p-value=1.000e-40, raw score of 15.55
  DOMAIN (8)..(238): AP endonuclease family 1 domain identified by PFam, accession name AP_endonucleas1, E-value=1.6e-91, PFam score of 317.5
MTGSNSHITILTLNINGLNSAIKRHRLASWIKSQDPSVCCIQETHLMCRDTHRLKIKGWRKIYQANGKQKKAGVAILVSDKTDFKPTKIKRDKEGHYIMVKGSIQQEELTILNIYAPNTGAPRFIKQVLSDLQRDLDSHTLIMGDFNTPLSILDRSTRQKVNKDTQELNSALHQADLIDIYRTLHPKSTEYTFFSAPHHTYSKIDHIVGSKALLSKCKRTEIITNYLSDHSAIKLELRIKNLTQSRSTTWKLNNLLLNDYWVHNEMKAEIKMFFETNENKDTTYQNLWDAFKAVCRGKFIALNAYKRKQERSKIDTLTSQLKELEKQEQTHSKASRRQEITKIRAELKEIETQKTLQKINESRSWFFERINKIDRPLARLIKKKREKNQIDTIKNDKGDITTDPTEIQTTIREYYKHLYANKLENLEEMDTFLDTYTLPRLKQEEVESLNGPITGSEIVAIINSLPTKKSPGPDGFTAEFYQRYKEELVPFLLKLFQSIEKEGILPNSFYEASIILIPKPGRDTTKKENFRPISLMNIDAKILNKILANRIQQHIKKLIHHDQVGFIPGMQGWFNIRKSINVIQHINRAKDKNHMIISIDAEKAFDKIQQPFMLKTLNKLGIDGTYFKIIRAIYDKPTANIILNGQKLEAFPLKTGTRQGCPLSPLLFNIVLEVLARAIRQEKEIKGIQLGKEEVKLSLFADDMIVYLENPIVSAQNLLKLISNFSKVSGYKINVQKSQAFLYTNNRQTESQIMGELPFTIASKRIKYLGIQLTRDVKDLFKENYKPLLKEIKEDTNKWKNIPCSWVGRINIVKMAILPKVIYRFNAIPIKLPMTFFTELEKTTLKFIWNQKRARIAKSILSQKNKAGGITLPYFKLYYKATVTKTAWYWYQNRDIDQWNRTEPSEIMPHIYNYLIFDKPEKNKQWEKDSLFNKWCWDNWLAICRKLKLDPFLAPYTKINSRWIKDLNVRPKTIKTLEENLGNTIQDIGMGKDFISKTPKAMATKAKIDKWDLIKLKSFCTAKETTITVNRQPTEWEKIFATYSSDKGLISRIYNELKQIYKKKKNNKPTKKWAKDMNRHFSKEDIYAAKKHMKKCSSSLAIREMQIKTTMRYHLTPVRMAIIKKSGNNRDMDEAGSRHSQQTNIGTENQTPHVLTHKWELNNENTQMQRGEQHTLEPVGGEGELRKDNHSTKNDQYDNRHFQLAVGNGLMAKTFMVSFFYKASAYVVPTGELPDLDIIQLKQFGNALSHLTVGTSVTQIQNLNTMGIIGSQDSRDQLATLKCQGKGDPKYQCDPPVKVGANGGQIINEVLAQVQLTVGPKTNGYWRMTVDYHKLNQDVTPIVAAVPDVVSLLEVISTLQKDFYCFFLLQNITLVHYIDGIMLTESSEQEVADTLDLLTSIRGLMECLIHHHGIPHSIASDQGPHFMAKELWEWAHAHGIHWSYHIPHHPEAAGLIEWRNDLLKSQLQHQLGDNALQGWGKVLQKAMYALNQHPIYVTVFPIARIHKSWNQGVEVEVASLTITPSDPLAKFLLSVPTTLHSPGLEVLVPAGGMLPPGDTTIPLNWKLILPPGHFGLLLPLSQQAKKAVTVLARVIDPDYQDEISLLLHNGGKEEYAWNSGDPLGVSWYYHALSLRSMRTTTVQSRQDYKWPRYLRNEDLGHVTREKKHNLLRCLLKAKGI

SEQ ID NO: 48005 - protein, 124 aa, Homo sapiens
MLSRILASRNRMRFAVEVVRAVRERVGNDFIIIYRLSMLDLVEDGGTFAETVELAQAVEAAGATIINTGIGWHEARIPTIATPVPRGAFSWVTRKLKGHVSLPLVTTNRINDPQVADDILSSTH

SEQ ID NO: 48006 - protein, 50 aa, Homo sapiens
CGTFHVSRFISLLHRSQEVAIKGDMPRPSLLKAPLISRIPYDKRCSGSQF

SEQ ID NO: 48007 - protein, 192 aa, Homo sapiens
HWKMTLARRCWLPRCGLSRWGWAGCLLVVQASGGGVTLLVVCLITSSSSPASSCSLSITLIGPIAWLPMPCLIIGKRICSSFIMWLESSSCSMVSFCLTSVSARRTCRKPASNFAGKTSLIWPSTRLPPALITMKPCRKSQACLDQIFVGKVTSCLVNPRACHETKMPILPAVQKKNLAVVETFRSSLMKSL

SEQ ID NO: 48008 - protein, 108 aa, Homo sapiens
AGIAEPSLGSGVQITKPFAPLAARLSIAFNVFSPSGTAILITSNPKSFPALSANFHSVWNHGSSGCFTRKPSFRFSAIADCDITAARPMAARALVNLCMVLSVFSPRM

SEQ ID NO: 48009 - protein, 382 aa, Homo sapiens
  DOMAIN (343)..(375): Bacterial-type phytoene dehydrogenase proteins domain identified by eMATRIX, accession number BL00982A, p-value=6.538e- 15, raw score of 18.41
  DOMAIN (342)..(377): Pyridine nucleotide-disulphide oxidoredu domain identified by PFam, accession name pyr_redox, E-value=4e-08, PFam score of 30.2
ISDLAGDCQRQRQISCGSLLNRTRQRYCSRQSALAVKQRRCTKGPVPEYLFEMLIGHRLRIAITAENAGGFIEDKQRTLSRCHIFPGIFQRSLPERQHRFLTPINRSKCQLIRTLLSTLCTPKCGPGFKHRIVLCKSSDLSKTFPAAQCPEESKPPVRIRCSLGRCPPPRWVTGDWGQSTLEIPDLVEDGGTFAETVELAQAIEAAGATIINTGIGWHEARIPTIATPVPRGAFSWVTRKLKGHVSLPLVTTNRINDPQVADDILSRGDADMVSMARPFLADAELLSKAQSGRADEINTCIGCNQACLDQIFVGKVTSCLVNPRACHETKMPILPAVQKKNLAVVGAGPAGLAFAINAAARGHQVTLFDAHSEIGGQFNIAK

SEQ ID NO: 48010 - protein, 257 aa, Homo sapiens
  DOMAIN (32)..(254): Shikimate / quinate 5-dehydrogenase domain identified by PFam, accession name Shikimate_DH, E-value=1.9e-81, PFam score of 284.0
SGTCRNCFDRGNIMETYAVFGNPIAHSKSPFIHQQFAQQLNIAHPYGRVLAPINDFINTLNAFFSAGGKGANVTVPFKEEAFARADELTERAALAGAVNTLMRLEDGRLLGDNTDGVGLLSDLERLSFIRPGLRILLIGAGGASRGVLLPLLSLDCAVTITNRTVSRAEELAKLFAHTGSIQALSMDELEGHEFDLIINATSSGISGDIPAIPSSLIHPGIYCYDMFYQKGKTPLTEGLVKPSAFVHFILITKSFSK

SEQ ID NO: 48011 - protein, 287 aa, Homo sapiens
  DOMAIN (192)..(223): Ribulose-phosphate 3-epimerase family proteins domain identified by eMATRIX, accession number BL01085D, p-value=8.313e- 25, raw score of 16.55
  DOMAIN (74)..(268): Ribulose-phosphate 3 epimerase family domain identified by PFam, accession name Ribul_P_3_epim, E-value=7.6e-103, PFam score of 355.1
AVLRREMRQMEGAWLGSDLVDQGKERLNRLGFFETVDTDTQRVPGSPDQVDVVYKIVSLGGRLFYNDFQADDADLSDYTNKKIEIIDSHADYFHIDIMDGHFVPNLTLSPFFVSQVKKLATKPLDCHLMVTRPQDYIAQLARAGADFITLHPETINGQAFRLIDEIRRHDMKVGLILNPETPVEAMKYYIHKADKITVMTVDPGFAGQPFIPEMLDKLAELKAWREREGLEYEIEVDGSCNQATYEKLMAAGADVFIVGTSGLFNHAENIDEAWRVMTAQILAAKSE

SEQ ID NO: 48012 - protein, 297 aa, Homo sapiens
  DOMAIN (137)..(168): Ribulose-phosphate 3-epimerase family proteins domain identified by eMATRIX, accession number BL01085D, p-value=8.313e- 25, raw score of 16.55
  DOMAIN (18)..(212): Ribulose-phosphate 3 epimerase family domain identified by PFam, accession name Ribul_P_3_epim, E-value=7.6e-103, PFam score of 355.1
CVSLGGRLFYNDFQADDADLSDYTNKKIEIIDSHADYFHIDIMDGHFVPNLTLSPFFVSQVKKLATKPLDCHLMVTRPQDYIAQLARAGADFITLHPETINGQAFRLIDEIRRHDMKVGLILNPETPVEAMKYYIHKADKITVMTVDPGFAGQPFIPEMLDKLAELKAWREREGLEYEIEVDGSCNQATYEKLMAAGADVFIVGTSGLFNHAENIDEAWRVMTAQILAAKSEQWGQQVYAIVQNTDQAQAVMPYGPKCLYVLAQNDALQRTENYAESIAALLKDKHPAMLLLAATKR

SEQ ID NO: 48013 - protein, 639 aa, Homo sapiens
  DOMAIN (8)..(63): Bacterial surface antigen domain identified by eMATRIX, accession number PF01103A, p-value=1.000e-40, raw score of 15.56
  DOMAIN (4)..(639): Bacterial surface antigen domain identified by PFam, accession name Bac_surface_Ag, E-value=0, PFam score of 1077.3
RWRCKKLLIASLLFSSATVYGAEGFVVKDIHFEGLQRVAVGAALLSMPVRTGDTVNDEDISNTIRALFATGNFEDVRVLRDGDTLLCLVQERPNIASITFSGNKSVKDDMLKQTLEAYGVRVGESLDRTPIADIEKGLEDFYYSVGKYSASVKAVVTPLPRNRVDLKLVFQAGVSAEIQQINIVGNHAFTTDELISHFQLRDEVPWWNVVGDRKYQKQKLAGDLETLRSYYLDRGYARFNIDSTQVSLTPDKKGIYVTVNITEGDQSKLSGVVVSGNLAGHSAEIEQLTKIEPGELYNGTKVTKMEDDIKKLLGRYGYAYPRVQSMPEINDADKTVKLRVNVDAGNRFYVRKIRFEGNDTSKDAVLRREMRQMESAWLGNDLVDQGKERLDRLGFFETVDTDTQRVPGSPDQVDVVYKVKERTTGSFNFGIGYGTESGVSFQAGVQQDNWLGTGYAVGINGTKNDYQTYAELSVTNPYFTVDGVSLGGRLFYNDFQADDADLSDYTNKSYGTDVTLGFPINEYNSLRAGLGYVHNSLSNMQPQVAMWRYLYSMGEHPSTSDQDNSFKTDDFTFNYACPYNKLDRGYFPTDGSRVNLTGKVTIPGSDNEYYKVTLDTATYVPIDDDHKWVVLGRTRWGYG

SEQ ID NO: 48014 - protein, 119 aa, Homo sapiens
  DOMAIN (19)..(44): mutT domain proteins domain identified by eMATRIX, accession number BL00893, p-value=1.273e-17, raw score of 18.99
  DOMAIN (1)..(43): Bacterial  mutT  protein domain identified by PFam, accession name mutT, E-value=3e-13, PFam score of 51.3
DSILLAQHTRHRNGVHTVLAGFVEVGETLEQAVAREVMEESGIKVKNLRYVTSQPWPFPQSLMTAFMAEYDSGDIVIDPKELLEANWYRYDDLPLLPPPGTVARRLIEDTVAMCRAEYE

SEQ ID NO: 48015 - protein, 134 aa, Homo sapiens
PRSASFSAWLAFCSTTKDSHPLLAQLLDGVENLDHRQHLLFTAGHGARPLIRAHADVEENCDHPFILIVHPSIHPIIYLSIHPSTIRGERLMTQIPLIKHFLAGVTGLKLTQQMRFCENVCLPLIATAGNRQTH

SEQ ID NO: 48016 - protein, 319 aa, Homo sapiens
  DOMAIN (184)..(311): Domain of unknown function DUF81 domain identified by PFam, accession name DUF81, E-value=2.9e-37, PFam score of 134.3
PSRAGHLPPKIKSSMAGTTPCLSIMVRQRKPLVPAPLYQGMRDGKIVRFEEITRTPLEVQDCLLASALALGLALMGNAQAVTTIPFWHSMEGELGKEVDSLAQRFNAENPDYKIVPTYKGNYEQNLSAGIAAFRTGNAPTYFAGHIMQACGVALSATIYFIRRKVVSLSDQKLNIAMTFVGSMSGALLVQYVQADVLRQILPILVICIGLYFLLMPKLGEEDRQRRMYGLPFALIAGGCVGFYDGFFGPAAGSFYALAFVTLCGFNLAKATAHAKLLNATSNIGGLLLFILGGKVIWATGFVMLVGQFLGAPHGVPTCV

SEQ ID NO: 48017 - protein, 386 aa, Homo sapiens
  DOMAIN (116)..(139): DELTA CRYSTALLIN SIGNATURE domain identified by eMATRIX, accession number PR00145A, p-value=6.143e-27, raw score of 12.59
  DOMAIN (22)..(193): Lyase domain identified by PFam, accession name lyase_1, E- value=1.8e-63, PFam score of 224.3
VAVCADGFRLLLRQQNGPLTLPAIHADQRFKPFNDSLRFDYRLAEQDIVGSVAWSKALVTVGVLTAEEQAQLEEALNVLLEDVRARPQQILESDAEDIHSWVEGKLIDKVGQLGKKLHTGRSRNDQVATDLKLWCKDTVSELLTANRQLQSALVETAQNYQDAVMPGYTHLQRAQPVTFAHWCLAYIEMLARDGIRTRGVILSPFTRAIYPLKKRVHPPQWAPRRKITTCKSEAGPTSRKGRITLRKRPRLRSHVTQVFNFNSALFHHFPRDCLLEGFAHFDESGKYCMDTVTMAGMLGEEDRIIATDGNNNAGGDLRVVTLTAMAAQHRPFGFARIHFMPAVTTVFMRSVKLRQLYASSGQLKQPNIEINDLTYRPHIVTPLLLY

SEQ ID NO: 48018 - protein, 59 aa, Homo sapiens
PRPCLTTRWLRRSGLIGPTGSVRTVGPPAQIGLLSIWGWSSASSVQSLKLDTECLGSMR

SEQ ID NO: 48019 - protein, 19 aa, Homo sapiens
  misc_feature (1)...(19): Xaa = X or * as defined in Table 2
RALRXSLQDGSAKRGASVS

SEQ ID NO: 48020 - protein, 366 aa, Homo sapiens
  DOMAIN (38)..(178): ABC transporter domain identified by PFam, accession name ABC_tran, E-value=0.018, PFam score of -36.7
MMKLINRSKQSPIGRRACDVALAAHLQTYGDYGRSKMKETYTVKVEGVKVWVEVVNRKASYVATAMTGMRRLRSLPGQLDGGLVEGCVVHESEPTNTDDQGLMGRAGHPPKDRASVADPCHDIWILDEPFTAIDVNGVDRLTQRMAQHTEQGGIVILTTHQPLNVAETFRHSAEIANPLWFFLIVITLFPLSIGPEPQLLARIAPGIIWVAALLSSLLALERLFRDDLQDGSLEQLMLLPLPLPAVVLAKVMAHWMVTGLPLLILSPLVAMLLGMDVYGWQVMALTLLLGTPTLGFLGAPGVALTVGLKRGGVLLSILVLPLTIPLLIFATAAMDAASMHLPVDGICCKPAYASVRSRHAANALIT

SEQ ID NO: 48021 - protein, 122 aa, Homo sapiens
MAWLATQENGEQVEHEETPYPLVDDLERFYGHLEQTLLATGFIRENHPGQVMNKLRRLFTRARPESQELNILRGILASIEQQNKGPTVNRTVGRIRRSRRIRQPLPDATRNASYQAYSEQKP

SEQ ID NO: 48022 - protein, 97 aa, Homo sapiens
  misc_feature (1)...(97): Xaa = X or * as defined in Table 2
GEGENYCDSVVMTWVAIXQNWQCHCCSLRCASLRQGXRQDVTDTRGETIKREMARNWVWRARVINAGFSRGSLLRGPISDHRRKRLSASIRQFYPRP

SEQ ID NO: 48023 - protein, 169 aa, Homo sapiens
HRWCVVLGFVRRQRLWTCRLLLLLTCPQRTIGASGPASDALSPIPQAIQVQVMSPLRLTNTGKQVTHITVPSGQGTRPRVRTKHDGDHIPICVTAYQGKVLLVGQSPNAELSARAKQIAMGVDGANEVYNEIRQGQPIGLGEASNDTWITTKVRSQLLTSDLVKSSNVK

SEQ ID NO: 48024 - protein, 1325 aa, Homo sapiens
  DOMAIN (775)..(793): Xanthine/uracil permeases family proteins domain identified by eMATRIX, accession number BL01116A, p-value=4.656e-16, raw score of 8.86
  DOMAIN (215)..(448): Copper amine oxidase domain identified by PFam, accession name Cu_amine_oxid, E-value=5.3e-127, PFam score of 435.3
MGCYDDIEQADAFVLWGANMAEMHPILWSRITNRRLSNQNVTVAVLSTYQHRSFELADNGIIFTPQSDLVILNYIANYIIQNNAINQDFFSKHVNLRKGATDIGYGLRPTHPLEKAAKNPGSDASEPMSFEDYKAFVAEYTLEKTAEMTGVPKDQLEQLAQLYADPNKKVISYWTMGFNQHTRGVWANNLVYNLHLLTGKISQPGCDGAYVKVKPGAQTAIVNGQPLALQVPVVMKDNKAWVSDTFINDVFQSGLDQTFQVEKRPHPLNALTADEIKQAVEIVKASADFKPNTRFTEISLLPPDKEAVWAFALENKPVDQPRKADVIMLDGKHIIEAVVDLQNNKLLSWQPIKDAHGMVLLDDFASVQNIINNSEEFAAAVKKRGITDAKKVITTPLTVGYFDGQDGLKQDARLLKVISYLDVGDGNYWAHPIENLVAVVDLEQKKIVTRSATLLPSSSVTPCITDKDWQTTSFGRLSSCISRNAFTVSELALMADKSAASGNTAEGRTSAMAENRIVLSIRSILASKTPSKFCIWGREYQLQPNVEWDAHYLHGDGWLGEWQCVSHSDDSLCLVYEHRSGVYHYRVSQAFHLTADTLTVTLSVTNQGAETLPFGTGWHPYFPLSPQTRIQAQASGYWLEREQWLADRPPLPQTLFAACQHLLAMFVAVITPALLICQALGLPAQDTQHIISMSLFASGVASIIQIKAWGPVGSGLLSIQGTSFNFVAPLIMGGTALKTGGADVPTMMAALFGTLMLASCTEMVISRVLHLARRIITPLVSGVVVMIIGLSLIQVGLTSIGGGYAAMSDNTFGVSSVPCLPGDDGTVHLAFGFALIVGIPVGMIAGITRHKWQDNLINAIALLGFSIPVFWLALLLTLFCSLTLGRFDLLYEVKPITGFALIDAWLSDSPWRDEMIMSAIRHMILPVITLSVAPTTEVIRLMRISTIEVYDQNYVKAAATRGLSRFTILRRHVLHNALPPVIPRLGLQFSTMLTLAMITEMVFSWPGLKNRIPRSNACAPFCATGSACPGLPRRLTSVIPTVNSDLQASRKTEFLFRNTFNITVVTAAAIDGQKIGDALPGEKWVMPDVTMRTVLLKNLNQRQIVVTLHQAIVNMEKIPLLRAGRLIHSYNPGLACETYMAQVYGWMTVGLLLTAFVAWYAANSAAVMELLFTNRVFLIGLIIAQLALVIVLSAMIQKLSAGVTTMLFMLYSALTGLTLSSIFIVYTAASIASTFVVTAGMFGAMSLYGYTTKRDLSGFGNMLFMALIGIVLASLVNFWLKSEALMWAVTYIGVIVFVGLTAYDTQKLKNMGEQIDTRDTYPACC

SEQ ID NO: 48025 - protein, 602 aa, Homo sapiens
  DOMAIN (312)..(344): ABC transporters family proteins domain identified by eMATRIX, accession number BL00211B, p-value=5.800e-26, raw score of 13.37
  DOMAIN (202)..(385): ABC transporter domain identified by PFam, accession name ABC_tran, E-value=1.3e-52, PFam score of 188.2
  misc_feature (1)...(602): Xaa = X or * as defined in Table 2
MLIAEGLMTAKNITVITNSLPAAFALSENKDITLVVCGGTVRHKTRSMHGSIAERSLQDINADLMFVGADGIDAVNGITTFNEGYSISGAMVTAANKVIAVLDSSKFNRRGFNQVLPIEKIDIIITDDAVSEVDKLALQKTRDTSLVYVLSLADFFRTASTIGERDGTQVEMILFAGFVYLVISLSASLLVLTDCSTEVKKGEVVVVCGPSGSGKSTLIKTVNGLEPVQQGEITVDGIVVNDKKTDLAKLRSRVGMVFQHFELFPHLSIIENLTLAQVKVLKRDKAPAREKALKLLERVGLSAHANKFPAHYSGGQQQRVAIARALCMDPIAMLFDEPTSALDPEMINEVLDVMVELANEGMTMMVVTHEMGFAVKWRIGSTQQGAQLHCNRWLHVRKHLLVAYYNLVGIKPGKESYMRLNEKALDDFCQSLVDYLSAGHFSIYERILHKLEGNGQLARAAKIWPQLEANTQQIMDYYDSSLETAIDHDNYLEFQQVLSDIGEALEAAFVLEDKLILLVLDAARXNLLKLKVIIMIDGGFQTGIVVIHNLLSIGFELRPNLRGARELPVAFQLMKNALINTEMSGRQVIDQALTKIIKGFFV

SEQ ID NO: 48026 - protein, 85 aa, Homo sapiens
  misc_feature (1)...(85): Xaa = X or * as defined in Table 2
DALRVASGNGCYSALLPLFCRLLXAESAXVPVQRPCGETLMRSSVVCLGGTAPECSSLGCAEKSGRSWPRKVAHTLGSWTVPRES

SEQ ID NO: 48027 - protein, 477 aa, Homo sapiens
  DOMAIN (243)..(291): Tetrahydrofolate dehydrogenase/cyclohydrolase proteins domain identified by eMATRIX, accession number BL00766C, p-value=1.000e- 40, raw score of 25.86
  DOMAIN (217)..(337): Tetrahydrofolate dehydrogenase/cyclohydro domain identified by PFam, accession name THF_DHG_CYH, E-value=1.1e-69, PFam score of 245.0
MRMQPQEQQTARLIVASLLSHCRDLLGSQIQTASRSQALFEAIRDYIDERYASALTRESVAQAFYISPNYLSHLFQKTGAIGFNEYLNHTRLEHAKTLLKGYDLKVKEVAHACGFVDSNYFCRLFRKNTERSPSEYRRHRRLHDNRICQFKTPTDNPENPDRYLTFRRIDKETSSLPKKVAPSCKRLSVSRSSPKPSISIRRCMRLMLIEGRRSSFIHPDKDVDGFHPYNVGRLCQRAPRLRPCTPRGIVTLLERYNIDTFGLNAVVIGASNIVGRPMSMELLLAGCTTTVTHRFTKNLRHHVENADLLIVAVGKPGFIPGDWIKEGAIVMMSGINRGVATDASCFPLVPFANRVSGNRFVWQGREYQLQPNVEWDAHYLHGDGWLGEWQCVSHSDDSLCLVYEHRSGVYHYRAQASGYWLEREQWLAGEFCEQLPQELDFNQPAPLPRQWVNNGFAGWNGQARIEQPQEGYAITLD

SEQ ID NO: 48028 - protein, 60 aa, Homo sapiens
  misc_feature (1)...(60): Xaa = X or * as defined in Table 2
PASSLVMRXCLNRIASRAHQPAVRAYXSASAPGIAXKENAXGXRLHHRXNPAGKPDPGLL

SEQ ID NO: 48029 - protein, 609 aa, Homo sapiens
  DOMAIN (334)..(344): DDC / GAD / HDC / TyrDC pyridoxal-phosphate attachment site proteins domain identified by eMATRIX, accession number BL00392, p- value=5.263e-10, raw score of 7.79
  DOMAIN (262)..(436): Pyridoxal-dependent decarboxylase conse domain identified by PFam, accession name pyridoxal_deC, E-value=3.8e-85, PFam score of 295.1
MSSLSQAASSVEKRTNARYWIVVMLFIVTSFNYGDRATLSIAGSEMAKHIGLDPVGMGYVFSAFSWAYVIGQIPGFVDIFSGFGIIVALFTLRFLVGLAEAPSFPGQSRIVGDWFPAQDRGTGVSIFTPFILRKGDLRPIWVVILMAGQLHALMSTLEDTPFSNKAGMRLRRWINAAVMRLNPLACLATRSNQVNWLLLTGNISVYPVGSSEPTRRRSTPINSTPHFNKTILPINARYSPTLPSSDGTRWTTRIDDKPTVGHKFARYWDVELREIPMRPGQLFMDPKRMIEACDENTIGVVPTFGVTYTGNYEFPQPLHDALDKFQADTGIDIDMHIDAASGGFLAPFVAPDIVWDFRLPRVKSISASGHKFGLAPLGCGWVIWRDEEALPQELVFNVDYLGGQIGTFAINFSRPAGQVIAQYYEFLRLGREGYTKSTQPARGSPPANNCQAQPETPDRAVIHPTDGYESAATIIVLSPPTASDSDPAHRDQRVVKTDAWSVVPGSTSEYPRRYKAEWFCQPFAVLPAILAWSAALWRYQPRARRRKADYGCRALNSLKNELTTPYHAFHMGNVLTISGEWLRVHMKGHSVSVLMSPVFVFLMKTKCNV

SEQ ID NO: 48030 - protein, 426 aa, Homo sapiens
  DOMAIN (79)..(91): ABC transporters family proteins domain identified by eMATRIX, accession number BL00211A, p-value=2.385e-11, raw score of 12.23
  DOMAIN (74)..(207): ABC transporter domain identified by PFam, accession name ABC_tran, E-value=0.0044, PFam score of -28.9
MVPLLLTQGIVLFQDTSLVYVLSLADFFRTASTIGERDGTHVEMILFAGFVYFGISLSASLLVLTDCSTEVKKGEVVVVCGPSGSGKSTLIKTVNGLKPVQQGEITVDGIVVNDKKTDLAKLRSRVGMIPLKSKLSLKGVRFTYLGGKPGKLAVPVPLGYVVMAQDLQLAGCEYSFSAIKIAAGGQFLPVIGAILNITDNVIYDQEIEFTFGRLSFCGLPRWPKGEVERIWACGYREEVPVIAVNNRCLMRRVMRLIRPTVNRTVGRIRRSRRIRQPLPDATRNASYQAYSVQNPRADMAFTPHPTTGRYAVTAMLDVALNSEAGPVPLADISERQGISLSYLEQLFSRLRKNGLVSSVRGPGGGYLLGKDASSIAVGEVISAVDESVDATRCQAKGGWQGGDKCLDHALWRDLSDRLTGFLTTLL

SEQ ID NO: 48031 - protein, 325 aa, Homo sapiens
  DOMAIN (12)..(29): GNTR BACTERIAL REGULATORY PROTEIN HTH SIGNATURE domain identified by eMATRIX, accession number PR00035B, p-value=2.184e- 11, raw score of 12.93
  DOMAIN (142)..(238): Pyridoxal-dependent decarboxylase conse domain identified by PFam, accession name pyridoxal_deC, E-value=9.1e-36, PFam score of 125.7
  misc_feature (1)...(325): Xaa = X or * as defined in Table 2
XRELGELLGIKRMTLRQALLNLEAESKIFRKDRKGWFVTQPRFNYSPELSASFQRAAIEQGREPSWGFTEKNRTSDIPETLAPLIAVTPSTELYRITGWGALEGHKEFKMDKKQVTDLRSELLDSRFGAKSISTIAESKRFPLHEMRDDVAFQIINDELYLDGNARQNLATFCQTWDDENVHKLMDLSINKNWIDKEEYPLSAAIDLRCVNMVADLWHAPAPKNGQAVGTNTIGSSEALGFAVDKDGITITVDDDGPGVSPEDREQIFRPFYRTDEARDRESGGTGLGLAIVETAIQQHRGWVKAEDSPLGGLRLVIWLPLYKRS

SEQ ID NO: 48032 - protein, 177 aa, Homo sapiens
  misc_feature (1)...(177): Xaa = X or * as defined in Table 2
SAGDAXDWFWHGGVAGGNGXRSPXAVTSSALKCIHRALVRAWLLRMKKVXATCAXCVTMRLKCCIKXCPDNSLRMVQLFFPDPWHKARHNKRRIVQVPFAELVKSKLQLGGVFHMATDWEPYAEHMLEVMSSIDGYKNLSESNDYVPRPASRPVTKFEQRGHRLGHGVWDLMFERVK

SEQ ID NO: 48033 - protein, 93 aa, Homo sapiens
  misc_feature (1)...(93): Xaa = X or * as defined in Table 2
CAFQRNIWHAKLNASPTPVFVPXXLLASLTIPMKPAAMPGGKMDWWRVCRASASRPCQKXSLCQTPASVNTLLTVTAVCCASMASTTTRLWKI

SEQ ID NO: 48034 - protein, 1042 aa, Homo sapiens
  DOMAIN (326)..(357): OXIDOREDUCTASE NAD REDUCTASE P H PROTEIN domain identified by eMATRIX, accession number PD01757, p-value=6.464e-29, raw score of 18.57
  DOMAIN (406)..(649): Pyridoxal-dependent decarboxylase conse domain identified by PFam, accession name pyridoxal_deC, E-value=3.8e-118, PFam score of 405.9
MWYVGATCADLVGYWLYDVEGGWRWMLGSAAIPCLLILIGRFELPESPRWLLRKGRVKECEEMMIKLFGEPVAFDEEQPQQTRFRDLFNRRHFPFVLFVAAIWTCQVIPMFAIYTFGPQIVGLLGLGVGKNAALGNVVISLFFMLGCIPPMLWLNTAGRRPLLIGSFAMMTLALAVLGLIPDMGIWLVVMAFAVYAFFSGGPGNLQWLYPNELFPTDIRASAVGVIMSLSRIGTIVSTWALPIFINNYGISNTMLMGAGISLFGLLISVAFAPETRGMSLAQTSNMTIRGQRMGTLEGVEIRSLYQLYPDFNIDIAAEQEALSRADLIVWQHPMQWYSIPPLLKLWIDKVFSHGWAYGHGGTALHGKHLLWAVTTGGGESHFEIGAHPGFDVLSQPLSYWPFHLCKNWIDKEEYPQSAAIDLRCVNMVADLWHAPAPKNGQAVGTNTIGSSEACMLGGMAMKWRWRKRMEAAGKPTDKPNLVCGPVQICWHKFARYWDVELREIPMRPGQLFMDPKRMIEACDENTIGVVPTFGVTYTGNYEFPQPLHDALDKFQADTGIDIDMHIDAASGGFLAPFVAPDIVWDFRLPRVKSISASGHKFGLAPLGCGWVIWRDEEALPQELVFNVDYLGGQIGTFAINFSRPGGIDIGAKYEIYKLINQLVQQGIAVIVISSELPEVLGLSDRVLVMHEGKLKANLINHNLTQEQVFVMIAAIIAIMLFFTWTTDGAYLSARNVSNLLRQTAITGILAPCVMYPGPLCGMLSDIDRFSILGQCGCQRYLFRWHSSAVLLGAIYRQFSITIVSAMALSVLVALILTPALCATLLKPVSAEHHENKGGFFALTTTPTASAKILGSTGRYLLIYALIVAGMVVLFLRLPSSFLPEEDQGVFLTMIQLPAGATQERTQKVLDQVTDYYLKNEKANVESVFTVNGFSFSGQAQNAGMAFVSLKPWEERNGDENSAEAVIHRAKMELGKIRDGFVIPFNMPAIVELGTATGFDFEVNDPAGLGPDALNKARNQLLGMAGKIWQLSSVCLIAGRTGR

SEQ ID NO: 48035 - protein, 1231 aa, Homo sapiens
  DOMAIN (914)..(946): ABC transporters family proteins domain identified by eMATRIX, accession number BL00211B, p-value=1.000e-29, raw score of 13.37
  DOMAIN (949)..(1135): Pyridoxal-dependent decarboxylase conse domain identified by PFam, accession name pyridoxal_deC, E-value=1.9e-86, PFam score of 299.6
INGGTLTVTLSVTNQGAETLPFGTGWHPYFPLSPQTRIQAQASGYWLEREQWLAGEFCEQLPQELDFNQPAPLPRQWVNNGFAGWNGQARIEQPQEGYAIIMETTPPAPCYFIFVSDPAFDKGYAFDFFCLEPMSHAPDDHHRPEGGDLIALAPGESTTSEMSLRAYNDTNRRSDKAFTPHPTCFPSNQNNSASPPTITPDTATIAPVSHKAFAGNALRSIISDGKLTAGSVINNASAGAVPIPASIIVCTIGISAAVGMTNKHPATAIDTTHIMLLSTAPSAWGNNQTRAAPNTSLLAAYRFLIDSRDTETDSRLDGLSDAFSVFRCHSIMNCVSVCPKGLNPTRAIGHIKSMLLQLPPNVEKFAGAYLIQFALFQPLTHNRLMFFGAFADFLHADQTFPGQITAAVKGQFVRRRLRFFAIISPSRTLSSILRDQDDDHVDQISSPDVMPDAVCIIANRRHHFKHMFRIRGKSSCAPRDDRKVRVMAADYENQLDEFSLDAPIVAHENYQWANYVRGVVKHLQLRNNSFGGVDMVISGNVPQGAGPTVNRTVGRIRRSRRIRQPLPDATRNASYQAYSEQNRLQCTEPQGGYGVHAASDNRDKRHDKKMALKVKYPTKSVKGEFEVKEDMKLTSKGRYAVTAMLDGALNSEAGPHFELFPHLSIIENLTLAQVKVLKRDKAPAREKALKLLERVGLSAHANKFPAQLSGGQQQRVAIARALCMDPIAMLFDEPTSALDPEMINEVLDVMVELANEGMTMMVVTHEMGFARKVANRVIFMDEEHQQEHNARQSVDATRHETLRSEYIALCSKDFLEKPSEGSIVVNGQTINLVRDKDGQLKVADKNQLRLLRTRLTMVFQHFNLWSHMTVLENVMEAPIQVLGLSKQEARERAVKYLAKVGIDERAQGKYPVHLSGGQQQRVSIARALAMEPEVLLFDEPTSALDPELTWDDENVHKLMDLSINKNWIDKEEYPQSAAIDLRCVNMVADLWHAPAPKNGQAVGTNTIGSSEACMLGGMAMKWRWRKRMEAAGKPTDKPNLVCGPVQICWHKFARYWDVELREIPMRPGQLFMDPKRMIEACDENTIGVVPTFGVTYTGNYEFPQPLHDALDKFQADTGIDIDMHIDAASGGFLAPSSPGYRWDFRLRLCGDRPATLLLESADIDSKDDLKSLLLVDSALRITALGDTVTIQALSGNGEALLALLDNALPAGVESEQSPNCRVLRFPPSTAG

SEQ ID NO: 48036 - protein, 725 aa, Homo sapiens
MDEAPDADDLMLAETPRTKMLPKPPRSVESEIGRTTDPVRMYMREMGTVELLTREGEIDIAKRIEDGINQVQCSVAEYPEAITYLLEQYDRVEAEEARLSDLITGFVDPNAEEDLAPTATHVGSELSQEDLDDDEDEDEEDGDDDSADDDNSIDPELAREKFAELRAQYVVTRDTIKAKGRSHATAQEEILKLSEVFKQFRLVPKQFDYLVNSMRVMMDRVRTQERLIMKLCVEQCKMPRENFITLFTATNQRYLVLRGNAMTSRGNRGDSAILRGLLDAINILNPHAEVDVMSRYPVSSSWLLNRPVMGDPLFLQMKQHNSAAGVVGRVKKVLRRRYQHQVLLSRVTDTGKLRNIAIAQGFTDFVRLLSGYDAIIQVGGSFFVDLYGVPQFEHALCTFMAKKPLFMIGHSVGPFQDEQFNQLANYVFGHCDALILRESVSFDLMKRSNITTAKVEHGVDTAWLRIPKHGDMTHMAVALFRVQPGLRIACPHRRGCSVCPGGVTSGHPVNPLLGAKVLPGETDIALPGPLPFILSRTYSSYRTKTLAPVGSLGPGWKMPADIRLQLRDNTLILSDNGGRSLYFEHLFPGEDGYSRSESLWLVRGGVAKLDEGHRLAALWHALPEELRLSPHRYLATNSPHGPWWLLGWCERVPEADEVLPAPLPPYRVLTGLVDPFGRHRRFNANAGEFTANHGVTMCWRTSAVLHQPGQRPAQHSADDVASILR

SEQ ID NO: 48037 - protein, 57 aa, Homo sapiens
FKEQKRGNKMFVEALKRQNPALISAALSLWQQGKIAPDSWVIDVDQILENVTPPASI

SEQ ID NO: 48038 - protein, 189 aa, Homo sapiens
  misc_feature (1)...(189): Xaa = X or * as defined in Table 2
MRTSCGSFIKRRVMRRIASGMVAENRAVXXPSGICAIMVSTSSMKPMRSISSASSRTRPLSLAEVQSATFQVVQQTARSTDNDLRPLTQGAXLHVITLAAVQSIPHLRRACVXRNPSLLQQPVPPVRGSVPAPESVVLSAQDQDSATEVKRMLQFFRSPSGPYPERRGHSADVEYTLPELEMVFRNPDR

SEQ ID NO: 48039 - protein, 495 aa, Homo sapiens
MRLMPQVSAWSKGSAVGFDHGSWGVLIKMYPDADIPMVQLSIDSSKPAAWHFEMGRKLAALRDSLQIPLQRTSGTDRYNDIAARSRQQATNAIGFRQRDHFHIFSPERGRQRFDVVPVINRQIEPQFRLVHAIHQQPAVWHLSYRHPRFELRVHFKRIGMIVEKNIEQLAGVNNTSFIQSVISAERDQIGISLIFCLHIFNTKYTLRLIWYDQITLRIQETDMLYKGDTLYLDWLRQLHARNRRVQKGKKRKINYTKSVTEGGRIQSVLLKVYSDDDFLYPGQESGFALNVLPEIVAEIQNLPVLHLAGLTHFPCLLWDEAVGKVLPTPNLHTLIQARDQLAKSGIALEQLNAPSATSCTSLPLLAQYGVTHAEPGHALTGTIPANQQGDQPERIAMLWLSEISHHFRGDSYCYGGGYYRRGHAQHALVFTPENQKITETNLKTVDDSSIDYTLPLAGEFPIFVTRSDVVLVSGIHRGEPEIVGRYDSLGNSLGA

SEQ ID NO: 48040 - protein, 447 aa, Homo sapiens
KADPRAKLGKQMHIIAAVFSPDAYRALVFSKSTGGLVRRQTIQSGNIERTMKLTIPEVELPNAELLGKRRLEKFAAKVQQQLESSDLDQYRALLSKIHGFTDDPRFLQATEAVVLTRVDDYPMQQLLRAVVDKHALLAHQQRVEQKRGNKMFVEALKRQNPALISAALSLWQQGKIAPDSWVIDVDQILENGKRLIETARLYGIELYLMTKQFGRNPWLAEKLLALGYSGIVAVDYKEARVMRRAGLPVAHQGHLVQIPCHQVADAVEQGTDVITVFTLDKAREVSAAAVKAGRIQSVLLKVYSDDDFLYPGQESGFALKVLPEIVAEIQNLPGLHLAGLTHFPCLLWDEAVGKVLPTPNLHTLIQARDQLAKSGIALEQLNAPSATSCTSLPLLAQYGVTHAEPGHALTGTIPANQQGDQPERIAMLWLSEISHHSEDPPDCSVGS

SEQ ID NO: 48041 - protein, 129 aa, Homo sapiens
  DOMAIN (93)..(118): Universal stress protein family domain identified by eMATRIX, accession number PF00582A, p-value=7.000e-17, raw score of 19.95
  DOMAIN (39)..(129): Universal stress protein family domain identified by PFam, accession name Usp, E-value=1.6e-24, PFam score of 94.9
KELNMAYKHIGVAISGNEEDALLVNKALELARHNDAHRTLIHIDDGLSELYPGIYFPATEDILQLLKNKSDNKLYKLTKNIQWPKTKLRIERGEMPETLLEIMQKEQCDLLVCGHHQSFINRLMPAYRG

SEQ ID NO: 48042 - protein, 152 aa, Homo sapiens
  misc_feature (1)...(152): Xaa = X or * as defined in Table 2
MQQLEEALKQLAQGSGSSQALTQVRRWDSACQKLPDANLALISVAGEYAAELANQALDRNLNVMMFSDNVTLEDEIQLKTRAREKGLLVMGPDCWYVDDCRHTAGFCXRDAGRQYWRHWRFRYRDSGAVFADCAGRGGNYSRDWPWRARPQP

SEQ ID NO: 48043 - protein, 89 aa, Homo sapiens
  misc_feature (1)...(89): Xaa = X or * as defined in Table 2
QAGKYYGGAVFAPVFGAIMGGVLRTMNIEPDALTSVDKNEFVINHGEGTGGRSXFARPSCSVGARRTFASTARDDTRQPCGCGGRSLCS

SEQ ID NO: 48044 - protein, 479 aa, Homo sapiens
  DOMAIN (7)..(72): Iron-containing alcohol dehydrogenases domain identified by PFam, accession name Fe-ADH, E-value=1.3e-16, PFam score of 61.1
MLWHKLPKSIYFRRGSLPIALDEVITDGHKRALIVTDRFLVNNGYADQINSVLKAAGGETEIFFQRKTDPTLDIGRKVQNWQTPSTRRDYRAGLERGERRAEAQNWDECLMKGELLSQPDPLICQLLRHQSELLAEAHSEICRLTDLDQEQCITFHMAATKKKPCSSDISMASKYLAQYEIRVNQPSLDSRKVPIESCYLRKSATKVKYHPLFEIRKVNTDAFPKIIRNAIYEVEQHTQAPQGLIAASALGVISLACQNRIDVCRLNNLRGPVSLFLMTLAESGERKSTVDKLLMKPLYQLEEDLFEKYTHDLTAWKNDETIFNIEKKALMSKLKSNIRPTRLSSVISRSAREGASGTHGARRSRKLRSATCPLALINHKFIFIARCQRIRLDVHGTQYAAHDGTKDRRGNGAAVVFTRLRIVDNNNQREARLTRRRNACGISNIFIDVATVRPDLFRGTGFNGDTIAFNRRLHAAADR

SEQ ID NO: 48045 - protein, 34 aa, Homo sapiens
  misc_feature (1)...(34): Xaa = X or * as defined in Table 2
XAASAAVVXYFIGNATTGKGRTFTGFDEDIGGFH

SEQ ID NO: 48046 - protein, 82 aa, Homo sapiens
IFQEQIMDHLPMPKFGPLAGLFFVFSGIEIAGPFAGQMFAEWGAEVIWIENVAWADTIRVQPNYPQLSRRNLHALSLNIFKD

SEQ ID NO: 48047 - protein, 311 aa, Homo sapiens
  DOMAIN (46)..(65): ASPARAGINASE/GLUTAMINASE FAMILY SIGNATURE domain identified by eMATRIX, accession number PR00139B, p-value=7.429e-21, raw score of 10.35
  DOMAIN (1)..(293): Asparaginase domain identified by PFam, accession name Asparaginase, E-value=1.8e-15, PFam score of 64.9
MPEFHRPEMPDFTIHEYTPLMDSSDMTPEDWQHIAEDIKAHYDDYDGFVILHGTDTMAYTASALSFMLENLGKPVIVTGSQIPLAELRSDGQINLLNALYVAANYPINEVTLFFNNRLYRGNRTTKAHQRCQRVGIRRIKAHMHVIDAKTELIAQYAGRTNVSGNHRFFDDTVGNATRLGDDIQHFTFFTENKAVIRAIFKHQLPVTGIFQPVRNLVIHQLCFGFDGGGKEFDIIFNGAISGERHAACQYRADFIGAHDDVETRMMSNYTLKRELAEFAASLVQPGETIFIENGSSNALLALEHIDSRGLK

SEQ ID NO: 48048 - protein, 616 aa, Homo sapiens
  DOMAIN (208)..(245): Ribonuclease II family proteins domain identified by eMATRIX, accession number BL01175B, p-value=6.667e-27, raw score of 28.81
  DOMAIN (98)..(451): RNB-like proteins domain identified by PFam, accession name RNB, E-value=1.1e-33, PFam score of 125.4
MAATMRLSDRGPDDAVNRRISLLVLNKQAEQAILHENAESQNEPVSALEKPEVAPQPNRGDSVSMDISDFYQTFFDEADELLADMEQHLLVLQPEVPDAEQLNAIFRAAHSIKGGAGTFGFSVLQETTHLMENLLDEAREDIMQEQLDAYKQSQEPDAASFYYICQALRQLALEAKGETPSAVTRLSVVAKSEPQDEQSRTAWIAEGSKLDKAAKIRAFTNYLPGFNIPMLPRELSDDLCSLRANEVRPVLACRMTLSADGTIEDNIEFFAATIESKAKLVYDQPESEAIAEQVRLLAQICQRRGEWRHNHALVFKDRPDYRFILGEKGEVLDNRRRALVALANRIVEEAMIAANICAARVLRDKLGFGIYNVHMGLDPANADAPAAMMKHPGLHVDAEQVLTLGRFLHTAKPATACREERCMSEPLIVGIRHHSPACARLVKSLIESQRPRYVLIEGPADFNDRVDELFLAHQLPVAIYSYCQYQDGAAPGRGAWTPFAEFSPEWQALQAARRIQAQTYFIDLPCWAQSEEEDDSPDTQDESQALLLRATRMDNSDTLWDHLFEDKASKLHYPLRWRTILPNCGATPSAMRSIVSAKPLWPAGLDGRCSKIMATC

SEQ ID NO: 48049 - protein, 458 aa, Homo sapiens
DQVSDGLENSGDWQPKSKAISEQVRLIAQICQPRAEWRHTHALVFKDRPDSRFIFGEKGEVLDIVAEPRRIANRIVEEAMIAVNICAARVLRDKLGLGIYNEHMGFDPANTDALAALLKTHGLHVDAEEVLTLDGFCKLRRELDAQPTGFLDSSIRRFQSFAEISTEPGPHFGLASYPIWIENVAWADTIRVQPNYPQLSRRNLHALSLNIFKDEGREAFLKLMETTDIFIEASKGPAFARRGITDEVLWQHNPKLVIAHLSGFGQYGTEEYTNLPAYNTIAQAFSGYLIQNGDVDQPMPAFPYTADYFSGLTATTAALAALHKVRETGKGESIDIAMYEVMLRMGQYFMMDYFNGGEMCPRMSKGKDPYYAGCGLYKCADGYIVMELQREQVMNNFNLHTPTRILFGKGAIAGLREQIPHDARVLITYGGRQREKNRRSRSSSGCPERHGRAGIWRY

SEQ ID NO: 48050 - protein, 157 aa, Homo sapiens
YRNPGRSLKQFRNKYPVSFLYASNGRDLFILKSVMRLKQMSKVFICAAIPDELATREEGAVAVATAIEAGDERRARAKFHWQFLEHYPAAQDCAYKFIVCEDKPGIPRPALDSWDAEYMQENRWDEESASFVPVETESDPMNVTFDKLAPEVQNAVM

SEQ ID NO: 48051 - protein, 97 aa, Homo sapiens
CPPVPEKKRGRPLGGLALNRPATPYQGSRLTDKQLQVSGMQICQKSAPASGHNQTERYLMATGLVHRLDKSLQEDEPRCKAAPTATSLRRSYPVVKE

SEQ ID NO: 48052 - protein, 125 aa, Homo sapiens
  DOMAIN (51)..(70): ATP-DEPENDENT CLP PROTEASE ATP-BINDING SUBUNIT SIGNATURE domain identified by eMATRIX, accession number PR00300A, p-value= 9.239e-10, raw score of 9.56
IHLPAFQSLPMSYQVLARKWRPQTFADVVGQEHVLTALANGLSLGRIHHAYLFSGTRGVGKTSIARLLDHDPYFEDDCSSSMGMRPGVIRGFGSVIKRRCGFRSQIRTGCAGAVGVRFNAVLFLR

SEQ ID NO: 48053 - protein, 1090 aa, Homo sapiens
  DOMAIN (549)..(604): Fimbrial biogenesis outer membrane usher protein domain identified by eMATRIX, accession number BL01151, p-value=1.000e-40, raw score of 29.09
  DOMAIN (441)..(658): Fimbrial Usher proteins domain identified by PFam, accession name Usher, E-value=1.5e-130, PFam score of 447.1
MKRHLLQDIRRSAYVYRVDCGGCNACEIEIFAAITPVFDAERFGIKVVSSPRHADILLFTGAVTRAMRMPALRAYESAPDHKICVSYGACGVGGGIFHDLYSVWGGSDTIVPIDVWIPGCPPTPAATIHGFAVALGLLQQKIHAVDYRDPTGGLVPPHIAAGINLNFWPAGRFFRRLGAFFIRRTFKGNKLYSTVFREYLGELFSRGYSVEYFVEGGRSRTERLLDPKTVNKIAALMHDATEAYCQDIHEPLKRLLPDYKRMEEKIDAVIREKYGLPPVMSTPVKYADLIMLATERRDLGLDDGSFWPVLEGIPATEMFNVIPLAPGHAYGMFMERFNDLSDNAKSTGGWSIMTTFTNKELIKEIKERISSLEVRDDIERRAYEIALVSLEVEPDEREAYELFMEKRFGDLVDRRRAKNGDNEYMAWDMTLGWIIWQQRAVPQIAIKSNARGYVPPERWDEGINALLLGYSFSGANSIHSSADSDSGDSYFLNLNSGVNLGPWRLRNNSTWSRSSGQTAEWKNLSSYLQRAVMPLKGELTVGDDYTAGDFFDSVSFRGVQLASDDNMLPDSLKGFAPVVRGIAKSNAQITIKQNGYTIYQTYVSPGAFEISDLYSTSSSGDLLVEIKEADGSVNSYSVPFSSVPLLQRQGRIKYAVTITAGMQAACRKVGIGYLYEKGHDDAIAIVLALASPELDVKAITSSAGNQTPEKTLRNVLRMLTLLNRTDIPVAGGAVKPLMRELIIADNVHGESGLDGPALPEPTFAPQNCTAVELMAKTLRESAEPVTIVSTGPQTNVALLLNSHPELHSKIARIVIMGGAMGLGNWTPAAEFNIYVDPEAAEIVFQSGIPVVMAGLDVTHKAQIHVEDTERFRAIATHYHTLNHRQKELPMKLFYKPGACSLASHITLRESGKDFTLVSVDLMKKRLENGDDYFAVNPKGQVPALLLDDGTLLTEGVAIMQYLADSVPDRQLLAPVNSISRYKTIEWLNYIATELHKGFTPLFRPDTPEEYKPTVRAQLEKKLQYVNEALKDEHWICGQRFTIADAYLFTVLRWAYAVKLNLEGLEHIAAFMQRMAERPEVQDALSAEGLK

SEQ ID NO: 48054 - protein, 1006 aa, Homo sapiens
  DOMAIN (7)..(54): kw TRANSCRIPTASE REVERSE II ORF2 domain identified by eMATRIX, accession number DM01354V, p-value=1.000e-40, raw score of 12.97
  DOMAIN (791)..(1006): Dihydrodipicolinate synthetase family domain identified by PFam, accession name DHDPS, E-value=7.7e-95, PFam score of 328.5
MSELPFTIASKRIKYLGIQLTRDVKDLFKENYKPLLKEIKEDTNKWKYIPCSWLGRINIVKMAILAKVIYRFNAIPIKLPMTFFKELEKTTLKFIWNQKGAASRSNPEPKNKLEDHITNSTIYRLSTKSCSVSGLKQTLLAESEALTSYSHRVFSAWDFGLCGDVHVRLRQRIILYELKGQVPALLLDDGTLLTEGVAIMQYLADSVPDRQLLAPVNSISRYKTIEWLNYIATELHKELKFSFHWSTTSHKGLGMKLVGSYTSPFVRKLSILLLEKGITFEFINELPYNADNGVAQFNPLGKVPVLVTEEGECWFDSPIIAEYIELMNVAPAMLPRDPLESLRVRKIEALADGIMDAGLVSVREQARPAAQQSEDELLRQREKINRSLDVLEGSGGCPASNAIHGHINDFLVRTGLRSGILQIRLSKLLNDMNVSTLVEMKRTTSDKGMFLHEEILLVLAIDSVAQHSIPHIFHPEIYSEQTRNGTELTEKLRHACGAAVECVISDTCIAGMAEAAACEEKFSSGDVARRVTDKTHDRSDNTAANNGHNDEGRTIFGVLAEILNAQREDCWEIFMSTMQSGIVKWFDDGKGFGFITPADGGKDLFAHHSEIKNNGGFRTLAEGAQPAPCAGFVLSGPAVDNPPLMSALPVAAPKALTAYRPFWAKRFGPAPFLPMSRAEMEQLGWDSCDVIIVTGDAYVDHPSFGGSSRVTTAASCTAPKAKTGRAPVDPNIDELKQYHNPRYGRVPVGGNYYAETKMSTYEKETEVMKKFSGIIPPVSSTFHRDGTLDKKAMREVADFLINKGVDGLFYLGTGGEFSQMNTAQRMALAEEAVTIVDGRVPVLIGVGSPSTDEAVKLAQHAQAYGADGIVAINPYYWKVAPRNLDDYYQQIARSVTLPVILYNFPDLTGQDLTPETVTRLALQNENIVGIKDTIDSVGHLRTMINTVKSVRPSFSVFCGYDDHLLNTMLLGGDGAITASANFAPELSVGIYRAWREGDSGDRCDAE

SEQ ID NO: 48055 - protein, 235 aa, Homo sapiens
  DOMAIN (112)..(138): Elongation factor 1 gamma chain profile domain identified by eMATRIX, accession number BL50040B, p-value=6.850e-10, raw score of 13.65
  DOMAIN (66)..(150): Glutathione S-transferases domain identified by PFam, accession name GST, E-value=1.3e-20, PFam score of 71.1
MAVPDNVTDPLMSLEVYGRVFLQIGVATAVIAVLMLLTAPKLHRMTQDDAADKAAKAAVAQKELPMKLFYKPGACSLASHITLRESGKDFTLVSVDLMKKRLENGDDYFSVNPKGQVPALLLDDGTLLTEGVAIMQYLCDSVPDRQLLAPGSKQKPGSRERCEKVRPPPQIPGPPSKSLSAGQTLDNGSSTFSSSFSPTSPVAGSPRPGTPAPAPESEPARYAPSRRGRMTNGYR

SEQ ID NO: 48056 - protein, 82 aa, Homo sapiens
  misc_feature (1)...(82): Xaa = X or * as defined in Table 2
FLAQWLPELPLSRHLRQCTWCRRHRNRWXVRSLHRCWLADCRCPELRIRSHDLXSLAQRSLYDRTRTPDRRQLRTVLHWLLC

SEQ ID NO: 48057 - protein, 703 aa, Homo sapiens
  DOMAIN (112)..(128): Prokaryotic molybdopterin oxidoreductases proteins domain identified by eMATRIX, accession number BL00551A, p-value=3.182e- 10, raw score of 17.41
  DOMAIN (378)..(657): HlyD family secretion protein domain identified by PFam, accession name HlyD, E-value=8.3e-12, PFam score of 52.7
MSKLLERFRYFKQKGETFADGHGQVMHSNRDWEDSYRQRWQFDKIVRSTHGVNCTGSCSWKIYVKNGLVTWEIQQTDYPRTRPDLPNHEPRGCPRGASYSWYLYSANRLKYPLIRKRLIELWREALKQHSDPAADNDLIARFQSFTNQPFIANRLTGNDRARFNLTFIVNNQHATAITTTGTFLPEWSTTFIITLILQSKVQAIDLTKEAIVTVGCNTISTTVHEVVSASIGIATKFWQHIGPCFYVIYDTVVTTIVESRTTEYSPDVVTGLITRITTPDGRASAFYNNHHSQLTSATGPDGLEIRREYDEWGRLIQETAPDGDITRYRYDNPHSDLPCATEDATGSRKTMTWSRYGQLLSFTDCSGYVTRYDHDRFGQVTAVHREEGLSQYRAYDSRGQLIAVKDTQGHETRYEYNAAATYDSAKVICKAPAAANIAQLTVNRYQKLLGTQYISKQEYDQALADAQQANAAVTAAKAAVETAQINLLTPKAPLRLAVALSNVTEGALVQNGQATALATVQQLDPIYVDVTQSSNDFLRLKQELANGTLKQENCKAKVSLITSDGIKFPQDGTLEFSDVTVDQTTGSITLRAIFPNPDHTLLPGNIDEWNKLAGFETFNHRIPLIISEIGTRWVLQTWMQQHNTAGRRLIPGSSVSGNPRPLSMPRSRQGFEWFYALLFQYRMVRTKQQRRNGMAIAVKPFHR

SEQ ID NO: 48058 - protein, 205 aa, Homo sapiens
  misc_feature (1)...(205): Xaa = X or * as defined in Table 2
YHDDRNQPDAGNPSNADSGPQIXQATGSPRRLVRRRWKRVNRLLAGKLAIVIDDFGYRPHNENQVLAMPSAISVAVLPDSPHAREMATKAHNSGHEVLIHLPMAPLSKQTAGEKYATPGDEQRRNXAHYSXWVNNVPYAVGINNHMGSKMTSNLFGMQKVMQALERYNLYFLDSVTIGNTQAMRAAQGTGVKVITRKVFLDGFAK

SEQ ID NO: 48059 - protein, 678 aa, Homo sapiens
  DOMAIN (268)..(281): RNA methyltransferase trmA family proteins domain identified by eMATRIX, accession number BL01230B, p-value=3.000e-14, raw score of 11.62
MIRHIRHGMRMWRMLIRRASVASGNRSGVRCWMRRNRLIQPTGGALHSGVGLIRRASVDQATGLGVRCRMRRNRLSDLRGGALHSGVGLIRAPASHQATGSDVGCRMRVTALSNLRGGALHSDAPASHQATGLGVDVGCGVTALSDLRGGALTAVGAALHSGVGLIRRASVHQATGSGVGCRMRRDRLSDLRGAALHGSLANYPLSIFSSAFQTRYFTSTCLAYTPRSAACCCNAASSIAQIRGQCGCEPKNGSACVEWLDVQPEDRVLDLFCGMGNFTLPLATQAASVVGVEGVPALVEKGQQNARLNGLQNVTFYHENLEEDVTKQPWAKNGFDKVLLDPARAVPIRGVGAQGEAARDITVSVPVTGELDDGTAKQSFSTAARRGIISDRFVEEFCSFGAKDGCSTPGSARRTREGHWQLAGRVVIANNTSAIALPPSVPANQVPESHQPADLLSPAPADAVHQHQHQRFTGGFQRRIKSRWLCGIVISVRLELPTTTSIVSPSAPLHQSSLAANRIDFDRFFILIQEIDNALSLVTFAPLAYSTLPFHRRQFLIPWPNHRNGGRFFPAVTFETGFSATPSFRAPSALLRCSAFAWYHRSIFRPKWLYGSLNNPHIIFNRQYMAGSIVQLCHRHFADLINPGRLGSDLLILTRKRNKDPLKILNAENVLTQTTSWT

SEQ ID NO: 48060 - protein, 73 aa, Homo sapiens
  misc_feature (1)...(73): Xaa = X or * as defined in Table 2
TISVLWLMLSLNTSKKRLAXTGSIGFFGLHSFTPRNGLRGASGTAFFGGVEVSTCGSFSKLLAFTSVMSGGRL

SEQ ID NO: 48061 - protein, 1194 aa, Homo sapiens
  DOMAIN (487)..(506): BACTERIAL SENSOR PROTEIN C-TERMINAL SIGNATURE domain identified by eMATRIX, accession number PR00344C, p-value=4.094e- 13, raw score of 12.49
  DOMAIN (1)..(774): Transposase domain identified by PFam, accession name Transposase_15, E-value=3.7e-165, PFam score of 562.1
  misc_feature (1)...(1194): Xaa = X or * as defined in Table 2
MLRIHCMQHWYNLSDGAMEDALYEIASMRLFARLSLDSALPDRTTIMNFRHLLEQHQLARQLFKTINRWLAEAGVMMTQGTLVDATIIEAPSSTKNKEQQRDPEMHQTKKGNQWHFGMKAHIGVDAKSGLTHSLVTTAANEHDLNQLGNLLHGEEQFVSADAGYQGAPQREELAEVDVDWLIAERPGKVRTLKQHPRKNRTGISIAYMTGSIRARVEHPFRIIKRQFGFVTARYRGCLNTITNGDVFPLATWFGGPYSERNHWQDMLKLEAAAQRFGDGHLNERIHFDEGSSFERLGVAFNQMADNINALIASKKQLIDGIAHELRTPLVRLRYRLEMSDNLSAAESQALNRDISQLEALIEELLTYARLDRPQNELHLSEPDLPLWLSTHLADIQAVTPDKTVRIKTLVQGHYAALDMRLMERVLDNLLNNALRYCHSTVETSLLLSGNRATLIVEDDGPGIAPENREHIFEPFVRLDPSRDRSNGGCGLGLAIVHSIALAMDHFSAQFAAHSQHNYTAGYPAMCQQRFRLSSYGHSPLVHVYIVPCTSYRDQGARLIRKRKQPPCWALRHSSWRGVNYSFCQGHLPVVNPHAIIQQHHPTHGSLQLVIVKSSISXISATCWSSINWPANCSRPSIAGWPKQASXXLKAPWYDATIIEAPSSTKNKEQQRDPEMHQTKKGNQWHFGMKAHIGVDAKSGLTHSLVTTAANEHDLNQLGNLLHGEEQFVSADAGYQGAPQREELAEVDVDWLIAERPGKVRTLKQHPRKNRTGISIAYMTGSIRARVEHPFRIIKRQFGFVTARYRGCLNTITNGDVFPLATWFGGPYSERNHWQDMLKLEAAAQRFGDGHLNERIHFDEGSSFERLGVAFNQMADNINALIASKKQLIDGIAHELRTPLVRLRYRLEMSDNLSAAESQALNRDISQLEALIEELLTYARLDRPQNELHLSEPDLPLWLSTHLADIQAVTPDKTVRIKTLVQGHYAALDMRLMERVLDNLLNNALRYCHSTVETSLLLSGNRATLIVEDDGPGIAPENREHIFEPFVRLDPSRDRSNGGCGLGLAIVHSIALAMDHFSAQFAAHSQHNYTAGYPAMCQQRFRLSSYGHSPLVHVYIVPCTSYRDQGARLIRKRKQPPCWALRHSSWRGVNYSFCQGHLPVVNPHAIIQQHHPTHGSLQLVIVKSSISTQIQCTFP

SEQ ID NO: 48062 - protein, 423 aa, Homo sapiens
  DOMAIN (112)..(128): Prokaryotic molybdopterin oxidoreductases proteins domain identified by eMATRIX, accession number BL00551A, p-value=3.182e- 10, raw score of 17.41
MSKLLDRFRYFKQKGETFADGHGQVMHSNRDWEDSYRQRWQFDKIVRSTHGVNCTGSCSWKIYVKNGLVTWEIQQTDYPRTRPDLPNHEPRGCPRGASYSWYLYSANRLKYPLIRKRLIELWREALKQHSDPVLAWASIMNDPQKCLSYKQVRGRGGFIRSNWQELNQLIAAANVWTIKTYGPDRVAGFSPIPAMSMVSYAAGTRYLSLLGGTCLSFYDWYCDLPPASPMTWGEQTDVPESADWYNSSYIIAWGSNVPQTRTPDAHFFTEVRYKGTKTIAITPDYSEVAKLCDQWLAPKQGTDSALAMAMGHVILKEFHLDNPSDYFINYCRRYSDMPMLVMLEPRDDGSYVPGRMIRASDLVDGLGESNNPQWKTVAVIPEFSEADFIELIKVIGIDPQETHPFNQRVRFVRRFLKHAFIER

SEQ ID NO: 48063 - protein, 662 aa, Homo sapiens
  DOMAIN (167)..(183): Prokaryotic molybdopterin oxidoreductases proteins domain identified by eMATRIX, accession number BL00551A, p-value=5.034e- 11, raw score of 17.41
  DOMAIN (1)..(107): Frataxin-like domain identified by PFam, accession name Frataxin_Cyay, E-value=1.8e-70, PFam score of 247.5
MNDSEFHRLADQLWLTIEERLDDWDGDSDIDCEINGGVLTITFENGSKIIINRQEPLHQVWLATKQGGYHFDLKGDEWICDRSGETFWDLLEQAATQQAGETITGFRVYTLQLNAQLRLGFLRLPYSVNLATEYKSLTHYTKVPEATNPSLESSVDVKLSANRLKYPMMRKRLMKMWREAKALHSDPVEAWASIIEDADKAKSFKQARGRGGFVRSSWQEVNELIAASNVYTIKNYGPDRVAGFSPIPAMSMVSYASGARYLSLIGGTCLSFYDWYCDLPPASPQTWGEQTDVPESADWYNSSYIIAWGSNVPQTRTPDAHFFTEVRYKGTKTVAVTPDYAEIAKLCDLWLAPKQGTDAAMALAMGHVMLREFHLDNPSQYFTDYVRRYTDMPMLVMLEERDGYYAAGRMLRAADLVDALGQENNPEWKTVAFNTNGEMVAPNGSIGFRWGEKGKWNLESIARIENPHFRSVKHNPVLVRQLPVKNLTLVDGNTCPVVSVYDLVLANYGLDRGLEDENSAKDYAEIKPYTPAWGEQITRVPRQYIETIAREFADTAHKTHGRSMIILGAGVNHWYHMDMNYRGMINMLIFCGCVGQSGGGWAHYVGQEKLRPQTGWLPLAFALDWNRPPRQMNSTSFFYNHSSQWRYEKVSAQELLSPLADA

SEQ ID NO: 48064 - protein, 624 aa, Homo sapiens
  DOMAIN (222)..(238): Prokaryotic molybdopterin oxidoreductases proteins domain identified by eMATRIX, accession number BL00551A, p-value=3.182e- 10, raw score of 17.41
RRNGSTIAVIADGVVHTLRSEIGQIPGQTIKPLFVAICACYQTTSLRPAQPDVGEFMRLSGIVHPPDGNTLNSAIRTQQCISRCPCFTKANHPIFSGNKAQNRIPSAILIMYVDSVVLTTSAGKGETFADGHGQVMHSNRDWEDSYRQRWQFDKIVRSTHGVNCTGSCSWKIYVKNGLVTWEIQQTDYPRTRPDLPNHEPRGCPRGASYSWYLYSANRLKYPLIRKRLIELWREALKQHSDPVLAWASIMNDPQKCLSYKQVRGRGGFIRSNWQELNQLIAAANVWTIRTYGPDRVAGFSPIPAMSMVSYAAGTRYLSLLGGTCISFYDCYIIAWGSNVPQTRTPDAHFFTEVRYKGTKTVAVTPDYAEIAKLCDLWLAPKQGTDAAMALAMGHVMLREFHLDNPSQYFTDYVRRYTDMPMLVMLEERDGYYAAGRMLRAADLVDALGQENNPEWKTVAFNTNGEMVAPNGSIGFRWGEKGKWNLEQRDGKTGEETELQLSLLAVKIRFFSHLYYQIGLTVFQHTLDIGAIVSFDDDEWCGNVQRIFNRIMLLSIVLRPRTIPFHDLAQIFRQFRNVKCLWCAFEGAQLMRIQPAIVMVKTIHRERLNSGQFRVLLREIFPEGG

SEQ ID NO: 48065 - protein, 622 aa, Homo sapiens
  DOMAIN (271)..(290): NADH-Ubiquinone/plastoquinone (complex I) various chains. domain identified by eMATRIX, accession number PF00361B, p-value= 2.875e-16, raw score of 14.16
  DOMAIN (231)..(391): NADH-Ubiquinone/plastoquinone (complex I) domain identified by PFam, accession name oxidored_q1, E-value=1.3e-39, PFam score of 143.9
MGRTCFHNSITTILNGRNDRRIGRRTTDTAFFQLFNQRCFTETGWRLGKVLGWSFNVADSYRAVLIANSTGTFTQTVLRTNASGNFRQGVGLVRKLDGGVDVSGFHQMNPLMILVKIIKLRQQDVRTRYFTRLSLPILPRITLKTTQQLNVGLHALLDCKTLTLTELGRNLPTKARTKHNIKRIDRLLGNRHLHKERLAVYRWHASFICSGNTMPIVLVDWSDIREQKRLMVVVMRLFLYAPVGDSEAIRVVLAIIAFASIIFGNLMALSQTNIKRLLGYSSISHLGYLLVALIACKPARCRWKRSLGAFGVVSLMSSPYRGPDADSLFSYRGLFWHRPILAAVMTVMMLSLAGIPMTLGFIGKFYVLAVGVQAHLWWLVGAVVVGSAIGLYYYLRVACERGLLAKDLSSSIVIRTSAASDARMGGATLPAMSNSGSVTRDYGTMPVVVVAEHFGADDERLARALMLSHLSAIYIHTQLPRLSALCAATTAAMGAAAGMAWLVDGRYETISMAISSMIGDVSGMICDGASNSCAMKVSTSASAAWKAVLMALDDTAVTGNEGIVAHDVEQSIANLCALASHSMQQTDRQIIEILEKHGQISARFWGSCRMRCWRILSGIRVV

SEQ ID NO: 48066 - protein, 285 aa, Homo sapiens
  DOMAIN (63)..(75): 4Fe-4S ferredoxins iron-sulfur binding region proteins. domain identified by eMATRIX, accession number BL00198, p-value= 4.316e-12, raw score of 10.43
  DOMAIN (56)..(119): 4Fe-4S binding domain identified by PFam, accession name fer4, E-value=0.00014, PFam score of 27.4
ADEQIVERTKFIDKTTRQRLMLNTHRADHFAAAQTFLSAGFIFYPNGAISHVDDSIQVNQQKCIGCKSCVVACPFGTMQIVLTPVAAGKVKATAHKCDLCAGPETGPACVENCPPDALQLVTDVALSGMAKSRRLRTARQEHQPWHASTAAQEMPVMSKVEQMQATPARGEPDKLAIEARKTGFDEIYLPFRADQAQREASRCLKCGEHSVCEWTCPLHNHIPQWIELVKAGNIDAAVELSHQTNTLPEITGRVCPQDRLCEGACTIRDEHGALSRRRRADECRQ

SEQ ID NO: 48067 - protein, 432 aa, Homo sapiens
  DOMAIN (202)..(249): Initiation factor 2 proteins domain identified by eMATRIX, accession number BL01176E, p-value=1.000e-40, raw score of 25.77
  DOMAIN (142)..(329): Elongation factor Tu family domain identified by PFam, accession name GTP_EFTU, E-value=1.6e-16, PFam score of 58.3
FITAQTRPTVVAANGEGTYLNVFTVHFHATDKVLKDDNLLALFDIPKILWPRLRLSWQRRRHHMITGRMDFCYRLSIMVGGDEAVFERVKPLFELLGKNITLVGGNGDGQTCKVANQIIVALNIEAEPTYLRKRVPVSMNCLDAILLQAEVLELKAVRKGMASGAVIESFLDKGRGPVATVLVREGTLHKGDIVLCGFEYGRVRAMRNELGQEVLEAGPSIPVEILGLSGVPAAGDEVTVVRDEKKAREVALYRQGKFREVKLARQQKSKLENMFANMTEGEVHEVNIVLKADVQGSVEAISDSLLKLSTDEVKVKIIGSGVGGITETDATLAAASNAILEGLFTLTLDRYRIEGSVLGKSRIVIDTVVCHAELIITILHPRIGVYPGVDMLAFKVAVGIVVTIDGNFNIVRFPDLITGFGIAWYSKRLNRF

SEQ ID NO: 48068 - protein, 417 aa, Homo sapiens
  DOMAIN (389)..(417): Indole-3-glycerol phosphate synthase proteins domain identified by eMATRIX, accession number BL00614B, p-value=3.571e- 25, raw score of 22.42
  DOMAIN (319)..(417): Indole-3-glycerol phosphate synthases domain identified by PFam, accession name IGPS, E-value=6.9e-53, PFam score of 186.9
CRIITQLHGNKVRIAEQNVIHSPLPQGQQWTRELEMVVENGCYTLKDTFDDTTILGWMIQTEDTEYSLPQPEIAGELLKISGARLENKGQFDGKWLDEKDPLQNAYVQANGQVINQDPYHYYTITESAEQELIKATNELHLMYLHATDKVLKDDNLLALFDIPKILWPRLRLSWQRRRHHMITGRMDFCMDERGLKVYEYNADSASCHTEAGLILERWAEQGYKGNGFNTITRDSSEEEILWLETMLNRALHISTEPSAEWRPLLVEKIKQFQKSHHLKTDGVVGFSTMKICKPMRKPFLRYCAVVPLTTESPHWRHEAKIVADKAIWVEARKQQQPLASFQNEVQPSTRHFYDALQGARTAFILECKKASPSKGVIRDDFDPARIAAIYKHYASAISVLTDEKYFQGSFNFLPIVR

SEQ ID NO: 48069 - protein, 474 aa, Homo sapiens
  DOMAIN (98)..(137): Bacterial surface antigen domain identified by eMATRIX, accession number PF01103J, p-value=2.828e-09, raw score of 9.61
MAQQHNIGLHGVREQDLPHLTKFSSKTHNIKQFGELVKEIPFSCYVESQITSRQMAPVVWQDHGQRPPGYSASQPQAQNVWIRTLYDRHRFVTRGTLGWIETGDFDKVPPDLRFFAGGDRSIRGYKYKSIAPKYANGDLKGASKLITGSLEYQYNVTGKWWGAVFVDSGEAVSDIRRSDFKTGTGVGVRWESPVGPIKLDFAVPVADKDEHGLQFYIGLDIGKVTGGWRDLTLSDVRYEQPGVAVKAGNLHLAVGLECLWNSSVCINDLALKDIQVNIDSGTIDNGILALIRHTRGNEILFIPALFILFSLGGAVFGMGEEAVAFAIIIAPLMVRLGYDSITTVLVTYIATQIGFASSWMNPFCVVVAQGIAGVPVLSGSGLRIVVWVIATLIGLIFTMVYASRVKKNPLLSRVHESDRFFREKQADVEQRPFTFGDWLVLIVLTAVMVWVIWGVIVNAWFIPEIASQFFTMGL

SEQ ID NO: 48070 - protein, 97 aa, Homo sapiens
CVDDGGTVEAIKGSDVNVPDAVFAWMLDGRGGVKPLENTDVIDEAHPCWLHLNYVHHDSAQWLATTPLLPNNVRDALAGESTRPRVSRLGEGTLITL

SEQ ID NO: 48071 - protein, 115 aa, Homo sapiens
  DOMAIN (20)..(61): Ribosomal protein S11 proteins domain identified by eMATRIX, accession number BL00054A, p-value=4.913e-33, raw score of 25.71
  DOMAIN (20)..(115): Ribosomal protein S11 domain identified by PFam, accession name Ribosomal_S11, E-value=9.1e-61, PFam score of 198.2
IMAKAPIRARKRVRKQVSDGVAHIHASFNNTIVTITDRQGNALGWATAGGSGFRGSRKSTPFAAQVAAKRCADAVKEYGIKNLEVMVKGPGPGRESTIRALNATGFRITNIIDVT

SEQ ID NO: 48072 - protein, 95 aa, Homo sapiens
  DOMAIN (20)..(65): Bacterial regulatory proteins asnC family proteins. domain identified by eMATRIX, accession number BL00519C, p-value=1.000e- 29, raw score of 29.50
  DOMAIN (1)..(72): AsnC family domain identified by PFam, accession name ASNC_trans_reg, E-value=1.2e-18, PFam score of 75.4
EKIGLGLTAFVLIKTQHHSSEWYCRFVTVVTEMPEVLGFWRMAGEYDYLMRVQVADMKRYDEFYKRLVNSVPGLSDVTSSFAMEQIKYTTSLPIE

SEQ ID NO: 48073 - protein, 542 aa, Homo sapiens
  DOMAIN (343)..(398): Heat shock hsp70 proteins family proteins domain identified by eMATRIX, accession number BL00297G, p-value=9.500e-33, raw score of 21.87
  DOMAIN (56)..(542): Hsp70 protein domain identified by PFam, accession name HSP70, E-value=4.5e-09, PFam score of -163.1
MVSMARKTGFTTGELVGPNNGPTIGNWPAGDSTYLRNTILILLSSGIVLRQRSLNIFRAGVTVIQLYQTVFIPTVFNAGVTGRYVIQTCIVLNPATQSPTLGDTPRRQYGQDRRKSGPGTGQSSQIAAETSRSYRCRSDRDTARTNTARAVPAFGITRSQHFHIAFKDHFAVNFELRHYAVNGFVQLGRVSGVIPVKIGLLIIADVARTTLNESELAALYACVEAAKCSNQSPLHIRWQYQEETRECEFYENELEDLWLPLLNRLRVPIEQALRDARLKPSQIDSLVLVGGASQMPLVQRIAVRLFGKLPYQSYDPSTIVALGAAIQAACRLRSEDIEEVILTDICPYSLGVEVNRQGVSGIFSPIIERNTTVPVSRVETYSTMHPEQDSITVNVYQGENHKVKNNILVESFDVPLKKTGAYQSIDIRFSYDINGLLEVDVLLEDGSVKSRVINHSPVTLSAHTIEESRTRLSALKIYPRDMLINRTFKAKLEELWARALGDEREEIGRVITDFDAALQSNDMARVDEVRRRASDYLAIEIP

SEQ ID NO: 48074 - protein, 17 aa, Homo sapiens
RFSHMLKDASLKRLLTV

SEQ ID NO: 48075 - protein, 606 aa, Homo sapiens
  DOMAIN (31)..(73): Bacterial regulatory proteins asnC family proteins. domain identified by eMATRIX, accession number BL00519B, p-value=5.500e- 29, raw score of 26.49
  DOMAIN (26)..(128): AsnC family domain identified by PFam, accession name ASNC_trans_reg, E-value=2.3e-22, PFam score of 87.8
MLDKIDRKLLALLQQDCTLSLQALAEAVNLTTTPCWKRLKRLEDDGILIGKVALLDPEKIGLGLTAFVLIKTQHHSSEWYCRFVTVVTEMPEVLGFWRNWPQPFMGGQWQNDTPTLRIPYYRPLEPLQPGFLPGRAEQHLAGQIFSGLTRFDNNTQRPIGDLAHHWETSTDGLRWDFYLRSTLHWHNGDAVKASHLHQRLLMLLQLPALDQLFISVKRIEVTHPQCLTFFLHRPDYWLAHRLASYCSHLAHPQFPLIGTGPFRLTQFTAELVRLESHDYYHLRMLEPGRRSCNLQPPGYRTTTSNHKAVQRKTSPMSLHSCWEGQAPSYFTPPGSAGRRVEGKGNFRQTGKGGQDLGDTAYRRAHSPSRAPVIEVHASAGDNFLVGEDFTHMLVDEVLKRADVARTTLNESELAALYACVEAAKCSNQSPLHIRWQYQEETRECEFYENELEDLWLPLLNRLRVPIEQALRDARLKPSQIDSLVLVGGASQMPLVQRIAVRLFGKLPYQSYDPSTIVALGAAIQAACRLRSEDIEEVILTDICPYSLGVEVNRQGVSGIFSPIIERNTTVPVSRVETYSTMHPEQDSITVNHSVPSRFLPAPCGST

SEQ ID NO: 48076 - protein, 215 aa, Homo sapiens
  DOMAIN (113)..(130): Sulfatases proteins domain identified by eMATRIX, accession number BL00523A, p-value=3.667e-14, raw score of 13.36
MAAEKIRDIIGPELVTLHNLIPEAFCMEFSFSPKRISGCCSPPFFPLMASAADTPSTATARKGFAEYDHPNQYLVKPATNIADNMMPVMQHPAQDKETQQKLAELEKKTGKKPNVVVFLLDDVGWMDVGFNGGGVAVGNPTPDIDAVASQGLILTSAYSQPSSSPTRATILTGQYSIHHGILMPPMYGQPGGLQGLTTLPQLLHDQGYVTQAVGS

SEQ ID NO: 48077 - protein, 45 aa, Homo sapiens
  misc_feature (1)...(45): Xaa = X or * as defined in Table 2
ALVCSSPWPSEKCKSKPQXDTISHQLEWQSLKSQETTGAGEDVEK

SEQ ID NO: 48078 - protein, 482 aa, Homo sapiens
  DOMAIN (7)..(54): kw TRANSCRIPTASE REVERSE II ORF2 domain identified by eMATRIX, accession number DM01354V, p-value=1.000e-40, raw score of 12.97
MSGIPFTIASKRIKYLGIQLTRDVKDLFKENYKPLLKEIKEDTNKWKNIPCSWVGRINIVKMAILPKVIYRFNAIPIKLPMPLFTELEKTTLKFIWNQKRAHIAKSILSQKNKAGGITLPDFKLYYKATVTKTAWYWYQNRDIDQWNRTEPSEITPHIYNYLIFDKPEKNKQWGKDSLFNKWCWENWLAICRKLKLDPFLTPYTKINSRWIKDLNVRPKTIKTLEENLGITIQDIGMGKDFMSKTPKAMATKAKIDKWDLIKLKSFCTAKETTIRVNRQPTKWEKIFATYSSDKGLISRIYNELKQIYKKKTNNPIKKWVRDMNRHFSKEDIYAAKKHMKKCSPSLAIREMQIKTTMRYHLTPVRMAIIKKSGNNRDIDEGVNHHSQQTITRTENQSLHVLTHTWEFNNENTWTQGGEHHTLGPVMGYVFISSVKMDQYTKLVSEEWGVAEKIPENVETILELGNRQRLERFGGFRRRQENV

SEQ ID NO: 48079 - protein, 102 aa, Homo sapiens
  DOMAIN (50)..(68): STOMATIN SIGNATURE domain identified by eMATRIX, accession number PR00721C, p-value=7.955e-09, raw score of 6.39
MWKQLWNWVTDIGWNSLEGSEEDRKMWESLELPTDLLNGFDQNADSDTNNKVQAQTELRNFLGTGAKNSIEGKRGTSKHQKTQAPPPPLTNCTPEQIVYPHP

SEQ ID NO: 48080 - protein, 148 aa, Homo sapiens
  misc_feature (1)...(148): Xaa = X or * as defined in Table 2
TIRSGLGWSQMEMRNMLGTGAKKYKLPSENTINTSTQINXKIXKKRINSSTHTLSQDXTRKKLNLXIDQXQELKLWQXSIAYQPKRVQDQMDSQREFYQRYKEELHINRAKDKNHMIISIDAEKAFDKIQQRFMLKTLNEVLMGRISK

SEQ ID NO: 48081 - protein, 276 aa, Homo sapiens
MWKRLWKWVTGRGWNSLEGSEEDRKMWESLEPPRDLLNGFDKNADSDTSNKVQAEVISDGNKELIGNWSKGTQKSRIEVWEPLPRFPKMYGYAWIPRQKFAAGAGPSWRTSVKAVQKGNVGSKPHHRDPTGALPSGAVRRGPPSSRPQNGRSTGSLHHVPGKARPQHQPVKAARREAVPYKATGVELPKTMGTHLLHQCDLDINICKLIKIMLLVSLYFRGVGLLPSFDGEEVLTTKSACFHGATWLQIWDDIRHQLSLQTFKLGGAVSAVVNQAL

SEQ ID NO: 48082 - protein, 188 aa, Homo sapiens
MWESLEPPRDLLNAFVKNADSDMNNKVQAEVVSDGDEELAGNWSKGDSRYVLAKRLAAFCPCPRDLWNFELERDDLGYLVEEISKQQSIQKFSESLSSWGKKFLLGNKMDEYFKEEIVAAMGLRLKDGKINITSRVAFQNDGIEGFPMSHDFYTGKSEIKVDNQLSHILGLLAENLSLPQTTGSIGSS

SEQ ID NO: 48083 - protein, 408 aa, Homo sapiens
MWKQLGNWVTGRAWNSLEDSEEDRKMWESLELPRDSLNGFDKIADSDMNNKAQAEVVSDGDEELVGNWNKVSFESMMCCYGRFQVSGTQNPRNSTTARRQCTWSGFSPQGWSRGSRKPPALYSNYSHATHHTTCLHQQDGPESCILGILPPRCFPKDPGHLLQTPRVHVIISSQTYAHGTASTTGSNDHGPSYTDEPWLCHRLPQNPGLRRYTTSIPSDGVIKIWNGHTYTLPVLFLWRILTNTLTKAMRVGTGGALKPVICGMSFDTTHKGTPPETGGKTSGAAAFWIGKGVLDELLTLISLTPLQEVPYSSSASTGAGRLCKDECVLCRTRLRSEGLLQVKSDLVPVGPRALPPLQPGLQLTASASTACVLAFLTSHCQGPPPSFRGVLRSPQGQERFARAPADKQ

SEQ ID NO: 48084 - protein, 299 aa, Homo sapiens
  DOMAIN (7)..(54): kw TRANSCRIPTASE REVERSE II ORF2 domain identified by eMATRIX, accession number DM01354V, p-value=1.000e-40, raw score of 12.97
MSELPFTIASKRIKYLGIQLTRDVKDLFKENYQPLLNEIKEDTNKWKNIPCSWVGRINTMKMAMLPKNRVSCIPASPAPVTGKRGQGTAQAIVSEGKSPKPLQLHCDFGPAGGQKARIEVWEPLLPTVTFPTLKVQGPNSLEKMDEGLTPTALRLERAPTSGRSQAVGAGTSKPAGAGGHSRAPKYAVMPESVASVSVWAAAAVQGMRVVPAFSMEWEAQVCSRVAAATIGEFLPELRKGGAPTSPLLLPAAHNMQPQLYLPATACGMAASGCLEWSLSSLASFFLNGSTHNGDSKVLK

SEQ ID NO: 48085 - protein, 113 aa, Homo sapiens
  misc_feature (1)...(113): Xaa = X or * as defined in Table 2
NHFLQGLGPLLQFPTSSSSPSETTSAWTLCPHHYQAFGQSHSTSLXEVHKLSHIFMSSSEPSKLFQPLPVTQFQSRFHIFRYLFSSIPLYWCQFTVLVHFPAADKDISVTTIP

SEQ ID NO: 48086 - protein, 375 aa, Homo sapiens
MVEGNASTTTTVIDSKNGSVPKSPGKVLKRTVTEDIVTTFSSPAAWLLVIALIITWSAVAIVMFDLVDYKNFSGRGWNSLNGSEEDRKMWESLELPRDLLNGFDQNADSDMNNKVQAEVVSDGEEELVGNWSKELYEDEVKCKSSKSNRPKATVFKSPRTPPQRWNQEVPFISEENPFSPSFTYGASWAIGHLRKFMIMKDEYMLTGYKEDEKVPCKGNGNEVQNDMAYLQIHQWLRTAKAHGKGMSWWGYGQNSNMIVFVLLKNSSESDTEGRMKAEAPAGRQGDNQGRSLKIVNCASGKQSEEENTDRRDFLEEKIEDLEPKSEESEETITSQQRCHSILLPSQKSINDIFIEISTLDDSTYKAKRDVFGKGT

SEQ ID NO: 48087 - protein, 255 aa, Homo sapiens
MNFRQLLLHLPRYLGASGSPRRLWWSPSLDTISSVGSWRGRSSKSPAHWNQVVSEAEKIVGYPTSFMSLRCLLSDELSNIAMQVRKLVGTQHPLLTTARDLLNGFDKNADSDMNNKIQAEVVSDGDEELVGNRSKGAEPSWRTSGRALQKGNVGLEPPQEVPTGAPFSGAVRRGPPFSRPQNGRSTDSLYRVPRKAAATQHQPMKAAKRVAVPCKATGAELPKTMGAHPLHQRDLNARHGVKGDYFGVLRYDCPA

SEQ ID NO: 48088 - protein, 317 aa, Homo sapiens
  DOMAIN (7)..(54): kw TRANSCRIPTASE REVERSE II ORF2 domain identified by eMATRIX, accession number DM01354V, p-value=1.000e-40, raw score of 12.97
MSELPFTIASKRIKYLGIQLTRDVKDLFKENYKPLLSEIKEDTKKWKNIPCSWVGRINIMKMAILPKVLEKNVLGRDMETMKKVQIKLLEISTIMKNEMKNVLDGINCALDSEQMKVFNTYSNEDYDRRNDEVDPVAASAEYELEKRVEKLELFPVELEKGMYGEEDRVQLGSRWVSHRNNKWPLRMRFQTSLRESYEDGLGISIIGMGVGADAGLEKLGIFVKTVTEGGAAQRDGRKSGVLLKRHLKMWKRLWNWTTGRGWNSLEGSEEDRKMWENLELPRDLLNGFDQNADSDMNNKVQAEVSSDGDEETCWELE

SEQ ID NO: 48089 - protein, 202 aa, Homo sapiens
  DOMAIN (148)..(197): kw TRANSCRIPTASE REVERSE II ORF2 domain identified by eMATRIX, accession number DM01354Z, p-value=1.000e-40, raw score of 9.06
  misc_feature (1)...(202): Xaa = X or * as defined in Table 2
FLQSTHLTKGXYPESTMNSNKFTRKKQPNQRAKDMKRPFSKEDIDAANKHMKKCSSSLAIREMQIKTTMRYHFTPVRMAIIKKSGNNRCWRGCGEIGTLLHCWWDCKLIQPLWKSMWRFLKDLELEIPFDPAIPLLGIYPKDYKSCCYKDTCTHMFIAALFTIAKTWNQPKCPTMIDWIKKMWHIYTMEYYGAIKRMSSCPL

SEQ ID NO: 48090 - protein, 177 aa, Homo sapiens
  DOMAIN (56)..(74): PHOSPHORIBULOKINASE FAMILY SIGNATURE domain identified by eMATRIX, accession number PR00478A, p-value=7.245e-12, raw score of 13.44
  DOMAIN (49)..(176): ABC transporter domain identified by PFam, accession name ABC_tran, E-value=2e-08, PFam score of 39.3
LAKCIRHDEEKIAMSMVETAPSKIQVRNLNFYYGKFHALKNINLDIAKNQVTAFIGPSGCGKSTLLRTFNKMFELYPEQRAEGEILLDGDNILTNSQDIALLRAKVGMVFQKPTPFPMSIYDNIAFGVRLFEKLSRADMDERVQWALTKAALWNETKDKLHQSGYSLSGGQQQRLSS

SEQ ID NO: 48091 - protein, 154 aa, Homo sapiens
  DOMAIN (79)..(145): Acetyltransferase (GNAT) family domain identified by PFam, accession name Acetyltransf, E-value=1.7e-07, PFam score of 38.3
MSLFDKHNKLDHEIARKEGSDGRGYNAEVVRMKKQKLQLKDEMLKILQQESVKEDTRKTVQGNVMLHQRGYAKMFMIFKEDELIGVISFNRIEPLNKTAEIGYWLDESHQGQGIISQALQALIHHYAQSGELRRFVIKCRVDNPQSNQVALRNG

SEQ ID NO: 48092 - protein, 78 aa, Homo sapiens
KTKILALCPCSINTINLIMKLPERKVPRSRQSLNWPQFVQSEEDTRKTVQGNVMLHQRGYAKMFMIFKEDELIRVISV

SEQ ID NO: 48093 - protein, 91 aa, Homo sapiens
  misc_feature (1)...(91): Xaa = X or * as defined in Table 2
LLPGFFCSNLAPVPPSGGHQHDLPYPSSAXNPGASGTGQARMGQSHQWAFLWRKDAHVRKESGYMYSLYDRAYGERTTGRRGRGRGPIPRP

SEQ ID NO: 48094 - protein, 430 aa, Homo sapiens
MQMTKQPPIAKADLQKTQGNRAPAAVKNSDVISFINQPSMKEQLAAALPRHMTAERMIRIATTEIRKVPALGNCDTMSFVSAIVQCSQLGLEPGSALGHAYLLPFGNKNEKSGKKNVQLIIGYRGMIDLETSQLKQGQRIHMPMRMVAFHEMPNLALTMSPALATAIFWLTSIPMRNVPDPADEGALQKWWSVLPDGYGFEEDWAEVYTSKNLPPESYPVGAPIPWPSDTVPSGYALMQGQAFDKSAYPKLAAAYPSGVIPDMRGWTIKGKPASGRAVLSQEQDGIKSHTHSASASSTDLGTKTTSSFDYGTKSTNNTGAHTHSVSGSTNSAGAHTHSLANVNTASANSGAGSASTRLSVVHNQNYATSSAGAHTHSLSGTAASAGAHAHTVGIGAHTHSVAIGSHGHTITVNAAGNAENTVKNIAFNYI

SEQ ID NO: 48095 - protein, 189 aa, Homo sapiens
  misc_feature (1)...(189): Xaa = X or * as defined in Table 2
RSTPSMKEQLATALPRHMTAERMIRIANTEFRKVPALGNCDTMSFVSAIVQCPQLGLEPGSASGHAYLLPFGNKNEKSGKKNVQLIIGYRGMIDLARRSGQIASLSARVVREGDEFSFEFGLDEKLIHRPGENEDAPVTHVYAVARLKDGGTQFEVMTRKQIELVRSLSKADTDXPWMCPCPMKRKSAT

SEQ ID NO: 48096 - protein, 261 aa, Homo sapiens
  DOMAIN (57)..(73): FGGY family of carbohydrate kinases proteins domain identified by eMATRIX, accession number BL00933E, p-value=8.683e- 10, raw score of 13.80
MCSEIQAACRETAQPIPESDAELARCIFDSLALVYADVLHELAHLRGEDFSQLHIVGGGCQNTLLNQLCADACGIRVIAGPVEASTLGNIGIQLMTLDELNNVDDFRQVVSTTVNLTTFTPNPDNSLYTTDKGALRMTTQLEQAWELAKQRFAAVGIDVEEALRQLDRLPVSMHCWQGDDGLSLEEDSTGDLVAIATWIPDKVGFSAIEKPHFPHNTFPPNKMNGSQSLISNGGMKDKIEPFEKQSEINTDIIEQLAVHHK

SEQ ID NO: 48097 - protein, 299 aa, Homo sapiens
  DOMAIN (94)..(229): SIS domain identified by PFam, accession name SIS, E-value= 2.1e-46, PFam score of 167.6
  misc_feature (1)...(299): Xaa = X or * as defined in Table 2
FCRQRQCQVYRRGRFTHAAFTGTHRDNVLQVQSKLRADGCALEDYFSQSEQVLPSELAFDEAPQDVVNKVFNITLRTIMEGQSIVNVDEIHRAARFFYQARQRDLYGAGGSNAICADVQHKFLRIGVRCQAYPDAHIMMMSASLLQEGDVVLVVTHSGRTSDVKAAVELAKKNGAKIICITHSYHSPIAKLADYIICSPAPETPLLGRNASARILQLTLLDAFFVSVAQLNIEQANINMQKTGAMXKRPXNWQKRTGQRLFVXPIATIHRXRNWPIILFAHQPRKRRYXVVMPRQEYYN

SEQ ID NO: 48098 - protein, 1602 aa, Homo sapiens
  DOMAIN (939)..(978): kw TRANSCRIPTASE REVERSE II ORF2 domain identified by eMATRIX, accession number DM01354X, p-value=2.459e-36, raw score of 13.86
  DOMAIN (344)..(478): SIS domain identified by PFam, accession name SIS, E-value= 1.6e-27, PFam score of 104.9
MFRVTWSSGRTGLGKRLFRTPYDNDDTGPYAFNKTHPKDNYTCTVLFIDDMSASGQSLDKAQDNYRQAMKKLSSGRGNVLAQAEAFRGLGVEIKREINPDLAEQAIRLQDCVFDTQETMTTTFTGTVSSANSGNYYTIFNTDTGAAFNNVSLAIGNYVVLAFSASAAQYEDGKQYNHRFRLKTLNYRFAAGALPAVAIKCRSAKFTATLQFPGNVRELEHAIHRAVVLARATRSGDEVILEAQHFAFPEVTLPTPEVAAVPVVKQNLREATEAFQRETIRQALAQNHHNWAACARMLETDVANLHRRAMSEALLNAGRQTLMLELQEASRLPERLGDDFVRAANIILHCEGKVVVSGIGKSGHIGKKIAATLASTGTPAFFVHPAEALHGDLGMIESRDVMLFISYSGGAKELDLIIPRLEDKSIALLAMTGKATSPLGLAAKAVLDISVEREGSRMTYATSAHQPGCGLLPRSMITPTFAARATAPGLLSLIRTHGELKRANSSSATSSATRSTSAKRAPSTWLTTVSAMSAASNDPRSKRGDFQPAHGAPNATTLLQGQQRGVPRAQTRGPKGNTGITPTGRRTRHGAIRDPIGRPEPPCSGAIGKRSSAQVQKVGKARTRPSQDTMFEYIPQRVIVRQHRWSRTKQRIGFDVYLDVNYKFVPWFNLTVRNRYNHNNYSSTDLSGELDNNDTYEIGTYWNFKITDKFSYTFEPHYFMRVNDFNSSNGKDHHWEITNTFRYRINEHWLPYFELRWLDRNVEPYHREQNQIRIGTNNFGFACVIADCRQLDWRSRVLRQRKKRTMPDATKSKMSVTASPLLSLLALHNTPDGGIPTIGLPGYSAPSAGTAALNHSGKVDIFNKLHLFLFPHCIKRLAAFPELRPDELLHGTGQCERVVGVLYGAAKIRRIPSGEPDVSVSLLVHMRIWHTAQVIYRFNAIPIKLPMTFFTELEKTTFKFIWNQNRARIAKSILSQKNKAGGITLPDFKLYYKAIVTKTVCHTRTRKRTILGNNNRIDTNLGVPCLLADGSLAALLTSYHQVSIPLGIRKAVYNGSRFDVWSSAFIIIGYAIPAFLFAILLIVFFAGGSYFDLFPLRGLVSANFDSLPWYQKITDYLWHITLPVLATVIGGFAALTMLTKNSFLNSEQGQSVPLNTSTTTDPATTSTPPASVDTTATNTQTPAVTAPAPAVDPQQNAVVSPSQANVDTAATPAPTAATCCQQTLTRGETVNGDIFHTIRDPDVHHRWCAELLAKIGRNATAGFAVINPELANAVVGMGKHRHVAHWHYALCPDNCLWPESPRSANLPGFQNRKHHRPASSALKRVNDQVGAAPPRHQSPPPRNAVSLAPRPVPMSFTWENNRQIWFKVQDSQLMKYILYKGFIGIDGISLTVGEVMSSAISSWSRPAIPVQRRSVNDREVHLLVGRVEVNEQIEYLIHNPIRTRARPVNLGDNHHLLLAVRYRARITNLDESDVSAYSESPTGQTASNACGGTVRLWKAPYTIAHRASLSQGPDNFRACSAHGSSSPYYGVCFRKVHDEPLGGMTAPVHNPSVLRSFRNQSVAVPGSATHDPNIELGVAGLIGQIQHAFRCQRQHRRLTLHVV

SEQ ID NO: 48099 - protein, 155 aa, Homo sapiens
MTASERHASTENDIRIRRTFSAANYRLTFCGLLFELFMRGVTNFNGISLVFLQLLKNFSNNARANGTAAFTDCETQTVVHRDRVDQGNNHFDVVARHYHLYAFRQFDGTSHVSSTEVELRTVAFEERSMTAAFISWTECTLQIRTCTAFVQQFHQ

SEQ ID NO: 48100 - protein, 285 aa, Homo sapiens
  misc_feature (1)...(285): Xaa = X or * as defined in Table 2
XMYTSDFNFGVRLNGARLSQYLTTFDFFTFDTTQQNTYVLTSTAFVQQFAEHFNASTGRLLSLFDTNDFNFFTNFDDTAFYTTGNNGTTTGDGEYVFDRQQERLVNRTLWFRNIRIQEASQFQDFRFPLCVAFQRFQSRTTNDRSVVAREVVLRQKFTNFHFNQFQQLFVINHVAFVQEHDDVRNAYLTTQQDVLTSLRHRAVSRSNYQGGSSREIVMEILYNIFTVFFNQVMTNAPLLLGIVTCLGYILLRKSVSVIIKGTIKTIIGFMLLQAGSGILTSTFKP

SEQ ID NO: 48101 - protein, 512 aa, Homo sapiens
RWMNSTMWMISVRSSAPSANLTTFTPNPDNSLYTTDKGALRMTTQLEQAWELAKQRFAAVGIDVEEALRQLDRLPVSMHCWQGDDVSGFENPEGSLTGGIQATGNYPGKARNASELRADLEQAMRLIPGPKRRNLHAIYGSKVFAVAGCVVLMTTMPDSCNSWQKCRNKTMNKKIHSLALLVNLGIYGVAQAQEPTDTPVSHDDTIVVTAAEQNLQAPGVSTITADEIRKNPVARDVSKIIRTMPGVNLTGNSTSGQRGNNRQIDIRGRFDGIVGIFALIGDWYPAMYGTELNMQMTKQPPIAKADLQKTQGNRAPAAVKNSDVISFINQPSMKEQLAAALPRHMTAERMIRIATTEIRKVPALGNCDTMSFVSAIVQCSQLGLEPGSALGHAYLLPFGNKNEKSGKKNVQLIIGYRGMIDLARRSGQIASLSARVVREGDEFSFEFGLDEKLIHRPGENEDAPVTHVYAVARLKDGGTQFEVMTRKQIELVRSLSKAGNNGPWYSLEEVPS

SEQ ID NO: 48102 - protein, 243 aa, Homo sapiens
  DOMAIN (77)..(122): Bacterial regulatory proteins asnC family proteins. domain identified by eMATRIX, accession number BL00519C, p-value=1.000e- 29, raw score of 29.50
  DOMAIN (26)..(132): AsnC family domain identified by PFam, accession name ASNC_trans_reg, E-value=7.3e-50, PFam score of 179.1
MLDKIDRKLLALLQQDCTLSLQALAEAVNLTTTPCWKRLKRLEDDGILIGKVALLDPEKIGLGLTAFVLIKTQHHSSEWYCRFVTVVTEMPEVLGFWRMAGEYDYLMRVQVADMKRYDEFYKRLLVFPSGMASLSRGCRLACHYRDAATGSAKSGGIVVDGVTEQHLLPVPSSCGAADGCQHADAADEYFVSNGKLSAHRYPVVAYPVNKTQNRLPNFSPAAEYSRYAAIFFAVHDKYRMNDE

SEQ ID NO: 48103 - protein, 124 aa, Homo sapiens
PRGLSANSAITLRWSLYGDWKPITAAIAPEEVSVDRVSAARSLSSGTMPGNGVWRIGVFTQLSVACTNRSICLSSFSLSGIPPMIMMSASLPWRLTTVQLSIIFSTPSAMRASSSFSPSWRICS

SEQ ID NO: 48104 - protein, 471 aa, Homo sapiens
  DOMAIN (310)..(359): Sodium:galactoside symporter family proteins domain identified by eMATRIX, accession number BL00872A, p-value=6.595e- 28, raw score of 30.73
  DOMAIN (37)..(361): ABC transporter transmembrane region domain identified by PFam, accession name ABC_membrane, E-value=6.9e-37, PFam score of 136.0
IHHFFTHRINIQNQVRTQRVRLFAQLSWYFRREWRRYLGAVALLVIIAMLQLVPPKVVGIVVDGVTEQHFTTGQILMWIATMVLIAVVVYLLRYVWRVLLFGASYQLAVELREDYYRQLSRQHPEFYLRHRTGDLMARATNDVDRVVFAAGEGVLTLVDSLVMGCAVLIMMSTQISWQLTLFSLLPMPVMAIMIKRNGDALHERFKLAQAAFSSLNDRTQESLTSIRMIKAFGLEDRQSAYCREQSTYLASMKRRTPVSRTFVHPVMKSPYGLTLNSRRIPGPRLDGRTSMSHITTEDPATLRLPFKEKLSYGIGDLASNILLDIGTLYLLKFYTDVLGLPGTYGGIIFLISKFFTAFTDMGTGIMLDSRRKIGPKGKFRPFILYASFPVTLLAIANFVGTPFDVTGKTVMATILFMLYGLFFSMMNCSYGAMVPAITKNPNERASLAAWRQGGATLGLLLCSGGFVPVRL

SEQ ID NO: 48105 - protein, 219 aa, Homo sapiens
  DOMAIN (129)..(170): TRANSFERASE GLYCOSYLTRANSFERASE domain identified by eMATRIX, accession number PD01966B, p-value=1.000e-40, raw score of 22.84
  DOMAIN (130)..(216): Queuine tRNA-ribosyltransferase domain identified by PFam, accession name TGT, E-value=1e-06, PFam score of -74.1
RSGEKMKFELDTTDGRARRGRLVFDRGVVETPCFMPVGTYGTVKGMTPEEVEATGAQIILGNTFHLWLRPGQEIMKLHGDLHDFMQWKGPILTDSGGFQVFSLGDIRKITEQGVHFRNPINGDPIFLDPEKSMEIQYDLGSDIVMIFDECTPYPADWDYAKRSMEMSLRWAKRSRERFDSLGNKNALFGIIQALTIPTNKVSFRYSFVEMKESVVPAAM

SEQ ID NO: 48106 - protein, 101 aa, Homo sapiens
LAKSSPVGNSFTTAITNLRARVTEIVEKAANNLPAVVEMMITSLRDKSPQFLRLNIRQQQRLEQAAYEMTALRAATIELGPLVRGLPHLRTIHRQLYQEIE

SEQ ID NO: 48107 - protein, 216 aa, Homo sapiens
RRCVLRPGLDIMRNRLNIRQQQRLEQAAYEMTALRAATIELGPLVRGLPHLRTIHRQLYQDIFDWAGQRRITLINHGFVPKSTTVVETNGPSDQSIAMRRPGQTISRIHQVQKKLGIELTNCYEHSGLPDIKNVTGILICRQTHARPARLARLIFTANKTNTINALVDIEVDDFFTDACQIDCCFETGSHSVLARLGGASAQDLQLDATSASHGSK

SEQ ID NO: 48108 - protein, 556 aa, Homo sapiens
  DOMAIN (313)..(336): LEUCYL-TRNA SYNTHETASE SIGNATURE domain identified by eMATRIX, accession number PR00985F, p-value=1.000e-27, raw score of 13.02
  DOMAIN (327)..(556): Protein of unknown function UPF0096 domain identified by PFam, accession name UPF0096, E-value=2.1e-14, PFam score of 61.3
MPCTFIERNILDYFTITANQTHPILRIAVAGYAMPAPELLTRHAASPVRGLTLQRWLSLALRPGSRFQKAYAYPPVVRRTTIKTVVAMYTTGCLPVGQRRWPYIVWNVDGLPLLPATMWAKFAYQTLGYYQRRQHQVTQLRRLNIKPVILAADGSEPDLSQQALTEKGVLFNSGEFNGLDHEAAFNAIADKLTAMGVGERKVNYRLRDWGVSRQRYWGAPIPMVTLEDGTVMPTPDDQLPVILPEDVVMDGITSPIKADPEWAKTTVNGMPALRETDTFDTFMESSWYYARYTCPQYKEGMLDSEAANYWLPVDIYIGGIEHAIMHLLYFRFFHKLMRDASMTNPSSVPRAGGPALLFENPKGYSMPVLCNLFGTPKRVAMGMGQEDVSALREVGKLLAFLKEPEPPKGFRDLFDKLPQFKQVLNMPTKRLRGAPCQQKIVSGDDVDLNRIPIMTCWPEDAAPLITWGLTVTRGPHKERQNLGIYRQQLIGKNKLIMRWLSHRGGALDYQEWCAAHPGERFPVSVALGADPATILGAVTPVPDTLSEYAFAGSGTC

SEQ ID NO: 48109 - protein, 360 aa, Homo sapiens
  DOMAIN (198)..(222): VACUOLAR ATP SYNTHASE 16 KD SUBUNIT SIGNATURE domain identified by eMATRIX, accession number PR00122D, p-value=7.032e- 09, raw score of 9.97
MPFKGQIQAPVGTGEGKGSAGSLERQMAKTPPGLWKIKGKGAFQAHSFPAEEDHHNEERQTKKKRKTKHRHKFSEELLQELKEIFGENGYPDFTTRKTLANKFDCPVNVINAYFKKNSGETEFSITRVKRISSNHGFNMTLSLIKLPENNWPKKLGFQNLIFSFFHHPHLEITEIADRTLRAGGPALLFENPKGYSMPVLCNLFAGVTGLYVLGIGLILYALSKEIYVITTETFSTISVVGLLVYAIKKYGASLAEFADKLNEQKLVQLEEAKQASIKQIQDATDLEKSQQVLPLLFDVQRKNIPMASEFTYQEQLYRVHKEVKNCLDYHISVQNMMHQKEQEHIINWVEKHVVQSISAQ

SEQ ID NO: 48110 - protein, 301 aa, Homo sapiens
  DOMAIN (98)..(123): NI-FE HYDROGENASE SMALL SUBUNIT SIGNATURE domain identified by eMATRIX, accession number PR00614E, p-value=3.250e-30, raw score of 11.48
  DOMAIN (45)..(148): NADH ubiquinone oxidoreductase, 20 Kd sub domain identified by PFam, accession name oxidored_q6, E-value=2.5e-14, PFam score of 61.0
  misc_feature (1)...(301): Xaa = X or * as defined in Table 2
MRAGFTSNVLTFLTCTSHFLNTFRAADVANVQTATSNFRQIQVFEDIITQYNGKYILAVEGNPPLGEQGMFCISSGRPFIEKLKRAAAGASAIIAWGTCASWGCVQAARPNPTQATPIDKVITDKPIIKVPGCPPIPDVMSAIITYMVTFDRLPDVDRMGRPLMFYGQRIHDKCYRRAHFDAGEFVQSWDDDAAPKVTACTKWAAKGLPPITPVPHTLEXWVWSRLLAGGNGLDRGRFSGVDSSWISYLSSAISVTMAPATTLNQTSKAALAACAISTLCNGWPAVILAQHRWMKWSGLAS

SEQ ID NO: 48111 - protein, 220 aa, Homo sapiens
  DOMAIN (16)..(220): Protein of unknown function UPF0096 domain identified by PFam, accession name UPF0096, E-value=1e-08, PFam score of -25.4
EATMDAMKYNDLRDFLTLLEQQGELKRITLPVDPHLEITEIADRTLRAGGPALLFENPKGYSMPVLCNLFGTPKRVAMGMGQEDVSALREVGKLLAFLTEPEPTKGFRDLFDKLPQFKQVLNMPTKRLRGEPCQQKIVSGDDVDLNRIPIMTCWPEDAAPLITWGLTVTRGPHRERQNVGQFREHLQARKCDLPGITHRLAVKNPGVRSQGSYEGVIKAD

SEQ ID NO: 48112 - protein, 31 aa, Homo sapiens
  misc_feature (1)...(31): Xaa = X or * as defined in Table 2
CMRRKTALTGGEPDRXTAMRXHNKSPALTGS

SEQ ID NO: 48113 - protein, 442 aa, Homo sapiens
  DOMAIN (304)..(324): HEPATIC LIPASE SIGNATURE domain identified by eMATRIX, accession number PR00824H, p-value=5.055e-09, raw score of 9.98
  DOMAIN (1)..(144): Domain of unknown function DUF28 domain identified by PFam, accession name DUF28, E-value=3.8e-05, PFam score of -86.1
MTRDTLNRAIARGVGGDDDANMETIIYEGYGPGGTAIMIECLSDNRNRTVAEWKEGELSFGAVSCAAWVYKRGDANFSLATLCVSQYARRESGEGQSGMYEAVRDGMVVNLLLEAIPDLHLRLDANRAWTPLKGQQFAKYVNPDYRDRIAFLEEPCKTRDDSRAFARETGIAIAWDESLREPDFAFVAEEGVRAVVIKPTLTGSLEKVREQVQAAHALGLTAVISSSIESSLGLTQLARIAAWLTPDTIPGLDTLDLMQAQQVRRWPVRGETIALRLNDEQLNWRELCARVDELASGFAVQGVVEGSGVMLRAWNTPQTLLAWLALLQCGARVLPVNPQLPQPLLEELLPNLTLQFALVPDGENTFPALTSLHIQLVEGAHAATWQPTRLCSMTIMVFITDISSDSAVILSAHPIRPTLPAIALLSVLEILFVLVDVKCISL

SEQ ID NO: 48114 - protein, 464 aa, Homo sapiens
  DOMAIN (358)..(390): ABC transporters family proteins domain identified by eMATRIX, accession number BL00211B, p-value=2.895e-22, raw score of 13.37
  DOMAIN (257)..(434): ABC transporter domain identified by PFam, accession name ABC_tran, E-value=2.7e-52, PFam score of 187.2
MNDASPVSLACAVLTVSDTRSAGDDTSGNLLANSLAQAGHQCVRRDISKDNVVLGPMQHANAAVGVPDNCDARSRYAFRMTYVILVVASWLSVYNTSALAFVAYLLNQRYGSGDAWMYETESVITMVLGLWMVNVVFSFGHRLLNFQSARPQKQRIPCSRACSVNSTGIAAPPSNTAFRETELRLTSKRQSCVGTSEANASQASSVCGVFHARNITPLPSTTPCTANPEANSSTRAQSSRQLSCSSLRPSRAQSRAGTCQASGCGKSTLLRMVAGLERVTEGDIWINDQRVTEMEPKDRGIAMVFQNYALYPHMSVEENMAWGLKIRGMGKQQIAERVKEAARILELDGLLKRRPRELSGGQRQRVAMGRAIVRDPAVFLFDEPLSNLDAKLRVQMRLELQQLHRRLKTTSLYVTHDQVEAMTLAQRVMVMNGGVAEQNCTPVEVYEKPASLFVASLLASAITA

SEQ ID NO: 48115 - protein, 220 aa, Homo sapiens
  DOMAIN (76)..(108): GTP-binding elongation factors proteins domain identified by eMATRIX, accession number BL00301B, p-value=4.273e-33, raw score of 20.09
  DOMAIN (10)..(114): Elongation factor Tu family domain identified by PFam, accession name GTP_EFTU, E-value=3.8e-58, PFam score of 198.6
RISVIYVTHNVGTIGHVDHGKTTLTAAITTVLAKTYGGAARAFDQIDNAPEEKARGITINTSHVEYDTPTRHYAHVDCPGHADYVKNMITGAAQMDGAILVVAATDGPMPQTREQVYLVEHNNRLNLQGFAGHQVTVDNIERQLRQNGGDNDNLVDVGGNRFYAVVEIRTRQHRGTLMHRFHDPFDIYAFRRRFTRTPDANIQVPAFFSGDNTHVFTLSF

SEQ ID NO: 48116 - protein, 162 aa, Homo sapiens
PRKFLYMVVLVRAFSFKISRHFFAMGEARSILPAYGFFAYVGAVDAAQRLQYFHFFIADAVCAQVRRRRHRNHAKNLQQVVLDHVAHLTGFIKIAPAPFDPHFFCHGNLNMINGAIVPVIHKQGVSKTQRQQVQPRFFTKIVVDTVNLALLEVFANLIPGYR

SEQ ID NO: 48117 - protein, 41 aa, Homo sapiens
  misc_feature (1)...(41): Xaa = X or * as defined in Table 2
LLARTSRQXKTSLNCVNKLXMPSGQWAVLLLPVCRCWWLRT

SEQ ID NO: 48118 - protein, 476 aa, Homo sapiens
  DOMAIN (298)..(311): Glutamine synthetase proteins domain identified by eMATRIX, accession number BL00180A, p-value=5.865e-13, raw score of 13.20
  DOMAIN (266)..(435): Glutamine synthetase domain identified by PFam, accession name gln-synt, E-value=1.2e-113, PFam score of 358.5
MSGEHTLKAVRGSFIDVTRTIDNPEEIASALRFIEDGLLLIKQGKVEWFGEWENGKHQIPDTIRVRDYRGKLIVPGFVDTHIHYPQSEMVGAYGEQLLEWLNKHTFPTERRYEDLEYAREMSAFFIKQLLRNGTTTALVFGTVHPQSVDALFEAASHINMRMIAEDPPVPEHACMPAGRRVFTTAVHASLDKFRRHFYAICRKNHPSLAADLGQQFGGDATDRQPWMIHQMLIHQGSEQLCFVEHGINMLRLGEILHLAATRHEVKFVDLRFTDTKGKEQHVTIPAHQVNAEFFEEGKMFDGSSIGGWKGINESDMVLMPDASTAVIDPFFADSTLIIRCDILEPGTLQGYDRDPRSIAKRAEDYLRSTGIADTVLFGPEPEFFLFDDIRFGSSISGSHVAIDDIEGAWNSSTQYEGGNKGHRPAVKGGYFPVPPEYPHPNPSKACLGSHNNSRSQKDGWPLMFRKPTDSRPSIRR

SEQ ID NO: 48119 - protein, 345 aa, Homo sapiens
  DOMAIN (60)..(91): Glucose-6-phosphate dehydrogenase proteins domain identified by eMATRIX, accession number BL00069C, p-value=4.857e-25, raw score of 16.11
  DOMAIN (41)..(127): Glucose-6-phosphate dehydrogenase domain identified by PFam, accession name G6PD, E-value=7.7e-61, PFam score of 188.2
MMYLALSYDHRLIDGRESVGFLVTIKELLEDPTRLLLDVYTFGAICKGLGEAKLNAKPARVVMEKPLGTSLATSQEINDQVGEYFEECQVYRIDHYLGKETVLNLLALRFANSLFVNNWDNRTIDHVFPIESRLFHKLSTRHRLAYVEAQSSQNQVDSSSIFNGIEGAEMSNKGKDQGVVVNNVKTGTPAAQIGLKKAVHNGGLMAGWHLDTKMAQDIVARTMRIIDTNINVMDARGRIIGSGDRERIGELHEGALLVLSQGRVVDIDDAVARHLHGVRQGINLPLRLEGEIVGVIGLTGDPENLRKYGELVCMTAEMMLDQSRLMHLLAQDSRLREELVMNLLR

SEQ ID NO: 48120 - protein, 91 aa, Homo sapiens; identical to SEQ ID NO: 48093
  misc_feature (1)...(91): Xaa = X or * as defined in Table 2

SEQ ID NO: 48121 - protein, 430 aa, Homo sapiens; identical to SEQ ID NO: 48094

SEQ ID NO: 48122 - protein, 189 aa, Homo sapiens; identical to SEQ ID NO: 48095
  misc_feature (1)...(189): Xaa = X or * as defined in Table 2

SEQ ID NO: 48123 - protein, 112 aa, Homo sapiens
  misc_feature (1)...(112): Xaa = X or * as defined in Table 2
QLSLLLNLPLDSIHHRLASSALKRVNDQVGAAPPRHQSPPPRNAVSLAPRPVPVEWSCAKLLCLSCRVNCQDXGNKALTSIHFVWGEGIVGKMWLFYCTEAHFVRDPSGYSN

SEQ ID NO: 48124 - protein, 299 aa, Homo sapiens; identical to SEQ ID NO: 48097
  DOMAIN (94)..(229): SIS domain identified by PFam, accession name SIS, E-value= 2.1e-46, PFam score of 167.6
  misc_feature (1)...(299): Xaa = X or * as defined in Table 2

SEQ ID NO: 48125 - protein, 1602 aa, Homo sapiens; identical to SEQ ID NO: 48098
  DOMAIN (939)..(978): kw TRANSCRIPTASE REVERSE II ORF2 domain identified by eMATRIX, accession number DM01354X, p-value=2.459e-36, raw score of 13.86
  DOMAIN (344)..(478): SIS domain identified by PFam, accession name SIS, E-value= 1.6e-27, PFam score of 104.9

SEQ ID NO: 48126 - protein, 155 aa, Homo sapiens; identical to SEQ ID NO: 48099

SEQ ID NO: 48127 - protein, 231 aa, Homo sapiens
  DOMAIN (68)..(78): GTP-BINDING ELONGATION FACTOR SIGNATURE domain identified by eMATRIX, accession number PR00315E, p-value=2.929e-11, raw score of 12.29
  DOMAIN (41)..(231): Elongation factor Tu family domain identified by PFam, accession name GTP_EFTU, E-value=1.1e-60, PFam score of 207.1
DVAQTGHNTQQQRGIGHDLVKKHGKDVVEDLHNDLSRGSPLVVAATDGPMPQTREHILLGRQVGVPYIIVFLNKCDMVDDEELLELVEMEVRELLSQYDFPGDDTPIVRGSALKALEGDAEWEAKILELAGFLDSYIPEPERAIDKPFLLPIEDVFSISGRGTVVTGRVERGIIKVGEEVEIVGIKETQKSTCTGVEMFRKLLDEGRAGENVCVLLRGIKREEIERGQVLA

SEQ ID NO: 48128 - protein, 490 aa, Homo sapiens
NCPLCGADSLYTTDKGALRMTTQLEQAWELAKQRFAAVGIDVEEALRQLDRLPVSMHCWQGDDVSGFENPEGSLTGGIQATGNYPGKARNASELRADLEQAMRLIPGPKRRNLHAIYGSKVFAVAGCVVLMTTMPDSCNSWQKCRNKTMNKKIHSLALLVNLGIYGVAQAQEPTDTPVSHDDTIVVTAAEQNLQAPGVSTITADEIRKNPVARDVSKIIRTMPGVNLTGNSTSGQRGNNRQIDIRGRFDGIVGIFALIGDWYPAMYGTELNMQMTKQPPIAKADLQKTQGNRAPAAVKNSDVISFINQPSMKEQLAAALPRHMTAERMIRIATTEIRKVPALGNCDTMSFVSAIVQCSQLGLEPGSALGHAYLLPFGNKNEKSGKKNVQLIIGYRGMIDLARRSGQIASLSARVVREGDEFSFEFGLDEKLIHRPGENEDAPVTHVYAVARLKDGGTQFEVMTRKQIELVRSLSKAGNNGPWYSLEEVPS

SEQ ID NO: 48129 - protein, 44 aa, Homo sapiens
  misc_feature (1)...(44): Xaa = X or * as defined in Table 2
AGRSRENRRYRAKQPRCGKRXFXCVYRFYPSGRYAEPSSAPNYT

SEQ ID NO: 48130 - protein, 476 aa, Homo sapiens
  DOMAIN (248)..(268): D-ALA-D-ALA CARBOXYPEPTIDASE 3 (S13) FAMILY SIGNATURE domain identified by eMATRIX, accession number PR00922A, p-value=4.086e- 18, raw score of 15.09
  DOMAIN (250)..(379): D-Ala-D-Ala carboxypeptidase 3 (S13) fa domain identified by PFam, accession name Peptidase_S13, E-value=2.1e-64, PFam score of 227.4
HGRRGISSPPVHSSRGNLKKMGKQDYCEILGVSKTAEEREIRKAYKRLAMKYHPDRNQGDKEAEAKFKEIKEAYEVLTDSQKRAAYDQYGHAAFEQGGMGGGGFGGGADFSDIFGDVFGDIFGGGRGRQRAARGADLRYNMELTLEEAVRGVTKEIRIPTLEECDVCHGSGAKPGADAPGILRCTADLSTLSGPRFIIGLTSCIAFSVQAANVDEYITQLPAGANLALMVQKVGASAPAIDYHSQQMALPASTQKVITALAALIQLGPDFRFTTTLETKGNVENGVLKGDLVARFGADPTLKRQDIRNMVATLKKSGVNQIDGNVLIDTSIFASHDKAPGWPWNDMTQCFSAPPAAAIVDRNCFSVSLYSAPKPGDMAKVRTVAVPRSSDGSAAHRDPLRSVRSSPADAVRFAPGSGDHWPPDNPLPDRLRHRCALPAHAPYRRVCTAQPPVADAKYVARDETPGLCRDGHGARWR

SEQ ID NO: 48131 - protein, 88 aa, Homo sapiens
  misc_feature (1)...(88): Xaa = X or * as defined in Table 2
TRARRRFITALRFSSLVSASPCCNWAAAFSSYFCQQIVRXPHFDRQEKRSVQNQPDGCSSSASQSVRQRPKSPQQPVQSANPSLLLCR

SEQ ID NO: 48132 - protein, 110 aa, Homo sapiens
SASFYQKAVPYPDPGSWRDIFNHVMQQRRHQRFIVSFISARMQATATGCVIWVHRLNVFAPREHHVQRIRLPQTLDLVFRQRLLLLLFLAFANVEDLVADQTFFDFAQRE

SEQ ID NO: 48133 - protein, 197 aa, Homo sapiens
MSLIRTETRDTKRAADPLHDLRSKPFSEWGEDEIRRFNLIDALLEFVYTDTSSPFGIGMTFDYTECWEIGVRDDCLVMTRVKPVHPEYAKHWNMKGVMNDKTRFHADKWVGYSKVLAWVSLSHKDTFTGAKRFQYFQTMYDMERQINANLPVGGLPNVDTERTGKLFQRDDFSEDSHANDPKLVGDDYVPQAPEQIN

SEQ ID NO: 48134 - protein, 399 aa, Homo sapiens
MTLHGDTRIDNYYWLRDDTRSQPEVLDYLQQENSYGHRVMASQQALQDRILKEIIDRIPQREVSAPYIKNGYRYRHIYEPGCEYAIYQRQSAFSEEWDEWETLLDANKRAAHSEFYSMGGMAITPDNTIMALAEDFLSRRQYGIRFRNLETERFPNDVDPIETRDWLQAIESVIREEGVERAQYLIDQLLAEARKGGVNVAAGTGISNYINTIPVEEQPEYPGNLELERRIRSAIRWNAIMTVLRASKKDLELGGHMASFQSSATIYDVCFNHFFRARNGVPTYHLIEAVVFRFLTAGFPLLLKKASGVFWNAEFGHQLIAGDHFFHHFQAHLVQFGGDFFQLFNLGEGQLVVSIFTPVRLAVHGVKIETVFVGFLTPVRALGNTDSFHRYQPPIEREE

SEQ ID NO: 48135 - protein, 1120 aa, Homo sapiens
  DOMAIN (175)..(215): Transketolase proteins domain identified by eMATRIX, accession number BL00801D, p-value=5.250e-11, raw score of 22.48
  DOMAIN (178)..(321): Transketolase domain identified by PFam, accession name transketolase, E-value=0.0033, PFam score of 15.1
NRFSHISVTSACGWYHIPVEEQPEYPGNLELERRIRSAIRWNAIMTVLRASKKDLELGGHMASFQSSATIYDVCFNHFFRARNEQDGGDLVYFQGHISPGVYARAFLEGRLTQEQLDNFRQEVHGNGLSSYPHPKLMPEFWQFPTVSMGLGPIGAIYQAKFLKYLEHRGLKDTSKQTVYAFLGDGEMDEPESKGAITIATREKLDNLVFVINCNLQRLDSPRWDELLRKDTSGKLIQLMNETVDGDYQTFKSKDGAYVREHFFGKYPETAALVADWTDEQIWALNRGGHDPKKIYAAFKKAQETKGKATVILAHTIKGYGMGDAAEGKNIAHQVKKMNMDGVRHIRDRFNVPVSDADIEKLPYITFPEGSEEHTYLHAQRQKLHGYLPSRQPNFTEKLELPSLQDFGALLEEQSKEISTTIAFVRALNVMLKNKSIKDRLVPIIADEARTFGMEGSVRQIVLRNWKSGDVPEISHENESLIVTFSDRVPLPRLANGHALKEAQRSCGANGMCRHRDDAGVKLSTTLCHHFSLRKKKKSGIRQSGWKNWLPFPMTTRKRAQALVAKGITIELFCAPGEIPSARLPMSDVRFYSRSSIRFARCDCIEGTLCEHVVLAVQAFVEAKAQQAEFNHLIWQMRSEHVTSSDDPFASEEGNACRQYVQQLSQTLWLGGISQPLIHYEAAFNRALQAAETCNWRWVSESLRQLRASVDAFHARASHYNAGECLHQLAALNSRLNCAQEMARRDSIGEVPPVPWRTVVGSGIAGEAKLDHLRLVSLGMRCWQDIEHYGLRIWFTDPDTGSILHLSRSWPRSEQENSPAATRRLFSFQAGALAGGQIVSQAAKRSADGELLLATRNRLSSVVPLSPAAAIKNSKYPNSVTRSDYVPIEPSVKNLFAVNEFYRNNDDFINPDLQERLVIGDYSISIFTYDIKGATSGFCFYQLSLLIQLLTGWCVTAKAPPDISAISALTAVKHGNCSSLTPLLNPPGSDVIVCAEMDEQWGYVGAKSRQRWLFYAYDRLRKTVVAHVFGERTMATLGRLMSLLSPFDVVIWMTDGWPLYESRLKGKLHVISKRYTQRIERHNLNLRQHLARLGRKSLSFSKSVEQHDKVIGHYLNIKHYQ

SEQ ID NO: 48136 - protein, 315 aa, Homo sapiens
  DOMAIN (241)..(277): OmpA-like domain proteins domain identified by eMATRIX, accession number BL01068, p-value=7.188e-13, raw score of 21.59
  DOMAIN (210)..(306): OmpA family domain identified by PFam, accession name OmpA, E -value=1.9e-43, PFam score of 157.7
LAGATGTAIRLILHAPLLLPIKMRLPTVSEGKPDSIPAAEKFAAENKNTYGALASLELAQQFVDKNELEKAAAQLQQGLADTSDENLKAVINLRLARVQVQLKQADAALKTLDTIKGEGWAAIVADLRGEALLSKGDKQGKHQRAENCEIQGYIDMIKHLVAPLVFTSLILTGCQSPQGKFTPEQVAAMQSYGFTESAGDWSLGLSDAILFAKNDYKLLPESQQQIQTMAAKLASTGLTHARMDGHTDNYGEDSYNEGLSLKRANVVADAWAMGGQIPRSNLTTQGLGKKYPIASNKTAQGRAENRRVAVVITTP

SEQ ID NO: 48137 - protein, 512 aa, Homo sapiens
  DOMAIN (48)..(85): Argininosuccinate synthase proteins domain identified by eMATRIX, accession number BL00564A, p-value=2.125e-09, raw score of 19.93
  DOMAIN (49)..(106): Arginosuccinate synthase domain identified by PFam, accession name Arginosuc_synth, E-value=9.5e-07, PFam score of 23.3
MPDEENRFNALKAVFSQLMTDATLTPLFNYHYRISAPPGVNGLSMKRAVVVFSGGQDSTTCLVQALQQYDEVHCVTFDYGQRHRAEIDVARELALKLGARAHKVLDVTLLNELAVSSLTRDSIPVPDYEPEADGIPNTFVPGRNILFLTLAAIYAYQVKAEAVITGVCETDFSGYPDCRDEFVKALNHAHKEKLDEDCKRRMYTNPLRVLDSKNPEVQALLNDAPALGDYLDEESREHFAGLCKLLESAGIAYTVNQRLAVNPEFKADPVVDIYLVASGADTQSAAMALAERLRDELPGVKLMTNHGGGNFKKQFARADKWGARVAVVLGESEVANGTAVVKDLRSGEQTAVAQDSVAAHLRRYWVKEGEGQRGNLRERKRPALAVGVILGVGALIGWRYWNSHQVDSARSASLAYQNAVTAVSEGKPDSIPAAEKFAAENKNTYGALASLELAQQFVDKNELEKAAAQLQQGLADTSDENLKAVINLRLARVQVQLKQADAALKTLDTIKR

SEQ ID NO: 48138 - protein, 629 aa, Homo sapiens
STTRSSTFANARNSKSRKPLNYKPLPLLLKVVVNHKAGRPCICLKALKLMTNHGGGNFKKQFARADKWGARVAVVLGESEVANGTAVVKDLRSERFPNDVDPIETRDWLQAIESVIREEGVERAQYLIDQLLAEARKGGVNVAAGTGISNYINTIPVEEQPEYPGNLELERRIRSAIRWNAIMTVLRASKKDLELGGHMASFQSSATIYDVCFNHFFRARNEQDGGDLFYFQGHIYPGVYARAFLEGRLTQEQLDNFRQEVHGNGLSSYPHPKLMPEFWQFPTVSMGLASTLKRRERISARLGDILSHLYLASVVLKRYDYEGRNEADLAIVHWGVQHALYHAEQAMDDLLQNFPNRVVAGLLNVVILPTGRHYLAPSDKLDHKVANILQVPNATRSRIGRGQYLTPSEHNPVGLLEQTLVDVIADDPIHQPDLKRAGEKPAVTRLDELAHNARGSPSALKPETQNAQLTHCTTCVASRFLNTSSPFGIGMTFDYTECWEIGVRDDCLVMTRVKPVHPEYAKHWNMKGVMNDKTRFHADKWVGYSKVLAWVSLSHKDTFTGAKRFQYFQTMYDMERQINANLPVGGLSNVDTERTGKLFQRDDFSEDSHANDPKLVGDDYVPQAPEQNN

SEQ ID NO: 48139 - protein, 671 aa, Homo sapiens
  DOMAIN (264)..(309): TRANSFERASE ACYLTRANSFERASE PHOSPH domain identified by eMATRIX, accession number PD02355C, p-value=1.551e-26, raw score of 21.47
  DOMAIN (29)..(351): Phosphate acetyl/butaryl transferase domain identified by PFam, accession name PTA_PTB, E-value=9.9e-124, PFam score of 424.5
  misc_feature (1)...(671): Xaa = X or * as defined in Table 2
MESGVATRPIADFDVYIDKLTEFVYKTNLFMKPIFSQARKAPKRVVLPEGEEARVLHATQELVTLGLAKPILIGRPNVIEMRIQKLGLQIKAGVDFEIVNNESDPRFKEYWTEYFQIMKRRGVTQEQAQRALISNPTVIGAIMVQRGEADAMICGTVGDYHEHFSVVKNVFGYRDGVHTAGAMNALLLPSGNTFIADTYVNDEPDAEELAEITLMAAETVRRFGIEPRVALLSHSNFGSSDCPSSSKMRQALELVRERAPELMIDGEMHGDAALVEAIRNDRMPDSSLKGSANILVMPNMEAARISYNLLRVSSSEGVTVGPVLMGVAKPVHVLTPIASVRRIVNMVALAVLFVNADETTVVNFHACFACVEVFTVRHTTNRYQHGVVTLRFSGCFFAFHRHINAVFFRFNIQAVFVALRPEVIAIMHKLREQGHRVVVLSNTNRLHTTFWPEEYPEIRDAADHIYLSQDLGMRKPEARIYQHVLQAEGFSPSDTVFFDDNADNIEGANQLGITSILVKDKTTIPDYFAKDKARHRTRPLWAWLKLLWQRIDEDNMTTLAGNLAYVSLLSLVPLVAVVFALFAAFPMFSDVSIQLRHFIFANFLPATGDVIQRYIEQFVANSNKMTAVGAASLAISSYLLSLIANVLMLMSXSVLRMSWNPKWAWSSIWYS

SEQ ID NO: 48140 - protein, 94 aa, Homo sapiens
  DOMAIN (26)..(45): PRION PROTEIN SIGNATURE domain identified by eMATRIX, accession number PR00341H, p-value=9.153e-10, raw score of 1.28
  misc_feature (1)...(94): Xaa = X or * as defined in Table 2
RGTGHCALYRRAAARCAKITLTTFISLFSSYFVIYNILLLIYLIFAASFCLLVVXCIITVFITVCSAGDVSGMSATWCAFVAISVDHFTGFNRF

SEQ ID NO: 48141 - protein, 366 aa, Homo sapiens
  DOMAIN (156)..(171): GLUCOSE-6-PHOSPHATE ISOMERASE SIGNATURE domain identified by eMATRIX, accession number PR00662E, p-value=5.737e-16, raw score of 12.20
  DOMAIN (100)..(214): Phosphoglucose isomerase domain identified by PFam, accession name PGI, E-value=1.1e-53, PFam score of 191.7
MISAITLRASVSGIMTGILLAIARIAGETAPLLFTALSNQFWSTDMMQPIANLPVTIFKFAMSPFAEWQQLAWAGVRNLNFYYGKFHALKNINLDIAKNQPEALAFGKFREVVEQEYRVKGKDPATLDYVVPFKVFEGNGPTNSILLREITPFSLGALIALYEHKIFTQGVILNIFTFDQWGVELGKQLANRILPELKDDKEISSHDSSTNGLINRYKAWRVPLVAVVFALFAAFPMFSDVSIQLRHFIFANFLPATGDVIQRYIEQFVANSNKMTAVGACGLIVTALLLMYSIDSALNTIWRSKRARPKIYSFAVYWMILTLGPLLAGASLAISSYLLSKQWAIDIDSVNRLGAIILTALITGDT

SEQ ID NO: 48142 - protein, 338 aa, Homo sapiens
MAGKPEYDKTISTSIVLNALNALGVSAEASGRNDLVVKTVEGDRKVSGSAYRETKDRGFHHGTLLLNADLSRLANYLNPDKKKLAAKGITSVRSRVTNLTELLPGITHEQVCEAITEAFFAHYGERVEAEIISPNKTPDLPNFAETFARQSSWEWNFGQAPAFSHLLDERFTWGGVELHFDVEKGHITRAQVFTDSLNPAPLEALAGRLQGCLFSLYNSDLNTVIDNVLRIFPLLLSWISFWLLYSIVPTIRVPNRDAIVGAFVAALLFEAGKKGFALYITMFPSYQLIYGVLAVIPILFVWVYWTWCIVLLGAEITVTLGEYRKLKQAAEQEEDDEP

SEQ ID NO: 48143 - protein, 632 aa, Homo sapiens
  DOMAIN (517)..(572): ELEMENT INSERTION TRANSPOSABLE SEQUENCE TRANSPOSASE FOR domain identified by eMATRIX, accession number PD02662D, p-value= 3.973e-10, raw score of 21.71
  misc_feature (1)...(632): Xaa = X or * as defined in Table 2
MFPAQVRALGVGLSYAVANAIFGGSAEYVALSLKSIGMETAFFWYVTLMAVRTSIQTWHCDPGFEPDGEGEHILVRILKNGCNTRFVADALAKFLKIHAREVSFAGQKDKHAVTEQWLCARVPGKGMARSWSALFHLGQGLARLAGGIPRGQSNIEGANQLGITSILVKDKTTIPDYFAKDKARHRTRPLWAWLKLLWQRIDEDNMTTLAGNLAYVSLLSLVPLVAVVFALFAAFPMFSDVSIQLRHFIFANFLPATGDVIQRYIEQFVANSNKMTAVGACGLIVTALLLMYSIDSALNTIWRSKRARPKIYSFAVYWMILTLGPLLAGASLAISSYLLSLRWASDLNTVIDNVLRIFPLLLSWISFWLLYSIVPTIRVPNRDAIKAHDQFLADLASILPSNTTPLIVSDAGFKVPWYKSVEKLGWYWLSRVRGKVQYADLGAENWKPISNLHDMSSSHSKTLGYKRLTKSNPISCQILLYKSRSKGRKNQRSTRTHCHHPSPKIYSASAKEPWILATNLPVEIRTPKQLVNIYSKRMQIEETFRDLKSPAYGLGLRHSRTSSSERFDIMLLIALMLQLTCWLAGVHAQKQGWDKHFQANTVRNRNVLSTVRLGMASLRHSGYTITTGRLTX

SEQ ID NO: 48144 - protein, 281 aa, Homo sapiens
KGANQLGITSILVKDKTTIPDYFAKDKARHRTRPLWAWLKLLWQRIDEDNMTTLAGNLAYVSLLSLVPLVAVVFALFAAFPMFSDVSIQLRHFIFANFLPATGDVIQRYIEQFVANSNKMTAVGACGLIVTALLLMYSIDSALNTIWRSKRARPKIYSFAVYWMILTLGPLLAGASLAISSYLLSLRWASDLNTVIDNVLRIFPLLLSWISFWLLYSIVPTIRVPNRDAIVGAFVAALLFEAGKKGFALYITMFPSYQLIYGVLAVIPILFVWCYWTWVPS

SEQ ID NO: 48145 - protein, 57 aa, Homo sapiens
  misc_feature (1)...(57): Xaa = X or * as defined in Table 2
KKWMHSAVXWRKRSIRRVSSLGYXTQAKDRRFALPELRRIVCSTVRRYVRRWRTNRT

SEQ ID NO: 48146 - protein, 48 aa, Homo sapiens
CDAYANRLALLTTVIDESAIAAPATTGLSSVPVNGHKIPAATGIPILL

SEQ ID NO: 48147 - protein, 440 aa, Homo sapiens
  DOMAIN (212)..(261): Ribosomal protein L19 proteins domain identified by eMATRIX, accession number BL01015A, p-value=1.000e-40, raw score of 24.62
  DOMAIN (201)..(313): Ribosomal protein L19 domain identified by PFam, accession name Ribosomal_L19, E-value=3.3e-34, PFam score of 127.1
  misc_feature (1)...(440): Xaa = X or * as defined in Table 2
MRDRLGSPQFGISGVRAGGTNRRMARMISIPPASSSSSMLSIRTGVRAGFVDERCGVVQVRDKRCLEFISTRTRPLAVTGDGVDFTVMRQIAERLRQRPARYGVSGEALVEQANGRFQTQVRKIPHYTRPEVLEGMEVPPVLLSGNHAEIRRWRLKQSLGRTWLRRPELLENLALTEEQARLLAEFKTEHAQQQHKHDGMANIIKQLEQEQMKQDVPSFRPGDTVEVKVWVVEGSKKRLQAFEGVVIAIRNRGLHSAFTVRKISNGEGVERVFQTHLRCRIINNGIDMATEAILADLPPVRETQGKPKIAVVAHDLRYDGKTNQQLVREMMALGDKIELHTFGKFSPFTAGNVVNHGFETDKRKLMSALNQMDALVFSSRVDNYPLILCEALSIGVPVIATHSDAAREVLQKSGGKTVSEEEVLQLVQLSKPEIAQAIFX

SEQ ID NO: 48148 - protein, 147 aa, Homo sapiens
  misc_feature (1)...(147): Xaa = X or * as defined in Table 2
APSQTVSLPEVASSMSGVMAGVEAVSSPGPYAVCAGSLLPSGWLCVKTSVIAMIASAWSAPGAVSIKRSSAVSVRIWALCGAQPECAVRSLPSYPAFRQVLAPVTHALXPRRSSGCPXCDYSLQLLLQXPAHXHLQGLLRKQLSCQR

SEQ ID NO: 48149 - protein, 833 aa, Homo sapiens
  DOMAIN (241)..(269): Sigma-54 interaction domain proteins ATP-binding region A proteins domain identified by eMATRIX, accession number BL00675C, p -value=4.500e-28, raw score of 13.51
  DOMAIN (225)..(300): Sigma-54 transcription factors domain identified by PFam, accession name sigma54, E-value=1.3e-33, PFam score of 124.2
MGPGLAQRYSFRAHLIKIPGAGPTSPEPNVQRQLAEKVQPTWMLSQVRVESLQIFHAEIANCWWFYHSQVWRLPSHSSTQQGPESGREDCGQLGQKCLETAECIHFFYQMSLPNTADRRVAAHLPQSVDIVCQKQSLLTHYVARHRGLGACMTPANDDDVKRIRIKHESCCSTMPPMVITCVRILSSSAFIGPSGCGKSTLLRTFNKMFELYPEQHGNGTKTGDQIIAATHQNLEQRVQEGKFREDLFHRLNVIRVHLPPLRERREDIPRLARHFLQVAARELGVEAKLLHPETEAALTRLAAITVSQRQAVEKKLDTRRGSNSELETAVKDLGMAVSYKGNHSTGSEIMIKIGVIVDDFTGATDIASFLVENGLPTVKVSLEDTLNAFAVGNFTNSECRVQTAVTNSDNHALECLQTFFGTFNNPYFHFHGITRTEGSGNIYQHYLNEYKVKPVIHNKDWRFKRFAVELPPSLRVIKVVNHKPRIGLETVDSGRIMLDNEDITHVPAENSYVNTVFQSYALFPHMTVFENVAFVQLMAQVCRPDKTRKRCIRQWCSDAGCGVNALSGLRFRHKFVGLIRRMKRCFGLTRPFLHAIHGVPNIHGRYQQFDDNPFKQVAQNPLATFSLDVDTASYATVRRFFNQVLLRPPDAVRVEEIVNYFPSDWDIKDRQFIPASKPIPFAMRYELAPAPWNEQRTLLKVDILAKDRKSEELPASTLVFLIDTSGSMISDERLPLIQSSLKLLVKELREQDNIAIVTYAGDSRIALPSISGSHKAEINAAIDSLDAEGSTNGGAGLELDYQQATKGFIKGGINRILLDSEGSSKVDPQACMH

SEQ ID NO: 48150 - protein, 415 aa, Homo sapiens
  DOMAIN (121)..(163): Nickel-dependent hydrogenases large subunit proteins domain identified by eMATRIX, accession number BL00507C, p-value=5.378e- 13, raw score of 23.54
  DOMAIN (118)..(350): Nickel-dependent hydrogenases domain identified by PFam, accession name NiFeSe_Hases, E-value=3.4e-10, PFam score of 34.9
RLKCLGSIFFGGCTNGGKLNFGFRRLLKHLVTFVDIGNGNFSAVQIGAEFLRFFFVTAASKRETRQMQQRGKQRAFRLFVDGENIIDADYRLFYVHRGMEKLAETRMGYNEVTFLSDRVCGICGFAHSTAYTTSVENAMGIQVPERAQMIRAILLEVERLHSHLLNLGLACHFTGFDSGFMQFFRVRETSMKMAEILTGARKTYGLNLIGGIRRDLLKDDMIQTRQLAQQMRREVQELVDVLLSTPNMEQRTVGIGRLDPEIARDFSNVGPMVRASGHARDTRADHPFVGYGLLPMEVHSEQGCDVISRLKVRINEVYTALNMIDYGLDNIPHRFALGFAEAPRGDDIHWSMTGDNQKLYRWRCRAATYANWPTLRYMLRGNTVSDAPLIIGSLDPCYSCTDRMTVVDVRKKKRH

SEQ ID NO: 48151 - protein, 344 aa, Homo sapiens
  DOMAIN (3)..(336): tRNA synthetases class I (R) domain identified by PFam, accession name tRNA-synt_1d, E-value=0.0074, PFam score of -197.7
KSIFWRAPADCEPQVRQSAKVQFGDYQANGMMAVAKKLGMAPRQLAEQVLTHLDLNGIASKVEIAGPGFINIFLDPAFLAEHVQQALASDRLGVATPEKQTIVVDYSAPNRGFFGGGAPLGTTLQDLTRPTKEDGLQAKPISFWASFALQFVNVKIILYGVTALSTFVLPQTQALSWVVGVSVLLAMIGTFGNVCWALAGHLFQRLFRQYGRQLNIVLALLLVYCAAFSKGTSDNVALLFRSQRVKANCITGYTDGQLRIFFRMLNCIFQSFATQNVNVQVLTTFNANFWFHFYWNFTVFNVTQFAYCNHFIFCITCFCNDATPFAFFAVQQPERVHRKTAILL

SEQ ID NO: 48152 - protein, 46 aa, Homo sapiens
FCDDIAGFTGAWIGDSTAYANFVAQLYKPFGLLQAAGKTVNHASAR

SEQ ID NO: 48153 - protein, 131 aa, Homo sapiens
  misc_feature (1)...(131): Xaa = X or * as defined in Table 2
VFPVFLRIYVFWKKPGMKVTNARNWQLKPLFTELPVILPDTQLHYVAWMELYSPAEXERIQAXFVVWSWNIWLYXAXRLIQKXIIALTPVVRTGKTKLMSAILFNITIHRMKAMNLSSPKRRLPPRNCGKK

SEQ ID NO: 48154 - protein, 492 aa, Homo sapiens
  DOMAIN (29)..(47): Acetate and butyrate kinases family proteins domain identified by eMATRIX, accession number BL01075G, p-value=5.750e- 16, raw score of 7.88
  DOMAIN (132)..(490): tRNA synthetases class I (R) domain identified by PFam, accession name tRNA-synt_1d, E-value=1.4e-11, PFam score of 17.5
MGTRSGDVDFGAMSWVASQTNQSLGDLERVVNKESGLLGISGLSSDLRVLEKAWHEGHERAQLAIKTFVHRIARHIAGHAASLRRLDGIIFTGGIGENSSLIRRLVMEHLAVLGLEIDTEMNNRSNSCGIPVNIQALLSEKVRQAMIAAGAPADCEPQVRQSAKVQFGDYQANGMMAVAKKLGMAPRQLAEQVLTHLDLNGIASKVEIAGPGFINIFLDPAFLAEHVQQALASDRLGVATPEKQTIVVDYSAPNVAKEMHVGHLRSYIIGDAAVRTLEFLGHKVIRANHVGDWGTQFGMLIALLEKQQQENARSASSRWAWAPRTPHSEPAAGPQRPGHEIKMAVGVDKTANQARSSLLNVGSFACGASLTSATSVSLATGAGGMTIDSGVTTGTRWRNLRPITFLPTLTLRIVLWHLPPRTSFRRARADTNLYRLISPLYDSLRPVRIQSNITPATRNNMPRKISPLILYLDQDWISPMSSMIDWIRKCGT

SEQ ID NO: 48155 - protein, 79 aa, Homo sapiens
  misc_feature (1)...(79): Xaa = X or * as defined in Table 2
RGGAXRQKHRRTSALSLLSLPXNMATAVHLHRFSTRRAVTSSSARKWTNSGAMSGLNRASAAVLRVXQSPEDGCCARIR

SEQ ID NO: 48156 - protein, 108 aa, Homo sapiens
  misc_feature (1)...(108): Xaa = X or * as defined in Table 2
PRNLRKSGPPISDAISPTSKPXTITEPISAPSLLATYKAAGCGGTTQCTAINAVHSGMASFNNEVLVFLAIEKARGINSTTPTSTNSVMPQIRPTSTIMTSTESQRQR

SEQ ID NO: 48157 - protein, 464 aa, Homo sapiens
  DOMAIN (53)..(98): TRANSPORT GLUCONATE TRANSMEMBRANE PROTEIN PERMEA domain identified by eMATRIX, accession number PD02680B, p-value=7.088e- 12, raw score of 27.96
  DOMAIN (9)..(445): Peptidase family M3 domain identified by PFam, accession name Peptidase_M3, E-value=4.5e-05, PFam score of -103.8
MVLVGLICGITLFVEVGVVLLIPLAFSIAKKTNTSLLKLAIPLCTALMAVHCVVPPHPAALYVANKLGADIGSVIVYGLLVIHQRFVLAGAKLAQADKAKLKVLNTEAATLTSQFNQRLLAANKSGGLVVNDIAQLAGMSEQEIALAAEAAREKGLDNKWLIPLLNTTQQPALAEMRDRATREKLFIAGWTRAEKNDANDTRAIIQRLVEIRAQQATLLGFPHYAAWKIGDQIAKTPEAALNFMREIVPAARQRAHPSWKTARNSVFDIFKIGIGPSSSHTVGPMKAGKQFTDDLIARNLLKDVTRVVVDVYGSLSLTGKGHHTDIAIIMGLAGNLPDTVDIDSIPSFIQDVNTHGRLMLANGQHEVEFPVDQCMNFHADNLSLHENGMRITALAGDKVVYSQTYYSIGGGFIVDEEHFGQQDSAPVEVPYPYSSAADLQKHCQETGLSLSGLMMKNELALHSN

SEQ ID NO: 48158 - protein, 458 aa, Homo sapiens
  DOMAIN (35)..(82): Bacterial regulatory proteins tetR family proteins. domain identified by eMATRIX, accession number BL01081, p-value=1.789e-16, raw score of 28.63
  DOMAIN (35)..(81): Bacterial regulatory proteins, tetR family domain identified by PFam, accession name tetR, E-value=3e-11, PFam score of 49.7
MALGKDLEQGPHHIGSHHLQMKKSGRPRRFAPEQAISAAKVLFHQKGFDAVSVAEVTDYLGINPPSLYAAFGSKAGLFSRVLNEYVGTEAIPLADILRDDRPHRHFAEATIMPTVITHAAVPLCIGLGLGSKVIPPRLLFAGIILAMLPDADVLSFKFGVAYGNVFGHRGFTHSLVFAFVVPLLCVFIGRRWFRAGLIRCWLFLTVSLLSHSLLDSVTTGEKSTVIEVGVDVPNASLMIIENPERLGLAQLHQLRGRNQQLKKGEPTAQYRKLRSPTDGTDDNALSADARDGTSARWWRALGISEHVTLELNSIGSLEARANYRDALVAFLEQHKEKLDEDCKRRMYTNPLRVLDSKNPEVQALLNDAPALGDYLDEESREHFAGLCKLLESAGIAYTVNQRLLNYRLSANLIENNLSLFDGEGIYRFYHPKPTKNAERENRQCRNDLFFRCGFFCPP

SEQ ID NO: 48159 - protein, 111 aa, Homo sapiens
LVGSHRSGGAQCLAGQASEARHSIRWAWSWVGLARCCVRQARGQWGQRGTVSSGPGGLGEPGREGPAEPASLGLAAPTGREGPRLWAASGGPGTGSATTAVGPCRLWPHTW

SEQ ID NO: 48160 - protein, 80 aa, Homo sapiens
GPERSSTLTFEARGQVELSATQPRPPLLGPEQGCAPLHATQALLPHPTGKPALAAAGAPALCTPGQADARRIPPHGLRSR

SEQ ID NO: 48161 - protein, 80 aa, Homo sapiens
MKKILTTPIKAEDLQDIRVGDVIYLTGTLGSGLRVAVLEQRVQEPLAANAPPQLRVSAINAASEKLLTRLGVWQDILSRR

SEQ ID NO: 48162 - protein, 152 aa, Homo sapiens
MKKILTTPIKAEDLQDIRVGDVIYLTGTLVTCRDVCHRRLIELKRPIPYDLNGKAIFVRCILDADAQREGINASTRYPKNWVQSGDPARESTMIQSQINRNIRLDLADAILLSKAKKDLSFAEIADGTGLAEAFVTAALLGQQALPADAARL

SEQ ID NO: 48163 - protein, 632 aa, Homo sapiens
  DOMAIN (537)..(555): VESPID VENOM ALLERGEN PHOSPHOLIPASE A1 SIGNATURE domain identified by eMATRIX, accession number PR00825C, p-value=6.756e- 09, raw score of 11.90
  DOMAIN (535)..(571): MYND finger domain identified by PFam, accession name zf- MYND, E-value=1.9e-14, PFam score of 61.4
MSQTHPVLESGLLASAGCSAPRGPRKGGPAPVDRKAKASAMPDSPAEVKTQPRSTPPSMPPPPPAASQGATRPPSFTPHTHREDGPATLPHGRFHGCLKWSMVCLLMNGSSHSPTAINGAPCTPNGFSNGPATSSTASLSTQHLPPACGARQLSKLKRFLTTLQQFGSDISPEIGERVRTLVLGLVNSTLTIEEFHSKLQEATNFPLRPFVIPFLKANLPLLQRELLHCARLAKQTPAQYLAQHEQLLLDASASSPIDSSELLLEVNENGKRRTPDRTKENGSERDPLHPEHLSKRPCTLNPAQRYSPSNGPPQPTPPPHYRLEDIAMAHHFRDAYRHPDPRELRERHRPLVVPGSRQEEVIDHKLTEREWAEEWKHLNNLLNCIMDMVEKTRRSLTVLRRCQEADREELNHWARRYSDAEDTKKGPAPAAARPRSSSAGPEGPQLDVPREFLPRTLTGYVPEDIWRKAEEAVNEVKRQAMSELQKAVSDAERKAHELITTERAKMERALAEAKRQASEDALTVINQQEDSSESCWNCGRKASETCSGCNAARYCGSFCQHRDWEKHHHVCGQSLQGPTAVVADPVPGPPEAAHSLGPSLPVGAASPSEAGSAGPSRPGSPSPPGPLDTVPR

SEQ ID NO: 48164 - protein, 26 aa, Homo sapiens
GARGAAGRGLTRSLWSCRASSSCRSR

SEQ ID NO: 48165 - protein, 19 aa, Homo sapiens
GHQWPCRWAASGPQGPGWW

SEQ ID NO: 48166 - protein, 48 aa, Homo sapiens
NQPVYRSNGDRIWRTGKLFPTTVFRLIRTLSPRAFPPFTSYRRCSVAY

SEQ ID NO: 48167 - protein, 665 aa, Homo sapiens
  DOMAIN (248)..(303): Aconitase family proteins domain identified by eMATRIX, accession number BL00450B, p-value=2.059e-15, raw score of 42.34
  DOMAIN (258)..(295): Aconitase family (aconitate hydratase) domain identified by PFam, accession name aconitase, E-value=3.3e-17, PFam score of 58.5
MTLKTPDARQSVGANSLRDIPCTRRAGLASESRDAALTILQVLGDGGPSVQVLALRSWPRFLVRGWLGFFSHVLVTRRCGRAGITLPSLRKSPPVWCGAESPTDNPRHTLIAVGRSTLRIPDCARVVHVKVAVMVNFTFCVFYNKNPKQEDGSPMASKDITLTFVLPATSRPSSSLPRSLSPHVPRGYVGAVTVPTRSHGARPRHGRELGAVGKPHPGSPGSGSLKDLERAYKNFFRKRAAFPRFKKRGQNDAFRYPQLGWGVGGIEAEAAMLGQPVSMLIPDVVGFKLTGKLREAPPGKLCPLPSAVSSGCSTLERVVYRPDINQGNYLTANDVSKIRVGMTQQQVAYALGTPLMSDPFGTNTWFYVFRQQPGHEGVTQQTLTLTFNSSGDPKLREPQVAQATAAGVAFVPDVGPPPPSSMSGSGSNGPFLCGKQTTFEGGMREPALAWWPGHVTAGQSCWNCGRKASETCSGCNAARYCGSFCQHRDWEKHHHVCGQSLQGPTAVVADPRVMKKILTTPIKAEDLQDIRVGDVIYLTGTLVTCRDVCHRRLIELKRPIPYDLNGKAIFHAGPIVPKNGDKWEMVSVGPTPSMRMESFDREFIEQSGVNLVVGKGGMGPLTEEGCQKFKALHVIFPAGCAVLAATQVEEIEEVRWTELGMPESL

SEQ ID NO: 48168 - protein, 717 aa, Homo sapiens
  DOMAIN (117)..(322): tRNA synthetases class I (W and Y) domain identified by PFam, accession name tRNA-synt_1b, E-value=2.9e-46, PFam score of 167.1
MTPSRFAKKNGSLVKRCPMGIDAEVTMIKPIAARPKVSHSKVRSYMIRLSVSFSREPITQPFSAVEIQTRIRYGVSGFFLRRVDTEHHPDRHAARALQYHITGSNRCDAINAVQFDTAGGECTNRRMAEDHGRNVAVIQMLIRLVIKQAFREVPSELWTNRKQACPFLDFDCGENSAIAANNYDWFGNMNVLTFLRDIGKHFSVNQMINKEAVKQRLNREDQGISFTEFSYNLLQGYDFACLNKQYGVVLQIGGSDQWGNITSGIDLTRRLHQNQVFGLTVPLITKADGTKFGKTEGGAVWLDPKKTSPYKFYQFWINTADADVYRFLKFFTFMSIEEINALEEEDKNSGKAPRAQYVLAEQVTRLVHGEEGLQAAKRITECLFSGSLSALSEADFEQLAQDGVPMVEMEKGADLMQALVDSELQPSRGQARKTIASNAITINGEKQSDPEYFFKEEDRLFGRFTLLRRGIGTKLARVARMHFARQRLAAVGPRLPARQDLFNKLLASRAIAKAVEDEARSKKISHEKAQQNAIALMEEIAANFSYEMIRLTDRILGFTWNRLYQGINVHNAERVRQLAHDGHELVYVPCHRSHMDYLLLSYVLYHQGLVPPHIAAGINLNFWPAGPIFRRLGAFFIRRTFKGNKLYSTVFREYLGELFSRGYSVEYFVEGGRSRTGRLLDPKTGTLSMTIQAMLRGGTRPITGIPSDRPEVMQLPP

SEQ ID NO: 48169 - protein, 375 aa, Homo sapiens
  DOMAIN (108)..(294): Acyltransferase domain identified by PFam, accession name Acyltransferase, E-value=1.8e-40, PFam score of 147.9
GTPYASQPVIRPVEGSKPLIKQVLDIGAHGTDKTIAQKLARVARMHFARQRLAAVATFACSAQNAIALMEEIAANFSYEMIRLTECILGFTWNRLYQGINVHNAERVRQLAHDGHELVYVPCHRSHMDYLLLSYVLYHQGLVPPHIAAGINLNFWPAGPIFRRLGAFFIRRTFKGNKLYSTVFREYLGELFSRGYSVEYFVEGGRSRTGRLLDPKTGMLRGGTRPITLIPIYIGYEHVMEVGTYAKELRGATKEKESLPQMLRGLSKLRNLGQGYVNFGEPMPLMTYLNQHVPDWRESIDPIEAVRPAWLTPTVNNIAADLMVRINNAGAANAMNLCCTALLASRQRSLTREQLTEQLNCYLDLMRNVPYSTDST

SEQ ID NO: 48170 - protein, 98 aa, Homo sapiens
PVLVYLWVSFSWLCGRSLVCDAFGCVLCVLCFWCGVCWGWFSRCLVLVRVLDCVAVAWVCPLGVGIGLWVRVLPTGLVSAVPCCCDVLARFRVDLCWG

SEQ ID NO: 48171 - protein, 822 aa, Homo sapiens
  DOMAIN (302)..(331): Chorismate synthase proteins domain identified by eMATRIX, accession number BL00787F, p-value=2.227e-30, raw score of 13.19
  DOMAIN (239)..(333): Chorismate synthase domain identified by PFam, accession name Chorismate_synt, E-value=8.5e-62, PFam score of 204.6
MFQPSDSGKSFIFNMSVGYNLEGIKQPPMQQFIDNMMDASDHPKFAQYRDTLNKLLQDDAFLARHGLQEKRESLQALPARIPTSMVHGVTLSTMHGCPPHEIEAICRYMLEEKGLNTFVKLNPTLLGYARVREILDVCGFGYIGLKEESFDHDLKLTQALEMLERLMALAKEKSLGFGVKLTNTLGTINNKGALPGDSTSGVLRTYERLLTAWMLTCPCADEHQRGESVKLATALTWWLRGSQNRDEITKDGFQSNHAGGILGGISSGQQIIAHMALKPTSSIDVPGRTINRFGEEVEMITKGRHDPCVGIRAVPIAEAMLAIVLMDHLLRQRAQNADVKTDIPRCAQSIGSFSNGCIVGADTLPIQSEHYQVMRTDQRRYFGHPDLVMFIQRLSSQVSNLGMGTVLIGDMGMPAGGRFNGGHASHQTGLDVDIFLQLPKTRWTSAQLLRPQALDLVSRDGKHVVSTLWKPEIFSLIKLAAQDKDVTRIFVNPAIKQQLCLDAGTIATGCAKCDPGVSIGAYAYLLTLRAQCLAHDLPDPLEPLEIDGTLLPRYVFIHGGPRVFTYYTPKEESIKLFHDYLDLHRSNPNLDVQMVPVSVMFGRAPGREKGEVNPPLRMLNGVQKFFAVLWLGRDSFVRFSPSVSLRRMADEHGTDKTIAQKLARVARMHFARQRLAAVGPRLPARQDLFNKLLASRAIAKAVEDEARSKKISHEKAQQNAIALMEEIAANFSYEMIRLTDRILGFTWNRLYQGINVHNAERVRQLAHDGHELVYVPCHRSHMDYLLLSYVLYHQGLVPPHIAAGINLNFWPAGPIFRRLGVI

SEQ ID NO: 48172 - protein, 244 aa, Homo sapiens
MLKSVPGEAQNTVSQANHLVREIRRNLFHQCNRVLLRFFMGDFFAARFIFYRFGNGAGGEQLIKQILTSRQTWAYGSQTLTGKVHTRYVFIHGGPRVFTYYTPKEESIKLFRDYLDLHRSNPNLDVQMVPVSVMFGRAPGREKGEVNPPLRMLNGVQKFFAVLWLGRDSFSGIVGAALLMAGCSSSNELSAAGQSVRIVDEQPGAECQLIGTATGGTMSQVQSGILPEHSPRGDLDRSQRERGS

SEQ ID NO: 48173 - protein, 320 aa, Homo sapiens
  DOMAIN (242)..(266): Glycosyl transferases group 1 domain identified by eMATRIX, accession number PF00534B, p-value=3.455e-15, raw score of 14.47
  DOMAIN (135)..(312): Glycosyl transferases group 1 domain identified by PFam, accession name Glycos_transf_1, E-value=5e-41, PFam score of 149.7
MANHLLPDRCYRTTYGQALNLKRYGAESRNLILSAICGQVATPFRADVFIAHFGPAGVTAAKLRELGVIRGKIATIFHGIDISSREVLNHYTPEYQQLFRRGDLMLPISDLWAGRLQKMGCPREKIAVSRMGVDMTRFSPRPVKAPATPLEIISVARLTEKKGLHVAIEACRQLKEQGVAFRYRILGIGPWERRLRTLIEQYQLEDVVEMPGFKPSHEVKAMLDDADVFLLPSVTGADGDMEGIPVALMEAMAVGIPVVSTLHSGIPELVEADKSGWLVPENDARALAQRLAAFSQLDPDELAPVVKRAREKVEHDFNQQ

SEQ ID NO: 48174 - protein, 334 aa, Homo sapiens
  DOMAIN (34)..(301): Polysaccharide biosynthesis protein domain identified by PFam, accession name Polysacc_synt, E-value=2.7e-72, PFam score of 253.6
SVWFGYQNRFPDRCSKVSLPNRHIDMSLREKTISGAKWSAIATVIIIGLGLVQMTVLARIIDNHQFGLLTVSLVIIALADTLSDFGIANSIIQRKEISHLELTTLYWLNVGLGIVVCVPVFLLSDLIDTVLNNQYLAPLIKTLSLAFVVIPHGQQFRALMQKELEFNKIGMIETSAVLAGFTCTVVSAHFWPLAMTAILGYLVNSAVRTLLFGYFVRKIYRPGLHFSLASVAPNLRFGAWLTADSIINYLNTNLSTLVLARILGAGVAGGYNLAYNVAVVPPMKLNPIITRVLFPAFAKIQDDTEKLRVNFYKLLSVVGIINFSALLGLKVVTK

SEQ ID NO: 48175 - protein, 80 aa, Homo sapiens
  misc_feature (1)...(80): Xaa = X or * as defined in Table 2
HSTGRWATTINVPITCGTKARHSTSSICKTGMILLWANALKQHCLLSRNLPXKGESINVANSLLSYFNLRPQCNQTRTQD

SEQ ID NO: 48176 - protein, 272 aa, Homo sapiens
  DOMAIN (35)..(272): Capsid protein (F protein) domain identified by PFam, accession name Phage_F, E-value=5.9e-16, PFam score of 66.4
MEGAEFTENIINGVERPVKAAELFAFTLRVRAGNTDVLTDAEENRLTVRVWGLGEDAGQITSTVQCSNWQEEVLTDAADEMVLASGATISAALKIPLRRTFTNAGARLVCSPAIAVYTVANVIVYRRKYTTELGTVLPGDNRLSEGYLNIYNNYFKAPWMPDRTEANPNELNQDDARYGFRCCHLKNIWTAPLPPETELSRQMTTSTTSIDIMGLQAAYANLHTDQERDYFMQRYHDVISSFGGKTSYDADNRPLLVMRSNLWASGYDVDGT

SEQ ID NO: 48177 - protein, 281 aa, Homo sapiens
QKHDNDDRLLALLLLNTFTPRAQLASALNLPETWVAERLPRLKQRYERTCCLASRPGLGHFIDETEEKRVILLANLLRKDPFLIPLAGITRDNLQHLSTACDNQHRWPLMQGDYLSSLILAIYALRNQLTDEWPQYPGIAHDLREFFDMSDQIVVFGDGDRDAVGVHFLEGVGADHRGGNLTSDANQRDGVQPRIGNGGHQVSRTRSLRQFTPQTSNSHWMTNAQLLGDFSIDNYQLYSLGHYPGAVPGNGTVHGEVYRIDNATLAELDALRTRAVNTRAS

SEQ ID NO: 48178 - protein, 92 aa, Homo sapiens
  misc_feature (1)...(92): Xaa = X or * as defined in Table 2
QVIRPTFIPSTSSNGAISLPASTRRDSXMANASXRCSLAXRATMFPAXSATSIFHARPGVEGTXIVRIVVIMLRLLSRRKVRGIRLPAAVLI

SEQ ID NO: 48179 - protein, 183 aa, Homo sapiens
ITACNSPVGPKSSQEAGIGIIHQELNLIPQLTIAENIFLGREFVNRFGKIDWKTMYAEADKLLAKLNLRFKSDKLVGDLSIGDYAGVVHAVNDVGTAGIRNSDRSHWRAAWRQLIYHRGIEIGIRSHCQRAGDRRGGHDQLQQHTACSRFAVYVAGANKQARRQLFRISCLKCHQHIPCAPRR

SEQ ID NO: 48180 - protein, 117 aa, Homo sapiens
  misc_feature (1)...(117): Xaa = X or * as defined in Table 2
DSGQQLDDVQLARYLLSGQNQPKSDRPYRVRXLTGAMLKLILTLVIEGNVTLGHRVKIGTGCVIKNSGDWRXLRNQSVYRCGRCESGSGLYHWARLPVCVLVLSCWKVLTSSLVPPD

SEQ ID NO: 48181 - protein, 486 aa, Homo sapiens
  DOMAIN (466)..(480): GTP-binding elongation factors proteins domain identified by eMATRIX, accession number BL00301C, p-value=7.750e-13, raw score of 11.73
  DOMAIN (155)..(260): SPRY domain identified by PFam, accession name SPRY, E-value= 0.011, PFam score of -0.0
SYLGSFAPIWLQYHLQVDTSMIYRIPPLHKTLVPQGQGKQEWANHTNGHSYGGRMLMCVKRVGTCIAYMTAPMENVLQDAEAAVAGPSHAPDTSDVGATLLVSDGTHSVRCLVTREALDTSDWEEKEFGFRGTEGRLLLLQDCGVHVQVAEGGAPAEFYLQVDRFSLLPTEQPRLRVLESTSQSPHGWDKHSYGYHGDDGHSFCSSGTGQPYGPTFTTGDVIGCCVNLINGTCFYTKNGHRLAQGRLEGNALKLDLLTSDRALDTTAPRGPCIGPGAGEILERGQRGVGDVLLQLEGISLGPGASLKTLCGLSTWRAVRRPWTASLLLELRSGVKSGRQSAVISQAKSLLSMGDGWPERDTPGLSDGERMIKRTFNPVLKKSVSLGSNIRHMLAEEATTEELDGTVPCAGVAEPPLAGVLDAGVFEFEEDELPLFSQEGVEMVMPGDNIKMVVTLIHPIAMDDGLRFAIREGGRTVGAGVVAKVLG

SEQ ID NO: 48182 - protein, 287 aa, Homo sapiens
  DOMAIN (124)..(137): Hexapeptide-repeat containing-transferases proteins domain identified by eMATRIX, accession number BL00101B, p-value=9.250e- 10, raw score of 8.91
  DOMAIN (77)..(138): Bacterial transferase hexapeptide domain identified by PFam, accession name hexapep, E-value=2.7e-05, PFam score of 31.0
LPVRQRIAVFPLANECWQRFWLNAEEVNIDIINVERHYRQPFNDFARQQRTTAGMSFCKTPWRSSQRGDPPIVVGETAVIENDVSILQSVTLGGTGKSGGDRHPKIREGVMIGAGAKILGNIEVGRGAKIGAGSVVRSRIPQLPPGFIHHYRDRIGQIHAAAVRHHRNANFWFSGQGIKNARWQAACFRAEHQIIAILIAYGAVSRCTFRGEGEQALGIFCFEERAIVMMTRNGGKLVIVQPRAAQALIVPGKSHRFDDMQTKAGISAKTDDVASIWRNFWFVKYDV

SEQ ID NO: 48183 - protein, 428 aa, Homo sapiens
  DOMAIN (267)..(306): Bacterioferritin proteins domain identified by eMATRIX, accession number BL00549A, p-value=9.609e-39, raw score of 22.99
  DOMAIN (267)..(417): Bacterioferritin domain identified by PFam, accession name Bacteriofer, E-value=4e-92, PFam score of 319.5
MVVVKVGIIVVFGFAMIPHWNFANITAFPQASVFFRDVLLTIPFCFFSAVFIQVLNPMNIAYRKREADKVLATRLALRTHRISYITLIAVILFFAFSFTFSISHEEAVSAFEQNISALALAAQVIPGHIIHITSTVLNIFAVLTAFFGIYLGFHEAIKGIILNLLSRIIDTKKIRVRARVRSGGTNITPWVAGIIAFRITRTVRRGYPPGIFIYRTIKDDIPGLTALLFIPGNYRRIRRNSALCWCSRTAISRRIGCRQWKRRSQKMKGDTKVINYLNKLLGNELVAINQYFLHARMFKNWGLKRLNDVEYHESIDEMKHADRYIERILFLEGLPNLQDLGKLNIGEDVEEMLRSDLALELDGAKNLREAIGYADSVHDYVSRDMMIEILRDEEGQIDWMETPLDLMGTELRVRLSLVFYAENLIEKH

SEQ ID NO: 48184 - protein, 223 aa, Homo sapiens
  DOMAIN (183)..(196): Hexapeptide-repeat containing-transferases proteins domain identified by eMATRIX, accession number BL00101B, p-value=9.250e- 10, raw score of 8.91
  DOMAIN (2)..(198): FMN-dependent dehydrogenase domain identified by PFam, accession name FMN_dh, E-value=2e-05, PFam score of -146.4
EIVDAGGLAPVGLCGMYARRGEVQAAKAADAHGIPFTLSTVSVCPIEEVAPACKRPMWFQLYVLRDRGFMRNALKGFHALQAYRIGHWLWNQGRRALAIFLQNQVSVTFQVDIHPAAKIGRGIMLDHATGIVVGETAVIETDVSILQSVTLGGTGKSGGDRHPKIREGVMIGAGAKILGNIQVGRGAKIGAGSVVLQPVPPHTTAAGVPARIVGKPDSDNPSM

SEQ ID NO: 48185 - protein, 1693 aa, Homo sapiens
  DOMAIN (821)..(876): Fimbrial biogenesis outer membrane usher protein domain identified by eMATRIX, accession number BL01151, p-value=1.643e-38, raw score of 29.09
  DOMAIN (667)..(890): Fimbrial Usher proteins domain identified by PFam, accession name Usher, E-value=2.3e-111, PFam score of 383.4
MQVGDFSTGVDLNGNNNSVTLAAKDLKVVGQKATGINVSGDANTVNITGNVLVDKDKTADNAAEYFFDPSVGINVYGSDNNVTLDGKLTVVSDSEVTSRQSNLFDGSAEKTTFVGGNCTVSLMLMSLGGLFANDLVDWVSVATYQAASGGGARHMRELLTQMGHLYGHVADELATPSSAILDIERKVTTLTRSGELPVDNFGVPLAGSLIPWIDKQLDNGQSREEWKGQAETNKILNTSSVIPVDGLCVRVGALRCHSQAFTIKLKKDVSIPTVEELLAAHNPWAKVVPNDREITMRELTPAAVTGTLTTPVGRLRKLNMGPEFLSAFTVGDQLLWGPRSRCVGCGFYCTTRNWRIQHFQIESSQSGSNFLRISTSDSGRNHYCRTGFQMLCNACFTKQHLFNLGRIDHQHQQCVQFFGKRRGVIRNPASTCLFQRSAGIAVQVCAPVIGHDSAPQNATLRDDETLASRHAQIVARIDTVKQQWRDAVGELDALIESSGIDRRKFNRSNQAKWIDKISAWAEEETNSYQLPESLEKFSQRFLEDRTKAGGETPRHPLFEAIDQLLAEPLSIRDLVITRALAEIRETVAREKRRRGELGFDDMLSRLDSALRSESGEVLAAAIRTRFPVAMIDEFQDTDPQQYRIFRRIWHHQPETALLLIGEEDVAKNLQWSHDGKCLKPGQLEGVEIKADLSQSALVISLPQAYLEYTWPDWDPPSRWDDGISGIIADYSITAQTRHEENGGDDSNEISGNGTVGVNLGPWRMRADWQTNYQHTRSNDDDDEFGGDDTQKKWEWSRYYAWRALPSLKAKLALGEDYLNSDIFDGFNYVGGSVSTDDQMLPPNLRGYAPDISGVAHTRAKVTVSQMGRVIYETQVPAGPFRIQDLGDSVSAWLVAHKDDIERHYGEPLYKVVGVVTPFSAQVNAIKMSLRKLEINGKDEQAFYPLNESVAIARARDKLRSMQLLARQGIDLPVTGIAHSPDDTSDLIDMVGGAPLVVKLVEGTQGIGVVLAETRQAAESVIDAFRGLNAHILVQEYIKEAQGCDIRCLVVGDEVVAAIERRAKEGDFRSNLHRGGAASVASITPQEREIAIKAARTMALDVAGVDILRANRGPLVMEVNASPGLEGIEKTTGIDIADLSEVALRQRILKNMSDLSLETTLFNEKLSMPVALAPVGLCGMYARRGEVQAAKAADAHGIPFTLSTVSVCPIEEVAPAIKRPMWFQLYVLRDRGFMRNALERAKAAGCSTLVFTVDMPTPGARYRDAHSGMSGPNAAMRRYLQAVTHPQWAWDVGLNGRPHDLVVVVLVVTFANVFTIIQPVVEAGDWDSTLWMIGGPVFFSLLAMAIYQNYCSRVAKNPQWAGVKTGNVMDDTSRDPAITEDEIRALQFSAGDVAEIEQTILSFVDACHTRKVAMVVGSTINTLKDRDAKLSERLPYECAHVCLMLHLVYGGVPLLEHQLQLLQEAVNSKRLTLTEKTAQEAVSPDEAARIQANPLVKQELEINQQLSQRLITATENGNQLMQQNIKVKNWLERALQSERNIKEQIAVLKGSLLLSRILYQQQQTLPSADELENMTNRIADLRLEQFEVNQQRDALFQSDAFVNKLEEGHTNEVNSEVHDALLQVVDMRRELLDQLNKQLGNQLMMAINLQINQQQLMSVSKNLKSILTQQIFWVNSNRPMDWDWIKRRPNFCGI

SEQ ID NO: 48186 - protein, 85 aa, Homo sapiens
  DOMAIN (10)..(65): kw TRANSCRIPTASE REVERSE II ORF2 domain identified by eMATRIX, accession number DM01354Q, p-value=4.673e-14, raw score of 9.23
MNVVAKILNKMLENQIQQHIKKVTHYDRVDFILGLQGFRYEIFAITYVLNGIMEMINIDLLTAMLLEPQLPQISSASLTVDKIAK

SEQ ID NO: 48187 - protein, 185 aa, Homo sapiens
  misc_feature (1)...(185): Xaa = X or * as defined in Table 2
TESRCADGAGSVDVGTEPVVPRVELVAKWPGSRAGGTGLGCSPWVGAGCVGGLGPQARLSGPTASTEASAKAASTLASLMWLRVRLXGACPFARTGATAPSSSKGPELGVSGLRKATWMGRGSGCCTRGLGAGEWRAVPESCGLDESSEDSDDRDHAVPFSSSSCRRSMLRPRRVARGLCRRRGV

SEQ ID NO: 48188 - protein, 278 aa, Homo sapiens
MQKHSSSLTSESPEVKSCEPTTNHRETIRVDEQRKKSSRPTTTDFSQHKFLPGDNVDSESYWLYFYAYKIADPPAPQHKKGTKSKAKNSNYPGLDPELALLDTLLLLMAINGDTNVASRGGQGGLIDPADQIFRSTGSDSSLQNDISRFVGSITHRLYLFCVNTDKYILDEPGGPNAIKRVIVRGKQEDTHSIEYDSRGSRVLRQQIHRYFQDAENTYFDHYARHQRRSVRWCGVIGIISGITQLHAVVTFSGKFHFAGILVHLAQDTWQHTGLFVTF

SEQ ID NO: 48189 - protein, 73 aa, Homo sapiens
  misc_feature (1)...(73): Xaa = X or * as defined in Table 2
TVWNGTCGLPFSSLMKCMVIMIMRAIQKKMMSKPDTITLVGWNXRRASVFSGQPRVEKVHSAEENQVSRTSSS

SEQ ID NO: 48190 - protein, 271 aa, Homo sapiens
  DOMAIN (122)..(140): ALPHA-LYTIC ENDOPEPTIDASE SERINE PROTEASE (S2A) SIGNATURE domain identified by eMATRIX, accession number PR00861C, p-value= 4.836e-09, raw score of 13.18
  DOMAIN (115)..(259): Fimbrial Usher proteins domain identified by PFam, accession name Usher, E-value=1.2e-54, PFam score of 195.0
  misc_feature (1)...(271): Xaa = X or * as defined in Table 2
RISMVFPWCFCSCSRTLATTPAPTVRPPSRIAKRRPSSIAIGWIRVTTILMLSPGITISTPSGSSMVPVTSVVRKXNCGRXPLKNGVXRPPSSLDRMYTSDSNLHGLRPAVSPVTNTPASDGYYSHDGSLAQVDLSANYHEGQYTSAGLSLQGGATLTTHGGALHRTQNMGGTRLLIDADGVADVPVEGNGAAVYTNMFGKAVVSDVNNYYRNQAYIDLNKLPENAEATQSVVQATLTEGAIGYRKFAVISGQKAMAVVNFAEGKVSLAVV

SEQ ID NO: 48191 - protein, 74 aa, Homo sapiens
  misc_feature (1)...(74): Xaa = X or * as defined in Table 2
VPAIQQKFPRSWKLGGERPPKAFRLRLSAAXRKSVPXAQRSLADSGMPLRLEKCLDTFXTQIVXSAFKIQREGS

SEQ ID NO: 48192 - protein, 545 aa, Homo sapiens
  DOMAIN (300)..(342): Aldehyde dehydrogenases glutamic acid proteins domain identified by eMATRIX, accession number BL00687B, p-value=2.222e- 09, raw score of 17.54
  DOMAIN (442)..(536): Putative tRNA binding domain identified by PFam, accession name tRNA_bind, E-value=7.5e-37, PFam score of 135.9
MSELQRLEKPYKRIMLVGGGNIGAGLARRLEKDYSVKLIERNQQRAAELAEKLQNTIVFFGDASDQELLAEEHIDQVDLFIAVTNDDEANIMSAMLAKRMGAKKVMVLIQRRAYVDLVQGSVIDIAISPQQATISALLSHAQQASTIRIKAMGFLSGKRILVTGVASKLSIAYGIAQAMHREGAELAFTYQNDKLKGRVEEFAAQLGSDIVLRVKKAQREYASFTQEQVDKIFRAAALAAADARIPLAKMAVAESGMGIVEDKVIKNHFASEYIYNAYKDEKTCGVLSEDDTFGTITIAEPIGIICGIVPTTNPTSTAIFKSLISLKTRNAIIFSPHPRAKDATNKAADIVLQAAIAAGAPKDLIGWIDQPSVELSNALMHHPDINLILATGGPGMVKAAYSSGKPAIGVGAGNTPVVIDETADIKQAMETVAYADFARLEMRVGKIVEVKRHENADKLYIVQVDVGQKTLQTVTSLVPYYSEEELMGKTVVVLCNLQKAKMRGETSECMLLCAETDDGSDQRAVNAGADDACGHRMATSYRHPI

SEQ ID NO: 48193 - protein, 300 aa, Homo sapiens
  DOMAIN (119)..(134): FecCD transport family domain identified by eMATRIX, accession number PF01032B, p-value=1.360e-16, raw score of 9.12
  DOMAIN (2)..(227): FecCD transport family domain identified by PFam, accession name FecCD_family, E-value=2.3e-08, PFam score of -52.2
MRMLQEENIWIVGTAGEADHTLYQSKMTGRLALVIMHHIMGKLFFTVFAFERDIIDTLKVVLIPVLIAGATALLLSRALNSLSLGSDTATALGSRVARTQLIGLLAITVLCGSATAIVGPIAFIGLMMPHMARWLVGADHRWSLPVTLLATPVVTTPSAKEPWILATNLPVEIRTPKQLVNIYSKRMQIEETFRDLKSPAYGLGLRHSRTSSSERFDIMLLIALMLQLTCWLAGVHAQKQGWDKHFQANTVRNRNVLSTVRLGMEVLRHSGYTITREDLLVAATLLAQNLFTHGYALGKL

SEQ ID NO: 48194 - protein, 313 aa, Homo sapiens
  DOMAIN (202)..(244): FecCD transport family domain identified by eMATRIX, accession number PF01032A, p-value=8.333e-35, raw score of 14.01
  DOMAIN (173)..(311): FecCD transport family domain identified by PFam, accession name FecCD_family, E-value=5.2e-10, PFam score of -20.1
MVPDRPAYPDVYDQLRFWQAGSLDIRNLHTLKVVLIPGADRRSNCAITESRAEQFEPRQRHRDGAGQSRGAHTVDWSAGDYRALCATAIVGPIAFIGLMMPHMARWLVGADHRWSLPVTLLATPALLLFADIIGRVIVPGELRVSVVSAFIGAPVLIFLVRRKTRGIWGLRSGAVTLETSQVFAALMGDAPRSMTMVVTEWRLPRVLMALLIGAALGVSGAIFQSLMRNPLGSPDVMGFNTGAWSGVLVAMVLFGQDLTAIALSAMVGGIVTSLLVWLLAWRNGIDTFRLIIIGIGVRAMLVAFNTWLLLKAS

SEQ ID NO: 48195 - protein, 274 aa, Homo sapiens
KMPKVCLTPPCAMPGHPMARTGLFIPLTGKENRWSANVYVGLSSKQWVRPTRSTPSLAIASMKPGIKHGARGPSGAVFGFDISLTGGCMSLIKVPCMQITNMHCSGQTVSLAAGDYHATIVTVGAGLAELTFQGCHLVIPHKPEEMPLAHLGKVLIPWPNRIANGCYRYQGQEYQLPINEHSSKAAIHGLLAWRDWQISELTATSVTLTAFLPPSYGYPFMLASQVVYSLNAHTGLSVEIASQNIGTVAAPYGVGIHPYLTCNLTSVDELLDEL

SEQ ID NO: 48196 - protein, 94 aa, Homo sapiens
  misc_feature (1)...(94): Xaa = X or * as defined in Table 2
LCPSNTSPLSCLLCDLVASTEMAPMRVFQPAPKVNAXXLFATIEPPYSVNKLLKPYXXPAWTKSLCLLAPSIWLRPAAKSYFDTPGCSIFGTAA

SEQ ID NO: 48197 - protein, 684 aa, Homo sapiens
  DOMAIN (211)..(234): Glycosyl hydrolases family 38 domain identified by eMATRIX, accession number PF01074A, p-value=4.517e-09, raw score of 12.68
  DOMAIN (175)..(203): Bacterial regulatory helix-turn-helix protei domain identified by PFam, accession name HTH_1, E-value=8.2e-05, PFam score of 24.1
MRQNTTVPPFNLSGKFCSLIRNLITESEVAVKDNTKFRFVGADAFSPDELRTDLFSDIGGRALLMHGTEGEVYANPQRCPQINLIDPEGMRVLYEKQDTAAEGSDVQAGQSLYQIDPATYQANYDSAKGELAKSEAAAAIAHLTVKRYVPLVAKNEVIMEPLREIRNRLLNGWQLSKMHTFEVAARHQSFALAAEELSLSPSAETTMKAVSRVHITPHMHWDREWYFTTEESRILLVNNMEEILCRLEQDNEYKYYVLDGQTAILEDYFAVKPENKDRVKKQTDTTIVSAESIVRNLMYGMRDCLAFGEPMKIGYLPDSFGMSGQLPHIYNGFGITRTMFWRGCSERHGTDKTEFLWQSSDGSEVTAQVLPLGYAIGKYLPADENGLRKRLDSYFDVLEKASVTKEILLPNGHDQMPLQQNIFEVMDKLREIYPRRKFVMSRFEEVFEKIEAQRDNLATLKGEFIDGKYMRVHRTIGSTRMDIKIAHARIENKIVNLLEPLATLAWTLGFEYHHGLLEKMWKEILKNHAHDSIGCCCSDKVHREIVARFELAEDMADNLIRFYMRKIADNMPQSDADKLVLFNLMPWPREEVINTTVRLRASQFNLRDDRGRPALHAAWLSGFNDFHLLLKLSDTLRCRCNCFFHAITGDFQIRQHLLFSGNEILKARDFFSNFVNQRRINVLA

SEQ ID NO: 48198 - protein, 190 aa, Homo sapiens
MAQWLQPVFASLDAKTLQQLNASIAVEGLDAKKVAADYPETKRVDEVISPALPFISYAPNRLVSGEGRHLWQLWPQTIWMLVGVGCAWLTACFIPGKKGSICALILAQFVFVLLVWGAGKAATQLAQNGSALARTSLGSGFWLAAALALLACSDAIRRISTHPLWRWLLHMQIAIIPLWLLYSGTLTISH

SEQ ID NO: 48199 - protein, 426 aa, Homo sapiens
MRRTSVPASRFRSWSQPAQRQTTGRKRLSAGRNHDPHRFIERKGPRFVASQSRDNRRAIKAYRVRIPSGGTKSGRNGATKEAVWPASKGPPKTHGNKGRRHARLEQAGRRRPKGRHREHRAMGRKDNKGEGAKTTKGAKPATFTSTSVKKDGDELDITGDLTLNGVTKPVTLEAKLIGQGDDPWGGKRAGFEAEGKIKLKDFNIKTDLGPASQEVDLIISVEGVQQNYAPNRLVSGEGRHLWQLWPQTIWMLVGVGCAWLTACFIPGKKGSICALILAQFVFVLLVWGAGKAATQLAQNGSALARTSLGSGFWLAAALALLACSDAIRRISTHPLWRWLLHMQIAIIPLWLLYSGTLNDLSLMKEYANRQDVFDDALAQHLTLLFGAVLPALVIGVPWGILGYFSLVRKGPIFSGQGDPTGPRGGP

SEQ ID NO: 48200 - protein, 166 aa, Homo sapiens
FPVTYFRINPVLALLLLLTAIAAALPFICYAPNRLVSGEGRHLWQLWPQTVWMLVGVGCAWLTACFIPGKKGSICALILAQFVFVLLVWGAGKAATQLAQNGSALARTSLGSGFWLAAALALLACSDAIRRISTHPLWRWLLHMQIAIIPLWLLYSGTLIDLSHQN

SEQ ID NO: 48201 - protein, 196 aa, Homo sapiens
LFISSLILLAWTAALGVAGLWSAWVLVPLAIILVPFNFAPMRKSMISAPVFRGFRKVMPPMSRTEKEAIDAGTTWWEGDLFQGKPDWKKLHNYPQPRLTAEEQAFLDGPVEEACRMANDFQITHELADLPPELWAYQIFKLIAHGREFMFGKRHKSPVVLPARVENLTQDLHLFGKPLTIDAANGHLFAHLIHQFF

SEQ ID NO: 48202 - protein, 126 aa, Homo sapiens
  misc_feature (1)...(126): Xaa = X or * as defined in Table 2
KLKPYSWAFSRQSGRSVILTPPRVTVVVVAGFGPIPVFGTVMVRPGWAAPXFLPVASVYFPXAGLAGFLKKNRGCCANPAPPPIRRPIMYPPMQRLQEPPADWWACAWFSGKDXWKKSPPNCTRCA

SEQ ID NO: 48203 - protein, 594 aa, Homo sapiens
  DOMAIN (141)..(165): HMW KININOGEN SIGNATURE domain identified by eMATRIX, accession number PR00334B, p-value=7.033e-12, raw score of 8.69
  DOMAIN (243)..(343): Acyl-CoA dehydrogenase domain identified by PFam, accession name Acyl-CoA_dh, E-value=1.4e-12, PFam score of 45.7
NQIAELILRIIIMTEFTTLLQQGNAWFFIPSAILLGALHGLEPGHSKTMMAAFIIAIKGTIKQAVMLGLAATISHTAVVWLIAFGGMVISKRFTAQSAEPWLQLISAVIIISTAFWMFWRTWRGERNWLENMHGHDYEHHHHDHEHHHDHGHHHHHEHGEYQDAHARAHANDIKRRFDVESHHLQFRSRLMRAPPGKPDWKKLHNYPQPRLTAEEQAFLDGPVEEACRMANDFQITHELADLPPELWAYLKEHRFFAMIIKKEYGGLEFSAYAQSRVLQKLSGVSGILAITVGVPNSLGPGELLQHYGTDEQKDHYLPRLARGQEIPCFALTSPEAGSDAGAIPDTGIVCMGEWQGQQVLGMRLTWNKRYITLAPIATVLGLAFKLSDPEKLLGGAEDLGITCALIPTTTPGVEIGRRHFPLNVPFQNGPTRGKDVFVPIDYIIGGPKMAGQGWRMLVECLSAQPEAANFVATDVTDMFEQQFIERVDVIVLRRFHLFQHVRMATNRSLSEDHHAAGQNVSPFNGDGNRCALVSTRQEVALPEHNAFTAGNIHRINNRLLPAVGTVILNDSRQHGRFFAEHNAVVISDAAASIT

SEQ ID NO: 48204 - protein, 212 aa, Homo sapiens
MSDATLARLIRPTGTHVVSGGSKAQREPASTRNVKQAHRQWAKATEAETQCAQPRQSCVAGNKLTKLLSTGWRTCRQAARSAGNGARAAEFATVIVSHLWENAMRKYRLSEEQRAFSYQEDGTKKNVLLRQIIAISDFNDVIAGTAGGWIDRETVLAQEGNCWIYDQNAIAFGGAVISGNTRITGTSVLWGEVYATDNVWIDNSEISQGAYI

SEQ ID NO: 48205 - protein, 83 aa, Homo sapiens
RFRVPPFLMFSPGHSPLYAFRQLNGPSPASSTEVNWRPVAFEDRSMTPAFIFGQNVHFRFQLWCAAEWCPAKPVPDHVRFLHV

SEQ ID NO: 48206 - protein, 194 aa, Homo sapiens
  DOMAIN (21)..(33): D-ALA-D-ALA CARBOXYPEPTIDASE 1 (S11) FAMILY SIGNATURE domain identified by eMATRIX, accession number PR00725A, p-value=4.103e- 13, raw score of 9.01
  DOMAIN (1)..(154): D-alanyl-D-alanine carboxypeptidase domain identified by PFam, accession name Peptidase_S11, E-value=0.02, PFam score of - 107.7
MDYTTGQILTAGNEHQQRNPASLTKLMTGYVVDRAIDSHRITPDDIVTQKLTNSVSGEALFLLAAAFLPVNEEVGKRLLEEMEHRQVPGAHKRAGTMSGGEQQYIIKGAIIIFAVALDSLKYAQVKSTKDVVIDAKMTLVAYERYFNAEDDYTRESALQEHIASVRNHIRLLGRKDYQHSVGLASPSASRERSL

SEQ ID NO: 48207 - protein, 832 aa, Homo sapiens
  DOMAIN (262)..(287): kw PERIPLASMIC GALACTOSE RIBOSE XYLOSE domain identified by eMATRIX, accession number DM01011C, p-value=1.300e-18, raw score of 17.35
  DOMAIN (646)..(713): DEAD/DEAH box helicase domain identified by PFam, accession name DEAD, E-value=0.038, PFam score of 9.6
MVPASASGEGLRKLTVTVEGKKGASTSHGFLPAKSKGRRDALKAIEAEPRTLIFYESTHRLLDSLEDIVAVLGESRYVVLARELTKTWETIHGAPVGELLAWVKEDENRRKGEMVLIVEGHKAQEEDLPADALRTVALLQAELPLKKAAALAAEIHGVKKNALYKYALEQQGENAFMAAGLRNSELRLPLGDFAEWKRNWNGKANGNLGSNLQAHPLGAKLRHLTVKERLLPKAIKECAEIGKSSVGSQAIKEAGLKPGKDILTGSIDGVPDIYKAMMDGEANASVELTPNMAGPAFDALEKYKKDGTMPEKLTLTKSTLYLPDTAKEELEKKKNMGTGRLLSLFDTNDFNFFTNFDDTAFYTTGNNGTTTGDGEYVFDRQQERLVNRTLWFRNVRIQEASQFQDFRFPLCVAFQRFQSRTTNDRSVVAREVVLRQKFTNFHFNQFQQLFVINHVAFVQEHDDVRNAYLTTQQDVLTSLRHRAVSRSNYQDRAVHLRSTGDHVFNIVGVPRAVYVCVVTGRGVVFNVRSVDGDTTSFFFRRVIDLVECASSTAVGETISGREEEQHLTIYIWESKWTRRGRDPLESTLGRIDQGKKEAWFQCCQWLSQSNRKVFLGQIGVCTIDQVLISVLPVNTGFIRGLGIGRSVLIVDEVHAYDTYMNGLLEAVLKAQADVGGSVILLSATLPMKQKQKLLDTYGLHTDPVENNSAYPLINWRGVNGAQRFDLLAHPEQLTPRFSIQPEPICLADMLPDLTMLERMIAAANAGAQIDGPLGFPVKRSFLIRLKTAPAAWVIFTANIPRQFHHSFGDNVLYLFGRDLMFNRVNQHRRVLA

SEQ ID NO: 48208 - protein, 58 aa, Homo sapiens
AWLLNQGECKAYRTGKTKTTHQLPAALLKAFLPEGLGNPPVNLQSLSDRLPDRFPDDD

SEQ ID NO: 48209 - protein, 263 aa, Homo sapiens
NTRAEKAGSITALPEMWLGEDEVSKSLPIPNHYGVDDFPVIIQDKRSKSAENQCIIDEWHFHKGFFNSRFQMQMTFDNGAPDLNIKPGQKVVFDVDVEHGPLPITMLMHGNVIPALAAAKVNLVNNELTQPLFIAAKNKSPVEATLRFAFGGSFSTTLDVAPAEYGKFSFGEGQFTFNGDGSSLSNLDIEGKVEDIVLQLSPMNKVTAKSFTIDSLARLEEKKFPVGESESKFNQINIINHGEDVAQIDAFVQGTQLNVDFVS

SEQ ID NO: 48210 - protein, 158 aa, Homo sapiens
MPDFRNDRFVDERQSTRLIAWRRSSDLRLTLLFHISVTYYRMCGNCMEQETHMNNKGSGLTPAQALDKLDALYEQSVVALRNAIGNYITSGELPDENARKQGLFVYPSLTVTWDGSTTNPPKTRACGRFTHAGSYTTAITRPTLFRSYLNEQLTLRYQ

SEQ ID NO: 48211 - protein, 179 aa, Homo sapiens
  DOMAIN (157)..(179): Class II Aldolases and Adducin N-terminal domain proteins domain identified by eMATRIX, accession number PF00596B, p-value= 9.000e-20, raw score of 15.07
MAAPAPISAYLHAGSMVKVGVNIFARAMIDGGNIPHVIGGVGMVMALPEQDMKRLLAWSTITQRRLDVLSAWSVSILRLGGMALEGSIAYIVINFCDVKPQRFRGLSVPAASITVVLIQQFVLHRRELRRKLALPAHHLVTFTWGNVSAVDETRQWMVIKPSGVEYDVMTADDMVVVEI

SEQ ID NO: 48212 - protein, 163 aa, Homo sapiens; identical to SEQ ID NO: 43678
  DOMAIN (124)..(163): PEP-utilizing enzymes domain identified by PFam, accession name PEP-utilizers, E-value=8.2e-13, PFam score of 46.6

SEQ ID NO: 48213 - protein, 367 aa, Homo sapiens
  DOMAIN (144)..(163): NADH-Ubiquinone/plastoquinone (complex I) various chains. domain identified by eMATRIX, accession number PF00361B, p-value= 2.125e-16, raw score of 14.16
  DOMAIN (76)..(278): NADH-Ubiquinone/plastoquinone (complex I) domain identified by PFam, accession name oxidored_q1, E-value=1.1e-28, PFam score of 105.2
ASFQRSNSHDKVRRIVAEEGRTARNLIAWSVPLESKDDDDGTVCASRIDRVTRRRTLSWFRRPSCLPRGEIRASLPMQAWLPNAMEAPTRISAYLHAASMVKVGVYIFARAIIDGGNIPHVIGGVGMVMALVTILYGFLMYLPQQDMKRLLAWSTITQLGWMFFGLSLSIFGSRLALEGSIAYIVNHAFAKSLFFLVAGALSYSCGTRLLPRLRGVLHTLPLPGVGFCVAALAITGVPPFNGFFSKFPLFAAGFALSVEYWILLPAMILLMIESVASFAWFIRWFGRVVPGKPSEAVADAAPLPGSMRLVLIVLIVMSLISSVIAGRSRMPRHLLCDETLRGANDTTASKGQAAKASPVVTATVMRG

SEQ ID NO: 48214 - protein, 97 aa, Homo sapiens
  misc_feature (1)...(97): Xaa = X or * as defined in Table 2
TRRNWRPIQSSEESWRAAGSSTPLTTQNRQQTAGIYXRSRXTAARRXSPALPRRNPRLATAGWQYATQTRQQRVPQLXLSAPATRKNRLLANAWLTM

SEQ ID NO: 48215 - protein, 568 aa, Homo sapiens
  DOMAIN (127)..(146): NADH-Ubiquinone/plastoquinone (complex I) various chains. domain identified by eMATRIX, accession number PF00361B, p-value= 2.125e-16, raw score of 14.16
  DOMAIN (193)..(335): GAF domain identified by PFam, accession name GAF, E-value= 1.2e-30, PFam score of 115.2
KRYLSLISARWGCIVAGVTLFLQTGTFALIAMSDVHGDALYLVCGGILYAEWGKSAQLPMQAWLPDAMEAPTPISAYLHAASMVKVGVYIFARAIIDGGNIPHVIGGVGMVMALVTILYGFLMYLPQQDMKRLLAWSTITQLGWMFFGLSLSIFGSRLALEGSIAYIVNHASSSPIMLTRLREIVEKVASAPRLNEALNILVTDICLAMDTEVCSVYLADHDRRCYYLMATRGLKKPRGRTVTLAFDEGIVGLVGRLAEPINLADAQKHPSFKYIPSVKEERFRAFLGVPIIQRRQLLGVLVVQQRELRQYDESEESFLVTLATQMAAILSQSQLTALFGQYRQTRIRALPAAPGVAIAEGWQDATLPLMEQVYQASTLDPALERERLTRALEEAGNEFRRYSKRFAGACRWDIVQQGSEARDRFCGFRADAHTQFGGKTYRAQHTYRIFTVARFRVTNQTDNAVLQILHAANVITDGKIRYAVIQAVDSEIAALGVFFDGAENVVAQQHAVLPALGGRAVADVTFVVSTEGRNFDNLRAKHYMSQTETATHQAAVTEQFAHLLRRGR

SEQ ID NO: 48216 - protein, 274 aa, Homo sapiens
  DOMAIN (228)..(242): AMINOTRANSFERASE PROTEIN AMIDOTRA domain identified by eMATRIX, accession number PD00718C, p-value=1.628e-10, raw score of 10.79
  DOMAIN (48)..(157): Helix-turn-helix domain, rpiR family domain identified by PFam, accession name HTH_6, E-value=1.5e-52, PFam score of 188.0
SLFRQQSTASWLTGIFNSWQLAAMEYKIHSRVSHIACCRHYFIARKDMNGLLRIRQRYQGLAQSDKKLADYLLLQPDTARHLSSQQLANEAGVSQSSVVKFAQKLGYKGFPALKLALSEALASQQDSSAGSSQSHISGDDPLRLVGEKLIKENTAAMYATLNVNSEEKLHECVTMLRSARRIILTGIGASGLVAQNFAWKLMKIGFNAAAVRDMHALLATVQASSPDDLLLAISYTGVRRELNLAADEMLRVGGKVLAITGFTPNALQQRASHC

SEQ ID NO: 48217 - protein, 280 aa, Homo sapiens
  DOMAIN (174)..(215): PHOSPHATE-REPRESSIBLE PHOSPHATE-BINDING PROTEIN domain identified by eMATRIX, accession number DM01866B, p-value=2.723e- 09, raw score of 19.97
MLSGIVLLERDFFETKSARREPSGPNSAAVGRSRGSPRLPVVTNIFSLWRDDGRASCGYNKTMRFYMRKIKGLRWYMIALVTLGTVLGYLTRNTVAAAAPTLMEELNISTQQYSYIIAAYSAAYTVMQPVAGYVLDVLGTKIGYAMFAVLWAVFCGATALAGSWGGLAVARGAVGAAEAAMIPAGLKASSEWFPAKERSIAVGYFNVGSSIGAMIAPPLVVWAIVMHSWQMAFIISGALSFIWAMAWLIFYKHPRDQKHLTDEERDYIINGQEAQQQVSS

SEQ ID NO: 48218 - protein, 575 aa, Homo sapiens
  DOMAIN (318)..(354): Bacterial regulatory proteins deoR family proteins. domain identified by eMATRIX, accession number BL00894A, p-value=2.696e- 09, raw score of 22.25
  DOMAIN (304)..(340): Bacterial regulatory proteins, deoR family domain identified by PFam, accession name deoR, E-value=3.3e-05, PFam score of 22.5
MLLQDAGWNDKRISDALKQGDTRYVNIRQSIPVNLYYLTAFVGADGRTHYAAVFKFDWFSATGTAILFAAITIAIGPPSCSATASTRLSENSDCQVYHSLIKPFSGGMADIARQPIHLTLDGCFVEVEQNVRLQSEVLGLYFRCRSWSRSNYWSCFALTETVGNTQAQHAVVRTSADGVQLRQLQFINERLKTCRVRLQREILCLIERSIADRPAGRRRHGVRQRADGYLPQYRLSRIDGFQPYSGWAKTAGRGVDRAHQHFCRAVWRRQIQPAECVAGAAKRDPDQRYLMTQAERRHDRLAVRLSLIISRLVAGETLSVRKLAAEFGVSVRTLRRDFRERLMYLDLEYQSGYCRLRTAGSEMQMVPDVLIFAHRSGLAGLFPGLDRRLRRHYYGWLPKEGTVEPLPNGKRLPTDFNEGAKNNTYSRNEKMVGYSFDHEFNDTFTVRQNLRFAENKTSQNSVYGYGVCSDPANAYSKQCAALAPADKGHYLARKYVVDDEKLQNFSVDTQLQSKFATGDIDHTLLTGVDFMRMRNDINAWFGYDDSILSSIRSKKQETSSPRCCLPQLRNVGVAG

SEQ ID NO: 48219 - protein, 454 aa, Homo sapiens
  DOMAIN (2)..(35): Bacterial chemotaxis sensory transducers proteins domain identified by eMATRIX, accession number BL00538B, p-value=9.686e- 13, raw score of 12.18
HRHISVRKGSDAIYAGTREIAAGNTDLPPVLNRSQPQQQPQQQLAQQEQKDSDGVAVVVATAVSGMSVYAQAAVEPKEDTITVTAAPAPQESAWGPAATIAARQSATGTKTDTPIQKVPQSISVVTAEEMALHQPKSVKEALSYTPGVSVGTRGASNTYDHLIIRGFAAEGQSQNNYLNGLKLQGNFYNDAVIDPYMLERAEIMRGPVSVLYGKSNPGGLLNMVSKRPTTEPLKEVQFKAGTDSLFQTGFDFSDSLDDDGVYSYRLTGLARSANAQQKGSEEQRYAIAPAFTWRPDDKTNFTFLSYFQNEPDTGYYGWLPKEGTVEPLPNGKRLPTDFNDRAKNNAYSRNEKMNEPETGYYGWLPKDGTVEPLPNASFVAIFPQEGFPCSGPPPHWYLQPSEHLALDLWVPNFIKSNDHFYGNHPNMPDVLFLLCYLSTLSMMSLVEQKSLDLM

SEQ ID NO: 48220 - protein, 38 aa, Homo sapiens
ARGVMVFEVFRGLVPLSPDICRLIYLGSLLLLTFKWAL

SEQ ID NO: 48221 - protein, 880 aa, Homo sapiens; identical to SEQ ID NO: 45512
  DOMAIN (493)..(540): kw TRANSCRIPTASE REVERSE II ORF2 domain identified by eMATRIX, accession number DM01354V, p-value=1.000e-40, raw score of 12.97

SEQ ID NO: 48222 - protein, 445 aa, Homo sapiens
  DOMAIN (340)..(383): kw TRANSCRIPTASE REVERSE II ORF2 domain identified by eMATRIX, accession number DM01354T, p-value=1.000e-40, raw score of 9.48
  DOMAIN (224)..(432): Reverse transcriptase domain identified by PFam, accession name rvt, E-value=2e-07, PFam score of 35.9
MTVTNDHQHMLHSYITDLFQVLLTGNGNTKVDSSFLSLYDSHVAKEILLRVLTLFQNIKNCLKIEGHLAVQPTFTEGSLFFLLHGEECAQKIRALVDHHDAESNWGKGCCGRSFSRLKRPCLTALKRALVLPAQRSSSDKGQTASSSGSLTPVYPGWETPPSRGRQTSHTGDLWLASDGCPSGTKLAEEETGSNLCCSAASDVDTQANRVWSGPPANSSRPAAEGPDHNSSPAREENWTQNEFDELTEAGFRRWVITNPSELKERILTQCKEAKNLEKRTNDKNHMIVSIEAEKAFDKIQQPFKLFNKLGINGTYLKIIRAIYDKPTANILLNGQKLEAFPLKTSTRQGCPLSPLLFNIAFEVLARAIRQEKEIKGIQLGKEEVRLSLFADDMIVYLEKPIISTQNLLKLISNFSKISGYKNQCITAFLYRIKNHKQTQKRAEDQ

SEQ ID NO: 48223 - protein, 36 aa, Homo sapiens
  misc_feature (1)...(36): Xaa = X or * as defined in Table 2
RIPXMTXWSXKPWHKNYMMHAQASVDNLIKWKKGYQ

SEQ ID NO: 48224 - protein, 43 aa, Homo sapiens
EVTSATHWHLLSLCASPPSPDSCCFLFCCLCLSPHPKSPTASL

SEQ ID NO: 48225 - protein, 70 aa, Homo sapiens
SSPSKFTVAFFASLVMASAVSLALSLRSLTTLSICGLVLQEERTDDALVEQFSPIRRARGHAPQQEATEM

SEQ ID NO: 48226 - protein, 173 aa, Homo sapiens
  misc_feature (1)...(173): Xaa = X or * as defined in Table 2
LVFLVLFVGFLSCFKSTYTLTYGDSPSLCDGLLIIXISRIDTNKPAIDNSISGIRDVGWVAKSYQVAVGERLHNRTPGTSHQSDTRFDFXLCXPGSACPNLVSEHERPQANMLVEASGRLAAXYQNALSCSFGYGVGLVRRQDFSSLGRFLQSAFASNRYXQVVWVFEFQQVS

SEQ ID NO: 48227 - protein, 95 aa, Homo sapiens
  misc_feature (1)...(95): Xaa = X or * as defined in Table 2
LRFRFTRAVGRIFHRLDLLVLLGCNRYGRRGGDHGLCSVLVPRSLRLGRLPGGDSAAADAQSRHREKCRXDGVLVCDDQNRQTPVWKPHQEDVQV

SEQ ID NO: 48228 - protein, 305 aa, Homo sapiens
  DOMAIN (142)..(177): Glucokinase regulatory protein family proteins domain identified by eMATRIX, accession number BL01272B, p-value=7.840e- 29, raw score of 19.61
  DOMAIN (19)..(297): Amino acid permease domain identified by PFam, accession name aa_permeases, E-value=0.00011, PFam score of -215.4
MVDQVKVVADDQAPAEQSLRRNLTNRHIQLIAIGGAIGYFTGWTYWFCWVVTGMADVVAITAYAQFWFPDLSDWVASLAVIVLLLTLNLATVKMFGVIGLVALYLVFGYGASLLCNLIGFGYPAYISECPPTYGVKPGLVVGLIAGGEYAIQHAVEGAEDSREGGVNDLKNINLTAQDVVVGIAASGRTPYVIAGLEYARQLGCRTVGISCNPGSAVSTTAEFAITPIVGAEVVTGSSRMKAGTAQKLVLNMLSTGLMIKSGKVFGNLMVDVVATNEELHVRQVNIVKNATGCSAEQAEAALIEW

SEQ ID NO: 48229 - protein, 57 aa, Homo sapiens
  misc_feature (1)...(57): Xaa = X or * as defined in Table 2
SDSNISICTCAQIHXKHFRIIXNCTLXEVEPXRLSXMXLQRKCVQGEPSKVHSLWGI

SEQ ID NO: 48230 - protein, 80 aa, Homo sapiens
  misc_feature (1)...(80): Xaa = X or * as defined in Table 2
SFFDYQTSALEHARRXLHCRTXNAGWLPHRTDRSSGYHGRTCSAAGRCSSGDHSSYQQQNPAEKLPAGHPQRSGSPERTG

SEQ ID NO: 48231 - protein, 384 aa, Homo sapiens
YLCILIQHFNYIRQRGSGQPARKTMLQLNENKQFAFFQRLAFPLRIFLLILVFSIFVIAALAQYFTASFEDYLTLHVRDMAMNQAKIIASNDSVISAVKTRDYKRLATIANKLQRDTDFDYVVIGDRHSIRLYHPNPEKIGYPMQFTKQGALEKGESYFITGKGSMGMAMRAKTPIFDDDGKVIGVVSIGYLVSKIDSWRAEFLLPMAGVFVVLLGILMLLSWFLAAHIRRQMMGMEPKQIARVVRQQEALFSSVYEGLIAVDPHGYITAINRNAGDPLGSTCELASVSRYVRDSLESVWHVVNPQKVVTLIMMRNLLNNLTCVKHITMSTEKSVHQAVGEINGICAGYRAVRKAIGEAKDDDTADILTAASRDLDKFLWFIER

SEQ ID NO: 48232 - protein, 53 aa, Homo sapiens
  misc_feature (1)...(53): Xaa = X or * as defined in Table 2
RLFRWCPMXSWASYFPPESQSLPDSYWLFXECNLPTAYNSQNAIIRESHAIYS

SEQ ID NO: 48233 - protein, 117 aa, Homo sapiens
  misc_feature (1)...(117): Xaa = X or * as defined in Table 2
MAKKMSLSIAVFWRRLYAYYPHLRXKSXTNWQWWRSALSXAVXPNRSIDSRWSIIWSVLFGMLVATALAPAFWLRYXKKSFSAWNPTKSPRCLSNARPCCSLSKKASLPWTIAARSR

SEQ ID NO: 48234 - protein, 707 aa, Homo sapiens
  DOMAIN (212)..(261): Ribosomal protein L19 proteins domain identified by eMATRIX, accession number BL01015A, p-value=1.000e-40, raw score of 24.62
  DOMAIN (201)..(313): Ribosomal protein L19 domain identified by PFam, accession name Ribosomal_L19, E-value=3.3e-34, PFam score of 127.1
MRDRLGSPQFGISGVRAGGTNRRMARMISIPPASSSSSMLSIRTGVRAGFVDERCGVVQVRDKRCLEFISTRTRPLAVTGDGVDFTVMRQIAERLRQRPARYGVSGEALVEQANGRFQTQVRKIPHYTRPEVLEGMEVPPVLLSGNHAEIRRWRLKQSLGRTWLRRPELLENLALTEEQARLLAEFKTEHAQQQHKHDGMANIIKQLEQEQMKQDVPSFRPGDTVEVKVWVVEGSKKRLQAFEGVVIAIRNRGLHSAFTVRKISNGEGVERVFQTHLRCRIINNGIDMATEAILADLPPVRETQGKPKIAVVAHDLRYDGKTNQQLVREMMALGDKIELHTFGKFSPFTAGNVVNHGFETDKRKLMSALNQMDALVFSSRVDNYPLILCEALSIGVPVIATHSDAAREVLQKSGGKTVSEEEVLQLVQLSKPEIAQAIFGTTLAEFSQRSRAAYSGQQMLEEDNISGSVPSIDCIMSIDFTALRCIFGALVLFIVLLLRGRGMRPTPFKYTLAIALLQTCGMVGLAQWALVSGGAGKVAILSYTMPFWVVIFAALFLGERLRRGQYFAILIAAFGLFLVLQPWQLDFSSMKSAMLAILSGVSWGASAIVAKRLYARHPRVDLLSLTSWQMLYAALVMSVVALLVPQREIDWQPTVFWALAYSAILATGVPQIYAAKSEANRANTRLMLSDVVHRSHDRPPFCISIGR

SEQ ID NO: 48235 - protein, 569 aa, Homo sapiens; identical to SEQ ID NO: 41097
  DOMAIN (163)..(227): PAS domain identified by PFam, accession name PAS, E-value= 5.8e-12, PFam score of 48.9

SEQ ID NO: 48236 - protein, 445 aa, Homo sapiens
  DOMAIN (196)..(318): Integral membrane protein DUF6 domain identified by PFam, accession name DUF6, E-value=3.6e-24, PFam score of 93.7
MSRKCYATVPRAATKRLRLKHRLLLITTVPVRSNGVIIGAISTFRDKTEVRKLMQRLDGLVNYADALRERSHEFMNKLHVILGLLHLKSYKQLEDYILKTANNYQEEIGSLLGKIKSPVIAGFLISKINRATDLGHTLILNSESQLPDSGTAACGQSLNVLYQRIVGERKLHTGSLMSAAGKSNPLAISGLVVLTLIWSYSWIFMKQVTSYIGAFDFTALRCIFGALVLFIVLLLRGRGMRPTPFKYTLAIALLQTCGMVGLAQWALVSGGAGKVAILSYTMPFWVVIFAALFLGERLRRGQYFAILIAAFGICTATQRNRLLPCKNQPCKANQYQGTGDVLNQLHIDFRAFSGVMVAGSRQIFANEISSGASNVGVVIFSTQDSANTFNVLNASGGSRSVYPVMSDDMNGSSWKFSTRMQKIDPALSVTSGQLMSHVLVDIYYE

SEQ ID NO: 48237 - protein, 499 aa, Homo sapiens
  DOMAIN (4)..(48): GTP1/OBG family proteins domain identified by eMATRIX, accession number BL00905B, p-value=1.000e-38, raw score of 19.00
  DOMAIN (1)..(170): GTP1/OBG family domain identified by PFam, accession name GTP1_OBG, E-value=1.4e-66, PFam score of 228.4
MLLADVGMLGMPNAGKSTFIRAVSAAKPKVADYPFTTLVPSLGVVRMDNEKSFVVADIPGLIEGAAEGAGLGIRFLKHLERCRVLLHLIDIDPIDGTDPVENARIIISELDNNYQPGSGDETALAEEAKQPEKVEFMWDDYHRQQLEEIAEEDDEDWDDDWDEDDEEGVEFIYKPRKINRYALRGNPGARTEQLYDTLFTTSDDEPGSYYPLIAESARYADDYSWVEVAINPRARFHDGSPITARDSILALYARRIIINFDAARTMKVITNRIRPDNQRGAQQRTVCTARLRVENVPDPGVEQADDIILRITATAICGSDLHLYRGKIPQVKHGDIFGHEFMGEVVETGKDVKNLQKGDRVVIPFVIACGDCFFCRLQQYAACENSNAGKGAALNKKQIPAPAALFGYSHLYGGVPGSKKCADPQGSSVAVYGAGPVGLLTIACARLLGAEQIFVVDHHPYRLHFAADRYGAIPINFDEDSDPAQSIIEQRQVTGAWMQ

SEQ ID NO: 48238 - protein, 274 aa, Homo sapiens
  DOMAIN (217)..(235): Bacterial extracellular solute-binding prot domain identified by PFam, accession name SBP_bac_5, E-value=0.067, PFam score of 9.6
DPTFGKKSFEQTLTVELCGTAGEPGGFHWQVPSGKHPCISEFFIMHGQAEHNKNDDGEGMTPLRVFRKTTPLVNTIRLSLLPLAGLSFSAFAAQMIVRILLLFIALFTFGVQAQAIKESYAFAVLGEPRYAFNFNHFDYVNPAAPKGGQITLSALGTFDNFNRYALRGNPGARTEQLYDTLFTTSDDEPGSYYPLIAESARYADDYSWVEVAINPRARFHDGSPITARDVEFTFQKFMTEGVPQFRLVYKGTTVKAIAPLTVRIELAKHHWGHQ

SEQ ID NO: 48239 - protein, 655 aa, Homo sapiens
MGLLMMRDVPCGFNDPARRQPQAFLIIHARNRTVTQTGTQVSNGHSAKVQQCNAGLLSPRARQRSLCFNMNAGLHEARLESVTAVCRVERSFPRCCPSFLDSGKQRRILTELWRTAHDCRQIKAETIDVAVIRVVARDGTRYSYIVWMDTESKLPMRVDLLDRDGETLEQFRVIAFNVNQDISSSMQTLAKANLPPLLSVPVGEKAKFSWTPTWLPQGFSEVSSSRRPLPTMDNMPIESRLYSDGLFSFSVNVNRATPSSTDQMLRTGRRTVSTSVRDNAEITIVGELPPQTAKRIAKLSYPTRPPGQIRLPVDQPNTDKPPSANGWSAYCTFPLTRLNQYQPSFSTDLYHGTLKPASLTMSGMVLLGRMLARPVNKYNGHRIARTDKASMPTVYSESLFVEVTAKFGDSSVLGAELQITNMFGNTFLHSFDKDPMFASSFIVQHASIIMSISQISETLFILTIPFFLSRYERNDDQYCGVDPAFCAVCLRRPDSVRYCTAGTVDDRYRARFVSVIPVIGLTLLDKNPQAKVVLVDESPMAVASSRLNVETNMPEALDRCEFMINNALSGVEPFRFNAVLCNPPFHQQHALTDNVAWEMFHHARRCLKINGELYIVANRHLDYFHKLKKIFGNCTTIATNNKFVVLKAVKLGRRR

SEQ ID NO: 48240 - protein, 1185 aa, Homo sapiens
  DOMAIN (14)..(34): PEPTIDYL-GLYCINE ALPHA-AMIDATING MONOOXYGENASE SIGNATURE domain identified by eMATRIX, accession number PR00790E, p-value= 1.600e-22, raw score of 9.33
  DOMAIN (709)..(796): Trp repressor protein domain identified by PFam, accession name Trp_repressor, E-value=8.5e-57, PFam score of 202.1
MKKKRPVLQDVMERNGTSSDEMCNLYIMYYMEAKHAVSFMTCTQNVAPDMFRTIPPEANIPIPVKSDMVMMHEHHKEIQTTIREYYKHPYTNKLENLEEMDKFLDTYTLPRLNQEEVESLNRPITGPEIVAIINSLPTKKSPGPDGFTAEFYQRYKEELRLFAAHIIEQTTKSSRVSRFLWVEGKISTGWVTTGIFLCIDGKNNQTISPQTTNAMAARDSRTGHTLPYATLAASYPAWMYVLYVGRIRRLRRIRQQCQLPDATLARLIRPTNSRTIRRPIRRYPHPQQLKSWRKCRITDDTAENRHCVQTDLDHGKEHAGIFLHIQNALGIYIAFISHQFKFDFAPDPRKGKLINLCEIHIESRFEESEPAFLSGIVLRRHMTDANSANSKMHAAALPHHVLRAGVESAVACPGGWGPWGEHGHVDLDTHSANIYEAPAVECTGRCQSVQQVIVNAKRGPLCPHGPSLVGAGRVRKTFNSSQQMPVCLIEPVFASKLIPVRAIFGSIGPIVQGKSTLFRMISAQEQPDSGTITLGETVKLASVDQFRDSMDNSKTVWEEVSGGLDIMKIGNTEMPSRAYVGRFNFKGVDQGKRVGELSGGERGRLHLAKLLQVGGNMLLLDEPTNDLDIETLRALENALLEFPGCAMVISHDRWFLDRIATHILDYQDEGKVEFFEGNFTEYEEYKKRTLGADALEPKRIKYKRIANFSTKLLFVDLLKNAYLYDLHLPLLNLMLTPDEREALGTRVRIVEELLRGEMSQRELKNELGAGIATITRGSNSLKAAPVELRQWLEENHRRQRQSSRTRLAALAGVFNHHPTESAVTIDASFNRHPGEETRQSRYEDEGEDTRERGVILSVHGEPKQQSPAKSRVIQFFQQGFVIRTYSDAQAGAKILRIGHFLSSNTKLWIGFQPFVYHRCVTKYPINTTIFQIDKGILITVIRDSFHFRVLILNIFLASTGGHFLSRITCRVQYFLSKSLRISGSFLWSKRARLFSFCGGGLPAYGPLRVIWLWMLLDLRSCLPAPMSSRGSGHRCFGDSQPATVVLRTRRWKLFLIPEEYSPPQVLVDTDRFLEMNRQRSLDDGFMHAVFNPSFNALATAMATARHRASKVLEIARDRHVEQALNETPEKLNRDRRLVLLSDPVTMARLHFRVWNSPERYSSWVSYYEGIKLNPLALRKPDAASQ

SEQ ID NO: 48241 - protein, 579 aa, Homo sapiens
  DOMAIN (279)..(292): RNA methyltransferase trmA family proteins domain identified by eMATRIX, accession number BL01230B, p-value=5.424e-09, raw score of 11.62
  DOMAIN (413)..(518): Bacterial regulatory helix-turn-helix protei domain identified by PFam, accession name HTH_1, E-value=1.3e-25, PFam score of 98.5
  misc_feature (1)...(579): Xaa = X or * as defined in Table 2
XRATVGLRTKRWKLFLIPEEYSPPQVLVDTDRFLEMNRQRSLDDGFMHAVFNPSFNALATAMATARHRASKVLEIARDRHVEQALNETPEKLNRDRRLVLLSDPVTMARLHFRVWNSPERYSSWLPDALRLSGLHRSCNLLILQDFVGRIRRSRRIRQKQRANKNTGVMPSLRVKAKVLKKNSLGVVLIKVPKTLALLEQQLRALRKVVTSDTRIIAGAKARDIHTSTLELFEKVLGPTTTTLAWKKARLINCTFNEPQLADAPQTVSWKLEENLEGEIVDLGCGNGVIGLTLLDKNPQAKVVFVDESPMAGASSRLNVETNMPEALDRCEFMINNALSGVEPFRFNAVLCNPPFHQQHALTDNVAWEMFHHARRCLKINGELYIVANRHLDYFHKLKKIPQGPYGRYTWGYRELGIEIFVRRGKRLLGMTEPGKALLVIAERILNEASNVRRLADLFTNDTSGVLTIATTHTQARYSLPEVIKAFRELFPEVRLELIQGTPQEIATLLQNGEADIGIASERLSNDPQLVAFPWFRWHHSLLVPHDHPLTQISPLTLESIAKWLKITYRQGIKQVLGLX

SEQ ID NO: 48242 - protein, 116 aa, Homo sapiens
MSIDVVDRELCLGFWKGNMVVYRVRGVAVDRGKRLSNKGVSLTQPAALNPLWESKRADPNTSVLLLEAGGPDYRFDFRTQMPAALAFPLQGKRYNWAYETEPEPFMNNRRMEWGTR

SEQ ID NO: 48243 - protein, 297 aa, Homo sapiens
MTQHFDIRTVQRTDSQRTVKRKLYVTGAGSFRPCQKNLLKQICRRNDQLRQANAVVRDEHDFQLIANLGIGGEHFRYVIEQKNNVLRHVIGPNRLSRKNIYARGARKPMCPPKKKSTRPYHDTNLFAYTDNVLRFALLGWVGAEMASGLDPFWRPDVVHAHDWHAGLAPAYLAARGRPAKSVFTVHNLAYQGMFYAHHMNDIQLPWSFFNIHGLEFNGQISFLKAGLYYADHITAVSPTYAREITEPQFAYGMEGLLQQRHRERRLFGVLNGVDEKIWSPETDLLLASRYTPDTLEE

SEQ ID NO: 48244 - protein, 226 aa, Homo sapiens
LGTRGAYNTYDHLIIRGFAAERQSQNNYLNGLKLQGNFYNDAVIDPYMLERAEIMRGPVSVLYGKSNPGGLLNMVSKRPTTEPLKEVQFKAGTDSLFQTGFDFSDSLDDDGVYSYRLTGLARSANAQQKGSEEQRYAIAPAFTWRPDDKTNFTFLSYFQNEPDTGYYGWLPKEGTVEPLPNGKRLPTDFNDRAKNNAYSRNEKMNEPETGYYGWLPKDGTVEPLPN

SEQ ID NO: 48245 - protein, 833 aa, Homo sapiens
EAIREVSNPIPQEEIWTHREAVPPVQLLTGWCVTAKAPPDISAISALTAVKHGNCSSLTPLLNPPGSDVIVCAEMDEQWGYVGAKSRQRWLFYAYDSLRKTVVAHVFGERTMATLGRLMSLLSPFDVVIWMTDGWPLYESRLKGKLHAILVTFEEKFQEEPVKKQIIMVSISVSDTGGKKEKPKLINLSSKTNGLQNTTEAQLCETKSDFELSFSGFNPISIDTEDMKTGCCFQEQSVRRAYFKATSSPRRGLIITKLTTRVDGYVADDPSRRYSGHGDLLWPNAGNSCVETTVGSLLCEVQAAPTPHTLEGKHGCRNKEKKRLTHSGACTYTFSELGLELWAWNCGKTEVNLGAVGKGVGGDRGFKKIHAKSQFTCSVLYTFTIKQGISLTLWSKVMHILEHLKENSKQLTSICTRYQRVFGPTWLHETIFCKVALTATLLAELEKTSTLQTFLDKIWILGAQQHTGSQEPSQALLTCDPAWKKALRKVTQKGGAFFGVDNLGSSLSPTTDLLYEEQRLTSLSGSWFPICVMVELTLRAGSSPGGRLYVEFDQAVTKEPRFLQYKHYWDGAVAGSSILRQDSFVAEASTTITRIESPSVPSRSSTFLDDFSITQQHRRHAGLSVMLSLIISPPVRGLCQERTLRRDFRERLMYLDLEYQSGYCRLRTAGSEMQMVPDVLIFAHRSGLAGLFPGLDRRLVNALLMCDESPCVIAPANPVPSPSGALSFWRLIQAITGRRRVTLIAEGRRCERLAPCRLLIHQQTWYLVAEHEGHIAVFTLDEIHLIQPLQETFRRNDSLCRLVEDPVFIQALPHFRFIQHSLLTFVPADSPPE

SEQ ID NO: 48246 - protein, 66 aa, Homo sapiens
  misc_feature (1)...(66): Xaa = X or * as defined in Table 2
GSQSTIFTFAARWNLWANENTDTSISPLGVGEQRHCSSPXRFPDSDRCSPWSPRSQGQNQSPQTWQ

SEQ ID NO: 48247 - protein, 575 aa, Homo sapiens; identical to SEQ ID NO: 48218
  DOMAIN (318)..(354): Bacterial regulatory proteins deoR family proteins. domain identified by eMATRIX, accession number BL00894A, p-value=2.696e- 09, raw score of 22.25
  DOMAIN (304)..(340): Bacterial regulatory proteins, deoR family domain identified by PFam, accession name deoR, E-value=3.3e-05, PFam score of 22.5

SEQ ID NO: 48248 - protein, 126 aa, Homo sapiens
  DOMAIN (40)..(55): Ribosomal protein S11 domain identified by PFam, accession name Ribosomal_S11, E-value=0.017, PFam score of 11.4
MSIKRLMDLGCYRVCVIVVVSRFAVSVPRPRTYPPRIYYRALNAAGFRITNITDVLRSLITVVVRRKNVAYNASFSRFVGEEKMARYLGPKLKLSRREGTDLFLKSGVRAIDTKCKIEQAPGSTLE

SEQ ID NO: 48249 - protein, 89 aa, Homo sapiens
WRTNWRCNWFCRRMPSTEGGSVGKSISEQGSFSFNQRHSLSSARPKQAGIRIISQVLATGISASSNSGQFCQKKESCFSISFSKMSYFC

SEQ ID NO: 48250 - protein, 385 aa, Homo sapiens
  DOMAIN (53)..(71): Glycosyl hydrolases family 25 proteins domain identified by eMATRIX, accession number BL00953A, p-value=6.769e-15, raw score of 11.74
  DOMAIN (27)..(139): Glycosyl hydrolases family 25 domain identified by PFam, accession name Glyco_hydro_25, E-value=0.0018, PFam score of 16.3
VQITDYIHFYGYRPVKSFAIRIPASYTIHGIDVSRWQERIDWQRVAIMRDNGIRLQFAFIKATEGEKLVDPYFSRNWQLSRENGLLRGAYHYFSPSVSASVHARLFLQTVDFSQRRFLAVLDVEERGRIIGKRIYASWQQYNRGDSAILRGLLDAINILNPHAEVDVMSRYPVSSSWLLNRPVMGDPLFLQMKQHNSAAGVVGRVKKVLRRRYQHQVLLSRVTDTGKLRNIAIAQGFTDFVRLLSGYDAIIQVGGSFFVDLYGVPQFEHALCTFMAKKPLFMIGHSVGPFQDEQFNQLANYVFGHCDALILRESVSFDLMKRSNITTAKVEHGVDTAWLALANHATGAKLDKRITASIVPHKIPITTAVTVIFRVITSPSSRYGR

SEQ ID NO: 48251 - protein, 101 aa, Homo sapiens
TPYPTYGYVPLVGLIRRTASRQATVAGCGVKRLIRPTVLCSGLDAINILNPHAEVDVMSRYPVSSSWLLNRPVMGDPLFQNGVFAVASEKAVHTVKHGFAG

SEQ ID NO: 48252 - protein, 159 aa, Homo sapiens
LAGCYTMLPGNEGDRHPRFKALLNNCDLFLDAINILNPHAEVDVMSRYPVSSSWLLNRPVMGDPLFDAIIQVGGSFFVDLYGVPQFEHALCTFMAKKPLFMIGHSVGPFQDEQFNQLANYVFGHCDALILRESVLFERLRHAVPPALPPHPQHGTCIHM

SEQ ID NO: 48253 - protein, 245 aa, Homo sapiens
  DOMAIN (183)..(238): Ribonucleotide reductase small subunit proteins domain identified by eMATRIX, accession number BL00368A, p-value=8.062e- 12, raw score of 36.98
  DOMAIN (209)..(245): Ribonucleotide reductases domain identified by PFam, accession name ribonuc_red, E-value=2.7e-11, PFam score of 34.7
FTVTNRQFKDRAGKLSKCEFFSVRSENESYLKTSFAKSGNEQYLRSLTWHQIYEEKMKLLILGNHTCGNRGDSAILRGLLDAINILNPHAEVDVMSRYPVSSSWLLNRPHQVLLSRVTDTGKLRNIAIAQGFTDFVRLLSGYDANIAGSIRQFKGLPGCRMQRERLIRPTAQDLPVNVARYDQQNMNLRKADRKAALLSSGVRKKLTSSRDRIDYQALPEHEKHIFISNLKYQTLLDSIQGRSPN

SEQ ID NO: 48254 - protein, 586 aa, Homo sapiens
  DOMAIN (174)..(215): Bacterial regulatory proteins gntR family proteins. domain identified by eMATRIX, accession number BL00043, p-value=8.765e-16, raw score of 22.96
  DOMAIN (156)..(209): Bacterial regulatory proteins, gntR fam domain identified by PFam, accession name gntR, E-value=1e-19, PFam score of 68.8
MSVHRFARHNETLEEVLRSSGDPADQKYVELKARAEKALDDVKKRKLYCWRRRQICALRRISRSPYPGHQLECIASFVRWFNLVVERVSSSSLTLASRSKSETKTESFFESLGGGYLLLQMINRIALPAGLYPLLALSGGILIFSLTTALEGRYSKEKLDRWLKDGITTPGGKLPSERELGELLGIKRMTLRQALLNLEAESKIFRKDRPFRNFISTISARPSTNGCTPTPAVSNAILVHNKKGGPLADGIVITPSHNPPEDGGIKYNPPNGGPADTNVTKVVEDRANALLADGLKGVKRISLDEAMASGHLCRSLFLYLRAGLSGHQAQQLHFSDAPLQMQPWAHLAQLMGQQEQQPGEEGRRNPMDTHAKAIDGYTPRDYLTHWLSQWVRDYGIDGFRVDTAKHVELPAWQQLKTEASAALREWKKANPDKALDDKPFWMTGEAWGHGVMQSDYYRHGFDAMINFDYQEQAAKAVDCLAQMDTTWQQMAEKLQGFNVLSYLSSHDTRLFREGGDKAAELLLLAPGAVQIFYGDESSRPFGPTGSDPLQGTRSDMNWQDVSGKSAASVAHWQKISQFRARCFPSP

SEQ ID NO: 48255 - protein, 811 aa, Homo sapiens
  DOMAIN (543)..(558): Phosphoglucomutase and phosphomannomutase phosphoserine signa domain identified by eMATRIX, accession number BL00710, p-value= 8.875e-15, raw score of 12.98
  DOMAIN (441)..(787): Phosphoglucomutase/phosphomannomutase domain identified by PFam, accession name PGM_PMM, E-value=4e-08, PFam score of -49.5
MVKPRTPNKQPPAHKQTGGSKNPEAPPPPPKKDRPQEPSDRTNATTHEQRESAKKREPTNPTKTQRKKGNKDPATQHRRQETRKEPPNASKKTETDNQKRPTAKRGNASSGPPTQGQTEGTHPPKRGEEGRNTQGARHKERGTKETTAKQASTKEPKDRKGPTGQETEERPGRRKKERAARRGRAKSQASTHARQGRKPPTGQRNQTRKPTNNTRRSDPNRRRTQTNTHTEKRTDTEPKQDKHAPTQSEDRRTTRTRTPPNRTERNNGAHTTNTATARRRRPRQRNRSGDAKQKRQKTAQKPKGEDKRQATKAANEPRAPQKAREDKARNHQTATKGKQAKDVSPGENRRNRRPERRQGTERRRRNERKRSKRQGKRTEGEPNDSEAEATERETKSTPRPAKARLAESQRKAQAKRTDWFNVAQLTAQYYVLKPEAGNAEHAVKFGTSGHRGSAARHSFNEPHILAIAQAIAEERAKNGITGPCYVGKDTHALSEPAFISVLEVLAANGVDVIVQENNGFTPTPAVSNAILVHNKKGGPLADGIVITPSHNPPEDGGIKYNPANGGPADTNVTKMVEDRANALLADGLKGVKRISLHETMASGHVKEQDLGPPRRRTEAEPRAKPQSYANASESKGKRSNPERQEQRTGSTAKANRKEQLTENLRQRRRQPKGRVMRTGKVKLRQTHRQGKARENSAQRQTTAKAQATRKRTLKRQRKRNPTGTHRRTDNESRTQSQQKHNSNAKAKRKHPTTTTKTVPQTRIQHPKPRAHRERRTTSEKAKAKALRTTATAKDKIATAKRAHHHPKRQPE

SEQ ID NO: 48256 - protein, 179 aa, Homo sapiens
  DOMAIN (131)..(163): ABC transporters family proteins domain identified by eMATRIX, accession number BL00211B, p-value=8.393e-16, raw score of 13.37
  DOMAIN (41)..(179): ABC transporter domain identified by PFam, accession name ABC_tran, E-value=1.3e-06, PFam score of 16.2
SQEELLQQALVAQLAHSEQLEGVQLPEPDEPSARHALPANEPRIVLNNGVVSYNDRPILNNLSWQHIGYVSSSLHLDYRVSTTVRNVILSGYFDSIGIYQAVSDRQQKLVQQWLDILGIDKRTADAPFHSLSWGQQRLALIVRALVKHPTLLILDEPLQGLDPLNRQLIRRFVDVLISE

SEQ ID NO: 48257 - protein, 178 aa, Homo sapiens
  DOMAIN (66)..(98): ABC transporters family proteins domain identified by eMATRIX, accession number BL00211B, p-value=8.393e-16, raw score of 13.37
  DOMAIN (116)..(178): Tetrahydrofolate dehydrogenase/cyclohydro domain identified by PFam, accession name THF_DHG_CYH, E-value=3.8e-37, PFam score of 133.9
HIGYVSSSLHLDYRVSTTVRNVILSGYFDSIGIYQAVSDRQQKLVQQWLDILGIDKRTADAPFHSLSWGQQRLALIVRALVKHPTLLILDEPLQGLDPLNRQLIRRFVDVLISEGFIPGDWIKEGAIVIDVGINRLENGKVVGDVVFEDAAKRASYITPVPGGVGPMTVATLIENTLQ

SEQ ID NO: 48258 - protein, 439 aa, Homo sapiens
  DOMAIN (202)..(234): ABC transporters family proteins domain identified by eMATRIX, accession number BL00211B, p-value=3.250e-16, raw score of 13.37
  DOMAIN (114)..(177): Binding-protein-dependent transport system domain identified by PFam, accession name BPD_transp, E-value=6.3e-08, PFam score of 39.8
MILTDPEWQAVLLSLKVSSLAVLFSLPFGIFFAWLLVRCTFPGKALLDSVLHLPLVLPPVVVGYLLLVSMGRRGFIGERLYDWFGITFAFSWRGAVLAAAVMSFPLMVRAIRLALEGVDVKLEQAARTLGAGRWRVFFTITLPLTLPGIIVGTVLAFARSLESGYRAQAEIIQDEVKDAPRCMQLAQQFGITAFLDQRFKYLSTGETRKTLLCQALMSEPDLLILDEPFDGLDVASRQQLAERLASLHQSGITLVLVLNRFDEIPEFVQFAGVLADCTLAETGAKEELLQQALVAQLAHSEQLEGVQLPEPDEPSARHALPANEPRIVLNNGVVSYNDRPILNNLSWQVNPGEHWQIVGPNGAGKSTLLSLVTGDHPQGYSNDLTLFGRRRGSGETIWDIKKHIGYVSSSLHLDYRVSTTVRNVILSGYFDSIGIYQAV

SEQ ID NO: 48259 - protein, 89 aa, Homo sapiens
  misc_feature (1)...(89): Xaa = X or * as defined in Table 2
MKIPKEGTGSNLXXXXXXXXXXXXXXXXXXXXXXXXXXXXXXXXXXXXXXXXXXNSINIXXXXXXXXXXXXXXXXXXXXXXXXXXXXET

SEQ ID NO: 48260 - protein, 33 aa, Homo sapiens
LFAWVLPAEAAEQQILLPDPSSGSFVPEGHPPM

SEQ ID NO: 48261 - protein, 248 aa, Homo sapiens
MATASGEAITVASGVHGCSPQRKHQLIGQKVNTDSRVGSTNTSYRRALAGIWWVPSGRSFQRKEQAAIFAVLQPLLVILRQTGSGVAPQQTPADLQRENEQMKRNSININKKDIHTKTPETPCEGHKHQRPKDYNSLPAREQNWTENEFDELTEVGFRKRVITNSSELKEHVLTQCKKAKNLEKRLEELLSRITSLEKNIKDLMELKNAARELCEPYTSISSQINQVEERISEIEDRLNEIKQEDKIR

SEQ ID NO: 48262 - protein, 221 aa, Homo sapiens
GEANTFFFTWRQQGEVRSAAKLWPDCFSRFLLTGQGISRTGKLWLASSGCPSGMKLPEEGTGSNLCCSAASAGDTQANRVWSGTPTNSSRPEVSSGAMDGEGWGLPVDPLTPGHQDALPWQRCYHPCSSSSVPPRQACASPASCSSSAAWPQPPRDPGTRAVAPAAAAAAAGAALRHQWVWERVRSGAGLCSCGRGCWPRKCPQGSHSAPRSRGAPHRPRP

SEQ ID NO: 48263 - protein, 98 aa, Homo sapiens
VGENGHYTLEGEEFTVNGMVGQRLEKDGVALTIADIKAKPGTQFVLSQRTRTEVRSELDQAEEKLNVYRQQRDSVDLNLEAKAVLEQIVNVDNQLNEL

SEQ ID NO: 48264 - protein, 110 aa, Homo sapiens
  misc_feature (1)...(110): Xaa = X or * as defined in Table 2
VPANSLSAIALFRRESVTPLAALAASPVCAGRFVLLKNHRRDLPXISVPVNSSSNSARSLVWHSGRQQIAPDWSSKDDFMRLGKPNRFSVLLLATWIRXSTVIRRSPFTS

SEQ ID NO: 48265 - protein, 709 aa, Homo sapiens
  misc_feature (1)...(709): Xaa = X or * as defined in Table 2
MVHRFGIRVRFVALGFYQDVILPVRAHRHEWGHYVHLCASIQRQIDVSFARDATSHSSCPVTGVRFWGYPFAANKVVIAGFELEGETMTRPGLICAEGGLLVMIVSLRSELYDSYHEFTRQRVTEIVEKAANHLPAVVEMMTLHRCAINRHNFVRRVGPAGISTFFASSPDGVNAGFSTFRVVFTCQRSRPLQRHSHADVQTATLLLNTVNLEQKQANAILSGLSDMIPNSSPESAPEIQLLQSRMILGKTIAELNLRDIVEQKYFPIVGRGWARLTKEKPGELAISWMHIPQLNGQDQQLTLTVGENGHYTLEGEEFTVNGMVGQRLEKDGVALTIADIKAKPGTQFVLSQRTELEAINALQETFTVSERSKESGMLELTMTGDDPQLITRILNSIANNYLQQNIARQAAQDSQSLEFLQRQLPXTLSKNRPTPFSAAXDDMIPNSSPESAPEIQLLQSRMILGKTIAELNLRDIVEQKYFPIDGSRLGEINQRKTRXAGDQLDAYSTTEWSGSATDTQVGENGHYTLEGEEFTVNGNGRPASGKRWRCADYRGHXGQDQQLTLTVGENGHYTLEGEEFTVNGMVGQRLEKDGVALTIADIKAKPGTQFVLSQRTELEAINALQETFTVSERSKESGMLELTMTGDDPQLITRILNSIANNYLQQNIARQAAQDSQSLEFLQRQLPEVRSELDQRKKNSTFIASSAIR

SEQ ID NO: 48266 - protein, 159 aa, Homo sapiens
  misc_feature (1)...(159): Xaa = X or * as defined in Table 2
VFAQHGLTVAAIAAHARDRWFVGRTAHANPPVRCSTDGSGRVPVTRYSGFVAAAVILLTASPRGGECSREAPLCSVSEYLLLQSAGEYAPAPRCVLRCVPSVDEDFVPVVPDXAPPVEVALFLLRLTPVARPADGGWLLAAIRPDALTSLAIVVLAAAR

SEQ ID NO: 48267 - protein, 225 aa, Homo sapiens
SLSLTSLLSTPIYQADTLVQVDKNKATAILSGLSDMILTSSPESAPEIQLLQSRMILGKTIAELNLRDIVEQKYFPIVGRGWARLTKEKPGELAISWMHIPQLNGQDQQLTLTVGENGHYTLEGEEFTVNGMVGQRLEKDGVALTIADIKAKPGTQFVLSQRTELEAINALQETFTVSERSKESGMLELTMTGDDPQLITRILNSIANNYLQQNIARQAAQDSQS

SEQ ID NO: 48268 - protein, 201 aa, Homo sapiens
  misc_feature (1)...(201): Xaa = X or * as defined in Table 2
MPVAFGKVNVFRNYNRFRFIEKNGHYKPKPFGKFRRIIRIVRRWPTIPLTVNSSLPVYSGRFPQPRDPQSEILLLNYVAQIQFSNGFTRIMRDCSSWISAMHLFRREQRDAAGLRLHFSSSVRADLCCSKTIARFARRFQCRLTPRAIPPFFGFGIQEGSKLPLRNSIERFQLIFHFVGENFAVGQRASSTRGTCKLPSGX

SEQ ID NO: 48269 - protein, 79 aa, Homo sapiens
SCLIDNHRYMRLQTRPGLSSEMIMTSMTLDLPRRFPWPTLLSVCIHGAVVAGLLYTSVHQVIELPAPAQPISVTMVTPA

SEQ ID NO: 48270 - protein, 400 aa, Homo sapiens
  DOMAIN (170)..(199): SODIUM CHANNEL SIGNATURE domain identified by eMATRIX, accession number PR00170G, p-value=5.976e-10, raw score of 7.74
MKNSVLTAFITVVCAMFAGHFRTSYLPRIIPRFTDAPLILAKDLSMAGNVQEKQLRWYNIALMSFITVWGFGNVVNNYANQGLVVVFSWVFIFALYFTPYALIVGQLGSTFKDGKGGVSTWIKHTMGPGLAYLAAWTYWVVHIPYLAQKPQAILIALGWAMKGDGSLIKEYSVVALQGLTLVLFIFFMWVASRGMKSLKIVGSVAGIAMFVMSLLYVAMAVPRLQLLKCILRPTTLPGKRSFLIATLSTVPPIQCWFSRLANRQRFSLRYQTRNPGLEFRCSWLFTGSGWGFKPYFAKRYTDQTYYTGDNGYVAGWVAGYNFMLGSEKFTLTNWNEYEFDRDATYAAAISALPWSRTTSHKASAAVESERFFLRTSINWRSTTGVMRFTTSGLPSGNGSA

SEQ ID NO: 48271 - protein, 206 aa, Homo sapiens
MIAKKISLIAKGSFNHAGVIQFPHPKDELPQKTGSSFTIRKEGLVSNVKKETILFGNRGGMYVSSGQEFQVYAVISYFYNCLLDNPRQTIKIRPTSTPAYLPFLPVRGQMYGFYDWENFYNGRHNKPCSEQRYTFKNTKPYLSWVDTGFSLYLHAYGTYGSANRVNFLDDMFLYGIGYNFTGSGCNFMLGSENFTLTNWNEYEFDL

SEQ ID NO: 48272 - protein, 347 aa, Homo sapiens
  DOMAIN (40)..(72): Sigma-54 transcription factors domain identified by PFam, accession name sigma54, E-value=7.6e-06, PFam score of 24.9
  misc_feature (1)...(347): Xaa = X or * as defined in Table 2
MLCTKWDKLGLEKNAGKNKNAYKWYGWPANAPDEPHIEQLVGECRVMRQLKRLISRIAPSPSSVMVVGESGTAIPVVSHAEFKGGFADIGVHYLDWTSRTTEKSSTKSHKDDFGYLEFEGGANFSWGEMYGFFDWENFYNGRHNKPGSEQRYTFKNTNRIYLGDTGFNLYLHAYGTYGSANRVNFHDDMFLAGFGFQFXPAGGWWGSNPFFAKRYTRSKPYYTGDNGYVAGWVAGYNFMLGSEKFTLTNWNEYEFDRDATYAADFLPLYDVDCQDNGNLEYDTYSQPEWKHNLFDHYLAVLYRFKDESGKEQFSGAVVKTREATPGKEIEAITRRMLDFSPRLKKLA

SEQ ID NO: 48273 - protein, 67 aa, Homo sapiens
  misc_feature (1)...(67): Xaa = X or * as defined in Table 2
YPRQHRQRADGSDRHRXXCWSAXIWANPTSNLPPCRFALTKRKRPILCAPPSRQSYAAWCRWEIRIA

SEQ ID NO: 48274 - protein, 294 aa, Homo sapiens
LARRSLASWMMIASKMTMCVTMVVTPTIMTMSTAFVILKPTRPHVITPILIGYLNLLGAPGKLAVFAVRLDTFEAEKNQQVFYMQCSLRVMTCRPDKGVHCRIRHWLPDATLARLIRPTVYAIHGWHTTHQTLHILIPKSNYIVTQTARSAVTVNNYMTNLNAVFQFGVDNGYLADNPFKGISPLKESRTIPDPLSREEFIRLIDACRNQQAKNLCLQMLSWITSRRECNIRDSVSPINCEYIISRVYQFMFATGHRETYEVPRMCTSWNKVPTVHKVTNRCRKKPRRAKDDAR

SEQ ID NO: 48275 - protein, 466 aa, Homo sapiens
  DOMAIN (98)..(141): Transcriptional regulatory protein C terminal. domain identified by eMATRIX, accession number PF00486C, p-value=7.188e- 14, raw score of 20.21
  DOMAIN (163)..(381): Sigma-54 transcription factors domain identified by PFam, accession name sigma54, E-value=5.9e-127, PFam score of 435.2
MPSDISLASCRLRATSRLFTDHRRQSDCMTAINRIPIVDDEDNVRRFETHCANNVRTALHLFADIHPDVVLMDIRMPEMDGIKALKEMRSHETRTPVILMTAYAEVETAVEALRCGAFDYVIKPFDLDELNLIVQRALQLQSMKKEIRHLHQALSTSWQWGHILTNSPAMMDICKDTAKIALSQASVLISGESGTGKELIARAIHYNSRRAKGAFIKVNCAALRESLLESELFGHEKGLFERANEGTLLLDEIGRMPLVLQAILRILQEREFERIGGHQTIKVDIASLLAPTRLQAMVKEGTFREDLFYRLNVIHLILPPLRDRREDISLLANHFLQKFSSENQRDIIDIDPMAMSLLTAWSWPGNIRELSNVIERAVVMNSGPIIFSEDLPPQIRQPVCNAGEVKTAPVGERNLKEEIKRVEKRIIMEVLEQQEGNRTRTALMLGISRRALMYKLQEYGIDPADV

SEQ ID NO: 48276 - protein, 257 aa, Homo sapiens
  DOMAIN (181)..(195): Transcriptional regulatory protein C terminal. domain identified by eMATRIX, accession number PF00486B, p-value=7.395e- 10, raw score of 11.05
  DOMAIN (136)..(247): Response regulator receiver domain identified by PFam, accession name response_reg, E-value=1.3e-36, PFam score of 135.1
MDLIVLGCRFSQRNAPPQSISCSPGKSIIGASLGNEMRHKSAGGPTAQQVLLNILINAVQAISARGKIRIQTWQYSDSQQAISIEDNGCGIDLSLQKKIFDPFFTTKASGTGLGLALSQRIINAHQGKSDCMTAINRILIVDDEDNVRRMLSTAFALQGFETHCANNGRTALHLFADIHPDVVLMDIRMPEMDGIKALKEMRSHETRTPVILMTAYAEVETAVEALRCGAFDYVIKPFDLDDEYSATPHEKRSVCRH

SEQ ID NO: 48277 - protein, 718 aa, Homo sapiens
  DOMAIN (467)..(522): Transglycosylase domain identified by eMATRIX, accession number PF00912B, p-value=1.783e-30, raw score of 29.21
  DOMAIN (424)..(558): Transglycosylase domain identified by PFam, accession name Transglycosyl, E-value=4e-33, PFam score of 123.5
MAMVDDFRCVVIKLAERIAHLREVKDAPEDERVLAAKECTNIYAPLANRLGIGQLKWELEDYCFRYLHPTEYKRIAKLLHERRLDREHYIEEFVGHLRAEMKAEGVKAEVYGRPKHIYSIWRKMQKKNLAFDELFDVRAVRIVAERLQDCYAALGIVHTHYRHLPDEFDDYVANPKPNGYQSIHTVVLGPGGKTVEIQIRTKQMHEDAELGVAAHWKYKEGAAAGGARSGHEDRIAWLRKLIAWQEEMADSGEMLDEVRSQVLTTGCTSYANQPRIPTLIIRGFAAEGQSQNNYLNGLKLQDNFYNDAVIDPYMLERAEIMRGPVSVLYGKSSPGGLLNMVSKRPTTEPLKEVQFKAGTDSLFQTGFDFSDSLDDDGVYSYRLTGLARSANAQQKGSEEQRYAIAPAFTWRPDDKTNFTFLSYFQNEPETGYYGWLPKEGTVEPLPNAWQDLTSGRVISGGSTLTMQVARLLDPHPKTFGGKIRQLWRALQLEWHLSKREIRTLYLTRAPLAGTLQGIGAASWAYLGKSPANLSYSEAAMLAVLPQAPSRLRPDRWPEPCLKPRRNKVLERMAVQGVWSREQVKESREEPIWLAPRQMPQLAPLFSRMMLGKSKSDKITTTLDAGLQRRLEELAQNWKGRLPPRSSLAMIVVDHTDMRVRGWVGSVDLNDDSRFGHVDMVNSIRSPGSVLKPFVYGLALDEGLIHPASLLTEIKHEQI

SEQ ID NO: 48278 - protein, 52 aa, Homo sapiens
  misc_feature (1)...(52): Xaa = X or * as defined in Table 2
IKTGETHPGIGPSVMXRHSKADLTHRHCGGIPEPQSVSFGSSQHGGGQFPPL

SEQ ID NO: 48279 - protein, 98 aa, Homo sapiens
  misc_feature (1)...(98): Xaa = X or * as defined in Table 2
SPLVNQXGAXKFFSRGNLFPQGETHXKTKGVPCWTRYPDLKRSDSAEIFKTPANASGRTSGSLGCAAQLEKVADGRDLDEKLAEAGIGGSNKTSVWQG

SEQ ID NO: 48280 - protein, 736 aa, Homo sapiens
MSRTTAGSGLGRRSEFHVQQRTVNSSVLSSLLTDFSTAVGLVRPGPAWVTSRRLPAFSGKTTVWRRANHRSQRTAHARRISGDSACQGRYNVGVYFQRAIGFFPADSHCATWGDARQGTIRQGFASSAIIRRMIHAAPDDLKAVQAADRQAVSAICRLAVASKRGIRCRHIFHFAPAPPRMSERFGAAPWANITAIQHCVTLPQTVRSIGFQHLHSSFAPVLPDVVEDRIQRSSDFVAFAFTEHHRENSGASCGICRGASQRVLPLTLLPAHGTTHLAGHPFEHFITRGFGTLRQRSGRRRLGACGKTASMPPRNSLNSQAIFRDKPIAERSLQVPQRDASSSQLHHPLQQSLQAAGDDNLPHEFDFLWLFRFFSLQTGFSMIKIRLVIVVQLADNNTRVFNGSVPSIGSISMRCNRTGNVPGASGSECPDLRLRSAFNQSWNIGNNEALLLSIRTTPRLGTRVEPKANAGARAPGKAVTQMEAFKPEPESFTNARYSAMRIIGTRVMPPPSAYCQSPPAGNKHIADKISWRTNQLRDDKSPSVSEKCQQRAEIDNAKHISGPSSSKNSPSPGLSRRNRTPYPDLDVKVIAYIHRHSPLLNQRHHHIRDQETITCCPGRNFSDLALATYADEHYGVIWPRDKKNRLSPTHGLRCIPYKDGENSFKEWRTNNTAWQLIIFLKPMDIHSYHCEGSKRDLAKAVLAELPQQVVQYLSIKTCPPPTRSPTELQAQQQHVS

SEQ ID NO: 48281 - protein, 64 aa, Homo sapiens
IPTGNAGVSGAGGDAGNVSAWGADKLWPLPLHEVNPARVVVAQDGTPLWRFADADGIWRYPSKH

SEQ ID NO: 48282 - protein, 104 aa, Homo sapiens
  misc_feature (1)...(104): Xaa = X or * as defined in Table 2
PYRGSPRNGHQLCDHCSHRLSEDPFVRYSNHCQSISNYRCDKPPVRPLSPLHQKTDRKHHQRPDRPFQWSAAPAHGRWRSGDSXETPLHYAQPAGKLRWLWVNY

SEQ ID NO: 48283 - protein, 59 aa, Homo sapiens
  misc_feature (1)...(59): Xaa = X or * as defined in Table 2
LLGYGQQPPASNLLSEGXRSVVLXISALRMXALPPQKSSDAPNGWLPNRWPISSTHMIR

SEQ ID NO: 48284 - protein, 426 aa, Homo sapiens
  DOMAIN (102)..(141): 3-hydroxyisobutyrate dehydrogenase proteins domain identified by eMATRIX, accession number BL00895B, p-value=5.179e-33, raw score of 21.14
  DOMAIN (204)..(374): Transglycosylase domain identified by PFam, accession name Transglycosyl, E-value=7.8e-91, PFam score of 315.2
MGKPMSKNLLKAGYSLVVADRNPEAIADVIAAGAETASTAKAIAEQCDVIITMLPNSPHVKEVALGENGIIEGAKPGTVLIDMSSIAPLASREISEALKAKGIDMLDAPVSGGEPKAIDGTLSVMVGGDKAIFDKYYDLMKAMAGSVCIPGGPLPAVPREVPVPHRWGPKDVPHGGERARLKFADAWGADKLWPLPLHEVNPARVVVAQDGTPLWRFADADGIWRYPVTIEDVSPRYLEALINYEDRWFWKHPGVNPFSVARAAWQDLTSGRVISGGSTLTMQVARLLDPHPKTFGGKIRQLWRALQLEWHLSKREILTLYLNRAPFGGTLQGIGAASWAYLGKSPANLSYSEAAMLAVLPQAPSRLRPDRWPERAEAARNKVLERMAVQGVWSREQDFPSSDAVYVRARAPIACPRMVFEEPADD

SEQ ID NO: 48285 - protein, 24 aa, Homo sapiens
NHSCGNEGWGNEPAIIALCTNVFR

SEQ ID NO: 48286 - protein, 159 aa, Homo sapiens; identical to SEQ ID NO: 48252

SEQ ID NO: 48287 - protein, 447 aa, Homo sapiens
  DOMAIN (53)..(71): Glycosyl hydrolases family 25 proteins domain identified by eMATRIX, accession number BL00953A, p-value=6.769e-15, raw score of 11.74
  DOMAIN (27)..(139): Glycosyl hydrolases family 25 domain identified by PFam, accession name Glyco_hydro_25, E-value=0.0018, PFam score of 16.3
VQITDYIHFYGYRPVKSFAIRIPASYTIHGIDVSRWQERIDWQRVAIMRDNGIRLQFAFIKATEGEKLVDPYFSRNWQLSRENGLLRGAYHYFSPSVSASVHARLFLQTVDFSQRRFLAVLDVEERGRIIGKRIYASWQQYNRGDSAILRGLLDAINILNPHAEVDVMSRYPVSSSWLLNRPVMGDPLFLQMKQHNSAAGVVGRVKKVLRRRYQHQVLLSRVTDTGKLRNIAIAQGFTDFVRLLSGYDAIIQVGGSFFVDLYGVPQFEHALCTFMAKKPLFMIGHSVGPFQDEQFNQLANYVFGHCDALILRESVSFDLMKRSNITTAKVEHGVDTAWLALANHATGAKLDKRITASIVPHKIPITTAVTVIFRVITSPSSRYGRQLRGFTDNSPWGDIGDNLPASKSERDSPGSEITTFIRFTMLNCYWTNCRPSSSVFPVSSAAP

SEQ ID NO: 48288 - protein, 185 aa, Homo sapiens
  DOMAIN (127)..(182): Ribonucleotide reductase small subunit proteins domain identified by eMATRIX, accession number BL00368A, p-value=8.062e- 12, raw score of 36.98
  DOMAIN (153)..(184): Ribonucleotide reductases domain identified by PFam, accession name ribonuc_red, E-value=1.2e-09, PFam score of 29.9
  misc_feature (1)...(185): Xaa = X or * as defined in Table 2
MKLLIVGNHTCGNRGDSAILRGLLDAINILNPHAAVDVMSRYPVSSSWLLNRPHQVLLSRVTDTGKLRNIAIAQGFTDFVRLLSGYDANIAGSIRQFKGLPGCRMQRERLIRPTAQDLPVNVARYDQQNMNLRKADRKAALLSSGVRKKLTSSRDRIDYQALPEHEKHIFISNLKYQTLLDSIQX

SEQ ID NO: 48289 - protein, 150 aa, Homo sapiens
  DOMAIN (35)..(54): Phosphoribulokinase proteins domain identified by eMATRIX, accession number BL00567A, p-value=1.000e-08, raw score of 10.66
  DOMAIN (33)..(150): ABC transporter domain identified by PFam, accession name ABC_tran, E-value=0.00027, PFam score of -13.4
QGYCVGMLEARELLCERDERTLFSGLSFTLNAGEWVQITGSIGAGKTTLLRLLTGLSRPDAGEVLWQGQPLHQVRDSYHQNLLWIGHQPGIKTRLTALENLHFYHRDGDTAQCLEALAQAGLAGFEDIQGTSTGRLASLQGELQTLLKES

SEQ ID NO: 48290 - protein, 107 aa, Homo sapiens
MPVTALEDLPVGQDIEVEDSDTDDPDPGRAAVQVTRRLATRYTPPKTGSGRPALQGHAGGLEEQTASENDSRDSPTPRRSLTVALAPRGGTKPAASLGFLTSRALMS

SEQ ID NO: 48291 - protein, 281 aa, Homo sapiens
  DOMAIN (210)..(232): KINESIN HEAVY CHAIN SIGNATURE domain identified by eMATRIX, accession number PR00380A, p-value=4.000e-26, raw score of 14.18
  DOMAIN (172)..(280): Kinesin motor domain identified by PFam, accession name kinesin, E-value=2.3e-39, PFam score of 144.2
MSVCSPCDIESNIILSPTGYGEQYHRRVCTTYDIESNILSPPEYCEHYYRGECTPCNVKSNIILLLLDVTNNITETDLHTKCVVDVDANKVILNPVNTNLSKGDARVYAYYPFLKRLIVKQPQAGLSGVTTKEGTVITGDDSSMPVTAPEDLPVGQDVEVEDGDTDDPDPVFAYDHCFWSMDESVKEKYAGQDIVFKCLGENILQNAFDGYNACIFAYGQTGSGKSYTMMGTADQPGLIPRLCSGLFERTQKEENEEQSFKVEVSYMEIYNEKVRDLLDPK

SEQ ID NO: 48292 - protein, 94 aa, Homo sapiens
GARAEARAGSGQGAGLGVSSPVRWRGWSDKGAERPGGPLSPLREVSRAGPSGHAARGQQPGRPRFPPPGPRPPRRRCPCTRARPGGAAGGGPCL

SEQ ID NO: 48293 - protein, 51 aa, Homo sapiens
MADFKVLSSQDIMWALHELKGHYAITRKAFSDAIKKWQELSPETSGKRKKK

SEQ ID NO: 48294 - protein, 325 aa, Homo sapiens
PLLTSAASSKLLTSSWPTSKCSVVRTSSGPCTSSKDTMQSPERPCLMPLKKWQELSPETSGKRKKRKQMNQYSYIDFKFEQGDIKIEKRMFFLENKRRHCRSYDRRALLPAVQQEQEFYEQKIKEMAEHEDFLLALQMNEEQYQKDGQLIECRCCYGEFPFEELTQGANAHLFCKECLIRYAQEAVFGSGKLELSCMEGSCTCSFPTSELEKVLPQTILYKYYERKAEEEVAAAYADELVRCPSCSFPALLDSDVKRFSCPNPHCRKGCCSPSGFSPRNSQRQLLTPRQVAEPTPTCISEPRKSRVSVGSENPAATWGLRCRRPP

SEQ ID NO: 48295 - protein, 651 aa, Homo sapiens
  misc_feature (1)...(651): Xaa = X or * as defined in Table 2
MAQFHVSHPPAEWPRHVLLLMADSKNELQNMNTGQTCGTRQTLKSKLQGWNKPGIQSDPGSQGHPRCLKTFPLVAQSSTQERNHVMEKAVLKSQNWAIIEEFITKIGWFPDYSGKVKYLSSPKSSCTTVLQVTHFSLFFHPNPDELVSKIKVWSKHRLYQNNSEAFLEVQIPEPKCEVYSMRTMGRRQPGTAMDLNAGGSICNVPRTLLHLTGESTFRDRQRVGAYLDIRGWYILVLVVDKEKLGIPGQKQNSSKILFGSEKLKQWVYVKNHAKESITQEAMGIWVGQQRKRQPLGYEERKLTNRKDIHIKNPSVCHHHQRPKVDKTTKMGKKQSRKTGNSKNQSTSPTLKESSSSPATEQSWTENDFDELREEGFRRSDYSELQEEVQNNGKEVKNFGKKLDEWITRITNAKKSLKDLMELKTKARELCDERTSLSSQCNQLEERVSVMEDEMNEIKQEEKFREKRIKRNEQSLQEIWDYMKRPNLRLIGVPESDGENGTKLENTLQDIIQENFPNLARQANIQIQEIQRTPQRYSLRRATPRHIIVRFTKVEMKEKMLRVAREKGRVTHKGKPVRLTADLLAETLQARRQDTHRLKIKDGGRFTKQMENRKRQGLQSXSQIKQNLNQQRSKETKKAITXWXRDQFNKKS

SEQ ID NO: 48296 - protein, 946 aa, Homo sapiens
MKASMNSKYPLADATKREFENCSMKSFYVDIPVSNEGLKAVQITTCSFYEKSFSKLLYEKASKLYKCPLQILQNECFKTALSKESFNSFLCEDILVSNEGLKAVQISTGRFHEKSVSKLLYEKFLCEDIPISNEGLNAIKISTCRFYEKNVSKLLYENASKLSKCPLAHTTKRMFQNCSIIGKVQLCELNAHITKKFLRILLSSFYVKIFPFPTKASKQSKYPLADTAKRVFQNCSVKRFYEKSVSKLLYEKGHRAQAHLLCEDPATGWFFGFLRVSRQEAKGECTPESRSTGDFLSLAQRATPQITPSPTPGHLNPYNKMYWPEKYEEDAQVEPPDKTVRSRETYSLPGEQYGGSAPMIPIIYHQVPPTTQENDGRTIQDEIWLWNKAPCILATASALGVAQIDPVTTPVTASECASHNLGSFHVVLGLWVYQMQVVETWEPPPLFQRMYEKARSWQPDPGTKVLRDIQTHPTTVTSKPTPKHTDTQGRTRGNTSTHTDTQRHRQLEEEQGTERWRDRNGRRVRNSDREKDREEPGRLRERARKVEREVEKGRGDFVFAALAPLEVGLYHPQIPRWPPHPNKCQEVQYPQHGSLLGACSVGQLGYPQAKSQGQKFTRHWWQWETGCTGTDFFVAGEDNVLPPGKAAHGFWSRGLGWQLWDLLPQLRWLRRRLMNELNCLGSGEREDTPEGRKPAPAPSRSTTCCSALAGAGLLVGLQPGKRGGMLPPGGIAAADPHEEERCASPATEQSWTENDFDELREEGFRRSNYSELKEEVQTNGKEVKNFEKKLDEWLTRITNAEESLKDLMELKTMTRELCDECTSLSNRCDQLEERVSVMEDEMNEMKHEEKFREKTIQRNEQRLQEIWDYMKRPNLCLIGVHESDGENGTKLEINQQDIIQENFPNLTRQANIHIQEIQRMSQRYSSRRATPRHVIVRFTNLHIKTT

SEQ ID NO: 48297 - protein, 299 aa, Homo sapiens
MGNGPKAKSTATGSCRIELMAVEANPPQRGKNCHSSKIQRPSSDPGGMKRRILSTDPQKEAGGCGEMNRLAPTLASSQAKQGHPVSVPTRKKLGVVTPILMIRKKLNKQKLSNLSWTPQRAEVAEQTATGKSEEMGMHRLETSMGANRNQGEKAAAISGIKTKTQGLMEKKDKDRRSRGGSCQDSRSHRKQRKKDANKEIADIWAHPGMPASQGGTTEKQYEKELSHTGPGMAEQIKFDSVEVCVCCELQHQSSGCSNLGETLKLNPLQENCNAVRLTLKVTPLGAACACISFHALQTV

SEQ ID NO: 48298 - protein, 94 aa, Homo sapiens
RITNCLRKVWKVFLVITPSQLELYVTGTSRGMMALERLLLFSAAALTRPLLTARAVTGPTSPLCPVWAGPRPRTWLGAWALHRGCSRHSRHKAS

SEQ ID NO: 48299 - protein, 90 aa, Homo sapiens
VLVRDPSQPAQPFSVSFSPQKHRDEKLYFLPKGVSGGSELRGRPQPYLPCPVSPTLCPWGHLSLAPPSVPPTACESSSELWPSLSWTWAE

SEQ ID NO: 48300 - protein, 591 aa, Homo sapiens
  DOMAIN (253)..(266): REPEAT PROTEIN ANK NUCLEAR ANKYR domain identified by eMATRIX, accession number PD00078B, p-value=9.100e-10, raw score of 13.14
  DOMAIN (159)..(555): Ank repeat domain identified by PFam, accession name ank, E- value=6e-46, PFam score of 166.1
MAVRVTAAHTAEAQAEAGREAGEGAVAAVAAALAPSGFLGLPAPFSEEGNRADPEGAAGVRAVHPGLAEARMARAAGSTDPPRPRHLADLAGPSQPSTKPPGKGWELGALVPALILAQRVASLGAAGDGWMGVWTSRVCGCAQLLGSTKKINVNFQDPDGFSALHHAALNGNTELISLLLEAQAAVDIKDNKGKTSRGPLGRKEPMKLVLKAGSAVNIPSDEGHIPLHLAAQHGHYDVSEMLLQHQSNPCMVDNSGKTPLDLACEFGRVGVVQLLLSSNMCAALLEPRPGDATDPNGTSPLHLAAKNGHIDIIRLLLQAGIDINRQTKSGTALHEAALCGKTEVVRLLLDSGINAHVRNTYSQTALDIVHQFTTSQASREIKQLLRGGPKPGKRGSGWGWGWARFTRTNLGGPLPDSPKALNGPLQVRATKDYCNIYDLTSLNVKGGDIITVLEQHPDGRWKGCIHDNRTGNDRVGYFPSSLGEAIVKRAGKFHPTLGGRQEPLGLGAGSSECAEAGIDINRQTKSGTALHEAALCGKTEVVRLLLDVSVGPRGAGPSGLDSAAEKSTGSILDDIGSMLDDLADQLDAMLE

SEQ ID NO: 48301 - protein, 630 aa, Homo sapiens
EVCDLSVTLKDACRSRSPSPPPLSPIETEGFEKLKDVISEISALENNKLEANINQPPSLTPAEISSNKSDHQDKILKTKKSSNSYSLLSNDSNNSTTNHEKGETAVIFQDLMDRINEKLKSIETTDMTSLVKLSSSDYNTYNDLKLGDFITSLLHNAKASDYSFMELLSQHDKKVENKIIQTRFRKRQETLFAMRNSSDSPMFRRQSLQIKRELASLDENFTRKKYTEKSSRKLTQNNEISSSDKGEFYHEQGPNWDGVLDLSTKKTSIKSEESSICDPSSENSVAGRLHRNREDYVERSAEFADGLLSKALKDIQSGALDINKAGILYGIPQKTLLLHLEALPAGKPASFKNKTRDFHDSYSYKDSKETCAVLQKVALWARAQAERTEKSKLNLLETSEIKFPTASTYLHQLTLQKMVTQFKEKNESLQYETSNLTVQLKIPQLRVSSVSKSQPDGSGLLDVMYQVSKTSSVLEGSALQKLKNILPKQNKIECSGPVTHSSVDSYFLHGDLSPLCLNSKNGTVDGTSENTEDGIDRKDSKQPRKKRGRYRQYDHEIMEEAIAMVMSGKMSVSKAQGIYGVPHSTLEYKVKERSGTLKTPPKKKLRLPDTGLYNMTDSGTGSCKNSSKPV

SEQ ID NO: 48302 - protein, 252 aa, Homo sapiens
MIRGQEGKRTELWCTLIFEVQKEGVTAAGQQGGRKPGSREEKLLLEGVGTGPDAAGRPRNGTAQSADLRIRRQHSSDSVSSINSATSHSSVGSNIESDSKKKKRKNWLRSSFKQAFGKKKSPKSASSHSDIEEMTDSSLPSSPKLPHNGSTGSTPLLRNSHSNSLSDKGSQGVVLGGGDEASGRIVAGDPSTAEGDVDGLTAGVEAADRLKAQAILANCGGAAGVGAPDTQKCYSMSSPLLVAKNVPSDYKE

SEQ ID NO: 48303 - protein, 86 aa, Homo sapiens
  misc_feature (1)...(86): Xaa = X or * as defined in Table 2
CPPEAVMPRRHEPVWEMTGFFLPDVLLSDSSDTSEGFRLHLETWAPFLCRCLSLRLISXHHHQTTGNSSPPVSASQHQSVDRDSLN

SEQ ID NO: 48304 - protein, 365 aa, Homo sapiens
  DOMAIN (105)..(148): A-BINDING PROTEIN CHLOROPHYLL domain identified by eMATRIX, accession number DM01283C, p-value=9.036e-09, raw score of 17.25
STAKRGDLSPAGQPHWAKSQKSSALVSRSAGRKSSMDGAQNQDDGYLALSSRTNLQYRSLPRPSKSNSRNGAGNRSSTSSIDSNISSKSAGLPVPKLREPSKTALGSSLPGLVNQPDKEKGISSDNESVASCNSVKVNPAAQPVSSPAQTSLQPGAKYPDVASPTLRRLILLISLLGKTDDAKVSEKGRLSPKASQVKRSPSDAGRSSGDESKKPLPSSSRTPTANANSFGFKKQSGSAAGLAMITASGVTVTSSREIDQVENFCVVVKHTTKLHASFGKCILPNTSDALKHTCQSSSVGCSFKQAFGKKKSPKSASSHSDIEEMTDSSLPSSPKLPHNGSTGSTPLLRNSHSNSLPIVFNHHFL

SEQ ID NO: 48305 - protein, 163 aa, Homo sapiens
AAALRALRPEASALPLARDGNGAKRRRHHVLPQAAQTHLQVLPPATAPGEIVVNEVNFVRKCIATDTSQYDLWGKLICSNFKISFITDDPMPLQKFHYRNLLLGEHDVPLTCIEQIVTVNDHKRKQKVLGPNQKLKFNPTELIIYCKDFRIVRFRFDESGPES

SEQ ID NO: 48306 - protein, 224 aa, Homo sapiens
ELYARRRRRCHWPATGTGRKGGGTMFSLKPPKPTFRSYLLPPPQTDDKINSEPKIKKLEPVLLPGEIVVNEVNFVRKCIATDTSQYDLWGKLICSNFKISFITDDPMPLQKFHYRNLLLGEHDVPLTCIEQIVTVNDHKRKQKVLGPNQKLKFNPTELIIYCKDFRIVRFRFDESGPESAKKVCLAIAHYSQPTDLQLLFAFEYVGKKYHNSANKINGIPSGDG

SEQ ID NO: 48307 - protein, 94 aa, Homo sapiens
  DOMAIN (32)..(52): PHOSPHATIDYLINOSITOL TRANSFER PROTEIN SIGNATURE domain identified by eMATRIX, accession number PR00391A, p-value=7.382e- 18, raw score of 7.83
  DOMAIN (17)..(94): Phosphatidylinositol transfer protein domain identified by PFam, accession name IP_trans, E-value=1.2e-54, PFam score of 191.2
KSQLAVPHRREGLDSKMIIKEYRIPLPMTVEEYRIAQLYMIQKKSRNETYGEGSGVEILENRPYTDGPGGSGQYTHKVYHVGMHIPSWFRSILP

SEQ ID NO: 48308 - protein, 69 aa, Homo sapiens; identical to SEQ ID NO: 45022

SEQ ID NO: 48309 - protein, 178 aa, Homo sapiens
  misc_feature (1)...(178): Xaa = X or * as defined in Table 2
LGFLLRLSEMPRKQGDYRTRIWKFEDGLSNVLVIQLNKLIICVMCLVRDCDVLKTYFHRXSGLLPIKDTSRPFTRVTVQWGKKNDQTFQGLLDTGSELTLIPEDPKRHCGPPVKVGAYGGQVLHSKWAPIYHFLSSHNCNGFCYISIANLPKKFGQNIKECLTNNRIVPFNCVQDPTY

SEQ ID NO: 48310 - protein, 391 aa, Homo sapiens
  DOMAIN (187)..(375): Reverse transcriptase domain identified by PFam, accession name rvt, E-value=3.4e-07, PFam score of 32.6
VGVLTPVEKKLKLWKNRHNLLPCEWLTCNERYYSGNHSHSTTKFKYNGNNWILRWHGPSGGTQASRQGDLWPFTRVTVHWGKGNNQTFQGQLDTGSELTLIPGDPKRHYGPPVKVGAYGECTIGIDVLSTWQNTQIGILTGRVRAIMLAKAKWKALELPLPRKIVNPKQYHIPGGTAEISATIKDLKDAGAVIPTTSLFSYPIWPVQKTDGSWRMSVDYHKLNQVVTLITDAVPDVVSLLEQINTSAGTWYAVIDLANAFFSIYVYKAHQEQFAFSWQGQKYTFIVLPQGYINSLSLHPNFIQRDLDHFLLPQDIPLVHYIDDIMLIGSMTQKAASFEWGPEQQKTLQKAQAAVHAALPLGPYDPADPMVFEVSLADKDAVWSLWQAPIFE

SEQ ID NO: 48311 - protein, 121 aa, Homo sapiens
FVQYRRSPSLILFANLRGYSLTISNKNSLNHPGESLHSLDRIINGQQFYVRRIHEVIDDIIMRMGVIVSKGAVLSDNFSKHRVLFWQNHTPGFNNWLSIHSSGNFIFVTLQWSDGYRSLFP

SEQ ID NO: 48312 - protein, 364 aa, Homo sapiens
KASGTGLIQNLRKKTPISITPLQRNKDKVTRAMDAQPVIKAGRVVLPEEHPMLAEIIAEHSAFTYDDTHPHDDIVDNFMDAANIELLTIDDPIERMKRLAGMVKRIFIADGERVTPQIRKQNQGWGASVLNKSLIDAICDYDYCESLATQILRRKQQAVWKVKGLAEMCDDDDAQYAARLRLAQVDDNSGVGRAIGIDAETEEYDVLNSDISGVPEFLSSKMDRIVSLSGIHEIIIKNKNVGGVSASQNTALETFYKLVDRKREEDYRPLLEFLLPFIVDEEEWSIEFEPLSVPSKKEESEITKNNVESVTKAITEQIIDLEEARDTLRSIAPEFKLKDGNNINIREPGRNTRTGTGIRGEVRR

SEQ ID NO: 48313 - protein, 500 aa, Homo sapiens
MCELDILHDSLYQFCPELHLKRLNSLTLACHALLDCKTLTLTELGRNLPTKARTKHNIKRIDRLLGNRHLHKERLAVYRWHASFICSGNTMPIVLVDWSDIREQKRLMVLRASVALHGRSVTLYEKAFPLSEQCSKKAHDQFLADLASILPSNTTPLIVSDAGFKVPCLGDVLCWSRLYGGAGFVAIIKDNRMLTSPVKPGAKLEGVRVYDRFAITVEKRVTNARSPRYGEPEGDNVSPGDYLQPYLIHHTRIFIADGERVTPQIHKQNQGWGASVLNKSLIDAICDYDYCESLATQILLRKQQAVWKVDDNSGVSRAIGIDAETEEYDVLISDISGVPEFLSSKMDRIVSLSGIHEIIIKNKNVGGVSASQNTALETFYKLVDRKREKDYRPLLEFLLPFIVDEKEWSIEFEPLSVPSKKEESEITKNNVESVTKAITEQIIDLEEARDTLRSIAPEFKLKDGNNINIREPEETTEPEPGLGEKLEDDNPRVRITVDVS

SEQ ID NO: 48314 - protein, 2071 aa, Homo sapiens
  DOMAIN (852)..(888): DnaB-like helicase domain identified by eMATRIX, accession number PF00772D, p-value=4.545e-09, raw score of 13.57
  DOMAIN (605)..(690): Fibronectin type III domain identified by PFam, accession name fn3, E-value=0.051, PFam score of 17.9
MEDNLISINKIKILLAVSDGEIDETFSLKQLMFNSVPVQNEDGSFNFEGVKAEFRPGTQTQEYIKGMEDSSSEVTVNREVTTDNPYTISVTNKTLSAIRIKMFMPRGVRIESNGDKNGVRVEYEVQQAVDGGSFETVLTDVIEGKTMSGYDRSRRVNLPNFNNQVIFRVVRKTPDSNDSNVVDAIQVRSYAEVIDAKFRYPLTGLLFVEFDSKMFPNQLPTISIRKRWKIVNVPSNYDPESRTYNGNWDGTFKKAWTNNPAWVLYDLMINQRYGLDQKELGISVDKWALYEAAQYCDQMVPDGKGGTEPRYLCDVIIQSQTDAYKVVRDICSIFRGMSFWNGESISVIIDRPREPAYIFTNDNVVNGDFSYTFASEKSMYTTCNVMFDDEQNMYQQDVEPVFDREATLRFGNNVTSITAIGCTRRSEANRRGRWILKTNLRSTTVNFATGLEGMIPTIGDVVAISDNFWSSNLTMNLSGRLLEVSGSQIFLPFRVDARAGDFIIVNKPDGKPVKRTISSVSADGKTIEINIGFGFPVKPNTVFAIDRTDLALQQYVVTKIDKGDDDEEFTYKITAVEYDPNKYDEIDYGVNIDDRPTSIVEPDQIPKPENVKVSSESRIVQGMSVETMIVSWDKVPYAVFYDVQWRKDNGNWQNVPQTANKEVYVEGIYAGNYQVRVRSVAGSGTTSGWSNIVAATLTGKQGEPGRPINLTATDDVVFGIRTKWGFSDGSGDTAYTELQQSPDGTVDNASLLSLIPYPQHEYYHSPMPGRTVDRIGNVSQWTDFVRGMASTNVDDIIGEISVDIENSPGYEWLVDNATDNASQNAANAEAAIENALANDKDAIYMKKENGKRKAEYTKSLKLIADETEARVTAVEQLGQVLISASNSELREVIATETGALSREIDQLKAEIGDDIQASLTDIREAIANETEARTQADLSLSRGLGIMRQHFLKNLIRGAMRIRLVQFQGGNFKELYKKKFGTVLAKNRAMTPEQLFDLSVKYFEWAEDNAIKASESASFQGGVYESLVHKPRVFTWTGYRLFIGASEAAIIKWKREEEYSEVMEFVESVINEQKFQLAANGVINASFIGKDLGIDKPASINIENSAASASTAVATTEEAMKEAKLAIKKMSEANFEKMIRIWFQLMQAQQFQPNWHHLYLCHEVEEIIAGRRGNTIFNVTPGSGKTEVFSIHLPVYAMLKCKKVRNLNVSFADSLVKRNSKRVREIISSNEFQELWPCKFGTSKDEEMQVLNEDGKVWFELISAAAGGRITGSRGGYMTPGFSGMVMLDDIDKPDDMFSKVKRERTHMLLKNTIRSRRMHNETPIIAIQQRLHAQDSTWFMMNGGMGIEFDQISIPALVTEEYGKTLPDWLQPYFERDVLSSEYVELDGVKHYSFWPSKESVHDLLALREADQYTFDSQYQQKPIALGGSVFNSEWWTYYGNSLDADEPDPGKYDYRFITADTAQKTGELNDYTVFCLWGKKNDKVYFIDGIRGKWEAPDMERQFTAFVNQAWRHNKSMGVLRKIYVEDKASGTGLIQNLRKKTPISITPLQRNKDKVTRAMDAQPVIKAGRVVLPEEHPMLAEIIAEHSAFTYDDTHPHDDIVDNFMDAANIELLTIDDPIERMKRLAGMGCQLTALFIGGNMKIVKHDGYNDIFNGGADGSPKPFFMSDASYHVGSFYNDNATAKRIVDVIPEEMVTAGFKMSGVKDEKEFKSLWDSYKIDSSLVDVLCWSRLYGGAAIVAIIKDNRMLTSPVKPGAKLEGVRVYDRFAITVEKRVTNARSPRYGEPRYTMYLPGDNLQPYLIHHTRIFIADGERVTPQIRKQNQGWGASVLNKSLIDAICDYDYCESLATQILRRKQQAVWKVKGLAEMCDDDDAQYAARLRLAQVDDNSGVGRAIGIDAETEEYDVLNSDISGVPEFLSSKMDRIVSLSGIHEIIIKNKNVSRVSREPKPQPLETFYKLVDRKREEDYRPLLEFLLPFIVDEEEWSIEFEPLSVPSKKEESEITKNNVESVTKAITEQIIDLEEARDTLRSIAPEFKLKDGNNINIREPEETTEPEPGLGEKLEDEN

SEQ ID NO: 48315 - protein, 30 aa, Homo sapiens
AITQIEPTGQRDKLLSLHCRHFRKTFRCRI

SEQ ID NO: 48316 - protein, 1657 aa, Homo sapiens
MSDGLDSTATWALLLRDTCIRVPRWPMGLLSHASTHSYVLAPHADAQVPLRSHLQASTHSYVLAPHADAQVPLRSHLHASTHSYVLAPHADAQVPLRPHLHASTHSYVLAPHADAQVPLRSHLHTNTHSYVLAPHADAQAPLRSNLHASTHSYVLAPHADAQAPFRPHLHASTHSYVLAPHADAQAPLRSHLHASTHSYVLAPHADAQAPLRCTGTFEAPPLMTPASALGTRGEAQCGRALQGFSPGPHSCPENKCSLPKGGIAWLSSLHRAHAGGNRALSAVKAAVLGAPGYVRGIMLGPVKPAVRTGVLMRRGRDPRSTCTLRKGHVRTQGKGSHQAAKMRLQEKPNLWRLDLGFPVCGAADSSNQSGLGTTQSVSVQPGEFRRLLCFELWNKRKGIFHRRLKMKAKQRFDSVKIKAHFDDNGFLVDRPIVARIGAQVYKTPHGDRVEFRPASEVFKQDSLQSFAGKPITVGHVTVTPQNARDVDVGSCAGAGIASRVGVEISLSIDSDYAISKAKRAEAGELSVGYTSVDIDKPGWGSNETGEYIFEEDMKQDEAPPEGWVKFDAVQTNIKEFPYDNNVQLTNEDKQMKKIKIDSVDVEVTEDVANHIEKLTAQIATIQRKADGFEAERDALKVKVDSLPELVKAEVEKQKADAAARAEVTAVAETAGVKHDGLDIKDVKIAVVKAMLDKDVSEKSDAYIDAMFDVPKDSDIMAIQRKAVKGDSIEGGKPEETNDTAPVPPNSTCKQSNVRGNIMAQINASYQRDMAIALPGMVADTSKYNIDGACVVNEGDVFVGAAVQVVQAQAVDGHKLVKALTTGTTPYGVAIRSHWQTVNAQNQMVYEDGGAINVMTSGRVWMLSKSTEAPTFGSAVKLDVDGQEKSDGTIETTWTYAGGWTKYKDIQLVEVVGIVDGVKVVTALSDGGTPYGIAFRSQYEHLSGKILDGEVCNVVSHGRVWALTSLDEAPSLFSKLQLGSGGVVTGGSGSAGWTFAGGFVKHEDGYVIEVQVKQNAFIVPPPPPPVVLVESATITTDKESPQPNNVTIQCVANALPANATDKTGKWSIDATNIATVDPDSGLVTPVGGESVGDFNITWTANDASKTTATIAYSVEAVPTPEAGVKQDAAATMGIWTAKELHRIKSQSYKEDYPVGSALRVFPVTTDLSPTDKTFEYMTFDKVYKTPHGDRVEFRPASEVFKQDSLQSFAGKPITVGHVTVTPQNAKDVVVESCAGAGIASGVGDVEVTEDVANHIEKLTAQIATIQGKADGFEAERDALKVKVDSLPELVKAERREAKSRCRRTRRSYKIDSSLVDVLCWSRLYGGAAIVAIIKDNRMLTSPVKPGAKLEGVRVYDRFAITVEKRVTNARSPRYGEPEIYNVSPGDNLQPYLIHHTRIFIADGERVTPQIRKQNQGWGASVLNKSLIDAICDYDYCESLATQILRRKQQAVWKVKGLAEMCDDDDAQYAARLRLAQVDDNSGVGRAIGIDAETEEYDVLNSDISGVPEFLSSKMDRIVSLSGIHEIIIKNKNVGGVSASQNTALETFYKLVDRKREEDYRPLLEFLLPFIVDEEEWSIEFEPLSVPSKKEESEITKNNVESVTKAITEQIIDLEEARDTLRSIAPEFKLKDGNNINIREPEETTEPEPGLGEKLEDEN

SEQ ID NO: 48317 - protein, 280 aa, Homo sapiens
ICWTLGAVARGIIVLNCDVLTPPTVMVCTADFTALFGDFKGEMAILFGVCVVEFKVDPITPLSDIVMVFDGVPGVDCERTLPANERQHISLTFFNNSIKIYVMMLYTHKDCRMYCDCFANGEFCNNCNCTNCYNNLEHENERQKAIKACLDRNPEAFKPKIGKGKEGESDRRHSKGCNCKRSGCLKNYCECYENIIFIWYCCRYRQILEKAIQLSGAEQLEALKAFVEAIIESVESRTSGMTIQRSCLALQHTDLECSSIYGLQKALRNLHYQRTRTAQL

SEQ ID NO: 48318 - protein, 759 aa, Homo sapiens
  DOMAIN (506)..(519): GLIADIN domain identified by eMATRIX, accession number DM00406, p-value=8.054e-10, raw score of 7.73
MFKVIASEQSKVKLGPKTTKTLSYHPRNGSLTLILSKIWKCQGLAVVLKIIFQPNLIGCSKIIVMFAIECIKLSLHCYKEVPETGEYDERDFGGSLRVVRLPSATVGSQAPPAIEMRNSEEQPSGGTTVLQRLLQEQLRYGNPSENRSLLAIHQQATGNGPPFPSGSGNPGPQSDVLSPQDHHQQLVAHAARQEPQGQEIQSENLIMEKQLSPRMQNNEELPTYEEAKVQSQYFRGQQHASVGAAFYVTGVTNQKMRTEGRPSVQRLNPGKMHQDEGLRDLKQGHVRSLSERLMQMSLATSGVKAHPPVTSAPLSPPQPNDLYKNPTSSSEFYKAQGPLPNQHSLKGMEHRGPPPEYPFKGMPPQSVVCKPQEPGHFYSEHRLNQPGRTEGQLMRYQHPPEYGAARPAQDISLPLSARNSQPHSPTSSLTSGGSLPLLQSPPSTRLSPARHPLVPNQGDHSAHLPRPQQHFLPNQAHQGDHYRLSQPGLSQQQQQQQQQHHHHHHHQQQQQQQPQQQPGEAYSAMPRAQPSSASYQPVPADPFAIVSRAQQMVEILSDENRNLRQELEGCYEKVARLQKVETEIQRVSEAYENLVKSSSKREALEKAMRNKLEGEIRRMHDFNRDLRERLETANKQLAEKEYEGSEDTRKTISQLFAKNKESQREKEKLEAELATARSTNEDQRRHIEIRDQALSNAQAKVVKLEEEVWFPQTASPPPTNLTSLEIFDGCLAYPLTRLRAAQASGWLLSYDDPEWKRLG

SEQ ID NO: 48319 - protein, 149 aa, Homo sapiens
KNDKGDIIVTTKSGGRGTSTVSFKLLKPEKIGSKFSQKDLEMLFHGMRADFTSENFSAAWYLIENHSNTSFEQLKMAVTNLKRQANKKSEGSLAYVKGGLSTFFEAQDALSAIHQKLEADGTEKVEGSMTQKLENVLNRASNTADTVYE

SEQ ID NO: 48320 - protein, 287 aa, Homo sapiens
  DOMAIN (18)..(108): IPT/TIG domain identified by PFam, accession name TIG, E- value=0.083, PFam score of 8.6
QDHQFAPQSTMSRSRQPPLVTGISPNEGIPWTILLFLSLNFVMHMRLFSGLTICGHNCLLTAEWMSASKIVCRVGQAKNDKGDIIVTTKSGAGTLCLCSRAWGRLHLIKHMLLISVGILDQSAVWVDEMNYYDMRTDRNKGMSPRCEEPGFAGCSVALSIKHISLAIVVETGHNDVLRQKDGVSSWFPFLKVWRPFPDVLQQTFLRHHCSKTSLSNQEQGEYDKRGWLMVVDLSPVCMDSRGGCILGVFSMSRCASTLLERVGSRPLEVVPCVWFIPYELGLSSVLG

SEQ ID NO: 48321 - protein, 417 aa, Homo sapiens
  DOMAIN (35)..(50): WW/rsp5/WWP domain proteins domain identified by eMATRIX, accession number BL01159, p-value=1.529e-13, raw score of 13.85
  DOMAIN (20)..(49): WW domain identified by PFam, accession name WW, E-value=6.2e -12, PFam score of 53.1
DKKPGMVPPPPGEESQTVILPPGWQSYLSPQGRRYYVNTTTNETTWERPSSSPGIPASPGSHRSSLPPTVNGYHASGTPAHPPETAHMSGRKSTGDSQNLGSSSPSKKQSKENTITINCVTFPHPDTMPEQQLLKPTEWSYCDYFWADKKDPQGNGTVAGFELLLQKQLKGKQMQKEMSEFIRERIKIEEDYAKNLAKLSQNSLASQEEGSLGEAWAQVKKSLADEAEVHLKFSAKLHSEVEKPLMNFRENFKKDMKKCDHHIADLRKQLASRYASVEKARKALTERQRDLEMKTQQLEIKLSNKTEEDIKKARRKSTQAGDDLMRCVDLYNQAQSKWFEEMVTTTLELERLEVERVEMIRQHLCQYTQLRHETDMFNQSTVEPVDQLLRKVDPAKDRELWVREHKTGNIRPVDMEI

SEQ ID NO: 48322 - protein, 145 aa, Homo sapiens
MAVLEGIEKPEMEETLGAAESRHKPRKVDEPQQEATGGQRLVGQVPYLRGRTSRGFDPQGDKVSRCIKSLSLSSAALCAGPLKGAEKGGEMGGEVNGYHASGTPAHPPETAHMSVRKSTGDSQVLVCDVPPPVSIWSHCSSPTYE

SEQ ID NO: 48323 - protein, 308 aa, Homo sapiens
  DOMAIN (192)..(209): LAMBDA AND OTHER REPRESSOR HELIX-TURN-HELIX SIGNATURE domain identified by eMATRIX, accession number PR00031B, p-value=4.600e- 11, raw score of 16.29
KAFDLVACGRVFVSFGLWLPFGLFVMDGSVRCVRCLRVSCSVSVRNDGMEMVAGSPGRRGPRSNHPSRRSTRSSGPGPANAAAGMLQTLYDYFWWERLWLPVNLTWADLEDRDGRVYAKASDLYITLPLALLFLIVRYFFELYVATPLAALLNIKEKTRLRAPPNATLEHFYLTSGKQPKQVEVELLSRQSGLSGRQVERWFRRRRNQDRPSLLKKFREASWRFTFYLIAFIAGMAVIVDKPWVYDMKKVWEGYSIQSTIPSQYWDYMIGLSFHWTLVFSIGSDVQRKGFQEPNIHPVAPIIFINFSG

SEQ ID NO: 48324 - protein, 230 aa, Homo sapiens
RPPLAYLRDGDARAGLNGLQLAVLAMLSSRKMFCKKSGQSYSPSRVLITENDVKEGLQRSHILYDRAGEEHYNCISALHKSMRGSDQNASLYWLARMLEGGEDPLYVARRLVRFASEDIGLADPSALTQAVAAYQGCHFICMPECEELLAQCVVYFARAPKSIEVYSAYNNVKACLRNHQGPLPPVPLHLRNAPTRLMKDLGYGKGYKYNPMYSEPVDQEYLPEELRGVD

SEQ ID NO: 48325 - protein, 654 aa, Homo sapiens
MVSLRHVPGEAITVSCHRGQKVVSTTPQMPLSLWSCDSRKLPYQDQDGEGGVVKRRPDGKDARQKQKDISPRSSPSVDAYNAEVLNHFGTRDWFCGRQFFQDRGVDAFKTIQAHYIYHYLLATGQYQSVAQGVGTPATVQSSQVILMQVIHTPHVDKYCSRSLLKELLRGLLIQTQQEKYWGHCALSTRQLTTGPHATPLPLFGRGRFGQVHKCEETATGLKLAAKIIKTRGMKDKLHQVQCPVCQQEMPAAHINSHLDRCLLLHPAGHAEPAAGRRLSESSALKQPATPTAAESSEGEGEEGDDGGETESRESYDAPPTPSGARLIPDFPVARSSSPGRKGSGKRPAAAAAAGSASPRSWDEAEAHDEDEAVGDGDGDGDADADGRGRPGALGRGRCRSRHRPSGPVAGAARTPGRWLPRRSDRCYRASRWPTRCVLTRCRITSGRARPQAPCMKSNNALIVILRTVTLDAPVLLAALLGAPIDYAIMATTPGLWIYPLVNHHLGEEHYNCISALHKSMRGSDQNASLYWLARMLEGGEDPLYVARRLVRFASEDICKFKEGAPSSRESGGWCSRESHSSQRSTWSVLSISPCPQYDWRQPQTLAAELAVKLLGSKEGTKISKKWVFALVEFTAKILFDGGSEIGKIPYKSKE

SEQ ID NO: 48326 - protein, 128 aa, Homo sapiens
  DOMAIN (39)..(87): Ribosomal protein L15e proteins domain identified by eMATRIX, accession number BL01194B, p-value=1.000e-40, raw score of 13.66
  DOMAIN (5)..(128): Ribosomal L15 domain identified by PFam, accession name Ribosomal_L15e, E-value=4.3e-40, PFam score of 146.6
AKMFAYLYIQELWRKKHTDDMRFLLRVRCRQYRQLSALHRAPRPTRPDKSRRLGYKAKQGYDIYRIRVLRGGRKRPVPKGATYGKPVHHGVNQLKYARSLQSVAEDPAGRHCGALKDLNTYWVGEEST

SEQ ID NO: 48327 - protein, 135 aa, Homo sapiens
  DOMAIN (46)..(94): Ribosomal protein L15e proteins domain identified by eMATRIX, accession number BL01194B, p-value=1.000e-40, raw score of 13.66
  DOMAIN (11)..(135): Ribosomal L15 domain identified by PFam, accession name Ribosomal_L15e, E-value=9.4e-39, PFam score of 142.2
  misc_feature (1)...(135): Xaa = X or * as defined in Table 2
FRATITSAKMGAYKYIQELWRKKQADVMRFLLRVRCWQYRQLYALHRAPRPTRADKARRLGYNDKQGYVIYRIRVRRGGRKRPDPKGATYGKPVHHGDNQLKIARSLQSDAEEPAGRHCGALREQSSYXVGEHST

SEQ ID NO: 48328 - protein, 126 aa, Homo sapiens
  DOMAIN (39)..(87): Ribosomal protein L15e proteins domain identified by eMATRIX, accession number BL01194B, p-value=1.000e-40, raw score of 13.66
  DOMAIN (4)..(126): Ribosomal L15 domain identified by PFam, accession name Ribosomal_L15e, E-value=1.3e-32, PFam score of 121.8
  misc_feature (1)...(126): Xaa = X or * as defined in Table 2
AKKGAYNYIQELWRKKRADVMRFLLRVRCWQYRQLSALHRAPRPTRPDKARRLGYKAKQGYVIYKIRVRRGGRKRPVPKGATYGKPVHHGANQLKSAQSLQTGVQERPGHPXYAMRVLKAYRARPD

SEQ ID NO: 48329 - protein, 107 aa, Homo sapiens
  DOMAIN (4)..(39): Ribosomal protein L15e proteins domain identified by eMATRIX, accession number BL01194A, p-value=7.120e-35, raw score of 18.70
  DOMAIN (4)..(106): Ribosomal L15 domain identified by PFam, accession name Ribosomal_L15e, E-value=2.2e-05, PFam score of -22.8
AKMGAYKYILELWRKKQSDVMRFLLRVRCWQYRQLSALHRAPRPTRPDKVHRLGYKQVIKRRIEGNFPGEFIDKALRLIRTLSEIPKYKISIQKPVVPSVSKKDIPH

SEQ ID NO: 48330 - protein, 247 aa, Homo sapiens
  DOMAIN (4)..(39): Ribosomal protein L15e proteins domain identified by eMATRIX, accession number BL01194A, p-value=3.152e-24, raw score of 18.70
  DOMAIN (4)..(238): Ribosomal L15 domain identified by PFam, accession name Ribosomal_L15e, E-value=6.4e-37, PFam score of 136.1
  misc_feature (1)...(247): Xaa = X or * as defined in Table 2
AKMGAYKYIHELWRKKQSDVMRFLLRARCWQYPALHRAGTEWQLSALHRAPRPTRPDKARRLGYKQAKQGYVIYRIRVRRYIXDSCSPWWLKTAQFPKGCNFTGKPVHSWVFNQLKSFASKAFQFRWQEGGEAWDGTCGGLLEEFLNFFNWVWVGKISTXQNFFEGLILIVIPFHKSXSEENPDTQWDQPNQSHKHREMRGLTSARPEKSRGLGKKGHKFHHTIGGSLRRATWRRRNTLQAPPLPLI

SEQ ID NO: 48331 - protein, 187 aa, Homo sapiens
NTKLMDMAKTKFLRRHLSKGPTADALMLFTTSGNQVGHDGTITMAAVLYSISLALWVREFLNEENKGLDVLVEYLSFAQYAVTFDFESVESTVESSVDKSKPWSRSIEDLHRGSNLPSPVGNSVSRSGRHSALRLKCFYLISGMIWQEDIISLSVYDHSGYSVIVVESICQIAASEYVAFRPLDLVV

SEQ ID NO: 48332 - protein, 527 aa, Homo sapiens
  DOMAIN (492)..(505): PROTEIN ZINC-FINGER METAL-BINDI domain identified by eMATRIX, accession number PD00066, p-value=8.200e-16, raw score of 13.92
  DOMAIN (222)..(524): Zinc finger, C2H2 type domain identified by PFam, accession name zf-C2H2, E-value=4.1e-94, PFam score of 326.1
MTAELREAMALAPWGPVKVKKEEEEEENFPGQASSQQVHSENIKVWAPVQGLQTGLDGSEEEEKGQNISWDMAVVLKATQEAPAASTLGSYSLPGTLAKSEILETHGTMNFLGAETKNLQLLVPKTEICEEAEKPLIISERIQKADPQGPELGEACEKGNMLKRQRIKREKKDFRQVIVNDCHLPESFKEEENQKCKKSGGKYSLNSGAVKNPKTQLGQKPFTCSVCGKGFSQSANLVVHQRIHTGEKPFECHECGKAFIQSANLVVHQRIHTGQKPYVCSKCGKAFTQSSNLTVHQKIHSLEKTFKCNECEKAFSYSSQLARHQKVHITEKCYECNECGKTFTRSSNLIVHQRIHTGEKPFACNDCGKAFTQSANLIVHQRSHTGEKPYECKECGKAFSCFSHLIVHQRIHTAEKPYDCSECGKAFSQLSSLIVHQRIHSGDLPYVCNECGKAFTCSSYLLIHQRIHNGEKPYTCNECGKAFRQRSSLTVHQRTHTGEKPYECEKCGAAFISNSHLMRHHRTHLVE

SEQ ID NO: 48333 - protein, 151 aa, Homo sapiens
  DOMAIN (2)..(22): DNAJ PROTEIN FAMILY SIGNATURE domain identified by eMATRIX, accession number PR00625C, p-value=8.554e-09, raw score of 16.54
  misc_feature (1)...(151): Xaa = X or * as defined in Table 2
RWRLQNLSFCSSCSGSGSEGATCFARGRXRPPGNSLNVSRMGTRSSYSCRRHSPAFLSWGKGRCHLCNKAHLLAGAXHYSFLSGSAPYXNXVNGQIXXRXTAHRSTPDAPTGHXNCCSXLXCHSYXQRAXPGYRHDXCRMCCXCADCSHAC

SEQ ID NO: 48334 - protein, 502 aa, Homo sapiens
  DOMAIN (467)..(480): PROTEIN ZINC-FINGER METAL-BINDI domain identified by eMATRIX, accession number PD00066, p-value=8.200e-16, raw score of 13.92
  DOMAIN (225)..(499): Zinc finger, C2H2 type domain identified by PFam, accession name zf-C2H2, E-value=7e-85, PFam score of 295.4
AEKMTAELREAMALAPWGPVKVKKEEEEEENFPGQASSQQVHSENIKVWAPVQGLQTGLDGSEEEEKGQNISWDMAVVLKATQEAPAASTLGSYSLPGTLAKSEILETHGTMNFLGAETKNLQLLVPKTEICEEAEKPLIISERIQKADPQGPELGEACEKGNMLKRQRIKREKKDFRQVIVNDCHLPESFKEEENQKCKKSGGKYSLNSGAVKNPKTQLGQKPFTCSVCGKGFSQSANLVVHQRIHTGEKPFECHECGKAFIQSANLVVHQRIHTGQKPYVCSKCGKAFTQSSNLTVHQKIHSLEKTFKCNECEKAFSYSSQLARHQKVHITEKCYECNECGKTFTRSSNLIVHQRIHTGEKPFACNDCGKAFTQSANLIVHQRSHTGEKPYECKECGKAFSCFSHLIVHQRIHSGDLPYVCNECGKAFTCSSYLLIHQRIHNGEKPYTCNECGKAFRQRSSLTVHQRTHTGEKPYECEKCGAAFISNSHLMRHHRTHLVE

SEQ ID NO: 48335 - protein, 510 aa, Homo sapiens
  DOMAIN (475)..(488): PROTEIN ZINC-FINGER METAL-BINDI domain identified by eMATRIX, accession number PD00066, p-value=8.200e-16, raw score of 13.92
  DOMAIN (205)..(507): Zinc finger, C2H2 type domain identified by PFam, accession name zf-C2H2, E-value=1e-92, PFam score of 321.4
SFCPFPGREPKKSINGTYAPNSPAPGVGDVRGGVSMLHFRGMGMSGPNPEGLVLGCDAGELWKCDLPRQLRYHETSGPQEALSRLRELCRRWLRPEARTKAQILELLVLEQFLSILPGEIRTWVQLHHPGSGEEAVALVEELQKDLDGPAIQDLAVFHMVLAAVAVMAASVTLSVRAYPFFDIQHPQTQKPQLLDLCLQLGQKPFTCSVCGKGFSQSANLVVHQRIHTGEKPFECHECGKAFSQSANLVVHERIHTGEKPYKCKECGKAFTHSSNLVVHRRIHSLEKTFKCNECGKAFSYSSQLARHQKVHITEKCYECNECGKTFTRSSNLIVHQRIHTGEKPFACNDCGKAFTQSANLIVHQRSHTGEKPYECKECGKAFSCFSHLIVHQRIHTAEKPYDCSECGKAFSQLSCLIVHQRIHSGDLPYVCNECGKAFTCSSYLLIHQRIHNGEKPYTCNECGKAFRQRSSLTVHQRTHTGEKPYECEKCGAAFISNSHLMRHHRTHLVE

SEQ ID NO: 48336 - protein, 235 aa, Homo sapiens
MSGPNPEGLVLGCDAGELWKCDLPRGKNSQVPEEDGKNESKSPRIGKPRAEGFSKPGCQRGYTLKPFSPVHPNNKPFRHTHQCAHVNLPLPWQHPGVTAPFHGSDPMTQKYYSFPRKFCISRPLICMRLKMGINMAAKLPFQPVANGLSPSIKCPGQNISWDMAVVLKATQEAPAASTLGSYSLPGTLAKSEILETHGTMNFLERQTTLRSYGIAEKSADCVTMDLQPFLPFTGL

SEQ ID NO: 48337 - protein, 31 aa, Homo sapiens
ATSVKSQDTKSMCKNHKHSYTPIPDKQRAKS

SEQ ID NO: 48338 - protein, 294 aa, Homo sapiens
  DOMAIN (57)..(100): kw TRANSCRIPTASE REVERSE II ORF2 domain identified by eMATRIX, accession number DM01354T, p-value=1.000e-40, raw score of 9.48
  DOMAIN (1)..(179): Reverse transcriptase domain identified by PFam, accession name rvt, E-value=3.7e-14, PFam score of 60.5
  misc_feature (1)...(294): Xaa = X or * as defined in Table 2
MIISIDAEKAFDKIQQHFMLKTLNKFGIDGTYLKIIRAIYDKPTANIILNGQKLEAFPLKTGTRQGCPLSLLLFNIVLEVLARAIRQENEIKGIQLGKEEVKLSLFADDMTVYLENPIVSAQNLLKLISNFSKVSGYKINVQKSQAFLYTNNRQTESQIMSELTFTIASKRIKYLGIQLTRDVKDLFKEDYKPLLNEIKEDTNKWKNIPCSWVGRINTVKMAILPKVIYRFNAIPIKLPMTFFTELEKTTSKFIWNQKGAHIAKSILSQKNKAGGIMLPDFKLYYKATVTKTAX

SEQ ID NO: 48339 - protein, 68 aa, Homo sapiens
  misc_feature (1)...(68): Xaa = X or * as defined in Table 2
ITLGIMAIFTVLILPIHEHGMVFHLFVSSFISLSSGLXFSLKRSFTSLVSWIPKYFILFEAVVNGSSL

SEQ ID NO: 48340 - protein, 658 aa, Homo sapiens
  DOMAIN (7)..(54): kw TRANSCRIPTASE REVERSE II ORF2 domain identified by eMATRIX, accession number DM01354V, p-value=1.000e-40, raw score of 12.97
MSEFPFTIASKRIKYLGIQLTRDVKDLFKENYKPLLKEIKEDTNKWKNIPCSWIGRINIMKMAILPKVIYRFNAIPIKLPMTFFTELEKATLKFIWNQKRASIAKSILSQKNKAGGITLPDFKLYYKATVTKTAWYWYQNRDIDQWKRTEPSEIIPHIYNHLIFDKSEKNKQWGKDSLFNKWCWENWLAICRKLKLDPFLTPYTKINSRWIKDLNVRPKTIKTLEENLGITIQDIGMGKDFMSKTPKAMATKAKIDKWDLIKLKSFCTAKETTVRVNRQPTKWEKISTTYSSDKGLISRIYNELQQIYKKKNNPIKKWAKDMNRHFSEEDIYAAKKHMKKCSPSLAIREMQIKTTMRYHLTPVRMAIIKKSGNNRDMDELEIIILSELSQEQETKRCIFSLIENKIPRNPTYKGCEGPLQGELQTTAQGNKRGYKQMDEHSMLMRRKNQHCENGHTAQELEKATLKFIWNQKRAHIAKSILSQKNKAGGITLPDFKVYYKATVTKTACLPSPWLRGGGCERPTAPTVAVRAPGQKQTDTAPAVDSDPELEQRSIPAGGATPGLQGCPLAFARKPDLGRLSNWRVGAGKVLSRVPSDPAAARMRTQIRSAHTDPERAHRSGARTQIRSAHTDPERAHRSGARTQIRSAHTDPERDGLSH

SEQ ID NO: 48341 - protein, 115 aa, Homo sapiens
  misc_feature (1)...(115): Xaa = X or * as defined in Table 2
AWKVLPFFVSFCFLSSGLXFSLKRSFTSLVSWIPRYFILFEAIVNGSSLMIWLSVCLLLVYKNACDFCTLILYPETLLKLLISLRRFELLFLSMFSASFRSSCKAGLVVAESLSI

SEQ ID NO: 48342 - protein, 58 aa, Homo sapiens
  misc_feature (1)...(58): Xaa = X or * as defined in Table 2
IWSFHIVPYFLEALFVXGVRKGSSFSFLHMAGQFSQHHLLSRESFPHCLFFSGLSKTR

SEQ ID NO: 48343 - protein, 55 aa, Homo sapiens
YSLKSRSMMPPALFFWLRIDLAMRALFWFHMNFKVVFSNSVKKVIGSLMGMALNL

SEQ ID NO: 48344 - protein, 558 aa, Homo sapiens; identical to SEQ ID NO: 38216
  DOMAIN (244)..(291): kw TRANSCRIPTASE REVERSE II ORF2 domain identified by eMATRIX, accession number DM01354V, p-value=1.000e-40, raw score of 12.97
  DOMAIN (35)..(257): Reverse transcriptase domain identified by PFam, accession name rvt, E-value=2.3e-05, PFam score of 6.6

SEQ ID NO: 48345 - protein, 593 aa, Homo sapiens
  DOMAIN (398)..(438): kw TRANSCRIPTASE REVERSE II ORF2 domain identified by eMATRIX, accession number DM01354Y, p-value=1.000e-40, raw score of 10.69
MELKTLAREPRDACTSFSSQFDHVEERVSVIEDQMNEMKREEKFREKIVKRNEQSLQEIWDYVKRPNLLLIGVPESDGENGTKLENTLQDVIQENVPNLARQANIQIQEIQRMPQKYSSRRATPRHIIVRFTKVEMREKMLRAERQKGRVTHKGKPIRLTADLSAETLQARREWGPIFNILKVKNLQPRISYPAKLSFISEGEIKSFTDNQMLRDSATTRPALQELLKEALNMERNNSSNLLKLISNFSKVSGYKINVQKSQAFLYTNNRQTESQIMSELPFTIASKSIKYLGIQLTRDVKDLFKENYKPLLNETKGHKKRKNLPCSWVGRINIVKTAILPKVIYRFNAIPIKLPMIFFTELEKTTLKFMWNQKRACIAKTILSQKNKAGGITLPDFKLYYKSTVTKTAWYWYQNRDIDPWNRTEPSEIIPHIYNHLIFDKPEKNKQWGKDSLFNKWCWENWLGIYRKLKLDLFLMPYTKINSRWIKDLNVRPKTIKTLEENLGNTIQDIGIGKDFMTKTPKAMATKAKIDKWDLIKLKSFCTAKETTIRVNRQPTEWQKIFTIYLSDKGLISRIYKELKQIYKKKSTPSKSG

SEQ ID NO: 48346 - protein, 55 aa, Homo sapiens
YSLKSGSMMPPALFFWLRIVLAMHALFWFHMNFKVIFSNSVKKVIGSLMGMALNL

SEQ ID NO: 48347 - protein, 55 aa, Homo sapiens
YSLKSGSVMPPALFFWLRIDLVMQALFWFHMNFKVVFSNSVKKVIGSLMGMALNL

SEQ ID NO: 48348 - protein, 449 aa, Homo sapiens
  DOMAIN (209)..(256): kw TRANSCRIPTASE REVERSE II ORF2 domain identified by eMATRIX, accession number DM01354V, p-value=1.000e-40, raw score of 12.97
  misc_feature (1)...(449): Xaa = X or * as defined in Table 2
INRIYILLSTTSHLFQNXPHSWKXSTPQQMXKNRNYNKLSLRPQCNQTRTQDEETHSKSLNYMETEQPAPEXLLGTXQNEGRNKDVLXNQREQRHNIPESLGHIXSNCXQDXXRRKERRIKXMQXKCXRCNKNAKGVITTDPTEIQTTIREYHKHLYANKLENLEDTDKFLDTYTLPRLNQEEVESLNRPITGSEIEAIINSLPTKKRPGPDGFTAEFYQRYKEEQRIKYLGIQLTRDVKDLFKENYKPLLNEIKEDTNKWKNIPCSWIGRINIMKMAILPKVIYGFNAIPIKLPRTFFTELEKITLKFIRNQKRARIAKTILSKKNIAGGIMLPDFKLYYKATVTKTAWYWFQNRDIDQWNRTEASEITPHIYNHLIFDKPEKNKKWGKDSLFNKWCWENWLAICRKLKLDPFLIPYTKINSRWIKDLNVRPKTIKSLEENLGIPFRT

SEQ ID NO: 48349 - protein, 671 aa, Homo sapiens
  DOMAIN (88)..(133): kw TRANSCRIPTASE REVERSE II ORF2 domain identified by eMATRIX, accession number DM01354N, p-value=1.000e-40, raw score of 13.17
  DOMAIN (172)..(403): Reverse transcriptase domain identified by PFam, accession name rvt, E-value=1e-13, PFam score of 59.0
MEETAPMIQLSPPGPALDMWGIITIQDFNKCMTLKFRLKNFSRINKIDTPLARLIKKKREKNRIDTIKNDKGDITSNPTEIQSTIREYYKHLYTNKLENLEEMDKFLDTYTLPRLNQEEVESLNRPITGSEIMAIINSLPTKKSPGPDGFTAKFYQRYKEELVPFLLKLFQSIEKEGILPNSFYEASIILIPKPGRDTTKNENFRPISLMNIDAKILNKILANRIQQHIKKLIHHDQVGFIPGMQGWFNIRKSINVIQHISRTKDKNHMIISIDAEKAFDKIQQPFMLKTLNKLGNKIPRNPTYKGCEGPLQGEVLEPLLNEIKEDTNKWKNIPCSWVGRINIVKMAILPKVIYRFNAIPIKLPMTFFTELEKTTLKFIWNQKRALIAKSILSQKNKAGGITLPDFKLYYKATVTKTAWYWYQNRDIDQWNRTEPSEITLHIYNYLIFDKPEKNKQWGKDSLFNKWCWENWLAICRKLKLDPFLTPYTKINSRWIKDLNVRPKTIKTLEENLGITIQDIGMGKDYMSKTPKAMATKAKIDKWDLIKLKSFCTAKETTIRVNRQPTKWEKIFATYSSDKGLISRIYNELKQIYKKKTNNPIKKWVKDMNRHFSKEDIYAAKKHMKKCSPSLAIREMQIKTTMRYHLTPVRMAIIKKSGNNRDMDDIGNHRSQ

SEQ ID NO: 48350 - protein, 55 aa, Homo sapiens
YSLKSGSVMPPALFFWLRIDLAMRALFWFHMNFKVVFSNSVKKVIGSLMGMALNL

SEQ ID NO: 48351 - protein, 115 aa, Homo sapiens
GSSSHLTAACSETSCPRTSFLALQALSGGHPVHWQVSPSLPVFPFPGCGSSAGFSPVPTASLGLDRQTTHHWLFPQTGSGPGPIASQALEPCSAKQEFVEPDPSRSLAKIGAAER

SEQ ID NO: 48352 - protein, 930 aa, Homo sapiens; identical to SEQ ID NO: 34599
  DOMAIN (195)..(240): kw TRANSCRIPTASE REVERSE II ORF2 domain identified by eMATRIX, accession number DM01354N, p-value=1.000e-40, raw score of 13.17
  DOMAIN (85)..(360): Reverse transcriptase domain identified by PFam, accession name rvt, E-value=5.2e-06, PFam score of 15.7

SEQ ID NO: 48353 - protein, 55 aa, Homo sapiens
YSLKSGSMMPPALFFWLRIDLAMQALFWFHMNFKVVFSNSVKKVIGSLMGLALNL

SEQ ID NO: 48354 - protein, 556 aa, Homo sapiens
  DOMAIN (22)..(67): kw TRANSCRIPTASE REVERSE II ORF2 domain identified by eMATRIX, accession number DM01354N, p-value=1.000e-40, raw score of 13.17
  DOMAIN (106)..(381): Reverse transcriptase domain identified by PFam, accession name rvt, E-value=2e-84, PFam score of 293.9
  misc_feature (1)...(556): Xaa = X or * as defined in Table 2
MKNDKGDITTDPTEIQTTIRKYYKHLYANKLENLEEMDKFLNTYTLPRLNQEEVESLNRPITGSEIVAIINSLPTKKSPGPDGFTAEFYQRCKEELVPFLLKLFQSIEKEGILPNSFYEASIIVIPKPGRDTTKKENFRPISLMNIDAKILNKILANRIQQHIKKLIHHDQVGFIPGMQGWFNICKSINVIQHINRAKDKNHMIILIDAEKAFDKIQQCFMLKTFNKLSIDGTYLKIIRAIYDKPTANIILNGQNLEAFPLKTGTRQGCPLSPLLFNIVLEVLARAIRQEKEIKGIQLGKEEVKLSLFADDMIVYLENPIVSAQNLLKLISNFSKVSGYKINVQKSQAFLYTNNRQTESQIMSELPFTIASKRIKYLGIQLTRDMKDLFKENYKPLLNEIKEDTNKWKNIPCSWVGRINIMKMAILPKVIYRFNAIPIKLPMTFFTELEKTTLKFIWNQKRARIAKSILSQKNKAGGITLPDFKLYYKATVTKTAWYWYQNRDIDQWNRTEPSEITPHIYNYLIFDKPEKMSIIDTGGWYEAPVSSFFKEGLCRTX

SEQ ID NO: 48355 - protein, 356 aa, Homo sapiens
  DOMAIN (13)..(52): kw TRANSCRIPTASE REVERSE II ORF2 domain identified by eMATRIX, accession number DM01354X, p-value=6.400e-34, raw score of 13.86
  DOMAIN (169)..(356): Sialyltransferase family domain identified by PFam, accession name Sialyltransf, E-value=9.9e-10, PFam score of 18.9
MAILPKIIYRFNAIPIKLPMTFFTELEETTLKFIWNQKRACTAKTTLSKKNKAGGIMPPDFKLYYKATVTKAAWYWYQNRDIDQRNRTEASEITPRIYSLWEVAIRTVKMVTLRKRTLKVLTFLVLFIFLTSFLNYSHAMVATTWFPKKMALELLENLKRLIKHRPCTCTHCIRQHGLSAWFDERFNQIVQLLLTAQNALLEDNTYQWWLRLQQEKKPNIINNTIKEFRAVPGNVDPMLEKRMNKAPTAGFEAAAGSKTAHHLVYPESFRELGDNVSMVLVPLKTMNLEWVVSTTTTGAISHTYTPVLVKIRVKQDKILIYHPAFIKYVFDNWLQSHRRYPLTSILSVIFSMHVCD

SEQ ID NO: 48356 - protein, 499 aa, Homo sapiens; identical to SEQ ID NO: 34594
  DOMAIN (342)..(389): kw TRANSCRIPTASE REVERSE II ORF2 domain identified by eMATRIX, accession number DM01354V, p-value=1.000e-40, raw score of 12.97

SEQ ID NO: 48357 - protein, 22 aa, Homo sapiens
  misc_feature (1)...(22): Xaa = X or * as defined in Table 2
KKWINYWTHTPSQDXTRKKLNP

SEQ ID NO: 48358 - protein, 404 aa, Homo sapiens
  DOMAIN (163)..(203): kw TRANSCRIPTASE REVERSE II ORF2 domain identified by eMATRIX, accession number DM01354Y, p-value=1.000e-40, raw score of 10.69
MVLMIVDVCRCCGIEELVVFLYGETSPESHLLSVTFPDLTMIKCIQEVSKDPRSLVIARKFSDEDLFKENYKPLLNEIKEDTNKWKNIPCSWIGRINIVKMAILPKVIYRFNAIPIKLPMTFFTELGKKTTLKFIWNQKRARIAKTILSKKNKAGSITLPDFKLYYKATVTKTAWYWYQNRDIDQWNRTEPSEIIPHIYNHLIFDKPDKNKQWGKDSLFNKWCWENWLVICRKLKLDPFLTPYTKINSRWIRDLNVRPKTIKTLEENLGNTIQDIGMGKDFMPKTPKAMATKDKIDKWDLIKLKSFCTAKETTIRVNRQPTEWENIFTIYPSGKGLISRIYEELKHIYKKKSNNPIKKWEKDMNRHFSKEDIYSAKRHMKKMLMITGHQRNANQNHNETPSHTS

SEQ ID NO: 48359 - protein, 399 aa, Homo sapiens
  DOMAIN (199)..(254): Sialyltransferase family domain identified by eMATRIX, accession number PF00777C, p-value=1.000e-40, raw score of 18.60
  DOMAIN (80)..(399): Sialyltransferase family domain identified by PFam, accession name Sialyltransf, E-value=4.1e-107, PFam score of 369.3
GGSSCYPSWEATIRTAKMVTLRKRTLKVLTFLVLFIFLTSFFLNYSHTMVATTWFPKQMVLELSENLKRLIKHRPCTCTHCIGQRKLSAWFDERFNQTMQPLLTAQNALLEDDTYRWWLSLESVMFSVTMGFCLQRPFGDKQGTTQPVYINQTGRDLTQQQRLQREKKPNNLNDTIKELFRVVPGNVDPMLEKRSVGCRRCAVVGNSGNLRESFYGPEIDSHDFVLRMNKAPTAGFEADVGTKTTHHLVYPESFRELGDNVSMILVPFKTIDLEWVVSAITTGTISHTYIPVPAKIRVKQDKILIYHPAFIKYVFDNWLQGHGRYPSTGILSVIFSMHVCDEVDLYGFGADSKGNWHHYWENNPSAGAFRKTGVHDADFESNVTATLASINKIRIFKGR

SEQ ID NO: 48360 - protein, 1619 aa, Homo sapiens
  DOMAIN (297)..(343): kw TRANSCRIPTASE REVERSE II ORF2 domain identified by eMATRIX, accession number DM01354O, p-value=1.000e-40, raw score of 8.73
  DOMAIN (330)..(1190): Reverse transcriptase domain identified by PFam, accession name rvt, E-value=3.2e-134, PFam score of 459.3
  misc_feature (1)...(1619): Xaa = X or * as defined in Table 2
MGKKQSRKTGNSKKQSASPPPKECSSSPATEQSWTENDFDELREEDFRRSNYSELQEEIQTKGKEVENFEKNSDECITGITNTEKCLKELTELKAKARELHEERRSLKSRCDQLEERVSVMEDKMNEMKREGKFREKRIKRNKQSLQEIWDYVKRPNLRLISVPESDRENGTKLENTLQDIIQENFPNLARQANIQIQEIQRTPQRYSSRRATPRHIIVRFSKVEMKEKMLRAAREKEIQTNIREYYKHRYANKLENLEEMDKFLNIYTLRRLNQEEVESLNRPIRGSEIVAIINSLPTKKSPGPDGFTAEYYQRYKEELVPFLLKLFQSIEKEGILPNSFYEASIILIPKPGRDTTKKENFRTISLMNIDAKILNKILANRIQQHIKKLIHHDQVGFIPGMQGWFNIRKSINVIQHINRTKDKNHVIISIDAEKAFDKIQQLFLLKTLNKLGIDGTYLKIKRAIYDKPTANIILNGQKLEAFPLKTGTRQGCPLSPLLFNIVLEVLARAIRQEKEIKGIQLGKEEVKLSLFADDMIVYLENPIVSAQNLLKLISNFSKVSGYKINVQKSQAFLYTNNRQTETQIMSELPFTIASKRIKYLGIQLTRDVKDLFKENYKPLLNEIKEDTKKWKNIPCSWVGRINIMKMAILHKVIYRFNAIPIKLPMTFFTELEKTTLKFTWNQKRARIAKSILSQKNKAGGIMLPDFKLYYKATVTKTAWYWYQNRDIDQWNRTEPSEITPHIYNYLIFDKPEKNKQWGKDSLFNKWCWENWLAIWRKLKLDPFFTPYTKINSRWIKDLNVRPKTIKTLEENLGITIQDIGMGKDFMSKTPKAIATKAKIDKLDLIKLKSFCTAKETTIRVNRQPTEWEKIFATYSSDKGLISRIYNELKQIYKKKTNNPIKKWAKDMNRHFSKEDIYAAKKHMKKCSPSLAIREMQIKNTMRYHLTPLRMAIIKKSGNNSKILASRIPQHIKKLIHHDQVGFISGMQILFNISKSINVIHRINRTNDKNHMIISIDAENTFDKIQQLFILKTLNKLGIDGMYLKIIRAIYDRPTANIILNGQKLEAFPLKTGTRQGCPLSPLLFNILMEALARAIRQEKEMMRIQVGKEEVKLSLFADDMIVYLENPIVSAPNLLKLIRNFSKVSEYKINVQKSQAFLYTNNRQTESQIMSELPFTIASKRIKYLGIQLTRDVKDLFKENYKPLLNEIQEDTNKWKNIPSSWIGRINIVKMAILPKVIYRFNAIPIKLPMTFFTELGKTTLKFIWNQKRARIAKTIPSQKNKAGGIMLPDLKLYYKATVTKTAWYWYQNRDIDQRNRTEPSEIIPHIYNHLIFDKPDKNKKWGKDSLFNKWCWENWLAICRKLKLDPFLTPYTKINSRWIKDLNVRPKTIKTLEENLGNTIQDIGMGKHFMSKIPKAMATKAKIDKWDLIKLKSFCTTKETTIRVNRQPTEWEKIFAIYPSDKQLISRIYKELKHIYNKKKKKNNPINKWAKDMNRHFSKEDIYAANRHMKKCSSSLAIREMQIETTIRYHLTPVRMAIIKKSGNNRIEHGEMMRVAGHFEMDLRVVFGVEKSPFSNHILATPATPPPQRYQRFVMSKPPQDYHWIGVPHSGQTKLKX

SEQ ID NO: 48361 - protein, 70 aa, Homo sapiens
  misc_feature (1)...(70): Xaa = X or * as defined in Table 2
FSLKRSSTSLVSWIPRYFILFEAIVNGSSLMIWLSVXAKILVQRAXVLAFHPSXLRFVKDQVVVDMWHYF

SEQ ID NO: 48362 - protein, 58 aa, Homo sapiens
  misc_feature (1)...(58): Xaa = X or * as defined in Table 2
SFRSRLFSFHVVELFXVSFLILSSSLIALWSERQSVIISVLLYFLRSAFLPTMWSILE

SEQ ID NO: 48363 - protein, 89 aa, Homo sapiens
  misc_feature (1)...(89): Xaa = X or * as defined in Table 2
SGQRRKEVPSPTLPAPPFILKKKEWPDPPRSFFSGGHWAKSSCPSDCSSQLMACXCKNAKHQKDNSCLISTHMKGNSERKXNSGYQGLG

SEQ ID NO: 48364 - protein, 206 aa, Homo sapiens
  DOMAIN (94)..(115): PROTEIN REPEAT DOMAIN TPR NUCLEA domain identified by eMATRIX, accession number PD00126A, p-value=2.731e-10, raw score of 22.53
  DOMAIN (87)..(120): TPR Domain domain identified by PFam, accession name TPR, E- value=8.6e-07, PFam score of 36.0
GAFLLEVATAAGLSAGLTRLGSQVGGAMRRSKADVERYIASVQGSTPSTLQKSMKGFYFAKLYYEAKEYDLAKKYICTYINVQERDPKAHRFLGLLYELEENTEKAVECYRRSVELNPTQKDLVLKIAKLLCKNDVTDGRAKYWVERAAKLFPGSPAIYKLKNDGWVRGQMVPKPDDEGVQVRGRSGRPDAGWRLNRRSSVGGSAW

SEQ ID NO: 48365 - protein, 331 aa, Homo sapiens
  DOMAIN (79)..(100): PROTEIN REPEAT DOMAIN TPR NUCLEA domain identified by eMATRIX, accession number PD00126A, p-value=2.731e-10, raw score of 22.53
  DOMAIN (72)..(105): TPR Domain domain identified by PFam, accession name TPR, E- value=1.2e-06, PFam score of 35.6
MAFHVEGLIAIIVFYLLILLVGIWAAWRTKNSGSAEERRSHHSWWPRYWFIGWWIYHDRYICTYINVREMDPRAHRFLGLLYELEENTEKAVECYRRSVELNPTQKDLVLKIAELLCKNDVTDGRAKYWVERAAKLFPGSPAIYKLKTPSSSVLELGLALVAPQSADGLVIVCVKFQESNDKTQLIFDSVTNIPAKDAAPVEKIDTMLVLEGSGNLVYTQEWFGFLDSCLNRTESGRSRCARTVTGATTFCPVSSRKERSGGSDHSFSSNNEGMQKHVSTEALECPERAEKASQESARFKLTEEVNKIVKTYQMHILEFWVSNVYLLYEIL

SEQ ID NO: 48366 - protein, 171 aa, Homo sapiens
MGELITYPGCCGRKGKKSHIWQEKSHKENLQGVVGEWVSAEVKRERLKVKAPPSVPRRDYASESPADEEEQWSDDFKKKRKMRGRGDFSAHLLVMGALLGPSSRSSLRCTAAAPLLAAHARPTTLPTTTTPARSKCGHRGKTAPRERQHNQNREFQTEGVKRGECDGRERM

SEQ ID NO: 48367 - protein, 153 aa, Homo sapiens
PLDSYSCLLQLPNRMDKLNKITVPASQKLRQLQKMVHDIKNNEGGIMNKIKKLKVKAPPSVPRRDYASESPADEEEQWSDDFDSDYENPDEHSDSEMYVMPAEENADDSYEPPPVEQETRPVHPALPFARGEYIDNRSSQRHSPPKTHTSAKI

SEQ ID NO: 48368 - protein, 125 aa, Homo sapiens
  DOMAIN (64)..(100): Transmembrane 4 family domain identified by PFam, accession name transmembrane4, E-value=2.2e-07, PFam score of 26.5
MVDRYPVTTDTEFFQGLGIYPNSPLESTSKASPEIHFFKRLWTISPEPSLALSIIFPREAEPQILGAVILGFGVWILADKSSFISVLRKDPSASPDPGPLKRGGPGRRYSCSHKCFGFNACCFSR

SEQ ID NO: 48369 - protein, 135 aa, Homo sapiens
  misc_feature (1)...(135): Xaa = X or * as defined in Table 2
LVKVCHCTYHHFLTGVVSLPRDGGKGAPCWGRARSPKSALLPYLAPGRGXVGTYEVQNPNGTSPVQSPATDVGRSPALGNQEPGTXSPGPQIGRGVTGTARPHTGVSRDSWRRPPSFILNAVANIPKGNAPIPKE

SEQ ID NO: 48370 - protein, 228 aa, Homo sapiens
  DOMAIN (95)..(119): PROTEIN NUCLEAR RIBONUCLEOPROTEIN SMALL MRNA RNA domain identified by eMATRIX, accession number PD01861A, p-value=2.184e- 18, raw score of 14.06
  DOMAIN (78)..(153): Sm protein domain identified by PFam, accession name Sm, E- value=0.0026, PFam score of 20.1
RHPWLCPSRCCTRKCCPALRSRQRHCCSHWAPLHWSSQEMQRPRAPCLPSLAVSEALSEDFPQGNPASDTVNASPVNQFFGYTANTNAASICWEGTIFFGIFKAFDKHVNLILCDCDEFRKIKPKNVKQPELEEKHFWGLVLLHGENLVSMTVEGLPPKYTGIARVPLAGAAGGPGVVRAAGRGVSAGVPIPQAPGGLAGPVPGVGGPSQQDCEGSLTTDERLEDQRS

SEQ ID NO: 48371 - protein, 135 aa, Homo sapiens
  misc_feature (1)...(135): Xaa = X or * as defined in Table 2
IPLGKLLLKPVGAPQIERFPFQIPVPLCSLSFPSHSPSSSSARSXVRQESXLGTPGSAPTGSPTSHHPSASSPPHPSAKAAFLSFVCFLCSXPPPSSCHPCGLGPGPDPSQKMMICTVAHLNQSLIFTVVKVHLL

SEQ ID NO: 48372 - protein, 696 aa, Homo sapiens
FRAGAHVFRVSVSVAEMESRDAAQPMSPGEATQSGARPADRYGLLKHSREFLDFFWDIAKPEQETRLAATEKLLEYLRGRPKGSEMKYALKRLITGLGVGRETARPCYSLALAQLLQSFEDLPLCSILQQIQEKYDLHQVKKAMLRPALFANLFGVLALFQSGRLVKDQEALMKSVKLLQALAQYQNHLQEQPRKALVDILSEVSKATLQEILPEVLKADLNIILSSPEQLELFLLAQQKVPSKLKKLVGSVNLFSDENVPRLVNVLKMAASSVKKDRKLPAIALDLLRLALKEDKFPRFWKEVVEQGLLKMQFWPASYLCFRLLGAALPLLTKEQLHLVMQGDVIRHYGEHVCTAKLPKQFKFAPEMDDYVGTFLEGCQDDPERQLAVLVAFSSVTNQGLPVTPTFWRVVRFLSPPALQGYVAWLRAMFLQPDLDSLVDFSTNNQKKAQDSSLHMPERAVFRLRKWIIFRLVSIVDSLHLEMEEALTEQVARFCLFHSFFVTKKPTSQIPETKHPFSFPLENQAREAVSSAFFSLLQTLSTQFKQAPGQTQGGQPWTYHLVQFADLLLNHSHNVTTVTPFTAQQRQAWDRMLQTLKELEAHSAEARAAAFQHLLLLVGIHLLKITQGPGPVSTLRAFLLPPGSLAQSGAGHKGNGPDWQSAESCPEGIQCRGTSLDSENRPGCQPWSCHLWAVWP

SEQ ID NO: 48373 - protein, 14 aa, Homo sapiens
MLVNRTPTPWRCGA

SEQ ID NO: 48374 - protein, 28 aa, Homo sapiens
TGSPQWLSAAFMESFACPMDSDGGLEEA

SEQ ID NO: 48375 - protein, 325 aa, Homo sapiens
  DOMAIN (222)..(263): kw TRANSCRIPTASE REVERSE II ORF2 domain identified by eMATRIX, accession number DM01354I, p-value=7.532e-24, raw score of 15.55
MVHYSIDTENPTKSCKSRDSNRIHLRTLVKLPRPSRICMYEKPLSDLKDVTLQKQHVPFQHYNGGVGRRREENEERQPSTHFDREMNPGKGFRWKEGAQIELFANLPEKPTSADQLCILNYEQANKDHQVCEKSNSMKNAKINRNNDRRRRKESSQTLDHLLPHKVAVVVVVFKSPQVLQSVETGLWTVTPDPSWIYEENDKLSFDECTWPWQLNHANIWKLNSLLLNEHWAKNKIKMEIRKLFKLNGNNDKTYQNLWDKAKVVLRGKFIALSTYIKKTESAQTDILRSHLKELEKQEQTKPKLRRRKEITKIRAELNETEKYKR

SEQ ID NO: 48376 - protein, 250 aa, Homo sapiens
MRDCAMKDGAIRPRYYAFPMVFTTCRPEDSLGCLHHQSPGFQAQSWEGISERKAAALLRGLEIKLPSPWNRAPGGRGSCGPTFSKLKRFCLLALKRAVDLLAQTASSKSNSININKKDAHAKTPSEGHQKPKVDKSTKMRKNQHKKSENSKNQNNSSPPKDHNYSPAREQNWMENEFDKLTEVGFRRWVITNSSPLKEHVLAQCKEAKNLYKWLQELLTRITSLDKTINDLMELKNTAQELCEAYTSINS

SEQ ID NO: 48377 - protein, 26 aa, Homo sapiens
PDCLSRFLLSGQSISERKEAAPVRGL

SEQ ID NO: 48378 - protein, 45 aa, Homo sapiens
SGQLHTPSHHHALPKGCQSRVVRWLSSSQTAGRHTSHHQSPWRDQ

SEQ ID NO: 48379 - protein, 367 aa, Homo sapiens
  DOMAIN (202)..(237): Bacterial type II secretion system protein E proteins domain identified by eMATRIX, accession number BL00662A, p-value=4.405e- 27, raw score of 18.07
  DOMAIN (194)..(367): Bacterial type II secretion system protein domain identified by PFam, accession name GSPII_E, E-value=4.1e-101, PFam score of 342.3
EAGRRLRRPSPMQIWLSRPSSNSMKKNRAAQSGATGISVTACGQASQLFRSSMLGTSAIGIPAYQNYLRKAALTDMLQTFVPYRTAVELCALEHGGLDTCDGGSNGIPSPTTTRYVSAMSVAKGVVSLTGQEILLDASEEVVHVAVVDAPSHELLDALHFATTKRIEITCWTRQQMEGHASRTQQTLPVAVQEKHQPKAELLTRTLQSALEQRASDIHIEPADNAYRIRLRIDGVLHPLPDVSPDAGVALTARLKVLGNLDIAEHRLPQDGQFTVELAGNAVSFRIATLPCRGGEKVVLRLLQQVGQALDVNTLGMQPLQLADFAHALQQPQGLVLVTGPTGSGKTVTLYSALQKLNTADINICSVE

SEQ ID NO: 48380 - protein, 39 aa, Homo sapiens
  misc_feature (1)...(39): Xaa = X or * as defined in Table 2
SDCSCPGLXGPPGRWHKRRKSGSPHLSTPEGTPALTSQA

SEQ ID NO: 48381 - protein, 56 aa, Homo sapiens
GRIQTSSCCHGTYIPARRNTDNKLKHLGRSGDRYCKENNKALWSVVRRTGRWGEGS

SEQ ID NO: 48382 - protein, 591 aa, Homo sapiens
QRSTLVCSRKHVERVCANSRAPSGTQRQPVTSCNSTKVRGFILEVSKTKNSLEGTNSGQILATTKGLLPSCQAIQPLEGTSSSQAATSSEPEAQVQALTFTLLASDNTRFLLYSPRALKDTSQEPKGCPAAFGSVVDSEPPGRGRLPLSFTMVLMPSLTIDPLDLPIFQTPAQGARLTCVLAKSRAEPELSGLTSPNEVTGWNLKEAIWTQKTAMECKFSRVCGIVRVVLLYRICGRCHRISAINKTKNVWTAVIPTSRGGFTTLSLGGVNASRQYNGGDVPSFMLVRCGFQAFQRPEFGCGLLRLPLAQTPGPPEAACSVSLERCQPQGGRERGTSDGDRAFGLGDLPNLLGLVGDQLGDTERKRRHAKPGSYSIEVLLVVDDSVVRFHGKEHVQNYVLTLMNIGRKMNNSLTPSLLLPDSHRHAQQLYASGSHTSVPLCSPPPSSHALQGTCHASLTPLHRTSGDGPPPALPPSRHALRTPTTPPDLPPPLHRPPLDKFLLSRNLHPSKEEYRQQIKTPGEEWRQILVHWRSSSPPDAFKPEHREEDIEAEGRELRGPNTCTCLAQEQPQGFRGVSVSTTFTAVPDSLP

SEQ ID NO: 48383 - protein, 90 aa, Homo sapiens
  DOMAIN (10)..(87): Ribosomal L37ae protein family domain identified by PFam, accession name Ribosomal_L37ae, E-value=9.6e-35, PFam score of 128.8
  misc_feature (1)...(90): Xaa = X or * as defined in Table 2
VAGTWPNFLKKVGIVGKYGTRYGASLRKMVKKIEISQHAKYTCSFCGITKMKRRAVGIWHCGSCMKTVAGGAWTYKXVXFLVVFGSVWTT

SEQ ID NO: 48384 - protein, 53 aa, Homo sapiens
MKTPLLSSCRNHSTRSPQLVSSSWFCHRKEQVLLGVLADFNYFFIHFPDASAP

SEQ ID NO: 48385 - protein, 166 aa, Homo sapiens
  DOMAIN (137)..(166): DnaJ domain identified by PFam, accession name DnaJ, E-value= 0.029, PFam score of -0.4
RTRGRKKEQAMEGNRDEAEKCVEIAREALNAGNREKAQRFLQKAEKLYPLPSARALLEIIMKNGSTAGNSPHCRKPSGSGDQSKPNCTKDSTSGSGEGGKRLYQRPSRWSSQSFMDIGTLIWDGGPVPNTHINKCKNYYEVLGVTKDAGDEDLKKAYRKLALKFHP

SEQ ID NO: 48386 - protein, 101 aa, Homo sapiens
RQEIDSIHQVGVYCLALVPANTLPKTPLGGIHISQTKQLFLEGSLHPCNILMCPHTCVTNLPKPRQKQPWCRPCFRDGWESGCWKTYSTSCWKGSGTNRRE

SEQ ID NO: 48387 - protein, 399 aa, Homo sapiens
  DOMAIN (317)..(360): kw TRANSCRIPTASE REVERSE II ORF2 domain identified by eMATRIX, accession number DM01354T, p-value=1.000e-40, raw score of 9.48
  DOMAIN (21)..(58): Trypsin domain identified by PFam, accession name trypsin, E- value=4.7e-10, PFam score of 34.4
MDGIEDCGTAPLKDVLQGSRIIGGTEAQAGAWPWVVSLQIKYGRVLVHVCGGTLVRERQRSLSLWPPPPLGPWVVLPGHCRCLLKAQGLFYQLVVNAGRQLRHSKSQDETSQHKIQVMKTLLIKQVAVKKPAKTEMATRVTPGHPHCYTPISDIYKSHGNVRKAIDSIHQVGVYCLALVPANTLPKTPLGGIHISQTKQLFLEGSLHPCNILMCPHTCVTNLPKPRQKQPGNLLRAVSSGSLILSSVTGINPLSDKWFANNFFPVHAEKAFDKIQHRFMIKTLNKLGIKGTYLKIIRAIYDKPSANIILNGEKLKAFPLRTGTRQGCPLSPLLFNIVLEVLARGIRQEKKIKGIQISKEEVKVSLFADNINIFLENPKDSSRKLLELIKEFRGSFYRVA

SEQ ID NO: 48388 - protein, 130 aa, Homo sapiens
NSRVDDFVAPGLSEAGKLLGLEFPERQRLAAAVGCSPMSGVISMSAPFFLGKIIDAIYTNPTVDYSDNLTRLCLGLSGVFLCGAAANAIRVYLMQTSRQRVVKRLRTSLFSSILGQEVAFSDKAGTGELI

SEQ ID NO: 48389 - protein, 231 aa, Homo sapiens
  DOMAIN (208)..(220): ABC transporters family proteins domain identified by eMATRIX, accession number BL00211A, p-value=8.000e-13, raw score of 12.23
SGFMDHLEEKADLSELVEKEELGFFQYYRERCHQKVYHPITKPGGSAKDAAPGGGHHQAGPGQGGDEGIRMMFCVSPNRATFVVSVVPLVSIIDVIYGRYLRKLTKVTQDSLAQATQLAEERIGNVKTVRAFGKEMTEIEKYPSKVDHVMQKARKEAFARAEGVILNEKSFQGALEFKNVHFAYPARPEVPIFQDFSLSIPSGSVTALVGPSGSGKSTVLSLLLRLYDPAS

SEQ ID NO: 48390 - protein, 712 aa, Homo sapiens
  DOMAIN (190)..(464): ABC transporter transmembrane region domain identified by PFam, accession name ABC_membrane, E-value=6.4e-54, PFam score of 192.6
MLEGLALMLMIWVVIAEDRVTPYLFKVVSLFRVRVVLGHALPPKAGYRCHPCCRGYSSAVPCGQKQRIAIARALLKHFGRVHEPLYPAGTPFRTTQIQNSDNTKCRNLGIPELGASASRPATSLQSRCQPGLWSHLKAELGQDLHPNSFKWLVTGFMSLWLEPSLSELPHGLLVSIISCALTCLAQIRLSKSAVGFLTMSSVISMSAPFFLGKIIDVIYTNPTVDYSDNLTRLCLGLSAVFLCGAAANAIRVYLMQTSGQRIVNRLRTSLFSSILRQEVAFFDKTRTGELINRLSSDTALLGRSVTENLSHGLRAGAQASVGISMMFFVSPNLATFVLSVVPPVSIIAVIYGRYLRKLTKVTQDSLAQATQLAEERIGNVRTVRAFGKEMTEIEKYASKVDHVMQLARKEAFARAGFFGATGLSGNLIVLSVLYKGGLLMGSAHMTVGELSSFLMYAFWVGISIGGKQECIPSQLGTNDFLVFVSLLVFENQDGKVRDFQVSWLPHSTELQQRWKRHILQKKGEGKCALQIAGQQRWIEEVGGGWRKLYTVPTTCPLLNRAPIWLYQAGTAIPTVIQGLKGSTSESSPLSEGSGIHHLKSSLSPSSYPRFSERNLEHREREPTQGLPIYTSQNHILRQSLSLASSHIPSRGRGSTGLTLESGKGAESLAGWSRGRDLMGAQEGELRNEMKPLDYRTEGFCGKVGLKGLYTGE

SEQ ID NO: 48391 - protein, 274 aa, Homo sapiens
  DOMAIN (199)..(222): ANNEXIN FAMILY SIGNATURE domain identified by eMATRIX, accession number PR00196A, p-value=6.438e-16, raw score of 11.16
MKPNCSIYIVQSQELDRVSDSDVITHSQSYTLSEGSQQLPKGDSQPSTVVQPLSHPSRNGEPEAPQPGSLSPCCHVRCDFAPPSPSATTVKPPQPCGTLSAWQDAHIVYTPEDTISTFRYNGAHQFKAQHIEGPSSQAKASSPQGFDVDRDAKKLNKACKGMVSGSPARRKAPSGLGTCQDPGLRGQGPRLGQEWSEWKERGTNEAAIIEILSGRTSDERQQIKQKYKATYGKVIPGVVSKLAPSHGLSRLGFLMSPGHAEYLYSFIESAQEEK

SEQ ID NO: 48392 - protein, 44 aa, Homo sapiens
  DOMAIN (18)..(32): Carboxylesterases domain identified by PFam, accession name COesterase, E-value=0.0041, PFam score of 12.9
ARTTATRAGTGGCWTRWAALRWVQENIAAFRGRPREILTLFRPI

SEQ ID NO: 48393 - protein, 255 aa, Homo sapiens
  DOMAIN (135)..(152): ArgE / dapE / ACY1 / CPG2 / yscS family proteins domain identified by eMATRIX, accession number BL00758B, p-value=1.964e- 11, raw score of 20.82
  DOMAIN (2)..(125): Peptidase family M20/M25/M40 domain identified by PFam, accession name Peptidase_M20, E-value=1.3e-05, PFam score of 22.7
  misc_feature (1)...(255): Xaa = X or * as defined in Table 2
MVNALSLAARIHAEVPADESPEMTEGYEGFYHLASMKGTVERADMHYIIRDFDRKQFEARKRKMMEIAKKVGKGLHPDCYIELVIEDSYYNMREKVVEHPHILDIAQQAMRDCDIEPELKPIRGGTDGAQLSFMGLPCPNLFTGGYNYHAPSPKFSAVSAMLLASASSAGRCGESIFSPLAYTSSPIESDSCGPALXRFLRHXPEIFLTQPVFSENEAIDIWNSPTASVSPLMPSRQNAVRELFLLTVRRPTGTD

SEQ ID NO: 48394 - protein, 388 aa, Homo sapiens
  misc_feature (1)...(388): Xaa = X or * as defined in Table 2
LTHWVYHLYGIQRILIHIPSTSQPNRVRGDIPPLQRIVVPVTVIVQPRLLIMLLPWQTVRLVQVMRVLLIKLVAPFIILPAPRRIAVFADERQRQAPVVAVVKMNFSRRCVFRLHLSGQLLHRQPALRKPRPAFTAHAVCPDFFLQPVQQPHQFSREHHAVAVLTPFLLERLCQAAPLRFFPLAVLCLDPDERREASRLVYRLDTCGVSLHRRQPVSVPAISLALPMLAILVVQTIFMALYAIFVTWRMMGKNYDAAVLAAGHCGFGLGATPTAIANMQAITERFGPSHMAFLVVPMVGAFFIDIVNALVIKLYLMLPIFAGXPMKRRXKSPPQQRQMPDTLRLSSVPSPASSVLSGLLPVVGNVREYGVPGAELPGSSPDRAVNPPL

SEQ ID NO: 48395 - protein, 88 aa, Homo sapiens
  misc_feature (1)...(88): Xaa = X or * as defined in Table 2
LVPMTWVIEASYSIMRKKVGEHPHFLDIAHQAMRDCDIEPELNPIRGGTDGAQLSFMGLPCPNLFTGGYNIMVSMSLXLWKVWKKRCR

SEQ ID NO: 48396 - protein, 988 aa, Homo sapiens
  DOMAIN (822)..(873): TRANSPORT GLUCONATE TRANSMEMBRANE PROTEIN PERMEA domain identified by eMATRIX, accession number PD02680A, p-value=1.000e- 40, raw score of 23.51
  DOMAIN (2)..(86): Carboxylesterases domain identified by PFam, accession name COesterase, E-value=3.1e-19, PFam score of 68.4
  misc_feature (1)...(988): Xaa = X or * as defined in Table 2
MRWILCWSLTLCLMAQTALGALHTKRPQVVTKYGTLQGKQMHVGKTPIQVFLGVPFSRPPLGILRFAPPEPPEPWKGIRDATTYPPGKQENLLGREKPDMPGDTAAFVNPHPGAGSGAICPQVSVHHVSLSMFIWGVGAQNSSCFESWTNAKTALGVRYIGYGAPLMPKVYLKAPMILNGVCVIWKGWIDLQRLDGMGCLEFDEERAQLRSQRVPAPPPQEAEDAEPVLQKHQHHFLAGGQVRALVRRSSAHDEGASREPDHHLDEEGRDLSGAVGGGGTAGAGDLALTGSWGSPGARAGAYTFRYRQSSLKRSHLYRSRVLTYIEASWPQDSCRHLRAPEPPYQPDEIYDALKQGEVLVRLGGLRVLRIGDDVYANGEKIDSPHRPALDALASNIALTAENFGDALEDPSFLAMLAALVNSGYWFFEGRKSSASVLMSLHPGQDLARLNLIRCYRHFCPSVVHRPQLLRLHWCCSTKAYWRMMGKNYDAAVLAAGHCGFGLGATPTAIANMQAITERFGPSHMAFLVVPMVGAFFIDIVNALSRGVGSTAVALLHKLGYQVVAVSGRESTHEYLKSLGASRVLPRDEFAESRPLEKQVWAGAIDTVGDKVLAKVLAQMNYGGCVAACGLAGGFTLPTTVMPFILRNVRLQGVDSVMTPPERRAQAWQRLVADLPESFYTQAAKEISLSEAPNFAEAIINNQIQGRTLVKHSHLSRRCSENWVIPRKRCRSLTRSINTNARFPHPYQQCSNLRSQAYSCMRNPCTRFQHDAGNRANRNMSAQNDRATGYRYDGIPAVVGFAEGMDAQAVLHSIQNGIGSTLGGLAMILGFGAMLGKLISDTGAAQRIATTLIATFGKKRVQWALVITGLVVGLAMFFEVGFVLLLPLVFTIVASSGLPLLYVGVPMVAALSVTHCFLPPHPGPTAIATIFEANLGTTLLYGFIITIPTVIVAGPLFSKLLTRFEKAPPEGLFNPHLFSEEEMPSFWNX

SEQ ID NO: 48397 - protein, 360 aa, Homo sapiens; identical to SEQ ID NO: 42651
  DOMAIN (54)..(90): Ribosomal protein L6e proteins domain identified by eMATRIX, accession number BL01170A, p-value=7.917e-11, raw score of 12.34
  DOMAIN (46)..(177): Ribosomal protein L6e domain identified by PFam, accession name Ribosomal_L6e, E-value=3.2e-27, PFam score of 103.9

SEQ ID NO: 48398 - protein, 319 aa, Homo sapiens
  DOMAIN (271)..(309): Ribosomal protein L6e proteins domain identified by eMATRIX, accession number BL01170B, p-value=7.568e-33, raw score of 19.54
  DOMAIN (132)..(319): Ribosomal protein L6e domain identified by PFam, accession name Ribosomal_L6e, E-value=2e-48, PFam score of 174.3
  misc_feature (1)...(319): Xaa = X or * as defined in Table 2
DAWADAWSKKADVKVENPDTKEKKPEAKKVDAGGKVKKGNLKAKKPKKGKPHCSRNPCPCKKEIGRNSRSGMYSRKAMYKRKYSAAKSKVEKKKKEKVLATVTKPVGGDKNRRXPGVVKLPQKCPRYYPSLEDVPRKACLSHGKKTPLVQHVEKNCEASIYPRGPFXFILTGRHRGKRVGFPESSLAKLAYLLCXLGPLVLKSEVPLRRTHQKFCHLPLSTKIDISNVKIPKHLTGCLLSRRKKLRKPRHQEGEIFDTEKEKYEITEQRKIDQKAVDSQILPKIKAIPQLQGYLRSVFALTNGIYPHKLVVLNCLKNPN

SEQ ID NO: 48399 - protein, 186 aa, Homo sapiens
  DOMAIN (97)..(146): Parathyroid hormone family proteins domain identified by eMATRIX, accession number BL00335B, p-value=1.000e-40, raw score of 24.23
  DOMAIN (28)..(139): Parathyroid hormone family domain identified by PFam, accession name Parathyroid, E-value=5.3e-62, PFam score of 219.4
NLFSGCVESTFRKQPAHQRRSRARAETMQRRLVQQWSVAVFLLSYAVPSCGRSVEGLSRRLKRAVSEHQLLHDKGKSIQDLRRRFFLHHLIAEIHTAEIHPVRFGSDDEGRYLTQETNKVETYKEQPLKTPGKKKKGKPGKRKEQEKKKRRTRSAWLDSGVTGSGLEGDHLSDTSTTSLELDSRRH

SEQ ID NO: 48400 - protein, 140 aa, Homo sapiens
  DOMAIN (62)..(97): Parathyroid hormone family proteins domain identified by eMATRIX, accession number BL00335A, p-value=8.393e-39, raw score of 17.98
  DOMAIN (28)..(140): Parathyroid hormone family domain identified by PFam, accession name Parathyroid, E-value=2.1e-61, PFam score of 217.4
NLFSGCVESTFRKQPAHQRRSRARAETMQRRLVQQWSVAVFLLSYAVPSCGRSVEGLSRRLKRAVSEHQLLHDKGKSIQDLRRRFFLHHLIAEIHTAEIRATSEVSPNSKPSPNTKNHPVRFGSDDEGRYLTQETNKVET

SEQ ID NO: 48401 - protein, 73 aa, Homo sapiens
SQAQPEVSPIIHCGLRALHLLLAPCFCHPLFWILILISILVLMLWSFSCFLGHCHPWHSARNVAHFYSSSNFY

SEQ ID NO: 48402 - protein, 220 aa, Homo sapiens
  DOMAIN (133)..(182): Parathyroid hormone family proteins domain identified by eMATRIX, accession number BL00335B, p-value=1.000e-40, raw score of 24.23
  DOMAIN (28)..(175): Parathyroid hormone family domain identified by PFam, accession name Parathyroid, E-value=3e-74, PFam score of 260.1
NLFSGCVESTFRKQPAHQRRSRARAETMQRRLVQQWSVAVFLLSYAVPSCGRSVEGLSRRLLKPMRPKNVHVPTKVTTYKRAVSEHQLLHDKGKSIQDLRRRFFLHHLIAEIHTAEIRATSEVSPNSKPSPNTKNHPVRFGSDDEGRYLTQETNKVETYKEQPLKTPGKKKKGKPGKRKEQEKKKRRTRSAWLDSGVTGSGLEGDHLSDTSTTSLELDSR

SEQ ID NO: 48403 - protein, 107 aa, Homo sapiens
NLFSGCVESTFRKQPAPQRRSRARAETMQRRLVQQWSVAVFLLSYAVPSCGRSVEGLSRRLSLTQRFSKCGLWATYTKIYCMCWLKKDGLLKAILSLLNQSLKRAQE

SEQ ID NO: 48404 - protein, 72 aa, Homo sapiens
NLFSGCVESTFRKQPAHQRRSRARAETMQRRLVQQWSVAVFLLSYAVPSCGRSVEGLSRRLSGDQTHCSGQW

SEQ ID NO: 48405 - protein, 19 aa, Homo sapiens
TMQRRLVQQWSVAVFLLSY

SEQ ID NO: 48406 - protein, 36 aa, Homo sapiens
LCSGCCPPPLPASLLPEAAVSPGESPGEVPFPRIQG

SEQ ID NO: 48407 - protein, 269 aa, Homo sapiens
  DOMAIN (161)..(185): Eukaryotic and viral aspartyl proteases proteins domain identified by eMATRIX, accession number BL00141E, p-value=2.324e- 09, raw score of 14.32
  DOMAIN (170)..(186): Eukaryotic aspartyl protease domain identified by PFam, accession name asp, E-value=0.0017, PFam score of 15.0
MQSTGERAFRQKKHRCKGPVTTSSSGDCQKASIARYEILEFAREIGIDPIKEPELMWLAREGIVAPLPGEWKPCLQKQLRLQTEKFPDGFWLGEQLVCWQAGTTPWNIFPVISLYLMGEVTNQSFRITILPQQYLRPVEDVATSQDDCYKFAISQSSTGTVMGAVIMEGFYVVFDRARKRIGFAVSACHVHDEFRTAAVEGPFVTLDMEDCGYNIPQTDESTLMTIAYVMAAICALFMLPLCLMVCQWRCLRCLRQQHDDFADDISLLK

SEQ ID NO: 48408 - protein, 374 aa, Homo sapiens
  DOMAIN (315)..(330): WW DOMAIN SIGNATURE domain identified by eMATRIX, accession number PR00403B, p-value=3.898e-09, raw score of 12.19
  DOMAIN (82)..(149): Subtilase family domain identified by PFam, accession name Peptidase_S8, E-value=9e-19, PFam score of 71.1
GRPVPSRLDKEVVPLKLSDASSIHQPCCLGQGIRLLLQSLFLPVTFQAFQVHSPARPPCALAIRPTCPCQAHDPGNQYLFLNSWGPDDDGKTVDGPHQLGKAALQHGVIAGRQGFGSIFVVASGNGGQHNDNCNYDGYANSIYTVTIGSHPMFLCSCVCVTEGEVWEMELDRLKNQDGEINRNIMEETERAWKAEVRRGADILKVLVSGFQMVSTFGIVIGEPEILKAIQDVTIKREETKKKIEKEKKEFLQKEQDLKAEIEKLCEKGRRQWGHDALSRQPHQFWFLDGINTNLPGKFKNFCKERQSQDITGDIYYFNFANGQSMWDHPCDEHYRSLVIQERAKLSTSGAIKKKKKKKEKKDVADAWNPSYSGG

SEQ ID NO: 48409 - protein, 88 aa, Homo sapiens
  misc_feature (1)...(88): Xaa = X or * as defined in Table 2
ASPMAPTSLCVPTLLPSLNQTSSSSTAPTGKASWGWPMLRLPGLTTPWSLSLTLWXSRPTFPTSSPCSFVVLASPSTSLKCWPLSEGA

SEQ ID NO: 48410 - protein, 335 aa, Homo sapiens
VMAGRPLRIGDQLVLEEDYDETYIPSEQEILEFAREIGIDPIKEPELMWLAREGIVAPLPGEWKPCTTGPQVLSVVVVVTGASLDQSCIVELHSGHSKGQTVAGASSTYRDLRKGVYVPYTQGKWEGELGTDLVSIPHGPNVTVRANIAAITESDKFFINGSNWEGILGLAYAEIAREPARFQTEELSPGSPIFTSSLSPRPHSSASRSLARERASGPPPRSLPSPPPNPSLDEVLNYPPPRKAPGEAPGEALGEAQLPQRHPTPTRSPSFQGRRGVALQRATNTSGKGPQFPPTLPMAAPMLQPDEAGRLGNCCHTQTCSEHLPNLQSSWPHQM

SEQ ID NO: 48411 - protein, 492 aa, Homo sapiens
  DOMAIN (276)..(294): Ubiquitin carboxyl-terminal hydrolases family 2 proteins domain identified by eMATRIX, accession number BL00972A, p-value= 3.000e-20, raw score of 11.93
  DOMAIN (275)..(306): Ubiquitin carboxyl-terminal hydrolases famil domain identified by PFam, accession name UCH-1, E-value=1.6e-11, PFam score of 51.7
MLAMDTCKHVGQLQLAQDHSSLNPQKWHCVDCNTTESIWACLKLLPMLPVGRYIERACTQALFKKAVILLQLEVNEMYVFCYLCDDYVLNDNTTGDLKLLRRTLSAIKSQNYHCTTRSGRFLRSMGTGDDSYFLHDGAQSLLQSEDQLYTALWHRRRILMGKIFRTWFEQSPIGRKKQEEPFQKKIVVKREVKKRRQELEYQVKAELESMPPRKSLRLQGLAQSTIIEIVSVQVPAQTPASPAKDKVLSTSENEISQKVSDSSVKRRPIVTPGVTGLRNLGNTCYMNSVLQVLSHLLIFRQCFLKLDLNQWLAMTASEKTRSCKHPPVTDTVVYQMNECQEKDTGFVCSRQSSLSSGLSGGASKGRKMELIQPKEPTSQYISLCHELHTLFQVMWSGKWALVSPFAMLHSVWRLIPAFRGYAQQDAQEFLCELLDKIQRELETTGTSLPALIPTSQRKLIKQVLNVVNNIFHGQLLSQVWIFKNLIFIIGSS

SEQ ID NO: 48412 - protein, 1095 aa, Homo sapiens; identical to SEQ ID NO: 35487
  DOMAIN (632)..(673): PROTEIN GTPASE DOMAIN ACTIVATION domain identified by eMATRIX, accession number PD00930B, p-value=3.189e-22, raw score of 33.72
  DOMAIN (529)..(681): RhoGAP domain identified by PFam, accession name RhoGAP, E- value=4.4e-53, PFam score of 189.8

SEQ ID NO: 48413 - protein, 734 aa, Homo sapiens
  DOMAIN (654)..(682): Granins proteins domain identified by eMATRIX, accession number BL00422C, p-value=1.766e-10, raw score of 16.18
DTQAHQMDKQKNPQKAAPPPIQRASDWRSSTPNQTHPKTDGQTQSDRHREDNTEIRRDKDRPSDARTRTQAGSPGPLVPQRRPSGKARSIARPCGAPCAPLGSSHAPRAHPTSGWLWKTPSPQPRNPGTLGGISRHQAFLRRRDRGWVGPAPAAALALAWNLVLSRTCPDSAMALALLCLVPGPDPDPDPFLALHWTFPGPELAMHRPGCGPGPAVALSQTLALPGTIGPTGAALLGEQEKQKNSDPASPPHPGANSCSGRLHAQGPVPRGVPRGAWQPLRHRPTVHRPRNHVQPCTVLPTSTPNAGNDTLDSALNPPHTAKGAALDSPCPTTLVVLQSLSPPPPTTAVQPRFGPQTTPPPPGAGSTAPDSTPTGHPRRAVTPEIGLQLVQATTVQLDSALTPTPFYALAGCSVIAAPTTNRAANRKDLFTVHAALSCPKRGSAPRSRWMNEEQGIVLMHSWSVVSAVYMYGRSVTPCAPKSDMRELGCFSLVESLGEDISWERVNELSTQVIIHLDGLSLTSYKNLISRERFSSNIYIPRHGQGSQRGTESSEAWYIDSQDSGEPLPNLPGWLEQCCDLGYHASLNRALRTFLSAELNLEQSKHEGLDAIENAVENLDATSDKQRLMEMYNNVFCPPMKFEFQPHMGDMDRLSRKKKKEEEEEEEEEEEEEEEEEEGGGGRGGRGGVTKPLTSLKQPISEQEFGPPCNGVKFPQKQDELDPVPEPKKSKISSG

SEQ ID NO: 48414 - protein, 347 aa, Homo sapiens
  DOMAIN (206)..(285): Eukaryotic protein kinase domain identified by PFam, accession name pkinase, E-value=1.2e-13, PFam score of 53.1
MNMNIKKIVKQATVLTFTTALLAGGATQAFAKENNQKAYKETYGVSHITRHDMLQIPKQQQNEKYQVPQFDQSTIKNIESAKGLDVWDSWPLQNADGTVAEYNGYHVVFALAGSPKDADDTSIYMFYQKVGDNSIDSWKNAGRVFKDSDKFDANDPILKDQTQEWSGSATFTSDGKIRLFYTDYSGKHYGKQSLTTAQIIEKQAGHSRSRVFREVETLYQCQGNKNILELIEFFEDDTRFYLVFEKLQGGSILAHIQKQKHFNEREASRVVRDVAAALDFLHTKGHKWPGVETASVKVAIGLGFKIAPNYFMSKSTDLSAYGAYGILSSHSSSIGRAAGSAHSEVGS

SEQ ID NO: 48415 - protein, 486 aa, Homo sapiens
  DOMAIN (222)..(241): TYROSINE KINASE CATALYTIC DOMAIN SIGNATURE domain identified by eMATRIX, accession number PR00109B, p-value=1.164e-11, raw score of 12.27
  DOMAIN (111)..(395): Eukaryotic protein kinase domain identified by PFam, accession name pkinase, E-value=4.3e-74, PFam score of 259.6
RSAGRGARDRSPAGASEGFHVRGRWRTEDCHLRTKAIETLRVAGRHQLPDRSFISFGISSLQMVSSQKLEKPIEMGSSEPLPIADGDRRRKKKRRGRATDSLPGKFEDMYKLTSELLGEGAYAKVQGAVSLQNGKEYAVKIIEKQAGHSRSRVFREVETLYQCQGNKNILELIEFFEDDTRFYLVFEKLQGGSILAHIQKQKHFNEREASRVVRDVAAALDFLHTKGIAHRDLKPENILCESPEKVSPVKICDFDLGSGMKLNNSCTPITTPELTTPCGSAEYMAPEVVEVFTDQATFYDKRCDLWSLGVVLYIMLSGYPPFVGHCGADCGWDRGEVCRVCQNKLFESIQEGKYEFPDKDWAHISSEAKDLISKLLVRDAKQRLSAAQVLQHPWVQGQAPEKGLPTPQVLQRNSSTMDLTLFAAEAIALNRQLSQHEENELAEEPEALADGLCSMKLSPPCKSRLARRRALAQAGRGEDRSPPTAL

SEQ ID NO: 48416 - protein, 264 aa, Homo sapiens
MLRFPDRPGAAPALALCRGAMLLKACREWMPTAPQLPHVNVISKKPANLMVVQNMSCVGMGYNVVLKRLQQTLPTTCQKKLFLFCCECNTPASFCGPECHSHTDAGGAIQAAEHQGYKWLNEILSRRHYKITIEGEMGVESNVKEKEVGEPQCRCHQGVGQTSAGHWIWTECGLAFSQRTPAKGLFGSQIIEKQAGHSRSRVFREVETLYQCQGNNSGYPVQIIAPSSVIILQPPASPTQLSRALRRKSWVPEAAPADTTDSAM

SEQ ID NO: 48417 - protein, 103 aa, Homo sapiens
  DOMAIN (48)..(62): Phage integrase family domain identified by eMATRIX, accession number PF00589B, p-value=1.621e-11, raw score of 16.17
  misc_feature (1)...(103): Xaa = X or * as defined in Table 2
AHGAAWPSHRKDRESADLGSDGQNGQDLDWGGGCRRCCXRCDVLCWGAPHTFRHSYAMHMLYAGIPLKVLQSLLLGQAPCRCGLGQNVGTALPLVSGGPMLFP

SEQ ID NO: 48418 - protein, 27 aa, Homo sapiens
LAAGDNAGGNTTCYSIQTRPQADDGQL

SEQ ID NO: 48419 - protein, 685 aa, Homo sapiens
  DOMAIN (6)..(45): BIR repeat proteins domain identified by eMATRIX, accession number BL01282B, p-value=2.543e-09, raw score of 30.49
  DOMAIN (10)..(59): Zinc finger, C3HC4 type (RING finger) domain identified by PFam, accession name zf-C3HC4, E-value=3.1e-08, PFam score of 31.0
METLESELTCPICLELFEDPLLLPCAHSLCFSCAHRILVSSCSSGESIEPITAFQCPTCRYVISLNHRGLDGLKRNVTLQNIIDRFQKASVSGPNSPSESRRERTYRPTTAMSSERIACQFCEQDPPRDAVKTCITCEVSYCDRCLRATHPNKKPFTSHRLVEPVPDTHLRGITCLDHENEKVNMYCVSDDQLICALCKLVGRHRDHQVASLNDRFEKLKQTLEMNLTNLVKRNSELENQMAKLIQICQQVEVNTAMHEAKLMEECDELVEIIQQRKQMIAVKIKETKVMKLRKLAQQVANCRQCLERSTVLINQAEHILKENDQARFLQSAKNIAERVAMATASSQVLIPDINFNDAFENFALDFSREKKLLEGLDYLTAPNPPSIREELCTASHDTITVHWISDDEFSISSYELQYTIFTGQANFISLYNSVDSWMIVPNIKQNHYTVHGLQSGTRYIFIVKAINQAGSRNSEPTRLKTNSQPFKLDPKMTHKKLKISNDGLQMEKDESSLKKSHTPERFSGTGCYGAAGNIFIDSGCHYWEVVMGSSTWYAIGIAYKSAPKNEWIGKNASSWVFSRCNSNFVVRHNNKEMLVDVPPHLKRLGVLLDYDNNMLSFYDPANSLHLHTFDVTFILPVCPTFTIWNKSLMILSGLPAPDFIDYPERQECNCRPQESPYVSGMKTCH

SEQ ID NO: 48420 - protein, 744 aa, Homo sapiens
  DOMAIN (35)..(74): BIR repeat proteins domain identified by eMATRIX, accession number BL01282B, p-value=2.543e-09, raw score of 30.49
  DOMAIN (39)..(88): Zinc finger, C3HC4 type (RING finger) domain identified by PFam, accession name zf-C3HC4, E-value=3.1e-08, PFam score of 31.0
RRWLAPGNAMGESPASVVLNASGGLFSLKMETLESELTCPICLELFEDPLLLPCAHSLCFSCAHRILVSSCSSGESIEPITAFQCPTCRYVISLNHRGLDGLKRNVTLQNIIDRFQKASISGPISPSESRRERTYRPTTAMSSERIACQFCEQDPPRDAVKTCITCEVSYCDRCLRATHPNKKPFTSHRLVEPVPDTHLRGITCLDHENEKVNMYCVSDDQLICALCKLVGRHRDHQVASLNDRFEKLKQTLEMNLTNLVKRNSELENQMAKLIQICQQVEVNTAMHEAKLMEECDELVEIIQQRKQMIAVKIKETKVMKLRKLAQQVANCRQCLERSTVLINQAEHILKENDQARFLQSAKNIAERVAMATASSQVLIPDINFNDAFENFALDFSREKKLLEGLDYLTAPNPPSIREELCTASHDTITVHWISDDEFSISSYELQYTIFTGQANFISKSWCSWGLWPEIRKCKEAVSCSRLAGAPRGLYNSVDSWMIVPNIKQNHYTVHGLQSGTRYIFIVKAINQAGSRNSEPTRLKTNSQPFKLDPKMTHKKLKISNDGLQMEKDESSLKKSHTPERFSGTGCYGAAGNIFIDSGCHYWEVVMGSSTWYAIGIAYKSAPKNEWIGKNASSWVFSRCNSNFVVRHNNKEMLVDVPPHLKRLGVLLDYDNNMLSFYDPANSLHLHTFDVTFILPVCPTFTIWNKSLMILSGLPAPDFIDYPERQECNCRPQESPYVSGMKTCH

SEQ ID NO: 48421 - protein, 83 aa, Homo sapiens
DPKVFSGGVTAAKLDRKRPSACCPTSTMSKDLKILCKDPALELSCYRDHQFSGRKFQQEKLLKESSTLNMGNLSFYTTEEKIH

SEQ ID NO: 48422 - protein, 717 aa, Homo sapiens
  DOMAIN (65)..(84): Eukaryotic  RNA-binding region RNP-1 proteins domain identified by eMATRIX, accession number BL00030A, p-value=6.500e- 10, raw score of 14.39
  DOMAIN (552)..(594): B-box zinc finger domain identified by PFam, accession name zf-B_box, E-value=8.2e-07, PFam score of 36.1
VFSGGVTAAKLDRKRPSACCPTSTMSKDLKILCKDPALELSCYRDHQFSGRKFQQEKLLKESSTLNMGNLSFYTTEEKIHELFSRSDIRNIFMGLDKIKKTACGFCFVECHNRADAENAMRFLTGTCLDEWIICTDWDVGFREGQQYGRGKSGGQAWSKFLAWSYRFRCHQDEGKNGSIHILGADDEGGSHKGQSKNRLLGALICECVSPRGLGGLNGFLGQGQGPCCPAQPWDPAPCILAAPSPAVAQRGPSTAQVTPSEGASCSLLVIVFEKRQRRRRRAAAYSGSGGGGDRGPGARAGARANPLRRQTRAQRPRASGGDGWHLGTLWVKRAPSPRPWRSSVVALAGLVSGSGRFSGQTPLVDERHPQSLDHRLTETEQSDNKPIIQSEIVLKHEIPVFAICLDRSIILCFSCAHRILVSSCSSGESIEPITAFQCPTCRYVISLNHRGLDGLKRNVTLQNIIDRFQKASVSGPNSPSESRRERTYRPTTAMSSERIACQFCEQDPPRDAVKTCITCEVSYCDRCLRATHPNKKPFTSHRLVEPVPDTHLRGITCLDHENEKVNMYCVSDDQLICALCKLVGRHRDHQVASLNDRFEKLKFSLHQYLKGANNRLFENNLQNVDTEIVLGWIEILSVIVGQRNILQKYNIADISIPISPATLALLLSRFNCPEKVALTGLEHKEPGPVINYIAQEQSKTHQYFKTEQQRRDMFTFI

SEQ ID NO: 48423 - protein, 404 aa, Homo sapiens; identical to SEQ ID NO: 36637
  DOMAIN (313)..(359): kw TRANSCRIPTASE REVERSE II ORF2 domain identified by eMATRIX, accession number DM01354O, p-value=1.000e-40, raw score of 8.73
  DOMAIN (134)..(186): DnaJ domain identified by PFam, accession name DnaJ, E-value= 0.089, PFam score of -5.1

SEQ ID NO: 48424 - protein, 198 aa, Homo sapiens
MEPTPGEDPVNNVDMTTKDLEYYINLVDKTAAGFEASFDSNFERSSTWRDFAKEVDGLLRIGAVNCGDDRMLCRMKGVNSYPSLFIFRSGMDGLVNVGWMDCATQDNLCKSLDITTSTTAYFPPGATLNNKEKNSILEELGRGGQKRERKMPKFTEEKKRHRKGSEEGQRKDDKEDYDVPLAEELSLTSHTSLADKLV

SEQ ID NO: 48425 - protein, 459 aa, Homo sapiens
  DOMAIN (147)..(160): Thioredoxin family proteins domain identified by eMATRIX, accession number BL00194, p-value=5.500e-14, raw score of 12.16
  DOMAIN (124)..(169): Thioredoxin domain identified by PFam, accession name thiored, E-value=8.6e-16, PFam score of 56.8
MASDGNAKACALHLPGAFTCPVARATGSSATPTLRTTPGRETSYPKELIETMPSLFLMGVFLCGYSLISTSLYFSKTLTGLINVGSIDCQQYHSFCAQENVQRYPEIRFFPPKSNKAYHYQFLPQVSTDLTPQTFSEKVLQGKNHWVIDFYAPWCGPCQNFAPEFELLARSGNTDEEASFTGKTRQNITSEEEEQERSSSPATKQSWTENDFDELREEGFRQLNFSKLKEVRTHRKQVKNLEKRLDEWLTRTTNAEKSLKDLMELKTMAQELCDECKSFVADSINWKKGENGTKLENILQDIIQENFPNLARQANIQIQEIQRMQQRYSLRRATPRHKIVRFTKVEMKEKTLRGAREKDPVTHKGKPIRLTADLSAETLQARKEWGPIYNILKENNFQPRSSYPAKLSFISEGEIKYFTHKQMPRDFVTTRPTLQELLKEALNMERNNRYQPLQKHAKL

SEQ ID NO: 48426 - protein, 84 aa, Homo sapiens
  DOMAIN (54)..(74): DNAJ PROTEIN FAMILY SIGNATURE domain identified by eMATRIX, accession number PR00625A, p-value=5.018e-13, raw score of 12.84
  DOMAIN (43)..(83): DnaJ domain identified by PFam, accession name DnaJ, E-value= 0.00029, PFam score of 18.8
IRTCIRKRMGVWLNKDDYIRDLKMIILCCLIVYMAILVGTDHDYYSLLGVSNTASSRDIRQAFKRLASKLHPDKYPNNPYAHGD

SEQ ID NO: 48427 - protein, 437 aa, Homo sapiens
  DOMAIN (196)..(209): Thioredoxin family proteins domain identified by eMATRIX, accession number BL00194, p-value=8.071e-16, raw score of 12.16
  DOMAIN (176)..(279): Thioredoxin domain identified by PFam, accession name thiored, E-value=1.4e-24, PFam score of 85.9
  misc_feature (1)...(437): Xaa = X or * as defined in Table 2
QHVRSTVTELWTGNFVNSIQTAFAAGIGWLITFCSKGGDCLTSQTRLRLSGMLFLNSLDAKEIYLEVIHNLPDFELLSANTLEDRLAHHRWLLFFHFGKNENSNDPELKKLKTLLKNDHIQVDRFGCSSAPDICSNLYVFQPSLAVFKGQGTKEYEIHHGKKILYDILAFAKESVNSHVTTLGPQNFPANDKEPWLVDFFAPWCPPCRALLPELRRASNLLYGQLKFGTLDCTVHEGLCNMYNIQAYPTTVVFNQSNIHEYEGHHSAEQILEFIKDLMNPSGGSLTPTTFIELVTQRKHTEVRIVXFHCPGWPPWPRLWPMAKKPRNLLPXSSRPLNTXSSLFCSSNQPDLRGPLLHRPLSLPRRYRGAQVPNPDFGHYSVSPSLIHGLHQCSHLFSHSPPPRVLRPPRILTTSTGLPPSPRRSATDVHTAYPPTAD

SEQ ID NO: 48428 - protein, 308 aa, Homo sapiens
  DOMAIN (135)..(156): Nt-dnaJ domain proteins domain identified by eMATRIX, accession number BL00636B, p-value=9.667e-13, raw score of 15.11
  DOMAIN (109)..(158): DnaJ domain identified by PFam, accession name DnaJ, E-value= 0.059, PFam score of -3.3
MLRARPRPGSPWRPAREEPTGTGRALVVAGVAAPHQSRAPRLGRRRVRVLLSCTRCLGSARRGPPPGFEDGGVATGSDPAMASDGNAKACALHLPGASTCPVARATGSSATPTLRTTPGRETSYPKNNPNAHGDFLKINRAYEVLKDEDLRKKYDKYGEKGLEDNQGGQYESWNYYRYDFGKDGLVNVGWMDCATQDNLCKSLDITTSTTAYFPPGATLNNKEKNSILFLNSLDAKEIYLEVIHNLPDFELLSANTLEVGRFDCSSAPDICSNLYVFQPSLAVFKGQGTKEYEIHHEYLANSKLPFKT

SEQ ID NO: 48429 - protein, 415 aa, Homo sapiens
LRDEMASELGARDDGGCTELAKPLYLQYLERALRLDHFLRLTSAIFNRNISSDDSEDGLDDSNPLLPQSGDPLIQVKEEPPNSLLGETSGAGSSGMLNTYSLNGVLQSESKCDKGNLYNFSKLKKSRKWLKSILLSDESSEADSQSEDDDEEELNLSREELHNMLRLHKYKKLHQNKYSKDKEPAGTNIPGSRAVSIDVTSGKSNLASAVAGLESSRDIFSCEICLLTVAMTPSSSSPPPFGNLRQSQSRLICTQMAWIRVSPRTPVRTGRQVAAAGCELREADGSGTTGGHGQATSIECGRGGDTPYQEAECPECGSRRSECMSPWQTVLAAALMEGMDIHIPHQQGRRSPSMPNMEDHPCSMENFSNLPHAEEHRTLFADLMKIDRWMDRMLPLFTLPIFAGNSDNILLCIPF

SEQ ID NO: 48430 - protein, 206 aa, Homo sapiens
MVLTRYVFSSLDSQPLEIHSNEETQNPSNWESKPLVTTLSQAMAAKLVNLSLKLAREYQDTPKCIIWVPNMLFPAYTSMVAILKMSVCIPSVAYWSLVPDRDTEDGKDHLGTIEQTIQRQNSLSEKFRNIMKRTKTTCWASSRPSRIPRGWGSLTIMAEGKEEQVLSYMMAAGKERMRKTQKRKLLIKTIRSRETYSLPQEQHGGH

SEQ ID NO: 48431 - protein, 262 aa, Homo sapiens
  misc_feature (1)...(262): Xaa = X or * as defined in Table 2
MAAPMTPAARPEDYEAALNAALADVPELARLLEIDPYLKPYAVDFQRRMFWMFLPFFTLAFSPSVLVRFHAADKDIPETGQFTKGRGLLDLQFQVAEDASQSWQKLYLLPNCSGQPHQKLVPTAQKFYITVEWGTFFSVPGQVVGSEGSQMSVTVEGSEESEDDKMYMTCSSALLDSFALCXXRHTXDWAIYKRKRFIGLTVPMWLRMPRNHGRSCISCLIALANHTKNWFPQRRSFISQWNGVLFSQCLAKLWALKEVRCQ

SEQ ID NO: 48432 - protein, 194 aa, Homo sapiens
MAAADRVEWSSVELPQSLTKQRMKKMSNIYESAANTLGIFNSPCLTKVELRVACKGISDRDALSKPDPCVILKMQSHGQWFEVARGPGTDVNPDPRLGRDERTEIQRCHNNISVLVCFHAADKDIPETGQFTKERGLIGLTVPRGWGSLTIMAEGKEEQVTSYMDGGRQRENDEDAKAETLDKTIRSCETYSLP

SEQ ID NO: 48433 - protein, 526 aa, Homo sapiens
  DOMAIN (89)..(268): BTB/POZ domain identified by PFam, accession name BTB, E- value=5.7e-17, PFam score of 69.8
MPDTVLSTGCVKPSHFRETDQSFVSGTRGAVRKTVGIKSRKGERKPNSITSKHSEALGWVWEKLLTSPGLEPMGPGTVCASPRSKTPGTEMLKELNQQRRAKAFTDLKIVVEGREFEVHQNVLASCSLYFKDLIQSSDTSGGWAEDGQDQDGKASTRTQGGEVSRASEVTGIRGHREESRSTGQCRESWGDEQLTIWSVQDSGQGGREKLELVLSNLQADVLELLLEFVYTGSLVIDSANAKTLLEAASKFQFHTFCKVCVSFLERQLTVSNCLGVLAMAEAMQCSELYHMAKAFALQIFPEVAAQEEILSISKDDFIAYVSNDSLNTKAEELVYETVIKWIKKDPATRTQEEDPGRTRSAPGSLGPPLLPNLARVVPGLPASQANPSSWVCDLCLLNPVFQLARELRISNFCNLLAFGLGPRERLRGTALFPQACDSNFSSIEISGPLETTHPSKPCAPGGNPALQAVTQDQELYRDKPSICMGRTGPALKPLQACPCGARCQPLGSEQHIPPGALCTQWQLHKE

SEQ ID NO: 48434 - protein, 431 aa, Homo sapiens
MISALVWNLNYALHGVPHSRQQASYSQSRAATIIELEVVIVNAWLKDKSYQIVDITHAIQKRVDNWRYVTWQIYDNIAATTSPSSGEGLQETRLKQDVYYLEKPRRKTEALIFGSHDNSTLEMTQRMSTYLDTLSAFTIRCLALTRHYCKLPDHRHPLLYANTRNHLFLRFFVTGFSSPHHEASCIQVAPEAACMMMFKAQEINMLDTNMITQLKAYLEKLTKPVELIATLDDSAKSAEIKELLAEIAELSDKVTFKEDNSLPVRKPSFLITNPGSNQGPRFAGSPLGHEFTSLVLALLWTGGHPSKEAQSLLEQIRHIDGDFEFETYYSLSCHNCPDVVQALNLMSVLNPRIKHTAIDGGTFQNEITDRNVMGVPAVFVNGKEFGQGRMTLTEIVAKIDTGAEKRAAEELNKTPKRPEDTCPQRRFLHNR

SEQ ID NO: 48435 - protein, 338 aa, Homo sapiens
  DOMAIN (186)..(202): PYRIDINE NUCLEOTIDE DISULPHIDE REDUCTASE CLASS-II SIGNATURE domain identified by eMATRIX, accession number PR00469B, p-value= 9.000e-14, raw score of 10.56
  misc_feature (1)...(338): Xaa = X or * as defined in Table 2
EAQSVTNHKRNSDCTFKEDNSLPVRKPSFLITNPGSNQGPRFAGSPLGHEFTSLVLALLWTGGHPSKEAQSLLEQIRHIDGDFEFETYYSLSCHNCPDVVQALNLMSVLNPRIKHTAIDGGTFQNEITDRNVMGVPAVFVNGKEFGQGRMTLTEIVAKIDTGAEKRAAEESARKGIRTGLMGERFGGQILDTVDIENYISVPKTEGQKLAGALKVHVDEYDVDVIDSTGTRSSAISGFFHTYDSNSPTARCAPTXQNCAPSPSGEYAPGEKAMRRTILVWRHCDYPLCNAGNFVSMISRATSNTIATMIIXGVCTDNTRLCLYALNCSGDILSRTSCD

SEQ ID NO: 48436 - protein, 520 aa, Homo sapiens
  DOMAIN (441)..(464): PYRIDINE NUCLEOTIDE DISULPHIDE REDUCTASE CLASS-II SIGNATURE domain identified by eMATRIX, accession number PR00469A, p-value= 1.265e-21, raw score of 15.46
  DOMAIN (442)..(485): Pyridine nucleotide-disulphide oxidoreducta domain identified by PFam, accession name pyr_redox, E-value=3.3e-10, PFam score of 37.2
MTSNSVHSWCRSGQQVPRDEEMTTFSKASQSACRAISMGWGLGRARHPDPCCPGEQGTEPEIDLVFCSPETREPSPKLVASGNEGRRRVPSLGKMPECWDGVSEGAAGIKPWCGLLIPWVVQSAAWLTLRLITWALLEDNREIKRACKSKSVLQGRAFGHQEHDIETPYGLLHVVIRGSPKGNRPAILTYHDVGLNRLGRARHPDPCCPGEQGTEPEIDLVFCSPETREPSPKLVASGNEGRVGLQEVGMSMSASCLLAPLPLPGGLEPLAAGGSPVTFKEDNSLPVRKPSFLITNPGSNQGPRFAGSPLGHEFTSLVLALLWTGGHPSKEAQSLLEQIRHIDGDFEFETYYSLSCHNCPDVVQALNLMSVLNPRIKHTAIDGGTFQNEITDRNVMGVPAVFVNGKEFGQGRMTLTEIVAKIDTGAEKRAAEELNKRDAYDVLIVGSGPAGAAAAIYSARKGIRTGLMGERFGGQILDTVDIENYISVPKTEGQKLAGALKVHVDEYDVDVIDSQSASKL

SEQ ID NO: 48437 - protein, 95 aa, Homo sapiens
  misc_feature (1)...(95): Xaa = X or * as defined in Table 2
PRRLNNEDHKRLMSWLHCLVPHHAKWLQRWQWQSAKVVXFAXIRAVNFVTAYRAIIYQQSRKQHRYLRSACHGRSIITVITQSPTKSSATKMPEN

SEQ ID NO: 48438 - protein, 47 aa, Homo sapiens
  misc_feature (1)...(47): Xaa = X or * as defined in Table 2
QADDDADNQSGDTDAAFGALIYCESDDLCXLPLPALKPLCVMWYQTM

SEQ ID NO: 48439 - protein, 161 aa, Homo sapiens
  DOMAIN (103)..(119): Calcium-binding EGF-like domain proteins pattern proteins domain identified by eMATRIX, accession number BL01187B, p-value= 8.971e-10, raw score of 12.04
MEGAAKILMSVQPSNTTASSYVLTPLAASHANVLPDLPNTIRPALITMNAPLTSICAGLRAFARTLLEASPVNASGDSHLIRPAPAVKTWTSVRVTTAASMAARTSLGGYRCSCPQGYLQHYQWNQCVDENECLSAHICGGASCHNTLGKLQVHVSRRLPV

SEQ ID NO: 48440 - protein, 644 aa, Homo sapiens
  DOMAIN (508)..(547): Phosphorylase pyridoxal-phosphate attachment site proteins domain identified by eMATRIX, accession number BL00102B, p-value= 1.000e-40, raw score of 12.29
  DOMAIN (493)..(642): Carbohydrate phosphorylases domain identified by PFam, accession name phosphorylase, E-value=6.3e-115, PFam score of 373.2
MGFTPCFLWGPQEVFIRLSDKSGLFAPTQKGRIWALKKRGLYRLIILMSVREILSYAEVVFAITQREVTAVNARLAISCPPTISRVSILMSVQPSNTTASSYVLTPLAASHANVLPDLPNTIRPALITMNAPLTSICAGLRAFARTLLEASPVNASGDSHLIRPAPAVKATSIELAARLDISREEVLNELWELKKAGFVDKSAYTWRVADNNVQQEQPAQAELPEEITTATVAKISECDLTATIEQRGPQTADELATLFGTTSRKVASTLAMAISKGRLIRVNQGGKFRYCIPGDNLPAEPKAASKLQTWINIKEDEHNLFVYTGTQSLPGLIPRRQGPRNYVELDASIPIYAELRSHLSEYKCPKYPLNNEHMGPSNCRKTSSGLPLIYIMRIPPFTYSSPTLSVEALKHSIAYKLMFTIGKDPVVANKHEWLNATLFAVRDRLVERWLRSNRAQLSQETRQVYYLSMEFLIGRTLSNAMLSLGIYEDVQGALEAMGLNLEELIDEENDPGLGNGGLGRLAACFLDSLATLGLPGRGYGIRYDYGMFKQNIVNGSQKESPDYWLEYGNPGEFKRHNTRYKVRFGGPIQQEGKKTRWIETEEILGVAYDQIIPGYDTDATNTLRLWSAQASSEINLGKFNQGVF

SEQ ID NO: 48441 - protein, 861 aa, Homo sapiens
  DOMAIN (396)..(438): Bacterial regulatory proteins asnC family proteins. domain identified by eMATRIX, accession number BL00519B, p-value=5.500e- 29, raw score of 26.49
  DOMAIN (391)..(493): AsnC family domain identified by PFam, accession name ASNC_trans_reg, E-value=2.3e-22, PFam score of 87.8
MLPQHEYVDIARRHGLDPAQIKTMSSTLVTMTCDDNVYREGAMSIGVNQTTLIVINRNAGRIVSTARQQCAASSYAALPETNVQAAELLAEMAISSAQRRMRAAKKVVRKKLTSGPALPGKLADCTAQDLNRTELFLWKGKRSFHQGPAEEEDVERLVQDAGIIRHRGKIQAIIGNARAYLQMEQNGEPFVDFVWSFVNHQPQIMVRSAVVAGIAQAALPQSVVAWEYLVEDYDRIRNDIEAVLPEFADYNQRIRHPGGFHLINAAAERRWMTPSGKANFITSKGLLEDPSSAFNSKLVMATVRSHDQYNTTIYGMDDRYRGVFGQRDGYRDWAGALNCEEIAQLAEDCGNLFAVTVFRCPAGANLQGNRNVHCIDDLGKDRFNDIRALAEAVNLTTTPCWKRLKRLEDDGILIGKVALLDPEKIGLGLTAFVLIKTQHHSSEWYCRFVTVVTEMPEVLGFWRNWPQPFMGGQWQNDTPTLRIPYYRPLEPLQPGFLPGRAEQHLAGQIFSGLTRFDNNTQRPIGDLAHHWETSTDGLRWDFYLRSTLHWHNGDAVKASHLHQRLLMLLQLPALDQLFISVKRIEVTHPQCLTFFLHRPDYWLAHRLASYCSHLAHPQFPLIGTGPFRLTQFTAELFGYDMDAIVGGAHNGAADAMRHCYLMCRMTKTFGSTIADVMNCFDRAYDQQPDQNRSGYEPDGFSCPTCCGNVPAYDVPGNPKRWSRKRSHGHPGAKVANLVPKTTFIDGVDQTSFFLGTNGQSNRKAEHYFLNGKLAAVRMDEFKYHVLIQQPYAYTQSGYQGGFTGTVMQTAGSSVFNLYTDPQESDSIGVRHIPMGVPLQTEMHAYMEILKKYPPRAQIKSD

SEQ ID NO: 48442 - protein, 165 aa, Homo sapiens
  DOMAIN (94)..(136): Bacterial regulatory proteins asnC family proteins. domain identified by eMATRIX, accession number BL00519B, p-value=5.500e- 29, raw score of 26.49
  DOMAIN (89)..(165): AsnC family domain identified by PFam, accession name ASNC_trans_reg, E-value=1.9e-19, PFam score of 78.1
MSLHMVTALIGNSVKNEEVLSFSRMSHKWNHTVSNLLRLASFSMCENRQVVGAFVTDYFDDARQNRNHNNPDDQQLKRYCEDSVQALAEAVNLTTTPCWKRLKRLEDDGILIGKVALLDPEKIGLGLTAFVLIKTQHHSSEWYCRFVTVVTEMPEVGCHVFSRAH

SEQ ID NO: 48443 - protein, 255 aa, Homo sapiens
  DOMAIN (118)..(251): Ring hydroxylating beta subunit domain identified by PFam, accession name Ring_hydroxyl_B, E-value=7.3e-46, PFam score of 165.8
  misc_feature (1)...(255): Xaa = X or * as defined in Table 2
KQRHSCFWSCWFSRAGXLGELVXNPEIAXRPPRPQQQTVSGNGAWSGKAPRRRHSWHYYTISFQKLPLVECTNAGPIFXVAKAGRKCSIKPPLTSRSYITDXPVSLSRSQLTGRAGNFVTGWQQLDEEIRYTMRTTVNAQTRDRRKGVQPPTTWIFNDTKDQLERRIARLETGMAWAEEPPSRTRHLISNCQISETDIPNVFAVRVNYLLYRAQKERDETFYVGTRFDKVRRLEDDTGASWNGNRTGSAGIISIT

SEQ ID NO: 48444 - protein, 203 aa, Homo sapiens
  misc_feature (1)...(203): Xaa = X or * as defined in Table 2
ARTRVPHFPGHETAGGAAAHPHLSLLGQDPGNQTQLPGGRGGIPGGRGGGRGGGGGGDDGRRRALRRQQVPVLCVQRAGPAMDAAAPRHSSPDRERPKDQEVLHRLPGHASHSPHLGRHAGQPAGPAGLWQAPGLRHHLHAGIQPPEVTNTTLTALTXTRRCPAFSSGTVKPLIFIWNLAAGPPLLRKGAASIWICSCSIFQR

SEQ ID NO: 48445 - protein, 710 aa, Homo sapiens
  DOMAIN (419)..(654): Mur ligase family domain identified by PFam, accession name Mur_ligase, E-value=4.5e-59, PFam score of 209.7
MVEAIRASGSQLVTLAMKRVDLRQHNDAILEPLIAAGVTLLPNTSGAKTAEEAIFAAHLAREALGTNWLKLEIHPDARWLLPDPIETLKAAETLVQQGFVVLPYCGADPVLCKRLEEVGCAAVMPLGAPIGSNQGLETRAMLEIIIQQATVPVVVDAGIGVPSHAAQAHGNGGRRGVSEYAIGTDTDPAVVATVINVVSFDLFCIAPRGTLAVSDVQYLLTFAVMLTVGLVIGNLTAGVRYQARVARYREQRTRHLYEMSKALAVGRSPQDIAATSEQFIASTFHARSQVLLPDDNGKLQPLTHPQGMTPWDDAIAQWSFDKGLPAGAGTDTLPGVPYQILPLKSGEKTYGLVVVEPGNLRQLMIPEQQRLLETFTLLVANALERLTLTASEEQARMASEREQIRTACCGAFAYYAGPATLPLAGVSGVRPRATGYPCGQEPTLANSANTTGSAVDVQHELAGLVDQGATFCAMEVSSHGLVQHRVAALKFAASVFTNLSRDHLDYHGDMEHYEAAKWLLYSEHHCGQAIINADDEVGRRWLAKLPDAVAVSMEDHINPNCHGRWLKATEVNYHDSGATIRFSSSWGDGEIESHLMGAFNVSNLLLALATLLALGYPLADLLKTAARLQPVCGRMEVFTAPGKPTVVVDYAHTPDALEKALQAARLHCAGKLWCVFGCGGDRDKGKRPLMGAIAEELLVHYLIWRVWATR

SEQ ID NO: 48446 - protein, 144 aa, Homo sapiens
  misc_feature (1)...(144): Xaa = X or * as defined in Table 2
EMTLDSRVAAAGDLFVAVVGHQADGRRYIPQAIAQGVAAIIAEAKDEATDGEIREMHGVPVIYLSQLNERLSALAGRFYHEPSDNLRLVGVTGTNGKTTTTQLLAQWSQLLGRNQRGNGHRWXRPAGESDPDRKYNRFGSRCSA

SEQ ID NO: 48447 - protein, 157 aa, Homo sapiens
  misc_feature (1)...(157): Xaa = X or * as defined in Table 2
SYITALGQFSRSGIQLLDRLGNFGTGWPNFDRKRFGSTMRTTVNGQTRGPPQRRPAADNLDFXXHQRPAGAANRPSGNGHGLGRRAAVTHPSLNQQLPDKRNRHPKRICCAGKLSALSGTKRSAMKHSMLERVSTKFAVWKMTTGACWNGISSWIKR

SEQ ID NO: 48448 - protein, 1193 aa, Homo sapiens
  DOMAIN (519)..(570): D-alanine--D-alanine ligase proteins domain identified by eMATRIX, accession number BL00843B, p-value=1.000e-40, raw score of 26.75
  DOMAIN (486)..(750): D-ala D-ala ligase domain identified by PFam, accession name Dala_Dala_ligas, E-value=3.1e-137, PFam score of 469.3
  misc_feature (1)...(1193): Xaa = X or * as defined in Table 2
MTTHYGQITHLQGRRIFPASGLVMYGEYLPQAVCAGQQWSMKLKVRAVHGQLNDGGFDSQRYAIAQHQPLTGRFLQANISVQYSFNARKLISAKNVNVIQRGPEITIEKQMTMPHQGEPFADGHGQVMHSNRDWEDSYRQRWQFDKIVRSTHGVNCTGSCSWKIYVKNGLVTWEIQQTDYPRTRPDLPNHEPRGCPRGASYSWYLYSANRLKYPLIRKRLIELWREALKQHSDPVLAWASIMNDPQKCLSYKQVRGRGGFIRSNWQELNQLIAAANVWTIKTYGPDRVAGFSPIPAMSMVSYAAGTRYLSLLGGTCLSFYDWYCDLPPASPMTWGEQTDVPESADWYNSSYIIAWGSNVPQTRTPDAHFFTEVRYKGTKTIAITPDYSEVAKLCDQWLAPKQGTDSALAMAMGHVILKEFHLDNPSDYFINYCRRYSDMPMLVMLEPRDDGSYVPGRMIRASDLVDGLGESNNPQWKTVAVIPEXVLAGLREGGIDAYPVDPKEVDVTQLKSMGFQKVFIALHGRGGEDGTLQGMLELMGLPYTGSGVMASALSMDKLRSKLLWQGAGLPVAPWVALTRAEFEKGLSDKQLAEISALGLPVIVKPSREGSSVGMSKVVAENALQDALRLAFQHDEEVLIEKWLSGPEFTVAILGEEILPSIRIQPSGTFYDYEAKYLSDETQYFCPAGLEASQEANLQALVLKAWTTLGCKGWGRIDVMLDSDGQFYLLEANTSPGMTSHSLVPMAARQAAALNTRNSEEEVLLAAIMDDKSQAVKAHGKATARGAQASRSDNTLGSTGVLFKALDFGIDVSIQAATKYLVGHSDAMIGTAVCNARCWEQLRDDTLHLVGKDRRRKFQCRHTVLYQPVGGNFHCAKRRALIHQPRQLMLNIDCRTGCIFCRDHFPQQAVTNGAHYRADFAKQLAPLRQQLGSRGFAVGARYAHETYIVRGFMVKAARQCRLTLVELAEIDDRHHLACRAVIFLGKFITNLTRFKIQFHEQFASDQYHALFSHASAVQVLGAKDDGSDKRLGDGQTARPVWETAKDALQFGQDGHGSGFFFTEKPDANVWVDGAVSSYYRETYAEAEQRLGEVRALRLAGHNNIFPTLSWLNGTATLRVWHPRGPDQVEVWAFCITDKAASDEVKAAFENSATRAFGPAGFLEQDDSENWCEIQKLLIGHRARNSKLCLEMGLX

SEQ ID NO: 48449 - protein, 287 aa, Homo sapiens
  misc_feature (1)...(287): Xaa = X or * as defined in Table 2
YHSINAASACSALHPVAFLTILTCRTCSSSLVATTSTMRLPNTLPDLIISPVESILSTSFCAVPAFIREEPVTTSAPTIGVMANSAVVETALPGLQEIPTVRQPSWRAYSSPAITYGVRPLAAMPSHHILCRXINIFQIINTAFPAIFRAFHRVLNGIFSASNQTNHQTRFHAVCGRTFGDVGWVAKSYQVAEERGSITEHQVQGHQSDDTEHFHGGEIERQQQHYHRQRGDPVGEIGEPELSISRDRHHVCHTGYNPAEPVSPAGEISNGTANGNKLNMSVCEIAP

SEQ ID NO: 48450 - protein, 487 aa, Homo sapiens
  DOMAIN (56)..(91): Glucokinase regulatory protein family proteins domain identified by eMATRIX, accession number BL01272B, p-value=7.840e- 29, raw score of 19.61
  DOMAIN (52)..(198): short chain dehydrogenase domain identified by PFam, accession name adh_short, E-value=2.4e-18, PFam score of 74.4
SAYCRISPRRSDVIHAQVSGGGRLIYLGAGTSGRLGILDASECPPTYGVKPGLVVGLIAGGEYAIQHAVEGAEDSREGGVNDLKNINLTAQDVVVGIAASGRTPFLDMSDDDRDFHIDINIKGVWNVTKAVLPEMIARKDGRIVMMSSVTGDMVADPGETAYALTKAAIVGLTKSLAVEYAQSGIRVNAICPGYVRTPWRKALPASRTRKIQSRRDQWRLSLPRDDMELAALSLLVCIGQIIAPAKDDVEFRHRIMNPLTEDEFQQLIAPWIDMFYLNHAEHPFMQTKGVKANDVTPMEKLLAGANQAPGFGGGFKSGLRGGTPVTTFVRGIDLRSTVLLNVLTLPRLQKQFPNESHTENQPTWIKPIKSNESIPASSIGFVRGLFWQPAHIELCDPIGIGKCSCCGQESNLRYTGFLKEKFTFTVNGLWPHPHSPCLVTVKKGEVEEKFLAFTTSAPSWTQISRVVVDKIIQNENGNRVAAVVMAP

SEQ ID NO: 48451 - protein, 324 aa, Homo sapiens
  DOMAIN (17)..(247): Formyl transferase domain identified by PFam, accession name formyl_transf, E-value=1.3e-06, PFam score of 27.0
  misc_feature (1)...(324): Xaa = X or * as defined in Table 2
GGXCRNWCDHYANGCRDTSGTLYDKLAELGPQGLSPRXNNWQTARRNQSSGRNSCHLRREVEXRRLDKALRRIRQFSAPDEGAKCPWPGIIDCSNHFARLRCQYGRFLEVTSAGDEKPYPLYDHHVGLVVEQLRCIITAKVRTRHFYYVLKSIHPAVAGLPALRDCGELFNSVYCRKPATGPELQADVMVVVAYGLILRKQCWRCRVLAVSTFMFTAATLARCCTNPTLTRAGDAETGVTIMQMDVEIPVVRCTTSWQSLAHKAYHHVETTGRRHGETRVQDETLVTYAEKLSKEERVLTGHFRQHSLNAALRFQSMANELAGN

SEQ ID NO: 48452 - protein, 88 aa, Homo sapiens
  DOMAIN (4)..(32): Zinc-containing alcohol dehydrogenases proteins domain identified by eMATRIX, accession number BL00059B, p-value=4.951e- 15, raw score of 16.08
  misc_feature (1)...(88): Xaa = X or * as defined in Table 2
SQYPLVAGHEVIGRVVALGSAAQDKGLQVGQRVGIGWTARSCGQLRRLYXRXSDQLRARCGADDYESRWLCREVACGLAMGDSTARKY

SEQ ID NO: 48453 - protein, 126 aa, Homo sapiens
LRRALFARRSSSAWQAAAVNSTSVEEFSAVSQESCNTPMIKPTATTCMAISFEIPNILQASGISSRDPPATPDAPQAHREATTLNSSAVGRSTGIPSVLTAASVNTVIVIAAPAILMVAPSGIETE

SEQ ID NO: 48454 - protein, 89 aa, Homo sapiens
VMRFAIVVTGPAYGTQQASSAFQFAQALIADGHELSSVFFYREGVYNANQLTSPASDEFDLVRASATTECATWCGAEYLRSGSITPWRC

SEQ ID NO: 48455 - protein, 884 aa, Homo sapiens
  DOMAIN (848)..(872): FRUCTOSE-16-BISPHOSPHATASE SIGNATURE domain identified by eMATRIX, accession number PR00115D, p-value=7.250e-12, raw score of 14.23
  DOMAIN (308)..(452): Formyl transferase domain identified by PFam, accession name formyl_transf, E-value=7.8e-68, PFam score of 238.8
MKMVSRITAIGLAGVAICYLGLSGYVWYHDNKRSKQADVQASAVSENNKCDCGKMEEYEKFCEKSLARIQEASLSTESCLRAQSESISLIRFHGVGSICGTRRIGVHTIRATYTVRRMAPEGNQSGEDRANTGAQGPTGPQETESAQRSESYTVRGQSAKSAKRVGPHTVDKIRVESCSPFIPKKQTEEPTSKARQRTARATEAKKQQRGAYSKPRTCRAAATTNPCARTSPCLNPTGTGASAQGKPSRPMPEPCSTYPLGTKSTSSTEQQPIGAELMAHHSWGQSSVQWQSQTRLANRQQDLRPERPAGRGKKLMPSPVKVLAEEKGLPVFQPVSLRPQENQQLVAELQADVMVVVAYGLILPKAVLEMPRLGCINVHGSLLPRWRGAAPIQRSLWAGDAETGVTIMQMDVGLDTGDMLYKLSCPITAEDTSGTLYDKLAELGPQGLITTLKQLADGTAKPEVQDETLVTYAEKLSKEEARIDWSLSAAQLERCIRAFNPWPMSWLEIEGQPVDDLHDAHFLVSIGIDRRHGDEDIHRIVVIVVELPRLFQRYQRETGFLNALFRTPPDWPALTNLDIELDFINDGLWMKTDGVNLGGVRASNLTAVIPDYSKEKLLIDADIKGPGKAVGPYFDETPLKDSLRATLQELQLDGDVNARLHLDIPLNGELVTAKGEVTLRNNSLFIKPLDSTLKNLSGKFSFINSDLQSEPLTASWFNQPLNVDFSTKEGAKAYQRVIGMNKRLFAPRFSPRGAETTKHNVDGIGDNALRLTEIFFPRLFEARNSQVGNGETNQTRFRLCAAPGGTFIADFTAGTGRRARPRRNRRRVVVSFDFHQNMRRFLMEIVAARFVVSKVAAHFRTFHYGGVISYKQRERDLAWFRKYF

SEQ ID NO: 48456 - protein, 307 aa, Homo sapiens
  DOMAIN (225)..(272): AAA-protein family proteins domain identified by eMATRIX, accession number BL00674D, p-value=1.000e-40, raw score of 23.41
  DOMAIN (135)..(307): ATPases associated with various cellular act domain identified by PFam, accession name AAA, E-value=1.3e-82, PFam score of 287.9
CLFRQVSAPHITRVCITRIDPTIETIRLDNSKNVKVVGEPPEEPSLLASIFISWFPMLLLIGVWIFFMRQMQGGGGKGAMSFGKSKARMLTEDQIKTTFADVAGCDEAKEEVAELVEYLREPSRFQKLGGKIPKGVLMVGPPGTGKTLLAKAIAGEAKVPFFTISGSDFVEMFGGVGASRVRDMFEQAKKAAPCIIFIDEIDAVGRQRGAGLGGGHDEREQTLNQMLVEMDGFEGNEGIIVIAATNRPDVLDPALLRPGRFDRQVVVGLPDVRGREQILKVHMRRVPLAPDIDAAIIARGTPGFSGA

SEQ ID NO: 48457 - protein, 116 aa, Homo sapiens
  DOMAIN (52)..(84): Bacterial-type phytoene dehydrogenase proteins domain identified by eMATRIX, accession number BL00982A, p-value=7.143e- 16, raw score of 18.41
  DOMAIN (51)..(86): Pyridine nucleotide-disulphide oxidoreducta domain identified by PFam, accession name pyr_redox, E-value=0.0059, PFam score of 12.7
LQRRDMTVPFGGYKQSGNGRTNPCMPSSYYAASANKYAPFDTLNESITCDVCVVGGGYTGLSSALHLAEAGFDVVVLEASRIGELLFSVGLRCGLVSWCAVGLFGSCWGASFVSWL

SEQ ID NO: 48458 - protein, 852 aa, Homo sapiens
  DOMAIN (30)..(76): p53 tumor antigen proteins domain identified by eMATRIX, accession number BL00348D, p-value=1.000e-40, raw score of 12.93
  DOMAIN (1)..(217): P53 domain identified by PFam, accession name P53, E-value= 4.9e-167, PFam score of 568.3
  misc_feature (1)...(852): Xaa = X or * as defined in Table 2
MAIYKQSQHMTEVVRRCPHHERCSDSDGLAPPQHLIRVEGNLRVEYLDDRNTFRHSVVVPYEPPEVGSDCTTIHYNYMCNSSCMGGMNRRPILTIITLEDSSGNLLGRNSFEVRVCACPGRDRRTEEENLRKKGEPHHELPPGSTKRALPNNTSSSPQPKKKPLDGEYFTLQIRGRERFEMFRELNEALELKDAQAGKEPGGSRAHSSHLKSKKGQSRLGTRFLCQPAVTVIPVKIVRVTGDTVIRPHAEGAVRVQLRVGQAVTCRVCGIRDADIQIRCGGVNAGQPAGGAVAVTPGLARAADADEFAVVVPGQPFHGGQAVRYTAVRQPLRVGRMSGLMLAKTCFRLQVMHRLTLTVFSQKVFTESIEVVEALKVNLMRVFLRRMDLRQHRKMIMIDNYIAYTGSMNMVDPRYFLRDALPHCPNPLTGPTFAVLEKLGYPHTFVSTDFNTVALDVKTFGIKANDDKAKLKALGEIAHACVDATIIYCKSPTVAGLVARELIKLGHGTPTENPHVYWSPLETVLACILARYRGHCSNTLATNSMLENCAFCSAPPRSLKESTLSLNTVVIYDNRDGTRSIDKFNRFCIHAFPKIIRNAIYEVEQHTXRACRYQXDVGWFNIYQPGISLAASKHCSTSSRXRWIXLDWICASASLLDEATAAAEAMAMAKRVSKLKNANRFFVASDVHPQTLDLMSYFTSNSPLPGVFYCKSGATRLSSVISRSAREGASGTHGARRSRKLRSATCPLALINHKFIFIARCQRIRLDVHGTQYAAHDGTKDRRGNGAAVVFTRLRIVDNNNQREARLTRRRNACGISNIFIDVATVRPDLFRGTGFNGDTIAFNRRLHAAADR

SEQ ID NO: 48459 - protein, 44 aa, Homo sapiens
IGGQKVYALTQGRIFTGHEFLDDHAVVIADGLIKSVCPVAELPP

SEQ ID NO: 48460 - protein, 419 aa, Homo sapiens
  DOMAIN (13)..(33): Phospholipase D Active site proteins motifs. domain identified by eMATRIX, accession number PF00614B, p-value=4.333e- 15, raw score of 14.45
  DOMAIN (8)..(35): Phospholipase D. Active site motif domain identified by PFam, accession name PLDc, E-value=2e-06, PFam score of 34.8
MRVFLRRMDLRQHRKMIMIDNYIAYTGSMNMVDPRYFKQDAGVGQWIDLMARMEGPIATAMGIIYSCDWEIETGKRILPWTISCLQLHPKAIMVCDEPSTMELKVKTLRYFNELEAENIKGQYFLKSGVRMYALTQGRIFTGHEFLDDHAVVIADGLIKSVCPVAELPPEIEQRSLNGAILSPGFIDVQLNGCGGVQFNDTAEAVSVETLEIMQKANEKSGCTNYLPTLITTSDELMKQGVRVMREYLAKHPNQALGLHLEGPWLNLVKKGTHNPNFVRKPDAALVDFLCENADVITKGLKGRGLKHYPIRDAGLGPSNQARSWSGQGGFRDVVGPLALAARGGQGVVLTAVCRPLLKAQLLWPCDLQVLGDSQLSRQDPRKPRNGGIVTYSWTKYLGEIVTNILAQLIGAMMIPGISQ

SEQ ID NO: 48461 - protein, 114 aa, Homo sapiens
  DOMAIN (12)..(41): LACY PROTON/SUGAR SYMPORTER SIGNATURE domain identified by eMATRIX, accession number PR00174E, p-value=2.161e-30, raw score of 13.61
ANHSAFSLKLALELFRQPKLWFLSLYVIGVSCTYDVFDQQFANFFTSFFATGEQGTSSSSYLNVLWNDNDGGCKGACDRVPHQNVTALNLPDQCINGAGVPGNLAVVTCTGAVP

SEQ ID NO: 48462 - protein, 72 aa, Homo sapiens
LYTIGSHGPTYYNRYPPQFRKFTEGTLYYLTVSVDPKSRQVQQKPLLRIAQGQHQRIRTIPLQRLGDADNAV

SEQ ID NO: 48463 - protein, 265 aa, Homo sapiens
  DOMAIN (167)..(197): Sulfatases proteins domain identified by eMATRIX, accession number BL00523E, p-value=4.273e-09, raw score of 19.27
DTLHLVIFPVQSSWDVEKTSFSQGQSCDSAGEGSERIHQDWESGDELSSSSTEQIRSLKEWNDNDGGCKGACDRVPHQNVTALNLRDQCINGECYDEVLFHGLEEYINNLQGDGVIVLHTIGSHGPTYYNRYPPQFRKFTPTCDTNEIQTCTKEQLVNTYDNTLVYVDYIVDKAINLLKEHQDKFTTSLVYLSDHGESLGENGIYLHGLPYAIAPDSQKQVPMLLWLSEDYQKRYQVDQNCLQKQAQTQKDCVLLIFAKQPFDNR

SEQ ID NO: 48464 - protein, 248 aa, Homo sapiens
  DOMAIN (168)..(211): Chaperonins clpA/B proteins domain identified by eMATRIX, accession number BL00870D, p-value=5.966e-23, raw score of 20.10
MVLLELHISQTRTHSSPGWHSVETGSPMMKEERKGGGEGETLVDRADVIWPKISPKACIPHIHHPSLLLQLNQATRSFANMMYIPTLSPSDHTPKRAPTACLLIIKQVMKLLMVLIIWAVDPQYRLNAMIATTVVLLLLALIGGIWTLRKSLKNTDEEERYFISEKLSQNDGRQRVGFAAATLSHRYIADRQLPDKAIDLIDEAASSIRMQIDSKPEELDRLDRRIIQLKLEQQALMKESDEASEKHG

SEQ ID NO: 48465 - protein, 244 aa, Homo sapiens
  DOMAIN (86)..(98): GLYCOPROTEIN L PRECURSOR SIGNAL TRANSMEMBRANE domain identified by eMATRIX, accession number PD01640A, p-value=3.388e- 09, raw score of 7.28
  misc_feature (1)...(244): Xaa = X or * as defined in Table 2
GVEPSPPTNPPPATAIPRATCVAAARAASPSPSXSHQPHPPPLAYDRCSTXPTPTTTAGQDHDHGRRWRSAPAPRSDHLSDMLQERSMSLLPLILSSTRSGSNPLRSTFLSRSRSISKNCSAEVXSNNSAGVGTISTSRSTYDINRADTQVRRAVNNYDIIVMSNSFNGQSEHQVWIGGQFILHQICPLTQFQYGAEPDRKEXCQAPASKWALLHKXHRPFPQDRKAGECLLHEYEDLYPSVIH

SEQ ID NO: 48466 - protein, 101 aa, Homo sapiens
  misc_feature (1)...(101): Xaa = X or * as defined in Table 2
HPARHKFVKGSSEHRKSPVKPPPIPSHXPPXPENTNPMRPLAPTDPVTNLRSLMTGRQRFTPYNNVSRSDPSTTARSSSADRVNASEYPTSSEETSGRSSR

SEQ ID NO: 48467 - protein, 240 aa, Homo sapiens
MVMAMRHGQLPRTLHVESPSPEVDWSAGTVQLLTENTPWPRSGRVRRVGVSSFGISGTNAHVILEQPPGVPSQSAGPGSGSVVDVPVVPWMVSGKTPEALSAQATALMTYLDERPDVSSLDVGYSLALTRSALDERAVVLGSDVNVVVRWPLQNADGTVAEYNGYHVVFALAGSPKDADDTSIYMFYQKVGDNSIDSWKNAGRVFKDSDKFDANDPILKDQTQEWSGSATFTSDGKIRLF

SEQ ID NO: 48468 - protein, 427 aa, Homo sapiens
  DOMAIN (320)..(349): kw REPLICATION REPB REPA INITIATION domain identified by eMATRIX, accession number DM00653A, p-value=7.207e-27, raw score of 20.40
  DOMAIN (304)..(416): Initiator RepB protein domain identified by PFam, accession name RepB_protein, E-value=1.1e-07, PFam score of 29.7
  misc_feature (1)...(427): Xaa = X or * as defined in Table 2
MVMAMRHGQLPRTLHVESPSPEVDWSAGTVQLLTENTPWPRSGRVRRVGVSSFGISGTNAHVILEQPPGVPSQSAGPGSGSVVDVPVVPWMVSGKTPEALSAQATALMTYLDERPDVSSLDVGYSLALTRSALDERAVVLGSDRETFVCGVKALSAGHEASXCDNLKTCHTSHGSVMAETAVINHKKRKNSPRIVQSNDLTEAAYSLSRDQKRMLYLFVDQIRKSDGTLQEHDGICEIHVAKYAEIFGLTSAEASKDIRQALKSFAGKEVVFYRPEEDAGDEKGYESFPWFIKRAHSPSRGLYSVHINPYLIPFFIGLQNRFTQFRLSETKEITNPYAMRLYESLCQYRKPDGSGIVSLKIDWIIERYQLPQSYQRMPDFRRRFLQVCVNEINSRTPMRLSYIEKKKGRQTTHIVFSFRDITSMTTG

SEQ ID NO: 48469 - protein, 591 aa, Homo sapiens
  DOMAIN (540)..(567): C1q domain proteins domain identified by eMATRIX, accession number BL01113A, p-value=6.170e-10, raw score of 17.99
  misc_feature (1)...(591): Xaa = X or * as defined in Table 2
MGKKQSRKTGNSKNQSASPPPKERSSSPAMEQSWTDNDFDELREEGFRRSNYSSYXEEIRTXWQTSLKALKRNXMMMILLASPSRTPISGPNGDPAGPKFVKAAATTGKARQRFHPATTTFHGRTPAPPLAHPAPTVSTPASTQHPARRHQVARPDRSSTPLPARIALRVFCPTPSTAPPEHPRQNPNPAPQTDSALPGADDVRVSTTDPERRHPHPTNTTTPGPGRVLRKELNRPRRPIHHRRRRFHVQRAWQLPVPHRHHHLDHTSHTRRRLRMTDVRLDRPQPQRPPRITITTVGGDQRLRLDRSYQPESPCDGDLRQLQMAGRAPCSPLSMLVLEKCDNLKTCHTSHGSVMAETAVINHKKRKNSPRIVQSNDLTEAAYSLSRDQKRMLYLFVDQIRKSDGTLQEHDGICEIHVAKYAEIFGLTSAEASKDIRQALKSFAGKEVVFYRPEEDAGDEKQNAKNEHGTTSSLPTQFKTDHMESQKDHPHKEETSPKVPHLVQESQKDHLHKEATNLKVPHPHPGKPQGPPPQEGNKPQRPPPPGRPQGPPPPGGNPQQPLPPPAGKPQGPPPPPQGGRPHRPPQGQPPQ

SEQ ID NO: 48470 - protein, 211 aa, Homo sapiens
  misc_feature (1)...(211): Xaa = X or * as defined in Table 2
RLCCLEISSTGYPKSSISSSKYPQIPRAGAQCSQAVXSGSNPLRSTFLSRSRSISKNCSAEVXSNNSAGVGTISTSGSTYDINRADTQVRRAVNNYDIIVMCNSFNGQSEHQVWIGGQFILHQICPLTQFQYGAEPDRKEXCQAPASKWALLHKXHRPFPQDRKAGECLLHEYEDLVPIRDTLRLFPGGRYLPRAKHVAPSEPDPTHHAYD

SEQ ID NO: 48471 - protein, 69 aa, Homo sapiens
  misc_feature (1)...(69): Xaa = X or * as defined in Table 2
DRVFDSGSKWRSEQDWAAAKAVGQCSENGDWRCCGNGRYPARGPAVPAXPSLCLHHPRXRCTCCMPVYR

SEQ ID NO: 48472 - protein, 83 aa, Homo sapiens
TVPNPKHHRFVHPARTVSPPASTQHPARRHQVARPDRSSTPLPARIALRVFCPTPSTAPPEHPRQNPNPAPQTDSALPGAVRG

SEQ ID NO: 48473 - protein, 149 aa, Homo sapiens
  misc_feature (1)...(149): Xaa = X or * as defined in Table 2
TSVELMDLCPIRLCRTFSGIPAYSMCIAXEWRNVCGVTGTENVTPSAAAAATASPIQVLTVLSVTSQIRAFSVLPVRRLRRSMSLSRINTCRTEYPRCAVVCLLWKDAVSCLSTTFCARLCGQNTWLPRPCRHVNRAASDASVSLSTVT

SEQ ID NO: 48474 - protein, 370 aa, Homo sapiens; identical to SEQ ID NO: 35371
  DOMAIN (303)..(317): Phage integrase family domain identified by eMATRIX, accession number PF00589B, p-value=1.621e-11, raw score of 16.17
  DOMAIN (167)..(349): "Phage" integrase family domain identified by PFam, accession name Phage_integrase, E-value=9.3e-09, PFam score of 42.5

SEQ ID NO: 48475 - protein, 317 aa, Homo sapiens
  DOMAIN (250)..(264): Phage integrase family domain identified by eMATRIX, accession number PF00589B, p-value=1.621e-11, raw score of 16.17
  DOMAIN (62)..(296): "Phage" integrase family domain identified by PFam, accession name Phage_integrase, E-value=1.2e-12, PFam score of 55.5
MEAQDTQACMEAQELYLLWHWAFRQNDCHSVRVQNRGEAEMAEMTEVEFRMWINTIFTDLKEHIVTQCRKAKNHKILQEVTDKIASIEKNVMNLMELKNTIQEFHNAITSINSRKDQVEERISEFEDCVSEIRQTDKNREKRMKRNEQNLQEIWDCVKRLDLQLIGVPERDVGPGLLDQQGHQDLFILRSDLPSQVFIRDKLMERRNRRTGRTEKARIWEVTDRTVRTWIGEAVAAAAADGVTFSVPVTPHTFRHSYAMHMLYAGIPLKVLQSLMGHKSISSTEVYTKVFALDVAARHRVQFAMPESDAVAMLKQLS

SEQ ID NO: 48476 - protein, 170 aa, Homo sapiens
  DOMAIN (6)..(46): kw TRANSCRIPTASE REVERSE II ORF2 domain identified by eMATRIX, accession number DM01354H, p-value=8.765e-24, raw score of 18.00
  misc_feature (1)...(170): Xaa = X or * as defined in Table 2
MPNHKAILIKFKKTEIIPITLLDHSTIKIEINIKKIAQNHTITWKLNNLLLNYFWPLTVSLCEMCKDFYSLGIEFSRFPLQELQNKDCALEKHSHWAQMWPXYPCPAKHWWSCRREHVLVVNDCSTSXNSYWHFSDXLRAMKRRNEQCKRXAIRSLSRSLPARQDLKLLS

SEQ ID NO: 48477 - protein, 92 aa, Homo sapiens
  DOMAIN (36)..(74): Lysyl oxidase  copper-binding region proteins domain identified by eMATRIX, accession number BL00926B, p-value=9.321e- 09, raw score of 13.84
GPISVNAPAPNRLARLERGVEDLRGAGRGLGPSEAWQAVRGPRPGRRKQARRGRPVRRPSVRGEPEGGPRPSPPALARSRCLLGLGAHSGRT

SEQ ID NO: 48478 - protein, 85 aa, Homo sapiens
GWGPAICFLTRPPGVQPNLRTTVPLHRALDQMSNAVGPGLPGINRDTRIYLFCEVIFRHRYLFAISSWSGVTVAQEGQRKRGSGK

SEQ ID NO: 48479 - protein, 533 aa, Homo sapiens; identical to SEQ ID NO: 43575
  DOMAIN (466)..(480): Phage integrase family domain identified by eMATRIX, accession number PF00589B, p-value=1.621e-11, raw score of 16.17
  DOMAIN (260)..(512): "Phage" integrase family domain identified by PFam, accession name Phage_integrase, E-value=9e-10, PFam score of 45.9

SEQ ID NO: 48480 - protein, 191 aa, Homo sapiens
  misc_feature (1)...(191): Xaa = X or * as defined in Table 2
VDSLRFQSPSCSVYSTDTRXISETXXNKLXPPKPVIACPKMWIQVGQKFRQKAAATPXKARXSPRPIPSHXQPXPKIQTRCGPQPPQIRSPTQKPHDRQTALSHRTTTFHGPTPAPPLAHPAPTVSTPASTQHPARRHQVARPDRSSTPLPARIALRVFCPTPSTAPPEHPRQNPNPAPQTDSALPGAVRG

SEQ ID NO: 48481 - protein, 297 aa, Homo sapiens
  DOMAIN (230)..(244): Phage integrase family domain identified by eMATRIX, accession number PF00589B, p-value=1.621e-11, raw score of 16.17
  DOMAIN (94)..(276): "Phage" integrase family domain identified by PFam, accession name Phage_integrase, E-value=1.3e-09, PFam score of 45.4
NPRKRTEQGKAQNKVQWWLTRTPVMVQKRPTIVSLKSSPDSPLETYSMFLFLGMWVGVGVEMCSVKLEEQVNTYHYQRILLGISSDNAILLEEESEEGRPMHISTIKEPSPDSPILYLTLNLKLLTSLILFHYGESWNLLRADQRLIFAKSWPRASRYQQGHQDLFILRSDLPSQVFIRDKLMERRNRRTGRTEKARIWEVTDRTVRTWIGEAVAAAAADGVTFSVPVTPHTFRHSYAMHMLYAGIPLKVLQSLMGHKSISSTEVYTKVFALDVAARHRVQFAMPESDAVAMLKQLS

SEQ ID NO: 48482 - protein, 109 aa, Homo sapiens
  misc_feature (1)...(109): Xaa = X or * as defined in Table 2
LISLRQRQQRTPGKPGKGPRPIPSPWPPXPENTNPMRPPSPTRSGHQPRSLMTGRQRFHTAQQRFTVRPQHHRSLIQRRPCQRQRVPNIQRGDIRSLVQIGHQRRCLRG

SEQ ID NO: 48483 - protein, 472 aa, Homo sapiens; identical to SEQ ID NO: 35378
  DOMAIN (405)..(419): Phage integrase family domain identified by eMATRIX, accession number PF00589B, p-value=1.621e-11, raw score of 16.17
  DOMAIN (230)..(324): Integrase core domain identified by PFam, accession name rve, E-value=1e-13, PFam score of 51.4

SEQ ID NO: 48484 - protein, 928 aa, Homo sapiens; identical to SEQ ID NO: 43585
  DOMAIN (861)..(875): Phage integrase family domain identified by eMATRIX, accession number PF00589B, p-value=1.621e-11, raw score of 16.17
  DOMAIN (742)..(907): "Phage" integrase family domain identified by PFam, accession name Phage_integrase, E-value=6.3e-10, PFam score of 46.4

SEQ ID NO: 48485 - protein, 73 aa, Homo sapiens
  misc_feature (1)...(73): Xaa = X or * as defined in Table 2
RTSTGLSGCIRCGCASEGGQAVFVWPRGPPETPCSRCPAAEGSPGXSPPREDPSSGSPGKRQTCTQTSARSPS

SEQ ID NO: 48486 - protein, 415 aa, Homo sapiens
  DOMAIN (161)..(175): Phage integrase family domain identified by eMATRIX, accession number PF00589B, p-value=1.621e-11, raw score of 16.17
  DOMAIN (41)..(207): "Phage" integrase family domain identified by PFam, accession name Phage_integrase, E-value=1.6e-14, PFam score of 61.6
MYHGWVPDLHIHAEDTLLPFYLGEKDDVTYAIKPTCWPGLDIIPSCLALHRIETELMGKFDESKLPTDPHLMLRLAIETVAHDYDVIVYVEVEELIGEIGEVRTPHVFIRDKLMERRNRRTGRTEKARIWEVTDRTVRTWIGEAVAAAAADGVTFSVPVTPHTFRHSYAMHMLYAGIPLKVLQSLMGHKSIQSTEVYTKGFALDVAAPHRVQFAMPESDAGAMLKHYPENKCLAFIWKAASVPGPPRSAHARAASIVKFDRLLSAPPGPWADPGGADPRASLNHPIGSSDGRYATPDGRRPPLLRGKWRSPPEIDIQVCDALRVRGCTRATLTGSACAYPTPAGAGNPLNPIRDGDRGLQLFPMNEEFPVSAGHKLALIKSLPFVHTARRYYRLDGLVRPSDRPRRGRPTALAER

SEQ ID NO: 48487 - protein, 373 aa, Homo sapiens
  misc_feature (1)...(373): Xaa = X or * as defined in Table 2
CRWRFRFIMPFVMASMSAECLMNYNSTAMSGKTGLQNDTTLIARPWVKPYLGLEIMRIVGNXPHLTWCFPCTMYIPLFSQLLCCPVSFGQCGAFRNPGHPPSPNPEFFLGPRRCNPSLGHKALVQEAASDTPGKSPGKSPPGPIPKPIGPPXPGKHKPDAAPSPHRSGSPNPEASXPEDSAFTPHNNVFTVRPQHHRSLIQRRPCQRQRVPNIQRGDIRSLRFGCFARHHPRHHRNIHDRTRTRPRRLTRHSRGLFEDDVRVSTTDPERRHPHPTNTTTPGPGRVLRKELNRPRRPIHLRRRRFHVQRAWQLPVPHRHHHLDHTSHTRRRLRMTDVRLDRPQPQRPARITITAVGGDQRLRLDRITKPRARPN

SEQ ID NO: 48488 - protein, 220 aa, Homo sapiens
SGHLRVPGASLSPQGPMGAFVRRWSHVGWRPVPAASWGGPGRTSQQQVSLVAWGPGPPTSPGPRPRRPWVALRLRGWTGRSPHRRQALRPQGSREPCQLGHPRGVAGLRAGSTRGAPSGPTSLAPFSLGLLGLPLLRRRFPFLLLPSSDLGQGPRPPVGRLLQHPGGPGPAGRRLWGSRARPTRAVLEPASPVAGLEVHGLSRRGAATIMTGNSLHFYHQ

SEQ ID NO: 48489 - protein, 473 aa, Homo sapiens
MANHRGGSGNFAEDRERASEAARQKAITAGYPVVDTDEKSPPYFSVLPARDPSLFRQVRCFHSASTAVSRFRLRAPPVLSSSAGPCHPPRFGCFARHHPRHHRNIHDRTRTRPRRLTRHSRGLFEDDVRVSTTDPERRHPHPTNTTTPGPGRVLRKELNRPRRPIHLRRRRFHVQRAWQLPVPHRHHHLDHTSHTRRRLRMTDVRLDRPQPQRPARITITAVGGDQRLRLDRITKPQWEREELDKKQKEKASLWKEKKTRVGNLGKGYLPYGSELHSPERSPKTYRFSESSERLFNGHHLQDISFSTPKGEGQNSGNVRSPASPNEFAFGSYVPSFAKTSERSNPFSQKSSFLDFQRNSMEKLSKDGVDLITRKEKKANLMEQLFGASGSSTISSKSSDPNSVASSKGDIDPLNFLPGNKGSRDQEHDEDEDFFLSEGRSFNPNRHRLKHADDKPAVKAADSVEDEIEEVALR

SEQ ID NO: 48490 - protein, 354 aa, Homo sapiens
MSVDLSHIPLKDPLLFKSASDTNLQKGISFMDYLSDKHLGKISEDESSGLVYKSGSGEIGSETSDKKDSFYTDSSSILNYREDSNILSFDSDGNQNILSSTLTSKGNETIESIFKAEDLLPEAASLSENLDISKEETPPVRTLKSQSSLSGKPKERCPPNLAPLCVSYKNMKRSSSQMSLDTISLDSMILEEQLLESDGSDSHMFLEKGNKKNLTTNYRGTAESVNAGANLQNYGETSPDAISTNSEGAQENHDDLMSVVVFKITGVNGEIDIRGEDTEICLQVNQVTPDQLGNISLRHYLCNRPVGSDQKAVIHSKSSPEISLRFESGPGAVIHSLLAEKKWISAVPHRKLQH

SEQ ID NO: 48491 - protein, 599 aa, Homo sapiens
  DOMAIN (296)..(309): Beta-ketoacyl synthases proteins domain identified by eMATRIX, accession number BL00606C, p-value=9.526e-10, raw score of 11.94
  DOMAIN (112)..(381): Beta-ketoacyl synthase domain identified by PFam, accession name ketoacyl-synt, E-value=2.3e-09, PFam score of 8.3
MCELDILHDSLYQFCPELHLKRLNSLTLACHALLDCKTLTLTELGRNLPTKARTKHNIKRIDRLLGNRHLHKERLAVYRWHASFICSGNTMPIVLVDWSDIREQKRLMVLRASVALHGRSVTLYEKAFPLSEQCSKKAHDQFLADLASILPSNTTPLIVSDAGFKVPWYKSVEKLGWYWLSRVGWRRHAQNKVGAARSSETRYRHVGNQNAFTVGSNLGRSLHLKKHSRCDAFEDSCEMLFMGALFRHIKVFAGGAAVVHNGTGTRLGDPIEAQALIATYGRDRDPGRPLWLGSVKSNIGHTQAAAGVAGVIKMVMAMRHGQLPRTLHVESPSPEVDWSAGTVQLLTENTPWPRSGRVRRVGVSSFGISGTNAHVILEQPPGVPSQSAGPGSGSVVDVPVVPWMVSGKTPEALSAQATALMTYLDERPDVSSLDVGYSLALTRSALDERAVVLGSDRETLLCGVKALSAGHEASGLVTGSVGAGGRIGFVFFRSGWSVLGMGRGLYPGFSRGLACWPFDQNLWARSSGCPTSGGPGKTPGVLGQGGLFPVSGIAPTFALGISGTVWCLEMAEEPMTFLYDPLNVTSKSVDFFSGFGGFY

SEQ ID NO: 48492 - protein, 168 aa, Homo sapiens
  misc_feature (1)...(168): Xaa = X or * as defined in Table 2
HTQNQRSGRSQNDFXRRRKNISERSAVYRXRQLYIRRQPYAERPSLRXRQRPXIPCIRSQHGNRKRIPRRRIFIXQSVLRRRHELLPXRKPEASAERHKTRCXVSERRPRYHRVKYDYHXKSIYSRXAHGAAXPSHRKDRESADLGSDGQNGQDLDCRGGCQPLLLTV

SEQ ID NO: 48493 - protein, 644 aa, Homo sapiens
  DOMAIN (144)..(173): kw REPLICATION REPB REPA INITIATION domain identified by eMATRIX, accession number DM00653A, p-value=7.207e-27, raw score of 20.40
  DOMAIN (401)..(507): ParA family ATPase domain identified by PFam, accession name ParA, E-value=1.5e-24, PFam score of 95.0
  misc_feature (1)...(644): Xaa = X or * as defined in Table 2
MAETAVINHKKRKNSPRIVQSNDLTEAAYSLSRDQKRMLYLFDDQIRKSDGTLQEHDGICEIHVAKYAEIFGLTSAEASKDIRQALKSYAAKEVVLYRPEEDAGDEEGYESFPWFIKRAHSPSRGLYSVHINPYLIPFFIGLQNRFTQFRLSETKEITNPYAMRLYESLCQYRKPDGSGIVSLKIDWIIERYQLPQSYQRMPDFRRRFLQCINAGHEMTKAIAIAQFNDDSPEARKITRRWRIGEAADLVGVSSQAIRDAEKAGRLPHPDMEIRGRVEQRVGYTIEQINHMRDVFGTRLRRAEDVFPPVIGVAAHKGGVYKTSVSVHLAQDLALKGLRVLLVEGNDPQGTASMYHGWVPDLHIHAEDTLLPFYLGEKDDVTYAIKPTCWPGLDIIPSCLALHRIETELMGKFDEGKLPTDPHLMLRLAIETVAHDYDVIVIDSAPNLGIGTINVVCAADVLIVPTPAELFDYTSALQFFDMLRDLLKNVDLKGFEPDVFIRDKLMERRNRRTGRTEKARIWEVTDRTVRTWIGEAVAAAAADGVTFSVPVTPHTFRHSYAMHMLYAGIPLKVLQSLMGXYVHCKALWMDCAHVXXTKEKIHSLLHRRHPLQGDKEPLPSPRNSSMPAVYPYWLPQRSIRIFQHI

SEQ ID NO: 48494 - protein, 94 aa, Homo sapiens
PADSASHRTTTFHGPTPAPPLGHPAPTVSTPASTQHPARRHQVARPDRSSTPLPARIALRVFCPTPSTAPPEHPRQNPNPAPQTDSALPGAVRG

SEQ ID NO: 48495 - protein, 797 aa, Homo sapiens
  DOMAIN (36)..(49): Beta-ketoacyl synthases proteins domain identified by eMATRIX, accession number BL00606C, p-value=9.526e-10, raw score of 11.94
  DOMAIN (633)..(776): "Phage" integrase family domain identified by PFam, accession name Phage_integrase, E-value=1.3e-09, PFam score of 45.4
MGTGTRLGDPIEAQALIATYGRDRDPGRPLWLGSVKSNIGHTQAAAGVAGVIKMVMAMRHGQLPRTLHVESPSPEVDWSAGTVQLLTENTPWPRSGRVRRVGVSSFGISGTNAHVILEQPPGVPSQSAGPGSGSVVDVPVVPWMVSGKTPEALSAQATALMTYLDERPDVSSLDVGYSLALTRSALDERAVVLGSDVKRCCAIPKQQQNEKYQVPQFDQSTIKNIESAKGLDVWDSWPLQNADGTVAEYNGYHVVFALAGSPKDADDTSIYMFYQKVGDNSIDSWKNAGRVFKDSDKFDANDPILKDQTQEWSGSATFTSDGKIRLFYTDYSGKHYGKQSLTTAQVNVSKSDDTLKINGVEDHKTIFDGDGKTYQNVHFFIDEGNYTSGDNHTLRDPHYVEDKGHKYLVFEANTGTENGYQGEESLFNKAYYGGGTNFFRKESQKLQQSAKKRDAELANGALGIIELNNDYTLKKVMKPLITSNTVTDEIERANVFKMNGKWYLFTDSRGSKMTIDGINSNDIYMLGYVSNSLTGPYKPLNKTGLVLQMGLDPNDVTFTYSHFAVPQAKGNNVVITSYMTNRGFFEDKKATFAPSFLMNIKGNKTSVVKNSILEQGQLTWLQVAKRAGLGGGQSGRTVLRERVRIEIASTHIALAARHSDWRCCRNGRYPARGPAVFIRDKLMERRNRRTGRTEKARIWEVTDRTVRTWIGEAVAAAAADGVTFSVPVTPHTFRHSYAMHMLYAGIPLKVLQSLMGHKSISSTEVYTKVFALDVAARHRVQFAMPESDAVAMLKQLS

SEQ ID NO: 48496 - protein, 290 aa, Homo sapiens
  DOMAIN (223)..(237): Phage integrase family domain identified by eMATRIX, accession number PF00589B, p-value=1.621e-11, raw score of 16.17
  DOMAIN (81)..(269): "Phage" integrase family domain identified by PFam, accession name Phage_integrase, E-value=9.9e-10, PFam score of 45.8
MSYQATKITIHENTTSSSNWSSSGFLRNLVQIPFVEVIMKGKKEGGAGVDPAAEVGCVERHPEGDGPRTAGEVAARGGPLRPTTLSIITGEVERQGKILILLPAQACAHLLSMDTTVSVEQPAVSLPPSLPDPQPPQSGGASTHWPRASRYQQGHQDLFILRSDLPSQVFIRDKLMERRNRRTGRTEKARIWEVTDRTVRTWIGEAVAAAAADGVTFSVPVTPHTFRHSYAMHMLYAGIPLKVLQSLMGHKSISSTEVYTKVFALDVAARHRVQFAMPESDAVAMLKQLS

SEQ ID NO: 48497 - protein, 166 aa, Homo sapiens
  misc_feature (1)...(166): Xaa = X or * as defined in Table 2
PFFGTDFFPWARWCIQLRHKFWSKGKQRTTKKAPVKPPGPSPAIDHPXPGKHKPDAAPSPHRSGHQPKTSMTGRQRFHTAQQPFHGPTPAPPLAHPAPTVSTPASTQHPARRHQVARPDRSSTPLPARIALRVFCPTPSTAPPEHPRQNPNPAPQTDSALPGAVRG

SEQ ID NO: 48498 - protein, 192 aa, Homo sapiens
  DOMAIN (113)..(146): PROLINE-RICH PROTEIN 3 domain identified by eMATRIX, accession number DM00215, p-value=5.271e-09, raw score of 19.43
  misc_feature (1)...(192): Xaa = X or * as defined in Table 2
LQTVLQGYSNENSMFVKQKGSPPGKPGKKKPCFWGAPKNGADIPSQSWRPSGNPGTTPPLPKPPSFFPGAPRMGQSQAWGHKGFWFKKGKPTEPPGKKARVKKPPGGQSPKAIGPTRGPGKPPKPDMRAPKPPTDSGHQTQKPSXPADSAFTPHINVSRSDPRTTARSSSADRVNASEYPTSSEETSGRSSR

SEQ ID NO: 48499 - protein, 219 aa, Homo sapiens
  misc_feature (1)...(219): Xaa = X or * as defined in Table 2
SLRPHLSGFYQARTLXDQRSXADHEDISKNCSAEVXSNNSAGVGTISTSRSTYDINRADTQVRRAVNNYDIIVMSNSFNGQSEHQVWIGGQFILHQICPLTQFQYGAEPDRKEXCQAPASKWALLHKXHRPFPQDRKAGECLLHEYEDLVPIRDTLRLFPGGRYLPRAKHVAPSEPDPEQDEQKLRFCKRHLYGQQPRSPVEIRLQHVAIAYQTHHAYD

SEQ ID NO: 48500 - protein, 671 aa, Homo sapiens
  DOMAIN (251)..(265): Phage integrase family domain identified by eMATRIX, accession number PF00589B, p-value=1.621e-11, raw score of 16.17
  DOMAIN (136)..(297): "Phage" integrase family domain identified by PFam, accession name Phage_integrase, E-value=1.3e-11, PFam score of 52.0
MKSNNALIVILGTVTLDAVGIGLVMPVLPGLLRDIVHSDSIASHYGVLLALYALMQFLCAPVLGALSDRFGRRPVLLASLLGATIDYAIMATTPVLWIYPLVSTAEQCRSSPKSMICCNKKSLYLPQEMSAVYIEFTEYYYPDGKDFPRNKKNSTTNYRGTAESVNAGANLQNYGETSPDAISTNSEGAQENHDDLVFIRDKLMERRNRRTGRTEKARIWEVTDRTVRTWIGEAVAAAAADGVTFSVPVTPHTFRHSYAMHMLYAGIPLKVLQSLMGHKSISSTEVYTKVFALDVAARHRVQFAMPESDAVAMLKHYSENKCLALNGKGLVRESYHWMVMAMRHGQLPRTLHVESPSPEVDWSAGTVQLLTENTPWPRSGRVRRVGVSSFGISGTNAHVILEQPPGVPSQSAGPGSGSVVDVPVVPWMVSGKTPEALSAQATALMTYLDERPDVSSLDVGYSLALTRSALDERAVVLGSDRETLLCDVLTLGTGTNCEPPQWLWQRQGDTNEAMDSRTTVDADTRRTGGKAAKSDADAQVLQALAEQEKLNLVVSPDVSGTVSLHLTDVPWKQALQTVVKSAGLITRQEGNILSVHSIAWQNNNIARQEAEQARAQANLPLENRSITLQYADAGELAKAGEKLLSAKGSMTVDKRTNRLLLRDNKTGVKRA

SEQ ID NO: 48501 - protein, 150 aa, Homo sapiens
  misc_feature (1)...(150): Xaa = X or * as defined in Table 2
IVTLCFPSYCLHCEAGPLPCGHPWLWLCXVLGSPGXTQRTGSWAMPGVQASKPACGXKVAPAARRVPHPLHMLPHSGHSAASGGASCPLCRGXATGSDQVLKHAFRKGRSSNCASNGTPPPNADFLGQDVHPARHKLRQKSASEPRKKAR

SEQ ID NO: 48502 - protein, 605 aa, Homo sapiens
  DOMAIN (471)..(486): PHD-finger domain identified by eMATRIX, accession number PF00628, p-value=2.350e-13, raw score of 15.84
  DOMAIN (458)..(503): PHD-finger domain identified by PFam, accession name PHD, E- value=6.2e-18, PFam score of 73.0
MNMNIKKIVKQATVLTFTTALLAGGATQAFAKENDQKAYKETYGVSHITRHDMLQIPKQQQNEKYQRSPGRRQEQLGQFPGRERKGMASGLGSPSPCSAGSEEEDMDALLNNSLPPPHPENEEDPEEDLSETETPKLKKKKKPKKPRDPKIPKSKRQKKERMLLCRQLGDSSGEGPEFVEEEEEVALRSDSEGSDYTPGKKKKKKLGPKKEKKSKSKRKEEEEEDDDDDDSKEPKSSAQLLEDWGMEDIDHVFSEEDYRTLTNYKAFSQFVRPLIAAKNPKIAVSKMMMVLGAKWREFSTNNPFKGSSGASVAAAAAAAVAVVESMVTATEVAPPPPPVEVPIRKAKTKEGKGPNARRKPKGSPRVPDAKKPKPKKVAPLKIKLGGFGSKRKRSSSEDDDLDVESDFDDASINSYSVSDGSTSRSSRSRKKLRTTKKKKKGEEEVTAVDGYETDHQDYCEVCQQGGEIILCDTCPRAYHMVCLDPDMEKAPEGKWSCPHCVSVWPLWPLGTHEKKGGTVKLFGAWMEMEMLVLRVEKEGIQWEAKEDNSEGEEILEEVFIRDKLMERRNRRTGRTEKARIWGSGRTERSGTWIGEAGCPPLLLTV

SEQ ID NO: 48503 - protein, 303 aa, Homo sapiens
MGHLEKAGGKHFDLSEEFKPIQRGLVIHNLEFLLGFYQEASDPVPPYWVRLQDRGVQPPPTGVFRPPTGQHPLGQSFQREKQAATFVVSQPSLVKPPGMGKTENDRIERPQGGGGGSGSGQGQASQDGEGQDEFVFQISKDEYLDLLFEDLALPNLKQNQQRQLTEYKTHRAGYTANGVPANISVVRSLQNSLARRTAMTAGKRRELHALEENLAIISNSEPAQLLEEERLRKEIAELRAKIERVPFIDTFDLRYKNYEKRPDPSSQAVMFCLMDVSGSMDQSTKDMAKRFYILLYLFLSRTK

SEQ ID NO: 48504 - protein, 71 aa, Homo sapiens; identical to SEQ ID NO: 47501

SEQ ID NO: 48505 - protein, 73 aa, Homo sapiens; identical to SEQ ID NO: 47503

SEQ ID NO: 48506 - protein, 208 aa, Homo sapiens; identical to SEQ ID NO: 47504

SEQ ID NO: 48507 - protein, 184 aa, Homo sapiens
  DOMAIN (20)..(66): PTR2 family proton/oligopeptide symporters proteins domain identified by eMATRIX, accession number BL01022B, p-value=5.909e- 28, raw score of 22.19
  DOMAIN (49)..(77): POT family domain identified by PFam, accession name PTR2, E- value=1.5e-05, PFam score of 21.3
MRALLILYLTNQLKYSDTHAYELFSAYCSLVYVTPILGGFLAHKVLGNRMAVMLGALLMAIGHVVLGASEIHPSFLCLFRRLISGYGSGHNIGHIFPPTLANISAGNRIPAFFRFNLYHGKQQITRFVEIDGVVMRTVRFQHCFQFWPDGIMPTLILFVGVGVYLHDKGFADHVCSLQRQRTGD

SEQ ID NO: 48508 - protein, 77 aa, Homo sapiens
  misc_feature (1)...(77): Xaa = X or * as defined in Table 2
RIMVHATGLMKHASSPGCWDLNRRTRRCGVRRVTEXQRASXKRXERDYISIMPKPDGLTAAKNLAEAFEHYNECIRI

SEQ ID NO: 48509 - protein, 482 aa, Homo sapiens
  DOMAIN (183)..(228): Cytosolic fatty-acid binding proteins domain identified by eMATRIX, accession number BL00214B, p-value=2.098e-20, raw score of 26.51
  DOMAIN (156)..(220): Lipocalin / cytosolic fatty-acid binding pr domain identified by PFam, accession name lipocalin, E-value=2.4e-07, PFam score of 29.4
MNIDAKILNKILANRIQQHIKKLIHHNQVSFIPGMQGWFNIHKSMKVIQHINRTKDKNYMIISIDAEKAFDKIQQPFMLKTLKKLVAGMMAVAAPDDPPPPSVSSSKPSTVAPPGRISPSGRALCTSLPSALSSSSKFSLLRIFQVPAKLGMVAVAAAAGVNAMLRKVAVAAASKPHVEIRQDGDQFYIKTSTTVRTTEINFKVGEGFEEETVDGRKCRVRPQSHYSVPVSPLGAHGPLLLEEPVSPFAACGAPSLQVPQGAQRWAHSASLRLASSECARCTYAVGPSRNSLCPHAQFRRHLNNAQRAENFSYLLKALGYELARILPLLNERFYPVLSIRTHTGVSFVFIQCLASVLDISLATWENENKIRCTQTLLEGDGPKTYWTRELANDELILLIEFGVVAAPEGQQSTAVYHWCNTAVLDPLACMLLILMNLAKLLSTELGYRARSFPSTQKNLFKNTSRHCMFTQCGSENDVYFSG

SEQ ID NO: 48510 - protein, 38 aa, Homo sapiens
FNAIYPQPVVAHFNHLSHQGAGTAGTEVAVVLKIGGAA

SEQ ID NO: 48511 - protein, 52 aa, Homo sapiens
VFNRASRISGVCRNNYTRHGALNRAYSFRQVLSGSAGRRLVFIRWQRRVAGS

SEQ ID NO: 48512 - protein, 916 aa, Homo sapiens
  DOMAIN (315)..(361): PTR2 family proton/oligopeptide symporters proteins domain identified by eMATRIX, accession number BL01022B, p-value=6.143e- 32, raw score of 22.19
  DOMAIN (810)..(916): FliG C-terminal domain identified by PFam, accession name FliG-C, E-value=2.2e-56, PFam score of 200.7
CTSFCGGGRFRTFNPAARRLPGFQPGFPYLGSLPEQLHTPRRAEPRLLVPAGSVGIGGPQTGVYPLATPACALYRRRREYAEDYSCGHVIPLCRMGVVTVFASRVSSHCGALDMPALRIANLLVGNDANAPALEITLGQLTVEFETDGWFALTGAGCEARLDDNAVWTGWRLPMKAGQRLTLKRPQHGMRSYLAVAGGIDVPPVMGSCSTDLKVGIGGLEGRLLKAGDRLPIGKSKRDSMEAQGVKQLLKHKHAAQLLRDVAVNCGIIMNKHASQPRAIYYVVALQIWEYFSFYGMRALLILYLTNQLKYNDTHAYELFSAYCSLVYVTPILGGFLADKVLGNRMAVMLGALLMAIGHVVLGASEIHPSFLYLSLAIIVCGYGLFKSNVSCLLGELYEPTDPRRDGGFSLMYAAAARDIAYLMYLENALRAEGAGGNPNLSRMAMPPINLYQNQRGGVACNPLTPILYIFPRTPWIASRQRTTHNNRTYRVALEVQCDSVTVTRQGDHFTLHTIGQAVNADNTVTYRNNSTFVVSFTHNIELSNALLDQFADFGGIQLHAPVPLRLQDVCKALKTTRTFFHRSRNFRELLFTQCGSGNDVYLSGSLTHGTQVNKLLQNIRERVKTTIFSHNPNQVLTVFVQLLTTNCDKRLGERCVERAREKLCHLFVFGYLGGPWKLASPGEDAATLLENILKLRDTASGIETLNFMEPQSAADLIRDEHPQIIATILVHLKRAQAADILALFDERLRHDVMLRIATFGGVQPAALAELTEVLNGLLDGQNLKRSKMGGVRTAAEIINLMKTQQEEAVITAVREFDGELAQKIIDEMFLFENLVDVDDRSIQRLLQEVDSESLLIALKGAEQPLREKFLRNMSQRAADILRDDLANRGPVRLSQVENEQKAILLIVRRLAETGEM

SEQ ID NO: 48513 - protein, 154 aa, Homo sapiens
  DOMAIN (120)..(138): Xanthine/uracil permeases family proteins domain identified by eMATRIX, accession number BL01116A, p-value=7.632e-15, raw score of 8.86
MHFAIQRIGRWRDRSRIGNPHWRSGTDVGKPVRCLACNFFQYVFIATSESQLTQHRNKRTFVRRDHGLGESRIGKGFHFHSMKSDGFHEELIMSSLLGVSFVGAFLVVGSSFMLPYLRRVITPTVSGIVVLMIGLSLIKVGIIDFGGGFAAKFL

SEQ ID NO: 48514 - protein, 160 aa, Homo sapiens
  misc_feature (1)...(160): Xaa = X or * as defined in Table 2
RGGIEYLLLVVFILTRTRFIQAVEHRRNGRRVAEKIVPELITHFMAEIRDLLQRTGVALWXHQSAAYLPGXQICALAXXIHPGVAAGEYQRRSIQENGGKVQESGQTASXMRGXMSVESRSGIAARCPESDAQSGVVHRSRWNQSLPARFGAGRDYREAS

SEQ ID NO: 48515 - protein, 134 aa, Homo sapiens
  DOMAIN (86)..(100): pfkB family of carbohydrate kinases proteins domain identified by eMATRIX, accession number BL00583C, p-value=5.355e- 12, raw score of 7.19
  DOMAIN (55)..(98): pfkB family carbohydrate kinase domain identified by PFam, accession name pfkB, E-value=6.4e-08, PFam score of 28.2
TQRIPAAQKQGSRCIVDSSAEALSAALAIGNIELVKPSRTMSDKAAQEIVNSGKAKRVVVSLGPQGALGVDSENCIQVVPPPVKSQSTVGAGDSMVGAMTLKLAENASLEEMVRFGVAAGSAATLNQGTRLCSH

SEQ ID NO: 48516 - protein, 518 aa, Homo sapiens
  DOMAIN (48)..(69): General diffusion Gram-negative porins proteins domain identified by eMATRIX, accession number BL00576A, p-value=2.875e- 23, raw score of 15.07
  DOMAIN (17)..(122): General diffusion Gram-negative porins domain identified by PFam, accession name Gram-ve_porins, E-value=2.6e-67, PFam score of 222.1
MGIVASASVQAAEIYNKDGNKLDVYGKVKAMHYMSDNASKDGDQSYIRFGFKGETQINDQLTGYGRWEAEFAGNKAESDTAQQKTRLAFAGLKYKDLGSFDYGRNLGALYDVEAWTDMFPEFDRQLMTDGHTPPRRENFCPHETARDTPLRVIRRPPRVRSTMRRGRTPRPRVLKARTRSTRGTHEKTGLAATQKKRFRTLIALRPYETVQKPIRWANNTRFGLSCGLVSPEREKFDQLLLEARPGIVNWNKPLTGAASTAPFGGIGASGNHRPSAWYAADYCAWPMASLESDSLTLPATLNPGLDFSDEVVSNPRLAAKQGLLKMKALADAGFPQAVIPPHERPFIPVLRQLGFSGSDEQVLEKVARQAPHWLSSVSSASPMWVANAATIAPSADTLDGKVHLTVANLNNKFHRSLEAPVTESLLKAIFNDEEKFSVHSACHRQSSEKRTDLGDIMPEMEQTDWSAEQKSRRNIVQLQPVASVRHSTDKTDSIVTWEIMAPCNWKSPVISMPALLKP

SEQ ID NO: 48517 - protein, 172 aa, Homo sapiens
  misc_feature (1)...(172): Xaa = X or * as defined in Table 2
QRDNPSGTDGGRNRAFGAGNIHTRGAAQAVERLVDSFPAQEKDPGESTGRTDSLPSSRPQKVAYPVHRNDRRERLWFAAPSSPSNATWGNAEWTLNFSSSDSVTGASSERXNLLFRLATVRCTLPSSVSADGAIVAALATHIGEAELTLESQCGAWRATFSSTCSSLPLNPN

SEQ ID NO: 48518 - protein, 69 aa, Homo sapiens
  misc_feature (1)...(69): Xaa = X or * as defined in Table 2
TALKLPLPMSTKVTRCLSNLLKPKFNLPPLVQPPKKMLPRHLSRXAPNTKTSRVLKKNXPIPIPTRRKT

SEQ ID NO: 48519 - protein, 1020 aa, Homo sapiens
  DOMAIN (288)..(323): Phosphorylase pyridoxal-phosphate attachment site proteins domain identified by eMATRIX, accession number BL00102G, p-value= 6.538e-33, raw score of 14.65
  DOMAIN (214)..(380): Carbohydrate phosphorylases domain identified by PFam, accession name phosphorylase, E-value=2.4e-128, PFam score of 416.6
TRTALAIVNKPPSSAIPPTSGLASRKRNPASNDFNGCSRGCGGGGNAGRLNNGSKATPPVASNKPPIMGEITDPRRTVNMVIAPACIKFSRPTSAGVAANSAVTPSDAKKPSHKPNTTPEGLTTATRLLTCTTPTPHSYKLRHLIVTIKPPIDGHITDPIRSVNIETGHDGTYYLRPTKAVNTAPQIPITNIHKPTGIAQALLSTRQHGGAQCTNGITPRRWIKQCNPALAALLDKSLQKEWANDLDQLINLEKFADDAKFRQQYREIKQANKVRLAEFVKVRTGIEINPQAIFDIQIKRLHEYKRQHLNLLHILALYKEIRENPQADRVPRVFLFGAKAAPGYYLAKNIIFAINKVADVINNDPLVGDKLKVVFLPDYCGRFSDGRFQRTVKFIVQVGNGEMHFAIQRIGRWRDRCRIGYPHWRSGTDAGKPVRCLACNFFQYLLIATTESQLTQHRNKRTLVRRDHGLGESRIGKGFHFQWELSCRAWIHKAGYAVVTLNDVIKSVSLPPGTSAQLAELIALTRAIELSKGKVANIYTDSQYAFLVLHAHAAIWKERHFLTTNGSPIKHHQEIKRLLSSVFLPREITEMHCRGHQKGTDEVAEGNRLASQVARSAARKPQDINTLQTPLIWEGSIREIKPQYSTTKGEWATSRGCTFQPLGGTLTVNDNGKATDIVQNSGAALQTSTANGIEISGTHQYGTFSISGNLATNMLLENGGNLLVLAGTEARDSTVGKGGAMQNLGQDSATKVNSGGQYTLGRSKDEFQALARAEDLQVAGGTAIVYAGTLADASVSGATGSLSLMTPRDNVTPVKLEGAVRITDSATLTLGNGVDTTLADLTAASRGSVWLNSNNSCADPLVTLEDTPLIGVTQSYSCSLEQISDFRHEMRYQFWHDFLGNAPTIPPVLYGLNETRPSQDKDDEQEVFYTTALAQDQADGYVLTGHPVMLQGGEYVMFTYECLGTGVQEFILTVYGTCMPMLNLTRRKGQDIERYYPAEDAKAGDRPINLRCELLIPIRR

SEQ ID NO: 48520 - protein, 173 aa, Homo sapiens
ENSEALSQEGELTQGRRKKRRKDGFFSHYIRTWVRVSGRHSPTSPPHTSTVEASRMGIDLVMLTREPNIKFPRTAAALHSAFKKPKPVALRSVGYSSTVTTSREFQAEMVNPLYRHSMPIIMDSLVPNQRKKQLIPESTIEPPSIVKRPILSISRADTMFPGNTANVPRKLTK

SEQ ID NO: 48521 - protein, 653 aa, Homo sapiens
  DOMAIN (563)..(643): Acetyltransferase (GNAT) family domain identified by PFam, accession name Acetyltransf, E-value=1.9e-15, PFam score of 64.7
MLQTFFDTFRQLCCNLRRRIDKNDDQIACPHAPPRCMPACVVRNGKSTAGHQRYLCSPCRKTWQLQFTYTASQPGKHQKIIDMAMNGVGCRANSPHYGRWPQHGFTSLKKLRPQSVTSRIQPGSDVIVCAEMDEQWGYVGAKSRQRWLFYAYDRIRRTVVAHVFGERTLATLERLLSPLSAFKGEFSLLIVDECHRIGDDEESQYQQILTHLTKVNPHLRLLGLTATPFRLGKGWIYQFHYHGMVRGDEKALFRDCIYELPLRYMIKHGYLTPPERLDMPVVQYDFSRLQAQSNGLFSERDLNRELKKQQRITPHIISQIMEFAATRQRAQRFRYLVNVAVLTTGFDGPHVDLIAIGGGGKGAMLVCLLILGAHRYITRDASAGSENHIALSEQEFFTRAGQNLLALSWHANGLYYGVGVEIDLWLHAGFDVLVNGSRAHLPQARARYQSALLPVCLQVSPEILRQRLENRGRENASEINARLARAARYTPQDCHTLNNDGSLRQRRNTMPACELRPATQYDTDAVYALICELKQAEFDHHAFRVGFNANLRDPNMRYHLALLDGEVVGMIGLHLQFHLHHVNWIGEIQELVVMPQARGLNVGSKLLAWAEEEARQAGAEMTELSTNVKRHDAHRFYLREGYEQSHFRFTKAL

SEQ ID NO: 48522 - protein, 238 aa, Homo sapiens
  DOMAIN (125)..(166): DEAD/DEAH box helicase domain identified by PFam, accession name DEAD, E-value=0.0078, PFam score of 11.8
WHTISILIYLRETMIFTLRPYPHEPVDATLNHFRPHKTPAVIALPTGAGNSLAIAELARLARGRVLVLAHVKELLAQNHAKHQALGLEADIFAAGLKRKESHGKVVFGSVQSVARNLDAFQGEFSLLIVDECHRIGDDEESQYQQILTHLTKVNPHLRLLGLTATPFRLGKGWIYQFHYHGMVRGDEKALFRDCIYELPLRYMIKHGYLTPPERLDMPVVQYDFSRLQAQSNGLFSEA

SEQ ID NO: 48523 - protein, 251 aa, Homo sapiens
MIRRVSVASGNEYPMRPASYIRTAPTVYPSSSPAGTWFAGNAPASSCGFRDRYLIVCSHQTPHVPGKREEVNYETGIYWLRHYGYTDYSRNAKQRLQRNNLAPILFTTTVPLGGRQYNNSQHLPQRQSLERIRHHTQAFTALIPHGAAGQGCGSGDLHYLSLEDVAVSSKATPDGSGVTRKASANLRVTIQIGGFQLRTCGFGPSCRGCHPALQISRALAVAAHQQAADNNMEFANYGPFELLQARQLIES

SEQ ID NO: 48524 - protein, 266 aa, Homo sapiens
  DOMAIN (96)..(137): Bacterial regulatory proteins gntR family proteins. domain identified by eMATRIX, accession number BL00043, p-value=3.613e-26, raw score of 22.96
  DOMAIN (77)..(136): Bacterial regulatory proteins, gntR family domain identified by PFam, accession name gntR, E-value=1.8e-28, PFam score of 97.1
MAQAQPYVTFQAHSSVTTITETTQQKEDTCRPPFKTTKTTVNGLTGMSAWLASTLFALVVGALADTIGFSPLFAVLAVFDLLERIEQGVYLVGDKLPAERFIADEKNVSRTVVREAIIMLEVEGYVEVRKGSGIHVVSNQPRHQQAADNNMEFANYGPFELLQARQLIESNIAEFAATQVTKQDIMKLMAIQEQARGEQCFRDSEWDLQFHIQVALATQNSALAAIVEKMWTQRSHNPYWKKLHEHIDSRTVDNWCDDHDQILKAL

SEQ ID NO: 48525 - protein, 90 aa, Homo sapiens; identical to SEQ ID NO: 44182

SEQ ID NO: 48526 - protein, 62 aa, Homo sapiens
  misc_feature (1)...(62): Xaa = X or * as defined in Table 2
LGFFFQRPLGFGQELSKLXEQVLLAPEEVGHLGEHLLFRHASEWPAPRVQLLLLVRVQDLQE

SEQ ID NO: 48527 - protein, 161 aa, Homo sapiens
SKIFPRHDDLLLWRSHRNGDDLRTAGMNAFKQRLTLLGFKITILTANDYLFADGQRSVRKKYPQAQVSRVAGADLWEELMARAGKEGTPVFLVGGEPEVLAQTEAKLVRSSSATSAIAWPLLIPCAISSWIRSTAFCCCSWVSEGKPADRSPAPSRTWLRC

SEQ ID NO: 48528 - protein, 142 aa, Homo sapiens
EQVLLAPEEVGHLGEHLLFRHASEWPAPRVQLLLLLPAQIGTLCFVPNFGEVDVASIVGHNVSRVAGADLWEELMARAGKEGTPVFLVGGKPEVLAQTEAKLRNQWNVNIVGSQDGYFKPEQRQALFERIHASGAQIVTVAM

SEQ ID NO: 48529 - protein, 796 aa, Homo sapiens
  DOMAIN (413)..(443): 2Fe-2S ferredoxins iron-sulfur binding region proteins. domain identified by eMATRIX, accession number BL00197A, p-value= 8.342e-14, raw score of 18.23
  DOMAIN (18)..(113): ParB-like nuclease domain identified by PFam, accession name ParBc, E-value=4.8e-20, PFam score of 80.0
MAIHQVSPFREEPVDCVLWVKNSQLMPNDYNPNNVAPPEKKLLQKSIEIDGFTQPIVVTHTDKNAMEIVDGFHRHEIGKGSSSLKLRLKGYLPVTCLEGTRNQRIAATIRHNRARGRHQITAMSEIVRELSQLGWDDNKIGKELGMDSDEVLRLKQINGLQELFADRQYSRAWTLKLAQRSAAASNVDSFLANRDESVYGKGSANTDSGIAVRRAPASATGKTQHHPGPVMNMVENMLDQAFKKLNPHEHPVLHSDQGWQYRMRRYQNILKEHGCGVTPIMSMRRWLAKNRPQADVRVIYNVRTPQDVIFADEWRNYPVTLVAENNVTEGFIAGRLTRELLAGVPDLASRTVMTCGPAPYMDWVEQEVKALGVTRFFKEKFFTPVAEAATSGLKFTKLQPAREFYAPVGTTLLEALESNNVPVVAACRAGVCGCCKTKVVSGEYTVSSTMTLTDAEIAEGYAVVALIKPGAQIGRSPVNCDVASCHVISFNLRVELAIMRRLLCRIAVLMSYRIEQRLMFLERLRHVGLIAHPAKKAIKKTRKPGMKVTFEQLKAAFNRVLISRGVDSETADACAEMFARTTESGVYSHGVNRFPRFIQQLENGDIIPDAQPKRITSLGAIEQWDAQRSIGNLTAKKMMDRAIELAADHGIGLLRLAGGGKRLYWHLLDQLHRRNDNISLDLGNNAEAVILREDMLPRENFRPGDRVRGVLYSVRPEARGAQLFVTRSKPEMLIELFRIEVPEIGEEVIEIKAAARDPGSRAKIAVKTNDKRIDPPTQHEDEEDEGLYDDPFPLNE

SEQ ID NO: 48530 - protein, 277 aa, Homo sapiens
PILLPHDGLALPLHAALALPLQGVQPLRVRGVLYSVRPEARGAQLFVTRSKPEMLIELFRIEVPEIGEEVIEIKAAARDPGSRAKIAVKTNDKRIDPVGACVGMRGARVQAVSTELGGERIDIVLWDDNPAQFVINAMAPADVASIVVDEDKHTMDIAVEAGNLAQAIGRNGQNVRLASQLSGWELNVMTVDDLQAKHQAEAHAAIDTFTKYLDIDEDFATVLVEEGFSTLEELAYVPMKELLEIEGLDEPTVEARGLLSGGGGGRIPLKNAYPKDR

SEQ ID NO: 48531 - protein, 62 aa, Homo sapiens
PPETPSEGVSMSVQQIDWDLALIQKYNYSGPRYTSYPTALEFSEDFGEQAFLQAVARYPERP

SEQ ID NO: 48532 - protein, 712 aa, Homo sapiens
  DOMAIN (626)..(659): PROTEIN INTERGENIC REGION LEUS-G domain identified by eMATRIX, accession number PD02292, p-value=1.474e-25, raw score of 21.23
  DOMAIN (166)..(314): Isochorismatase family domain identified by PFam, accession name Isochorismatase, E-value=1.4e-05, PFam score of 2.0
  misc_feature (1)...(712): Xaa = X or * as defined in Table 2
FILKLRTRRRXRHRLIRPWELFQTARNAEVMKALVRHLWLEVKGVDLGRFPERRYGSDKPDLRNPMELTDVADLLKSVEFAVFAGPANDPKGRVAALRVPGGASLTRKQIDEYGNFVKIYGAKGLAYIKVNERAKGLEGINSPVAKFLNAEIIEDILDRTAAQDGDMIFFGADNKKIVADAMGALRLKVGKDLGLTDESKWAPLWVIDFPMFEDDGEGGLTAMHHPFTSPKDMTAAELKAAPENAVATLGDPLESPDDGLHNRISTHGCFYVLCGISTNIGVESTARNAWELGFNLVIAEDACSAASAEQHNNSINHIYPRIARRGRDPQRVMIYIGLPQWSHPKWVRLGITSLEEYARHFNCVEGNTTLYALPKPEVVLRWREQTTDDFRFCFKFPATISHQAALRHCDDLVTEFLTRMSPLAPRIGQYWLQLPATFGPRELPALWHFLDSLPGEFNYGVEVRHPQFFAKGEEEQTLNRGLHQRGVNRVILDSHPVHAARPHRKLGGTAVWEWEPEGAHWVGDEPGWFSSGDLSKAEYWAQKAADSGDADACALLAQIKITNPVSLDYPQAKVLAEKAAQAGSKEGEVTLAHILVNTQAGKPDYPKAISLLENASEDLENDSAVDAQMLLGLIYANGVGIKADDDKATWYFKRSSAISRTGYSEYWAGMMFLNGEEGFIEKNKQKALHWLNLSCMEGFDTGCEEFEKLTNG

SEQ ID NO: 48533 - protein, 524 aa, Homo sapiens
  DOMAIN (306)..(343): tRNA synthetases class II domain identified by eMATRIX, accession number PF00152C, p-value=1.000e-26, raw score of 28.03
  DOMAIN (229)..(511): tRNA synthetases class II (D, K and N) domain identified by PFam, accession name tRNA-synt_2, E-value=1.6e-08, PFam score of - 53.3
HISLSVIRGRVRVAWPSCVYYDQRGAKGGVCMQRADYRCLPTRHAAAPTPRPTTSAPHSPAHAEHLPPSPPTSPHTPPHTNAAGHPPTTSKPPCAYREQWLIHPENDSRPSPTVTKKADPRHTPPGTRPQPPHAVNPLKTSSDTPSALPPTPTPISRPVFFDPDRATALKLASELRNEFCIQVTGTVRARDEKNINRDMATGEIEVLASSLTIINRADVLPLDSNHVNTEEARLKYRYLDLRRPEMAQRLKTRAKITSLVRRFMDDHGFLDIETPMLTKATPEGARDYLVPSRVHKGKFYALPQSPQLFKQLLMMSGFDRYYQIVKCFRDEDLRADRQPEFTQIDVETSFMTAPQVREVMEALVRHLWLEVKGVDLGDFPVMTFAEAERRYGSDKPDLRNPMELTDVADLLKSVEFAVFAGPANDPKGRVAALRVPGGASLTRKQIDEYGNFVKIYGAKGLAYIKVNERAKGLEGINSPVAKFLNAEIIEDILDRTAAQDGDMIFFGADNKKIVADASYLVSWL

SEQ ID NO: 48534 - protein, 1466 aa, Homo sapiens
MCIPVPPIATGDRHFIAVAHIHQNSRRSPVDSDESSTRSAVAAHPATRDFNVRALYTVTSSVSPTKPPLPATFRQGRYRPAEPCVGSIGVIPQSSCVLANGSTGAQSAFGDIIRAGPPSAGLVPVAQATVIETFLRYQTINERDFWAARNRLLKQPYGSRILRFTEAYAIAERAAQSVLRISLADAFNVDGPRPAEDSIFRLLRMPGSAVQRPDRRHNRRCQYRPAMAFPAGSKANKQRQYNGGRQFYRKRICWLAMEKIPIVINHSSRRRWAILREGTNPGFVAICLPVTTTVAVVPEARCSLAGCRDDIRVIDKDICKGMMPVVTYWKQSAICRCAVSKDHGDDPFGDCPDAQSPCAYGSRPRQSRGEESILIGHAGHPEVEGQWASTVTRKGECIWSIAGRCVETDGQKRREASFMTQITLSVDDTSDVTTRCVSASQNWRSAQDDLRRLSFTPTVQPVGAKITPVPDCFIPPNGLPPDQTPLHELSAIYIGIYHQRWRNIIPLSGGPFDPRISSACCACASWRNEHTLSQCARETKGLSVQQHLPGDDIENAIRDTSLAGRSATRNIVRAAAHASVTLEDPCLIGCAYQAYWVTTPTAKRATYSPSHQQLDPRSLLRQRRLQEAGLDPEQPAVNAGRIWRLCRETESLRHEVRLRTRTGRAGSNWQTLAPGTSTDFENDSDFRPAVPGAASDSGYTAQFAGISLADYVQLSLQAGFISGQPSVIHITTSKVRSPNTWQQPSSGACHTRKTASAARFSPDVSPLFVHFRAAMTSLPGCMREARGDTVVVAQSAFYVKIWDKRRRGRRSGVCRYFWVVVLPHSLVYYPDHLHVVFRTAGAVAINIDIATSPLSCQSLETSESCAVAGVFPSTVAPSGKFFDHHDGVIDHESGGDSNAISVRLLIEKSRNTIPLKFCIKPAGNRLPDPELHPDSTLRCGRITVSPADGENRPHPGRVIRTDDERTHRYHYDSHTGWCTTRGHNMQSRWSKPLSLRPAGPQGGKTGGRRERDLTGWMSLSRKPNDLVRLGRRPPDHDTDDRTRIQTIYQPGSFTPSSGLKPPPVSWRKRSAEPGAYPSAVRRRRRWQWVFPPVLVQMLDRLESESWLTGPAPATLRNPGPYIRKAVQHRIRHAVRAVARQWTMLLRFIGKRGNITECEPPRPMVPSRLGQLKPPAASAYAPFAHNDGPGALGESGSCALHGPSLSVGHISLQRYLRSSVVSFLRPFRPMLVRYCATSTVLPTICSTALGGFDAYVGCYCDVKLAAGTVTGGCELDWQENSGQLIVLARVTAIRCSICRGKLLVNNDRKRWSLELAWRYWGKGVLHAYAMPPGDVAGQDARRCHWYPGANAVHWRQCVTAINLKFSVDGRDPTYFLFKGIYMLVRLARFGIPAGGHGVLKGGSAWMPDIRLTVSILSCLSVLPMGLASGDSRSRYVANCRRINLVTAKNITADLQGRIRGLKKNPCC

SEQ ID NO: 48535 - protein, 141 aa, Homo sapiens
GSWPVPRSDRRQDHDRRGHPVRGDSSGSQHIRFAVKLATAIVLALFVGFHFQLETPRWAVLKKFAIQRIGRWRDRCRIGYPHWRSGTDAGKPVRCLACNFFQYLLIATTESQLTQHRNKRTLVRRDHGLGESRIGKGFHFQ

SEQ ID NO: 48536 - protein, 87 aa, Homo sapiens
VWLITMGIFSIANQHIRFAVKLATAIVLALFVGFHFQLETPRWAVLTAAIVAAGPAFAAGGEPYSGAIRYRGFLRIIGTFIGCIAGL

SEQ ID NO: 48537 - protein, 523 aa, Homo sapiens
  DOMAIN (18)..(52): Bacterial regulatory proteins lysR family proteins. domain identified by eMATRIX, accession number BL00044, p-value=2.350e-19, raw score of 19.03
  DOMAIN (4)..(117): Bacterial regulatory helix-turn-helix prote domain identified by PFam, accession name HTH_1, E-value=2e-34, PFam score of 127.8
  misc_feature (1)...(523): Xaa = X or * as defined in Table 2
MIEVKHLKTLQALRNCGSLAAAAATLHQTQSALSHQFSDLEQRLGFRLFVRKSQPLRFTPQGEILLQLANQVLPQISQALQACNEPQQTRLRIAIECHSCIQWLTPALENFHKNWPQYSVIFKSGVTFDPHFFFQQGELDPERAFDDFGIKPMASASIAQVHSARFNSNGHEVVIKVIRAETLPVIKADLKLIYRLARWDAAFAAGWSPPAANLSCAGSTKIHRLMNRTCCRNLPTPFSFGAKPGLYLVEAMVGGYRATTVVFVSDTVALSKVSGIELLVWGAGKKQGEANAGSEILWTDGLGVMTRGVTDDSGTLQLQHISPERSYILGTLAMVQLREDMAKRQAAGIIAPRSGRRMHRTQHKPPMTTEMGPRAVLREDTIPFLEALKASGKQRILLTNAHPHNLAVKLEHTGLDAHLDLLLSTHTFGYPKEDQRLWHAVAEATGLKAERTLFIDDSEGDAMKEKPAVEVRLDKWLWAARSLXNPRAGPXNDXRRXGALQRAAHEAEQNRRAECHAHSAPGK

SEQ ID NO: 48538 - protein, 65 aa, Homo sapiens
  misc_feature (1)...(65): Xaa = X or * as defined in Table 2
RFQVVYFDHEKPSLRHEXFALEEYTGTRNXGCVNLLDRXKPFPFKFMERWLAFSPPGLTLESSRG

SEQ ID NO: 48539 - protein, 1041 aa, Homo sapiens
  DOMAIN (137)..(187): Sugar transport proteins domain identified by eMATRIX, accession number BL00216B, p-value=8.800e-22, raw score of 27.64
  DOMAIN (41)..(442): Sugar (and other) transporter domain identified by PFam, accession name sugar_tr, E-value=2e-05, PFam score of -39.7
MELRGRPAVIVLWACVRGPWAVGRRRCPSLRNGSSSGGVMCRRLADVGGCPFGFSGETRVVLPANEGVGRTTSPVRMDDCPLTVVTARIAALTFGAHLTDGYVLGVIGYAIIQLTPAMQLTPFMAGMIGGSALLEHLIGLRILIGIGLGGDYSVGHTLLAEFSPRRHRGILLGAFSVVWTVGYVLASIAGHHFISENPEAWRWLLASAALPALLITLLRWGTPESPRWLLRQGRFAEAHAIVHRYFGPHVLLGDEVVTATHKHIKTLFSSRTGRRTALTASSSLRRSTELIIEATEALSGYALGLYGRTQAVCQIPFGVLSDRIGRIPLVVGGLAVFAAGSVIAALSDSIWGIILGRALARLWSNCRRRYGAAFRCHARTKPHQSDGVYRLAMVLGPIITHKLGLHALFWMIAILATTGIALTIWVVPNSSTHVLNRESGMVKGSFSKVLAEPRLLKLNFGIMCLHILLMSTFVALPGQLADAGFPAAEHWKVYLATMLIAFGSVVPFIIYAEVKRKMKQVLSSATREKRPRFNGFRRHSGVRQADRFAATIAAVQCFAGRGTKFTDKCGMDAGAARATYFWRQMGMATVSGGRANAILSQTLTGIGGHPVGGPCRVELQHNLNGVTSTQFTPYRQQFFTRGVPRPITFLRFFQLATQANARETEAIWNNALASGYLCVRASRYALHRREKSCCNWQTRYCRKLARPCKPAMNRSRRVCALPLSAIAVFSWLTPALENFHKNWPQVEMDFKSGVTFDPQPALQQGELDLVMTSDILPRSGLHYSPMFDYEVRLVLAPDHPLAAKTRITPEDLASETLLIYPVQRSRLDVWRHFLQPAGVSPSLKSVDNTLLLIQMVAARMGIAALPHWVVESFERQGLVVTKTLGEGLWSRLYAAVRDGEQRQPVTEAFIRSARNHACDHLPFVKSAERPTYDAPTHRREFQRRVIAEKIFCQHHRAKLNRLEERQYLTVNFRAIAQRVNIGITGLQITIDANAAINRQPGASCQGGFRAQSGGGNYRIHFDIALAVQRCLNARIRFFQPL

SEQ ID NO: 48540 - protein, 113 aa, Homo sapiens
  DOMAIN (40)..(61): RHS PROTEIN SIGNATURE domain identified by eMATRIX, accession number PR00394B, p-value=1.310e-28, raw score of 10.76
  misc_feature (1)...(113): Xaa = X or * as defined in Table 2
MLDRLESEILADRVSEESRRWLASCGLTVEQMQNQMDPVYTPARKIHLYHCDHRGLPLALISKEGTTEWCAEYDGMGQPAEXREPASAAAAYPPAGAAVXXGVRPVLQPPPLL

SEQ ID NO: 48541 - protein, 179 aa, Homo sapiens
FFSRATCFVVSCPPWGPSPLRSSGYLRPDSFSRSVCALCHAAGPSSPTRILPLRYFPFRLTGLGFPPGFGPAFFPSPSVFHASRNSPRPPGTLLRSQVDRLYRDVPHLSGCTARTYAAHQTGCCSRTSARCTDRRPCSNGSRCTHLCRNGQCRFSDLFSVQRPGTQRHSSDRRSAYTVS

SEQ ID NO: 48542 - protein, 146 aa, Homo sapiens
GTGTPATDLDDDYFDMLQEELCSVVEASGASLEKGRHDQLLTALRALLLSRKNPFGDIKLDGTVQKALENLGLGEAAPRNVGTGANQIPDMGSFMLSASVLISGISRSTTAALGWTSQSGPEQENEKHFSKPDRASRFPGFRDFSS

SEQ ID NO: 48543 - protein, 149 aa, Homo sapiens
NKDFLKTFRGALQQGASLWSLHIVANYRRLVGVSDRTFDFLHYRFRIFQQADNVIAIIVRLGHLLGAASRQGSDDFDHRKPELHLTDIFHGGEIERQQQHYHRQGGDPVGEIGEPELSISRDRHHVCHTGYNPAEPVSPAGEISCPRPE

SEQ ID NO: 48544 - protein, 105 aa, Homo sapiens
  misc_feature (1)...(105): Xaa = X or * as defined in Table 2
LLPWRSCILRSDPLAAHPVILVPXACIFIARNCYPRPSCDSACKLRRESCGXFGXTRMVSAQATFSIQITSALPFCEHLPGKRSGDFDTGEDNALSGQRPEFRHG

SEQ ID NO: 48545 - protein, 147 aa, Homo sapiens
  DOMAIN (2)..(114): Sodium/calcium exchanger protein domain identified by PFam, accession name Na_Ca_Ex, E-value=0.063, PFam score of -15.9
MLSEPALRELATAIAGVRKGENDIAVENIIGANIFNIVIVLGLPALITPGEIDPLAYSRDYSVMLLQAGKEVLAIERECLAELDQYINQNFTLACEKMFWCKGKVVVMGMGKSRAILGEKWPRNVCQHRIANHENRDSIRKICCYHR

SEQ ID NO: 48546 - protein, 182 aa, Homo sapiens
RESYNSILARNLDIPISYSINGTCSPQMNVKSGSSNYLRMEFYDTWVKTGAYIILESVLAPGINEGNLVKHVVCSVTGQSIPELEKQFEGKMYGHLKGEVADAVSGMLTELQERYHRFRNDEAFLQQVMKDGAEKASAHASLDASSTGTAVTRLKIPLYRTEHLLHEALAHALTQAFNERLL

SEQ ID NO: 48547 - protein, 115 aa, Homo sapiens
  misc_feature (1)...(115): Xaa = X or * as defined in Table 2
LVSLAGAAYRSPQDPVPYMPISPGLDWVRQIVCCVMASDADXXRVPRQNALLLPVCTSGPYHALATGCGFRRGQMLKTTVLPRHYKLYLGASSGMRYSTPATALMPLPLPHLAER

SEQ ID NO: 48548 - protein, 207 aa, Homo sapiens
  DOMAIN (157)..(170): PROTEIN PRECURSOR SIGNAL HYDROLA domain identified by eMATRIX, accession number PD00469A, p-value=7.980e-11, raw score of 13.95
  DOMAIN (157)..(198): Putative peptidoglycan binding domain identified by PFam, accession name PG_binding_2, E-value=8.2e-12, PFam score of 52.7
MNHFDGAKQNVVGADAHHLADTAVKRNQSLFQLRASGHPRLPAGGGKAVFHGRFAAKKPAGFFKGQTWQARIKLAAIAIADINQQIALQRAARKKGVVHVLTVKARHRAGIQSQRPAGDDQIGRLHGTVAKRCFFGKLWAGGSSAQRLANNSDSITYRVRKGDSLSSIAKRHGVNIKDVMRWNSDTANLQPGDKLTLFVKNNNMPDS

SEQ ID NO: 48549 - protein, 141 aa, Homo sapiens
SFFRLLYLIATFIIQPVNVLHLADHDELIAVRSDGAVVVKAPGQLRVTANHMRWFRANAGNRVMNAAAHASYFRTRNIHNAFLGVIHHGHARRYTLADHRAGSQRAVGVEYFHPVVIDNGQFSGICFADPDNRSTARERQH

SEQ ID NO: 48550 - protein, 516 aa, Homo sapiens
MHNGVLGVNICHWQLHNGKQFRCCRVFLGPGFVGNDMHGADREAIIRTIRQFGIGVFIARQCGERHLQPDDIFARLQFVTHPVRRPGVIKHRFALFVATDGVGHHRCVVPLIMRHGVGQFIRGKLVVDRTFADPDRLGNLRIFSVPGGELDGRGTYRQVPFRRTILRYFFPRFIFTGPPRRSERGPDIGSLSWYRLLEDPKSVVKKIKRAVTDSDEPPVVRYDVQNKAGVSNLLDILSAVTGQSIPELEKQFEGKMYGHLKGEVADAVSGMLTELQERYHRFRNDEAFLQQVMKDGAEKASAHASRLPTATNMIATDWRQMGHTLSLQSVDIPLADPHFWTMQGSVRVAQMCHEFGLTWGSHSNNHFDISLAMFTHVAAAAPGKITAIDTHWIWQEGNQRLTKEPFEIKGGLVQVPEKPGLGVEIDMDQVMKAHELYQKHGLGARDDAMGMQYLIPGWTFDNKRPCMSSVRSNFFLCVYVSHAETLLTDTRLTTDAKIKPVHQSPLERDRKVQQNA

SEQ ID NO: 48551 - protein, 529 aa, Homo sapiens
  DOMAIN (499)..(517): CYTOSOL AMINOPEPTIDASE SIGNATURE domain identified by eMATRIX, accession number PR00481A, p-value=5.390e-17, raw score of 8.82
  DOMAIN (36)..(239): NOL1/NOP2/sun family domain identified by PFam, accession name Nol1_Nop2_Sun, E-value=3.2e-70, PFam score of 244.8
AAFKPFWRQNAHGTPLCRRPLADGGDRMPATGSLDHHSAFHALRPGVTLFNSTCTLNQEENEAVCLWLKETYPDAVEFLPLGDLFPGANKALTEEGFLHVFPQIYDCEGFFVARLRKTQAIPALPAPKYKVGNFPFSPVKDREAGQIRQAATGVGLNWDENLRLWQRDKELWLFPVGIEALIGKVRFSRLGIKLAETHNKGYRWQHEAVIALASPDNMNAFELTPQEAEEWRQKLEFSVKSGSPEKQRSACIVVGVFEPRRLSPIAEQLDKISDGYISALLRRGELEGKPGQTLLLHHVPNVLSERILLIGCGKERELDERQYKQVIQKTINTLNDTGSMEAVCFLTELHVKGRNNYWKVRQAVETAKETLYSFDQLKTNKSEPRRPLRKMVFNVPTRRELTSGERAIQHGLAIAAGIKAAKDLGNMPPNICNAAYLASQARQLADSYSKNVITRVIGEQQMKELGMHSYLAVGQGSQNESLMSVIEYKGNASEDARPIVLVGKGLTFDSGGISNKPSENMDEMKSITV

SEQ ID NO: 48552 - protein, 114 aa, Homo sapiens
  DOMAIN (58)..(74): CBXX/CFQX SUPERFAMILY SIGNATURE domain identified by eMATRIX, accession number PR00819B, p-value=8.579e-11, raw score of 10.83
RMIEADRLISAGTTLPEDVADRAIRPKLLEEYVGQPQVRSQMEIFIKAAKLRGDALDHLLIFGPPGLGKTTLANIVANEMGGNLRTTSGPVLEKAGDLAAMLTNLEPHDVLFID

SEQ ID NO: 48553 - protein, 175 aa, Homo sapiens
MARRCRWLSNLYRSLLLRWWRWLSRCCLRFTLHGALPPLNPLRLYVMNKILLQCDNLCKRYQEGSVQTDVLHNVSFSVGEVRKRAPPAMPEYSQCGGQTAKEDVVKRRSPTFLSAGFIFYLQVEKELASGELIDLTPGLFQRRMLYWHRFAPESRMMRKVTDALLDYGHKVLRQD

SEQ ID NO: 48554 - protein, 472 aa, Homo sapiens
  DOMAIN (341)..(377): IMP PHOSPHORIBOSYLAMINOIMIDAZOLE domain identified by eMATRIX, accession number PD02408G, p-value=6.897e-36, raw score of 24.15
  DOMAIN (221)..(472): AICARFT/IMPCHase bienzyme domain identified by PFam, accession name AICARFT_IMPCHas, E-value=5.9e-159, PFam score of 541.5
MGLVEGAPTSSRVLWLLTLIEGQGEDVGETVLADTVGGIRHLPHERVAAFKATLQETRQATLLLHVIDAADVRVQENIEAVNTVLEEIDAHEIPTLLVMNKIDMLEDFEPRIDRDEENKPNRVWLSAQTGAGIPQLFQALTERLSGEVAQHTLRLPPQEGRLRSRFYQLQAIQKEWMEEDRNVMEVVNLYPFAQTVAREGCSLEDAVENIDISGPAMVRSAAKNHKDVAIVVKSSDYDAIIKEMDDNEGSLTLATRFDLAIKAFEHTAAYDSMIANYFGSMVPAYHGESKEAAGRFPRTLNLNFIKKLDMRYGENSHQQAAFYIEENVKEASVATATQVQGKALSYNNIADTDAALECVKEFAEPACVIVKHANPCGVAIGNSILDAYDRAYKTDPTSAFGGIIAFNRELDAETAQAIISRQFVEVIIAPSASEEALKITAAKQNVRVLTCGQWGERVPGLDFKRVNGGLLV

SEQ ID NO: 48555 - protein, 136 aa, Homo sapiens
YRPFYSLLSEAVFLSIRTLYTGYSLPNRIIKMKKIIALMLFLTFFAHANDSEPGSQYLKAAEAGDRRAQYFLADSWFSSGDLSKAEYWAQKAADSGDADACALLAQIKITNPVSLDYPQAKVLAEKAAQAEKEQPW

SEQ ID NO: 48556 - protein, 173 aa, Homo sapiens
  DOMAIN (84)..(108): Bacterial extracellular solute-binding proteins family 5 sig. domain identified by eMATRIX, accession number BL01040A, p-value= 4.682e-16, raw score of 17.12
  DOMAIN (27)..(169): Bacterial extracellular solute-binding prot domain identified by PFam, accession name SBP_bac_5, E-value=6.4e-26, PFam score of 95.8
AHTNAITVTNIERFQLFAIIAHINQAMCCALLVSSISLSYAAEVPSGTVLAEKQELVRHIKDEPASLDPAKAVGLPEIQVIRDLFEGRIWTFTLRDNAKWADGTPVTAQDFVYSWQRLVDPKTLSPFAWFAALAGINNAQAIIDGKATPDQLGVTAVDAHTLKIQLDKPLPCL

SEQ ID NO: 48557 - protein, 1012 aa, Homo sapiens
  DOMAIN (308)..(326): Aldehyde dehydrogenases glutamic acid proteins domain identified by eMATRIX, accession number BL00687A, p-value=6.400e- 10, raw score of 17.67
  DOMAIN (669)..(806): Prokaryotic transcription elongation factor domain identified by PFam, accession name GreA_GreB, E-value=5.3e-56, PFam score of 199.5
MSSLSQAASSVEKRTNARYWIVVMLFIVTSFNYGDRATLSIAGSEMAKDIGLDPVGMGYVFSAFSWAYVIGQIPGGWLLDRFGSKRVYFWSIFIWSMFTLLQGFVDIFSGFGIIVALFTLRFLVGLAEAPSFPGNSRIVAAWFPAQERGTAVSIFNSAQYFATVIFAPIMGWLTHEVGWSHVFFFMGGLGIVISFIWLKVIHEPNQHPGVNKKELEYIAAGGALINMDQQNTKVKVAHRGDGKSLESPMSVPVQHPMYIDGQFVTWRGDAWIDVVNPATEAVISRIPDGQAEDARKAIDAAERAQPEWEALPAIERASWLRKISAGIRERASEISALIVEEGGKIQQLAEVEVAFTADYIDYMAEPNNLAGIALVNSTKRSGVIRPVITPLENSNCMRFSTPALLAALFVCLKAANVTSIRTEPTYTLYATFDNIGGLKARSPVSIGGVVVGRVADITLDPKTYLPRVTLEIEQRYNHIPDTSSLSIRTSGLLGEQYLALNVGFEDPELGTAILKDGDTIQDTKSAMVLEDLIGQFLYGSKGDDNKNSGDAPAAAPAKAENIRLLILDVDGVLSDGLIYMGNNGEELKAFNVRDGYGIRCALTSDIEVAIITGRKAKLVEDRCATLGITHLYQGQSNKLIAFSDLLEKLAIAPENVAYVGDDLIDWPVMEKVGLSVAVDDAHPLLGTEIDAYIENADYQYNKKRLREIDRRVRYLTKCLENLKIVDYSPQQEGKVFFGAWVEIENDDGVTHRFRIVGYDEIFGRKDYISIDSPMARALLKKEVGDLAVVNTPAGEASWYVNAIEYVKPRLNQTVRLLLEHEMGQVWISGEISNFTQPASGHWYFTLKDDTAQVRCAMFRNSNRRVTFRPQHGQQVLVRANITLYEPRGDYQIIVESMQPAGEGLLQQKYEQLKAKLQAEGLFDQQYKKPLPSPAHCVGVITSKTGAALHDILHVLKRRDPSLPVIIYPAAVQGDDAPGQIVRAIELANQRNECDVLRPCVWCRRVRCRRRCR

SEQ ID NO: 48558 - protein, 314 aa, Homo sapiens
  DOMAIN (78)..(95): ARAC BACTERIAL REGULATORY PROTEIN SIGNATURE domain identified by eMATRIX, accession number PR00032B, p-value=2.853e-12, raw score of 16.24
  DOMAIN (11)..(97): Bacterial regulatory helix-turn-helix protei domain identified by PFam, accession name HTH_AraC, E-value=1.1e-24, PFam score of 95.5
MEYMKTHYGEPIGVRHAADHVGIHRTHFSKLFTEHVGMNPSDYLRKQRMEQALHLLCSTSRPIVEIGLSLSFADSASFTRAFGQYYGVSPKQARLAGREKNSDLLEKLAIAPENVAYVGDDLIDWPVMEKVGLSVAVADAHPLLIPRADYVTRIVGARRWVIIVLSLAVLVMIGINMAEKDDTAQVVVNNNDPTYKSEHTDTLVYNPEGALSYRLIAQHVEYYSDQAVSWFTQPVLTTFDKDKIPTWSVKADKAKLTNDRMLYLYGHVEVNALVPDSQLRRITTDNAQINLVTQDVDLQACQLTQSGSDRRSLE

SEQ ID NO: 48559 - protein, 708 aa, Homo sapiens
  DOMAIN (170)..(186): Putative AMP-binding domain proteins domain identified by eMATRIX, accession number BL00455, p-value=8.500e-11, raw score of 13.31
  DOMAIN (382)..(654): HlyD family secretion protein domain identified by PFam, accession name HlyD, E-value=4.7e-48, PFam score of 173.1
MVIPKALQIRPAAFYATCCSDSSRLSTASDMSIGSESAAGYLACSLRRQGINLGEPALVQLGNVAELYITFFALLKLGVAPVLALFSHQRSELNAYASQIEPALLIADRQHALFSGDDFLNTFVTEHSSIRVVQLLNDSGEHNLQDAINHPAEDFTATPSPADEVAYFQLSGGTTGTPKLIPRTHNDYYYSVRRSVEICQFTQQTRYLCAIPAAHNYAMSSPGSLGVFLAKERCLAAIHRPPHTQKTTTQRHATSYLPMNKTTEYIDAMPIAASEKAALPKTDIRAVHQALDAEHRTWAREDDSPQGSVKARLEQAWPDSLADGQLIKDDEGRDQLKAMPEAKRSSMFPDPWRTNPVGRFWDRLRGRDVTPRYLARLTKEEQESEQKWRTVGTIRRYILLILTLAQTVVATWYMKTILPYQGWALINPMDMVASALSPKSLQARIQYQQSLEDYNRRVPLAKQGVISKETLEHTKDTLISSKAALNAAIQAYKANKALVMNTPLNRQPQVVEAADATKEAWLALKRTDIKSPVTGYIAQRSVQVGETVSPGQSLMAVVPARQMWVNANFKETQLTDVRIGQSVNIISDLYGENVVFHGRVTGINMGTGNAFSLLPAQNATGNWIKIVQRVPVEVSLDPKELMEHPLRIGLSMTATIDTKNEDIAEMPELASTVTSMPAYTSKALVIFIQAISVPIGRERHRRFHRQSP

SEQ ID NO: 48560 - protein, 281 aa, Homo sapiens
  misc_feature (1)...(281): Xaa = X or * as defined in Table 2
GGISIDRSGDHXGRGAVYHVAGRXNAGRTAELYFASRPTCGRWLVAAVQGAATARISTIEMSVWAQLXQMCRGKIRATISLPEATAQVISSGSGATKVEDGLGDLNKPVSNQNLVTGIDTPVYNAPSAGSAPFGVLADNMRYPILHKLKDRLNQTWYQIRIGDRLAYISALDAQPDNGLSVLTYHHILRDEENTRFRHTSTTTSVRAFNNQMAWLRDRGYATLSMVQLEGYVKNKINLPARAVVITFDDGLKSVSRYAYPVLKQYGMKATAFIVTTRIKRV

SEQ ID NO: 48561 - protein, 397 aa, Homo sapiens
  DOMAIN (131)..(155): 60KD INNER MEMBRANE PROTEIN SIGNATURE domain identified by eMATRIX, accession number PR00701I, p-value=8.091e-29, raw score of 8.59
  DOMAIN (1)..(154): 60Kd inner membrane protein domain identified by PFam, accession name 60KD_IMP, E-value=2e-134, PFam score of 460.0
MYPLTKAQYTSMAKMRMLQPKIQAMRERLGDDKQRISQEMMALYKAEKVNPLGGCFPLLIQMPIFLALYYMLMGSVELRQAPFALWIHDLSAQDPYYILPILMGVTMFFIQKMSPTTVTDPMQQKIMTFMPVIFTVFFLWFPSGLVLYYIVSNLPREEKILIRADKHRASATQSNRNIMSDNDTIVAQATPPGRGGVGILRISGFKAREVAETVLGKLPKPRYADYLPFKDADGSVLDQGIALWFPGPNSFTGEDVLELQAGPARIFVAELSEAFNGISQRLIPGAVLAIDCAAIYSFAPNAVVWGFMWGTIGQLIAVGILVACGSSILIIPGFIPMFFSNATIGVFANHFGGWRAALKICLVMGMIEIFGCVWAVKLTGMSAWMGMRGLVDSGTDR

SEQ ID NO: 48562 - protein, 98 aa, Homo sapiens
  DOMAIN (2)..(26): 60KD INNER MEMBRANE PROTEIN SIGNATURE domain identified by eMATRIX, accession number PR00701I, p-value=6.077e-28, raw score of 8.59
  DOMAIN (1)..(25): 60Kd inner membrane protein domain identified by PFam, accession name 60KD_IMP, E-value=2.4e-12, PFam score of 47.2
MPVVFTVFFLWFPSGLVLYYIVSNLPRYAEYLTVKDADGSVLDQGIALWFPGPNSFTGEDVLELQGHGGPVILDLLLIRILTVCGLRIARPACSPRSL

SEQ ID NO: 48563 - protein, 337 aa, Homo sapiens
  DOMAIN (86)..(101): D12 CLASS N6 ADENINE-SPECIFIC DNA METHYLTRANSFERASE SIGNATURE domain identified by eMATRIX, accession number PR00505B, p-value= 1.621e-12, raw score of 11.49
  DOMAIN (84)..(189): D12 class N6 adenine-specific DNA met domain identified by PFam, accession name MethyltransfD12, E-value=4.2e-23, PFam score of 85.3
MGGRHTFPRRYHDRAFQRWKHSDLDQTNRRIREYGGDGQGRKDRGDESNDLWTTYQRIRENLIKGGLSGRNAKGGRTHTRAVRKRLIEPFVGGGSVFLNSDKHERFLLADVSADLINLYQMLAVVPDSVIYEAMKAFRHLNDAENYTLIREAFNAQRLDAVERAAAFLYLNRHCFNGLIRYNLDEAFTGILYSEQAARSALNSLQGAFSARVNHLVEALTHLRIYVEAAIDFPDEEIDFLSDGKIEAQLNDVIADLDALSAGDISRKKKLLQKQKEGKKRMKPDRYPSAPRRTSGIAGYEIGYALACEAGRDCFRVTTTATAAFDFTIAFVFCLASM

SEQ ID NO: 48564 - protein, 615 aa, Homo sapiens
MFDSQEVQYQVDGQTKTRKVVDPHSFRILTNEAGEPEYHRVQLFTTGDERPGLMNFPFEGLTSGSKYGTAVGIIMFMLVIGGAFGIVMRTGTIDNGILALIRHTRGNEILFIPALFILFSLGGAVFGMGEEAVAFAIIIAPLECVRVDESQCYGGPLAYPNLVMSGIIAPAYRIMAASGLVTSQYVIRRRRKQENWERHHAFASIIFRPIQSIINAFKQFIDAFISSVMRHTNADGKAWADKHRASATQSNRNIMSDNDTIVAQATPPGRGGVGILRISGFKAREVAETVLGKLPKPPYADYLPFKDADGSVLDQGIALWFPGPNSFTGEDVLELQGHGGPVILDLLLKRILTIPGLRIARPGEFSERAFLNDKLDLAQAEAIANLIDASSEQAARSALNSLQGAFSARVNHLVEALTHLRIYVEAAIDFPDEEIDFLSDGKIEAQLNDVIADLDANYLPMNKTTEYIDAMPIAASEKAALPKTDIRAVHQALDAEHRTWAREDDSPQGSVKARLEQAWPDSLADGQLIKDDEGRDQLKAMPEAKRSSMFPDPWRTNPVGRFWDRLRGRDVTPRYLARLTKEEQESEQKWRTVGTIRRYILLILTSRKLSSRPGI

SEQ ID NO: 48565 - protein, 251 aa, Homo sapiens
  DOMAIN (93)..(115): FLAGELLAR BIOSYNTHETIC PROTEIN FLIP SIGNATURE domain identified by eMATRIX, accession number PR00951E, p-value=1.360e- 24, raw score of 12.13
  DOMAIN (1)..(139): FliP family domain identified by PFam, accession name FliP, E -value=2.5e-59, PFam score of 210.5
MSPVIDKMYVDAYQPFSEEKISMQEALEKGAQPLREFMLRQTREADLGLFARLANTGPLQGPEAVPMRILLPAYVTSELKTAFQIGFTIFIPFLIIDLVIASVLMALGMMMVPPATIALPFKLMLFVLVDGWQLLVALVTGLIISILQAATQINEMTLSFIPKIIAVFIAIIIAGPWMLNLLLDYVRTLFTNLPYIIGRTMLQVTSEQCAILVKPVLLAVTARAGADLHRADSERTQRTKTGGGFCRYWAG

SEQ ID NO: 48566 - protein, 659 aa, Homo sapiens
  DOMAIN (566)..(593): GLUTAMATE-ASPARTATE SYMPORTER SIGNATURE domain identified by eMATRIX, accession number PR00173G, p-value=8.000e-20, raw score of 12.22
  DOMAIN (458)..(634): Sodium:dicarboxylate symporter family domain identified by PFam, accession name SDF, E-value=7.3e-88, PFam score of 305.3
METLRIFGRGEAEIESIRSASEDFRQRTMEVLRLAFLSSGILEFFTSLSIALVAVYFGFSYLGELDFGHYDTGVTLAAGFLALILAPEFFQPLRDLGATLHKPKFSEALRTGLIFGAVETLTPLIGWGMGMLASRFVLEWNHWIAFVLLIFLGGRMIIEGFRGADDEDEEPRRRHGFWLLVTTAIATSLDAMAVGVGLAFLQVNIIATALAIGCATLIMSTLGMMVGRFIGSIIGKKAEILGGLVLIGIGVKISGAHHRNTKYRNINLFPIDYAFRPRLRGTLGLPASGLFTRFIVTKSSIFSVTPLVQPKPSCNGYSPPPPPVPHRREFQRRVIAEKIFCQHHRAKLNRLEERQYLTVNFRAIAQRVNIGITGLQITIDANAAINRQPGASCQGRFPGAVRCGGNYRIHFDIALAVQRWPECQNPFFPAPVTEISTADERPSPLTGCLQRLVTFGSVIFGIINMIMRLAPIGRFGAMAFTIGKYGVGTLVQLGQLIICFYITCILFVVLVLGSIAKATGFSIFKFIRYIREELLIVLGTSSSESALRRMLDKMEKLGCRKSVVGLVIPTGYSFNLDGTSIYLTMAAVFIAQATNSQMDIVHPITLLIVLLLSSKGAAGVTGSGFSVLAATLSAGGPIAGSGSGADPRYSTALCQKLVR

SEQ ID NO: 48567 - protein, 210 aa, Homo sapiens
  DOMAIN (128)..(166): Short-chain dehydrogenases/reductases family proteins domain identified by eMATRIX, accession number BL00061B, p-value=2.636e- 17, raw score of 25.79
  DOMAIN (18)..(184): short chain dehydrogenase domain identified by PFam, accession name adh_short, E-value=5.5e-38, PFam score of 139.6
MTTLSYRHYCRHGVDDESKGIGYATALAFVEAGAKVTGFDQAFTQEQYPFATEVMDVADAAQVAQVCQRLLAETERLDALVNAAGILRMGATDQLSKEDWQQTFAVNVGGAFNLFQQTMNQFRRQRGGAIVTVASDAAHTPRIGMSAYGASKAALKSLALSVGLELAGSGVRCNVVSPGSTDTDMQRTLWIIVPQYYSKSVSGLLNAFSE

SEQ ID NO: 48568 - protein, 93 aa, Homo sapiens
  misc_feature (1)...(93): Xaa = X or * as defined in Table 2
LFRLLKTLTGRRKRSNKSWITTCRGFWGTWCAGWSRPXVVQKCRIYTMWRXWQHAQRXVSPATLNGLMLITISRKNPHTRKGAGKHCPFSGPS

SEQ ID NO: 48569 - protein, 53 aa, Homo sapiens
AMHSDTCFGQLFHCFPDIHCITTKAIQFCHNQLITTFQASKQPVKTRTLTGCC

SEQ ID NO: 48570 - protein, 48 aa, Homo sapiens
RPQRGDWRRWRCTARHRESPRPPSRSAVCCRSDDRRHLRRLDTALRLV

SEQ ID NO: 48571 - protein, 130 aa, Homo sapiens
LLLKNVLNVDCRFFGWSETMAIAIGLDFGSDSVRALAVDCATGEEIATSVEWYPRWQKGQFCDAPNNQFRHHPRDVLAELSVEQRAAVVGIGVDSTGSTPAPIDADGNVLALRPEFAENPNAMFVLWKDI

SEQ ID NO: 48572 - protein, 135 aa, Homo sapiens
  DOMAIN (84)..(96): Bacterial extracellular solute-binding proteins family 3 sig. domain identified by eMATRIX, accession number BL01039C, p-value= 6.400e-10, raw score of 10.62
ITCTLYPSLRIVYEAFPATGDNMFRRIIKDALFRTIQFCQIMNRSQYMFTCRCRTEMQVPQHRRKKTFKPTVLLNHFVMEIIVLTAGRIDAAFQDEVAASEGFLKQPVGKDYKFGGPSVKDEKLFGVGTGMGHHN

SEQ ID NO: 48573 - protein, 581 aa, Homo sapiens
  DOMAIN (81)..(114): Bacterial extracellular solute-binding proteins family 3 sig. domain identified by eMATRIX, accession number BL01039B, p-value= 9.036e-22, raw score of 20.00
  DOMAIN (293)..(493): FAD binding domain identified by PFam, accession name FAD_binding_4, E-value=1.5e-66, PFam score of 234.5
MNGQRALRRQNVQLRQTIFSTRGFCRWNVDNLVAFALRQLRQITYREHQHTACLSDCQQHIGSIFNHHRRHNMGIFRVIGLIPSLKAKKIDAIMSSLSITEKRQQEIAFTDKLYAADSRLVVAKNSDIQPTVESLKGKRVGVLQGTTQETFGNEHWAPKGIEIVSYQGQDNIYSDLTAGRIDAAFQDEVAASEGFLKQPVGKDYKFGGPSVKDEKLFGVGTGMGLRKEDNELREALNKAFAEMRADGTYEKLAKKYFDFDVYGVILQGALVTLELAISSVVLAVIIGLIGAGGKLSQNRLSGLIFEGYTTLIRGVPDLVLMLLIFYGLQIALNTQMEQVTAILAVCHRLRVPVVTRGAGTGLSGGALPLEKGVLLVMARFKEILDINPVGRRARVQPGVRNLAISQAVAPHNLYYAPDPSSQIACSIGGNVAENAGGVHCLKYGLTVHNLLKIEVQTLDGEALTLGSDALDSPGFDLLALFTGSEGMLGVTTEVTVKLLPKPPVARVLLASFDSVEKAGLAVGDIIANGIIPGGLEMMDNLSIRAAEDFIHAGYPVDAEAILLCELDGVESDSTAKTCERG

SEQ ID NO: 48574 - protein, 399 aa, Homo sapiens
  DOMAIN (109)..(150): Indole-3-glycerol phosphate synthase proteins domain identified by eMATRIX, accession number BL00614D, p-value=4.750e- 32, raw score of 22.58
  DOMAIN (58)..(195): Indole-3-glycerol phosphate synthases domain identified by PFam, accession name IGPS, E-value=3.9e-76, PFam score of 266.4
MAPRAAKGAFSLQVQFFRKVVRAVVIRAVGDKRWQTIGLLGAYGVVFRLPVDLPLRRPILCKDFIIDPYQIYLARYYQADACLLMLSVLDDDQYRQLAAVAHSLEMGVLTEVSNEEEQERAIALGAKVVGINNRDLRDLSIDLNRTRELRRNWGTTESGINTYAQVRELSHFANGFLIGSALMAHDDLHAAVRRVLLGENKVCGLTRGQDVKQLMTRARFTRETAFAAIPQNIRIGTDPTYAPFESKNSQGELVGFDIDLAKELCKRINTQCTFVENPLDALIPSLKAKKIDAIMSSLSITEKRQQEIAFTDKLYAADSRLVVAKNSDIQPTVESLKGKRGQDNIYSDLTAGRIDAAFQDEVAASEGFLKQPVGKDYKFGGPSVKDEKLFGVGTRVGLP

SEQ ID NO: 48575 - protein, 151 aa, Homo sapiens
  misc_feature (1)...(151): Xaa = X or * as defined in Table 2
LLRQGFIVISAGGKRVEGQIKLVFPAKFEAGFRHGVIANLRLYPFPEEKIGEMATAPLSTSGDCRTXYALIGIQPTDGDARGSPRYKPALALLPACVGSAKSTPHGRTPIPAIYVPSSPTXFRALASDSVAQTXYCRPASQTRRASPARSL

SEQ ID NO: 48576 - protein, 103 aa, Homo sapiens
  misc_feature (1)...(103): Xaa = X or * as defined in Table 2
SRYFSATSTWPLVMSIPVTCPFSPASWLSTXQSLPLPLPRSKIQQFCRCSGITRPQPXYPDPKSSSFVDAQGSPDHSHNILGLLLRVHFARLPECAWGPAWLW

SEQ ID NO: 48577 - protein, 191 aa, Homo sapiens
  DOMAIN (90)..(120): BACTERIAL CHEMOTAXIS SENSORY TRANSDUCER SIGNATURE domain identified by eMATRIX, accession number PR00260G, p-value=8.500e- 37, raw score of 4.71
  DOMAIN (7)..(67): Methyl-accepting chemotaxis protein (MCP) s domain identified by PFam, accession name MCPsignal, E-value=1.1e-36, PFam score of 133.4
ADSSKKIADIISVIDGIAFQTNILALNAAVEAARAGEQGRGFAVVAGEVRNLASRSAQAAKEIKALIEDSVSRVDTGSVLVESAGETMNNIVNAVTRVTDIMGEIASASDEQSRGIDQVALAVSEMDRVTQQNASLVQESAAAAAALEEQASRLTQAVPRSVWQPAHSPINRKHHPVLPIATGALMPGCGS

SEQ ID NO: 48578 - protein, 566 aa, Homo sapiens
  DOMAIN (48)..(78): BACTERIAL CHEMOTAXIS SENSORY TRANSDUCER SIGNATURE domain identified by eMATRIX, accession number PR00260F, p-value=1.450e- 36, raw score of 7.19
  DOMAIN (13)..(73): Methyl-accepting chemotaxis protein (MCP) s domain identified by PFam, accession name MCPsignal, E-value=7.6e-36, PFam score of 130.4
KTMHEIADSSKKIADIISVIDGIAFQTNILALNAAVETARAGEQGRGFAVVAGEVRNLASRSAQAAKEIKALIEDSVSRVDTGSVLVESAGETMNNIVNAVTRVTDIMGENCFASDEQSRGIDQIALAVSEMDRVTQQNTLYYGCGLVIPEHLENCWILDLGSGSGRDCYVLSQLVGEKGHVTGIDMTKGQRSLALRIIGVLALILTSCGLAAINADDIWYFASGGVIGSLLSTTLQPLLHSSGGTIALLCVWAAGLTLFTGWSWVTIAEKLGGWILNILTFASNRTRRDDTWVDEDEYEDDEEYEDENHGKQHESRRARILRGALARRKRLAEKFINPMGRQTDAALFSGKRMDDDEEITYTARGVAADPDDVLFSGNRATQPEYDEYDPLLNGSPRDILKEQRLQTLKLVREMRADVSELVEMLLATPNMEQRTQGIGILDRQIARDLRFDHPYADYGNIPKTLFTFTGGDVFSRVMVRVKETFDSLAMLEFALDNMPDTPLLTEGFSYKPHAFALGFVEAPRGEYVHWSMLGDNQKLFRWRFPAITYPQLAGVALHAERQYRL

SEQ ID NO: 48579 - protein, 717 aa, Homo sapiens; identical to SEQ ID NO: 48168
  DOMAIN (117)..(322): tRNA synthetases class I (W and Y) domain identified by PFam, accession name tRNA-synt_1b, E-value=2.9e-46, PFam score of 167.1

SEQ ID NO: 48580 - protein, 375 aa, Homo sapiens; identical to SEQ ID NO: 48169
  DOMAIN (108)..(294): Acyltransferase domain identified by PFam, accession name Acyltransferase, E-value=1.8e-40, PFam score of 147.9

SEQ ID NO: 48581 - protein, 822 aa, Homo sapiens; identical to SEQ ID NO: 48171
  DOMAIN (302)..(331): Chorismate synthase proteins domain identified by eMATRIX, accession number BL00787F, p-value=2.227e-30, raw score of 13.19
  DOMAIN (239)..(333): Chorismate synthase domain identified by PFam, accession name Chorismate_synt, E-value=8.5e-62, PFam score of 204.6

SEQ ID NO: 48582 - protein, 474 aa, Homo sapiens
MLKSVPGEAQNTVSQANHLVREIRRNLFHQCNRVLLRFFMGDFFAARFIFYRFGNGAGGEQLIKQILTSRQTWAYGSQTLTGKVHTRYVFIHGGPRVFTYYTPKEESIKLFRDYLDLHRSNPNLDVQMVPVSVMFGRAPGREKGEVNPPLRMLNGVQKFFAVLWLGRDSFSGIVGAALLMAGCSSSNELSAAGQSVRIVDEQPGAECQLIGTATGGTMSQVQSGILPEHSPRGDLDRSQLKHLPTNLATFEAKFPDAHLGQQSEASLDIMRNRLNIRQQQRLEQAAYEMTALRAATIELGPLVRGLPHLRTIHRQLYQDIFDWAGQRRITLINHGFVPKSTTVVETNGPSDQSIAMRRPGQTISRIHQVQKKLGIELTNCYEHSGLPDIKNVTGILICRQTHARPARLARLIFTANKTNTINALVDIEVDDFFTDACQIDCCFETGSHSVLARLGGASAQDLQLDATSASHGSK

SEQ ID NO: 48583 - protein, 77 aa, Homo sapiens
WPATSTSCPPGCWTTCAATWTRSASGTGWSSPRSAILLILGFASGLPLALTSGTLQAWMTVENIDLKTIGFFSLINF

SEQ ID NO: 48584 - protein, 46 aa, Homo sapiens
GCSARYLPASANQEFVAPDRYTRKYRPLPWSAPPRREATPRRYESV

SEQ ID NO: 48585 - protein, 658 aa, Homo sapiens
  DOMAIN (629)..(647): GLYCOSYL HYDROLASE FAMILY 1 SIGNATURE domain identified by eMATRIX, accession number PR00131D, p-value=4.462e-14, raw score of 14.81
  DOMAIN (490)..(655): Glycosyl hydrolase family 1 domain identified by PFam, accession name Glyco_hydro_1, E-value=3.8e-44, PFam score of 157.0
MSAARGVFERGDWSLSSPAKRKAVLNKLADLMEAHAEELALLETLDTGKPIRHSLRDDIPGAARAIRWYAEAIDKVYGEVATTSSHELAMIVREPVGVIAAIVPWNFPLLLTCWKLGPALAAGNSVILKPSEKSPLSAIRLAGLAKEAGLPDGVLNVVTGFGHEAGQALSRHNDIDALAAALISISRHIDPDLSGKSRTVREAEFFELFGEKVNAENIVARYAKLHLYDAFAIQESRRVDAGNEIAPLLKVEGMKVGLMTCYDLRFPELALAQALQGAEILVLPAAWVRGPLKEHHWSTLLAARALDTTCYMVAAGECGNKNIGQSRIIDPFGVTIAAASEMPALIMAEVTPERVRQRIPSFNAVAELINAGHQEIAFLTGSMDSPTSIERLAGYKDALAQHGIALNEKLIANGKWTPASGAEGVEMLLERGAKFSALVASNDDMAIGAMKALHERGVAVPEQVSVIGFDDIAIAPYTVPALSSVKIPARGTYPAYSARVFREKGVPINKAPGDDEILKNTVDFVSFSYYASRCASAEMNANNSSAANVVKSLRNPYLQVSDWGWGIDPLGLRITMNMMYDRYQKPLFLVENGLGAKDEFAANGEINDDYRISYLREHIRAMGEAIADGIPLMGYTTWGCIDLVSASTGEMSKRYLLK

SEQ ID NO: 48586 - protein, 597 aa, Homo sapiens
  DOMAIN (97)..(114): kw PERIPLASMIC GALACTOSE RIBOSE XYLOSE domain identified by eMATRIX, accession number DM01011B, p-value=4.333e-11, raw score of 11.27
  DOMAIN (1)..(158): Periplasmic binding proteins and suga domain identified by PFam, accession name Peripla_BP_like, E-value=0.0014, PFam score of -21.3
WCLITACAKPAAIASGCDHKQTSFNAVAELINAGHQEIAFLTGSMDSPTSIERLAGYKDALAQHGIALNEKLIANGKWTPASGAEGVEMLLERGAKFSALVASNDDMAIGAMKALHEPGETVPEQVSVIGFDDIAIAPYTVPAFSSVKIPVTKMIQEIIGRLIFMLDGGDFSPKENLQRKTDPARLTHWFFAITLSSHVIGTSVDESTLEDPHSVAGNVICTQHPRTVDYEPHIYTDNNGELMTLMQREIADDNRHLRSMEAFINHVQGKPVMIADAEQGNRDACGIMTRPVTLSEPHFSQHTLNKYASLMAQGNGYLGLRASHEEDYTRQTRGMYLAGLYHRAGKGEINELVNLPDVVGMEIAINDKAGIWSAFEGVSATKNVLAFSRGDSVNINHSPHDGLVIINKGNEEVEGSLLMNALTAVQNNAVDSGQDYSGFTLTPSAQSPRLLELTFTEQTTKQFLEQVAEWPVQALEYKSFLRFRVAKILDDLCANQLQPLLLKTLLNRAEGALLINAVGVDDVKQADEMVKLATAVAHLIGRSNFDAMSGQYYARFVVKNVDNSDSYLRQPHRVMELHNDGTYVEEITDYGVLPHAG

SEQ ID NO: 48587 - protein, 122 aa, Homo sapiens
  misc_feature (1)...(122): Xaa = X or * as defined in Table 2
KACEAVFXDQGLPLGPKVQGQWDWFPGPGALRHQQSVAHQAGGFRSLWGYSGVSGQCRRHSDXSRPGREARRRRSVAGXXSHALHRQTALFGARSDADLPAAAPRYLLYRGLSAAHFRPQAG

SEQ ID NO: 48588 - protein, 159 aa, Homo sapiens
  misc_feature (1)...(159): Xaa = X or * as defined in Table 2
KARSPEDQGFRPRVHIDGGVWHLDVGSSHPGAEVGPKGMAVRHLKWYASWVXNVVRQFGPYLPWALENWRGAAPSTRGHGVCGITVFGKSDGTTSHDQYXTAPYGSPHPPGRWSLRHRYPAHLTSSALAFSDARRNAARQPRRWNPLSGYSQVICLPAW

SEQ ID NO: 48589 - protein, 450 aa, Homo sapiens
  DOMAIN (79)..(104): Prokaryotic transglycosylases proteins domain identified by eMATRIX, accession number BL00922A, p-value=4.971e-21, raw score of 18.42
  DOMAIN (56)..(172): Transglycosylase SLT domain identified by PFam, accession name SLT, E-value=3e-38, PFam score of 140.5
  misc_feature (1)...(450): Xaa = X or * as defined in Table 2
MDDGTSIAPDGDLWAFIGDELKMGIPENDRIREQKQKYLRNKSYLHDVTLRAEPYMYWIAGQVKKRNMPMELVLLPIVESAFDPHATSGANAAGIWQIIPSTGRNYGLKQTRNYDARRDVVASTTAALNMMQRLNKMFDGDWLLTVAAYNSGEGRVMKAIKTNKARGKSTDFWSLPLPQETKQYVPKMLALSDILKNSKRYGVRLPTTDESRALARVHLISPVKCARFSRFVFCPAVCRDSGGADERRTDSDGCQYAGGVKPESVMGAEIVEGFSHISVTSAWSRGDNSPAPMAFSRLWLTVFSMVFKRRETVRSLSAVGAGELRGAAPSTRGPEWTHHWCSGCHANGTARSAVVPPDPMPNSEVKRRSADGSVGSPXRLITAAKVGSXRQLKRTKRVGNPRTSGRYRCRRKRSSTCLKCWHXVIFSKTASVMAYVCQRPMKAVLWRVCT

SEQ ID NO: 48590 - protein, 233 aa, Homo sapiens
  DOMAIN (35)..(73): Lysyl oxidase  copper-binding region proteins domain identified by eMATRIX, accession number BL00926B, p-value=7.113e- 09, raw score of 13.84
  misc_feature (1)...(233): Xaa = X or * as defined in Table 2
LCLHLPLPTRFPRLQLXEEGGPVQPAAMPQWRTLPGPGPRPALPLPRRLRGSSLRARPGRLRGPRLRXRRHVCGGRRRAPLLLRAGLRRPRLPRARGPVRRAPLCSRRPLLRPLLRPRLRLRSRLHGSAVXVPSAPRRRKRLARGPAGPQARGPSALPFASGSGTARGRGRGRRCALAGPRAPPWPLPGCWVSLAGWDPGAVSPRTPGCTQQPKDAGGFRGWSEAGVHDAQTV

SEQ ID NO: 48591 - protein, 270 aa, Homo sapiens
MAGDVTKTILASMAVDWVSSPLTLEGCVPLPPDEELNNKSSCFHIKRHQSPISGSAINCVTWRAAPLSSPAPTADRDRTVSRRSKPSSRTTLNGEQPYPWDLLQPQDVMSRHRGAKHRRRYELLGGLANLRAPPLLFRRRPPQSNYPPDTVRNPDYGSTLEHQTLKGGISRSAPCRLASTLQSLPPILHIKAQCSVSSYSKGSRGLSVLPRVHCIFTASSISLSLGWRQPGHHYAIRAGRNLPDKEFRYLRTVIVTAAVYRGFDQELRLR

SEQ ID NO: 48592 - protein, 161 aa, Homo sapiens
  DOMAIN (82)..(128): Ribosomal protein L2 proteins domain identified by eMATRIX, accession number BL00467A, p-value=8.412e-39, raw score of 28.90
  DOMAIN (76)..(149): Ribosomal Proteins L2 domain identified by PFam, accession name Ribosomal_L2, E-value=3.6e-31, PFam score of 112.9
ALPVGAAFSSTTGFGSGFGAGGASTFGLGGSTGFGFGGATGAGSGSNSVLLAAIVAGSSDGAAASPARTSSAAPSGGCDQERRIVDFKRNKDGIPAVVERLEYDPNRSANIALVLYKDGERRYILAPKGLKAGDQIQSGVDAAIKPGNTRLSYGQHREAWR

SEQ ID NO: 48593 - protein, 81 aa, Homo sapiens
  DOMAIN (40)..(81): Ribosomal Proteins L2 domain identified by PFam, accession name Ribosomal_L2, E-value=9.9e-16, PFam score of 58.8
YQQKLQVACQRRHVVKVVNPELHKGKPFAPLLEKNSKSGGRNNNGRITTRHIGGGHKQAYRIVDFKRNKDGIPAVDERLEY

SEQ ID NO: 48594 - protein, 254 aa, Homo sapiens
  DOMAIN (190)..(237): BINDING-PROTEIN-DEPENDENT TRANSPORT SYSTEMS INNER MEMBRANE domain identified by eMATRIX, accession number DM00914C, p-value= 1.643e-23, raw score of 21.08
  DOMAIN (46)..(254): Amino acid permease domain identified by PFam, accession name aa_permeases, E-value=9.6e-10, PFam score of -76.9
GGAALRQKESITIIRVTRRGKCRGALPSDTLSRGFRMGQSSQPHELGGGLKSRHVTMLSIAGVIGASLFVGSSVAIAEAGPAVLLAYLFAGLLVVMIMRMLAEMAVATPDTGSFSTYADKAIGRWAGYTIGWLYWWFWVLVIPLEANIAAMILHSWVPGIPIWLFSLVITLALTGSNLLSVKNYGEFEFWLLTRKTALGMFIEAVGINIRAAKNAGVNTRIIVMLTYVFRSLIGPDGEQYQAAAQRVPRHASLL

SEQ ID NO: 48595 - protein, 193 aa, Homo sapiens
  DOMAIN (54)..(91): Serine/threonine specific protein phosphatases proteins domain identified by eMATRIX, accession number BL00125A, p-value= 5.091e-10, raw score of 14.83
MHWSLGSLPYLPATLPFLNLWKTRGISRTLPLLATSFITRVYTERIKAGADWRNIFVVGDLHGCYTLLMNELEKVSFDPACDLLISVGDLVDRGAENVECLELITMPWFRAVRGNHEQMMIDGLSEYGNVNHWLENGGVWFFSLDYEKEVLAKALVHKSASLPFVIELNKALCNQVVSNHQRVRPDTSPIETQ

SEQ ID NO: 48596 - protein, 113 aa, Homo sapiens
GEKTMIIFTLRRILLLIVTLFLLTFVGFSLSYFTPHAPLQGASLWNAWVFWFNGLIHWDFGVSSINGQPIAEQLKEVFPATMELCILAFGFALIVGIPVGMIAGITRPKWQDN

SEQ ID NO: 48597 - protein, 406 aa, Homo sapiens
  DOMAIN (225)..(303): Bacterial extracellular solute-binding prot domain identified by PFam, accession name SBP_bac_5, E-value=1.2e-26, PFam score of 98.3
MKPISLSAIAGSFSTTLLKPRFIFSPWSASPISRSSPVRYSLSVLKISPQRVIVERNGKKLYVKRMTHHLFHSVRYPFGRPTIVREVAVIKELERAGVIVPKIVFGEAVKIEGEWRALLVTEDMAGFISIADWYAQHAVSPYSDEVRQAMLKAVALAFKKMHSINRQHGCCYVRHIYVKTEGNAEAGFLDLEKSRRRLRRDKAINHDFRQLEKYLEPIPKADWEQTNLAHWCDPKFDSVLRKALSSQQLAARIEAYDEAQSILAQELPILPLASSLRLQAYRYDIKGLVLSPFGNASFAGVYREKQDESNLFDGSAEKTSGLVVIGDGNTVNMNGGLELIGEKNALADGSQVTSLRTGYSYTSVIVVSGESSVYLNGDTTISGEFPLGFAGVIRVQDKALLEIGSA

SEQ ID NO: 48598 - protein, 235 aa, Homo sapiens
  misc_feature (1)...(235): Xaa = X or * as defined in Table 2
RGNRQLQQFPRHWRSNRLDGLLLQIQLQILGGHTVERHLVVQIALVVNGHPGHADGMWILCIRVLLSLQQNGFRRVPSIGHWTGHXAATDQARLMLGGHINAQFAGIQRLEDLGTQLLHTTNGLVEVEARRQILQLGLPLFLLLNQTDVWAIPGVHVLRFDVVGRDPSEVLIDPRQNAGLLWKVFATFRPEPTRPAVCCPRGGQSGDDRRAGCACNHVELVARHRRSCPWHSDRH

SEQ ID NO: 48599 - protein, 73 aa, Homo sapiens
SDCVGDRCSQNIFFFGFPLTSVLVFRFDVGVAPPEILLQDGWPRGGLSGWDTHQMGIVGNRQHHFDVFFLQVA

SEQ ID NO: 48600 - protein, 742 aa, Homo sapiens
  DOMAIN (321)..(343): SPUMAVIRUS ASPARTIC PROTEASE (A9) SIGNATURE domain identified by eMATRIX, accession number PR00920C, p-value=9.561e-10, raw score of 13.24
  DOMAIN (160)..(214): Lipase/Acylhydrolase with GDSL-like motif domain identified by PFam, accession name Lipase_GDSL, E-value=0.00023, PFam score of 18.1
MDKELPWLADNAQLELKYKKGKTPLSHRRMGEVFMVFSYTLQAGMEQQNKAGSLRFYYRFKGYHRINKLVLAFKGCFYVFERMCLFYCLLQYGGPDILPKLSASLTVPELQPHLIAALLPNQKPPSHLPLISPHLSPQDIDGVTIASSCPVNFRAAEADTLLILGDSLSAGYRMSASAAWPALLNDNWQSKTSHQPRWVLVELGGNDGLRGFQPQQTEQTLRQILQDVKAANAEPLLMQIRLPANYGRRYNEAFSAIYPKLAKEFDVPLLPFFMEEVYLKPQWMQDDGIHPNRDAQPFIADWMAKQLQPLALLSAGCFYAVYYVTYKTRLRKRVADVPRRPLFTMNRVETNLTWVILMGIALVSVGIFFMHNGFLLFRLNSYSQIFSSEVSGVALKRFFYFFIPAMLVVYFLRQDSKAWLFFLVSTVAFGLLTYMIVGGTRANIIIAFAIFLFIGIIRGWISLWMLAAAGVLGIVGMFWLALKRYGMNNDTTTITGRQIDRLFRVHSRFAFGERVQADHPDTTNLENDSRRYQQVDQRQRQADFPAEGHYLVITRTRDGHNPDVLTHEEQTELHTGIFNVVTIRQFLLGYRLVKRETVTYRNGPAGMQADTAQEFISTAVFGTSMSAHHILGLKTERTMHKFTKALAAIGLAAVMSQSAMAENLKLGFLVKQPEEPWFQTEWKFADKAGKDLGFEVIKIAVPDGEKTLNAIDSLAASGAKGFVICTPDPKLGSAIPAHPLML

SEQ ID NO: 48601 - protein, 61 aa, Homo sapiens
PSAGDFFAVYHHQLCSARRGVAEYQSRAQFLAFGAVRLFRRCRFFAGDGALRRHPRTPCCG

SEQ ID NO: 48602 - protein, 350 aa, Homo sapiens
  DOMAIN (176)..(194): DEAH-box subfamily ATP-dependent helicases proteins domain identified by eMATRIX, accession number BL00690B, p-value=9.036e- 14, raw score of 13.38
ADDADDAAELADDAAAVFEDSALVSDAFAFVSDVFAAEADLAAALACSVASPAFVVAVEADDAALSADFPAAVALAEACPALVDAALADDAAAVFEPAAAEALCPAAVSEDLAFVSTLIRLRSSYSATQKKQDILEAIRDHQVVIVAGETGSGKTTQLPKICMELGRGIKGLIGHTQPRRLAARTVANRIAEELKTEPGGCIGYKVRFSDHVSDNTMVKLMTDGILLAEIQQDRLLMQYDTIIIDEAHERSLNIDFLLGYLKELLPRRPDLKIIITSATIDPERFSRHFNNAPIIEVSGRTYPVEVRYRPIVEEADDTERDQLQAFVLVYVLCILIYVNNVNAYWSEVNI

SEQ ID NO: 48603 - protein, 799 aa, Homo sapiens
  DOMAIN (256)..(269): Thioredoxin family proteins domain identified by eMATRIX, accession number BL00194, p-value=1.000e-10, raw score of 12.16
MPTGMPMIEIHCAMPVAMCIRAYPQPKKFSHLGFKHHHASGLCGYLDAACIMVRRVTANAFSGNFDCLDDTLRVNNEGRTVSQTFIFTHVVEVTGQGASRVADHRIFDFSDGFRAAVPCFVGEVSIGRYCVYVYAQFLQFFVVVSNVTQFGRAYEKELPAPVKAIEKQGITIIKTFDAPGGMKGYLGKYQDMGVTIYLTPDGKHAISGYMYNEKGENLSNTLIEKEIYAPAGREMWQRMEQSHWLLDGKKDAPVIVYVFADPFCPYCKQFWQQARPWDSGKVHSYVFGYLVIAKASLRFYILAEVSQFTLLMAGMTVLIHVLGSDIPHHNRTVLRFFNDALAATSEHAREFMVVGKDDGLSDSCPALSVQFFPGKKSLAEAVIAKAKANRQQRFFFHGQFNPTLWLALLSGGIKPSQFFWHIWGADLYELSSGLRYKLFYPLRRLAQKRVGCVFATRGDLSFFAKTHPKVRGELLFFPTRMDPSLNTMANDRQREGKMTILVGNSGDRSNEHIAALRAVHQQFGDTVKVVVPMGYPPNNEAYIEEVRQAVLELFSEENLQILSEKLEFDAYLALLRQCDLGYFIFARQQGIGTLCLLIQAGIPCVLNRENPFWQDMTEQHLPVLFTTDDLNEDIGGRMSLLQFSGLFVVWLLCTLFIATLTWFEFRRVRFNFNVFFSLLFLLTFFFGFPLTSVLVFRFDVGVAPPEILLQALLSAGCFYAVYYVTYKTRLRKRVADVPRRPLFTMNRVETNLTWVILMGIALVSVGIFFMHNGFLLFRLNSYSQIFSSEVSGVALKRFF

SEQ ID NO: 48604 - protein, 303 aa, Homo sapiens
MPEADSPFRALQRCCGCRGWLNYAASEQIVLRVHHMRVNTRTDASYLIAQHHLILYLYSLHLSDTDVALDVPVPNEEEERNMKHYAALLTGRTSYFLKGEEMKSMYTTYNPQNVVATARFLFHKKNLYYSFYTSSRIGRPRAIQFVDDAGVILEEHQLETTLAGTLSVYQNATGKICGVWRRVPRDYKRILRDDRLHVVLLWGNKQQAEWELKEQGCKVTCKANRLRDRPRYRVNLRGNYQTVHRDLLRVKGIILVWFGVGYASYIDQFRLTPGLGGLTLESYETTEFRDRFEIFWHMDVEYV

SEQ ID NO: 48605 - protein, 90 aa, Homo sapiens
SWRSINWRPPWRALSVSIRMPRARSAVSGDEFHVITSASCATIVSMLSSSGATNSRPSWLWPERQAVTVSGSCMCQRFSPSSPKRARQLR

SEQ ID NO: 48606 - protein, 1107 aa, Homo sapiens
  DOMAIN (767)..(795): 3 kw FIBER MAJOR P1 TAIL domain identified by eMATRIX, accession number DM01038, p-value=6.595e-32, raw score of 13.33
  DOMAIN (1)..(203): Glutamine synthetase domain identified by PFam, accession name gln-synt, E-value=7.4e-141, PFam score of 444.0
MVLMPDASTAVIDPFFADSTLIIRCDILEPGTLQGYDRDPRSIAKRAEDYLRSTGIADTVLFGPEPEFFLFDDIRFGSSISGSHVAIDDIEGAWNSSTQYEGGNKGHRPAVKGGYFPVPPVDSAQDIRSEMCLVMEQMGLVVEAHHHEVATAGQNEVATRFNTMTKKADEIQIYKYVVHNVAHRFGKTATFMPKPMFGDNGSGSPPSQPQSQPTPPEILLQALLSAGCFYAVYYVTYKTRLRKRVADVPRRPLFTMNRVETNLTWVILMGIALVSVGIFFMHNGFLLFRLNSYSQIFSSEVSGVALKRFFYFFIPAMLVVYFLRQDSKAWLFFLVSTVAFGLLTYMIVGGTRANIIIAFAIFLFIGIIRGWISLWMLAAAGVLGIVGMFWLALKRYGMNVSGDEAFYTFLYLTRDTFSPWENLALLLQNYDNIDFQGLAPIVRDFYVFIPSWLWPGRPSMVLNSANYFTWEVLNNHSGLAISPTLIGSLVVMGGALFIPLGAIVVGLIIKWFDWLYELGNREPNRYKAAILHSFCFGAIFNMIVLAREGLDSFVSRVVFFIVVFGACLMIAKLLYWLFESAGLIHKRTKSSLRTQVEGMSRDSDVLFFTFSIGEAQINKLHFVLVQHRHPPSSASTPTTKAVEPTEQSSAAASSASAAKTSETNAKASETSAESSKTAAASSASSAASSASSASASKDEATRQASAAKSSATTASTKATEAAGSATAAAQSKSTAESAATRAETAAKRAEDIASAVALEDASTTKKGIVQLSSATNSTSETLAATPKAVKSAYDNAEKRLQKDQNGADIPDKGCFLNNINAVSKTDFADKRGMRYVRVNAPAGATSGKYYPVVVMRSAGSVPPNPSELLMSERFAELVNWASKNYDLVLIDTPPILAVTDAAIVGRHVGTTLMVARYAVNTLKEVETSLSRFEQNGIPVKGVILNSIFRRASAYQDYGYYEYEYKPDKAFTPHPASKPAHKPGEQPMKNNPLISIYMPTWNRQQLAIRAIKSVLRQDYSNWEMIIVDDCSTSWEQLQQYVTALNDPRITYIHNDINSGACAVRNQAIMLAQGEYITGIDDDDEWTPNRLSVFLAHKQQAGHTRLFVR

SEQ ID NO: 48607 - protein, 239 aa, Homo sapiens
  DOMAIN (139)..(161): SPUMAVIRUS ASPARTIC PROTEASE (A9) SIGNATURE domain identified by eMATRIX, accession number PR00920C, p-value=9.561e-10, raw score of 13.24
RPVPVTVKPPQAQSTHKDKSGGVVHTIAQSPQPQGCQRKGPRKDGGVGGTQRGGRMSLLQISGLFVVWLLCTLFIATLTWFEFRRVRFNFNVFFSLLFLLTFFFGFPLTSVLVFRFDVGVAPPEILLQALLSAGCFYAVYYVTYKTRLRKRVADVPRRPLFTMNRVETNLTWVILMGIALVSVGIFFMHNGFLLFRLNSYSQIFSSEVSGVALKRFFYFFMGPCKWSPRLTKHDPERYE

SEQ ID NO: 48608 - protein, 428 aa, Homo sapiens
  DOMAIN (345)..(395): Sugar transport proteins domain identified by eMATRIX, accession number BL00216B, p-value=3.189e-18, raw score of 27.64
  DOMAIN (165)..(204): Bacterial regulatory helix-turn-helix protei domain identified by PFam, accession name HTH_1, E-value=5.5e-05, PFam score of 24.8
MNGLTATGVTVGICAGLWQLVSSHVGLSQGWELLGTIGFVAFCSFYAAGGGKSGFIRSLAVNYSGMVWAFFAALTAGWLASVSGLSAFWASVITTVPFSAVVVWQGRFWLLSFIPGGFLGMTLFFASGMNWTVTLLGFLAGNCVGLEKFIVDNGENGLMNSIFTEENLLAFTTAARFGSFSKAAEELGLTTSAISYTIKSVEQQREVFEFVASSDYFSGPTWMAMYQSRFTCTRNEVHLMSTRTPSSSSSRLMLTIGLCFLVALMEGLDLQAAGIAAGGIAQAFALDKMQMGWIFSAGILGLLPGALVGGMLADRYGRKRILIGSVALFGLFSLATAIAWDFPSLVFARLMTGVGLGAALPNLIALTSEAAGPRFRGTAVSLMYCGVPIGAALAATLGFAGADLQAASCTARSELHSLIRLGEQSTIY
